United States Patent Application Publication US 2007/0083945 A1 - sequence listing, part 23

SEQ ID NO: 155491 - DNA, 457 bp, Glycine max
  unsure (1)..(457): unsure at all n locations
agctnntaaaaatggtttaattgcttaattatatattttaaaactcaagtacgtagttccgtgtgaaaattaattttatgttcaataacttgaattgagtcaaacataaattgaaataccgacttcttttttttggcttgtgttgattcatgggtatattattgcttaagattatctaaaatttaaggaaaaacatacacttgcaagttgataattaattatgcattattataaattttacataccgtgaagtataatattatatatatgtgtgtgtgtattatgtgtatagtgtatgtcttgccctttaacttttttttctcctcccaaatgtgtgtaacatttttttattattaaatttcgatatagaacagttgtttcatgaacgttacacattattactatatatatttntggagcgttacaaaaagaaaatatgacttaaaatttaagaatt

SEQ ID NO: 155492 - DNA, 422 bp, Glycine max
  unsure (1)..(422): unsure at all n locations
tagactccatntgaagagggagcatccggngcttatggctgttgaaaatgcagagcatgctcaggctaatgttgacaatgaaatggatgaagcaagtgaccatgatgcctatgttgcgaaacgatcaaatggtaaaattcagaagcagagtaagcctaaaccaaacctcaagttgcctccttccaaaattgcaaaacgcaaactgtccactccctctttaactgtaaataaaaattcttggcccgtgaaagatgaacctttcgatgaagaagatagcgaagaaacagaagaggatcgtgacaatgttgaagatggttggagatatgcaggaggaaacaatgaagatgatgatgaggaaacagaatatgaagactgaatcagttatggcatcctctatganacttaccttttccaagaaatat

SEQ ID NO: 155493 - DNA, 459 bp, Glycine max
  unsure (1)..(459): unsure at all n locations
agctntccttgctgaagtagctgcgcacatatctcgagcagagattccagagcatcagctctttgatggcaagtattatcaccacctcttgatatgcgtgtccttaatgaaacgccatttggtggcttatcagccatgacagcattgtcaacttctttatgcgttgaacaactgattgtgtgtgtatctgcttggccttcatccttacctggacgcatttcattactctcagaagccaagctgtccatgcatgagtcttctgtcaacactttagggttttcattttccttcaagctgtttccagtgtcagtgtcatgctcaaccttaaccgcatgtgcaattggtgatgacctttcctcatcaatggacccctctttatcgttgctgttgctgtcttcactagacaatgagttactggagtcctcaggtttatcatctttctcttgtgttcaactctat

SEQ ID NO: 155494 - DNA, 425 bp, Glycine max
tcatgcttaagtatgtatggcaaaacttcattactgttgttcatagacatacaagtgagcttgtaacaaatcttctagacttggagtgatcacatgcagtcctcttgaacccttgccacccactctatcatcatgccgagacttagaaaggccaacaggtttagccttctcaatatattcttctgcaatgtacctctcaacaatagatgcttctggatgatatagattctttgtatacccttttaagatcttcatgtaccgatcaaccgggtacatccaccgcaaataaacaggaccacaacatttgatttctctgactagatgcacaatcaagtgaaccataatgtcaaagatagcaaggggaaaaacatcttcaactggcacagtataattgcggcctcattttccagctcatcaaacttgac

SEQ ID NO: 155495 - DNA, 462 bp, Glycine max
  unsure (1)..(462): unsure at all n locations
aagcttttacaaacgctgcccgagtatatttttttacgttagaggatgctcttttgttcggtgttgccgtaaaaatttacaatgtaggtcggctaggttttttcgttcgagctcaaccgaagttgtgtttcgaccgacacctgcatgttttcatttactcggcaaggaaaacattagcccacctcggaaaaaaacatgattcaccgatactgatctaaacaaatgttagccgatgtcggccaggaaagatgaccgatcgatgtttaaaaaagaagcatcaccggatgacgccgatcgaacatttccaaatagacgtcatccaaatattattcaggggttgaatagaaaatactatatccgacatcggtcgttgtgaagccgcgactgatattttccagccgacattgcgcaagctcttttacaaatgctgacttataatatatntttcacggtagcggatgc

SEQ ID NO: 155496 - DNA, 402 bp, Glycine max
gtcggaagtcgaattgtgttctgtagtatatcgagaagctcgaaattcagaacagaagctgttagataaatcaaatgacgataaccttttacacggatgtccgattgagtcccgtaatatattgcgatgctcgtaattgaaaacagaatctctgagcaaattcaaacgacaataactattgactcggatgtgtgattgtgtccgtaatatctcgagacgctcgaaattcagaacataagctattacaaatatcaaaccacgataactttttacaccgatgtcccattgagtcccataatatatcgagaagctcgcatttgtaaacaaatgctctgagcaattcaaacgacaataactctttacttcgatgtccgaatgcgtcccatagtatattcataacgc

SEQ ID NO: 155497 - DNA, 444 bp, Glycine max
gtcacctgcaccatgcaagcttcaaactccacaagagacagtttcttgaatcatattcaattattcataccctagcaagttgtataatagacttatttatagaggcacaaactaacagaatcctaatcttgtgtctttaagataaactaaattgaaaacaaactatgctaaatataagataacaagactaactaaaagaaattctatcatctgtttaaataatataatcagttgcccatgccgatgcacttttaatccttgattttgttggcttatcttcgtgagttgtaacactgacattaatgtttcatattttcaaaaactattccattgtcctatattcacatcactttgtcgacgtgctaacagggcaattaacatagatatttggttcacattagaaccaaaataccaagaaatgcaactagctagcaaaatgtacga

SEQ ID NO: 155498 - DNA, 477 bp, Glycine max
  unsure (1)..(477): unsure at all n locations
agcttcaagaaaaagatggcctcagcaaattccttatttctagaaggaaattctatcaacagacctccaatctttaatggagagggttaccactactggaaaacccgaatgcaaatttttatcgaggcaatagatctaaatatctgggaagccatagaaatagggccttatatacccaccacagtagaaagagtttcaatagatggtagttcatcaagtgaaagcataaccatagaaaaacctagagatagatggtctgaagaggatagaaaacgtgtacaatacaacctaaaagccaaaaacataataacatctgccctaggaatggatgaatatttcagagtttcaaattgcaagagtgctaaggaaatgtgggacactcttcgattaacacatgaaggaactacagatgttaaaagatctaggataaatgcactaactcatgagtatgaattatntagaatgaatacaaatgaa

SEQ ID NO: 155499 - DNA, 473 bp, Glycine max
  unsure (1)..(473): unsure at all n locations
taagtctagtatatctattgctaacgcttgtgtgtgactttcattgagtttacgattaagaatttggtgttattatctggagtgtgaacttgaataaatgtgaataatgtgtgtgatcntgtgaagtgatgttgtttatgtaaattcaactctaagtattatatgtttcacatgctcgtgtgtgtgtgtgttcgtatttgagctgaatgtcattttgtttcaggtgaaccaacaaatgatcagctccatgctagagatggagaaacttactctgtgccaagaaaatactctgatgaatgtgacatccagtcatgacgttctatttcttatgttacaattccatgaataatagtagtcgtatatattanttgcnnnnntgttgacttcttttcataacgaccctgtatcagtttattatgattcagataagctctatatagtgtacgaatgtaagtagatactaacctttaccc

SEQ ID NO: 155500 - DNA, 449 bp, Glycine max
  unsure (1)..(449): unsure at all n locations
agcctttataggaggattgttaataaaagaaattgtggagggggaattgaagcccctgttaagtgttaaccccttgcatccgtccctgagcatatatttcattacttattatatatttattaaaacttctcacgaaggattactaaaaaaaatgcttttggggaggggggctgaanccctgctagcccccctttatctctgttcctgaatctatgtatcattgataagctataattcataatttatttgtaattagtattctagtttgtgtattatacaagacatttgtttatttctctataattaaagtttacaatcaatgcatacttttaaatatataatttcgtttatattttaaaattcataactcataaatatttcataatatataaattatattgtacatttacaatgacaatttaaatcgttatataacatatttttaatta

SEQ ID NO: 155501 - DNA, 443 bp, Glycine max
  unsure (1)..(443): unsure at all n locations
gcttgtatatgatcccagganacaaantaatctaaatctagattgatttgaaatttggttgggtgggaggcacttttgggccatacaccaaatgtgggagaaactgctcaagaggttctttatgtggtctactgataccataaatatctaatgattntatgttgttggcttctattaccgaagtagtaaatatgttttggtatcaaagatcaaaggataagatctttacctgatttgtttctagtctacttggtcctttgacactgtaaatcataatcttgcactaattaacttttcaagggtggttattttaataattctatcagaagattaacgaacatactataatctctagttttagtttctcctttgattctgtgagaagctaggtcgaaattttgctgtagtcaactaaagtatccttttaccatgtgcagatcaac

SEQ ID NO: 155502 - DNA, 442 bp, Glycine max
  unsure (1)..(442): unsure at all n locations
agtcacctgcggcatgcaagctntatgaattactaatgcagatgcaaattatgtgtattgccattcttgtgcaagccaaacacaatattattgctcacattgaaggtgaatttcaaccgcgaatgactaccttctttagtagtaaaccataaaccctttggattctcattctcacgaatgggaagaacaatgtcatctctatcaggagagatgatagtcaaacaagtaaagttaccatcactagagtgcttccaagccatgtgatcttttttatcattctgaacagagagtatagatggatatgatctggttcaaggactgctcagaaacataactctcaaaactattcaccaaccagcttccattaatcctcacataatcggagaccttcttcaccatctttgatgtaggaaaagaaaggataattatctgcccataactc

SEQ ID NO: 155503 - DNA, 433 bp, Glycine max
  unsure (1)..(433): unsure at all n locations
agcttcacagggcatatcaaccttgagcactatctctggaggctctttttccttcttttcctctgtggtctcttctttcttttcttcttccttgttctccgcaaatatatagaacattaattagatatagcaaagatgtgattgaaaaatctccaccatgtgtagaactagagtatatatatatgtgtgtgtgtgtgtgtgtggcatgcattactcgataatgatgccaccatatacatcataaaacagacattatatacaaaagatcataaaagtttaaaaaacacgatcctagtcccgtggtgtagttagttttcaaagcaaaagtngtcgaacaaaggacagacacggattgattaataattaatatagacaagaattttttgtgtagagagaactcttacctcacccattcttgtgatatggacaatga

SEQ ID NO: 155504 - DNA, 273 bp, Glycine max
gctgggactatccatagatttattgttcttaggggatattactgattctgccataaccacaccttctctatgtcaggtgagacctcttcgaatgagtggctcctgcgctctgaatctttgtggaattgcatgtggaaggctggatgtattctttgaacttggctttggtggtccttggtatgaatgaatatctccttctacattaatgtttggcaatgtgataatgtgattcacaatgcctttttacttttcaccgatgtatcaagtggtgct

SEQ ID NO: 155505 - DNA, 441 bp, Glycine max
  unsure (1)..(441): unsure at all n locations
agctnangagaaaccataaaactaaggtagttcctaaacaaaaatcaattgaggaaacttcgccaagaatccccattgaaaaacctttattcaaacctttcaaagttagtgagaaggctaaaagaaaaattatggaacttagaaaaactaaatccttaattgaaggcgtaggtgacaaccatagtgaattactaaacaagattggtagtttacttaaagtcattccagataccccccaagcctcggaaaatacttccaaaatggtaacaagaagtacctccaaattaatcaatgttattaatgaagatagtgaccaaaactcagataacacaactgagataggatcagtgtcagaaaagaatataaatccaattaattccaaacactggaagacaccctccaaattatattatcaacgtccaactgcccctgaccttttat

SEQ ID NO: 155506 - DNA, 425 bp, Glycine max
  unsure (1)..(425): unsure at all n locations
ntctagctnttcattggtgtatttcgatctccttttggtgctctaatatgtgggaatgtgctcaaatatgtggggcaatattggtttgttttcttgcttgattgggttggattgggggtttgtatgggatggccctaggcctataatgcattttgaagcaatggggcatgccacattgtccccgttctcttgctattgatgcctaaacgcgcgcccaccaagtgttcggtgaaatgcctcaatggcattagcgcgtgacttttgtaaggaaacaacccatggggcattntggtttgtacatattttctattttttgggacatgtattcattcccgaaaaaggctagaataattgcctcacatatatcctatgcctacgaaccaaagttnttatgcaaaagaacacaagacgaagtgcatcttggg

SEQ ID NO: 155507 - DNA, 479 bp, Glycine max
  unsure (1)..(479): unsure at all n locations
gatccttaagcaccgcggctgcgctgctttaatgactagctcttttctgttganatttagctctttcaacctattctatccttctaatgtttgattcctctctttaggcttcccaaaataatatttttctcctaattagtttatatgaaagttttatttttgggtcttcattctttgaaatcatttttttttctaatttttcggctgcttgatcatttttgaggaaattagttgccatttacggaaagatactgaaccaaaacattataaataaaaaaattgaggtttaaatggttttttttttgtctcaaaaagatattctctatttgttttttaaaaaccaaaattntcattcaatataagacggacaattatatataaaaaaaagtataaggtgtcatatagaatgacttctcctacatttatacctaataaattcacctatgttaataaatatttctntaccaacccattctgat

SEQ ID NO: 155508 - DNA, 322 bp, Glycine max
tcttgcggtttctgtagagaatgaagcccaatctgaccttctctgttttctgtgagggaaccgaaattctacgcttgttccttgataggttcagcttatctttgcatcttttccgactatggaaccaccattgtatgttttacttgtcctttgaaaaaccttacacatagagactttgtagacgtcatcttttttctgagatgagcgttattttcgtgaccttcactgaaccccgatcacattggcatgatcggaattttaaaaagatgttccttttgtagaagttgaaacgcccttagccttctcatgtaatgacttcagt

SEQ ID NO: 155509 - DNA, 427 bp, Glycine max
agcttctcaaagaagccacgaggaagcttcttgaggaagcctcttaatgaagcttctcaaggaagctacatgaagctacctcgataaaaatactgcccaaccttcgttaactgttggatcttctcgaaatttggtctgcagcttcacgagacacttttccacgatctaaccgttgggatctttgaaaagatgtttggagtgtgcgtgatgtttccgttgtcgagagcattactcacttgagtgtttcggcctttgctttcgtgtagcttaggaaaaatgccattttttctactttctttcttccaaaaccatttccaacgttccaagatttttctccatcacctacagccaccattatccaccacaaaccaccgttgtcctccgtgaaactccacaacgagaggaacccgtcgatcagagtggaatc

SEQ ID NO: 155510 - DNA, 459 bp, Glycine max
  unsure (1)..(459): unsure at all n locations
cgaattctcaagttcttctatcccaaatgcaaaaaatatgggtctcaaactttcatttcccttctcttctatattaaactttatgattatattcttgattcaccaaaaaaaaaaaaatattattgtcaagaaaacgaaaataagcattgtattcctagggttttggtggtattaaaagtggttgtcataacaaataaattagtggagagcctacgatgtcaccataatcatcaagaaattccttacagcaattatagacaataaccacatcttttctgtctttcacgctgtggtaaaattttcatgtcatcttccacaagaaatatcaattccttcatgatcctaatgagtggtgaaagaaataaaanagcaaagggaatgtatgaatagcaatgagctgtacacactagtgtagtgtagggattttagtccatattatcacaatcatctcattctaca

SEQ ID NO: 155511 - DNA, 453 bp, Glycine max
agcttcatgatgaatcaagattgatttttgttgtttgatgataacaaagatgatgacaaaaagctcaaaagtcaagatcacttcatgataacaaagatgatgacattcaagattgagtcaagaacacttcaaggatcaagaggaaatttgatttcaagattcaagaataatcaagatcaagactcatagattcaagaatcaagagaagacttaatcaagataagtattaaaaagtttttcaaaatattgagtagcacaagaagttttcacaaaatcattaccaaagagttttactctctggtaatcgattaccagattatagtaatcgattaccagtggttttaaaacgttaagattttcaaaattcacaatgaagagtcacatatgttgatgtgtaatcgattacacctttatgggaatcgattaccacggactgatttcaaaaattcattt

SEQ ID NO: 155512 - DNA, 496 bp, Glycine max
  unsure (1)..(496): unsure at all n locations
tataaaactaagctgtggttgcccccacatacttanaaattgtccatcttttcggtgaatcaagtacatgacacacctganagttcaccttctgttcaagcaccacctttcacagctactgagtgtcaacaattgatctatttcttaaccaatcatatgaaaattgaaaccacaattgatgcagtagccacaaatgttatagttatctgtatgaatgatgccttcaataatgatcaccacacttggatcattgatactggggctacctctcacatttgttgtttcaaagaattgtttaattcatatactgccactttcaactcgcatgtcctactgcctaattccacgaaagttaaagtataaggaatagacagtattaagattaagaaagacattttcctgcataatgttctactcatacctacattcagaattaatctcctcttccttgtcactcttatcaatactaatccttttcgaattacaatggaacctg

SEQ ID NO: 155513 - DNA, 459 bp, Glycine max
  unsure (1)..(459): unsure at all n locations
gcaagctntatgcagaggaccaaaatgaagaatttctgttatcttatatgaacaccttaacaggtaataatggaggtcagaacaagaagtttgcattctgaaccagaaacaagatattgaaaaaggatattggaaaaacacatactgttgcatcaagtttccaaccaacagctgcagcagcaacctccattcctatataaccacctctgacaactacaaccttttttgctttttcctggaaattaaaaacaaaagaaacaaatcataaccaggaacaaaatgcatgtctgattaatttatttatttttctgtaaacatattagtcaatatgtttcaagaaagtaatcatagcagcaaatatacagaatntgcaattttgctcaagctgtgtgaaagaatgctcgagaaagatcatgacacaataatatatttaaagggaaaactatgtacattatattg

SEQ ID NO: 155514 - DNA, 320 bp, Glycine max
cacaacaattaggtgcactttattgataaactgcgtctttgttcatcaacataaccatattctagtgctcaataacagagacaagatccaaaatactctgcttttcctagtgtcaaccacatgggatgtgattcaaatcgtttgccagaaattctagcaagggtggttattgatcaaaagttctttacctgtcgcgtcaaccactccgacaagcattcaaacattgaccctcgtttggatgagaaatttcagaattttaaacaattcgacactgtgtatatattacattacatcaattcattcactttcgttctaaaata

SEQ ID NO: 155515 - DNA, 483 bp, Glycine max
  unsure (1)..(483): unsure at all n locations
ttaagtcacctgccgcatgcaagcttccatcanaactcttccaccatgggtgatatctggaagtccccaaaggtgaagcacctcaacggccggtcataatattgggcaagggaggcaatggcctctgtggagacctctgccatggctaggtcctaaatcttactataagctttgcgaaaggcttgtcactggagctgacccatcaactgccctaactctttcagactggtgattcctaggctcttgaccttgacttgatagaacctttttttaagcgatagcgcctaactcgatcccatgttttactaaagtgaaacaaaacccagtgcgaatcaaaactctgacatctatcatgggtggaatggatgaatgcataaagaaatgcatatgacacagatgcattttatgaatacgggagcccgggaagttgtcctcttcttagatacaaaattcagacagcatggcgcccgacgcatgtattta

SEQ ID NO: 155516 - DNA, 446 bp, Glycine max
  unsure (1)..(446): unsure at all n locations
tatctgaagggagatntgatgcatgtcctcccagactaccacatataagacctataaattctctcaacagtcatcaacactggaaaaataactcaacggagaatgaaaattgttacaacttggagctaactagggagaaagaaggaatggcattactatcattacattcaccttcaactagacaaaatagaaatgataatgagaatgttgagtcttgtgcaatgtatgagagtaaggaaatgtgtcatagaagtggtaatgtggaaggtctttggataaatcgttttttaccaaagtcaacttcccccttggtagtttttttatcaccttaattgagagaggtggnncngaanntcattctgcgtcaataaagacgattccactgtccttgaggatgataagggaaatcaatatcacacagcaaagctgaataagttcaactcctt

SEQ ID NO: 155517 - DNA, 354 bp, Glycine max
  unsure (1)..(354): unsure at all n locations
catgcaagctcatccaanacgacactaaagagcgncttctatattattaanaagaagcaccaacanagacaaaacgcaacctgaggacaagttcggaaagaaaaaaaaaaggtccataccacaaaacatcatagtttagtaacctagagcaaactgtgataaccttactaaaaaaagtaccagaaagggctataccacaaaacatatcatatgtcagatacccagagcaaactgtgcgaactccactaaaataaagcactaccaaaaaaatggaaggcaaaaaaaaactcgcccccattaacaaaactttacatggcatggggatatacactctctctcagataaaaactctcg

SEQ ID NO: 155518 - DNA, 394 bp, Glycine max
agtcacctgccgcatgcaagcttcggaaaggtctggagggagttagagagtattatgctgagattgctcttgacaaggcgatgatgctattccggtacttgcgagaaaaagacatgtttgagaagtattacaatctgcatatggcaaagcggcttttgtcgggaaaaacagtttctgatgatgcagaaagaagtctcatagtcaggctcaagaccgaatgcggttatcaattcacctctaaattagagggcatgcttaccgacatgaaaacctctctagaaacaatgcagggcttttatgccagccaccctgagttaagtgacagtcctacacttaccgtgcaggttttgacctcagggttttggcctactcaatctactgttatatgtaatct

SEQ ID NO: 155519 - DNA, 452 bp, Glycine max
  unsure (1)..(452): unsure at all n locations
ttgatactaagctagataataaggaaaagtggngttcatgatctttgatgcttttttctcttctatctctctctctctttctctcttaatatgaacattggcacttcacacaagcaaaaggaaataatattgttgatataaagtgatctttntataggcccgaaagtgatataatatgtgtttacaattaatgaaacgtacaaatagcttgtaaggcatgttatgggatatgcgaatcatatcacactctttttctaataacttggtaagtgcatacatatgtatctgggaaagtgtacaaaggttatccacgaaaaccacaacgtgccctccaaggttgtcaatattggctaactaattaattaaatatgaattttcattaacttaaaatatttattcacttactttatacctaccaatatgtataaactatatcaaatatgtttattaac

SEQ ID NO: 155520 - DNA, 396 bp, Glycine max
  unsure (1)..(396): unsure at all n locations
agctngaagggttgtacatgaccaaatctttatttaatcgtctttacctaaagcagtctttgtattcatttaaaatgcatgaagatagatcagtaagagaacaattggatttgtttaataaactgattctagatcttgaaaatatcgatgtcaccattgatgatgaggatcaaactttgctattgctgcgctctttgcctaagagttactcttatttcaaatagactttattgtttggaagagactctgtttctcttgatgaagtgcaggctgctctgaattcaaaggaattgaatgaaagaaaggaaaagaagtcctctacaagtggtgaagggctaacagcaagaggcaagaccttcgagaaagatagtaaatttgataagaaaaatcaaaagc

SEQ ID NO: 155521 - DNA, 440 bp, Glycine max
agcttgttcgcacatcgttcgcgtgtattattccactcgacaaggtttgaagtagaggagacctttaatcctataacgcaacgtggcagacaataatgggcagtaaacttgaatggccattattgtcaatgcggaaggtattctgcacttcactatccatgttcacacattattgcagcttgtggctacatgagcatgaactactaccaatatatagatgttgtttacaccaatgagcacatcttaaaagcatactccgcacagtggtggcctcttgggaatgaagcggcaattcctccttctgatgaggcatggacactaatccctgacccaactacaattcgtgcgaaaggtcagccaaaatcaacaaggataatgaatgagatggatggggtcgaaccatctgaccaccgacaaaaatgtagtatatgtggagctga

SEQ ID NO: 155522 - DNA, 461 bp, Glycine max
  unsure (1)..(461): unsure at all n locations
ggtcccatatcttattggatcaagtaccttccctcctgcgtactcccttnnttcttcctcactcaggtcaaaaaacctctggcttgccctaagcatcttatccattagtgtctccgacacaccgtgattaattagctgtataaagcagttcaaagttaacgagacaacaaaagttacatgcatgcatggcatgctgaaggaaactccaatatatgcatgtacagtagtatttaacataataagcatataaaaaaagaaaaagattaatgagcacccaaatgctattacagtagagagataattaaagatatagaatagagaaaaaatgtatatataataggtattatgatgtgataagaaaagtaagatagacaaaaaatacagatttatcgagtgatgaaattttaagaatgtctcaatatcaagactttataacaaaatgctaatatgaagtagagtaa

SEQ ID NO: 155523 - DNA, 469 bp, Glycine max
  unsure (1)..(469): unsure at all n locations
agcttcaagaaaaagatggcctcagcaaatttcttatttccagaagggaattctatcaatagacctccaatctttaatggagagggttaccactactggaaaacccgaatgcaaatttttatcgaggcaatagatctaaatatctgggaagccattgaaatagggccttatatacccaccacagtagaaagagtttcaatagatggtagttcatcaagtgaaagcataaccatagaaaaacctagagatagatggtctgaagaggatagaaaacgagtacaatacaacctaaaagccaaaaacataataacatctgccctaggaatggatgaatatttcagagtttcaaattgcaagagtgctaaggaaatgtgggacactcttcgattaacacatgaaggaactacagatgttaaaagatctangataaatgcactaactcatgagtatgaattatttagaatgaata

SEQ ID NO: 155524 - DNA, 435 bp, Glycine max
tagatcaggcatccgagtcaaacgttatggccgtccgaatatgcatgggcattccatttcaacttttaatcgccatgatatattacgggcctcaatcggacatgcgagtcaaaactttagcccgtcagaattcacccgagtcttccatgttaaattttgagcgtcgcgataggttacttggcttattcgaagatccggaggaaaagttatggccgtttgtatttgcgatgggcttcatatttatcctaagagcatctcgatatattatgagcttcaattgggaatccgagccaaacgttatggctgtccgaatatgcgtggtcagtccatttctactttcgagggcgatgatatattatgggccttcatcggacattcgagtcaaaactctagcccgtcggaattcacccgagtcttccatgttaaattttgagc

SEQ ID NO: 155525 - DNA, 487 bp, Glycine max
  unsure (1)..(487): unsure at all n locations
ttagagtcacctcgcggcatgcaagcttacccattgagaccccatnggcctttatctgttctctttaggaggatggggtccgcacaggtaggaacaccgctaacctgattgtaagaacacatcacacttgccactttgccttccttcacgcacattctgaatggaacattgaacgtgtcctcaatgtcctgcttgctaacctgcccataaacttcaaaagtaagttgctacgaaaaataatattactatattgtgcggtctttttgtcatccttgcttggataagggttgctgaaagtgatcgacaaaactacaaaatgcatccatggcccgacaacatgatccatcctaaagaattttgtgcacaatactacaatttaaactagcatttaaatcttttaataaaagctatcattgagttgttgcactttttaccctcgcgtggttgtagatttcaatgtacataccgaaccttaaagtttgacatg

SEQ ID NO: 155526 - DNA, 307 bp, Glycine max
  unsure (1)..(307): unsure at all n locations
ntgactaggcttgactcatntccacccctattcatatcttatttctcttattctatctcatctcctatcaatcaagagggatgggtgggattgacataataaaaagaaggatgggtggagtccgtcattgttaagttgtaacgttgtactgcatgctcacacacgacttagattaagttcttagacacaatttcaaattatgcacccaattgaaatcatgctggtatctttattcgttcccttgtctcaatttatgcatatgggagaaaagtcctccgcatggttgcatggttcaagacattaaaat

SEQ ID NO: 155527 - DNA, 350 bp, Glycine max
  unsure (1)..(350): unsure at all n locations
agctntccgcgaagagatctaggagggacatctctgttgaanggaccagtgccgcccccgtgtttgatggtcaccgtttctagagcgccgtgcaccagcagcgcttcgaggccatcaaaggatggtcgttccaccgagagagatgcgtccagctcagggacgatgagtacaccgattttcaggaggagatagctcccagacattggacgtcgctggctactcccatggctaagtttgaccctgaggtagtcctggagttttacgctaatgcttatcccgcagaggagggagtgcggngcatgcgttcatgggtgaggggtcagttgattccttttgacgtagatgccctc

SEQ ID NO: 155528 - DNA, 282 bp, Glycine max
  unsure (1)..(282): unsure at all n locations
ntgagccattgaatntctcgagagcttccggtgatcaatnttgagggtctcgatatattatgcgcctgaatctgacctccgtgtgaaaagttatgaccatttgaatttcatgagagcttccgttgttcaatttctagcgtctagatatattatgcgcctgaatcggacctccgagtgaaacgttatgaccatttgaattgctcaagagctgtcgttgataaatatttagcgtctggatatattatgcgcctgaatcggacctccgagtaagaagtaatgatc

SEQ ID NO: 155529 - DNA, 432 bp, Glycine max
  unsure (1)..(432): unsure at all n locations
catgcaagcttggtccaattcagacggccatagctttttacatgggtgtacgattgagacacatgatatatagagacgctcaaaattgaaaaattgaggtactcgagaaattaaaatggtcataacatttcacttggatgaccgatttaggcacataatatattgagacgctcgaaattgaacacgaaagctctggtgcaattcagacggccataacttttgacatgggtataccattaaggcaaatgatatatagagacgcttgaaattgaaaaattgtagttctcgacaaatgcaaatggtcctaacatttcactcagatgtctaatccaggcacataatatatcgagacgctcgaaattcaacacggacgctctggtccagttcagacggccatatacttngacatggatgtacgattgaggcccatga

SEQ ID NO: 155530 - DNA, 424 bp, Glycine max
  unsure (1)..(424): unsure at all n locations
tccattntcaatttagagagtctcgatatgttacgagactcaatctgacatctaagtataaagttattgtcgtttgaattctatatgagcttccgttttcaatttggagcgtctcgatatattacaggactcaatcgtacatctaagtataaagttattgtcgtttgaattttctcagagcttctgttctcaatttcgagcgtctccatatattacgggactcaatcggacatccgagtaaaaagttattgtcttttgaatttgatatgagctttccttttgaatttggagcctctcgatatattacaggactcaattagacatccgactaaaaagttattgtaatttaaatttgctcagagcttctgttttaaatttggagcgtctcggtatattacggatctcactcggacatccgagtaaa

SEQ ID NO: 155531 - DNA, 466 bp, Glycine max
  unsure (1)..(466): unsure at all n locations
agcttgaatacaatgaaactcgctatcttatcatagctaagattcattcaatttgctcaagtttccttcgtctagtggactgacagcgttacaacacttattcgttttgtctcagaataatctcttttttttaacaatcttaacacaaacatcttcaggctttatataaacttcaaagcttcaagccattgaggaatcccagctagccgatgtataatagctttggcgcttgacacgaggttgctattgtgtaaagagagagtggggaccacaaatgctttctgcaccatttcctcatagaagtatagtttgtcggtgtggcctagtactcaaagctgactttcaacatatagattgaaagaaacattaacaacataagacaaaaggaattaagaatgtcaagacaagacattntaaatcttcccttttgtgcgttatagcacaagtttcttactgaatctatgga

SEQ ID NO: 155532 - DNA, 488 bp, Glycine max
  unsure (1)..(488): unsure at all n locations
ggtgtccatnggatganaagaaaaagtcaaaatagataatggtgaccaatcaccaaacctggaatcctgctgtcttctcaaaagtagtaatcttatgcacaaacccaaaggctgaaaagacctacataagtgtacaataactttcagaatgatatttaacaacatgaatcttactaattgaacaggaaatgaacaatgtctggtgtcatctatggtataatgtagagaacagggagcattaacaaatatacaatttcaaagataattcagtatacaaaaaattggaagcaggcttaaaggggggtaaaaggagatagtttaactgagtgaattcaattagataattntccttaactgaataactgctaaaatatataactganataaataacattaatatntaagattntgaaggtaatggttntattttcttntccacttgtattcaaacataagctctgaaaactcagcatatgattgccatgttc

SEQ ID NO: 155533 - DNA, 55 bp, Glycine max
agcttagttcagcttatcatcctcaaacagatggtcagactgaacgaaccattca

SEQ ID NO: 155534 - DNA, 449 bp, Glycine max
  unsure (1)..(449): unsure at all n locations
ggctactntgaacaataagctntgaagggatctaaaatgccatctcaataaattggcttcaacaaaaagtgagcttgagaaattgaagtaagaaaatgaaaaacttgtttcaagttataaagccactagttgtgtttgtgcttttacatctcttaatatggatgattacaaatctttacaagatgagttcgaaaagtttaaaaagagtcactatgaagaacgcatgaagttgcaagctgagatttcctatcttaaagatcttttagaaaaatgaataaagcaaagagtgatcttgatcacttactcagtgtgcaaaagcatactactaataagattagtttggtgataacaagcaaactgacctttccaagaaaaccaagtttgcaccttccctccgaataaaatcgtgaacccaaacaaagtctctaaaagaaaaacatagtgcatct

SEQ ID NO: 155535 - DNA, 456 bp, Glycine max
  unsure (1)..(456): unsure at all n locations
tgatgacagtgttattcatgtatcagcccgagattgaggctgaggatctgagattttataagagcttaatgggtgataaaacagaaaccatccaagctattgatattgtggcaatgagagcaggcacccaagtaaagccagagcaggatgacatgttgacatcgcaagttactgatcaagagatntttaaggccttaaatagcattggagacttggaatctcctgggatcgacgattacggtgcaaagttttttaaggctagttgaaatactataagaactgatgtgactgttgcagtaaaagaattttttgagcatgggaggatgtacatggtggtaagttgcacgctagtaacgctggttccaaaacatgacgagacaaaaacaattccagaatatcgaccaattgcaggctatactactctatacaaaatcatttcaaaaattctcacgatga

SEQ ID NO: 155536 - DNA, 428 bp, Glycine max
  unsure (1)..(428): unsure at all n locations
ggtggtggtgctggtgttttggtgtggtaaggggaagaaaggttgcggaaagatatatatcatggatacacttatngataatggaatacgtggacatccaatgagagacggtcatagtaacgtttacaaataattttctgatatatgtcatggtttggatggtgtgagataattttggtttcatgggaggccggttcaaatgtagctaccattttctgcctaaaaaagagaatgatggtcagaaagtgtggttatgtgatgaaaacttttatgggaatgaaggtgtagagtgagtcctgtgttgtacgtgaatggtgtataagagtgatgagtgaatattataagctgcactctaaggattgagacagtcgatgtcctgtgttgaatacttntatggngatgaaggtgtagagtgagtctacgtgaat

SEQ ID NO: 155537 - DNA, 471 bp, Glycine max
  unsure (1)..(471): unsure at all n locations
agcttgtttcacgataatgaaaccacaaaatttttctaatatattncntctccctatatatgtagtaatagagatagacattgggaatctaagtacagacctagtgcatatatgcgtctctagtgacacttacaaattaaatgctaacattatgtttagttaaagaaaatatgtttaatttgaattttattcaaatttttaaaaaatattatactactttcatcttatttttatttttaaaaattgcgtaataaatactaaaaataataaaacatcattttatcatttgaatttatatgaagttgtaaaaatattaaataaataagatataaagtgatatttctatattattaaaaaaaataatttttcaagtcaaatatatctctataatctttgatatggcataacctctttcctggaccatgaatacctatattcatttggcatgcanatggaaagaatactttttat

SEQ ID NO: 155538 - DNA, 434 bp, Glycine max
  unsure (1)..(434): unsure at all n locations
agcttgtccaaaatgcaaacaataataattgttatctcggatatccaattgagtattgtaatatatcgagacgctcgtaatggaaaacagaagctcgtagaaaatgcaaatcgcaataacttttaactcggatgatcgattgagtcccgtaatatatcgagacacttgaaattgaaagcagaagctctgagcaaattcaaacgacaataacttttgactcggatatccgattgagtcatttaataattcgagacgctcaaaattgaatacagaagctctaagcaaattcaaatgacaataacttttgactcggatgtccgattgagtcattttataatttgagacgctcaaaattgaatgcaggagctcttaccaagttcaaatgacaataactttntactcggatgtctgattgagtctcgtaatatatctag

SEQ ID NO: 155539 - DNA, 264 bp, Glycine max
  unsure (1)..(264): unsure at all n locations
tttgagcgtctcgaatattagatgactctttcttatatccgagtcaaaagctattgtcngttgaatttgctcacagcttctgcctgcaattcgagtgtcccgatttattacgggactctatcgatcatccgagttaaaagtcattgccctttgaatttgcttagagatactgttntccaattcctgcatctcgatattctgcatgactcactcagactttcccgttcaacgattttgacatgtgaattttgtgagaacttctat

SEQ ID NO: 155540 - DNA, 460 bp, Glycine max
  unsure (1)..(460): unsure at all n locations
gcaagcttctaaactntatacaagaatgaagctctgatttctcttgttggacaagtggcctcagatatcttaagaaggggggggttgaattaagatatcacaaactattccccaattaaaaattctacttttaatttaacccaacaacccaagattccttttaaacaagaactcctagataataatgcaaattaatcttactaaataaaaataataagcaataaatagtaaagaagtttaagggaagagaaaatgcaaactcagatttatactggttcggccacacccttgagcccaaatccagtccccaagcaacccacttgagagttccactatcttgcaaaatccctttacaagttctgaaccacacaaggacaacccttcctttgtgtcaaattntttacaacaagagaccctcggtctcttaatcccctttgagaatttagaaagaagagaagat

SEQ ID NO: 155541 - DNA, 386 bp, Glycine max
tctctgaaagctatgtgattattgagttgcacacacatttgagataaagagaggtccattcaatcaagtcttttgttcttgcatttgaatgtaaagggcggatctctccttgactatgtttcatatggattgtacacattgttactgcatgtgcaagcgttttagtgcatgctacaatacgtgtttataatttgaagctaagagtaggtttctcttatgcttagattcactaaggaccctgtgttgggtgcctaagattcattttctaggtagaatttgaaattgcttgaaaactcacatttgctattgaaaatctaattgcggttgaattagatgactagattaactctgatatacatacgtaatatgaatatttagatcacata

SEQ ID NO: 155542 - DNA, 413 bp, Glycine max
  unsure (1)..(413): unsure at all n locations
agctngtagaatgttattttgaaggttatattatagggtcaaggttaggaataaaatccgctccctactcatctaattgccaactctagctaattctcttctttgtctcgcactatatatattcaaaattgaaatcaccactctatcatcaaattgtagttaatttgctttacgtgatctttttgtctgtttgttgtggggagagaagaatatttcattactgaaaataagagaggcaataaacagcgctgaacaaccaagattaataagtaattaaggagtataaccaagattcaaattatgaatagaatgcaatggaggaaactagagaagaagtacgctttgacccgttgaggaggcgagacaatgagaaaaggtcctcttgttggattgaatctactgatatcggtagt

SEQ ID NO: 155543 - DNA, 391 bp, Glycine max
  unsure (1)..(391): unsure at all n locations
gatcaagttatttttgaggaaattattctctttaataatattttggtacaaattaaattttattagttcaggtgttaaatatttngataatacctataattattttctctgtaatctctctaatctctattccttcctagaaactttacagtctaaattaaacctcctcacctctcactctcagcatgcttaactttgaaccaaccaaatattatcaacacgcctttaattttcaattatgtttcttcttttgtacgacttgtntttgaacaagtaaaaagactctgccaaactaaaaaggtcatgaaattcataaaatccaagtacgcttgaatatttttctggtccaggtaaattagtgtgttcttcatttttgatcctcanagtctat

SEQ ID NO: 155544 - DNA, 463 bp, Glycine max
agcttaagagcgaggtcattctgttcttatgttaatcattgcctcgaactaaggcgcattacctttccctctactctactctaacaaaaatgatctttcattggattgtcaatacaaaaatcttaacatctaatttagcaccaagataaaataatttaattaaaaaattaattaaaaactaataaaattagtttcagactaacatatttcatttttaaattttttaattaacgtaattgacattgttggtgtcaaaaactattaaaatgatcagtttggtctaaaagagatattagtggggatttttctaaaaaaaatagatattagtagaggaccaaattaaataacatttttaagtataaatgaaaaaaatattatttgttaatttagtaatcttttaattgaatttatctataattaattaatagctatgtttaaacttaataactatttgaaaaatatt

SEQ ID NO: 155545 - DNA, 322 bp, Glycine max
atcatctttagcatcgccagcatacttgagggaatacggaattggtgcatctgaagcacacataatgtgggaagatcaaccgcagagggatactctagacgactactccaactctatcgtgccgcaatattccacaagcattgcgcggtcagaagtgcaagctcacaacatcacatattcacattccttgatccagctgattcaaggaaatctgcctcatggttcttctaatgaagacccttatgcacaccttgcgacatacatataaatctgttatacaatgaaaattgtatgggtgactgatgatgcagtgatgcttagc

SEQ ID NO: 155546 - DNA, 467 bp, Glycine max
  unsure (1)..(467): unsure at all n locations
agctttcgattcattctatgtacccgtattgttccacattgngtttcgtgcactcttattctcgttttgtttactttttataccccctgttgacgtgcttaagccattttacttaagtcatttctcgcttaacttaaaaataaaataaatttccaccgaacgtttgaattgtactatccattaacttcggttaaaataaattccgaccgttcggtcatgccgtaaccacgttggaaatcaaaaagaggtaaaaaataatataataatcaaaaagatatcttttagtaaaataaagcggaaaatcaagtggacattttatctttgggatttctcattcttaatcgaattgattaataactaaagtgaaactaaaggctaaaaacaattcgcctagtcaagctcgtccataaaaaataggcttttgaagtttgtcatttcatttcctcactaagtaaaatggatcattt

SEQ ID NO: 155547 - DNA, 375 bp, Glycine max
  unsure (1)..(375): unsure at all n locations
ctcctacattttatctctagcatgcattttgttgtgggcnncgcctttgtcacgggaagccggaagggccatctcaccttcttaattgtacacatggggcactgcgcccccaaatgcgcaagtaagaagagatatatttccgggctctcgtgtccgtaaaatgcattcatatcatgcatcgcataagcatctctttataacatcataatggacgtatcctgcatttgcatgagtcatggcatcatcatgcatatgcattcaacaaactatttggtctcgaaaattgcatatcaatttgtttcatgtttgctcatccttgcggtttgctctacaaacaatataataaaaggggaagcgcggaacattacctacatt

SEQ ID NO: 155548 - DNA, 461 bp, Glycine max
  unsure (1)..(461): unsure at all n locations
agcttctaagagcaaagacaatgttaatataatccatacactactacaaaaattgctttcaaagatggttgtttgtggcttttcatgatggtttttaattgtctttgaatccgtcattgtggaaagtcaacacttttcatgacgttttttaaactctcttagaatctcgatttttacattggttctcttcgaaactgtcttagaatgcgattttttcttttaaaaatgttaaaaaattaacgtttctaagatggttctttcaaaaaaccgttttaggaagaagactttctaatacgattttttcacaaaaccgtcttataaaagtatactttctaagacgattttttaaagtatggtcttaaaaagtgtcctttacnttccttttttgttggatctcacattccaagttctcaatctgtaattaagacaacattctacaagaagaatatgaataacaaata

SEQ ID NO: 155549 - DNA, 394 bp, Glycine max
  unsure (1)..(394): unsure at all n locations
nttcgattcattctatgtacccacagtgggccacattgtgntttgtgtattnnnanncccgnnacgcatactttttataccctctcttgacgtgcttaagccattttacttaagtcatttctcgcttaacttaaaaataaaatcaatttccaccgaacgtttgaattgtattgcctgttaacttcagttaaaatgaattccgaccgttcggtcgtgccgtaaccacgttggaaatcaaaaagaggtgaaaaatactataataatcaaaaaacatcttttagcaaaataaaacggaaaatcaatcggacgctttctcgttgggagttctcactcttaattgaattgatcaataactaaagtgaaactaacgctataatcaactcgcctattttag

SEQ ID NO: 155550 - DNA, 458 bp, Glycine max
agcttcaagaaaaagatggcctcagcaaattctcttatttgcagaagggaattctatcaatagacctccaatctttaatggagagggttaccactactggaaaacccgaatgcaaatttttatcgaggcaatagatctaaatatctgggaagccataaaaatagggccttatatacccaccacagtagaaagagtttcaatagatggtagttcatcaagtgaaagcataaccatagaaaaacctagagatagatggtctgaagaggatagaaaacgagtacaatacaacctaaaagccaaaaacataataacatctgccctaggaatggatgaatatttcagagtttcaaattgtaagagtgctaaggaaatgtgggacactcttcgattaacacattgaggaactacagatgtgtaaagatctacgataaatgcactaactcatgagtatgaattat

SEQ ID NO: 155551 - DNA, 265 bp, Glycine max
  unsure (1)..(265): unsure at all n locations
cctgaactntatatcatcctgggttcctttaagaaattccagataggcagggtagtcttctgtatcaaccactatcaaaacatccttgtggttctgctcaaataagaatttatcaccttatagttgagatattccaatggaaaactttaaaatttcatgagcaaaggtcctgttactttccacagtattttagtcacttggtggtatttggccaacagattattatttgagccattttacaaacatttgagttntaatgttgatt

SEQ ID NO: 155552 - DNA, 461 bp, Glycine max
  unsure (1)..(461): unsure at all n locations
agctngcaaagaatatatttggcattatcactggtgcataatatnttgtatccaataagatgaaaattataataaaagtaagatgttcaatttttttaataataacatatttaccattttaattttttttaaatacattctaagacagttcttagaaaaaccgtcttaaaaagtatactttctaagacagtttttgaaagaaccatcttagaattctcaatttttattttttttttaaaaattcattttaagacgatttttaacttagaatcatcttagaaagatattttttaaagatgattgtatgttaaaaaccgtcttataatagtatccttctaagacgatttttacttcagaaccgtcttaaaatgatattattattctaagatgatttttagttaagaatcgtcttanaaatgtgtaatttctaaggtgatcttttttaattatcatgaaaaatc

SEQ ID NO: 155553 - DNA, 502 bp, Glycine max
  unsure (1)..(502): unsure at all n locations
ttacggacctatgaaactcagctaagggtgcttggaaggtattagggtcctttctcatgtgcataatgttgatagtaataaccaaataattacttttatcttaagcattgtaatttatcttggcattgctcttttgtttatgcgacacctaacccttttgttaattctttgctctggggtgcatttctaacctttgaaaaactattgtggggctatggcttcttattggttactagaataagatcattagtccttttgaagttttaggtggatcttttaatcattcgcgagccttgcttatgggcaatatccttattgatataggttttattggaggccactttacttgaaaaaagaacacttaagaaggagatcattgaaggaaaaggcttgactgttgtcatgcctcacctaattggagacttcattnttcctatgttgttgttgaagtgctccaacctcacatggcagtgtggatgtctcatcctagatatggtcattt

SEQ ID NO: 155554 - DNA, 464 bp, Glycine max
  unsure (1)..(464): unsure at all n locations
agcttgcaaagaatttatttggcattatcactgttgcataatattntgtatccaataagatgaaaattataataaaagtaagatgttcaatttttttaataataacatatttaccattttaattttttttaaatacattctaagacagttcttagaaaaaccgtcttaaaaagtatactttctaagacagtttttgaaagaaccatcttagaattctcaattnttattttttttttaaaaattcattttaagacgatttttaacttagaatcatcttagaaagatattttttaaagatgattgtatgttaaaaaccgtcttataatagtatccttctaagacgatttttacttcagaaccgtcttaaaatgatattattattctaagatgatctttagttaagaatcgtcttaanaatgtgtaatttctaaggtgatctttttttaattatcatgaaaattctt

SEQ ID NO: 155555 - DNA, 445 bp, Glycine max
  unsure (1)..(445): unsure at all n locations
tattagggtcctttctcatgtgcttaatgttgatagtaataaccaaataattacttttatcttaagcattgtaatttatcttggcattgctcttttgtttatgcgacacctaaccctcttgttaattctttgctctggggtgcatttctaacctttgaaaaactattgtggggctatggcttcttattggttactagaataagatcattagtccttttgaagttttaggtggatcttttaatcattcgcgagccttgcttatgggcaatatccttattgatataggttttattggaggccactttacttgaaaaaagaacacttaagaaggagatcattgaaggaaaaggcttgactgttgtcatgcctcacctaantggagacttcatttttcctatgttgtttgtgaagtgctccaacctcacatggcagtgtggatgtctca

SEQ ID NO: 155556 - DNA, 436 bp, Glycine max
  unsure (1)..(436): unsure at all n locations
agctggagggaaaacctgaaattccctcactatttaatccttattgaggatatttctggtttttttagtgttctttnttctgattattagcttctgaaacagaagctctctgtgcagcacgaagccgctaacaaacccttctgcttctaccctaaccttccctacccacaagcccacatgctcccttcttctccgacgaccttcatttctataccaggaaactctagtgaccagcccactccagcaaccccacatgaggttgtcttttctttttcagtttttgtttccttattagcaactcagctgctgctacccaaccatgactttaagcactttgtttccttgatttcctactttatttttgtttaagtactatgaattttgagttaattttctgttcttgagcttataagctccaaaacacaaaacgaactca

SEQ ID NO: 155557 - DNA, 490 bp, Glycine max
  unsure (1)..(490): unsure at all n locations
gctggtatctccttcttactacatcaagaatcaccgggttgagtcttctctgtggctgtcttactggtttagctccatcctcaaaatttattcgatgcatacatgtggatgggctaataccaggaatgtctgccagggtccagcctatagccttcttatgcatcttgagaactgacaacaacttctcctcttgctcatcagcaagggaggcaaatatattcactggaaaactcttgctatcatccaagtaagcgtattttaaatttgatggcagaggcttcaattctggtgtggtcggctggacagtggtagaaggagatggtttctcagcctttacctcataaagaaagtcagaggtatgtgtacttcctgaaacattgntagtcctatctgactctataaaatcaatctcaagaggtaaaacaccaccaccagacatgcaatcantatcactctcaaattcactctcagcatcaaatacagacatatg

SEQ ID NO: 155558 - DNA, 435 bp, Glycine max
  unsure (1)..(435): unsure at all n locations
gcaagctntacagcagattttagtaatgacccactattctataattaaaataacttaatgccattaacctagggaattaaaaaaaaacttaatggctgagtgtaactgaaattgtggcaaccaaaagtcacccccaacagccaacaagtcagccaccatttggtctcccaaaaggctgatgcctaggttgccaattgggcccttattacaacttgaactaaacctaactaaagcccttttagttgattaacccaaaacatatttttggtcagccaactttacaaggattgggccattatttagacaaactaaacactctaaaattgagacaaagtggtgtcatttagtcctcctccatttgggccatgatacaactcacaaccttggacttttctccttgaaacttgggcttgtattcaaatagtatggacacca

SEQ ID NO: 155559 - DNA, 401 bp, Glycine max
  unsure (1)..(401): unsure at all n locations
cttttcgtgcaagctcaatcgacgtnttgtttctgccaaaactgtcattttcccatttattcggccaggagaacattagcccacctcggcataaaaatatttgttaatcgacttcatgcatatttcattcagggattgaatagaaaactcaattgctgacaacggtcgtgaaatagacccgactgatatttttcagccgacattgcgcaattattttttaaaaacgttcgctggcaaaaaatgtttttttttttctacggcaaaggaagttttctagttttggggttgcataaaatatttaaaatttacgtccactacgttttctttgtgcgagcttgatgaggacataaccaagggcaaggaccatgtaacactttgaggtcccatgaccagaggcagac

SEQ ID NO: 155560 - DNA, 449 bp, Glycine max
  unsure (1)..(449): unsure at all n locations
agctagcctcaggccggaagagaaggtgcctattatttttcgagaccgaagggaatatgcgggccatcatcgatgagtgcaaagagaagctaaatctactggcaactcacgagcaaaggctagaggatgagtacgccaagacatcaccagaaagggaagcaagggaaagggtaatagattccgtgcaccaacaggcaacaatgaggatggaccgaattgctcttactttgaacaggagtcaagaacttccccgattgctagccaaggccaaagcaatggcggacacctactccgtccccaaagagatccacggacctctcaggcattgtcaacatatgatagacttaatggactatatgattagaaaccgctatgaagtctgtattgtcgctcacaattngactagctatatcttctcgaacaaaaagagtttatcccacagtcntact

SEQ ID NO: 155561 - DNA, 471 bp, Glycine max
  unsure (1)..(471): unsure at all n locations
agcttgagaaagcccataaagtgccacgtttatcttgtntctgtgaccataagatctactgtttcttcccttcaatcattgaacatcgttgcccatatttgaaaagttctttttaaaaaaaaataaaattggagcagagggtaactctcactttttatcttaatagtagtagtagttattactaaacttaccgggtcacccaatattatttgcttacccttgaattaattacttataaatgtttagtcttggaaactttttgttgttagtgatatgatgaaaataatattatgcataaatagagagaaactcttatttcatgaatatatttttaaaagtgagttaaatctaaacccgaactctaatatttgatgtcacaaattaaactgacttatgattggaaaagaagtgctgtatcacgagcatgatggaactccttcgttattatatgggtggaacgagatgtctcct

SEQ ID NO: 155562 - DNA, 443 bp, Glycine max
  unsure (1)..(443): unsure at all n locations
ctatcacttaacatatttaactaagaagactgttcaagagatttgagtatgaccttatngttaaacgagcaaagccaaggcatatgcttctgaccggcggctagaacagaaaattaacaaaaaaaattattaggatcaaaattgataaaacacaaacttacataaattaaattcatatttaagtcaaaaatcatattactagagtaactaaaaataattaatgtgaccaatgaacaagatatacacgacaaatgatgaatgacaagataaaatgatagacaaaaaaatattcatttattttcacctacgaatttaagcttcgaggagagttgatatttaacatgggtattagttgccaccttactctcacaaccttcaattcacacccatttaatgttgatattatgataaaatatggcaataactgccaatgtaatgcactt

SEQ ID NO: 155563 - DNA, 422 bp, Glycine max
  unsure (1)..(422): unsure at all n locations
cctgcacgcatgcaagctttgactcgaatcatcacgagatgataattattttaccatggcatgaatttcatatcatctttttcaacatctctttcaataatcaagaatctatctttcaatcttctctctcaacatcattcaacttattctactgaatgtctgattttttttctcttcacttttctaaaagtttctgttcaaaactctctcttccaagaaaagtgctttgttcaaaaactcgngctattcatctttttcattctcttctacctttgccaaaagagcgaaggactaaccgcctgaattcntttgcgtctctcttctccctttccaagagaattcaaaggaccccgcccgagaattcttttgattctctccttcccctttaacaaaagatctctaaggactaatcgcctgagata

SEQ ID NO: 155564 - DNA, 163 bp, Glycine max
ctatcatgcttaaatcttacccagaatgactttttctttgcaagcacggattcagggtatcggaagcaacacatttttccctacttgagaagttgttctgaatccctccttttgttgtacctaaaaatgtaagattttcgatggctttacgctctggtcattc

SEQ ID NO: 155565 - DNA, 280 bp, Glycine max
  unsure (1)..(280): unsure at all n locations
gcagcatgcaacngagcactgaaacaaccatgtgtactttactaagncatactacccaactgaaaagcttcttccatggccctaacaaatgacgaaaactgtctattaataacgttggaaggtcccaaaccggcaatgtcaagcattattgcgatggaagtgttgtcaacaaccacaaagcagcacattcgaagcatgacgataggaatttgcttgttcaaacgctatccaacacattcaatggaaaggcgccaattactctgtacgatcgcatacctgc

SEQ ID NO: 155566 - DNA, 168 bp, Glycine max
  unsure (1)..(168): unsure at all n locations
aaaaccagccgcaaaaaaccaggaagaagagaggggatcattttacacaaaaacgcgggaacggcatcacccacaagagacacgaccgaccacaagggaccaacagcagagaggacggaccganccgagaacaccacacgtagggaaaagcgaggaagaaaaaagaaa

SEQ ID NO: 155567 - DNA, 470 bp, Glycine max
  unsure (1)..(470): unsure at all n locations
agctntacttgtgttgatggagacatactttatactaatgataatacatttaattgttagtgtaatcagaaatattaattaattctttcatattaggtattggtccaaaatttgaacataaagtgctaaattcgaattgagtatacacctccagttgtgtttgcgtgatattacaaaattgatttaagaacttacaacaattgattctccagttgtgtttgtgtgatattacaaaattgatttaagaacttacaacaattaattctcgagtgctagatgttggtgcaacaatgtaaaatgaattaatatctgaaagtcgttttcatggtttcctagataaatatttgaaagtaaaaaagaagattgaaaataagatgatagctttagaaatctatctataatatataaaagttgagtttcttactattacactattacgttagtaaaattgatgatttggaggaaagaat

SEQ ID NO: 155568 - DNA, 481 bp, Glycine max
  unsure (1)..(481): unsure at all n locations
taatatacatgctcagatcccttacaaagaattcctgagatatatggaacaattggctcaatggataagtgatggaagtctngatgtttgggcacctactccaatactacacatgcaagaagataacttttctatgaattatatttccatataggggataagctagcagctggcttccaattactgttgaactgagcatcaattagactagtcctgctattgtgaaataaaatttcaagatagataacagtgaaaaactagtcatgctgtaagcccttcatcccatgaaaagaatgagaagaattacatgagccaacagtaaccgtgcaaaaatctgttttatgctcaaataatagcaactgacattggaggttatcattctctgaatcttgaataaaacactgacgtatttggcatcaatcacttaattagatacttttgcatcatgcaatactatttctaacattntagcacaacttta

SEQ ID NO: 155569 - DNA, 442 bp, Glycine max
  unsure (1)..(442): unsure at all n locations
agcttccttntagtgcgtcacgtgtaattcttatctcgatggnggcgcgagcctttgatggtacttggcgggaagtgatgggggaaatcgacattcccattcagataggcccccacacttgcaatgtggtgtttcaagtaatggatataaatcccgcctatagctgcctcttgggaagaccttggattcatgccctgggagtggtcccttcaacgcttcaccaaaaattaaagtacgcagtgggtggactattactgatagtgtcgggtgaagaggatatgttagtgagctgcccctcctccgcaccgtacgtagaagcggcggaagaatcattggaaacggctttccaatctttcgaggtggtgagctgtgcctcggaggaaccaagttcgtatctaccctttatcttccacgctgacataatggtggcgcgtgtatactc

SEQ ID NO: 155570 - DNA, 401 bp, Glycine max
  unsure (1)..(401): unsure at all n locations
cttctggaccgnngaaactgtgtgcttaatgacatgattgtttttgttaattactcactactattgagtattgacacagcttggattctctcacttaataataatacagcgaattgattccttacatggaggtcttggttcgagactaccgaacttaatgatagcttattcgaattatttgattatataaatatgattcaaatatatttttcatccttaataaatatccgatatttatatatattttctattagaaaaaaatttacatcggatccctaacaaataacttcgtctttattttaacacttttttaattctgatcattatgaacttatattttttcctaataattttccttgttatacgtcgaataaatacacttattattttcataattaact

SEQ ID NO: 155571 - DNA, 451 bp, Glycine max
  unsure (1)..(451): unsure at all n locations
agcttagagagtatattctttgtatctacaaatgtttgttntttagattaaggtcttctttgtaaacacactctgtgaatgttagaaaatattttattctatatcaaactattatttgtgaaagccaagagtggcttaatgactaaataatacttcggttttcttagattccaggaggggtcaaagggttgtgccagtagtggcctagagaatacttgttgtaatcaagtttgattagtggaaccctttactggttagtaaaggagaactggacatagttgattgaactagtataaagctaagcgtttctactactcttcgttttggttgttgttagtcgtcttatacgactaacttttgtatagaaaacattnttcaaaacctgtatagtttccccaatttatagttattctgtagggatttgtaaataaatcttggtttattggtatag

SEQ ID NO: 155572 - DNA, 446 bp, Glycine max
  unsure (1)..(446): unsure at all n locations
tctaagggaagtacctagnctataaatagaagcatgtgttatacttgttgtaactttgatgaatgagagtctagtgagacacacttcagagttcaacttctctccctcttttcttccttcaattacatgcttccccctctctctttctctctctctttcttttcctccattgaagcaccctctccaagcttcttatccaagacactctcttggtggagaaactccatcttccatggcttattacctattggatggcgcctactctcaccatctattctttttttttcgttgcttctccatggtggaaaatcaccattgatagatctcattgaatctcaaatatttctccttcatgatactcccatgccatccttcatcatttgatgttcgcggaaaacggataataaagatcctgttatataatttattttctttatattatatcc

SEQ ID NO: 155573 - DNA, 356 bp, Glycine max
gcttgaaacgagtgatacgctcccgtgttatgtcttctttgatgcagtaaatagaaccactgtccaagccaatagctatgagtagtataggtggcacttcttctaaaaccaaaaatgatgtaatctgcagtacccagtagttccaaaatcatcaaaatacaggacgagataataaaattacattgctacccagttttactaaaaccaaatgggcatcattcatcagaaaatgaagagtaacaaccatccattacagtgtcattcattacctttgcctcaggaaactgattagtgaatattcgcaatatcccaacgcaatcaggacttgtcgtgctcgaactctccgattgcatctt

SEQ ID NO: 155574 - DNA, 436 bp, Glycine max
  unsure (1)..(436): unsure at all n locations
taacttaacacaattcacatcattgtaccatttatttcacaacatcaattgtcctaaggatntaatcacaaaattacattccacaccttcacattaatcatgtgttaaaaacaacacatctcaagtacaacacaacatctcacgctcacacaattcattacacatcatcacataacaagtcacaaatatcattacacatgtgttatgcaatagatacactaagactcaatcttatatgcaatgtggtatcatgttaatgaaaaacctcatcgggcgcctatgagtacatgacaagacaaactacacactggtaagtcaggtcactcttactatgtaaaaacatagggagaccaatccaggtcactctattttgcacgaacgctccaaccgtatgggatcaacataagctntaaggaacattcaaatcgagtgtatt

SEQ ID NO: 155575 - DNA, 457 bp, Glycine max
  unsure (1)..(457): unsure at all n locations
agcttgttgtgagatcgtcganttggctgtctcccccacatagttgtgagggggaaatttgttggattttttgggctccctttctatgtggagtaaatgcccaaatgagaaggctcattttgtctcacgtatttaagtggagaggggctagattagatagagagagggagactcatttgagagggaaaaacagttacaaaacattgagagagaaaggagagggaaaatcattgtgattttcgtacacccaccagagagcgtttttcagattgcaactacggattcgttcaccgctggattgaactgatttttggacagcaagttctgaacacatgatacttcaaatctttcggttggatagttaaaaagatatctagagagagagagagagataagtgtttctcattctctactctatatgttggggtttcatcttcttgtctctatttatcaattg

SEQ ID NO: 155576 - DNA, 459 bp, Glycine max
  unsure (1)..(459): unsure at all n locations
tccatatgcaagattaaactagcaagagaagctntaaattttcattnttccatgaaagtgtatctctggtgatgaagaacatgagccatttgaaatgttcatatgatatttaattattttatactatgctaagcaatatttaactggtcttaagcactgcattacattcaacatacgcgtttaatatcactttgaactactatatgcttttgaagccatacagtagagataattctggacttgtaaactatgtcaaatatcaacaacaacaaaaaataccatatatttagtcatttatacactattgctacttcagcaatgtcatcatactgctcatctgatttcacagaacctcaagtccgggatgacaatgtggaatccaggagtgcttccacctgccttgatgacattngagggtcaagtgcatcctataagttcatcaatgcttgtgactgattt

SEQ ID NO: 155577 - DNA, 427 bp, Glycine max
agcttcccgtatccgtacttggaaggatctgattaccgccttcctaaggcagtatcagtacaattctgatatggctcctgaccgtactcaactgcagaatatgtttaagaaagagggtgaaacctttaaagaatatgcgcagcgatggagggatttggcggcacaagtagctcctcccatggttgagagagagatgatcaccatgatggtagacactctgccagtgttctactatgagaagctagtgggttacatgccgtccagctttgcggatctggtgtttgccggggaaagaatcgaggttggattaaaaagaggaaagtttgattacgtttcctccacaaacgtgaacgccaaaagaatcggggcaacaggggcaaaaaggaaggaaggagatgcccatgccgtctcttcaacacccgcgtgg

SEQ ID NO: 155578 - DNA, 496 bp, Glycine max
  unsure (1)..(496): unsure at all n locations
tgctattaggacactatgaatctcagcttagaacttggttttttgctntcgtttcagatntgtgtcaatgtaacaattnttggtttttttcgaaagcaacattaactatgtccttatatattccttggaatagttagtcacgcacggnggagtagccacaatgtcatcaggatgatattatcggtttgcaattttccaatgcattctattttttattttgtggtttggttaggggttattttgaaccaatttgcttaacttcaatcctctttttgtgtgacatcagtgagattgacttctatttgtttttcacttcatcaggctgaagattgaccagtaattcaattacgccaagaaaagctacttcaatgggatcactcaacagttcatcacaaaatactttttaccttgttagtgaatctgtaaaatacgacatctgctgttgaattctaaattcaagtttttttaataagcatctgaatctttcgtatataaa

SEQ ID NO: 155579 - DNA, 476 bp, Glycine max
  unsure (1)..(476): unsure at all n locations
agcttgaatagcttaaaaacttctattttatttgttcataccacttcatgatattttgatgtcttaggactagcgttcattccattgctgcatatcagaaagatatcacgctgtacatcattgaaatagaatgaagcatcagtttggcactgagggaaattgtttcacaattaggcactaaataaagaggtgagatatattttaaaaagggtttagagacatgaagccagctagcttaatcatattatttttatactagttgtagtcaatattcaagtacgtacaatgtgtaagtggtgagatcaggatcaacaaaaccaaaataacacagattcttgttctcaaaataattaaaatataacaattgcaatagataaaaattcaaattcaaattgaaaggtaagtaaaaaggtgagttagaanaaatgtttgtataaaatgtaactattcaattaatacattacagtggttatgat

SEQ ID NO: 155580 - DNA, 136 bp, Glycine max
cgagtgtgataatcactacaagagttgtataatatgactcatggtgacttggtttgacgtggaaaatatacaggaaatttttatgcgaaaaagaaacttaccttcacacaaacattaataataacaatttccctta

SEQ ID NO: 155581 - DNA, 496 bp, Glycine max
  unsure (1)..(496): unsure at all n locations
tcctctgagtcacctgacgcatgcaagcttaaggctntagcgggtagaagatggccattgtcttcgtgttgcagctctaaggagattccttagaaaaaacctgtcagcatggtactcaaacatagccacattgagaacaatcagttgaaacagtggcattgtgcctttctctaataatctcaacaaaaaacaaaatcaagagacataaacactagcattgtgcctttctctaataatctatttctataacgataaaacgcaaaaaataggcataaacgacgaaaaaacacatgtacacatccatataaaaaacaaatgttaaccttttaagagaacaaaaccttgttgccgtcatgagagtgacactgatagaggttgtgcaaaaggtttcaatgtcgatggtgagagagttttaggcaccacacaattattataaaagatccaacagtataaatntttaaataaaaccgaggtacaagagatataacatcgattt

SEQ ID NO: 155582 - DNA, 336 bp, Glycine max
  unsure (1)..(336): unsure at all n locations
taagctngcttctacaagttgtggggcgtcttaatcatatcatggatttattctgttctttcaaaaagtgtttgtgcatatggctgtagcttattcagtttaataaccaaaatgaaaatggtttatgggtatgatattccaacaaagacatgattatttttcaatgtttgggctattggtagggatcccaatcaatgggagaacctttttgagtttatgccatagaggtttatcaaacatgggtagaatgatatggatgtgatgggacaacattatcattatattncatttgggagtggaataataacatgtacaattgtttctctaacatggcaa

SEQ ID NO: 155583 - DNA, 425 bp, Glycine max
  unsure (1)..(425): unsure at all n locations
ctcactgttgctgccgcacaaagctccacggaatttgtctcggccatgctcttccttgcgagccctcttggtttcttgttcaagggctcttgcagtagcttcattttcttctcgtaactcggcacactctttccggatgtctgtagcaaccaacttgaatttttcttgggcaagtcttgcttntcctagttcggtttttagagctcggacttcttcatcctctttcggagcttcaaagttctcctcattgataattttcaacttgaagagccaatctaaccctcgtgtacgaactttcagccattcatgataaccatcgatgatgccattacggatgcccctaagttctttatctttccttaacgggccttcccacaccttatggactctttgtataaccttgaaaccttgtgcgccgaaatctc

SEQ ID NO: 155584 - DNA, 293 bp, Glycine max
  unsure (1)..(293): unsure at all n locations
ccttgatactaagctttccgaagacttacgganagatcttagagttgaccgtagcatatgtatccatagaagccattgcatcactcacccaatactacgaccagcctttgagatgcttcacattcggagacttccaattagtaccaaccattgaagaatttgaggaaattctaggatgtcctctcgggggaagaaaaccatatctttcatccgactgtgtcccctctttgagcagaattgcaatagtggtcaaggattcaccaagaggtttggaccgcataaaacagactctg

SEQ ID NO: 155585 - DNA, 467 bp, Glycine max
  unsure (1)..(467): unsure at all n locations
gtgcaccggatcacgcagtagtatataatgtgtagaaccgagtatcgaactcttggggaactttgtttacttggtaaagctgcggttcagtaaataagtgcctctggatgaaaatntggtgtgtggtatggacaggcatgtaaactaaactattcaacagtaaatcacatgagtagngatgtgtcaagatagataaagaacgtgttggtcttcctactagatgactgatgttattaaagatgttctctacctaacaatgctcttgtggtctatgatgtctcctagactgctaaaccccgatgtctcgtgcatgtttagcctaatcctagcccagcctcattcttaaaaacctcacaatcactcaaaaatctcgtgcaatgctatgcaagatagcttcctcttctagctcagttcttttctggtctctcacagccagaaactctaaaagactccacaccccttctatt

SEQ ID NO: 155586 - DNA, 459 bp, Glycine max
  unsure (1)..(459): unsure at all n locations
catgcaagctngcttgtggggcttatatggaggctggttctttgagcttaaatggagtcctttaatggtgattttccaccatggagatgcagcggacgacaaaggaaaagaggttataggaggcgccatccattaatgaataagccatggaagaaggagcttcaccaccaagatgagccttggataacaagcttggagaggatgcttcaatggaggaaaagaaagagggagagaaagagagaggggggagcacgaaattgaaggaagaaaaagggagagaagttgaactttgagttgtgtctcacaagactctcattcatcaaagctaccacaagagttacacatgcttatatttatagactaggtagcttgcttgagaagctttcttgagaaaactcncttgagaagcttctttgagaaaacttncttgagaagctagagcttatctactcacaccca

SEQ ID NO: 155587 - DNA, 177 bp, Glycine max
ctacagtagttaaaagactatgtgcacgattgaagcgaaaatacaaagaaattttttgcgaaaataaacccttcattcaaactgtcaaagcccatgctctatatagaccataaaaaatgatgtactatcgggccgccctggaaaaccctctgcgtctacaactagatcatcatcacc

SEQ ID NO: 155588 - DNA, 427 bp, Glycine max
  unsure (1)..(427): unsure at all n locations
agcttacaaaaagacagacatgtagactatgttttcatatanataaaaatagcagtgcaagtgatagtacgcttacgtgagcacacgtattttgttaatggaataccaaatctgtgaaccaaaaggaccactacttgaaactttgtagaattgcagatattcgataatactaataataataatagtaataataataataataatcagtcatctaatgctataagaacaatgattagctctgctgtttattaatgtagagcgccttttcatttgttaccacacacgttccatcatatatagtctctttttctctctcctccttcaccactcaaatcttatctcttttgtaaaccaaattttgtacttgtctgttcaaatattcctttgaaaggaaattctttttttttaatatatattcacctcccat

SEQ ID NO: 155589 - DNA, 140 bp, Glycine max
tgaccacaagtggacctggagatatgcgcggggtcacgaaccttgcggcaatatgtggggtgctattgccaataccaagcgtgagcaatcacgaccctagccgggcatagatattcagtgagaacccgatacgtacctaa

SEQ ID NO: 155590 - DNA, 219 bp, Glycine max
  unsure (1)..(219): unsure at all n locations
atttcaaaaagaacgacggaggtagttaaggtctgatagaccatacacgtctcctagcgatatcaaattatgtgggccattaactctatcatatgctgacaatagcctataagcccatgaatttcttccggggcggagtaagtgttcgccactcccntggccttggctaacaatcggggaagttcttgactcttgttcaaagtaagagcaaacccatcc

SEQ ID NO: 155591 - DNA, 499 bp, Glycine max
cttgatggtgttgagattaatcacatgtgtgtcatcatcatatagggggagaatgtgaatgtatgtatacatgattctgatgatgtcaaaagaagaatcaaacaaggctcattttgcttcaagattaatacaagattgtttcaacaaacaaagccttgattcaagatttcttcaagatcaagccttgcctcacaatgaaaggtttcaagtcattcaaggcacatgtaatcgattaccaatacatgtaatcgattaccaatggtttgaaagtgtgcaatcgattacacatcatatgtaatcgattacaagagactctgaacgttgggtattcaaattttaaatgaagggtcacaactgttcaagaaaaacaactgtgtaatcgattacactaattctgtaatcgattaccacagaggattttcaaggaatattcccaacagtcacatcttttcattatatttgtgaatggccatcacaggcctataaataggtgacttgg

SEQ ID NO: 155592 - DNA, 445 bp, Glycine max
  unsure (1)..(445): unsure at all n locations
agcttctatataagctgaaccattttatcaataaacacaagttgagttttattcagaaaattagagtttatctcttttatcttagtgagagtgattctcctaaattcttgagtgattcaagaacaccctggctgtatcaaaggactttcacaacctttgtgtgttgccctcgctggaaagagtgattctttccttcctatcatctccacccttgttctttcaaaccacaattccagaaaatccacctctgtccaaaattatctcgtgaccataactcccattttacacactcaaattaagtgattcttgagcctaaattgaatttcaaaacgagacctttcacctcgttttggaatcacctcatttggagccctgtagcttccgttattgccatttctatatntctgtccagccaccacttaacctacgttntaccattccattc

SEQ ID NO: 155593 - DNA, 469 bp, Glycine max
  unsure (1)..(469): unsure at all n locations
nnggcttggtttagacatgtgtgatacatgatgtgtgacttgtacgattngatttgagcaagaacggatgaggggaagtgtgattttcgaaatctgcacttatgcagaattttgctgtcaaaataggtgcagcaggattttagcttggtgcagaaaatgcttgtgtgtggttggctgtggaaagagtagtacagaatgagttctggatgtttgctagtagatcccaacggtcaaaatgtaggcttatgcactatagacttccagtagaattttggagtcgatccaacggttaacgaattggatcaaaggaattgttactgtggtctttaagtgagaaaagctgtgattntggttgatgtgtcgagcagagttttctgcctctgctctgttttgcttggctgtgatagcttgagctgtttgaatgttgtanatcttggatgttgtggacgcttgagaggattgatgggga

SEQ ID NO: 155594 - DNA, 467 bp, Glycine max
  unsure (1)..(467): unsure at all n locations
agcttcctgctgtgccaggatcaacagtgaatcttgacaacctgtttggtctagaaggattattcgattagaataccacttgcaattacatgctattaagttgtagtaatgttttgattgacactagcagttttctataaaatattaacctacagtacaaaaataaaaatctaaccgcacatacattacattttttacttgttctgttttaatttttatttgaagttatcggatttttgtaatcgctcaaaaaatgttgaaagactaaaataagggtaaaatatgtttgaggtttatgtaaaattttaaaatgattaattttttttattaaaaaaatatatttttgttgatttttagtggtaattttgttagatgatttcttaatataattttatctttntaaatacactctaaagacactaaaaatcatgggtgtttcattntttcatctaatcttattagaagtg

SEQ ID NO: 155595 - DNA, 449 bp, Glycine max
  unsure (1)..(449): unsure at all n locations
tattgtggtgggatttntagaaccaattaagtcctagatttttctatgtttttccacatttttcttaaacttctatgccacatcaataattgcactaggcataagaagttcaagaaagctgtggaaaagcataacaggacttgttgaagaaagcatggaagttgaaatcctgaagcagccaaatatatagcagaattaattgaattatagaggagtggaaaggagagaagaggaagaccctttgagcttgctgtagataagcaatatcaacatttcaacatgatataaagataagatcaggatcagggacagtggggctgcattgcaatatgaaaggtgcagccaggcacagttcattcacaggtttactgcaacatcggcccaaaacttatagtgtgcacgcttttcttgtgagtgtcctaaaagggtggatcggattggatttcatg

SEQ ID NO: 155596 - DNA, 472 bp, Glycine max
  unsure (1)..(472): unsure at all n locations
agcctgtaaanaggtccataaaccattgcatgacgtacaatactcgggagaactagttactgtagaagaaaaatggtttactcttattattatggttgatcaatttagactgcttctgggggaaaagtcacaaaggtctcgtgacacaaaagtttgtgtttatatctctcccacagtcccactagaaaattcctagagagaaccctaaccccttctagggtggaaaacttcaataggtctcctactgtaggaaacaaatgtagtccgtttgatatggtctctttacaatcaagagctaagataaatgagggactaccatagacatcttgtaccggaataaattttaaaaaataatattagagtcctcttctcctttcaccgaccctcaccaatccaccctcttcaataccttctcctccgccggagaataataaagcatgtttttcttctgggtttattatgaatttacata

SEQ ID NO: 155597 - DNA, 403 bp, Glycine max
agacgatcgagtttccgagaaccaaaagggtagccacgggaatgacgcgcacgcatatagagtcagagaggaagagaagaaagagaaagacctgaaaatgaaagtagcggctggcatgatttttctgtgtctttctatgataatactacaaccttgtcattatctcacaccggattttgttgccccaaatacgggtttaattagtttcttgctcattcattgtttgtttcttcttaatgcatatctgaattttctccaccctttgatattaaaaaaatattaaaatgaataagcaagctagttgtacgacattaagatagtcaaacttaattaaacgctgtggctggttggagagaagcttatgaacatgcacctatggatgaccaacttctcttcctccacg

SEQ ID NO: 155598 - DNA, 452 bp, Glycine max
  unsure (1)..(452): unsure at all n locations
agcttgtgtctaactnttatctgtcttctttattatttaaaatatatnttatccacttcaccctctttaatatttatataaggttagttttgtcatttcacaaatgtacctcttcctttccttatcactttccatccaaacaaacaggagaaaagaaagttttaactttctttccttccacttttccttgtaccaaacaactaagacaatccttccactttctactatctttctttccttccactttctttcctaccactttcttttccaaaccaaacatagtgttaatatctttgtgagctgtaaatactaattaaaactttcttttaagtggtgaaattaatcaacatacaaaaggtcagtgtacaagttgtcatagttgttggtaaatgatgactaaataatcaccacagtatgactcaacccaatagagtatagattgtaaaaatact

SEQ ID NO: 155599 - DNA, 465 bp, Glycine max
agcttctatgaagatataagataattgggagattcaatgtttaaaaaaattaatggaagccttttgggtttgtcaaaggctgtagaaaattttgcttatgattaaaagagaagtgatgtacttgggaatatcataagaggattttgttttataataatattaataatattttggaaacataaagtatctcaatagataacgagcaatgtgagttttttattatgtgacttttacctacgattaaagcatataagtacaagtaaatggtttgtatctaccgtcactcaatggtaggcataagttaattgatgtaatttcatgtggagtttgtaggtcttggatcttcttcatcaatggagtttcttgtttcttaaagatcaatgacagcggaatggagaaggaagaaagatgattggagatgtcacttcaaaaaaaagatgagtcaagaataagttcactatcata

SEQ ID NO: 155600 - DNA, 120 bp, Glycine max
agacccgggaaaccgcaagacccgcctgcattaaggatattggaacatccctaaagaaaaatacccgtcagcctgaaagaagaaagaatatggaaacgcccatgcactaaaccgtaaaag

SEQ ID NO: 155601 - DNA, 390 bp, Glycine max
agcttaggttctaggagagcattctttcatataataaccttcacctttttattcattccttccccatacttgccctttttttcttaggcacttagctttcatacctgaaattttagcatacacacttattaactttatttatacttacatttttttaagcacagaaaacataatcagtgtgtatatactattttctttacgcatttcaatccttacccaatgcctcccccaaatttgggacaaatttaccttgataatacctcccccaaatttggaacaaattttccttgaaccatcttctgtggataatgctctcctacaacctaaaataaggtagcaaacaatacaactgaataggctcaaggttcaatcaatcaatcaattcattca

SEQ ID NO: 155602 - DNA, 356 bp, Glycine max
  unsure (1)..(356): unsure at all n locations
taaggtctatntccatattgaatatgaattagtgctttgaaatttcttttatcaagtccatgcaaaagcatctgaattcatttgggttttgggaaagtccttcattgttttcattctcaatgttttcaaaaaaaatcttttgttgtgttctgatctaaaaataagtttcaataaaatactggttgtttgattctttcaaagcatgttatgttcaagaaatttgccatgtcttcatcttcctcaactctttctccatctccttgggcagctccttgagcatctacaggtcttgcctcctcctgaaaaatatgtatgtcttcatgccatgcaacaatggctctaaactactcgggagt

SEQ ID NO: 155603 - DNA, 473 bp, Glycine max
  unsure (1)..(473): unsure at all n locations
agctttcaccccataattctcccaaatttgggaaaanttgctttgaaccaaaatttccttttatgaatgatgctctcctacaacctaagacaaggtagaaggagataaactgtataggctcaaggttcaatcaaacaatcatactttcagctcaaaatgggtgcaagggataaatcaatcatgcacaaggtaagctttttagctaagtggctatcttcaatcaaaacatggccttcatccttttcaaactcatgtattcattccatactcaaagattcatgcaaaaaccattacttactgctaatcgttctctcacaattaaagatcacactctcaccgggttgcgattaatgcattccttcacaatcaacctgacaaagcaactaacattnttagtcataatcctaattccatgttctttctcttctaataactgcatgctcattcaagtcatatgatctgtgcatttcagt

SEQ ID NO: 155604 - DNA, 441 bp, Glycine max
  unsure (1)..(441): unsure at all n locations
tataggaagtgaacggattagcatgggcagaaatgtctctgtattgattgagaaatctgttcctcaaattcctgagaaatgcaaagatccaggtacattcagcataccttgtattatagggaatagtaagtttgacaatgccatgctagatttaggagcttctgttagtgttatgcctctgtctatctttaattctctatctctaggtcccttgcagtcaactgatgtggtaattcatttagctaatataagttgtgcctaccctgttggtttcatacaagatgtcttagttagagttggtgaactgattttccttgttgattattatatttngaatatggaagatggattctctcaaggatcagttcccatcattctaagcagaccctttctgaacactgctagaactaatatatatgtttatgcatgcacactatccat

SEQ ID NO: 155605 - DNA, 352 bp, Glycine max
  unsure (1)..(352): unsure at all n locations
ctgcaagcttgcattaacaacacaaactgtgttattatctntgaatcnccgcactactcgatttggggggttatttataacagttctgttatcttttttattattttgcactaaatataactctccttttaattggctctggctgttcaccgactctagtgattcactcttaattttattagacgaaggttttcttagacagtcattagtttgtatttttaagagatttgttctgcttttgccttgttcacgtgacttctattactgttgaagtgttcacagacttcgttatggagaactacggaggtggtgcccttatgaggaatataatgtttgagagcctcttgaatac

SEQ ID NO: 155606 - DNA, 471 bp, Glycine max
  unsure (1)..(471): unsure at all n locations
tactcagctctcggtggaaaccgcagggggcaatctgcatagttaggtttttattnccatctcatcgactcgatgaaaaagattggcctccaagaatccattcttgatctgcggttcctgattatccgcataacctcctttcgagacaagagcctgtccacagcatataagacagatcagattctgacataaagaactatgaagattgaagaacattatggcgcacctctaaatacagctcaacgggacctgattcattccctgtgaaccacccttaagcatagaccaacaattacacctcaacaaaactggcatcagcaaattttaatcatagagcttgctccacaactgctgctacacgaacgatgctaccctcactcacctgaattcaagctgcataattacaacccaagcctaaccatgaatggataataatgtcatctctgtactcgacacttcatcaccatcata

SEQ ID NO: 155607 - DNA, 455 bp, Glycine max
agcttgactactgtggactgaacatattcttatatgaaatgaagatcaatgtcaatgtgcttggatcgttcatgatgagcagggtttgaaacaagacttatagcagatctattatcacaaaatagcatcacagagggcacatcaacttcaaagtaaagaagtaacttgcttaaccaaacaatttcactagtaacaaaagacaagacatgatattcagcttcggtggatgattttgaaacagtgggttgtttcttagaacgccaagaaagaaggttgtttccaagaaagacacaaaatccaaaagtgtatcttctggtatcaacaaagctgacccaatcaacatcatcaaaggtagtgaggttgagagagttctgagcacggaaaaacaaacctggtctacgagcagatttgatacactgcagaagatgatgaataacatgtaggtgaggaactct

SEQ ID NO: 155608 - DNA, 338 bp, Glycine max
  unsure (1)..(338): unsure at all n locations
nggtaacaaagatgacaatgaattatgatagcgttgtagctgtctatggcaaangcgcagcggttttggagcttttcttttaattaactgtgagagtgatctgtgaattcnaattaactcagatttgaatcaacatgctagcatattatcaattgtgttggactgttgttactctgccattataaactatatcagatgttcactaaaacttcacatcctaaataatgatccagataaattttagatctgttattccgtatacaatactgtataatcaatttctgcaacttcataaattctaatattctcaggttgaagaaaagtacgaataccactct

SEQ ID NO: 155609 - DNA, 461 bp, Glycine max
agtcacctgaggcatgcaagcttatacatggagtcttacacaagttgcatgaatgctacggactcaacggtttcttaactgcagtaaccaactactcagtggcttaactaaccgcccctaggttcatacaaagtgtgacctaactatacatgcatgcagtcacgtgcctatacgtactcctccaggtgccttggtctcgtgatactccttcgtggtcgtggctcgtgtgttgcatgaggtggagcttcattcatgttgctgctgctaacatcatccacccctgtgaaaaccaccttgtgctcaagatggtgggcattgcaaacatctgtccatttctcccatgtcgagtcctctagggccaaccccatccactgcactggtactattcgtgtgggtgggtgagttgaagggtcaaagcacgaatcaaggatggggattgggtctagtatcggatggtggta

SEQ ID NO: 155610 - DNA, 450 bp, Glycine max
tagatgataattataatgacatgaatggcgtaacaaattagtattacaataaaaaattaaagatcttaggagtactaatagagaaaatcaattaatattgcattgaaaaagctaacttgacacttattttagaatgattttttttacaaatagaatacttattttgggatagagtgagtgtttaataaagttagtaaatgtactatattgaataaatgacattaaagttaattaattaaagatactaaatatataataattaattgatgacattaaatatttattgaaaatatattaaatgagttttatcaggcatcatttacccttcggaataatatcatgttatatatctaatgaagggagagagagctctgttattacctatgctagctattctgagtttctcactactataagatgaggatattgtataaaaccttattccttttt

SEQ ID NO: 155611 - DNA, 402 bp, Glycine max
agcttgcttgtggagcttcaatggaggctggatctttgagcttcaatgaggtcctttaatggtgattttccaccatggagatgcagcggaagacaaaggagaagaggtaaaaggcggcgccatccactagggaataagccttggaagaaggagcttcaccaccaagatgagccttggataagaagcttggagaggatgcttcaatggaggaaaagaaagagggagagaaagagagaggggggagcacgaaattgaaggaagaaaaagggagagaagttgaactttgagttgtgtctcacaagactctcattcatcaaagttacaacaagtgttacacatgcttctatttatagactaggtagcttccttgagaagaattcttgagaaaacttccttgagaat

SEQ ID NO: 155612 - DNA, 359 bp, Glycine max
  unsure (1)..(359): unsure at all n locations
gtacgaganatcctatccaagagtggtcccnccccaccccctccattcgcacagaccacttgacaacatgcacgggatctatctcattagcccctgctctggtggaaattgatgcttccatggaacttactgaagaggatcgacttatacttccctctggtcaggctttcattcggaagattgaatatgagaataggccagccttttgctctcattgtaaaatgattggacaccgactagcaaactgtaaagctgtgtctgctactaagattggttccagcaaaaaaaccacagattgccctcccatagttcagccttaaatttctgaattagcgagcatcccagagcccaatgcttta

SEQ ID NO: 155613 - DNA, 461 bp, Glycine max
agcttcttatccaaggaacattcttggtggtgaagctccttcttccaaggcttattccttagtggttggcgcctcctctcacctcttctcctttgtctttcgctgcacctccatggtggaaaatcaccattgaaggacctcgttgaagctcaaatatccagcctccatagaagcttcacaagcaagcttccatccccatcaaacatcaaaatgcaccaaggtaccaaccgaggaggttaactacatgggaggacaacaacgatcgtataataacttcaaacaaagaggtttccaaaacatacatggatactacaaccgagcaggagacaacaaactacaacaaagagaatatttgtgggaccacaccgcaaagttggtagaagccttgaccaaattcaccgaagtggtcatcgccaaccacaaaaacacccaagccacgatcaaaagcatgtaaaatcaca

SEQ ID NO: 155614 - DNA, 469 bp, Glycine max
  unsure (1)..(469): unsure at all n locations
tcttatctaaggctcatcttggtggcgaagcttcttcttccatggcttattccctagtggatggcgcctcctctcgcctcttctcctttgtcttccgctgcatctccatggtggaaaatcactattgaaggacctcattgaagctcaaagatccagcctccatagaagccccacaagcaagcttccatcaagtggtaatcagagcacaagagcttcaagtaggtgctccttaaacctccattaattntatttctttaccttctcttccattgttgtttcttcatttttctccatgtatctcctcacatgtcttgttctaaatgttgttaacatgattctttagagtttccaccgattaaacttgctatagaagttagaattgaatttctatnggttaaatttcttgttcttgttcttgaaccatgaattgtgttgagtttacgttcctntngagtattgtcttggtatt

SEQ ID NO: 155615 - DNA, 394 bp, Glycine max
  unsure (1)..(394): unsure at all n locations
agctntagttagatntgagattatttaattttagcttccttttaaatataggcatttcctttgcccactttgacccgaattatcttgtaatatctcttacattgttttaattggagttaaatattcatggacttttcagatctgaagcagtatctgcatgattaaatgaatcggggtattgcctggcatcaagtcataccctggaatgaaataagacagataaaccttcgtcttaaattccttggtagttacataatacaattttagatattcattgaaaaaaatgttgacttgaaccttttctgaatgccaggaggattgcacaagtaaaagagaaccaatgtcaaattgctgtagaagatgttatgtacttgctgattntttacaagttttc

SEQ ID NO: 155616 - DNA, 316 bp, Glycine max
  unsure (1)..(316): unsure at all n locations
ntatctggcaacatcaaattgtttcttgaagttgaactattgtttcttacctgaaagcacctcctgatccagttaaaaggattttcctaagtgcaccctttggcaacccctggatagactgtgcagagaaaaatcctttaagaatcagtgattaacagcagcatgaagtggtgcaaataataaatccattgcttcaaagttcaaagcaatataaaagatgcaaagagtgatatactcagcgaaatgtgtgtaactagatatggactcaagtaccttgaaattgcagaatgttccgaatagcgggaagatatttatg

SEQ ID NO: 155617 - DNA, 463 bp, Glycine max
  unsure (1)..(463): unsure at all n locations
cacctgcagcatgcaagcttttcaattcattctatgtacccgtggtggttcactatttgnttcatgtatatttgttctcaatttcatttactttttatacccccttntgacgtgcttaagccatttatttaagtcatttctcgcctaatctataaataaaataaatttccaccgatcgcttgaattgtatcatccgttaactttggttaaaatgaattacgaccgttcggtcatgccgtaaccacattgaaaataaaaaaaaagaggtgaaaaataatataataataaaaaaatacccttttataaaataaagcgaaaaatcaatcggacgtgttctctttgggatttctcattcttaattgaattgactaataactaaagtgaaactaaggctaaaatcaaactcgcctagtcaagctcgtccacacaataagtgttgaaagttatcatttcagttcttact

SEQ ID NO: 155618 - DNA, 494 bp, Glycine max
  unsure (1)..(494): unsure at all n locations
cacatgaccactaataagagatacaatatttatttatctctaagcggccctttattctaatacatcctaactagcctaaaattaaactaaataaattagataataaatcttcaagcatccttagtttcaataatattgtcttcgtgctataaaaacaactaatcccaatgaataaaacatgtcacaattataaaatatttctagcaacttagttatctaaataagataattaagataagatgaagccaaataattgaaggaccggagcaaaggtgtaattatggtgactatggttatgactcttgagggattatgttaggttttcaagtaattatcttcatactcgttgtcattgcttgaaggagcacggcaaanagcgataccccacacaaaaaagtaaagactggtttatattatttattcgtatatctctaataaaacatnttttgaatagtaattataaaatataaagtattcnttatttattaaaatta

SEQ ID NO: 155619 - DNA, 386 bp, Glycine max
  unsure (1)..(386): unsure at all n locations
aaatattggtggtttctatcatagttgctcttcttattccgctggaggtacgcattttatgattnttttgttttttttttgtgtgttcatgttacagaagaagcagtaaaatggccaggaaggttattcagtaaaaacttcttccgaaagaagttccttttaccggaagaagctgntctggaagttaatgcttcttatttctgaagaaagtctttcgtaataaagtgtgtcagcttctggaagaacttcttttataagaagttttcggaagaacttcttccgatagtacatactgcttcttccagaagctgtatttttttaaattcttttttggagttgcgttttaaaattgcgaaaaaaataatatatatatatatatatatatg

SEQ ID NO: 155620 - DNA, 409 bp, Glycine max
agcttcataaatgtacagtgtattataaaaatgtttgtttctcatttttaaaacgaatgaatatcaataaaaatataattagttttgtttaataaaattatagtttttaatccaagatgccaattatgacgtctgacgagcgagcagagttgtagaccgtgtttgggtggtggattttgacagggatactttggtccttaaggaaatcccaaaaacgggttgtgtggaggagcttcaaatctaatcagaattattcaaactcttgttactatgccctgaacttgatagattttagtatatataatgtgatgtcataatgaaatagaagacattaaattcctccatgaataatcaaaaacgaaaattgaacttgatgtaatacttcctttagaggtttaatttaagtaat

SEQ ID NO: 155621 - DNA, 461 bp, Glycine max
gttcttgagcttaataaggacctcaatggttattttatccatggagatgcagaggaagataaaggagaagaggtgagaggaggcgccatccaataaagaataagccatgaaaggagaagcttcaccaccaagagagtgccttggataagaagcttacagagaaaacttcaatggaggaagagaatgatgtagagagagagagaggaagtggcatggaaattgaaggagaagagggagagaagttgaactttgaagtgtgtctcaaaagtttctcattcatcaaagttatgacaagtgttacacatgtttctacttataacctagcacatatgaagcttccttgagaagcatggaagggagcatccttgggaagctagaggaagaaagcttccttgagacgctagagagggactactcataccccttcaatagctaagctcaccctcatgccaaaatacatg

SEQ ID NO: 155622 - DNA, 444 bp, Glycine max
agcttgtccacacaaacctgaccttatcaggagtattaagtttattaaataaggctcaggagagattgatcattttatggtgtggctgcaaataattaaccattcaaaagtttttaaaataaactaattatgcatgttcaatcaaaattttgttgtctttcataaaaaaaaatgttaatgggcaaacataacggtatacacaaggggacaaccatttaagcttgatgtcaagcaaaacatcatggcttccaccccacgatgggtcatgggtgcaacccgctgtctcaagtctctacaaacatttgcacagaagttgtcaattcattgcatttataattgggataattgtatctttttttttaatggatctatttccaatttaaagcttattatatatggtgttcattacgaaattacgcctgtattctattatattataaagta

SEQ ID NO: 155623 - DNA, 480 bp, Glycine max
  unsure (1)..(480): unsure at all n locations
tctagcttgcggtgtacatggctattataggggatgtcttttaattcatacttagactaataaaatcacattttcccaattcttctctttgtctttctcattttgtttccattcagaaccaatttttcatatcaggtctagcaggggatgacataatactcaaccgtgttttggaagcactatacaggcgtattttgcaagcccacaaagatcagaaagattttagagttataattgtgatgcccctcttgcctggtttccaggtaactgtgcttaccttttttttataacaccaatcctctttgctgtagacttgaatatttttctgttgtaagctattaacacggtggtctggatgatggtggtgctgctactgtaagagccttaacacactggcagtatcgaacaatntctagagaaaatcactccatattagacaatcttgaagctatacttggtcctaagacacaagaatatatt

SEQ ID NO: 155624 - DNA, 458 bp, Glycine max
  unsure (1)..(458): unsure at all n locations
agcttgtaggattatggggtacccatcacatgttgtatctatgtggcggncgggcgatggtgcacaacaagttttccacattcacaaatcgcgcataaacccaccatcctctgttgcccacctccaactgagctcacgtactcccacgtagcccatctcctcgtttctctcaacaccgggtccccatcaatcctcccaagcttccncaacatccaagtaattcaacattcaaacaacacaaactatcacagccaagaaaatagggcaaaggcagaaaactatgcccaaaacaccaaccaaaatcacagcttttctcacttaaagaccccagtacatttccttcgttccaattcgttaaccggtggatcgactcaaaaattttactggaagtctctagtacataagcctacattntgaccgctgggatctgctagaaaacatccagaactcattctgca

SEQ ID NO: 155625 - DNA, 410 bp, Glycine max
  unsure (1)..(410): unsure at all n locations
tagggatggaatacttacttgttggtgatgaacaaaagcgtttactgaatcaaaaaatgcaaaaaggatgaccctatggctgcaaactcgtcaatcccgtgggtatggcttttgaaaggggggaaaagaagtttttgaatgcaaaaacgccccccctttcgtcattcttataatttggcgcangggtggctcgcccaggcgagctaacctgcacatttttttttttttttttttgaggggaacattaaccatgtcccctcccttctcatggattagcatcttgcctaacttgaacttacttaggttagaattaagcgttgattacttatttttttactttttaaaacaaacaaatagtaaaagaaagctgcaaaatacaaaggatacggggctgccttgcagcgacattc

SEQ ID NO: 155626 - DNA, 370 bp, Glycine max
agcttgaatcggacatccgtgtgagaagttattattatctgaatttctcaagatcttccgttgttcaatttcgagcttctcgacatattatgcacccgaatcggatatccttgtgaaaagttatgactatttgaattttccgagaatttccgatgtttaatttcgagcgtatcgatatattataagcttgaatcggacatccgcgtgaaaatttatgaccatttgaatttctcaagagcttccgttgttcaatttcgagcttctcgatatgtgatttgcctgaatcggacatccgtgtgaaaagttatactagttgaatttcgcaagagctttcgttgttaattttgagcgtctcgaatgtgatttgctg

SEQ ID NO: 155627 - DNA, 471 bp, Glycine max
  unsure (1)..(471): unsure at all n locations
tgcgaagtgggtggaattcctagagcaatttctttatgttatcaaacataaaaagggaaaaggtaatattgtagccgatgctctttctcggcgtcatgcattactttctatgcttgaaacaaaattgattggtcttgaatgtttgaaaagcatgtatgaaaatgatgaaacttttggagaaatttttaaaaattgtgaaaaattttcagaaaatggtttctttagacatgaaggctttcttttcaaagaaaacaaattgtgtgtgcctaaatgttctactagaaatttgcttgtttgtgaagcacatgaaggaggtttaatggggcattttggggtccaaaagactctagaaacattacaagaacattnttattggcctcatatganaaaggatgtgcagaaattttgtgaacattgcattgtatgtaaaaaggcaaagtctaaggtaaagcctcatggatggatactcca

SEQ ID NO: 155628 - DNA, 306 bp, Glycine max
  unsure (1)..(306): unsure at all n locations
ctgcagcggatgcactttgagagcctttctttatccctgactgangagctgagcaccaacgttctaaagtcctacagaggcctactggtagagcattctggcataatgagttcaaactcagagcaaatcagacatggacccattgagatccgcacatcttagaagatgacgatggtcaaagcaagaaggcagaattagttattaaagccctgttaatcctacttgctgaagtgaaaggtggaccctatgtcataaatgattgatctctagaacacatgaaagtcggatgcactctaggaaagactt

SEQ ID NO: 155629 - DNA, 443 bp, Glycine max
  unsure (1)..(443): unsure at all n locations
attaatatatatgtgaggggtagagggtgtcacaacttccatgtgaactgaaagaaacttacagttttattatcatataattgggtaggtaataggtattcgttggtgaatatcatcccctgcatcaattgctctcatcaaggttctataaaatgtgttgtgactgtgatttacgccgtaaaatcaaagttttttcaactgtgtgcaatcacaattgagatcgtgtcgatcacatttgtttgtgatttgccatgatatcaacaaacgcgatcaaactntaacacaaccgtggtcagtatttaaatctctggttctcactagctacaagttaaatgtactggaacaactgaacaatgaacaagatttatgatcagcaaattacgtgaagtgggagtgacatcacgatctccttttctagtgatataagtatatgcttcacatga

SEQ ID NO: 155630 - DNA, 374 bp, Glycine max
  unsure (1)..(374): unsure at all n locations
tgcattggtagcatgtccatcgttaatatgaaatacaaataccttcaactttatctgccctttggttcataaagtgtatccttctgaattntgactttgttttttaccaccttccagatctatgatatttttcagctgctgccacctaagatccaggttggggttttctctgccacaatgcctcctgaagccctggaaatcacaaggaagtttatgaacaaacctgtgaggattctagtaaaacgtgatgagcttaccttggaggggatcaagcaattttttgcaatgtagacaacgaggactggaagctcgagacactatgtgatctttatgaaactttggcaatcacccagagtgttatctttgtgaacacc

SEQ ID NO: 155631 - DNA, 478 bp, Glycine max
  unsure (1)..(478): unsure at all n locations
aaactcagcttcgaatgtattttggacaataaataaaaagttctttttcttctgtaaagctaacgcggtgagcataatgccgacaccatgcaatcttacacattgttttcatgtcgtcactatctttctacctactgatactttcattagtttactttattcgtcgtcccgagattcctgaaatgaaataatgatgcaatttttgttaacacggttatggaaattaattggttaaaacataaaaagtttttatcatttttctccaatgacgaacttgctataacttgcaacttgcaagtatgcccaaacctccaattgatgacttatagcatcaaccgngnnaatttatctgacttggattatcttggtagagagtataaccccttttattttgctgtaacattagctcaccttttagccttgttggatttatcttcttaagtagcttaaccgctattatcgtttagcagcattccat

SEQ ID NO: 155632 - DNA, 444 bp, Glycine max
agcttgtcacatggaataatgtacatacaatttattattttgtaaatcactcaaatcatcattgtaattaatttcaatatcaattaagctttgataaagcacccaaacacaaaacttactatagtctgagttacaaatttttagggtgttacatacagcctagaaaggtaaacttttgagaaggccaggtaagttgcccttgtcaattttgtggtggtgtatattcccacttacacaatgcaattgatgggtgccacgacaaatttgtgataagtaggatatgttgggcattagtttatttggagtggaaatctagaggggagcctccatctggttaagtgggattctattattcataagaagaggtctaggggttcgagtagctagacttcataatattgctttggatgaaagcttacttggatattctccatagccctaaca

SEQ ID NO: 155633 - DNA, 476 bp, Glycine max
  unsure (1)..(476): unsure at all n locations
attcccattgccaaaatctctgcagnttccagtttttttagcttgcatctcgttaatgtaggatttactgcaattgaccgtagctgtgctgagcccttttcaacttgtaactcgttgaatacattcctttccgcaggatgcaaaagtcctctgcatatctatgccaaccttcatagtttgacccttgttaatgccactcgatatattgctcacggaattgtgctttctactcctaaccttagatctctcactgatatgtcatcttatttaccaactctatgtatgcaatctttctttcctcacacaagtaaaaagtgatgtgtaaacctattctcatactcattntgagaagcaacatttagcccttattagtttgctgtacgtgctcgcagattatgtaaagacactgatactctctntgagtacccttgagattataaattaagttactttattctattctacttatttttact

SEQ ID NO: 155634 - DNA, 441 bp, Glycine max
  unsure (1)..(441): unsure at all n locations
agcttcttatccaaggctcatcttggtggtgaatctccttcttccatggcttattccctagtggatggcgcctcctatcacctcttctcctttttcttccgctgcatctccatggtggaaaatcaccattaaaggacctcattgaagctcaaagatccagcctccatagaagccccacaagcaagcttccatcaacttggaagtccgattccgatgcataatatatcgagacgctcaaaattgaacaacggaagctctcgagaaatgcaaatggtcataacttttcacttggattccgattaaggcgcataatatatcgaggcgctcgaaatacaacaatggaagctctcgagaaattcgaatggtcataactttacatttggatgtccgattaaggcgcataatatatcgagacgctcaaaatngaacaatggaagctct

SEQ ID NO: 155635 - DNA, 345 bp, Glycine max
  unsure (1)..(345): unsure at all n locations
tcatgagagagtcaaagatcaaatcgacaggaaaaatttattctatgcttaacaagccaacaaagggagaaagaaggttgtcttcgaacctggagaatgggtttgggtgcacatgagaaaagaaaggtttattgaacaaaggaaatcaaagcttcaaccaaggggagatggaccattttaagtgcttgaaagaatcaatgacaatgcttacaaagttgagctacccagtgagtataatgttagttccaccttcaatgtctctgacttatctctttntgatgcagatggagaatccaatttgaggacaaatccttctcaagagggagagaatgatgatgacatgac

SEQ ID NO: 155636 - DNA, 483 bp, Glycine max
  unsure (1)..(483): unsure at all n locations
cttagagtcatccctgagacttctcatactttcgaatgaacatcatataaaatggtaacaagaaatacctccaaattaattaatgttcttaatgaagatagtgatcaaaactcagaaaacgcatccgagataggttcagtatccggaatagacataaatccaataaattccaaacactggaaaacaccctccaaattatattatcaaagaccaactgcccccgaccttctactataagaaagaggtgaaagtaattttttttagtacaaataacatctatgagtggaatatagatgcccaaacggagtataatatcatgaatacactccaacatatgaccatggtagccacagcttaccaaacatcccatgaatgtcaggaagaaacaattattgatatcctagtagcaggatatttcggaccagttgaaggttggtgggataatcatctcactaatgacgaanaataataaatttacaacat

SEQ ID NO: 155637 - DNA, 343 bp, Glycine max
cattctatgcacccttacgggttcattcttgcttacatagtgtgatcttcatgcgtctaccagcagtgatctttttctttgtttaaagcgaggttcgaccgatcgtttaagccgtaatctcactcaatcactgttaaaataaatttgaaccgatcgtttgtgttgtagtctcgtataatcaccatggaaataaaattcaactggttggttgtgctgtaacctcggttaatcattgcataaataaatagcagccgatcatttactttgcgcgtcctctattaatgagttggaaaattaccaggtgaaacacaagctaaaatagactcataatcaagctgtttgt

SEQ ID NO: 155638 - DNA, 477 bp, Glycine max
  unsure (1)..(477): unsure at all n locations
gaagttgaattgttatgtagaaatgtctatttcaattggagtgtcactattcaacccccntttacatgagcaattgatccaccttattaaaggccccaacttttcacgttttcacccttggtcactaagacataattcagccaagtcatatatttaggtaaaaatatcggccaagtgtgtatatctttatgaaacttatcttgatggtactagttataggtgataagaatggtgcaatagtaaggattgaaaaggttgtgaagggacaactcttattcttcctcattgaatgttaagtaaggggcaaatatatgtttgtgctctctaacattatctagaataaggatctgcacactgattgtagttcaattgttggagaatcttatgactgttcgaaaggagtggtgctaataatttcttctttgtgtgaggactccttatgatctatagaatcattatggtttcgggaattaaatg

SEQ ID NO: 155639 - DNA, 441 bp, Glycine max
  unsure (1)..(441): unsure at all n locations
tcgcacatcattcgcatgtatgatatccactctacaaggtnntgaagagaggagaccttcaatcctataacgcaacatggcggacaaaagtgggaagttaacttgaatgaccatttttgtcaatgcggaaagtattctgcgcttcactatccatgttcacacattaatatttcttctttttcagtctatgtaagttcacactaaaattgaaaaaaaaaacttagagggaccaaattggaaaattacacacttatatgaaccaaaaatgaacaaaacaaaatccatgcataaaaattgaaaaaaaaaatgcaaacttatgggaacttaaaataaataaaaaacttagagacactaaaattaaaaaaaatgcgaacttatgaggacaaaagcatatttaggcctaattttcaactgaattgcagtttattaataatgacaccc

SEQ ID NO: 155640 - DNA, 187 bp, Glycine max
aaaaccaccgaaacagccgcgttctggggggggtttttttaccccccacactgcacgcatagtgagtgccacctgctccgatgtgcacaactacaaacttgtatcaatggaaggtgagtggtggacaatcgctccgttctatcatagtaccgccaattacgtgaacgcacaatcagttgtatgtggc

SEQ ID NO: 155641 - DNA, 441 bp, Glycine max
agctttatgggactatctaaaggattggcaagatgttgtgcttcatcaacttggttagccatctacaagaattgttggtctactggaggatgcagctctgctgacattcttgcggcatttgatgacgcgatatttgatggggttgacattctttcagcatctcttggctctgatcctccacttcctacttatgttgaggacgcactagccattggttctttccatgctgtaaccaaaggaatttctgtggtatgctctggtggcaattctggtccatatccccaaactgtcataaacactgctccttggcttgttaccgttgctgccagtaccattgattgagaattttcatctacgattatcttgtgaaacaatcaaactctacaggtacttcatcaattcatctttgtgtgcttgctgtgagttacactttaccacaaa

SEQ ID NO: 155642 - DNA, 472 bp, Glycine max
  unsure (1)..(472): unsure at all n locations
ttttcttcttaccacaatgatcttatatattattatgttcaaatcaaatataattgttttttttattcattcaacgagtgattttgatcataaaatttaaacttaaattttgtttaagaatattaaattcgagttaagtattgttcaaatcaataacctattaatgtttcttattataatagaattattagtttttaaaatagagttgtagttccaaaaaaagttaaattatataaaaaaaattcatattaaattttagtgtgcttttaattctaggtacaaattatgattttatttatgagtctgattttgatatacattattaatcaaatggaaatcatttttaagtaatcattatttaatttttaaagacaattatatgtattgatctataattgaataataataataatattaaatgcttttgtattgtcagtattttctttagactattattagtgtatnttaatat

SEQ ID NO: 155643 - DNA, 440 bp, Glycine max
  unsure (1)..(440): unsure at all n locations
accttggccatcatttctgctccttatcgtttaaggagagcattntcggggtcgtgaagtgcgtggctactaatgggacttctaaaattcaagtttgggtggacttctttctctcttaaatttcgtgggtatggggttttgggagatatgatgggtggttttgttagttttctgttgcgtgatgattatttgtgaaggaacttgttgaaagcttgttgaaattgccatgtttggatgagttagacatacccattctgttttagggttttgtgatgatgtttatatgctgaaattgcctatggaaactgttagagatgaagggtagagttaacctacggttagaaagtgagaatgtggtgttgtgagtggaaaaagagtgaggctttgagagttgacaggctaagtctgaattctgtggtaaatggagattaaaatgagtt

SEQ ID NO: 155644 - DNA, 468 bp, Glycine max
  unsure (1)..(468): unsure at all n locations
ggtatgccatgctgctttctntgctntaaatagttgttccattcttttatgatggaactatagtaagtgtatcgaattgataaagaaagaacaagacagtgaaaatgaattgtagatttcaagaattgatcaattggcatttcatgtaagtaatttctaatattaggaaccaccaagaaagaatacaggtttaatttgttgaagataatcattattttaaaaatcaaattggacatgccagcatgattagtccgatcggaaacttgttaggtgatcagtctattaaaaatagtgtgatcaagaagttgagatcaagtttcatttcatatacgaattttaagttgggagtaattcatttatctttntttacttatattttccttcaaacacaatctggttccagatgtagatagatatactaatatgtacttctctctcaacaggttcttgttgatgattaactctttc

SEQ ID NO: 155645 - DNA, 248 bp, Glycine max
  unsure (1)..(248): unsure at all n locations
ttttttgtgccaaagaatgggngaaggattctgtggagaatcaaggtttcaaaggggtggatgaaagatttggaaaatgcttctcccggtgaatctggcactcatttggaaattttttggtttttgaaatttaaataccccgctctttggaatttcaatttggtggatgggggatggaaattgaatttggtccatgaaaaaatggtttgaaaatcgagtggcgggtgaatggttggtttttcatttta

SEQ ID NO: 155646 - DNA, 460 bp, Glycine max
taagtccttagtgatccatattgtgtatgtgtgattgtattgtatatgatgatgcgaaaagttggcgagtataacttcagtcgatttaaatgaaatacacattaccgaaaacacttgtgtgcttgagagaaacactatctttgtgaggagtgaaacatagttgatctttatttgatacctgtcatacttgctaacctatatcaaaacttgagtgcattctttacatgatcccattatgaaaactgtgacaagtgtgaacttgaggattggaagctaaaattgttttaaaagtacgcaattatctcagctgttgtgattcattgcattctaaacaatgtcattaatctaacttagtgtagtatgtgtatacttttgattgggacaagcaaagcttaaatttggggactttgtaatgttttctactaaattgatatttaatacatttcattactatttccta

SEQ ID NO: 155647 - DNA, 457 bp, Glycine max
agcttcaatggaggagaagagaagtggttctttttattgtgtctcacaagactctcattcatcaaagttatgacaagtggtacacatgtttctatttatagcctagatcactaactaaatgaaagcttccttgagaagctagagcttatctacacacacccctctaatagctaagttcactttcttgagaagcttccgtgacaagctagagcttagctacacacacccctctaatagctaagctcagctccatgagatgagaagctagaacttagctacacacacccctctaatagctaagctcacccccatgccaaaatacataataatacaaataagtccctacttcagagactacatcaaatgccctgaaatacaagaataaaaccctatactactagaatggcctaatacaaagcccgaaagaacgaatacctattcttatatttacaaagac

SEQ ID NO: 155648 - DNA, 422 bp, Glycine max
ttggtcttcgccagtgaaaggatcaatgtgggttttttaaaggaaaatatgatcatcctactaggacgactgagaaaactggggcaaataaagagggtgagaaagagggagaaacccatgttgtgactgccattcctatacggccaagtttcccaccaacccaacaatgtcattactcagccaataacaaacctccttacccaccacccagttatccacaaaggccatccctaaatcaaccacaaagtctgtctaccgcacttccaatgacgaacatcacctttagcacaatccaaaaacacgcgccaagaaatgatgtttgtagcggaaataaaacctgtagaattcacccaaattccggtgtcctatgttgacttgctcccatgtacactcgataatgcagtggtagccataaaccctgc

SEQ ID NO: 155649 - DNA, 425 bp, Glycine max
  unsure (1)..(425): unsure at all n locations
agcttacaaatctgtnttatatccaagcccatttcttttattaaatatagataagataagataagatctagatgaaatcaaatctaaataatatctagataagataaaatttggtagaataaaatagtctgctctcttcaagtccaagcccaattctggattcaagcccaattgcttataattctcctgaaattaaattaaaaacacaaaattaatccagtaggcccaaatgataaaactgcataactaatttgacaattaagactaatcagtaattaaaaaggtgaaaaaagggttaagaaataggagaaaataatggcacatcatcgtctcccttttaaatggcgtgggcgtgtgcggcttcacgtcataccagtgggggcatttctcgccctcgtaggaggacgcgacctttcactgctttt

SEQ ID NO: 155650 - DNA, 492 bp, Glycine max
  unsure (1)..(492): unsure at all n locations
gacagcgtacagaccattttgcactacaacgggagatctataccgcgccaccacanaacatcgagatgcagatctggaggcaggcttttcgattnttcttttttcttgcattttgagatcctaatatgttgttattcaaggctttgatgttttttgtttttgagatattggtttttggttgagaagtatgggaggaggaagatgaagggggttgtattaattttcaattttagattctatgggcgtaagttattttcagatctgattctgttgcaattgaaggagaaaatattgaacacggaaatacagttgtggtgttatagtctgatagaggtgggagagggaagcacactgcaacaaanaaatttcatatataatttttaatntattaattattggagtcatgtcagcagacacgacacatgttcatgtaaagatgacacatttaatccaatataatgtactaaactaacaaatcatcaacagttaact

SEQ ID NO: 155651 - DNA, 475 bp, Glycine max
  unsure (1)..(475): unsure at all n locations
tattgaatatatgtggccataccttgaaaaggtatgttttatttatatttcggacaattatcaagtagcatgtattntttcttctttattgtgtgattgttcgattgggtcttttcatttacgcaatatgcaagactgcaaagaatattgcaaaaccaataattgatgagcaaataccgaaatataaaattgattctgttgagtttgaagagctcactatggtctttgccgccaacttttcaaggatagtttatttagatgtggtttattattagataaaaactttttactggtttgcacaaataatataaatattaccaatgtgtaaactatgataatacctaaatttcactctgttttatcatctgttaaggatacacatcacaatttataaattatttttggttctaatgatacatcatgttttattgcgagagatgtattaactaacaataacatgatggttttatttgaa

SEQ ID NO: 155652 - DNA, 440 bp, Glycine max
  unsure (1)..(440): unsure at all n locations
agctntgaaaaatgctatgtttcaccttctcgtttatccaatccactggcttagcgagcgtctgctaagcgcaacactcattggctaagcgcaaggaagaatctggaagaagatgagctgggcaggttcgctaagcgcaccgcttcagtccacccgctaagcgagaaaggtacgcgctaagccgaaattcactaatgtgcgctaagtggtccagaattgtgctaagcgctcgagcacgaacaaggccacctatttaagcctgacattagattttgtgaagggagtttgggctgagagctgaagcttngcatgtctagtgattctagagagagaaaggtccaagttctagagagttttgagagaatttgctgtgtgaagatctgcagagaccatagcttgaaaaggaagctgttctgagagcttaagatgagtttgtgagt

SEQ ID NO: 155653 - DNA, 489 bp, Glycine max
  unsure (1)..(489): unsure at all n locations
ngatcaanacanaatctatacattccaatccactcaattcatactatttctcattcaaatcaatcacaacacttcatttcatacaaaatcaaaccactgaatatcatattcaatcagttcattgttcaatcatgcttttgtacaagctactactacagacaaaataactgaaatttaaaactgaaatttaatgactgaaatttaaataactgaaacataaaggataaactaaataaactgataaaaataaactgttcaaaatgcaaaaagataaagatcctgtcaatcctcctgtgggtgatcgtctgcatgctcattaagatccaacactagagcagctggtggagcctgtgaaatgggttgctcttgctccaatgctggtgcagatggcaaggtatcctcagaaatatgtgtaggggatggctctggaataagctctggtgaatgtacttcctcttgagccacaactgaatcagacgtaaatgaaaa

SEQ ID NO: 155654 - DNA, 447 bp, Glycine max
  unsure (1)..(447): unsure at all n locations
agctnttaaagaaaataaatgagaaaacttcttataaatagttgcattttaaacttgtgaaataagcttgatttattttatatattttagaataaattattgacagccatgaagttttgtgagattgcacaaaattctcctttttctttttactgctacactaacactattaattgtttaaaaatattacattatgttatcctataagaaagattgttgtaaatgttaatatatatatatatatatatatatatatatatatatatatatatattataaatctcacaaaaccttaaaaaatgtcattgtgtcagcggaatttattatctgcgttattatttttataattacttttgaagaatgttatccaaactaaatatgtgtgtcttttcttttctctattttntatacaataaaattattaaaatgggaacatataattctata

SEQ ID NO: 155655 - DNA, 433 bp, Glycine max
  unsure (1)..(433): unsure at all n locations
ngccacaatgagtgcacgttttcccatatctcacattattgtttctgttcttaccatcgtggttgagtggcatcccgtgtttcttatagcagacgttctccatgtgacccgtacgtccgcagaaatcataaacaacttttgcggcattgatggatatatctctaggttctagattaaggttcgaagaaacattacctaatagttgacgttcttgctgcaccacatatgaaaaaatctttgaaattgcaggtagaggatccataagaagcacatgcgatctgatgtttccatactactcgttcagaccacgcaagaattgcatggcatgatcttcaagcttccgttgtgcgataatggtgagcgcggaacacgaacacctgatattgcatgaacaagctgngtctcgtcctaaagttttcgattcatcccatat

SEQ ID NO: 155656 - DNA, 446 bp, Glycine max
  unsure (1)..(446): unsure at all n locations
agcttatctgggcctaggtcgggtcctgtgcttttgggtcanggacatgggtattgatgtcaatattaaggattgcgcttgtattctccccttcctcctcagggtctgcgagaggagcatttgtgccctcgagtaaacttttcatcgcatttgaagcaaagacctttctctctgcgcatggtgatttcttccgacgagagacagcgaacgtgcggtggtggtggtttaacgcgggagggaagtatcggagaggtaggaggcagtggtagtatcagagtggaaatggggttggggttgcatgtacagggaccgtcgtaggcaccacggtgttggtctgctaacttttcttcctggagacgcgccagacccattgcctggaccaaggtcaaagggtgaagggcttgaacctctcgcctgatttctggagccaatcctgacatgaagca

SEQ ID NO: 155657 - DNA, 417 bp, Glycine max
  unsure (1)..(417): unsure at all n locations
atctaataccatattttttagcaaatgaaaataacatttatagcctataaaaatgattaaaacaaaatttttgtctcgtctacattttatggtttagttcaattccctttttgtgttttaatttttttactttagtctcttattatacatctgttaaactaaattagtcgttttgtcaatctttgatattaatagtaatgattctgactgacatgcatgacatctctaataatttatcacattactaagttaattaattttttatataatgaagaaactctaatgaattaaagtaaaattttttatgctatatngcattttgaccaccaaatatttaaattttgataatatactcctacaaatttatttgaagcttttatgtcttgcttttttgaaaaatataaacttatctctatc

SEQ ID NO: 155658 - DNA, 402 bp, Glycine max
  unsure (1)..(402): unsure at all n locations
tttggtcagatcacagtcctagaatggaacttggataaaaaagatcattggtaacagttgaaccatttgttgctagagaacttcattatctttgattcactgggttcactggagcagagttggctttaacattttacaaaagtcttcaagccattgttgacaatgaaattaatatccagtagatgatcaaatctttcaacatttttatcagcacaaatattggcttcgtgtgaatatctttatatatataaagtacatgtgcgggcattttttgtaaatcaatatttctttcttggtttagctctatcttagtaaaattgcatctcatattttcttcaataaaaaatgaaaattataaaacatttatanatatatgtgctaattaatgacaaattctaaaat

SEQ ID NO: 155659 - DNA, 482 bp, Glycine max
  unsure (1)..(482): unsure at all n locations
gcttacctttattntaacccttagaacttcccggccaaaattgtcatagataaagccatttgatgttcaaaggacactctaaatccctttttaatcaactaacctacgcttagcaagttttggtcaatgttaggtacataaagaacatctgatattaatttgatacctgaacacgttgaaattgcaacagttccttttccttttacaggaatatagccaccattcccaattctgacctttgagacattagttggcttcaaatccttgaataaagtcttatcatatgtcatgtggttcgtataaccactatcaatcaacagactttcacttgattcactgctcaagaagcatgtggccacaaacagttggtcctcttcttcttgattagcaatctaagctccctcatcatggtgattnttgttggcgcagatcaccgcttcataccctatctggttgcacttaatacatntagcatctggtct

SEQ ID NO: 155660 - DNA, 462 bp, Glycine max
  unsure (1)..(462): unsure at all n locations
gcaagcttctgtgttctgacattgccaaagtgttgcttttctgtattcttcnnctctntcagtcatagcttcgggccgcgataagactcactgatctgaccctgattcctcttgcagactttatagaccaattaaaatgcagtttctgcaggtcaacgtctgaccatcattgtcatcactctggccattagagtaaccttctgcattcatccttntgtaaaaagtttatattagtatcagcaattaaccggacctgatactgatatgagtcttaccgcatatacggtcaatttcagcaattaattacattatccacgccaaagtatttgtcatcacaatgatggtaccttctttcagacaccattntttcaactcccgtttccacggaccgcactcttatgtcaagagtgcggtccgtggatacaaccagagaccgactgacacgagttataagaaacgacc

SEQ ID NO: 155661 - DNA, 473 bp, Glycine max
  unsure (1)..(473): unsure at all n locations
gtcacctgccgcatgcaagcttctaatgctctgtgctgcaattgcagcactgttattttgctttctcttctgctgatagagaataagtgagagaagatgatttgatgtcatcaaaggaaggccatcctaaagctgtagaagagaaaccagccttggggctttcactttcccactcagcaccagaaaccagagattcatgagattcctacattcaattttcattagtaacaaccaacaagaagtaaacatatatgggagttgggatttgctagcagccaatattagtattcctttgctattccgattttcacaaatttgaagaaagtgtatcctaccacagctagcgatgttagccaataattaggtataacttccatctgttatatntaaaatgctatcccttacaagctagctctttgtatttgatctagtaatgtgtttaatgtgaaagttcaagacaatttcacattata

SEQ ID NO: 155662 - DNA, 466 bp, Glycine max
  unsure (1)..(466): unsure at all n locations
actccagattgctgcaaagaaggacagttatctttatggtgatctgcagaagaacatagaccacatactctngcaacaggtgtagatttctgaatcatggcaagctgagttactaggttgaccaaggcatcaagttttccttcaagctttttattttcagtagatgaagataaatatgtggccacctcatggactcctctaagaaaaatagcattatttcttgcactaaattgttgggagttggaagccatcttcttaatcaaattcctagcctcagcagaggtcatatcaccaagagctccaccactggcagcatcaatcatactcctctccatgttgctaagtccctcatagaaatattgaagaacgagttgctcataaatctggtggtaaggacagcttgcacacaatttcttaaatcttttccaatactcatacaagctttctccactaagttgcctgatgc

SEQ ID NO: 155663 - DNA, 445 bp, Glycine max
  unsure (1)..(445): unsure at all n locations
atgcaagcttgggangannganggcgaccacgtgttgttatattctattgatatggctacatgggagtacgcgagctcagatggaggtgggcaacaggtggatggtgcgcgctatgcgcgctttgtggatgtggaaaactagtcgtgcaccatcgcccgaccgccacctagtaccacatgtgaagggtaccccataatcctacaagcttgagatgaggaagtgtagaaaggagaaactacctgcttttattcgatgaccacaaagcggtacctagagataaatcgcgggggtcaagagaccttgcggacggcacgtggggagctattgcccacaaccaagcttgaccaatcccgacccaacccaggcataatccgccaatgagaacctgtgatgtacctaaacaggcgaagctctgtcagcaacagaaaaaggacccagaccaca

SEQ ID NO: 155664 - DNA, 453 bp, Glycine max
  unsure (1)..(453): unsure at all n locations
tactcaagccttagtcatgtgacgtgtaagagttgttggtaaatatctgtgtttttatttattatttataaatatatattaattctattgtataaaataaaatatatattttagattttcttaagattttgttttaatgagtcaactagtttgttagatttgttttgacaactggaggttagtttccaacggtcatatttccaacggtcatantttgtttgtcgcttaaggtgacctgtgcctatatattctctctcttcctttctaaaaaaaaacatgacagagctaccgtctcgtctctttctcccaaaattttctatttcttttattataaaataatttatttcttgatagtaagagcatcggtgttcataaggtttgtggatccatttgctgcacacgatcagaatttacgggttgtcgtatctcgtgagaggaacgcaatcaaaattt

SEQ ID NO: 155665 - DNA, 405 bp, Glycine max
gatgagtatggcacgcctgtggatcgagaaacaattatgaaagagcttgagactttctacagacagcgatccatcgaatttaagcctcttaagttttatagagagtcactcaattgtcttaagtacgtataatatcccctgtgatgcattcatggaatttaagcctcttaagttttatactgtagttgtgcttttagtactactgtttgttatgctttccctatgtttgatggcctaggtagagtttatatactcaagagctacacaaatgattgcagacactagttgtaggctatagcacatagagaactgatgtcgtggaagtcaaagcatttttgactttgtcctcagtcctcttgtcaactttacaaagatcctatcatttagtatctgtcattcatctag

SEQ ID NO: 155666 - DNA, 486 bp, Glycine max
tctacttatgtggcagggcgggcttacttcacctacttgtcttatctctaactttgaccattgttcttccttcccgcgatgcttcttttcatgtctgcctgagtgggcttatagcctaaaccatacttcccacgattaccttgggtatttatcagtctagttatgccgccgttgttttttcctaaacccatcccgggctcataaccgttccccaacattactcgggccatcattaccgctgcatcggacagactatgctgcccaaagagggagtccacggaggatatgctgaccacctcaaaagactggtaagtagtttctaacgattcttctgcggcttccacataaggcatggaggatgggcagcttaccaagatatcttcctcgcctgacacgatgaccaagtgcccctctactacgaaattcagcatttggtggagcgtataatgcacgactcccactgagtggatccacggacgccccaac

SEQ ID NO: 155667 - DNA, 455 bp, Glycine max
  unsure (1)..(455): unsure at all n locations
agctntaagaaatgtgaactcccttgcttcgtttttatttattgttgncaatccgcgccctgatgagactaatgaaggaggtataattgttgaaattaagctaaaggagttagaacagaagtcggctgaagtcagtactgagtggagtattgtccctggacgtggagggcatcccactctggtatttatttctgtcaaattgaatatcaattctctttaacaaccgaggaatttttggcccacccaattaatttgtttactttctatttgactttgtgtaggcttcgctccagcctggtggcactgttagttttgaacatcggaatctgcaagggctgaatagatctattaatggttctattacaactagcaacttcttgaatcctcaagtaggtacccttgagctaattcctggagttcctttattngattctacaaataagtttatgtcttgt

SEQ ID NO: 155668 - DNA, 288 bp, Glycine max
  unsure (1)..(288): unsure at all n locations
tatttctcgcacttggctgttcagcgtgtgtttctcttatattctacactgatagcacggcttatcacagagcattctactcatgattatcatactgtagcccatcttcatcgggactagggcttctttttgtcgtccatagcattatcttcatggcactgggtttcgtcattggctacccacttgcttcaacttcatgtaaaaattattttcacatttaatgataagcccctttatttagttcaatnttgataaggacaaaacttagaaatgaatccctgtgtattt

SEQ ID NO: 155669 - DNA, 432 bp, Glycine max
  unsure (1)..(432): unsure at all n locations
gaccttaagtcacctgcggcatcaagctttgccgcaaaatagctgaatttaagtgntatgtccaacgcctcaaccttttctcaccaagttaaaatggatcattttaaggtccaacgccttaaatgaccaccttccaagtaaaaaagaatcacttgattcgcccctttggaaagaagaactacgtaggtatgattttctctctgatggatggtacggaggagcaagagccccgcttttgtctacctcaaaaataaaaaagaaataaaacgcttagatacataatctcacaccaatctaatctaaggctgtcgtcctttgggacaaacgttagaggtgctaatagcaatggatgtatagttcttgctcacatgcctcatatataatgtttccttatcaaatgacaaagaaagacctttaatgtcatcatgttat

SEQ ID NO: 155670 - DNA, 416 bp, Glycine max
acctatcgcaagggtttgtggtttgtgctcctctgctgaccaccatacagacctttgcccttccatgcagcaaccgggagcaattgagcagcctgaagcttatgctgcaaatatttacaatagacctcctcaacctcatcagcaaaatcaaccacagcatagcaattatgacctctctagcaacagatacaaccctggatggaggaatcaccctaacctcagatggtccagccctcagcaacaacaacagcagcctgctccttccttccaaaatgttgttggcccaagcagaccatacattcctccaccaatccaacaacagcaacaacctctgaaacagccaacagttttaggccacattatctccaataacgggatgtgaagtagatcctgacaaaatttctgttatttcacaa

SEQ ID NO: 155671 - DNA, 434 bp, Glycine max
  unsure (1)..(434): unsure at all n locations
agctngctctaaatttacattgatgtttgtatttattggaggaggttgtatgccatttttgttttaagggtagcatttcttggtaaaactaactttccaaatgtttgccttcgcaggaaatggccccaaggaagcttgcctcaaagaggtccaggaaggacaaggcggccgaaggaactagttccgctcctgagtatgacagtcaccgctttaggagcgttgtacaccagcagcgcttcgaggccatcaagggatggtcatttctccgggagcgacgcgtccagctcagggacgacgagtatactgatttccaggaggaaatagggcaccggcggtggacatcactggttactcccatggccaagtttgatccagaaatagtccttgagttntatgccaatgcttggccaacagaggagggcgtgcgtgacatg

SEQ ID NO: 155672 - DNA, 428 bp, Glycine max
  unsure (1)..(428): unsure at all n locations
gcttgtcgccacggagttntccgactatgctcttgtgtggtgtgtcatgctacaaaaggagagagcaaganatgaagagccaatggttgatacatggacggagatgaaaaagatcatgaggaagcgatatgtgccgactagttactcaagggacttgaaattcaagctccaaaaactaacccaaggcaacaagggggttgaggagtatttcacggaaatggatgtgctcatgattcaagcaaagattgaagaagatgaggaggtaactatggctcgatttcttaatggtttgactaatgatatccgtgatattgttgagctgcacgagtttattgaaatggatgatttgcttcacaaagcaatccaagtagagcaacaattaaaaaggaaaggagtggctaagaggagttntaccaactttggttctt

SEQ ID NO: 155673 - DNA, 445 bp, Glycine max
agcttcctctcccggatacagataagaaagtattgtatcaattcttctggtgacaaaaatctgcaaaatatatagtaatagtaaataagcaaaagcaacaattcctaaacacttaaccattaatattgaattatttggaaaaacatatttttaggtaaaaaaagaaaaacttacttgtctttgttcacatcaagcttaacaaatttatcttttggagaaggtacatgtcctccattaatttcaaagttcatataactttcatatgtactatatagacggccttcaaattcattgaagtttagtttcccatcatttccattgtccatgcgcctatatcataaacgaatcaatgtataagctaagccaatttacacatgtatgtagttctataggaatttcacgaacttagaatgttgggaattgcattcctctattttccacaaag

SEQ ID NO: 155674 - DNA, 473 bp, Glycine max
  unsure (1)..(473): unsure at all n locations
cttcgtntnggcccatacttgaaggactctggcttatattgttataacctaccttctgcatgtgtcattgttcatctggctgagtgcagttgtctcttcattcttctattttcaggataggtaatcttctgtcctgtgatacgatctttagtcagtatttctagtttacctgaatgattagaatatgtggggaatcgtgtagatgagtaatgctagcaacacactattattggctgaaatttattgaaaatcacaaaatatggtgagttccactcataattctgtagttttcaataaattttattcaaatagtagtgtgttaaagagtgcattcacttgtgaagatatataaaatgctatngcttactgaaaatctactgtaatatttgctcttcgtcaattcttgaaagacttgcaaagtaaagccaaatctagaagtgtgattcaatgatgatattttgttcaacctcctg

SEQ ID NO: 155675 - DNA, 254 bp, Glycine max
ccacccgtcgagaaaaagacaatgactcacacctccaatcactgactaaacacgtcccacaaatgccagcaaaaacccaaagacgtccaagccatacaaaacaataaataatacagaaacaaatattaaaaaacgacatcgcaataacaaatacagaagacaatgaaccatttttacacaaaaaaaatcaaatacataagagaccaaagaacagaatgcaagcaaaggcaaaaaacaaacaggagcaaagaaca

SEQ ID NO: 155676 - DNA, 403 bp, Glycine max
agcttggtgatctgtgacttatcctcttttatgtgtttgcatctgctaagcgagctggctgcctcgctaagtgaatgaggatcgcttatccaatctgcctcgctaagcgagtttattaacagtttttcacaccttttcttctttagcctacaaactgagttgatttcaacattagatcacaaaaatggagtttctactctataaattcacacaagaataaaaatatttacaatttccacaaaaagaaccataaattggaggcatgtttgacgaccggcaagtgcaccggatcgcacaaatagtattaaatggtaagtgaataccgagtatcgaactcttggggaacttgtcttacttggtaaagctatgtttcaataaatgggtgtctttggatgaaagtgtg

SEQ ID NO: 155677 - DNA, 475 bp, Glycine max
tcatgagaaatcatcgatgagataattagtgtttattatctatacggggactaatatataattatttttgcaaccaagttgtagtatatgcttttctggttgattaaactaatgatctcatgtgtatatcatgtataggacaagttttcctgtctgcgagatgatgaatttatccggcaagcaatagcatgagtcaaccctgttaacattgaggggcttatagatttcccactggtgagcaaactcgacccggaaacatatgaccaccaagattctgcactcaatatagagcatattctaggacaacttaatggcatgaccgtgcaacaggtacgtaccttcaaaatacttaattaaatgactaatagtgtgttgtttcaaataccatatattctcttaacaatcgggcccctatactactatttcctttgattttcacgcaatagtggaaatagctgttatgtgaagtacccat

SEQ ID NO: 155678 - DNA, 451 bp, Glycine max
gaccttaagcacctcggctgcagctttcagacctgctgctaatattgatttattgttcagatgtcatttcaaacgaaggtcctactgtcttgtcaccttcaagaaagtccaggagagttatgccagggcgtgatgggtctgaaggaaatcctttgcaaggagataagtttgatgacagtgttgttagtgtcagacaggcagctggtgataatatgggaaagaatgagccagctccaatgtcactagatttttctctttttggattaaaacctccaaatagacctacaattaccaggtaaacacatgttgaccctcctatcatttcaaagtggcttaatagtttgtaattttgactctttcaacttagaaaagtagatagcagcattacactttggcttgcatattgaaccattagaggttgaaagaagataatcaacgttctatactgtgc

SEQ ID NO: 155679 - DNA, 489 bp, Glycine max
  unsure (1)..(489): unsure at all n locations
ctcaagcttacatccttagtagcaattactactagactcttcttcttctgttgtgttcactcacaacttcaaaagtagtaatttccttattactcttttgagttcttccctctatcattacggaattataaacactacactttttgggaaatcttttactgaaatttcttatataaaggtgtttacatacactcttttagatatgtctctaacctgtagtatttcggctaaagggtattcttctaattgatgtattctagattaacacttttttttttaccttaccctctcaatttggcacttcttcttttcaagttgcacatttgaatttgcatccatatatatagcttttgcaacacgttgtttatgatcgttggaggtagaatatgaaacttcaaatgcagtatgagttgtccatgttcatacaactagtagntcaactctttgcttctcctataaaagactttcgtaacttcagaatcttctcaa

SEQ ID NO: 155680 - DNA, 456 bp, Glycine max
agcttcaaatgactgattaactgtgacacgagactcattgattggagtgaatgtgtattagaacgtgtatgaactgaaatacaaacataattaaataatcactagggaattactcctcttgacattatatgaactaagccttcattaggtatttagattataaacattttcagtgcctcaaactagtatctacaataaatcaacaccccgacgttcatatttgataaattgttgataccatagtagagttcggtggttcacaaaaaataaaaataaaaaatagtaatgttccgtgggtgaactgtctttctttgatttctctttttagcataatcaaaagagaaaataggctatgtagtaagagtgtataataattctatagcgtcatcaaatcataaattattatgtatgataaatttattaaattgtataataattatcttaaacatcttttct

SEQ ID NO: 155681 - DNA, 324 bp, Glycine max
  unsure (1)..(324): unsure at all n locations
atttaactaagtacctttgggataccacaaaccaacatttggtgtgcccttaaggtacttaatgatccttttaacaactgtcaaatgagaatccttaaaattagacttataccatgcgcacaagcaaacactaagcataatatctgtgtgacttgtagttaagtaaataagtgaaccaatcatacctctatatcttgactcatcaactaattttcctttcacatctaagtcaagataggttgatgttgccattggagttgatgcttatattcacttttacatgcanacttcttacttagttctgtacaatacttggttagacat

SEQ ID NO: 155682 - DNA, 453 bp, Glycine max
agcttatggcggcaaaggggtaagctatcaagctctatatcttgttgatgttggggcttgcgaacattgtatccttggaaagcagataaaggtcagtttctcaagggtagggaagactcttaaagctgagaagctagaattggtgcacacagatgtttgggggccagccccagcgaaatctattggaaactcacgctattatgtcacctttatcaacgactctaccaaaaaggtatatgtttattttcttaaaaataaatctgatgtgttttctgtgtctaaaaggtggaaaacataagttaaaaatcaaacaggtctaaaggttaaaagtctgaaatctgacaatggcggggagtatgaatattacgagtttaaagacttctgtttagaacatgggatcagaatgatcatgacaattctatgaacacctgatcacaacggtgttgcataaaa

SEQ ID NO: 155683 - DNA, 451 bp, Glycine max
  unsure (1)..(451): unsure at all n locations
tgggcccttatgaagtcaccattatctatntaactatcctctattgcagctgccaacaccaaaatacaataatcagttgaacaatcctctattgctaggagatacaaaactcataatttcaggctccataagataaataaagagaagaatgatacctgctaccccttgagaagagttaggttttcccttttctgcacttgaagtactctcaaatgtttgtgtaattgagcacaccagacttttccaggtagaattcagaccagaagataaatctgagttaatacccaagggatcaaaatttgctagctcactgctgctaagtatgaaacagcaagtgtggcacaaaataattacaaccaacaacataagggaagaanataaaatggttgcaattttctctctaaaatcgagtagagacaaatgacctatgaagcacggatgcctctcttgt

SEQ ID NO: 155684 - DNA, 403 bp, Glycine max
  unsure (1)..(403): unsure at all n locations
gctcatgaaaaattggtgtgtgaagttgcaaaccaaatttcgacaagatccaacggttaacgaaggctgggaagaatttttactgaggcagcttcatgtagttttctctagaagcttcattaagaggcttcctccagaagcttcattaagaggcttctagcacactccaggcatcttctcaaagatcccaacggtcggatgattgacaagtgtcttgtgaagtttaaggccaaatttcgagaagatccaacggttaatgaaggctgggcagcgtttttaccgaggcagctgcatgtagctttctctagaaacttcattaagagacttcctccagaagcttcctcgtggcttctttgagaagctntctcaacaggcttctttgagaagctagatccttatctat

SEQ ID NO: 155685 - DNA, 477 bp, Glycine max
gttctctgattacatgttcattggagatagggagtatgttgaattttgtttgcttatgcagagaggtggcacaaggaaactagcagtttccatctacccataggagagatgagtataaccctcaatgatatgtgtcataccctaatttcgtccggggatcattgtttggtggcatgcaaccttcgcttggtcgcctcaaggtactcaacacccatcgttaggaaatccgtaaagttccgtgacattccgaaagtcaaaaagaagcattgttgcgcaatccataaagttctgcaacattccggaagtcaaaaagagtcttgttgcgtaatccgtaaagtttcgcaacattctgaaaggaaaatgggtgtcgttacgtaatccgtaaagttccgtaacgtttcgggaaggaatcagcaaataaaaacacgaaaacaggagtgtatttagcaaagtgtggtgtgtaaataaaagggagtg

SEQ ID NO: 155686 - DNA, 448 bp, Glycine max
  unsure (1)..(448): unsure at all n locations
agctnttaaaaatacactccatctctgcccttctatatctatttcctcatattatatctctctctaaaatcaaaaattacaanaatcccctccattctctctttaaaaccatcatttactccatcgcgcctcccgtcctccccatctccaacccccaaaccaccgcgagaaccaccggtgcaggtggcgacgccattgaggctntggagaacaacttggccttccgtgccttcatcaacaacctctccacctccatccgccatgacctcgaccagcaccacccctggttggagctcgcggaccattgtgcgttctcgaaacccgagtccttctccgaagccactttccatgtcagcaaaaacttctcctacttctgcgtcaactactacgttgtcgtttcactcatccttacagtttctctcctcactaatcctttctctctcatcct

SEQ ID NO: 155687 - DNA, 494 bp, Glycine max
  unsure (1)..(494): unsure at all n locations
tctaagctgccctgctaacgattgcttgtaactagcatgcgttggtatgtgttatgaaattatggctgagccatgttggttcgctggtttaggaagtgtcaaatgatatttgctagcagttctctagactaggaccactgttaaaccttacaacaacttctagactttgaaaaatcacatgatttaatgccttgtttcttctttntctcttataatttacacattgttttggagctagagcttcatgtatttcaactttgaattagagagagaacaaggaatgaccattacttttagtgcttttcccccctgattggtttttcaatttctcagacatttcctacttcactaacttcaacaagctatacaactggaattatgtgctttattacttgaacacttctgataaatggggttaatggacagcctaatgactatggaacaacaacaaggaaaatatggcaattactctgttgtaccacatctgacagcag

SEQ ID NO: 155688 - DNA, 454 bp, Glycine max
  unsure (1)..(454): unsure at all n locations
agcttccacatcaagcaagttcatctcagagctcttatacaactattgaattcaaaagttggagaaattgcttggaaaccttgtagctgtgcttaaagtacgattngcagaagatccacaaattaatcaagtcttagaagctatatatcaagagggatgaatttataattctacttattcaacgatttaactatgatatgatactttacaaagaaaaaacattcttttaatttaggtacctacaaatgattctaccaggtaagatcatcaaactacaaacaatcttagctagaggtgagttgaaatatagtactatattttaactatatatatatagatatatagaatatatcatcattatgttatcttaatagcagctgaatgttataatttatgccttcaatcttgttccttctacttgaatgacgatttgggaagccctcgcgcaattgga

SEQ ID NO: 155689 - DNA, 262 bp, Glycine max
ctgagagaccatacaagagtgctaacgatatctaagtatgtgggtcattaactctatcatatgctgacaatagccgagaagcccatgaatctcttacggggcggagtacgtagacgccatcgacttggacttggcttacaatcggggaaagttttgactcccgttcaatgtaagagtcaatcggtccattcacatggtcgcctcttggtgtcaagagtctatcatccttcctatagactctttagcgcgtaacatgggcata

SEQ ID NO: 155690 - DNA, 429 bp, Glycine max
  unsure (1)..(429): unsure at all n locations
agctngtanggttcaccccaaattccgttgtcttatgctaaacttgatcccatatccactcaataattcaatggtagccataaccccaaccaaggttcctcaacctccatttttctgaggatacgactcgagcgcaacgtgtgcttatcatggaggagccccggggcattccattgagcattgtatgaccccgaagcataaagtgtgaagtctaattgatacgggctcgctgaaatttgaggagaatcgcttgttgaatcctaacattgacaagcaacaccatacatggggcaattctggaagctgttgttatgactcatcaggattttcaagtttatgccataaaccacagttacaatgctaaatgatatggataaaatggacatcctctcacgaacacatctttgcttattcaacttccaccggaat

SEQ ID NO: 155691 - DNA, 481 bp, Glycine max
  unsure (1)..(481): unsure at all n locations
atgatgcagatgggtgtgtagctacttcatgcactcctctaatgactatggcatcatttctggcgctaaactgctgggagttggaggccatcttctcaattaaatttctggcttcagcaggagtcatgtctccaagggctccaccactggcagcatctatcatacttctctccatattactgagtccttcataaaaatattggagaagaaactgttctgaaatctgatggtgggggcaactggcacatagtttcttaaatctctcccagtactcatacaggctctctccactgagttgtctaatacctgagatatccttcctgatggctgtggtcctggaatcagggaaaattttttctaagaatactctcttaaggtcatcccagctcgtgatggaccttggagcaaggtaatacagccagtcctttgccactccctctaatgaatgatgaanagccttcagaaatatgtgatcctctta

SEQ ID NO: 155692 - DNA, 440 bp, Glycine max
  unsure (1)..(440): unsure at all n locations
catgcaagcnnatagaaatatggatatcaagaagtcattatatctcttaatatatataataacaaggacaataattaatcataaatttttaagttgataggggaaaattgttctatctcagccggaccattaaaagaggttttattaaatcaaaaaaaaaaaagtttccacaacggcttgtttaagttgccatatcctttatgtgacgatgatcttaaaaaaataaaaaagaattcaaggaatgttactttcctcattcttctctcttgtcacagagatagatgatggttgggtaggctcaagtttgtaaggtctacaccctattagatatacgcataatggaaatacagagttcaatttacaaaagcaagtaattcaatcctttaatttaacaagcatagaagtgaaagtgataaattcttgtaattttattctataat

SEQ ID NO: 155693 - DNA, 357 bp, Glycine max
cctgagccttacacaaggggggaaacaaattatagcaacaaaacctacggtctacgcatgaaaacaacaatctaacctcggtgaacctgtcaaactgctcctgcgacgtgccgatatgaggatccaaccgtaacacgtggatgatcttcccgaacagtgcaagtaactacaatcgctgggcgtgcgccgagctggtacggaaccaatggccatgaggaaccaatcgaacggtcgggcatgcgaagagctgcaaacggaaccgggcgggcggggtcgatctctctgttctgcatatctcttcgcctcactgatgtacgcggggtctctggccgggttcagcatggtgacgtgactccg

SEQ ID NO: 155694 - DNA, 444 bp, Glycine max
  unsure (1)..(444): unsure at all n locations
agcttctactcattagcttatggagaatctttttctttntaattntcttctcctattagggcttatagaaaagcttatccaaacaaggtccactatatattctgcaatctggtactgtgccatatatatggatggcggttttggacatttggatttgtgtagtcgttgttaataacaatgatgcttatgcctttgggcatgggtttggactatttgtggtggttttggacacatgtatattatgtaactggtttcattttattgctacatgtgaggtataactattctgttttttaaagccattgcattccttttttatttntttgctaaaagtttaaagttgacactgataggcatttgaatcggtttacattccacttgatttgtagagatgttggtgcttgaaagctccaaacctgctgattcagttctagagtntcttgg

SEQ ID NO: 155695 - DNA, 456 bp, Glycine max
  unsure (1)..(456): unsure at all n locations
cttaagtcacctgagcatgcaagctatgctganacattataatagaccttctcattttttaaaccaacaatagcagaagaattatgacctttcaagcaatagatacaatccaggttggaggaatcatccaaatctaagatggacaagtcctccacaacaacaacagcctgtccctccttttcagaatgctactggtccaagcaagccatatgttcctcctccaatacagcaacattcacaacaaaaataaataaccccccctaattcgttactattttattactatctgttatgaacgtttggttgaccattgctcgttaggagatgacctaggatcacttcctagatactgcatttntaatggttatttgatttgggtgcggcctcgatcaaatttggcaacaaagacaacaagcaactaaggctcctcctcaaccttccttagaagagttagtg

SEQ ID NO: 155696 - DNA, 487 bp, Glycine max
tcagaccaaagcaattcaaaatctaggtgtctaagactttttaatttttagattttcaaggcttgagaagtgaaaatgagaatggagtaattatggagcatactctcatctcaaacaagtctataacattaatctaaactttctcaaactggttttacaacgaaaactccaccgaatcaaaatttgaccccttaacacccaatttaccctagaagtggctcttgctttcactttggtcactcattttcttcatttgctcagcccaagctttcccacaagtcctaaatgacattttaaacttggattaacttactttagccttcaattaccactaaccccaaatttagcctctcaatccctcaatacctcacacttttccactcacatcactatcattctcactgttaaccctacgctaactgttcccatcatctctaccagtttcctaccaacgatttcagcacacaagcatcacatagcatcatta

SEQ ID NO: 155697 - DNA, 449 bp, Glycine max
  unsure (1)..(449): unsure at all n locations
agcttctcgtatccgtacttggaaggatctgattatctgccttcctaaggcaataccagtataattctgatatggctcccgatcgcactcagctgcagaatatgttcaagaaagagggtgaaacctttaaagaatacgcacagcggtggagagacctggcggcacaagtagctcctcccatggttgagagagatatgatcaccatgatggtagacactctgccagtgttctactatgataagctagtaggttacacgccgtccagcttcgcggacctagtgttcgccggggaaagaatcgaggtagggttgaaaagaggaaagttcgattacgtttcctccacgagtgcgaatgccaaaagaatcgggacaacggnggcaaaaaggaaggaaggagatgcccatgccgtctcttaacgcccgcgtgggtanacccccgcagaccctcat

SEQ ID NO: 155698 - DNA, 431 bp, Glycine max
gacactatgaatactcagcttgtgggttaaagtctcacgattgtcacgtgctcatgcaacaattgttagccgtggctatacgagacatcttgccaaacaaagtcaggttaacgataactcgcctgtgctttttcttccatgctatatgtagcaaagtcattgatccagtcatgtttgatgagttggaaaatgaggccgcagattcacttgattgtgcatctggtcagagaaatcaaatgttgtggtcctgtttatctacggtggatgtacccggttgagcgatacatgaagatcttaaaagggtatacaaagaatctatatcgtccagaagcatctatcgttgagaggtacattgcagaagaagccattgaattctgtttaaatacttatagaaggctaaacctgttgtgcttcctgagactctgcatgat

SEQ ID NO: 155699 - DNA, 406 bp, Glycine max
  unsure (1)..(406): unsure at all n locations
agcttatcataaatgacactccttgtaccacctaatctcaaactcagtcacttttaaagttctgtagaataagtacaaagtgacttgcaacagtttggtgagtaactcaacattgtatatagtcattacaaaaacacttctgtctgtcaaattttaaaatcatatacatatctaagatgaatntaatgttaatttcaggatgtgtcgagtaccatgtactcatttataaaaggtgtaggattcacccatttgaatttgaaagaaattacaaaatgtaagattgtttataatcattggaggaaatttgcaaaaattggctatggatggaggacttttgcacaatcacaaaatttgaaagctagaactcacattatatttgagttcgagttcctatatgaaacatcta

SEQ ID NO: 155700 - DNA, 459 bp, Glycine max
  unsure (1)..(459): unsure at all n locations
cagcaacagcataattctgagatttatgatcatcaccaagcttgcactagccaagtgtccaccatggctcaacccatagaaacctattctccacccagttatcaaggaacgttagatccattttcaattcagttccccacaaatcctgatcattcgagttgttgtaccaatgacagtagcaacaacaacaccaacaactattggagcatggaggatatctggtcaatgcaattagccaattactaaacgggaattaaacctataattaaacataattatataatatgtataaacctaagtgtctaagttccataaaattaagctgtagtctctggcttaatacatgttacgtttgtttatgcaagtagttggatgtttggacttctgtgttatgcgtaccatcaatattntaagaacttagttaagtttcgtatgttatgggctcttattaaactatat

SEQ ID NO: 155701 - DNA, 439 bp, Glycine max
  unsure (1)..(439): unsure at all n locations
agcttagcaacagccccaaaacccaatttttgtttttatccaagtgtcatgatttctatattaccaattttgctagctgttgatgctgcatcatagttttgctatgtcatctacctttggtctcatctctttaccttacaattcaggcaattctatcattaccctttttcaatatatagaattggcaacatgcaaacatatctaatccaggaaattccaccactaatagtcagcctataatccataaccaatgaagtcccccatctccaatttattccatcttctaattttattgtagtttctgcagatttaaaataagcgtttggttcttcgttntaacataaatctattgtttagtttataattcacccaattctgcctttagtcattttcaacatgcagaactatcaacatgcaaagagatctgantatacaaaag

SEQ ID NO: 155702 - DNA, 370 bp, Glycine max
  unsure (1)..(370): unsure at all n locations
tgtaatcgattacacaagtcttgtaatcgattaccagaggatattntgagaaaataatttccaagagttacatctgttcaaatggtttttgaatggccatcaaaggtctatttatatgtgacttggaacacgaatttgcttagagttttttcagaacaaaaagtcttattctctcaaaagaaaaaattgtcttatcctcttanaaattccttggccaatacacttgcaattcaataaggaattatttgagtgcttcattgttcaatctatctctttcaagagagatttcttcttctcttcttcttacttctgaaaagggattaagagaccgaggctctcttgttgcaaagcaatctgaacacanaggaag

SEQ ID NO: 155703 - DNA, 405 bp, Glycine max
ttggggtcatcccagtcacattctagtgtgacacaccatcactaaacatttatctttttttttataaaaaaacaaggctcatcgacaaacacattcgtttcggaggtaaaccaagacattttccctttcattcaaagaagaaatgaagaattgaacaagtaccacgttacattgcgtacaatttcgatccctttcattacattgattggagagtctccaacgctccatcaactcaaccaaacccctacaaccaactcaacatccatccccaccatcgtaattaaaactaaaatctaaaccataatatatataaccaatatttactaattaattcaacttaattactaaatataactatggacaacatttatggatgaatgttagttattacaactaattaaatta

SEQ ID NO: 155704 - DNA, 440 bp, Glycine max
  unsure (1)..(440): unsure at all n locations
aaccacaccttgactcccctttactctttcatgcaaatattccaccacaccctaatttattatagattcaatttatgaggagaaaagtgtacccatagaatcttaaacaatctctgtggagagaatgaccacaacttgcaaccctgcttgctgctgcatgatttgaaaaactcatctccaaaaatttcccaaaggataagccccaggcagcatcagacataactactcttcgtgtagcacgaggaaaaccatgtatgcgaggacatttcatgcacctgtgccacatccaaattttaccttcttgttcccctggtaaagcaaactccgatttcttaacggaaattgtaggctgccttgctgatgagtataacaatgaacatgagcttctgatggaactcacatgagcagcangtgtaactctaataaagaaacattatcag

SEQ ID NO: 155705 - DNA, 198 bp, Glycine max
gaacaggaccacacccacagagaaggaacaaagccaaacaagagaacaaaggcaccactctccaaacaacgaccagacaaggggcgagaacaacacccaccaggcacgccaccagacgcaaacaccaaagcacccaccaccgaaaagaacccaaaagagcaaacgaaaaaagaaatgcagacaaagcaaacagcccca

SEQ ID NO: 155706 - DNA, 108 bp, Glycine max
agaatttgaccctgaaatatgtctatcgaccacccatattttcggtagtcatatatgtgcattagcatgctcactagcgatctaatttggaatctatagccgtgatat

SEQ ID NO: 155707 - DNA, 436 bp, Glycine max
  unsure (1)..(436): unsure at all n locations
agctngcattgaataaaaacataataattaagtgctttatataagcaatgaacacagaacccaaaagaaattgacagacaatagcctgtagctgtaacaggaccaattaaacatggaaaattgagtccaatttactacagtaaactaatccattgttgcagcccagaaataaagaagataatataaaattcatttcaacttacagcttcaaacactttgatttcttgcaattgcagcgtttacagccctcggtgtctcctggtgtctccgacttacgcctgcaaatccaactcggtgtaaggctaatgaagaaaggaaaaattcaaaataatgggatgtagttcatcaagaaaatgtacaggtaattaacaacttcacttgccttttcattctggggctgttctgattgaagtcttcaccagccatgtaagctgat

SEQ ID NO: 155708 - DNA, 451 bp, Glycine max
agcttggccaagttcgtctagtaactcgtcaattgtgttatcggaaaacggtcccgtatcgtgactacgtttagtgaacgaaagtccacatatagtctccacgtaccatccttcttcttaacaagcagtacgggtgatgaatatggacttgtgcttgggcgtatgagtcctgcggaaaggaggttagacactagcttctcaatttccgttttctggaagtgtgggtaccgatacggccgtacgttcatcggagctgtggctgggtgggtgttgataccgtggactacctctcgtggagggggaagatgatttgaggtctggaataatttctggtatcgggtgagcagtgtgtttatggcggcgatgggatgaggaagatgagttgtggaaggttcgggttggtgggtgggtaatattcgtaagtggagcacggccgaagtggagcctgttc

SEQ ID NO: 155709 - DNA, 461 bp, Glycine max
taagcttcgggtgaacagggacactctgttagtaaatttttttctattaaggtctgacagaccatacaagattgctagcgatttctaactaagtgggtcattaagcctatcatatgctgacaatatccgagaagcccatgaatttcttccggggcggagtaagagtacgccatcgccttggccttggataacaatccgtgaagttcttgactcccgtttcaggtaagagcaaaccgatccatccacacgggtgcctcttggtgtaaatagtcgatcaccccttctctacctctttatgcgcgttacttgggatactcatacgtgaccctatgctcacggcgcggggtagaccaactttttttggacttggtgataaagctatcatgttggtcttcgtcttgcataaccccgatacaagacattttggactctgacaggcaactacttctatttataacatg

SEQ ID NO: 155710 - DNA, 302 bp, Glycine max
  unsure (1)..(302): unsure at all n locations
ctaacttccctgtgatattgaataatattttgaacttggcgtgtaaaattcaatttcaaatattctatattttaccaatgatcacagacatacaatcacagtactagtatagtaatttggatatttcttatcgggcggccccatgtactgctattatttttaacaaagatagttctagtatagtaattaaattaaattgaaccaacctgcgcattatagtggaatcgatccatgccgtccctattatcaagatcataatcagtgaaatgtntgctacaaacatcaacctntaaccggatagc

SEQ ID NO: 155711 - DNA, 427 bp, Glycine max
  unsure (1)..(427): unsure at all n locations
agcttcgagagcattgaatggaatagttaattcttattctatcattcngggaagagctgtgagacgccaagctttgaatactctaaagtgcttggagtcaatagtaagtatccagtcacaggtctttgcaaggaaactccaaatggttgaaggaagatgggattgtggtgaacatgaagagatgcaaggttcaagagacaagataataagggtagggataaaatgttacttttgatcattagttatgttctcaccacattacagaaataaaatttcactgctaatgtcataatctacatgttataatggaagcttaccttctcactttttatcccttgctcggttaagaattgaaacatgattttcatattttaattttcagatggactcacacagtgagagaaggtgggatgacagcattttgttg

SEQ ID NO: 155712 - DNA, 475 bp, Glycine max
ctatatggcgggcgggctagcttacctttttgtttttctcgaacttgaccattggtcttccttcccgcgatgcttcttttcatgtccgcctgagtgggcttgtagcctaaaccatacttcccacgatttccttgggtatttatcaggctagttatgccgccgttgttttttcctaaacccatcccgggttcataaccgttccccaacataactcgggccatcattaccgctgcatcggatagacaaggctgcccaaagagggagtccacgaaggatatgctgaccacctcataagattggaaagcagtttctaacgattcttctgcggcttccacataatgcatggaggatgggcagcttaccaagatatcttcctcgcctgacacgatgaccaagtgcccctccactacgaatttcagcttttggtggagtgtataatgcacaactcccactgagtggatccactggtcgccca

SEQ ID NO: 155713 - DNA, 394 bp, Glycine max
  unsure (1)..(394): unsure at all n locations
agcttanacaaccttgttgagacgagattacttttttatttattcggacaagtctgaatatgatgtataagaaaatgaatgtgagcctttttcccctttgaaagacttgtttaaaaaaaatgttttaaaaatacttttaattaatatttgaatttttttattccttattagtatatatgtgaggggtagagggtgtcacataacacctgtgtctttgccaaagagccatattccaaccaatttctaagcatgagaacccccactcactagtagctacaatcccttcttttgttaagcagatatcatcttagaaaagttcctcatttatggcacatgaacataatgaccctaaataaaagcatcatttcctcataacttactaaacattcacact

SEQ ID NO: 155714 - DNA, 318 bp, Glycine max
tttgagggatcgaaaccgccattatgcatgtctccagcttcggacatttctctgacgacacacggaggggatatgggaagatgagttccaaacctgtggtcaaacctcacgactatctcacggtacactaggcatcctgcaatatattactccgacaagtccgggtgtattccaataatgaacgctacttacaaatgacatgtctcttactctggacattattctgataatctcacagtgcggatgtgtgaaagtaaattccacactttgtcttcaagactaataaggatccactataattggtggactatccctgat

SEQ ID NO: 155715 - DNA, 425 bp, Glycine max
  unsure (1)..(425): unsure at all n locations
agcttctcaaatagattgtggtccatcatatcttgagctgaaatctgagaatntagccaagaaaaaacatatggaggatagcttgcaaggggatgaacagtagccatcaatggcccaactggaataacaggaatgttcaaagctcgagtaggttctgcctgcaaattaaggcataatctacttagttnttgttatctttagcttagagacatatcactagcatggaataaaacaaataatttttttcaccacacaatcagtttctttaaatacttgccaggggtaaaagcaacttgagagatgatcttgaaggggtatagtcaagtgacgatgccaaagtaacaacagatgccaacccagaatcctttccatcaaaacctgacataatntatgtagcaaagaagaaataccaatcaacacattga

SEQ ID NO: 155716 - DNA, 318 bp, Glycine max
gcttcttcaccttactcacaggtctcatgtacactgaaccatattttttgtttcatattatgttatgttatattgcttgatgtacatttgtctaattgaaaacatatgattatctcattcaaaatgccatttaaatgtatgcttgcttcagataaataacgtattttatgttgattgtaagtgttgcactaccatatatttgtgggtttccaagttaaatcctctacaatttccacttattttcttctgtcaacaggcttaacatataagtcatattccctgtagtgaaaactatatatattggtgtgttttatatat

SEQ ID NO: 155717 - DNA, 422 bp, Glycine max
agcttaacagattctattagtaatttatacgtttatgcaataaacttatatattttgataagttaattggagtactctatgagtgaatatggatgcaatagtttttgtatgcacatgattttactattctaacaatccaataagtgatgatccattgcttgagtgattatatttgtttgtttaataatttttatggatattgaatttgatcaatctaatgaataattaatagaaaatttattaaatgaataattaatagaaaatttattaaatgaataattaatagaaaatttattaaatgaataataattttgcatacaatttaaaagtaattattgatagtaattcgtaagggtaagagtaaaactaactaacagtaggcttgttgaagtaagccaaaaaatcatctctcgcgggtcctc

SEQ ID NO: 155718 - DNA, 463 bp, Glycine max
taactaatgtgtgtaactgtttgaacatattacgagtctcagaattacttttcaacaaataaagccaactaaaccaatgcaacagtgagaaaaaaaatcaaaacatgtttcatttataatgggtatgttacacaacttggatacaagtttcatagtatcaccactatggtgacctaatctggaatgccaagtggcaaaagaaagatcactattagaaagagtattgacatgagacacactaggattgattctatttacactagttgaaacaaaatctggagaagaacagaggtttgagactgattctgattatgatactggctggtataatccatatgctgagtagaaactatgaacatagccatcattgtgcctatgatgacaataagaagcctcatgaactatagtagtacaactaactctatcaataagtctgtcagtaactatagcagacaattaactg

SEQ ID NO: 155719 - DNA, 429 bp, Glycine max
  unsure (1)..(429): unsure at all n locations
agctgcttgtggggcttctatggaggctggattttttatcttcaatgagttcctttaatggtgattttccacaatggagatgcagcggaagacaaaggagaagaggtgagaggaggctccatccactagggaataagccatggaagaaagagcttcaccaccaagatgagccttggataagaagctaggaagaatacttcaatggaggaaaagaaagagggagagaaagagagaggggggagcacgaaattgaaggaataaaagagggagagaagtggaactttgaagtatgtctcacaagactctcattcatcaaagttacaacaagtgttacacatgcttctatatatatactanngtagctccttgagaagctttcttaagaaaacttccttgagaagcttctctgagaaaacttccttgagaagc

SEQ ID NO: 155720 - DNA, 453 bp, Glycine max
tccatcaagtaaccttgtgttgagtgttgtcatccatgacttatgcttccggtagatctgtagcggactcgcttgatgatggtgaatcagatgatgtatagtcagaagattgagcttcttcttctagaatggaagttactgtcctatcttgcaacgatttccttctcctatcggcactgttccttcttaaagtagcttcaaattccaagtccagaggaactaaattacttgtaggagatctatgcatacaaaatactgacaggaacatcggttatccaattcaagaagaaaacaaatatagacaacacaagtattcacaaataatcaaagaataacagatagacacttaaagaactgaactaaactttccaaatagaaagaatgtccccggcaagggcgccaaaaacttgttcgacggtcggcaagtgcaccggatcgcgtaagtagatgaat

SEQ ID NO: 155721 - DNA, 309 bp, Glycine max
aagcaggagcaatgtagaattctctctttttttgtccaagcacctaatataaacaccatcatatcataattaagggtcatgttcataacaaaatagaagtaaacaacactaaactattgggagatatatataatgtgggttggatggataaacgagaagcgaacaggggaaaagttgcaaattcgatatcttctgctaacacaactaacataaaaaaacaataaattgtgactacttactggcgaaatccagtgctgatgtactcgtaagagctcatgactgcatagtgagttccaacatcctgtggag

SEQ ID NO: 155722 - DNA, 426 bp, Glycine max
  unsure (1)..(426): unsure at all n locations
agtgctgaatgtggatgccacatactgaatgagctactctctctggggtggtgaagacacatcacacaccgacccagtatcctgaaacccctgagtttgccactcttgtatgcacttatggagctctgtttggttcctggaacaagtgtgcactgtagcgccaaacgcggctaagtcattcactatggcgtgcctaaaacataacacagtttgaaatgaaagatagaatgagaataaagcataagcaaaatgaataatgataataagagagaagaagaatatggtgaaaacccgattccacgagtgccaccagtgacaagagccgtcattccattgagagaccatcttgctcacctgctgctatcactcaaacacgcgtatggaattggaccctgcactttgcttttcatgtgcacacnatgtaca

SEQ ID NO: 155723 - DNA, 446 bp, Glycine max
agcttatcatcattaagtgattgagcattggtagtttattattttctattcttcttagctcaattgacatctctttgacttcttatttctcatcttaactcatttttggtctaaggcaagtgattgagcttaattgagaattgtagctaaatttcaaattttgtgcttacttgacatatctatcttgtgtagggcctagaggagactacagaactccaaatggaatgtgtaagtagtccctagaaagttgagaaaaggatcttcaattgtgttacaaatgctctagccaattctggcatttcaagggtcacattgagcttggaagtcagagcctctgcacttgaataattgggctataagtttggacttttattttgtgtaattagtttagttaggtagctaggtagttattaaagtagttagttagtactaacactctatatatt

SEQ ID NO: 155724 - DNA, 480 bp, Glycine max
gcaactggatgcattggttaactaggtaacccagtttggtcttgaatcacaaatctgtacctgtcgcaagggtttgtggtttgtgctcctttgctgaccaccatacagacctatgcccttctatgcagcaacctggagcaattgagcagcctgaagcttatgctgtcaatatttacaatagacctcctcaacctcagcagcaaaatcaaccacagcagaacaattatgacctcttcagcaacagatataaccctggatggaggaatcaccctaacctcagatggtccagccctcagcaacaacaacagcagcctgctccttcctttcataatgctgctggcccaagcagaccatacatttctccaccaatccaacaacagcaacaaccccagaaacaaccaacagttgatgccactccacaaccttccctcgaagaacttgtgatgcaaatgactatgcagaacatgcatgttcagcaag

SEQ ID NO: 155725 - DNA, 457 bp, Glycine max
  unsure (1)..(457): unsure at all n locations
cacctgaagctgcagcttcttataagctgaaccattttatcaaatatcacangttgttttttattcagaaaaattagagtttatcttctttatcttagtgagaatgattctcctaagtttttgagtgattcaagaacaccctgtctatatcaaaggactttcacaacctttgtgtgttgccctcgccagaaagagtgattctttccttcctttcatcttcaaccttgttctttcaaaccacaattccagaaaatccacttctacccataattatctcgtggccataactcccattttacacgctcaaattaaatgattcttgagcctaaattgaatttcaaaatgatatctttcaccttattttggaatcacctcatttggagtcctgtcgcttgagttatagtcatttctatatttctgtccaatcaccacttaacctacgtttatcatctcattc

SEQ ID NO: 155726 - DNA, 463 bp, Glycine max
  unsure (1)..(463): unsure at all n locations
ggagcttacatcatgtggtatcaagagcatcttcatttanttgatgttctntngcttcctctatctntttggttggtgaattctctttaattccttgttcttcatcttattctccttgtatatcctccatggtcttgtggtttggtgctgtttagagtagattcaaaaaaataaaccgattaaatcttagatctacacttgttcttgcatttctatggttcaaattttgtagatctactcttgaatcatgttttttgtgttgattttacgttctatcatttttcattcataatattcttgtgctgaacctttatatctaaattttcttccaaaatattgattagaaaaaaaaacacacaaatttaagtgtaaatcacttaatccatgttgtcttagagtcatgtctagtcatagtaattgtcacattatgttctaagatgtgttgaatattatttcttgattg

SEQ ID NO: 155727 - DNA, 451 bp, Glycine max
  unsure (1)..(451): unsure at all n locations
agctngtaggattatggggtacccatcacatttggtactatgtggcggtcgggcgatggtgcacaacaagttttccacatccacaaatcgtgcataaacccaccatcccctgttgcccacctccaactgagctcacgtactcccacgtagcccatatcctcgtttctctcaacaccgggtccccatcaatcctcccaagcttccccaacatccaagtaattcaacattcaaacagcacaaactatcacagccaagaaaacagggcaaaggcagaaaactctgcccaaaacaccaaccaaaatcacagcttttctcacttaaagaccacagcaacaaatccttcgttccagttcgttaaccgttggatcgactcgaaaattttactggaagtctctagtacacaagcctacatattgaccgttgggatctgctagcaaacatccanaactca

SEQ ID NO: 155728 - DNA, 470 bp, Glycine max
  unsure (1)..(470): unsure at all n locations
gccattcctgcgaaggcaaacatttggaaagttattttacattanatataacaatcattacagacaagggccaaacaacacttctcatggcccgagtgtcaacatgcactatataaaataatcatattggggtcgtgctattttatgacacatacgtatttgcacacataaaaattttgtgtgaagcattttacgacacctatccatgtacatattttttgacaaaccttttcatgctacatcctatatatatacacacacattttgttggaaggcttcttttgttacctactcacaaatacacatatnttgaaaaacacttttacgctacccatccaacactttgtaaggcacttcatgctatatatattcacattatgcaaggcatgttattcaactntctgcaaggcatcttattcaacattttgcaaggcatttccatgctatatatatttacatatatacatacc

SEQ ID NO: 155729 - DNA, 453 bp, Glycine max
agcttggggtaaatcgaaaaggctacaatggtctgtttctatattgtatcttcagactaatgtaactgcggaaacaaatcaaaatcaaaaccagctctgattaaatatcaatcacaatggcaatcaagtgataaccaaataaaaaacaaatgaaagtacataggatgatgttgaacggattggggaattgaaactcaacaattgaacaacaattgacataatatcagtgctaattattgaaacggtggagttttacgaagatgtggaaaagaaaataacactaaatattaagagatttaaggtgacttaattctatttaatgttttaaaaagtacttgtgtataaaacttggaatattaaccttcatttatactaatcataatcctatttaattaaggaaagtaatcatgagattagaaaaaatgggtaccaatcctaagataaaaaagtaaa

SEQ ID NO: 155730 - DNA, 315 bp, Glycine max
  unsure (1)..(315): unsure at all n locations
tactaagcttaccaataatggccttagcaaacttattattctcaaaaggatatttatttatacgcctcatatgtntaatggagagggttaccactactggaaaacccgaatgcaaatcttcattgaggcaatatacttgaacatttgggaagccacaaaaatgggaccttatgtgcccaccatggtggctggaaataaaacaacagaaaagccttgggtaaattggagtgaggaataaagaagacgagtacaatataacttaaaatctattcatggaagaatttattcatgtttcatttgatgagtctaatgcta

SEQ ID NO: 155731 - DNA, 395 bp, Glycine max
aatgcctctcactatactcagttgtggcatatcaaatgactttgtaaatcatgtcccaagaatatggatgggtaaattttatattgtgaatattatcgaatagttaggtagactttaacaactatatacctttttctcctctcactgttatatccgcggacctagtattgtaattttttacttttgtaataggtatgtaatttgtatgtaatgatgaaattatgggaatacatttaaatattgatggaggaaaatgagatattatacatttatattttgaaaattatatggattacatgtattgatatgctagatacgtaatgatgcgatatatgtgttacaaaacatacagccctaactcttactaacactcatcaccttcctaataatatatg

SEQ ID NO: 155732 - DNA, 387 bp, Glycine max
  unsure (1)..(387): unsure at all n locations
atataatcaaatatttactgtatgattgcgacttancaaagccgacagtaatgatctcttctgggaaactgatcggccccgcttactggcaagaggatggcactctgaacaaccaaagaatcaatgctatgtccactccatagaatatctggttattcttatccctggtgttaagaagttttgaagagaaaacttgtgaagggtgatcattactatgaatctgttatcgatgtcttgagcaaagaagaagctgaacctaatctatttgatcttgacaaagagactaaagttggtagctgcaatgatgaaaagccacaaaacggatngagtaaggatgaccaatctgattatcgacatcaatgttacctcaagccccgagcttctact

SEQ ID NO: 155733 - DNA, 373 bp, Glycine max
  unsure (1)..(373): unsure at all n locations
agcttgntnaagaactaagaaaagatctatatctttcttgttcgcacatcgntcgcgtgtatgatatccactccacaaggtttgaagtagaggagaccttcaaccctataacgcaacatggcggacaaaagtgggcagttaacttgaatggccattattgtcaatgcggaaggtattctgcgcttcactatccatgttcacacattattgcaatttgtggttacgtgagcatgaactgctaccaatatatagatgttacacgaatgagcacatcttaaaagcatactccgcacagtggtggcctcttgggaatgaagcgacaattccttcttctgatgaggcatggacactaatccctgacccaaatacaatt

SEQ ID NO: 155734 - DNA, 310 bp, Glycine max
  unsure (1)..(310): unsure at all n locations
gagatgagaaaaatgaagggaggtagatatcttgtagtgnggacgtctcctgcacctgtaggacctcacaataactcgcaaactcatctcaagctctcacgacgacttcctctttaagctccggtctctgcaggtctttgcgcagcaaaatctcataaactctctggaactaggacccttctctctctacaaatctctacacatgcagaagctttgagaattgcccaaactccctcttcaaaatctgatttcacgcttaaataggtggcattttttgtgctcgcacccttagcgcaactctgaaccgctt

SEQ ID NO: 155735 - DNA, 436 bp, Glycine max
  unsure (1)..(436): unsure at all n locations
agcttancctttatgttcagttgtttgtgtttcttattgtatgncactgaatacaaagcaaagagaggtggaagaattttgttcataccaaaggtgctatttgaattctatcattaattctcattttgttttctagctattttcgtctgatactatcatcttatttctattacccgatagctagaaagtttacagattgtctcatctatctagaagaaatttgcttctctgaatacaataaatgatgaatgtgcagttacatgacagagctcaagtatttatttcatgcccctctgaagaaagtggtgcaaggccaacttacattggaactattgaaaggtggttaaataacaaagtaacctctccggatattaaatgccattctaagatcaacttgtttattctggtgcggtactactatctttatgtatcctta

SEQ ID NO: 155736 - DNA, 338 bp, Glycine max
  unsure (1)..(338): unsure at all n locations
atcacacacgcgttctcattgatgtggaggaagggatctcgantccatattattaaaagaaggcgtatgaattatgaatacactctaatcaccactcaccacatcccgtatgacactagtgtataatatactggaataacttaacttgatttattacgcaattttataattgaaacttttttaatggattgaacaataaaaggtcatgtgatcacagatgggaagaaaagtgtgtttgcagaagaataacacttaaatgtacaaagagaaaaatcaattctatgtattgaaatgcaaaaatttctacggaaaataatcactgtgatgtattatttcac

SEQ ID NO: 155737 - DNA, 431 bp, Glycine max
agcttcaacttacagagagtagtttaggcttagtgcctctacatgtgctaagggcacttccaatgatttcaaaattgaacgatggttgttcttagcgcatcctttccccgctaagcctagcttgaaatctcaacttacagaatgaatctggggcttagcgcaggatggcgcgcttagcacaactataataaattttcgcagagaggaagtggcgcttagcacatcatccacgctaagcccaatgcttaaggtgcaacttacagtgaagatgttgggcttagcgcaacaatgtgtgcttagttgaaccatttagctaatcaatcaggggtctttgcacttagcacgagcaagctcggcttagtgcgtgaagagatggcgcttaacgcaaggtttgcacttagcggataaacaatctgaaaattttctaactc

SEQ ID NO: 155738 - DNA, 488 bp, Glycine max
  unsure (1)..(488): unsure at all n locations
ttcggtattcgctggaaaatgatcgaagtgggttctatttgatgcaaatctgatcatcatgctttgataaatgcaaaaaaactggggcaaatgaagagggtgagaatgagggagaaacccatgctgtgactgccattcctatatagccaagtttcccaccaacccaacaatgtcattactcagccaatgacaaaccttctccttacccaccacccagttatccacaaaggccatccctaaatcaaccacaaagcctatctaccgcacttccaatgacgaacaccacctttagcacaaaccaaaacaccaaccaagaaatgaatttngcagcaaaaaagcctgtagaattcaccccaattccggtgtcctatgctgacttgctcccatatctacttgataattcaatggtagccataaccccagccaaggttcataaacctgcatttcttcganaatacgactcgaacgcaacgtgtgcttgtcatgga

SEQ ID NO: 155739 - DNA, 415 bp, Glycine max
  unsure (1)..(415): unsure at all n locations
ttgagattcttcaaatgaatgtttgttaaacagngaatgcatatttttctcgtactttaaccatagccaacaaaatgaaggctcatggtgaaagtatgagtgaaacagtcgtttctgcaaagattttgagatcaatgatctcaaaatttgattatgtggtatgctcaattgaagaatccaacaacttagacatgatgactattgatgagttgcaaagtattcttcttgttcatgagcaaaggatgagaagtcgtggagaagaagatcaggttttgaagatctcccaccaagacaaagcaagtataggaagaggtataggtagaggtaatgtgtcattcacatgatgtcgaggaacgggaagagattcattcaactaagctgtttatgaatggttcaaatgtcacaacgtacgaca

SEQ ID NO: 155740 - DNA, 477 bp, Glycine max
  unsure (1)..(477): unsure at all n locations
tctaatttctctacaattgcatcttctctcattgagtcggtgaagaagaatgtggcatttacctgnggtgaaaaacaagagcaagcctttgtttttctcaaagaaaagcttactaaggcacttgttctagctcttcctgacttttctaaaaatcttgagctagaatgtgatgtctctgaagtaggagttggagttgtattgttacaaggtgggcaccctattgcttattttagtgaaaaacttcatagtgccatcctcaactaccccacctatgataaagagctttatgccttaataagagccctccaaacttgggaacattaccttgtttccaaagaatttgtcattcatagtgatcatcgatgaattgggatacatatagattacaaactaagagaatatgtttgaggggtatttacaacaaaacaactctcatgggttggatcttcattggtgatatggtttacttcacctcat

SEQ ID NO: 155741 - DNA, 346 bp, Glycine max
cctgcagcatgcaaggtgatggcacaccgcatagcgaaagatgtatactgtcctttcatgagccagcacgccttggaaggtggcactcacattctattgaaactgaacgagactggtgcgccatctgcttcattagctactcctaggaagcgccacacctaccatacttcactggttgcgcacagtagaggcgcacactattggaactgtcgcgccgatatcaaaagaaaggcggaccttgggatttcctagcggactgttgaaactgttactgtctaaatgagcgacacctaggtagacactggcgcctttgcgcggacacactaccatacctcatgtatgtatg

SEQ ID NO: 155742 - DNA, 247 bp, Glycine max
aatcgcccatcgacgactctaggttagctctggtcgaccccgcactaccttgacgtttgcacattctgaacaatcaatcgcgtaaccctatatctcccggatgatattgatgaatacacctggattggcgttcgagaccttgcgtcattgtgcgaggaagaatcctaacggtacaaataaaggagcagggcggctatctgaaaatctaagccctgaatcaaagaggcgttgccgaccataagctcga

SEQ ID NO: 155743 - DNA, 356 bp, Glycine max
  unsure (1)..(356): unsure at all n locations
agcnttgaaatntgaccttgtatgtgagacgacatactcttctcaaagttggngacattcgatgttattggcattgcacactatgacccgaattatgtatgtgggctatgtgttgaggcccaaggaccgaaccaggtattcctgcacaaagttgtgagtgattccttcgttgatcaaaatgatcacattctaattagaaatgtggcccactaaacgtaagatctcaggtgctatgtggcccgaaagggcatggaaactaatatgggctctcgaatattctactggctccttaaagacaaattgtgccatcataatgaggtgtctgttctgttggtcatcctcattatttgcaatga

SEQ ID NO: 155744 - DNA, 488 bp, Glycine max
  unsure (1)..(488): unsure at all n locations
tctatgaagatataagataattgtgagattcaatgtctaattaaatttatggtaagcctttgggtttgtcaaaggctgtagaaaattttgcttatgattaaaagagaagtgatgtacttgggaatatcataagaggattttgttttataataatattaataatattttggaaacataaagtatctcaatagataacgagcaatgtgagttttttattatgtgacttttacctacgattaaagcatataagtacaagtaaatggtttgtatctaccgtcactcaatggtaggcataagttaattgatgtaatttcatgtggagtttgtaggtcttggatcttcttcatcaatggagtttcttgtttcttanagatcaatgacagcggaatggagaacgaagaaagatgattggagatgtcacttcaaaaaaaagatgagtcaagaataagttcactatcatacgaagtcatgaataagagtttgaacgt

SEQ ID NO: 155745 - DNA, 428 bp, Glycine max
  unsure (1)..(428): unsure at all n locations
agcttatcttagcacaattcgcttcatgtgactattgtttatgtaacatcacttacatgtcacaccttcacattaatcatgtattcaaaataacacatcttaagtacaacacaacatctcatactgaaacaattcattactcaccatcatgtaacaagtcacaataatcattatacaagcgttatgcaagagatatactaagactcaatcatatatgcaatgtggtaccatgtcagtgaaaaacctcatcgagcgcctaggagtacatgacaagacagatcacacactgngaagtcaggtcactctcactagtcaaggtcacgctgttttgcgagaatactccaaccatgtgggatcggcacaggcttaaaggagcactcaaatcgagtgtatttagtcccaaagcctatacttcgaagagtctgtca

SEQ ID NO: 155746 - DNA, 253 bp, Glycine max
caagaattctctatcttagatatctcgactctcttctttttctctcaactccattatagtatttatagcttaagttgaaacctaaccttcattcatggcttccgcttcttaacaaaactagcctttacgaaatttataaaaaaagcaagtgactatctatgaaaacatgaaatgtattttatgtatccacaattatgtatattgtataataccggctttagtttttttaaatataatcaccatatttgatctg

SEQ ID NO: 155747 - DNA, 356 bp, Glycine max
  unsure (1)..(356): unsure at all n locations
actnaggctgctaatagctcagttgcttattttaaggcaaaggtctgtatggtggtcagcagatgagcacaaaccacaaacccttgcgacaggtacagatttctgattcaaggccagctgggttaccaagttgaccaacgcatccaatttgtcttcaagcttcttaatttcacatgatgcagatgggtttgtagctacctcatgcactcctctaatgactatggcatcatttctggcactaaactactgggagttggaggccatcttctcaattaaatatctggcttcagtacgagtcatgtctccaagggctccaccactggcaacatctatcatacttctctccatattactga

SEQ ID NO: 155748 - DNA, 399 bp, Glycine max
cttctcaattaattaatgttattaatgaagatagtgaccaaaatttagaaaacactactgaaactagttcaatatcggagatagacattaatccaataaatttcaagcattggataatgccctacaaactctatttccaacgaccaactgcccctaacctcctattatatgagataggcaagtgtaatttcaaatatcttagtgcaaattacatctatgagtggaatatagatgcccaaatggagtacaatattatgaatacactccagcacatgaccatggtagccatggcttaccaaacatcccatgagtgttcggaggaaacactcattgatatcttagtggcaggagtttcctgccaattaaaacgatggtgcgacaattatctcactaatgatg

SEQ ID NO: 155749 - DNA, 436 bp, Glycine max
ttaagcaccgcggctgcagcttcaagctgaaggaatagtagcttcttctatcattcgaggaagagctgtgagacgccaagctttgaatactctaaagtgcttggagtcaatagtaagtatccagtcacaggtctttgcaaggaaactccaaatggttgaaggaagatgggattgtggtgaacatgaagagatgcaaggttcaagagacaagataataagggtagggataaaatgttacttttgatcattagttatgttctcaccacattacagaaataataattcactgctaatgtcataatctacatgttataatggaagcttaccttctcactttttatcccttgctcggttagaatttgaaacatgattctcattatttatatttcagatggactcaaacagtgagagaaggtgggatgacagccatttgttg

SEQ ID NO: 155750 - DNA, 450 bp, Glycine max
ggatggcggcttacttaccttcttgtcttcattcgaactttgaccattgatcttgcttcccgcgatgctatttttcatgtccgcctgagtgggcttgtatcctaaaccatactttccacgatttccttgggtatttatcaggctagttatgccgccgttgtattttcctaaacccatcccgggttcatataccgtcctcaacataactcgtgccatcattaccgctgtatcggatagacaaggctgcccaaatagggagtccacgaaggaaatgctgaccacctcacaagattggaaagcgagttctaacgattcttctgcggcttccacataaggcatggaggatgggcagcttaccaagatatcttactcgcctgacacgatgaccaagtgccccttcactacgaagttcagcttttggtgagtgtataaggacaactcccactgagt

SEQ ID NO: 155751 - DNA, 446 bp, Glycine max
  unsure (1)..(446): unsure at all n locations
agcttcaacatcagaccacttccaggtgctggaattacttcacatggacttgatggggcctatgcaagttgaaagccttagaggaaagaggtatgcctatgttgttgtggatgattactccagatttacctgngtcaactttatcagagaaaaatcagacacctttgaagtattcaaggagttgagtctaagacttcaaagagaaaaagactgtgtcatcaagagaatcaggagtgaccatggcagagagtttgaaaacagcaggttcactgaattctgcacatctgaaggcatcactcatgagttctctgcagccattacaccacaacagaatggcatagttgagaggaaaaacaggactttgcaagaggctgctagggtcatgcttcatgccaaagaacttccctataatctctgggctgaagccatgaacacagcatgctaca

SEQ ID NO: 155752 - DNA, 482 bp, Glycine max
agaaggagtccacggaggagatgcttaccatcttataatactggaaagcggtttctaatgactcctctgcggcttccacataaggcatagaggatgggcagctcaccaagatgtcttcttcgcctgatacgatgaccagatgcccttccactacgaatttcaacttttggtggagtgtagagggaacaacccccactgagtggatccacgggcgccccaacagacagctgtagggggggttaatatccattatttggaaggtgacttgacaggtgtgagggcctatctgtactgggagatcgatctctcccctaacctctcggcgggtgccgtcgaaggcacgaaccaccattgaactcggctttaagtgggaagcattgaatggtaatatctccaaagtgctcttatgcatcacgtttaaactggaaccattatcgatgagcactttggctacgacatggtccatacacttgactgacact

SEQ ID NO: 155753 - DNA, 448 bp, Glycine max
  unsure (1)..(448): unsure at all n locations
agcttttgtataagcaaacaaacaactacacttctgaaatntaaatgttgaaatttaaagaactgaaacataaaagctgaaatttaaatgacataatcataaaataactaaaaataaactaaagtgttcagaatgcaaaaatttaaacgtcctgctcctcctatggctggtcttcattaggatccagtgctaatggctgagtctcctcaggagcaagagcaaaggatggagatgattgtggggtctgatctggagtagtctcctcctctgctggtgctagtgctggtgctggtggctcctcagtcacaggctcctgngctgcaaaggccccaccccgtcctgaagaagagggctggtctcctggcaaggccacctgagtctcanactcctccatgctcataatggtgggcaagcccaagccctgaaggctctgcatgataatggactg

SEQ ID NO: 155754 - DNA, 453 bp, Glycine max
tactcacgcttttcgattcattctatgtacccatggtggtgcacattgtgttttcttgtattttattctcatttcatttactttttatacccccttgtgatgtgcttaagccattttacttaagtcatttctcacttaacttaaaaataaaataaatttccaccgatcgtttgaattatattatccgctaacttcggataaaatgaattccgaccgttcggtcgtgccagtaccacgttggaaatcaaaagaggtaaaaaataatatagtaatcaaaaaacatctctcttagtaaaataaagcggaaaatcaatcggacgttttctcgttgggatgtctcattcttaatcgaatcgactaataactaaggtgatactaaggcttaaatcaactcgcctagtcaagctcgtccacaaaaatacgttattgaagtttgtcatttcaatctctact

SEQ ID NO: 155755 - DNA, 441 bp, Glycine max
  unsure (1)..(441): unsure at all n locations
agcttgtctcagcgtgtatgctatacttatattctcatgntagctatcatcgccaagnacgaagaagagttaggtctagccacggcccacgagcatagaatcgcggatgagtacgctcaagtatatgcggaaaaagaggctagagggagggtgatcgactctttacaccaagaggcaaccatgtggatggatcggtttgctcttaccttgaacgggagtcaagaactttcccgattgttagctaaggcccaagcgatggcagacacctactccgcccccgaagaaaatcatgggctcctcggctattgtcaacatatgatagacttaatggcccacataatttgaaatcgttaggaaacttgtatggtctcttatacttgactagatatgacttctcttctgaaataaaatgaggtggtccatgtctctatctctaaaagc

SEQ ID NO: 155756 - DNA, 423 bp, Glycine max
cgtctcagcgtatatgcgagacggagaccaatatgcttgctatcatcgccaagtaccaagaagagttaggtctagccacgacccacgagcatatgatcacggacgagtatgctcaagtatacgcataaaaagaggctagaggaagggtgatcgactctttacaccaatatgcaaccatgtggatggatcggtgtgttcttaccttgaacaggagttaataactttcccgcttgttaaccaaagacaatgcgatggctgacacctactccgcccccgaagagattcatgggcttctcggctattgcagcatatgatagacttaatggcccacataattagaaatacgtaggagacttgtatggtctcttataccctgactagatatgactttccttttgaaattaaatgaattggtacatgttt

SEQ ID NO: 155757 - DNA, 435 bp, Glycine max
agcttctagccaaatggacttaccttgaattaattcctttgatagcccttttgagccttgtttccctttccttgttttgaagctcactacaagccttaagtgaaaaaccatgatatcaccatatccttaaggaattttggagctttggaattgttttgggaataagtgtgggggggtttttgtttcattggacaacttgttttgttggctatgcttcatgatgtattttgggccatacttgatgtacattgtatattggttaaatgttggacatgctgaatgaaatgttgtttctcaaaggctatagagtaaaaaaaaaaaaatcgaaaaaaaaaattcgaaaaaagaaaaagaaaagcaataaagttgagtgaataagatcttaaatggcacaagaatgatgaaactcttggttctactcttcatgtgtaaatt

SEQ ID NO: 155758 - DNA, 488 bp, Glycine max
  unsure (1)..(488): unsure at all n locations
cttttggagtagaaacatgggaccaactcattntattttaaaatgtcgtatctagtcaagatctgagagaccatacaggtttcctagcggtttctaattatatgggccattaagtctatcatatgctgacaatagccgagaagcccatgaatttcttcgggggcggggtaagtgtccgccattgccttggccttggctaacaatcggngaagttcttgactcccgttcaatgtaagagcaaaccgatccatccacatggttgcctcttggtgtaaagagtcgatcacccttcctctagcctctntttccatgtatacttgggcatactcgtccgcgaccctatgctcgtgggccgtggctagacataactcttcttggtacttggcgatgatagctagcatgttggtctccgtctcgcataaacgctgagacaagctcctttnggacctcgaacaggcaactaactcctctttcaagaccatgctatg

SEQ ID NO: 155759 - DNA, 371 bp, Glycine max
  unsure (1)..(371): unsure at all n locations
cgcagcatgcaacnngcctcacgggatgcgagactgttactttcatgctcgcntcactggcagtaccaagaagagttaagtctagccgcggcccacgatcatatgaatgcagacgaatatgcccaaccatactcggaaaaagaggctagaggaagggtgatcgactctttacaccagaaagcaaccatgaggatggatcggcttgctcttaccttgaacgggagtcaagaacattcccgattgttagccaaggcccaggcgatggcatacacctactccgcccccgaagagattcaccggcatcgccgctctcgtcagcatatgatacacgtaatggcccacatgattatgactccgatcgaaacttgatg

SEQ ID NO: 155760 - DNA, 349 bp, Glycine max
tcataaaagctaaaacccttgtgctttgttggttcccagaatacgtattatgaggcaccaaatccctatgataggtgtgattatgaatgtgttgagtggcgcaaccctcttttgaaaatcacttatgctttaacatcttcatgagtggcatacatagagactcattacgtaggcttgtgcttatttttggtttcaatacaaacctatgtgctcatatgggacaccttatgtttgatctacatacgattttgatacgagtaatcaacatgtaaatttataaaaaataaacaagtgtgcttattgcattacttttctttattgtttacatagtgacaacgggttcccatgg

SEQ ID NO: 155761 - DNA, 452 bp, Glycine max
agcttcactcaagggattgtctggaaactggcggatataatatatggctgcctttccttctgcagtcttagactcggtgaaatactttttcaaaaaattttctaccaccccgtcccaagtcttaagactgttgtctttaaatgaatgtaaccatctttttgcttctccggacagtgaaaatgagaacaaactcagccacacaacatcttctggcacacctgcaagcttgattgtattgcaaatttcaatgtaagtcgctaggtgtgcgtacggatcttcattcggtaggccatgaaataaattgccttgtattaaatgaattaaagaatggggataagtaatattatgtgcttgaacctctggccgcgctatactagtgaaaaattgtggcacaacagaactagagtagtcttcaaaggtcactcttctaggttgatcttcagccattatgt

SEQ ID NO: 155762 - DNA, 440 bp, Glycine max
  unsure (1)..(440): unsure at all n locations
agccttttaagaagtgataatatctgncncattttctctttacctaattaattaatatcatagaaatcacttaatcttaatatatatggctaagatttcttatctttctttttcaatcagctagtgattcagtgagtagttatattgagtcttgtcctcaaatcctaccacaaaagaataaataaaagtgtgcactcacctgggtgtctactcattaaattactgtaaaacttggcacatctggtgaaggagtacacctgccatctctctactatttcactctggtcccttccctgatagatcatttccatggtagcaaaccaataataataataataataatgcatataaaataattgataagatagacatcacaaattagaagttgaattgaactnnnnagataacatgaaaaattgcttcattgtacacataaaatt

SEQ ID NO: 155763 - DNA, 482 bp, Glycine max
  unsure (1)..(482): unsure at all n locations
atgagaaagctctttctcttacaaccaagagttgtttattganacctcttagctttacgagtttgataatgttggctcagcttcaatagaatacggaaatgatctaacctacaagagataaggttagataaacaacaatttgggaaagtatcagcttgaagttgccaaagctcaatcaagctatttcaggatttcaatgggtgaaccctngctttatacccatgtataagaatagccctccaaggtaaatatcattcaaaccaaaatcaaacactacttctctgaaacctgctatgagataattcgggtgagagttatgacccttctttacatcataggagaggatgatattaaagtctttcatggtacaccatacgagagagatggcattggaaagggttctcacgagatcccatgactctgttctaccatcttgttaggaaaaccataatatccagtgaatcaccacatatggctaccat

SEQ ID NO: 155764 - DNA, 415 bp, Glycine max
gcttttgaaaaacatttgctagctggaattgattatatttatctggcaatcaattaccagagagtaaaaactctttggtaaaaggtttttgagacaaattcatgtgctacttagtttttgaaaaaactttttaatacttatcttgattgagtctttgatgtgccatcattttcttctattttctaaaccctttttgcaccattataattattgattggtcttaattgtcaattaattaggcagttttattatttgggctcatttagctaatttgatgtctttaatctaatttcaggaattaatgaaacattgcgcttaattcggattttagttgtggacttgaagagggcaaataaagcaacgcttaccttagttaatttctaattaggaaatttcgcactttatttatgtcgtc

SEQ ID NO: 155765 - DNA, 491 bp, Glycine max
  unsure (1)..(491): unsure at all n locations
ctaagctttcaatgggtaaaggctcacattcactatcttctacattatattcaaacttgtccaaacaaataataaagtcatctcgactcanagaaagtcatataagtctcatacaattaatataaaacctatatcctaatgtcacatcctatcagagcgtggtgttcccgtgtcctctagcatgaggttcttcatagtcatccacctattcatctgctcccccgaacacaaagttcaagatcatcacaggatccaaacacaaacaacaaaccgggagtgagttatcacattgctaactactagagagaaacaacacaacatatagtagccaaatacaatttacttatcatatctcacattatttcatcactttgtcattcatcaatcacacttttcatccatcaatcacacctttcaatcatcaatcattattcacaggaatcacacactccgatcaagacataataacacatcaatntcataataaacaa

SEQ ID NO: 155766 - DNA, 453 bp, Glycine max
agcttggtctttcctcctccctaagtccagctcttattatgagtagttccatttgttgtctatattcttcaactctcatactcccttgtctaagcctttagagcttgtccataagctccctttcatagtaggaggggatgtgcctcttcctaagggcacttttcaagtcattccaatactctattggaggatccccatgaatccttctttccctaacaagggaagtccaccaatagagtgcatacccttgtaagctaagggtagccaaaggaaccttttttttcctcacttgtatgatggcaagcaaagagttgctcaaccttcatttaccaatataaataagcatctacattgtccttcctatggaagtatgggaggttaatgttagcctcttgaggctttctttacttttctctcctatgggagtggggtctacgatgtgacctatgcctt

SEQ ID NO: 155767 - DNA, 462 bp, Glycine max
  unsure (1)..(462): unsure at all n locations
gaattagtagtactcatgttgccattgttattttctcctattcggcatccctgatgatttatgcgacaaggtttctaaataccctaattcttcaatattgtggttgaaaacaacgagaggagggtgctggagttggttaactgggatccacttctatcagtgaatgccttatagaaagagtttgttgttgacgaggattccgcgaagagaaagtttatgtttttggtgaagtatgggaaggatattggatttggaattggatgatagtaggaagcttaatttgctcagcgcgctttctttggtgtctccgtattcagaaatctagaaaagtaatttttatctcctaattaatgaacttatataagaaattatgcctctaaatttagtttcctctccttattattcagtctggcattaataattggtctaagactattanttcaacatcaaggcatcaagcat

SEQ ID NO: 155768 - DNA, 449 bp, Glycine max
  unsure (1)..(449): unsure at all n locations
agcttgaggttaatctcaaagctgcagaaacacaacattgtaaaaggattaccaagtatgttatcgtacaaggatgatttactttgtgaggcatgtcgaaaggggaaacaaattaaaaactctntttcaagtaaaatcattttttccaccttaagacctctagagctattacattttgatctgtttgttccaaccataacagcattcatcagggaaaagacgtatggactcgtcatagtggacaactactctagatggacatgaattatgttcctagcccacaaggatgagtcttttagtgtcttctttaaattatgtaaagggttcaaaatgaaaaaggggtatgcattactttaatcanaagtgatcatggggaggaattgggaatgaaaattttcaattgttatgtgaagaaaatggtattctcacaacttttcaacacaaagaat

SEQ ID NO: 155769 - DNA, 478 bp, Glycine max
  unsure (1)..(478): unsure at all n locations
cacaccaaagcaactcanaatctagttatctaaaatcccttttttaatggattttcaaggtttgagaagtgaaattgagaatggggtaaatttggagcaaactctcacttcacacaagtctatatcatcaatctaaacttgctcaaactggttttactacgaaaattctaccgaatcaaaatttgactcctcaacacccaattttaccctagaaatggctcttgccctcactttggtcatttgtttttctctctagcacagcccaagctttctcataagtcctaaaggacgtttcaagctaggattaacttactttaacctccaaataccactaaatccagatttggccttccaactctcaaagactcactctttttccactcataacaccatattctcaccttctaactctagcttaactctacccttcatctctaacaattntccataangcatatcagcacataaacatcacaag

SEQ ID NO: 155770 - DNA, 349 bp, Glycine max
taatgactatggcatcattgctggcgctaaacatgctgggagatcggaatgccactctcctcaacttaaatatactggctatcatctggaagacatgtcttacaatgggcgtccaccatctggcagcaacatatcatacattctctccatactactcgaatccttcataaaaataatggagaagaaactgctctgaaatctgaaggtgggggcaactggcacatattttcttaaatatctcccagtactcatacaggctccctccactgagttgtctaatacctgagatatccttactgaatggctggggcctggaatcacggaaaattcttctaagaatactctctta

SEQ ID NO: 155771 - DNA, 447 bp, Glycine max
  unsure (1)..(447): unsure at all n locations
agcttgnntatatttactgtgtttgcaagctttacatgattaatctattattctggacgaaatgtatacacctggagtccaattcaaattaaacagcttttgttctgtttcgcctgataatgttttttggatgttttatccttgtaaagtctaatattgtttcaacgttgaattctattcttcttagccgacgttcaaaagaatcatgggattgagcatgtggaattaaactttatctcatgtagcttataaatactaatattttatttcaaaaagcagaagtcaaatgaatgcgaaattacatgaagaaagaagtatgttaatcaaaatcgaatcacaccttttgtaaaccataaaattgataaaaaaaaaacccaaaatcgcttaaactaaaaattgtaaaaacaaantttaaaaatcatatactttttataaattggtttgatt

SEQ ID NO: 155772 - DNA, 478 bp, Glycine max
acttcactagcttcttaccatctgtcttaagcttgaacacccacttattcttcaaggcttttctgccttcggaaactttcacaagcttataagtatcattcttctgcacggaatctatcttttcttacatcactttcctccaatagaatttatccttatgaatttcaacttttgcaaaacttcctggcttcccttcattgatgatgaagatgtactccaaaccatggtaccttctagatgattggtgctctttatttgatcttctgaacagcaactgcttttcttgctcaacaccttcatcatcaccatactttattgctagctcatcatcaaccctaagttcattatcaagatctaccccttctatggcaattcttctagcaggggtgactggtgtaagatcaaccttaccaccttgttcactggtttctaatccatcagaaaccaacatagtttgtcgctcatgaaacactacgtc

SEQ ID NO: 155773 - DNA, 440 bp, Glycine max
agctttcctacaagtcctaattgacattctattctatgatcaactcactttagactccaatttccactaaccccaaatttggctgttcaaaccctcaaaatctcacacttttccactcacatcactaccattctcacatttaaccctaagttaactctccccatcatctctaccagttttcaatcaacaatttaagcatacaaatatcacaaagcatcatcataaaaccctaaaacagaatggttaaatttggctcacatcaaacatgtcaagtttagcatgctttcaacaaattccttcacaaataactaccataaggcattaacctagtaaaactacccatcatatctcccaaaaacccaacacccacgaatttcatgtgagaagaagttcacccatacctgatattcgaagtcccacaacgtagaggtgtgcttcac

SEQ ID NO: 155774 - DNA, 430 bp, Glycine max
  unsure (1)..(430): unsure at all n locations
cgctctanattacattgatgtatgtatatattggatgtgtgttgtatgccatttctgttttaagggtagcatttcttggtaaaaactaactttccaaatgtttgccttcgcaggaatggccccgaggaagcttgcctcaaagaggtccatgaaggataaggcggccgaacgaactagtttcgctccggagtacgacagtcaccgctttttgagcgctgtacaccagcagcgcttcgaggccatcaagggatggtcgtttctccgggagcgacgcgtccagctcatggacgacgagtatactgatttccaagaggaaatagggcgccggcggtgggcatcactggttactcccatggccaagttcgatccagaaatagtccttgagttttatgccaatgcttggccaacagaggagggcgtgcgtgacatg

SEQ ID NO: 155775 - DNA, 446 bp, Glycine max
  unsure (1)..(446): unsure at all n locations
agcttgctttaagactgtatatagatttctttattatgcacaccatgtgtncattaccttcaactgagaaccctattggttgggccatacaaacattctcctctaaatctccattcagaaaggcgcgtttcacatctatttgatgtagctccaagtcataatgggctactaatgtcatgataatcctgaaagaatcctttcgtgagactagtaaaatgcctctttataatcaatgtcatctttctgagtaaatttcttagcaacaagtctatccttgtaacgttcaacgttgccatgagagtcatggttagtcttgaagacccacttacaaccaactctcttacaaccctttataatactacaaggtcttatacaccattatgctccatggacattatctcttctttcatggcatttaaccacttctcataattattacaacttat

SEQ ID NO: 155776 - DNA, 260 bp, Glycine max
ctcataactaagctcacctccttgtgaagattcctaaagaagctagagcttatctacacacacctttttaatagctaagctcaccttcttgagaagagaagctagagcttagctacacacccgctataatagctcagctcactctcatgaacaaatacatttgtgataccctaatttcatccggggattattactcgatgacatgcaacctttggttagtccgtttgagatacttgacgacctttgttgcacaatgaatg

SEQ ID NO: 155777 - DNA, 395 bp, Glycine max
  unsure (1)..(395): unsure at all n locations
agcttctatgtaagagggcggtgttgtacctctctggagaaggatccagttcggccccacaagtggatatggaatttgacagacattggttccgaagcaaggaacaccaacgccattttgaagcaatcaagggttggtctttcctcaaggagagacgggtccagttaagggagggagaatatgctgagtttcaagaggaaatttccaggaggcagtgtactcaacttacagggcccatggctaagtatgatccagaaatagtcatcgagctctatgccaatgcatggcacacaaaggagggagtcagggataagcgctcctgngtgtggggtcaatggatcccctttgatgaggatgttattaatcagttcttggggcattcgttggtcctgaaa

SEQ ID NO: 155778 - DNA, 403 bp, Glycine max
ctcagctgataagaaatttgatagaagactttgaggccaatctattccaataaaaaatgagattcttttaacaatttaactaagtccttatttgtgattttcttgatcttatttgttgacttggaacaatgtgtgctttcatcaagtaaattcttttggcatcatcaaaacctgcacgaatcacatatatgtcactcaacctctaggtattgagatcaaaaggaaggaattaatggtgtacaaattgaataacgccttgtatggtcttaaacaagcacctatagcctggaatataaggaatgacttatttttcatttataatgaattcacccagtacacaatggaatatgatgtatatgtgaaaaggaaaactaaggcatacttttgaattgctatatgctga

SEQ ID NO: 155779 - DNA, 429 bp, Glycine max
  unsure (1)..(429): unsure at all n locations
agcttctttcaagaacaagtgcatggtgtaattttaaagccttcaatatgtcctgaaaaataaaaaccatttaaaggtgaaggggaggggggggcagatactcaatagaactgttcatcatagtgatttgatattctgattacctnaccaacagcatgcgttgcagtggcagtcaatgccatgacaggtacatctggaaagtgtagcttaagagatcccaatccccgataatcaggccgaaaatcatgtccccattggctggaaagcataatcttcaatttaattgtaacgagtgaatagtagataatttgatatctcttgttaacaaaaatcacatagctttaaaaactccatctcctgctgaagttgccaattttaaattctgcttgcacaccanagtttgagtttgacctatttttttcatcttac

SEQ ID NO: 155780 - DNA, 484 bp, Glycine max
  unsure (1)..(484): unsure at all n locations
tcttcagccttccttgatgccaagtcaatgtcgattaaaggacttccatcgctttgaagaacatcttcgaccacagatacaacagagaatggcaaggcaagctctggcgccattacttggtctcaaccaaaaccaacaccaacacaaaacacagcaataaatctaatacgaatccaagatgttaactgaaagaatgtatctaatccaagccttccaaaaagagctacgatgatgatgagcaaaatggaaccgtaattgttagctaaattctgagagaaagagagaaaaagaatgaacgtatagaccctgtgattctgagaagagctcctgcatgaagcatcagaatcacagagaaagagaaaggcaaggaattgtagaaagttgagagaaagaaaattaaaaatggctctctatcactnntaaggtatttttttctttctttgtgtagcttcccgtttctaatattgacgtgaaaaggctaaca

SEQ ID NO: 155781 - DNA, 446 bp, Glycine max
  unsure (1)..(446): unsure at all n locations
agcttatctcggcgtttatgcgagacggagactcaacatgctagctatcattgccaagtaccaagaagagttaggtctagccacggcccacgagcatagaatcgcggacgagtatgctcaagtatacgcggaaaaagaggctagaggaagggtgatcgactctttacaccaagaggcaaccatgtggatggatcggtttgctcttaccttgaatgggagtcaagaacttccccgcttgttagccaaggccaaggcgatggcagacacctactccgcccccgaagagattcatgggcttctcggctattgtcagcatatgatagacttaatggcccacataattagaaatcgttaggaaacttgtatggtctctcagaccttgactagatacgactttctttttgaaataaaatgaagtggtcccgtngttctactacaaaaagctt

SEQ ID NO: 155782 - DNA, 313 bp, Glycine max
  unsure (1)..(313): unsure at all n locations
gtaaaagattacacacaaaaaacacgcaagtaatcgattaaaatgacattgcaatcaattaaaatggccctcagtttcactcaaaaccaaaagctgatataactaatcatttaaaacacaaatgtaatcaattaaatatgccaaaacaaactccccctaaagcctttgaatcaattaaaatgtaagagaatcgattaaaatagatcacaaagccaaaagataccataacccataacatgtaatcgagttagatgaagcagnaatagactataccagaacataattccagaacatatgcttaagcccaacatat

SEQ ID NO: 155783 - DNA, 428 bp, Glycine max
  unsure (1)..(428): unsure at all n locations
cttagaaactaagcttttcaagtcagttcaaacctgcggggcattttagtanttagcttcagctaagacctcattagctatcattacaccatggaggatatgtctgcctttgaggaaagcaatttgcctttcatcaattaagtgaggcagcacaagagccagcctattatccacgactgatggaagcttgcttgtggggcttctatggaggctggatctttgagcttcaatgaggtcctttaatggtgattttccaccatggagatgcagcggaagacaaaggagaagaggtgagaggaggcgccatccactatggaataattcatggaagaaggagcttcaccaccaagatgagccttggataagaagcttagagaggatgcttcaatggaggaaaagaaagagggagagaaagagagaggggggag

SEQ ID NO: 155784 - DNA, 304 bp, Glycine max
  unsure (1)..(304): unsure at all n locations
tttttgacttttttgtttcgctttgtttcaatcagnactcgaaaattctaggatagattcttacttcttgaagacatttcacttcagttttaagcatgctgcttctgatatagcaatttatcgcttcaaaacaatgtagatacattcatattagngcttggtcaatttacatattctgatggagcttttaatcatatgcagattcttggctagctaccttttattcaaattcatcccgatcatatttatgatcatacatagngctttgggctgatagcattttgatcttctgacaagatgctca

SEQ ID NO: 155785 - DNA, 431 bp, Glycine max
  unsure (1)..(431): unsure at all n locations
atactcactcttgctgggtagcaactttttatggttaaaatatctatcgttatcattatattctngatttattttatgttcacaaagacaaaaatggattgtgctcttagaatgagtttatggattaatcaatctacaaaaaactggcttctaggattggcttagttttataaggattatattaactttatttctagttgagatcttaatatactacctcctttcttatgtataagattatttttactcaattgtttgtcctttttttttataagatttttttctaaaagtctgatgcattaattatttttatctataatatccttaattaattgagaaattgattgagagaaatgcttcaacagctgaagagtagattcaattaccaaatggaaaaatctcttttggtgagtcctcgagctctaattata

SEQ ID NO: 155786 - DNA, 457 bp, Glycine max
  unsure (1)..(457): unsure at all n locations
agctntacagcagatgccgctntactccttgtttatgttagacatcctcaccaagaaagggaagtatctcgataatgagaaaatagaggagggaagcaactgcagagttctaatacaaaagaagctacccaagaaatttaaagaccccggaagagtcactatcccctgtaccataaggaaatgagcggtagacaaagccctcattgacttatgggcaagtatcaacttgatgcccctctcgatatgcagaagaattgggaatctaaagatcgaccctaccaggatgacacttcagctagcggaccactccatcacacgaccatacagagtagaggaagatgtcctattcaaagtcagccacttcactttcccagaggactttgncatcatggatatcgaagaagacattgagattcctcttgtcttaagtagacccttcatgctgactaccaactgt

SEQ ID NO: 155787 - DNA, 392 bp, Glycine max
tgtaatttggtgcacaattttgcagtttgattctctcattttgattctacattattcctcctaatgggtgtttgtgaatattttgacttactatcaatttaatcaaccatgagttggaatatgtggtgtgtattatgtttcttatctgtgttcttgaaattagttatcatggagttatgatagttagtatttattttacaaagctgcgcatgtattgctccaggtttgagttactgggtatgcatcgtcatccagaacatcgggtggattatatggaatgggctccaggtttgacattatcccctaggttttcttttacagtctttctgattctgaaatccgtagtctaatttattttggttattttcagcaagaattatttcttaatggtc

SEQ ID NO: 155788 - DNA, 385 bp, Glycine max
  unsure (1)..(385): unsure at all n locations
atattatcgctaaatcntaaccttttgaagctctagatgctgacgagcttgacttgttaggttgtttatttatataaacaataagcgtcagaggctccatgtgaatgtgttgggatgaatgatgtgatacattaacatttttggttggaagattttcagtactaagtgacaacttggacttgccactgaaaatgtaatagaataatatgttgcaagtcatggttggtcttaaaatataaaaccagaggggtaaatttaaagcaagttaccttgactgaaaatcgcctatccaggtatgcaaatctggtcatttacatgcaatctaaatatagaactggcagcaaggtggcatgcataatcaattttaattgaaaaacattgatct

SEQ ID NO: 155789 - DNA, 381 bp, Glycine max
  unsure (1)..(381): unsure at all n locations
agcatgcaagctnacataacccttagtctaaactaactcattcaaacataaaaaccctaaaaatctaaagctacagttaaagtcttctaccctaaagntaagacaagaaaaagagaaaaaagatcaaagaacttacttggacggagtatgattgatgcttcaaagtcgaaaatgcacaaagagagtacaaatacaaaaagtgcaaatttttggagagagagaatgcataagcgaagntnctgtaatctggaaaatgtgagagaaactattgttacactcacttaagcaatttcgatactttcgcttagcggaccgnagcgctaagcgagcaagagagacgtnagagttctcaaccaggttcgcttagccaacatttcaaat

SEQ ID NO: 155790 - DNA, 416 bp, Glycine max
tgaagaatctaatggaatcgctagagacactactatcattgtcatactacacacatgagtccgcttagaggtaagagagtaggttattgccattggggttaaaatgaacatgtgtcgagatccttagagaatcaaaatagggcttattttgtgatgtctattgtattgtaattctgcctttacgatgataatcatgagactgatatgtttgatcagcaaattgatgccctgatgcgatttggttgataaaattgagcgctcttggtgttttcgcgtttttgaacctatgattttgattcctttgattttgatatgattatgtgaaactgttttaggggttatacttcccatgctgtgagaagcatttctgtataattcatttgtggtttggacatgatttactagattaacatgag

SEQ ID NO: 155791 - DNA, 256 bp, Glycine max
  unsure (1)..(256): unsure at all n locations
aaaacnctgctaatgaaatcactacaaactaagatcaatattttgcatgaatagaaagatgaagactgtatgcactatcatattactccataatactttcccctcttagaaaagaggtgcattcaaggtgagtaggccatatctaattctacacatcaaaccaagtaatagataagtcaaacctgagaaaaaaaaataagttagccctacaaacatgggtagcagagtaaaatattgcataattcaccacacaact

SEQ ID NO: 155792 - DNA, 418 bp, Glycine max
cgtaccatgaggtcgcgaagaagaagaagaagcgatgtttaatattaaaactggagcgtgaggaagaagaagaaaattggagcgcgaggaagaagaagaaaaacagagtgcgagaaaggaactatggctcgtggtctcatattttaaattataagtacaacatcagttttcttcaaaaaaatcgatgttaatccatagatgttaacgttaacatcggttttatgagaaaaaccgatgctaacatcattagttaacatcggttttcgaaaaatcgatgttaacgtgtatgcattaaaatcggttttttggaaaaccgatgttaagaaggataatttatttacaaatatgtcaccgcgtttaaattaacatcaggtttgtccaaaatcgatgcttataggccgatgttaaaaatgctttt

SEQ ID NO: 155793 - DNA, 338 bp, Glycine max
  unsure (1)..(338): unsure at all n locations
ctactttgtagtaacatgaatgtttcaggatgtaatgaatgagatgcttggctgtattttctttctgagatgattgagtaggtacaaatcgattatttttttaggaatataacttcataaatcattgagaaagnatnatatatacttatttatatactgatggntttattaaataagctgaagaggnaagaactgtatttatgctcattgagtgagatcttctcatatttactttctcatgtttatttcatgagcaaaagaaatgggactcattttcaatacattnttatgaaaaaattatctccaatatcttctattatttttcttgtgcacaaccc

SEQ ID NO: 155794 - DNA, 413 bp, Glycine max
tgttgtatctcatcaagggttatgtaaccactgcctattttgtcaaaataggagaaggccgacactaggttttcctctctctccagcttatttaaatggacagtggcagcaatgaattcaccataatcaattgtcccacttttatcaatatccgcctgccattgccaaataagatcttatgttaaaaaattaaaggcaaagcatcatatatcaagaaaatgaacataatttaccaaaaagaaaatgctaataacagacacttttcaaaatactcttttgttagatgaaattcatgtgatccttatttgggtcaacccacatagatttcacctaatgatagtatgttgaagagtattacactgttattagcattcctaaaaaaatcttacagcatccataagatccttgatttc

SEQ ID NO: 155795 - DNA, 411 bp, Glycine max
  unsure (1)..(411): unsure at all n locations
agctnagacatcaaacttactcactttttttgtttcattgnatacaagntgggcaagcgtggtcttacccaacccgcccatgcccacgatagaaagtattgatagcttttcatcagagtcagaagagatccagtcgaagatcattttttgcatcatctctgccataaatatcactttctaccaccgaagatgttgatggcaatttctctaacactttactacccgatcctgatccaaccccaacaccactagtccttggcaaacctagataaccactttggctttcaagatcatccaggtctttaaagatttgntccatccttgattcaatttccttgccaaaagagctcaaagataaaagttagaagaaattgctcaccttgtttagaatgggctgggattcatcttcta

SEQ ID NO: 155796 - DNA, 388 bp, Glycine max
  unsure (1)..(388): unsure at all n locations
tcccaaccacccncaacaaaatatattgttgaaagatcttttttttacttccaacgagataattgtttttcttatatcataaaagtttgctataattaaaagtatgttatctcttaagttttacttatgtaatatggaatttatttgttacaacatggaattctatacttaagaaacattgtttgtcaccaatgatgtcatttagcttaatattgaaataaaaaaaagcatatacatgtgtttagttgtaaatagtttcaatctttattagttttgaaatattcaccaatgagccatctaaaatattgggtcaataaaataaagtaatttaaatatacttatcttataattaccattataactactacttttggtattaaaaatattg

SEQ ID NO: 155797 - DNA, 436 bp, Glycine max
  unsure (1)..(436): unsure at all n locations
cggatccttaagcacctgaagctgcagcttggatgaagaagagnagattttttaactncctgcttnnattgnagaccacagattggcactaggagatatgtcgaggggagcaagagaccttggggacgtcaagtggggagctattgcccaaaaccaagcttgaccaatcccgacccaacccgggcatagtcagtcagagagaacctgagatgtacctaaacaggcgatctcctggcagncaacagataaaaggaacaaagacctctaagcaaggaagcttgtggtggctggccagctgagaattctgagtaatatgaggatcatggcctctggaatcgattaccaaaggtggagaatcgattacaaagcttaaaattgaagacaggatgctaagatggnctctggaatcgattaccaaaggagtgaatcgattacc

SEQ ID NO: 155798 - DNA, 392 bp, Glycine max
tgcataggagaaatggtcctagaggcacgccaatgcatttactccccatgggtacttatggcaagcagttaggttattgaagtattggagataggtgacatgaatatgagtcaagatcttgtcaacaaatatcatattgtcaagagataagtcatggcagcccaaacataaaagcctgacttaacatatctcttatatagatctgcttgtcatgtcaacctcacactagcacctgcatttgctaccattgtttatgttggaatgttgaggtgagtcatcaacaaaaccttcacgtgtctctattaaaggtcaaggggacatgatcaatgaacctgctgtcataggcaagtgcaacagacaagacacatcatccatagtgatggtcatctctt

SEQ ID NO: 155799 - DNA, 242 bp, Glycine max
  unsure (1)..(242): unsure at all n locations
tacttcactttcagtgtttctccctccagcgaaacgcgcgtcgcgtaccacgcgtcgnccttgcacgctctgaactccaccctgtagtatgaatcgctctccgccaacagcggnttcttctccattgccttcgctaaatagccaactaaactgcgncgnttcctttgctttctgctgctgcttcgnatttctattaattaactnttttcttttctcatcgngatgctgctattcgctaaaaa

SEQ ID NO: 155800 - DNA, 426 bp, Glycine max
  unsure (1)..(426): unsure at all n locations
ctcacgctttaagtattgaagcaagtcacactgagattctatttgctcagtatcactaccatgtntaccttcaaacatggaaatttcatattattttttccagcctttggtaattgatttactaaataacagacatatgactacaaataatcaagcccctacgtgaaaaagatataataccagttagagagagtctgtatcatattccctagttgatcaggcctcaagtccctaccagctgcaaattggacctgaaatcactctcaaagatcaggtaaactactactactcattaaatgaaaatatagaaatgggtcaaaaacataattaaatataataacagatgataatgagctaggacctcatagcaccgccgcaactgatccaactatcctcgaactattccctgatgggagaaacaaaagt

SEQ ID NO: 155801 - DNA, 382 bp, Glycine max
agctcggaaccaatacatattcaaaacaacagagtatttcacatcatcaaaacagaaaaaagttccaaatgaaccaagtttaataaaaatcatcatcttcaaggcgggagattgcaacagaagtaacgtcagttatcaatggttctgtcggttcacctatattgaaaaataaaagttagaatataaatatttaacttgacaaatttaattcaatctttaaaaagaataccttcatcatcagactccatttcagtgagtaaaatagcattttcatttcccacattagaattaaaattacctatcaatataacacaatataaacaatgaccatctttaaaatatacaaaattattaactaattcaaataccttcatatttaaat

SEQ ID NO: 155802 - DNA, 283 bp, Glycine max
  unsure (1)..(283): unsure at all n locations
tttcagctttaccttctcctccattgntgttcttcacttctatccatgtatctccttacatttcttgntctgaatgtagntaatgagattctttagaatttccaccgacaaaacttgctatataagntagatttgattttctatggntcaaatttcttgttattgaactatgaattatgtagagtttaagttcccttgagttttgccttgctctttttgtggctgaaacctacaccataaaattcttacaaaaacattaaagcagaagacaacctccaaaatc

SEQ ID NO: 155803 - DNA, 403 bp, Glycine max
  unsure (1)..(403): unsure at all n locations
ctcaagaaagcttctcaggaagcatcnattctataaatagaagcatgtgtaacacttgttgtaactttgatgaatgagagtcttgtgagacacaactcaaagttcaacttctctacctcttttattccttcaatttcgtgctcccccctctctctttccctccctctttcttttcctacattgaagcatcctctccaagcttcttatccaaggctcatcttggtggtgaagctccttcttccatggcttattccctagtggatggcgcctcctctcacctcttctcctttgtcttccgctgcatctccatggtggaaaatcactattaaaggacctcattgaagctcanagattcagcctccatagaagccccacaagcaagcttccatcaagtgggtatcag

SEQ ID NO: 155804 - DNA, 395 bp, Glycine max
  unsure (1)..(395): unsure at all n locations
acctgaagctgcaagctatcctccattagctgatcatttttcttatttatcagnaggctggnagtgccacccaaagtttctctcctcaaagcaactcaaagagatgctataagaaactattaccatgaaatgcatgtcatccaggacatgcttgntcctttgtacaaagagggagaagctttagaaagggttcaccgagagatggaagtacattttcttcttacccaatctttatatttataatggtctacttttaaaggaaagctgcttaacattctagntttaataatatgaagccaaagttggggctgaactcatggntattttgcaaacaaagggcattttcattgtctattntgttctaaatgaattcctatgcttttcttccccaactc

SEQ ID NO: 155805 - DNA, 342 bp, Glycine max
  unsure (1)..(342): unsure at all n locations
ggacctcacgngagaaagccctgaattgaaagccttcaaccactgctgcttgatcatcatccaattcatcatcaagaatcccacattcagaggctatggcccttgctgtgtgcgcattatctcctggaatcatcttaatcttcactccaacattcttgcacgattcaactgctgatccaactcctggcctacaagggtctttcaacccaaatattcccaacagcgtgagatctggctcttcaagtgcaagtttctcgcataaaaagctctntcgggcacaagcaatgcatatcaaacatttcgttgccatgcactcgacatgttttttatttgaaccctctc

SEQ ID NO: 155806 - DNA, 447 bp, Glycine max
  unsure (1)..(447): unsure at all n locations
atgctagaagatctatatatggactaaattctttcttttctccaaagaaggnatataaaaggncatagagaggtctccaaataaagattagagaaaaatgtagnagaccaatgcatataccttaaagntaatgggagtaagtttatttttttagttccatctgtaaatgacattttacttgcaagcatcgacttgggtctttcgcaagacactaaattntttctctcacagaactttgatatgaaagatatgggtgaaacttcttatgtcattggcatagaaattcatagagatagatctctaaagacattgagattatcctaaaaggcctacatagaaaaagntctgaaaaaatttattatgcagaatagnncatccattgttgcacctatagntaaaagggaaaattnagnctcaatcttttgtcccctaacaatattggaacaa

SEQ ID NO: 155807 - DNA, 296 bp, Glycine max
  unsure (1)..(296): unsure at all n locations
ggatgcagggggaaatttaatcgccgccggtagttaatataaaancaggagaacaaggagaccctctgaacgctatctgtgctacggcatgagtaacctttacccatcgactttaccttttatgccaatttggaatctttaatcatgaaggttaagagaaggagcctgtgtagtgtgtagaggagggaaaataagggatgcctaaaaaaattatgaatggaagcttataaaatatgaagtacaaatacatacaatgttgcacagatctaaagataatggcgaagagngacattagg

SEQ ID NO: 155808 - DNA, 321 bp, Glycine max
  unsure (1)..(321): unsure at all n locations
agctnagaagataaaaataactcnagagctcaactcttatnannncnnnnagaaaaagaattatgtatattcttagaaagntaaaaaaagctctcaaaataccttgaacatattgagagaaaagactaagtggagattgnaaatctgnctttaagacgatcatagatttagntattgagcaaacacaatcaacaaatctcttatgatttgtttagagccaatagtggcttggnatagacaaagaatattaggngttatcaagcttggggtagagnntaatnagtagagccaaaagatggcgagacataatacttttaattt

SEQ ID NO: 155809 - DNA, 350 bp, Glycine max
  unsure (1)..(350): unsure at all n locations
ttctttganagaaaatggaggagatagtagtcaaaaagcatgngtacgtggaagaggacgtggtcgtggacgtagtcatggccaaggaagaggaggaagaggagatcatgataattttgacaataatgaatggaggagccatcaatccactagaagtcgtggaagaggaagaggaagaggtagaaacaattatgaaaaagcatatgaaaggaggtatgataaatctaatgttgaatgttttaattgtcataaatatggccattactcttgggagcgtacaacaaatgttgatgagaagggcaaccttcgtgatgatcaagaacaagtccatctagtctcactatctacta

SEQ ID NO: 155810 - DNA, 243 bp, Glycine max
  unsure (1)..(243): unsure at all n locations
cacccaaagaagatccagggcgacgtgtgcaacaaacacgaagcctncgncttctgcacagccgacgaatgccgcctctgcgacgagctcgaccaccgtgtccaccatgccaacaaactcgccttcaaacaccaacgcttctctcttctccagccttctcataaacaacaccctctctgcgatatttgccatggaattaaccaaccacttccttttcaaaacaaaaacaaaacctaaaaaaca

SEQ ID NO: 155811 - DNA, 378 bp, Glycine max
  unsure (1)..(378): unsure at all n locations
tctctctctttgtaattaatctagctacaacctttttggggggtgactgcagcatccaccaaacaatccaaaacaaaatttccgtacccaaaaggagtgccttttagttatcaccacttcatgaacaatacttgttacctaattcccttttaatctttcctaaatccaaatttaaatcaaatgccagcacggttttgtcctccactctctcatcatcacactctgttagtcaccatctttatgcatgctcagctcanagttcatcactcaaacacgccactcatgaatattagcaatcaacattntatggatgcacttgttgggtatgggagtttgatatacacctttcatctcataattccaatgcccaataaattc

SEQ ID NO: 155812 - DNA, 200 bp, Glycine max
  unsure (1)..(200): unsure at all n locations
cccaaaacgcgaggaggcaatagagaagcaccaacncacacacacaaaaacanaacaacaagaacaagaagaagaacagcaacaacaaaaagaacaagaacaagaagaagaagaagaacaacaagaagaagaacaagaagaanaacaagaagaagaagaagaagaaggacacggaaaaaaaagaaggaaaaagaagaaaa

SEQ ID NO: 155813 - DNA, 303 bp, Glycine max
  unsure (1)..(303): unsure at all n locations
acctgaagcatgcaagctcaaactctatgatccgattctttatctcatctctcagnaaatnnncacacaaatctttgcagagacaaacaacaagatctttttaatgccatgggctccatgtatgccgctgntctccttattggcatttagaatgccaatgcagagcatccagaggttgctgttgagcgaacattcttttatagagaaaaagcagccggaatgtattcagctttaccatatgcttttgctcaagcaagctaatcctcattttaaaaacttatctattgagagttgctatatcct

SEQ ID NO: 155814 - DNA, 425 bp, Glycine max
  unsure (1)..(425): unsure at all n locations
aatctcagcttaagaactgggtgatttgagatatataaaacatatggtgntttcattctgtngngctagctagctatcttgacacttaaggtcaagtgagatgtgagatgtgagatgtgagagtgttgctataacaaaataatgcatcgtgaggaattggactggatgaaagcttgttatcaattgtacaccgcacaaggaaggaaccaagtataggatgtcaatttttgatttgttgggaatgaaaagcattattatcatgaacaaatgcatcaattatttggtgcagagtgatgtaagatcttattggatttttatattatataaaattttcttagattaatagcggtcatacatcacaagtagaattagtctctgatccaatagattaaaagacatttgtctcttaccccataaaaaaaatg

SEQ ID NO: 155815 - DNA, 410 bp, Glycine max
  unsure (1)..(410): unsure at all n locations
gacacatagaaactcagcttcctagaggatcgttctaatggatctacaatagctaatttctcaatgagccggngaagaagaatgtgacatttacctgaggtgaaaaacaagagcaagcctttgctttgctcaaagaaaagcttactaaggcacctgttctagctcttcctgactgtcctaaaacttatgagctaaaatgtgattcctctggagtgggacttggagctgtattgttacaaggagggcaccctattgcttattctagtgaaaaacttcatagcgccaccctcaactaccccacctatgataaagagcattatgccttaataagagccctccaaacttgcgaacattaccttgtgtgcaaggaagttttcattcataatgatcatcagtcacttaagctcatt

SEQ ID NO: 155816 - DNA, 343 bp, Glycine max
  unsure (1)..(343): unsure at all n locations
agctntgaacaaacgaaatggcatcatgcagcaaaagagaaataacaccacaaaatacccatattaccttacacttacccttgtctcaattttggagtgaagttgatcatcactcagagagactctttatttatcctttgattcgcaggatgacaagatgcaaatgcatgcatgcttatggnttggatgtttaagagcaacaattaaataggagttatagagttcgattttacttacgcttacggcaccccatgatttgatgccaaaagcttcgtattcaagatcgagagtgtgtagaaatgaaagtcacaacacagaaattttaagatgcaaatcattaatc

SEQ ID NO: 155817 - DNA, 428 bp, Glycine max
  unsure (1)..(428): unsure at all n locations
ntgcctttagggcttgtacgtcatcactttcttccaaatctttaacctcattgtctctcacagtctttagatttgggagccaatccaatccttgtgtccggactctcagccacttatgatagccgccgatgatcccattactgcttcccctaagctctctgtcctttcttcacgccgcatcccatgccttgcgaactccttggagtaccctagcattgtggtcactgaaacctcgtgcgatgaaaggcgtgatgctttcgtctgatggtactcctctcatgggacatccttcgcatgaagatagaatcctgattcttccttccttctagcgagggaaccatttaacagacgcccctccatgctagccaagaagtggtcccaattcgtctttcttttttcgacgcacgagcggtgaccttgtagcggat

SEQ ID NO: 155818 - DNA, 340 bp, Glycine max
  unsure (1)..(340): unsure at all n locations
ccccggcgngacgacagaangaaacaacaccggcgggcacgctccangagaataagacgggcctgacggggggccaacagcacngncaggacgctttgcaaatgataggaacatgcttatacagaacacgtgcttctcgagagagtcattcgccatgtactcataaaccgggactctgagacggctttgaccgcaaaatccatgtagacgaactaaagtgaaatgaagaactgtaccaataggaacatcttctgccatacactgctcactcattctcttctagaactcccacgcagaacctttacaactatgctggttacatcaccaaaacttactgtat

SEQ ID NO: 155819 - DNA, 334 bp, Glycine max
  unsure (1)..(334): unsure at all n locations
tcgaaaagatgtgtttntgcgcaatccgtgattttccgtaacttcttggaaagctaaaaaagattaaatacataattccgaaagattcgtagccttgcggaaaggatatatgtatcgttacgaaatnctnaaagnnncgtaacgttacgtaatagtattacctaaaaaatagaaaggggggtgcattgagnaaaaaaagggtgcaaatagtaaccaggcccacttgggccctccaaaagattcctccagaaagctgntgcttctggaagaagcaaccttgctcgcctgggcgagttgggcggcaagcttctcccctttttgcttaatttggggg

SEQ ID NO: 155820 - DNA, 376 bp, Glycine max
  unsure (1)..(376): unsure at all n locations
tctcggctcatgctgggaacgcctctagttcaacactcgtgcatcnctatgcacccacccagagggaagctccctaagttccaactccgaacacggctcgaccggccggcaattccaacacgacaaggaacttccctccaaggccattgccggaattcaccccgctcccgatgacgtacgaagatcttctaccatccctcatcgccaatcatttggccgtggtaactcccggaagggtcctcgaaccccctttcccgaagtggtatgaccctaatgcaacttgcaagtaccatgggggtgccccggggcattccgtcgaaaaatgcttggcccttaaatacaagggccaacatctaatggatgccggatggctgac

SEQ ID NO: 155821 - DNA, 381 bp, Glycine max
  unsure (1)..(381): unsure at all n locations
ctaataaacggaggactggaaattcatgccttttagctttcaaatataaacactacaaactagtttttgaaacaaacagggataattgtgttttaggaaagacaatgaaattgaatggttcgttttaacaactaaaagctaaaaataattacttcatcttgttttaaaatttaagatggaaatgtttcaaaattaagttaagaaataattcaactcaattttaatcacaagctgattttgaaatttacatctgaaaaccaaaaactgcgaataaacaatcgatcagcacttggttctattgttttataattttaaggttttcaaattaaaaattaaaattatatgaaattctatanccatttcttattttcgctattcttt

SEQ ID NO: 155822 - DNA, 432 bp, Glycine max
  unsure (1)..(432): unsure at all n locations
agctagctaatctgggattcaagtattctgtcttatttcttcctccctccttcctcaatnagaacttggagatatccagtttctgttttttaaactagatgattttcccacttcatttctaactttctttttctttcgacttcaagtgagtagagacaaagaaagatccagtctgcacttgttccaacctaacaccatactttgtctctgacatattttagaaatcaaatatattgtatttcattggctattattggttatttctttgtgcgtagttttccttgtcacttgattaatccgataactaaaagggtttagatggaaaaccaatgtcagacaacaactctcctgatacaaagtatgattgttttgntagcttcaagggcaaagacatccgtgacgggtttcttagccatctgactgacacttttc

SEQ ID NO: 155823 - DNA, 350 bp, Glycine max
tggccaaaccaaaatcagcaactttaggacagaagttcttgtctcttagaatatttcctggtttgatgtcataatagattattctttgttggcactcttcatgtaaataagcgatgcctcttggtgtgccaactgcaatctcatgacgcttttcaaatgataagaacatgcttttacaaaacaagtacttctcaagtgtgtcattcgccatgtactcataaaccagtcctctgaagtgactttcaaagcaaaatccatgtagacgaactagattgaaatgatgaactttaccaatagtagctacttctgccataaactgctcaataattctcttctcagaactcccacgt

SEQ ID NO: 155824 - DNA, 332 bp, Glycine max
  unsure (1)..(332): unsure at all n locations
ctaatantgctagctgcgcaataatccaaattaataagccgggcaaataatcttttttgcagagaaattgcataaattctacactacaaaatcaagattgaagtacccaccaagttatctattaatagatttgagcaagctttctaaatttttgagtttatttatttttcaaccgcttcttttacacaaagtaatactttcctactacactccacctgtgaagtccactggtttaagtcaagagatagtctatcctgactactttcttttagctttctttgtttcatagaataagacctcatctccaagcatttaatatgaaatggaaaaag

SEQ ID NO: 155825 - DNA, 382 bp, Glycine max
  unsure (1)..(382): unsure at all n locations
tactcacgcttgttaattntctaatttcttacatgttccatgaagngtgtgtggatcattttagtgacctgtggaaaaagcatcttttggaagcaactatgtccaatcttgtttcattttaaaataattctaaatcctcttatatcatattcttactaatcctcccacttactaaatgaaaaaagtatttagtgttttttatgttttcaagatattaaattcatttaccttttccttccttcatattcttaaatattggtgctgtttacagaggttggccattaggattttgacgaagggtagagctcctttacatattactaaggaaatgcaagtacagattggaaaatgctcagaatcaatgttcaagctaacatattat

SEQ ID NO: 155826 - DNA, 358 bp, Glycine max
  unsure (1)..(358): unsure at all n locations
tctcacgaatgtttctgtgcttatgcaacaattgggagccatggctatacgagacatcttgccaaacaaagtcaggttagcgataactcgcctgagctttttcttccatgctatttgtagcaaagtcattgatccagtcatgtttgatgagttggaaaatgaagccgcaattatactgagccagttggagatgtattttccccctgctttctttgacatcatgattcacttgattgagcatctggtcagagaaatcaaatgttgcagtcctgtttatctacggaggatgtacctggntgagcgatacatgaagatcttaanaaggtatacaaagaatctatatncgccataagcatct

SEQ ID NO: 155827 - DNA, 432 bp, Glycine max
tgtagaatggctagacatgatacatgtcagggtttggtttggttcaaggataaaagggatgccccacattatttccatgacacaaatgcaaaaatgatgatttggaaattttatgcaaaactggtcatgcatgcacctatgcggacactcaagtgtcaaatttttatggtcatgtgatgctagggttcaggattcatttcctctattttagtcaacccaatgtttccaaaatatgttcttttatcaatttgtgcattcctccgagtccatttcgggcgtccggggaaatttcacagcattcacccttcaggtgtagacacgtttttttcttcaaaaatcggttatgatcaatgaatgaatttttttcaaagaaaagttggaaatcgtctcttttcaaaagcatgttggtttttagctagacaacttattttc

SEQ ID NO: 155828 - DNA, 414 bp, Glycine max
  unsure (1)..(414): unsure at all n locations
tcattagncatgcaatatttgtatcaatgtaagcaagctctatcaactcacttgtcaaacaactcactgcacttagaacctgaagccaatgcctagaaactacaaagcaaagaaacctgaaatgcaacatagacgcagcgttgcttaagagacattcaaccttaggagtagccttttatttgagagatcacaatggaagctttatccaagaaagaactaatgttatcaaaagttacctatctcccaaagaagntgaagcatgggctcaagatttgacaacttcaactcccaaacttgagttttgagactgattgcaagatagnagncaacaatcccaataatcgctcttctgatttggcatatttccatatcattataaacaaatgtagagctntactttatcatatgccaaac

SEQ ID NO: 155829 - DNA, 306 bp, Glycine max
tgacgaaacggtagacacgctgcgtgtgagggaccgtctatattaaaggctccacaggatgcggcgcattatctacctgacacaggggcgacactgatgactgggagaacttaagcaaaactggacaagcctgcgcctcagctgacacccaagtgctaactccatatggaagtgtgaaacaaaggttcaggacccattgaccccatacttcaaaacgcaaagggtgcaaaatgtgaccttgtacccctttgcgcataacgaccaaaccatatcgcacggcctatgagattagccaccaccgagccg

SEQ ID NO: 155830 - DNA, 421 bp, Glycine max
  unsure (1)..(421): unsure at all n locations
accagacatatagagtagagaaagtttcacagaattaccactcaacctgagtagnacacaccagtccaatataaagaaaagtttcacagaatctacaatgaacacgggacaattgagagaagaagttctagaaaaagcagaagatgacattataagacaaaaaaaatttagagtagtaccgagttgtgaaatgaagaaggaaaaaccaagccactcttctcactaagctactctttctcataaccaggaatgaccacacattttagtagtcttactcgggttcgntggctttattagnctctctctcctaagtnagnataattgcntgctgagaaatgctctcactcataaaaatatatatttctagtacaagcttaaactttttttagcatgtattnacaaggaaaaaagctctgagttc

SEQ ID NO: 155831 - DNA, 427 bp, Glycine max
ctcagcttatgatgaatcaagatgattcaagaagtttgttgtaatcttagtgatgacaaaaagctcaaaggtcaagaacacttcatgataacaaagatgatgatctcaagaatcaaagaatgagttcaagattgaatcaagaacacttcaaagttcaagaggaaatttgatttcaagaatcaagtttcaagatcgaggttccaagaatcaagatcaagattcaagactcaagattcaagaatcaagagaagactcaatcaagataagtattaaaaagttttttcaaaaactgaatagtacatggatttttctcaaaaccttttaccaaagagtttttactctctattaatcgattaccagattattgtaatcgattaccagtagcaaaatggttttcaaaaagctttcaactaaatttacaacgttc

SEQ ID NO: 155832 - DNA, 198 bp, Glycine max
  unsure (1)..(198): unsure at all n locations
gggggctgagtgaagagtgagaaacaccntctggctttaaataaaaaggttttcctctttttctattattgtttttaagcaatgccacatgtctccatttgagtggagcaaaaaaggcccactttccctttttgactgagacccatactctgccacaaatgtgagaaaatctgaccctcaattcgctaaaatcctgcc

SEQ ID NO: 155833 - DNA, 375 bp, Glycine max
tatatcagaaaattgaggccaaaaaggttattgattgatgatacatgaactaattagacagcaaaagctacagtacctaaactgggagcagcaggacaaacaattagtgtctttggcttctagcatcaatggcatcgagtcttcacacaaaagcatggttatcaaacaaatgaagttaatatgatgtgctctgtaaaagttttaatacacctatgaaaactaatattcatgtgctctgtaaatcaattcatagtactaaacatgtgattatttacctgaaattatgttagctattatttggacatggtttggatgttttaacttgaacccaaacatgtactaaaagtacctagtacctagtaaactggttctatg

SEQ ID NO: 155834 - DNA, 227 bp, Glycine max
  unsure (1)..(227): unsure at all n locations
gaacggnnacgaacccggaatgggnntatgcaaagacaacggcggcataactagcctaataaaagccaaaagaaatcgagggaagtatgggttaagctataagcccactcaagcagatataaagagaagcatcgcaagaaagaagaacgagagtcaaagctcgcgggcgagacaagaaagagaaagaagcccgccctgccacataagtagaaactttataagcatgg

SEQ ID NO: 155835 - DNA, 284 bp, Glycine max
  unsure (1)..(284): unsure at all n locations
tgtaacgtcattggcaataacgggaacggcgaggccgncttttcttccgcgggacggggaggagagaggagatagacccgccattggtgctggcttgacacgaagagagaacagacctcgtcttggcactgacgggacatgccaacgtggacagttcctccattgggtcctacgacacacttggcgattgttgttgcttcatatcatgcgctctgatcgggcgggaccttattatgctggttaggcttgaaccatctaggcggcacatcagcacatacagctgc

SEQ ID NO: 155836 - DNA, 422 bp, Glycine max
  unsure (1)..(422): unsure at all n locations
tgcatacatggtcataaatatttttttaaccattattgtatactatagtcattatacttggatagttttgttaaaattaaagactgaagttaaattgcatatacaaaattttatctctttgattgaaaaccaatttcaagcaaaggagaaaattattagacacgccaatggtcctgaatttctattaaaagatttctttgcttcaaaatggattttacatcaaactagttgtgtttacacaccttaacaaaatgggagttgagaggaaacatcaacatattttaaatgtggcaagagcccttatgcttcaatctcatatcccaagcaagttttggtcatatgcaattaaacatgttgtttatctaattaatcaagttccatccccaattaattggaacaagactcctttngaacttctacgt

SEQ ID NO: 155837 - DNA, 80 bp, Glycine max
  unsure (1)..(80): unsure at all n locations
ccatcagagagcagactgtgggcgcgaatgctttcanaagagaccatctttggtgattaggttgtacaactaaccccctt

SEQ ID NO: 155838 - DNA, 425 bp, Glycine max
  unsure (1)..(425): unsure at all n locations
tgccaatacaaagaagaaaggtcaatacttaatagttatctaggaaacaatcttagaaccaagcttggacaaggcagtagtgagtgtaactcctgttgacagagagtgtatgaatgagatttggaattcctagaaaaaaactcacttctagaaaatccaatagcaacaagaaaacttaagagaaatgctagttattatgtcatagaaggaggagacctgtacaaaaaaggcttcacagcccctctattgaagtgcctaactcgggatcaagtaaagtatgtgataaacaaaatgcatagagggatttatggaatgaacttgggatcttgttccatgactacccgagtactcaaagtcagatactatctgtcaacaatgagaaatgactaaaccaaatacatgaagaatgcaaaanaattgcaaca

SEQ ID NO: 155839 - DNA, 392 bp, Glycine max
  unsure (1)..(392): unsure at all n locations
cctcagnaggaggtntagttttgcatatacctattagtagggcactagagtttgaactgggacttggacaaaatgaagcggccttatccattggaatttcgtataggctcagagtcatgttacttatagtttacacagnattatccgncatgtcagaaaactaaagtagctttaagtagcaatgctttaagaagcatcaaagagtttttcttcttagccatcccatctgcacttatgatttaggaagtttctagttttgcccctgtatgaatggagaaattattacatggnttaagagtaccatggnccaagaccaccatgattccatactattttccatgtgacatgtatacccgagttaattaactctttctcgtaatagaaaatctaat

SEQ ID NO: 155840 - DNA, 400 bp, Glycine max
gggaaagaggaaagcataatcatttcttagaagattgtttataaagagacaagaggtagagtttcaacggatgagacgaaaaccagcttaatttacaatacgattttcagtattttataatttgtagcagtaccacctattagggttggggtgtgggcatattctcatagacagaaaatgggtgacatacgcatgatatgataagcttacattacgcaagtaatttttttttatatatattaattatagtatttcgtaaaatgcgctgtgcttttctttttataacttttagggtacgaaaatacctttgtttaagtgcacactagctataccaaaaaattacgatagtaaaatgtgtgttttattaaaaagtacgatagtaaaatttattaagggatat

SEQ ID NO: 155841 - DNA, 235 bp, Glycine max
  unsure (1)..(235): unsure at all n locations
atccagcttctgcacttatcttgttatcttagnctgcttctttgacgagcaagaaatcatttgatctctcatgggtctggnttatgtcccccatgattattntgntnntctgatactttntttattaatatatccttggcatgttgntttgtcagataattctgtggagtcaatttaattgagatagtttgcacttcctgtttgcatcaactagnctttttttgagtgaaaaata

SEQ ID NO: 155842 - DNA, 423 bp, Glycine max
tcacctgacgtggagcatcaccgggtcgaaagtacagtattgtttcagaaggaagtccatctcggccagctcgaccactttcctgtcaagaaaagttacataaaaaccatcccttggctttctttcaactgccagcttaagcatttaagatcaatggttctttgtattaattattaaaacgtctatgcagcccccatttatcttcattaaattgatttttagcacaaggtttgggaagcatgggctttatccatgcttcaagcccaaaatacttttgcatgagattatgttagataaaaaccattccaaggccttcacccaacaaattaagcttctaggatgattggatcttgacagataacatagagaggttagctaataggagaaaatattattaggatcagggcaaaacctggtagtatg

SEQ ID NO: 155843 - DNA, 377 bp, Glycine max
  unsure (1)..(377): unsure at all n locations
gacaagaggcctcagatatcttaagatgggggggtagaatnaagatattacaaactattcccccaattaaaattctatttcactttctattcaagttacaaattcccttaacaatgaacttcttaaatattgattcaaatagaacaatctgaatataaatataaaacaataataaataaaagagtttaaaggaagagaaagagcaaactcggatttatactggnncggccacacccttgagcctacgttcaggccccaagcaacccactagagatgcccactatccttgaaaatccttttacaagccctgaacacacaaagacaatcctcccttagtgtcataattctttacaacagattaccctggctctaatccc

SEQ ID NO: 155844 - DNA, 403 bp, Glycine max
tgtaactgaagtggtcgaagaagaacgagattgctctcttatctaagagtgaaacacatttgaaagcattaaacatcaaagtcaattctgacttaatttcatgaactaccaacttaaatgttcttgtaatgaaaacatatctaacaagtctaatccacacagtctcgatcgataatgtataaacatctagttcgtttgtaatctgagtgaatttaaccttgaattttttagacaatacaaacgagagaaatccaaaactaagaaaaataacgagacaagtctatgtctaaaaagagaaaaatatagagagaagtctatagtttgatgttttttttttttaatataaatgctatgtctcttctacaggaagaaaacgttagtgtgagaactcattctctccaat

SEQ ID NO: 155845 - DNA, 268 bp, Glycine max
  unsure (1)..(268): unsure at all n locations
ctccttaacctccattaattntttttctttaccttctcttccatagntgnttcttcatttttctccatgtatctcctcacatgtcttgttctaaatgttgttaacatgattctttagagtttccaccgattaaacttgctatagaagttagatttgattttctatggttcaaatttcttgttcttgntcttgaaccatgaatagagttgagtttaagctcctttgagttttgtccagttattttttgtggctgatacctaaaccataa

SEQ ID NO: 155846 - DNA, 404 bp, Glycine max
  unsure (1)..(404): unsure at all n locations
tgctctaaatntacattgatgtttatgggaagaggttgtattccttttttgttttaagagtagtgtcccactggtaaaactaactttccaaatgtttgccttcgcaggaaatggccccaaggaagcttgcctcaaagaggtctaggaaggacaaggcagccgaaggaactagttccgctccggagtatgacagtcaccgctttaagagcgccgtacaccagcagcgcttcgaggccatcaagggatggtcgtttctccgggagcgacgcgtccagctcaagacgttaaagaagcgctactaggaggcaacctagtaccttttaaatttctgcctgctatttgatcactttttatagtaggacgcacctagttgctcatgatcctgggaatttaaataaaacaag

SEQ ID NO: 155847 - DNA, 287 bp, Glycine max
ccttaatatatagagacgctcgaagaggaataccgaagccctgagcaaattcaaacgacaataactttttactcagatgtcagatagagtcctagaatatatcgatactctcgaaatggaatttcgatactcagatcatattcaaacgacaataactttttactcgcatgtccgattgagtcctgcattatatcgagaccctcgaaatataataccgaagctctgatccaattcaaaggacaacaactatttactcggatgtctgagtcatgcccgtaatatatcga

SEQ ID NO: 155848 - DNA, 421 bp, Glycine max
tcggcattctagtccaagcgtctcgatatattacgggattgtttcagacatccgagtaaaaagttattgtaatttgaatttgttcagagcttcaatattcaaattcgagcgtctcgatatattacggaactcaatcagacatccgagtaaatagttgttgtcctttgaatttgcttaaagtttcgatattcactgtcgagcgtttcgatatattacgggactcaatcggacatccgagtaaaaagttattgtcgtttaaattggatcagagcttcggtattcaatttcgagcgtctcgatataatgcaggtctcaattagacatacgagtaaaaagttattgtcgtttgaatttgctcagagcttcgaaattccatttcgagcgtctcgatatattacgggactcaatcatacattcgagt

SEQ ID NO: 155849 - DNA, 392 bp, Glycine max
  unsure (1)..(392): unsure at all n locations
gcttctataccaccctatttctctcccccttaggcaacatcaaaaagccaaagagcgtgagaaaaacaacacaatatcattcatataattcaatataacacggaaacacgaaaaccaaatataatccaaacattgataagtcaaaccaaatataatccaagcataaaagactaaataccaaataccgaaagataatgaaagtccagataactaaaagatatagccaaatacacggcttataataaatgatagataagaatctaagacttagaaagcggaggaagatcgaagcaccgacgaagataagncacatcttcttcaagctgggagatgaagagatncatgccttcaaagcgaccatccaaagaatcgatatcgtcaccaacatatgt

SEQ ID NO: 155850 - DNA, 389 bp, Glycine max
  unsure (1)..(389): unsure at all n locations
tatatatgacaaaattgaatatctntttctttgatttttatggactactcacatgctccatttggagttctatagtgtcctataggcccagcacaaggcagataggtcaagtaagcacaaaaatttgaaaataagccacaattatcaattaagctcaatcatttgcctaagaccaaaactaagttaaagtgagaaaataaggttcaaagaggtttcaattgagctaagaagaatagaaaaatactaaattaaaaatgctcaattaggtgccatcattcacacttgtcttttcctgatgatgtgatcctcttgtcagagctgactgacattcactgtttctattatggctttctccagtcatcctaatgtaggatatgtgtnccatgccc

SEQ ID NO: 155851 - DNA, 332 bp, Glycine max
  unsure (1)..(332): unsure at all n locations
ctccttaaacctccattaatttttagctttaccttctcttccataggagnttcttcaatttatctccttgtatctcctcacatgtcttgagctaaaagttgntaacacgattctttagagtttccactgattaaacttgctatagaagctagatttgattttctatggntcaaatttcttgttcttgttcttgaaccacgaattgagttgagtttaagttcctttgagttttgtcttgttatttttagaggctgaaacctaaaccatataattcttacaaaaatattaaagnagaagataacctcanaaatctagagtgacttgttcaccta

SEQ ID NO: 155852 - DNA, 384 bp, Glycine max
tgacgagacgctaaatcagttcatgcaaatatccatgttcaactataggagcatggagtcttccatcaagaacctggagatacaagtgggacaattagccaaacaaatggctgaaagacccactagcagctttagagccaacatagagaataacacgaaggatgaatgcagggcagtgttgactataagccagaggaaagcgcagggagaagaaaagaaagatgaaggatactagtctaaggaagaaagggttgacaaagaagaaaagaaggaggaagaagagaaagaaaaagaaaagaaggtcttaacctctaagaccaaaagctagctagcccgagaggctgggaaaaaaagagccaccacccctctaaaggattccccata

SEQ ID NO: 155853 - DNA, 417 bp, Glycine max
  unsure (1)..(417): unsure at all n locations
ntaattcacgaaatcaaaatctcaattttttcttcttctatatattgcacaacagccagcatagctttcttttcaagatccaacgcctatcattcacaataaaatttaggctaattagaaaaggctaatgtttttgtgaaattgaggcaaaatggtgaaattgatcaacctcaaaagttccatttgagtaagtgtcgaaagatctacgattttagggttggaaggaaggaagatctatgattttgagattgatatatctacgattttggggttagaaagaagatcgttgattttgggcttgtgaatctctcccttcttctacaacttgaacaaggagaaaaaggaggcgatcacgattgttgcttgaaagtggcgttgttgttgactagagaagtgacggcctggaacagttgatga

SEQ ID NO: 155854 - DNA, 201 bp, Glycine max
  unsure (1)..(201): unsure at all n locations
tgagactctagcattcgatccnctttacatagcgaagataggcctttagatacaagacgatggagtgntattctaagaaaaaaaagaagtattatgggctccttgagcatgccaattgattctcaatttttctcgccagaagcatccctaaaaatgcaaagctatttgcagctcctagtgggcagaactcttgattaaata

SEQ ID NO: 155855 - DNA, 423 bp, Glycine max
  unsure (1)..(423): unsure at all n locations
ntgaaaatataatatcttgatttttaaaatacccantttctctccctctttggcaacatcaaaaaggccaaagtgcattgcaacataaaatcatacacaaatggataaacatacaagaaatgtattcatacaagaaaaaggagaaacttataaaaaaatcaaacaagataataaattatccacaaatcataataaaagcatatgtatcaaataagtcataagacatcatgacataaaacaaatcatttatctaagtcactaacatctagaagtcctaattctcttctaatggtgtagaaagaatctttgggtagtggttttgtgaagatgtctgtgagttggtttttggtatctacaaattctagaacacagtcaccttttaggacatgatctctaagaaaatgatgcctaatttttatgtgc

SEQ ID NO: 155856 - DNA, 241 bp, Glycine max
  unsure (1)..(241): unsure at all n locations
cggagttcgacatcaactcctttcctctcctccaagacaataataagccctccatccncgtccttattctccataaactcaacatgctcgacgccactgattcccccaatcctgagacgaggntagcaaaacactccaagatcctcaacctgtcttgttcatagttcgggactggctcnagagactaaaggaagagaaagatttcaccttcagcatctttgaagactgcacctgcgtgtgt

SEQ ID NO: 155857 - DNA, 413 bp, Glycine max
  unsure (1)..(413): unsure at all n locations
tctgacaacttgttataattgattacgatggactctgattctattaaaacaaatagtttttgcctcttgaagaaacttttcttcacagtaaccatgatgaaagaatgatactaagaagcaacacacaaaatagaaaccaatacaaatgccactcaagggagttaggcatgcaaaagtcaaagtatcttcaaaacttcttcaagctattccttgagaggatgttcaccatgttgctcatgtaggtgcccttatctctaacacctagctcatatcatctaagagtctattaatagtggaacttggaagccatcttattttggaagagttaacagagtggaagttcacaccttttctttgtcgatgatattattctagtggctaagcctncactaagcaagcaaatgagattaaag

SEQ ID NO: 155858 - DNA, 407 bp, Glycine max
  unsure (1)..(407): unsure at all n locations
agctnnnaactcaatacaagggcaattattgcttgtttctcaataagnagnagacctttctaaagattgaaatatgtagnattaatatatagcagacctttcttaaaatatgtagtagacattttgttcatggcaaatgttgaatgagtattccattatttttatagatgtgaacctcaatagntgacatttctatgaaattagatgcaatacatgtcatttctatagactttttaaaattctggaaaaaacaatgtacaacataatcacactttcatttagtatttttttggagaaaaaaatgtacaatggaagagtgattctattggacatttctcttttccaagaacaaaatccaaatgataatgggattatgtnacaaatcataaaacaaaatcacattcata

SEQ ID NO: 155859 - DNA, 428 bp, Glycine max
  unsure (1)..(428): unsure at all n locations
tcaaggactntaacacgtacctgctagttgtatttgtgttgtagtgttttaatacatgttttaatacatggtttagacatatacatgtatatataaaaagtagtaacaatgtgctttacctggacttgatataatgaaacagcttccacaagaacaccaatggacaaaccaacttcaactacaacaaagtaattcagcttcacctggagttcatataatgagtaatggcattagaagaactcaaagccaaaccaagttcaagtacaacaaactaattcagctttttctcaaccaaactatgtcaaactacttgttggctattaaaagtattagttattcatgtgacaggcatactattctagtttctattcatcatttaacattcacaaagcagatatagtgttctcatagcaataccacacagagag

SEQ ID NO: 155860 - DNA, 452 bp, Glycine max
  unsure (1)..(452): unsure at all n locations
agctagcatagattacatctccctctntctcaagcaaatncttcttgatatcatcaaaatcttcatgatttacattctccccctttttgatgatgacaaccacctgtaagttaagagcaacaacaaagaaaatatctatttgcatatagtttactcccccttggttttacaatgattgcttatatgagacaattgaagatttcatatttttcatatataaaaagttgcctcataaaacaatagataatttttcttactattttatcttttatctttctctccccctttgtcaacatcaaaaacaaatcatgaatagagaggagaaagatgtttccacttggtgcaatgtatgagattcaagtgataccaaaaggcattaaaacaatcattcaatattaatcaagcaaaaacaagtacaataacacatcaatcaaacacaatcaaatacaatc

SEQ ID NO: 155861 - DNA, 420 bp, Glycine max
  unsure (1)..(420): unsure at all n locations
ntctttgtatcaacccttcaactttcttttggatctcctttggctttttcagattactcctataggcagccctattaggaagtgaagctcccggaataagatctatttgatgctcaattcctcttaaaagaggcaagccatagggaatgtcttatgggaagacatcctcaaactcctttaagaatgtatcaaaaccttgaggcaactcaagggcactagtagacaaaccgatgtaatttggaatgagtaaatacattggttgtctagctagcatcactcattttacctctttaggtttgacgaacaaactctcttttatcactaattatttttcacttttttttctcttttcttttggtctttcttggcactctttttgccttctttttctttttggcttttctctctcaaaggactttt

SEQ ID NO: 155862 - DNA, 344 bp, Glycine max
  unsure (1)..(344): unsure at all n locations
ccattcttcatcctggactagattcatcttcattctccttggctagcttctcttataacttgaaattggcattttattttactcatgaaaggaaaccttaaaaactaaacatttttcattctttcttcaagattttgcgagttcgtcaacaagtgaaaggaatttctccaactcttacttagggntaaacttccttgaacatgttatagncttgaaattnttgtacttgctaccatgtcctggatatgtgtgctaagctattttccttgatttgtagatgccacaaatgagttctttgcatattaaaacataagatntagaacatcccacttttcataaataaa

SEQ ID NO: 155863 - DNA, 382 bp, Glycine max
tggataaagttaaattgaaccacactcttgttagcgagtataaaaaaaaaagagttgcagttagactatcattttttttcttacttttttcagataatcattttatttaaaacactattatgtaaacacttttttcaacagatatataaacagtagtttatctaattaattataagcattctaaccttaacatacatatgtatatggttgatagagagtccaaagagtctaacccagttgattgagatgtaagttattataaacctctaacaatattttttattcttaataaaaaaacatgtttgatagagagaatatcttgtgctgatataagtggcatggcatgaagtccatcttaacgatcattaattggttggtcttc

SEQ ID NO: 155864 - DNA, 401 bp, Glycine max
  unsure (1)..(401): unsure at all n locations
aacttcttattcccagaaagaaacncaataaataagtctcctatttttaatggagatggttaccactactaggaaacccgaatgcaaatcttcatagaagaaatagactttaacattagggaagccataaaagtaagaccttatgtacccaccatggtggctggaaatgcaaagatagaaaaacctaaagaagagtggactgaagatgaataaagattagtgcagnacaatttataggctaaaaacatcattacttctgccctaagaatgaatgaatattttataggttctatatagaagagtgctaaagatatgtgggacactcttcatgttacacatgaaggcatatctgatagttaatagtcaacgatctaggataaatacttcaactcatgagtatg

SEQ ID NO: 155865 - DNA, 421 bp, Glycine max
accacagcaacacgaaatctaggtatgcaaaacttctttatttaatggattttcaaggtttgagaagtgaaattgagaatgggataaatttggagtaaaacctcacctcacacaagtctataacatcaatttaaacttgctcaactggatttacacctaaaatttcaccgaatcaaaatttgactcctcaacacccaattttaccctagaaatggctctttgttcactttggtcatttgttttttctctcttgcacagtccaaactttctcataagtcctaaatgaaatttcaaactaggattaactccctttaacctccaaataccactaaatacagatttggccttccaactctcaaagactcactctttttccactcataacaccatattctcactttctaaccctaggttaactcta

SEQ ID NO: 155866 - DNA, 382 bp, Glycine max
  unsure (1)..(382): unsure at all n locations
accaagaaatgctactcttaaaacaaaaatggcatacaacctcctttaataaacacattcttctatgtaaatnnagagtaaactcatgcacatactttattacgaacgttcacttgcacaagatattctcctaactaagaaaaatgcacccacgcacaaccaaggcaccttcgtcacctagattatttatatgtacttccgggagagtatngttacctacatcacatgtacttccttggctaaatttacacacacgcatactcaaagcattttgactaccaaaaattgcacacatgcacattatggagtntctaatacctatgcatatacaaactttgagatgaatcttggctatctacacaataaagagctacatttcatg

SEQ ID NO: 155867 - DNA, 414 bp, Glycine max
  unsure (1)..(414): unsure at all n locations
tccatcaagtattccctccaccttggaaaagattgacctctaattccgaggttcttcatactctgggctccttccctcaacacctgtaaaaagaacaaaaacatatgtattagtggtgtttggtatgttgaagtaaggtaaggtttgaaaacccatttcctaggcatcttcccatgaaggaacatggtttctcaccaactcaatgagtggtgctacaagtatagaaaaatatgggacaaaccttttgtaaaagtttgttaagtcatggaagccccaaatttttcttatacttggtggagtgggccactcangaatgacctttattctcttagaattcatgggaaccccttgatcactatttgaaaaattaagaanagtaacacaataaaacatacactttttctgattttcata

SEQ ID NO: 155868 - DNA, 446 bp, Glycine max
  unsure (1)..(446): unsure at all n locations
agctntnaggagtagaaacatgggaccaactctttttattncaaaaagaaagncgnatctagtcaaagtctgagagaccatacaagtttcctaacgatttctaattatgtgggccattaagnctatcatatgctgacaatagccgagaagcccatgaatctcttcaggggcggagtaagtgtccgccattgccttggccttcgctaacaagcggagaagttcttgactcccgttcaaagtaagagcaaaccgatccatccacatggttgcctcttggagtaaagagtcgatcacccttcctctagcctctttttccgcgtatactagagcatactcatccgcgatcctatgctcgagggctagggctagacataactcttcttgagactaggcgatgatagctagcatgttggnctccgtctcgcataaacgctgagacatgcttc

SEQ ID NO: 155869 - DNA, 425 bp, Glycine max
tttgcatgtgtaggaagttctagagagagaaggcccttgttcctttagttctgagagattttgatgtgtgaagagctgtagagacgagagctcaaaacggaagccattttgagagcttgagatgagtttgtgagtgattgtgagatcctagaggtgaaggagacatcctcaccacttgtatttttgcaatctttcatcttgttcttctctgtgttgtaaaggaggtttcctgactatggaaagctaaatcctctgttggatcttccctgtaggtacccgatgtaaatattttttatctatgtaatgatgcattgtgtgttctctgtgctatctacttttcattccaacatgcctttaccttgattatgtagatgcatgctttcgttggggtcatttcacagcggaaactggtctgattctaaagt

SEQ ID NO: 155870 - DNA, 422 bp, Glycine max
  unsure (1)..(422): unsure at all n locations
agcttcgaatattcttgcctaactaatctattttttatactnnnnatatnnnaacatatcgcttatcaaaattaaaaatataaaaataatgtattcattcgaatggntnatttgnataatttcttccttaattaaaaatcttatctccttaacttattttttattttataaagcaaaatcttcatgactaataataaataaacattctattatattgnttatcatccaaaactcgntattttaatattatttgacagaaactacattttaaggcagnataaagttttctttagcagaagtagtataattttttatacaccttatatttttacattttctaattctaataaaaacgtgtctttagttcatgaagagagactcgaatcttattacttttgagatatacaaagcctataaatcta

SEQ ID NO: 155871 - DNA, 351 bp, Glycine max
  unsure (1)..(351): unsure at all n locations
ctatgaaactcagctgcttgtttgatatactggaggtgagtcgggatcttaatctttctccgaaaaggtataaaaacagcctttggattgtttccaaatgagtatgtacttaaattatttcatggaactgctgttcatgtacttacattattttggagtactctagcgttccaaatcagcttttattcttcctgacatgagagtctttttaatctacagaacaaccttgaggatatttacagtcttctgcggtttctgagaatagagccttgnggtcattgggcatggtaaagttacatctttctttgtgttggatatagcagctctttatgtccaatgttatctactact

SEQ ID NO: 155872 - DNA, 211 bp, Glycine max
  unsure (1)..(211): unsure at all n locations
ctcacaaagaggaagttgagccatgttctcaggatgaaagctagnagaggaatgttcaagatcataagttcccaaaatttttgtctctctctaatactgccacaccaagtgctctaggtatttttcacacaaaatatagatcaaaagatgctaccacacaaaaaatcagcccaaaataacaacttttactatcaaaaccaaaaatcgctaa

SEQ ID NO: 155873 - DNA, 429 bp, Glycine max
gatgaatcaaaaatgattcaaaggtgttttgattatttctaatgatgaaaacaaaagatgatgacaaaggtgatgaacaaaaagctcaaaagatcaaagaacaactcaagtgaatcaaagaacaactcaagtgaatcaaagaacatctcaagtgaatcaagaacaagtcaagagttcaagaatcaagaagaattcaagactcaagaagaaagcctacaatcaagaatcaagattcaagattcaagatctcaagaatcaagatcaagattcaagactcaagattcaagaatgaagaaaagaatcaatcaagataagtattaaaatgttttttttttcaaaactttgaatagcacatgagtttttgacaaaacctttaccaaagagttcttactctctggtaatcgattaccatagtgttgtaatcgatta

SEQ ID NO: 155874 - DNA, 359 bp, Glycine max
  unsure (1)..(359): unsure at all n locations
aaatataannnncaactctatggnttttctataatccaaaaataaattnatataaaaatataaatattttttatgttattncnnatttattaactatnncaatggctaactttaccaaaaaaaatttaattcaatatgcttgtaagattttaaattncaattaatgatttataaattagagctaaaagatctatatattttgcttagcatgaccggatgacctaaataatccatattaaaaaagaaaagcgctaccaaatcaatccatttgcaattttgcatcaccctaccctactgaccaaggcactaagctgntggaccaacaattgggcctacgagttagtncaactaaagttttt

SEQ ID NO: 155875 - DNA, 425 bp, Glycine max
tatgaccacgaattcttttatggcgaaacctatcatcctgacttccatgtgatcctctgtcctgccaatatgactcgaccacatacagcccatcatatacatatgtcttgtatttatcatccattgattcacagccgcgaatcaccctaacaggattcttttcctcactactgctcttcaaagcaagattgccccgcttgagcttctgatcttcaggatggttgtcattgctcatcacattcccaccctgccctgaatataccaagacatccgaattgaccaaataatcagcatagccacctgaagcaacaatactagtcgcaaggatcttaccattgtgcttcacataatctatgccaccctgaatctgaagatgaaggccaattatattaagctccacccgatattgaaactcatcaccaact

SEQ ID NO: 155876 - DNA, 359 bp, Glycine max
  unsure (1)..(359): unsure at all n locations
agcnnatagcaatagataaaaaggacttattattgcttgtnnnaggacaannncnctagaaaacagaatgaggacctatatgacttagggaaaaagtatcatgtaaagttatacaagataaagacctttgtagcctaacttgataatccaatgattttttcccagagagtttatgagaagaattcttcatttgagctatgcttgggggattttttccctcatagatttaaggacttaaaatattccaatgaagcctaactaatctgcatttttgagaatttgaaaacaactgatattatctccatatgaaatatgaataggttcccatttagttatttgggattttcttcaattgagca

SEQ ID NO: 155877 - DNA, 291 bp, Glycine max
taacctacctaagtgagaaagagactaacgtaccatgtttctttccctgctcttcacgaactgccactctttgattcatgcgaacttcatgccaagaagagtcctccatgccatcgggttgaattgaatatcaacagaattgggctactatgtctgaaatatctgagagtgaactcacttacgacgaaaaggggctagggttcaaattgtcacaaacaggggtgaccaggttcgaaatgtctaactcttcactctattactatatagagtcatgatcagacgctaagggtc

SEQ ID NO: 155878 - DNA, 249 bp, Glycine max
  unsure (1)..(249): unsure at all n locations
acaaaagcgccaaacggaatcaaattattcggtatatgatgaccctatggctgcaaactcgtcaatcccgagggtataggtcttgaaaagggggaaaagaagnttttgaatgcaaaaacgccccccctttcggcattcttataatttggagcaagggtggctcgcccatgcgatctaacctgcacattttttctttttttgaagggaacattaaccatgtcccctcccttctatggatatgctcttgct

SEQ ID NO: 155879 - DNA, 431 bp, Glycine max
  unsure (1)..(431): unsure at all n locations
ntgacttgagtcatcaagagattagtaaatatgtgcttttggcatgaatttaaaaaatgatctatcatctatctttcaatctatctgtcaatcttctctcaacatcattcaatatcttttaattctttctatagaatctttctgatttatttctcttcatctttctaaaagtttttgttcaaacactttctcttccaagaaaagttctttgttcaaaaacttgtgcaattcaactttttcattctcttctccttttgccaaaagaacgaaggactaaccgcctgaattcttttgtatctctctttccccttacaaaagattcaaaggactaaccgcctgagaattcttttgattcttcccttccccttaagcaaaagatttcaaaggactaaccgcctgagatatattttgtntccccttacaaagattca

SEQ ID NO: 155880 - DNA, 376 bp, Glycine max
  unsure (1)..(376): unsure at all n locations
agctagagtttaagcattnnccttgttcttttcttttagaancnncaagagnggaggtttatgatttcatcctttcttctgaatcttaaaaatccttaagaagagtctctcgtccactggataccttttagtccggtaatgccttgacctactcacaaacaaaagagtcttgtacatcacctggagaagaggtttctaagacaaaatcaactaaaagagttcgataagttttcttaagatcctgatgctctttttcaagatgtagaaaatgctttttttagntntctataagcttttaagtcactagcagaggaagtgataagntgattgtccttctaattaaatcttctctagattcgaatattacttcttcacc

SEQ ID NO: 155881 - DNA, 331 bp, Glycine max
  unsure (1)..(331): unsure at all n locations
ccgctngaaaatggcaccgatggggtcctcgtattgttatggttttaaccgngtctacaacgctaggaggaaaccctgcctggaggtgaagtaaccattactgttcatccactgaaataaggccagggcgcgcccctccatgtaaaaggaggcgatggttagcctatcgtgctcaagcgtggcgtggtattcgaagaattggttgatcttaaagatccaaccaaggggttcggcgccatcaaaccggaggacatcgagtttcaagcggtgaggggttgagatggacatacgtggagtggcattggacgacgaacgtgatggaaaagaattc

SEQ ID NO: 155882 - DNA, 308 bp, Glycine max
  unsure (1)..(308): unsure at all n locations
aaaactncnataaagagatagaaaccttgagagataacctatgcaaattttttggtgggcatgatacccttaacaaaattattatggngcaaagataccccaaagacaaatttggccatggtttaaaggcaaaaaagntgcacatagagaagaagncattgnttgctatttttgttgaaaagtgggtcatgaaactcataagtgcaaagacctccctaaaaaaggcaacccatcaaaaggtctgtccagagcttaccaacacccataagctaaaaaagaaaaaagacccaaaaatatntgagtaccta

SEQ ID NO: 155883 - DNA, 412 bp, Glycine max
tgctaacccatggaagctcctaatatctgcctcattttttggggtgggccattcttggatggccttgattatctcagggtccaattggaccccatttctaccaactacaaaccctaagaaaactatattatctacacaaaaagtacgcttctctatattggcatagagagtgtttttcctaaggactgaaagaacttgccttagatgtcctaagtgatcatctaggctcctactgtacacaaaaatatcatcaaaataaaaactacaaatatacctatgaaatcccttaagacatgatgcctaagccttataaaggtgcttggtgcattagtgagcgcaaaaagcatcactagccattcatacaaaccaaacatggtcttgaaagcggttttccactcaccaccatctctca

SEQ ID NO: 155884 - DNA, 147 bp, Glycine max
  unsure (1)..(147): unsure at all n locations
ttgcgccccgtgttttatattatccattgctgaaatgtttgccttgaaataaatatatttgcatgataccaatatgtctgttcctaactctnttttttttttttattatcaatntgatacccaaaatatattaaaagatcttggctt

SEQ ID NO: 155885 - DNA, 426 bp, Glycine max
taaaagtggtattcatcatcatcaaaccaaaataaccaattttattcttcattcactcaacaaacagaccaaacatcaacttaaattttttttaaaatgacaattttaaaacaaaaaagttaattcttaacaaaaggggtttgatcgatcagtagcaaaaactagtccttgctccttaagtcagctcaaaacaaggacactcctttacaaaataaatatataaatgaaaccaacaacagaaaaaaaaaaaaaacaaatgctaataaattcagcaaaaaagagtctttgacttaccaaacaataccataagcgcctctacccacaggacgaataggagggacatactttctggaaacttcaaagagattgccatagatattgtactgaacatagcgtccaccatgagttggtactcctctgatgttg

SEQ ID NO: 155886 - DNA, 369 bp, Glycine max
ccactccaaggaggcctccggaacatcctcacctccaaacggacgaacgtcgagattaacaccatcaatccggccctgtccaggaacaccaccattcccacttcacctccactcttctgcataacgatcgctaacctccatttgacccaaccccccagggagcgcatcatcccgctgcggcaataaccaccccatatgcagcatcaaagctcgcattcggaatcgcgaaagccccactccaccaccaggattagaacctgacatctcaaacacacaaaccaaacgcaacaagaaaaacatagcgcggcggtcgaaaaacccacccactcaagtgtatcacacaaccacggctcccctccaacgaaacac

SEQ ID NO: 155887 - DNA, 435 bp, Glycine max
  unsure (1)..(435): unsure at all n locations
ttgaaactcacgctctcaggagggggagctagttatgagaggggtgtgtgttgcttttctctagcttctcaaggaagttatctcaaagaattttatcaaggaagttttctcaagaaagcttctcaaggaagctacctagtctataaatagaagtatgtgtaacacttgttgtaactttgatgaatgagagtcttgtgagacacaactcaaagttcaacttctctccctttttcttccttcaatgtcgtgctcccccctctctctttctctccctctttcttttcctccattgaagcatcctctccaagctccttatccaaggctcatcttggtggtgaagctccttctccatggcttattccctagtggatggtgcctcctctcacctcttctcatntgtcttccgctgcatctccatggtggaaaatcaccatt

SEQ ID NO: 155888 - DNA, 311 bp, Glycine max
  unsure (1)..(311): unsure at all n locations
ccatnncaatcccgaatttactaaaaatgaattagnagcctatgaaaaataaccaaataacagnattntagcccttgacgttaccgaacattttaatccctgaaattacaaaaataagacctataatgtttatttcaatcctgaaactaaaaaataagacctataacaaccaatttatataattntactggttaaaggactataaagatattnttagaactgattaaacttaaacatgtgctaggaagnagaatgactatgtaggagatctcacattgactactaacangacccatatagagtatatatgc

SEQ ID NO: 155889 - DNA, 439 bp, Glycine max
  unsure (1)..(439): unsure at all n locations
cttagatactaagccctattaagctgaccatttatcaataaacacaagngtgntttttcagaaaattagagtttatctcttttatcttagtgagagtgattctcctaaattcttgagtgattcaagaacaccctggctgtatcaaaggactttcacaacctttgtgtgttgccctcgctggaaagagtgattctttccttcctttcatcttcacccttgttctttcaaaccacaattccagaaaatccacctatgcccagaattatctcgtggccataactcccgttttacgcactcaaattaagtgattcttgagcctaaattgaatttcaaaacgagaactttcacctcgttttggaatcacctcatttggagccctgtagcttcagttattgccatttctatatttctgtccagccaccacttaacctacatttta

SEQ ID NO: 155890 - DNA, 243 bp, Glycine max
  unsure (1)..(243): unsure at all n locations
aataaatggttgacatactttaacattagagagttgntagatagaaattctaattagacaatggctaaagatttcattcaataaatggctaacatacttgaacattnatgaaccgnnagatcaatatttttatttcacaatagncatttgattatccgncagaaaattaggtgagaaaaaaatgcttaaacattttaaaaccatcaagagacaactctttgcttcgnagcacttaaattcgtt

SEQ ID NO: 155891 - DNA, 426 bp, Glycine max
  unsure (1)..(426): unsure at all n locations
cttagaatctccgctgattgngagttaatttagcctgagttcactttgttattagtcaattcattcaaggaaactttcaaagaaaaatgttcgattgattttttttattattttattcaaagatattttgattattttattatatttttgcaaagacattttgattactttattatatttttttaaatatattttaattattttattatacttttttcaaagatattttgattattttattattatttttgccttttttgatttaacagaggttacagcgtaaacgatcggttggattntattttaacagtaattaaacgagattacaacataaatgattagttgaaattcattttatcaattatttggcgagataacggcttaaataaacggtcaaaaagctcgttaaagcataagaacagatat

SEQ ID NO: 155892 - DNA, 432 bp, Glycine max
  unsure (1)..(432): unsure at all n locations
ggacacaaaaactcagcttgatggtgtcagaagaatcacatgttgccncatcaatagggggagaatgtgaatgtatgtatacatgattttgatgatgtcaaagaagaatctaacaaggctgcttcaaatgataagcatttgcttcaagaataattcaagattgcttcaacaaacaaagccttgtttcaagattcactaaagaccaagccttgccttaaaacaaagtgctttcaagacatgcaaggctctggtaatcgattaccaggaagtgtaatcgattaccagaagacagggttgagaaatagctgttgaaaaatgtcttgatatctgaatttcaacatgtaatcgattaccatatgtttgtaatcgattaccagcaacgaaactttggagattcaaattcaaacgtcataaccgttcaaattataactg

SEQ ID NO: 155893 - DNA, 400 bp, Glycine max
  unsure (1)..(400): unsure at all n locations
agctntaacctcatcgtctctcacattctcttgttttgggagccaatccagnccttgagttcggactctcagccacttatgatagccgccgatgatcccattactgcttcccctaagctctctgtcctttcttcacgccgcatcccatgccttgcgaactccttggagtaccctcgagtagaggtcactaaaaccccgagcgaagaaaagcgagatgctttcgcctaaaggcgctcctctcatggagtagccaagctgccttatggagagaacgggatnataattaataccaccccttgttcccatcaaaggaacattaggacatccttcgcatgaagatagaatcgagattcttccttccttctagcgagggaaccaattaacagacgcccccccatgc

SEQ ID NO: 155894 - DNA, 299 bp, Glycine max
  unsure (1)..(299): unsure at all n locations
ngngagaatctccatggggttgaggatcagtacatgcttattcgtggngagccactcgttcgcggatgatagatttttgttctaatgacaaggaatgttcggcaatgacacaatatcacttcactacatactgaagcatgcttccgatcaagctattaatctatcgaaatcagacgttttctactgcacaaatgttcacttgcccccacgtaatatgatttcatctaccctaggtgctaccaaagaccttgggtcatgtacataccttgacactccatctcttattgggagaagtagga

SEQ ID NO: 155895 - DNA, 358 bp, Glycine max
gtaacaacctcatattatcatacaaaacagtgacgatgactttctgtcgcaatcacaaacaagttgaaacctagctatatgcaatgattaatgaaaataaagaaaaagaactgggttgcctcccaggaagcgcttctttaacgtcactagctgaatgtgtgttcctcatggatctagagcaagcttggatctggccatcagaaccatctcattcttaatttcctctatcttagaacagatgttatggtcaagtaagtgtatttatgcgtcaaaccaatcgaatttgatcttctaatcatctatacacatttccattttacctttccccatatccaccacacaattggcggttgacatg

SEQ ID NO: 155896 - DNA, 344 bp, Glycine max
tctaaactttatacaagagagaagcgtctgatttctctttttagacaagcggcctcagatatcttaagaagggggggtcgaattaacatattccaaactatttgcccgatcaaaaattatttcactttctcttcttgttatagattcccttaacaatgaacttcttacaatattaattcaaataaaacaacttagatctgaatgttaagccttaatatacctatgagactcatggaagagaaagcgcaaactcacatttatactggttcggccacacacttgtgcctacgtccagtccccaagctacccgcttgagagtaccactatctcgtaatatcctttac

SEQ ID NO: 155897 - DNA, 254 bp, Glycine max
  unsure (1)..(254): unsure at all n locations
cgtgtatttgtttttacattcgaaattttttgttatgtatagncgagtcttggtttgttttgnttacttttggcaattgatgtaagtccacatggntcaatttgtgtttaaagatcattacaaatgtcttcaacaatctcgtgaatatgattatattatcccacctgcatttgtgattaatgtttctaatagaagaaaaacttgaataattgagaatatctaaattctcattcttatcttcacacatatatagc

SEQ ID NO: 155898 - DNA, 354 bp, Glycine max
cgtcccagaactggaataaagaagaagaaatatgtttctttaatcatagctcagtcaagaggctccttggtctataatcgaaggaaacgcgtgactctccgagactctcaccttcttcctcctttctcctctaaccagcgcataacaattggtccgacctagcgaccatggctgcctctacccctactccggatatgccatgacacaccaccctacgcacgagccatcccttccgtcacaattgccaccctgcccgtatatacatccagctcaatcccttgggattgattttgagagtacccggatccacttgctagcctagtgcgatactcggatgccatggcctccttcttc

SEQ ID NO: 155899 - DNA, 467 bp, Glycine max
  unsure (1)..(467): unsure at all n locations
tgcaagcatgcaagcttctttccactaaatagagatatgcatctctctgaaatgnagaccactntaaccttcatatgcctactgagcattncaacaatgcgataaattttaaaaccctcctttttttgtttcatcatagatgtataaatgaaagcacactgtatccactacaatctggatatcagaggcctaggagatgtgtaacctaagtggataagcaatggtctggttgagtgcatacatctaagcatgtagtccacccaacatgtagtactcagattggatgagagcaagatcaagtggattaatatgtagtagttagttattaggagcgccctaaataatgactggnttaatagnaataaattaaatagcagaaaccatcggaattnttttttcttttctctctctttnntttaactgggattcatttcacgagaattaatattagaaagaatattatcact

SEQ ID NO: 155900 - DNA, 423 bp, Glycine max
agctttaggttaggcaacaatgatgtataaaaaagagcagattgtttattcaccaaaggcgagtaaagcagaaaaaagaaaaaaaaagacgagtgtcctccaaattttacaaggaaggcacaaaagtgcaataaggattaatgtataagacaattggagtagagcccaacccaaaaacttgaaatgaataaaagtacaagcaaggctcttgaggttcttactcaatataactcttaaacactttttgagtctctctgatcctttcattcatagccttcttacccgtgaccacattaatggccaataaagtccatgtggatcaagaaatgactaatttttcttttgattttggattttggaataaatcctgcacacaaaatacccaatgttagcacttggacaacttgagaaggaaactcattc

SEQ ID NO: 155901 - DNA, 339 bp, Glycine max
  unsure (1)..(339): unsure at all n locations
agagtatgcctctcttattatttctttcaagtatagagcctactctagaaacaagaataagagaaaattaaagggaatgcagntagtcacatgatatatagagatttgnctcttctttctttttttggaatagataaaaaagacaaaattggagtctttcgcattaaagggcctttcagaagaacttgngaaaataaattgatcagctcaattcccttatacttcaagagaaaagattnttatactatgaactaaccaaaaatcatcctatgatgtttaatataattatgataaaattaccatacatcataattagagagtggagataacataaacaac

SEQ ID NO: 155902 - DNA, 433 bp, Glycine max
tcatccgcagatccctcatgtaagactacacccaatttttattgccctcttaggtttagactaacttaaactgagtttcgtccgcagatccctcatgtaagactagactcagctcaagtagcttacggaagtttagcctaatttagcctaagcttcgtctgcagatccctcatgtaagactaggcctaaactaaacaacattattgtaataacataatttaaaccaaaacttaacccgcagatccctcatgtaagattaagtttcgatcctgcctcaatcaagttctagggcaacagtacatttcccaatgctaaagtcacctaactgtgcacacaagtgggtgatcagaccaaaagcatacaaacatcaagcattgaatgaagcattgaacgcaaaaaacataatcaattagatattaggtatttacatcag

SEQ ID NO: 155903 - DNA, 339 bp, Glycine max
  unsure (1)..(339): unsure at all n locations
ctgcagcgtgtataagatagtgatgcaaaattttttttgttggagatnnagnnaggaagggtatcctgcccatagatatgaaagatcgagcctatgtcttattgtccccaaattgggaaagaccgnntaaaataattcagatctattcgaatggagcttataagttagaagatctaacccctcagaaacgtactttgagcataaatgagaagtatttgaaaaaatataagccaacactgctcgaagctaaaaaaaaacaatataataagaatcaaaggtcagatatctatcacatcagatttcccttttatctccccagcgttacacgtgtcccactct

SEQ ID NO: 155904 - DNA, 368 bp, Glycine max
tgaaggtgcataccccaccattttttcatagtaaaacactggtaatgtgtctattattattgtgatcatctctttctccatcattggaggtgccacttgagctgccaagtctctctacctttgggcgtattctttaaaagatttgtgcccctttttgcacatgttctgtagttacatcctatccggagccatattagaattgtactgatattgcctaacgaaggcaaccattaggtccttccaagaatggactcgggaaggttccaagttagtgtaccaggtaacagctaccccagtaagactttcttggaaaaaatgtatcaacaattcctcatcttttgcgtatgcccccatcttctgacaataca

SEQ ID NO: 155905 - DNA, 306 bp, Glycine max
  unsure (1)..(306): unsure at all n locations
acacncaaaaaggaaaagctctttagcacccaacacttaactccctccattacatctccgtgataaatataacaaaattcaatcttagacttactcacttatcacatgacataataaaatatcggagcctatatccgctacctaacaagttgntcactttatacgacattactagctttctaccaatagaaaagatctgcgcatcatgttatagaatcncaaattatgtgcattcataattaaacaatnttattcctcgtctcaatcaaaatattagaacctaaatgttaatagaaacataagtaa

SEQ ID NO: 155906 - DNA, 425 bp, Glycine max
taatttgccttgatttaaaatttctacaagagattgacattttcaaagtccatgtagtcgttttaccttttcaatttgatgtgtttgtgtgcttaattttctaacccatcaaaagagttagaaaacataggagacgacaatatcattttttgtcattatttaaaagtactaatatattttgatacttgtgaatttttttaaaataattataatgtatatatcacgctatttatttaaaatataatatttatattacaatacaaaaatatcaatatttcatacacatacaatcagtatgaatataataaaaactatagattgctccagacatggaatgaaaattgatcaggaattttgtgtttctgtgccatcgattgagattgtataagtgaggacatgttgatcttctgaccaattttgttttc

SEQ ID NO: 155907 - DNA, 411 bp, Glycine max
agctttgcatatttggtcttcgccagtattatgatcgatgtgggtctgaaaaaaaaagcaaatttgatcatcctactaagacgactgagaaaactggggcaaataaagatggtgatgataaaggagatacccatgtagagactgccattcctgtacgaccaagtttcccaccaacccaacaatatctttactcagccaataacaaaccttctccttacccaccacccaggtatccacaaaagccatccctaaatctaccacaaagtctgtctaccgcacttccaatgacgaacaccacctttagcacaaaccagaaacaccaaccaagaagtgaattttgcagcgagaaatcctgtagaattcaccccaattccagatgcctatgctgacttgctctcatatctactagat

SEQ ID NO: 155908 - DNA, 380 bp, Glycine max
tcaacctttggccatcatttctgctccagatcgcgaattgttgcattttcggagtcgtgaagcgcatctctacgtgtgggacctcgaaatttcaggtttgggtagacttctttctcacttgattttcgtgggtattgagttttgggagatatgatgggtagttttgctaggtttctgcttcatgatagttatttgtgaagggatttgttgaaagcatgttgaacttgccatgtttggatgagttaagcttacccattcagttttagggtttttatgatgatgtttgtgatgtttatgtgctgaaattgcttatggaaaactgttagagatgaacgtagagttaacctagggttagaaagtgagaatatggtgttatgagt

SEQ ID NO: 155909 - DNA, 299 bp, Glycine max
  unsure (1)..(299): unsure at all n locations
aaaaanagattagaagatactgaaattataaggtaattctcaaactcgatttacaaaacatgaagatgcaaaattacttgagtactctattactagcatagataaactttgtagatttttacaaaaaaaaaaaaaaaatcagnataaaaaaataattactcatcttaactaagttctgttaaatatcagaaactctaaattaccaataaacgtttcgggagttttttactgaggtttgaagtaatgtctgagcttaagccaacaacccatgcacaaacatgttattgataaatctctcg

SEQ ID NO: 155910 - DNA, 417 bp, Glycine max
  unsure (1)..(417): unsure at all n locations
gcagagagtatctttaagatgatgagggtggagtttttttgtctcctatggcttaaaatactctttttattaattaattggcaaatcttgtccatttttttaaaagaatgatataaggagcacttgtgtttattggttaacagtttactagtgaaacccttatcttaatctggaaaagaaattatgtccttgctttgatcttgatgtcctaacaatattacccaaacatatcctttatgagtctagcattctctatagtggtgtgtgtgtgtgaactttacgacagctccacctattactctaactgagcatgcagaagtgatatgtttnatagcttgttcaacataaatgcaatgagcccatcactatttacgcattgggattgctacgtccgctcctatatgaaaatcatcttat

SEQ ID NO: 155911 - DNA, 451 bp, Glycine max
  unsure (1)..(451): unsure at all n locations
gcacctgcaagctgcagcnagcaatggcctgaggtttttttctcctcatatctnccgnaatacttatcacctttatcatatctaataattcccacattcatgtctaattnccattttacttcattggagtaaatttctaaagcatccattgcctaagaaatcttgggcagtaagtagacgtaaccgtaacgtgaataatcatcaataatggagataaaatatcattcctttccgaaagaactaacatcaaaagagccataaatatcagtatccataatttcaagaagctgagtgctttttgtagctcctttctttgnatgtttagcttgttttcctttaatacaacccacacaaatatttagatctgtaaaatctagataaagaagattttcattctttattaatctttccatcctttctctagaaatgtgacctaaacgnttatgccaca

SEQ ID NO: 155912 - DNA, 415 bp, Glycine max
  unsure (1)..(415): unsure at all n locations
nttgatgtagttgtttcatggcataatatcaaagtctctatgactaagtggtcaacaattcaatacttgctgtcgccattcttttaatagaagatttaatttctgcacaaggtgggtggggctgtgcatttgttggaatgtaagtgtgaggaataagtctcacattagacagagatgaacacattttgagcaacatataaatacaaaggactcatacctaatgttttaaggcattgggttagatataatgtcaaattcatttatgtggttgactcatgcctattaatggagatctctcggatgttttaccccccttgcatttctaacacatcctacacacactttaagcccaaggacatgaagggccatggtagatatgtaacaatattcatgtgtgaaaccgaacagtttaagc

SEQ ID NO: 155913 - DNA, 403 bp, Glycine max
  unsure (1)..(403): unsure at all n locations
gaattctcaatttagattttagtcgagtatatatatatatatatacatagncctatagtcttatatttnaaacattagctgagtctatgtcagatgtaggagttttatagatgcttctgcatgcttgcttttatttcattttatattttccctattatattcaatttagcttcttattttttcaagagttaaagattgtctttttaatttctcacaagaaatattttggacataatttcacttcattgcaattgcaaacagntaggattccgaaatgcagncttgattagagatgtttagtttttcttttcttttctttatgacttcatagatatactggcatgtaattcactcccaattatatccaagcaggtgcataaatgaagagaagtatgaattccac

SEQ ID NO: 155914 - DNA, 352 bp, Glycine max
tgctttcgaaacaaacaacaattaaagtatgcgtgtttttttttatatagcacaacaatatacttaaacaaaaaaatatttacaggtatgttttgtaagaagtaccacccttgtttaaaaattacttgttttaggaaagttacttttgtttattattttgggtaactagcattgctgtttaagtctataaaaatggtgatgaggaggttgcaatgctgcttctgatgctgtttgcctacttatggagttattattacctaattatttattttttggctttgcatctattcttttgaagaaaatgtttaggaacatacttatgtaatgaaattaaacatttcttcatcctact

SEQ ID NO: 155915 - DNA, 452 bp, Glycine max
  unsure (1)..(452): unsure at all n locations
agctagagatgaagaagagtagaaaggtttttcttcctgctnttattggagaccacagattggtacctggagatatgtcgcggaggtcaagagaccttggggacgtcaagaggggagctattgcccaaaaccaagcttgaccaatcccgacccaacccgggcatagtcggtcagagagaacctgagatgtacctaaacaggcgagctcctgacagtcaacagataaaaggaaaacaagaccacaaagcaaagaagcttgtggaggctggccagctgagaattttagagaatatgaggatagaggcctctgagaatcgattaccaaaggtgggtaatcgattacaaagcttaaaattgaagacaggaagctaagatggtctctgagaatcgattaccaaaggagagaatcgattaccaggcttgaaaacgaagtcaagatacttaaggagcct

SEQ ID NO: 155916 - DNA, 292 bp, Glycine max
tatgcacggaaaatgtaattacgatattgagatgctctattattcaccatttcctagttaaccatgcattatgtaccatgttcaattattttgctttgttgctgtgtgttgtttttttttttttttttttgagaaatgggtttatgatcccaacatggttggctcatggtgcctaacacatgctactaataatgtagtgtgaagtttcacgcttacccttttttggtcttggccttcgtgaggaaaactcctggtttagccaacatgaaaacatatggtatgcaattttgca

SEQ ID NO: 155917 - DNA, 471 bp, Glycine max
  unsure (1)..(471): unsure at all n locations
cccggatccttaaacacctgcagctgcagctggattcgggatgactttcagctattntnnnnaaaaggaaatncataatattctcacatgttatttgattcttagaaatgataattagnttgaagaaagagatgatgatggagtattgagtggggaggagttgcattttgttagttaacattaaaataatttactaattctaattttaatttagaggtattatcattagaaatgatgttgtattgagaggggaataaaacaaattttttaaattattatgttattatcattatgaatattatttgatttggttattctgtaagtcttagttgggagaaagtttctcccgacatggccttttattggccgnttgcgtgtatgctttgntgaacctncatattttcaaatgactggcaaacctttgnttactcatgggcttgatatgactgaacttccaggcattgctgggtg

SEQ ID NO: 155918 - DNA, 428 bp, Glycine max
  unsure (1)..(428): unsure at all n locations
tgtgagcctcggtaagtatttcaatgtcaanttcntctatttcctaaaagcaatctcgcccaatggtgcatcatcactctcattattgcttccataaatttcctctagctcatcacattcacttatccttaaaatgcggaggtttggtaaacttgtggttgttgatggccttataatattgaccagtgtatgacaactggacacaatcaatttatctaaacactgaaatagcacaaaggatggaattatggtcttcatgcctggacacttctctacagttattttttcaaggtaaacatgggtcatatcacaagtaatatcacttttttcaaaaatattctttatgccacatgatcttatttcaagaaattggtgctgccgaagctctttagccgcggatacgggaaagacaaaatccatgctttcac

SEQ ID NO: 155919 - DNA, 232 bp, Glycine max
  unsure (1)..(232): unsure at all n locations
gaagagatnnnnccaatcatgtgttttcacatcaagagagacacactcatccaaagcatatatacggnnaaaaatgtattcacaacattaatctacatgtcaagagagatataagcaagttaacaacatacgctccagaagataaaggctcattaaatgattatcaatcaatatcaagactacctgcatcacctaacagcttgcataatgncctacaacacttcacgaatta

SEQ ID NO: 155920 - DNA, 380 bp, Glycine max
tgaccgtgtgagacgatgagtggagggcggttattttgttcacgaacttttatgcatcaaacgaggtctgaactttgaagtataaatcacaaacgatcaaagttgaaaaaaatgcacgcactaagcctctatttataacctaactgtcacacaaaataggagggaaatctgaattgctattcaaatttcacttgaatttggatttgaatctatcgagcccaatttagagccaagagttcactaattatgattagtgaattttagctatggttcagttcactaatccaagatcaagttcaagatttttcactaaatgtgcttcactgtcatgatgcatgttaaacatgaacggcatgcccaattgtgactatgtgaacgac

SEQ ID NO: 155921 - DNA, 255 bp, Glycine max
  unsure (1)..(255): unsure at all n locations
tcagtgtttggagcaaactttctaagtaataattncacggattcatatgaaagtactaataatttcacggagtaagtcgtaagattggcaatcccaaaaagccatataattgactactaattactcatcatatagcttttgaattaagtntgcagaatttattatgntgactagntaaagagatgtaatttcgaacttactatagagatagnactatcttgcttctcctaattcacaaagaccagcataaccaac

SEQ ID NO: 155922 - DNA, 375 bp, Glycine max
tatatctaattctaacttctggattgggggaagtgcatttttttcttggccttcaaacgatagaacctcagctcattcagtttagcctttctagacattttaatatttttgttcagctggctcttctttgcattatcaatatcatcagacttgcctagagagaaccgaatgacatcattgtgagtctccagctcaactgattcattacttatgtatctggcagggagccagcttcccagaatatcatggcttccaaagatatctgatctctgcattaaaagaaaacctgatcgagaagctaaggaggaaactcctgaaagatggcttggtgttctgtaagttctttgatttatacacttatctggagtgaaagac

SEQ ID NO: 155923 - DNA, 432 bp, Glycine max
ccgctcctttgattaagataaataacctaaatggcagtttccttattttaacataagataaagatatcatgtattgattccagtatagaaagagctcgaatatttttttttatctattgaaattaaagatgatatttgagaatctataaggctcatatatttattcaatgaggtagactcttttgatatataaaagacttaaatatgattccttgtttatattattgacataaatatatttaattctttttataaattaactaatattattttagttttttagttaaaaaaaaaccttttgcattgaatctttaataaaataattttgttggtccttctcggctggcgtaacatatttcttatctttaggatggattacatgaacaatcaacaaaatttgatagttagtctctttacatgattcctcttacc

SEQ ID NO: 155924 - DNA, 388 bp, Glycine max
  unsure (1)..(388): unsure at all n locations
tagagctcatgccctgngnnaagagtacgcgcggcgacctttgtttttaacnncatcataatcgtgatcaagngtctcatcacgaatctgttttactttgttcttctcttgtggatgttgtagttcgcgcaccatattactaccattgcctaaaacgtgcctaaaaaattgttgtaaactagttgtttcagaaattgagtagtgagggtttgcaagtctctttatctgggatcgctcgggcgcttgctgtatctagagttctcgatatatctgtatatactctctgcatattgtgggattataaaactgcatcttaatatctacgtataaataaaaatcgtcccataaccttcgaattggctccacacttattaaaaataacgtcgac

SEQ ID NO: 155925 - DNA, 424 bp, Glycine max
atgctagccctagatgggatgagaccttatctatgttttgagaggatcaataacaatgcctataagttggacctcccagatgagtatggagtcagcaccacttttaacatttctgatttaattccttttgcaagtggagctgatattgaggaggaggaactaacagatttgagctcaaatcctcttcaaagggaaagggatgatgcaatcctccctatgaatggaccagttactagagccatgagcaagaggctccaagaagattgagctagagctgctgaagaaagccctaaagttctcatgatcctcaaggtagatttttgagcccatgggccaaagttggagccaattatctttagacatattagactaagatgtcattatatttgagccttgtatttaaggctccctagaaatataagat

SEQ ID NO: 155926 - DNA, 426 bp, Glycine max
tctaggaacaaaattgcctcaatcatttccaaatatgcttgtgaattaggaagcatcaacaagaatcaagccaaggctattgtgcaagcaatcaatggggcaaaacacaccaaatgattatgatgatggatggctcaaattctcacaaaggtaaactcatcactttcaaaactatcatgacatgtagaggagaatcaaggatttcaagtcacaaaatgtcaagaacttttattttcaaaacaattacccatttcttgaacatatcctataattcaaagaaaaacatgcaaagtcgtacatgcacacagaattgacccaaaatattcaactagaaatccgacgaaactaacaacattaacaaattaacacaactaacataattacaaaaccaacaaaactagctaaaccaaagaacacgtcctccca

SEQ ID NO: 155927 - DNA, 288 bp, Glycine max
  unsure (1)..(288): unsure at all n locations
agctacattagactctgtagctcttgttgcaatnnnnnatacagaagcaggagaacatcttgcgaatagctggtggagggattttaaaataatagaaggctctagactatgataggtcaaagnttttatagcgaactttcgctgtcaaacttatattatatattgaaggtcataaaaattgataggcaaaatagncaattagatccttgagagtgttcaaggatctcaagttaggctctaaattcagggactaattaacttgaaatcatcatatattttaataatggg

SEQ ID NO: 155928 - DNA, 407 bp, Glycine max
  unsure (1)..(407): unsure at all n locations
ttgtattcttgataaanaatacttcctttattgttgattaatattcttaattcactcttcaaataacataatattgactaagaggagtggtataattttctttcttatgtgcgaattttcttacaaattttggtttccaagtaatacggacatcaataatcaatttcctgccatttgcagcaaattgctttgtagaaaagtcgaagtttaggaaattttcagtagattttcacacgaaaatatcctcaagcaattttctttgtagaaattttatttcaaaaattctcaactagctaggtttcctgcaggtttcaaatcctcaaatagttctgcatgntaatttcaggtgaatctaaaatccacaagtaattttccagcagaatataaatcccatataattttcctat

SEQ ID NO: 155929 - DNA, 287 bp, Glycine max
  unsure (1)..(287): unsure at all n locations
tttntgtttcctttttagatcccccaattgtaaccctcgtggccttatattcacccaaaaatcctatcttagtctaattattcaatggctnaattgctcaatntaaaatggtctaactttttaatgttgnagattttaagcactaatatcattccaataatttcaaatagataatttccaaaatgatttcgctcactttttcttttctgaatttgcgcgtgnctactatcacttctaaattaaagaaagttgattctagagttgactntagaaatgatttaacaaat

SEQ ID NO: 155930 - DNA, 442 bp, Glycine max
  unsure (1)..(442): unsure at all n locations
gctagcatgattcacattctcccctnttttctatcaaatnctttnagacatcatcaaaaccttcatgatttacattctcccccctttttgatgatgaaaatcattatccaaagcttgatcttttttacatcatcacaatcttcatgatttacattctccccctttttgacgatgacaaccacttgtaggttaagagcaacaacaaaacaaaacgagaaaaaaatattaatcgcatagtcaattttcttaaggagaaatgtggcctttgttaggagcttcataaatcacatatccatttatctaggagagaaatatgaataaactttgatgcatgccatgtgttagaagaaatagctatcaatgtatcaactttgctcttctctgttttcatagnctttcatcatgatacccagacttatgatnttattctctgaatcacttg

SEQ ID NO: 155931 - DNA, 404 bp, Glycine max
tgcctcatagaggtccaggaaggacaaggcagccgaatttactagttccgctccggagtatgacagtcaccgctttaggagcgctgtacaccagcagcgcttcgaggccatcaagggatggtcgtttctccgggagcgacgcgtccagctcaagacgttaaataagcgctactaggaggcaacctaataccttttaaatttctgcctgctatttgatcattttttatagtaggacgcacctagttgctcatgatcctgggaatttaaataaaacaagcgcaagctcggaaggtagtcataccttacaaaacatatatatgtatgtttaggtagtgaaaataccttatatatgcatgtatgtaaacaaaaaaacacttcacaaaatatatatatgtatgtttaag

SEQ ID NO: 155932 - DNA, 453 bp, Glycine max
  unsure (1)..(453): unsure at all n locations
agcnnnacacgtatctgncaagtgtatctttcatatcgnagccaaagagctcatcgatattgtttccagnttaaacgtgatgcctaagagcactttggataaattaccattcaatgcctcccacctaaagccgagttcaatggaggttcatgccttcgacagcacccgccgagaagttaagggagagatcgaccttccagtacagataagccctcacacatgccaagttaccttccaaataatggacattaaccccctctacagctgtctgttggggcgtccgtggatccactcagagagagttgttccctctacactccaccaaaagttgaaattcgtagaggaaaggcatctggtcatcgtatcaagcgaagaagacatcttggtgagctgcccatcctctatgccttatgtggatagccgagaggagtcattagataccgctttccagtc

SEQ ID NO: 155933 - DNA, 418 bp, Glycine max
  unsure (1)..(418): unsure at all n locations
gacactaaaatctcagcttgtaaacccagggtngcccgtgtagagccgttttattttcaaannncgcattcataaaaatctaaggtatgctagcttcacccttgcaagttgggctattattcactgtttatctatgtttgattacaagtctgcaagaacaaaataaactgcctttggttgtacaacccaaggtttgtccttggttcaaaaatccaaggtccatccttagcataaaaacacaatgtttacccttggaatgcactcttacatacccaaggcatgcccttggtcaccatagtcaaaagttcagatttattacgcaaaacaaactaccacttaactgtgtagtaaaacccttcaacccagtggaagtcacactttctttcttacaaccatcagaggagaagttccattaagc

SEQ ID NO: 155934 - DNA, 386 bp, Glycine max
  unsure (1)..(386): unsure at all n locations
agcaagctaatatgcaattntcactntagtgtctaaacattnaataaaaaatgtatattncacagnagagagcaatttcaaagctcagtatgaatagagtagntacctgaatgctatcacttgaatcaaatctgtatcgatctgcaacaaaaaccagctagcatcagcagaaaaaccttacccaattgaaccttctaatacaacctcatgaatacattcaacaacagatgaatatatccaactccaccaaacttaccccaatttcctccttcactgctcttacagctgctgtatatatctcctctgcctgagataattcacacaagtcataaagaattcaagttgcaacataattgcataaattagactacaattcaacaccatct

SEQ ID NO: 155935 - DNA, 370 bp, Glycine max
tcattctacacctgaaaaagaggatgagatacttgtttttatgagacatcttcctaacaaaaattttcatgcaggtgggccttcttctagtaattctgacttacagcagcctcctatccctcttccattcccaccaagagcaattccaaacaaaaaaatggaagaagcggaaaaggagatcttggagaccttcaggaaattagaggtgaacatacctctgctagatgccatcaagaagatttcaagatatgccaagtttctaaaggagttgtgcacccacaaaaggaagctcaaaggcaatgaaaggattagcatgggtaaacatgtgtcagcattgataggtaatttgttcctcacattcctgagaaat

SEQ ID NO: 155936 - DNA, 352 bp, Glycine max
  unsure (1)..(352): unsure at all n locations
cgattacaaccttatcataatcgattgaattattgnttgcaagacaatgactgattnattcaagagtctctgctttaatcaaatataattgattacttctctttctataagtgtttcagaagtaaacaagaacactttattcgattacttaaagtatctaattgattgcattgttcttaagttgtttccattttttgggaagaacactttaattgattaaaaagataatttaattgattacttcattgaattaatcgattaccttgtagatttaatcgattacaggcgggtataattattttctctataaatagccaccttgagttctctctaataacaaaaccctttaagc

SEQ ID NO: 155937 - DNA, 387 bp, Glycine max
tgatacttacagctgatgcaatagccactgtttgtctaacttcaaggccatttattccagcatgtatattgatggaatttgtgcaaaaaacagccaagagccccatatatagtttatacatccatcctgccccataaaacaaagtcaaaatagtgaatctttacagtaattagtaataactcctcaagtatcatttacataaaggtacaacatcaatatggaagctcagaaatgacattatcttcaacaatcatccttttgtcatatcgaggctgttggacaatacaattttcctctcttggtcttggatgagggggtgggaaaaggattttaatgttccttttcaccaatggtcttcatctatggttatgggttttaagtagtgat

SEQ ID NO: 155938 - DNA, 446 bp, Glycine max
  unsure (1)..(446): unsure at all n locations
agcttcaacatcagaccacttcctttgtgctggatctacttcacatggacttgatggggcctatgcaagttgaaatccgcggatgttagaagtatgcctatgttgnagaggatgatttctccagatttacctgagtcaactttatcagagagaaatcagtcacctttgaagtattcaaagagttgagtctaagacttcaaagagaaaaggactgtgtcatcaagagaatcaggagtgaccatggcagagattttgaaaacagcaagttcactgaattctgcacatctgaaagcatcactcatgagttctctacagccattacaccacaacagtatggcatagntgaaaagaaaaacaagactttgcaagaagctgctaaggtcatgcttcatgccaaatatcttccctataatctctaagctgaagccatgaacacagcatgctac

SEQ ID NO: 155939 - DNA, 381 bp, Glycine max
  unsure (1)..(381): unsure at all n locations
tgcttgtggagcttctatggaggatggatctttgttcttcaatgaggtccttcaatggtgatttttcaccatggagatgcagcggaaggcaaaggagaagacgagaggggaggcaccatccactanggaataagccaaggaagaaggagcttcaccaccaagaattgcctcggataagaagcttgaagaggatgctttaatggaggaaaagaaagagagaaggggggggcaggaaattgaaggaataaaataacgagagaagtggaactttgaagtgtatctcataagactttcattcatcaaagttacaacaagtgttacacatgcttctatatatagactacgtagctttcttgagaagctttcttaagaaaacttttt

SEQ ID NO: 155940 - DNA, 232 bp, Glycine max
  unsure (1)..(232): unsure at all n locations
acgcggaacncncaattcagggacataatctgcctcccactcgtaactccttgaaatcttgggctaatttacatgacgtctttcccacttattaccttgatgactaggtcattctttcacgctggggtattgatcaccataagcctcacattatcgaggtgtacaccctctatcctcgaccaatacatacaataaccagtgaccaccaacttcatcacggctcacaacaccc

SEQ ID NO: 155941 - DNA, 385 bp, Glycine max
  unsure (1)..(385): unsure at all n locations
atcacatgtggtactatgtggcggtcgggcgaaggtgcacaacaattctccacatccacaaatcacgtataacccaccatcccctgttgcccacctccaactgagctcacgtactcccacgtagcccttatccccgttcctctcaacgtcgggtccccatcaatcctcccaagcttccacaacatccaggtaattccacatccaatcatcatggactaacaaaaccaagcaaaacagagcaaaggcagaaaactctgcccaaaacacaactcataatcacagcgtttcacatacaaataccctagtaacattttctttattccaattcgctaaccggtggatcgactcgaanatgttactggaagtctctagtacataagtctac

SEQ ID NO: 155942 - DNA, 209 bp, Glycine max
  unsure (1)..(209): unsure at all n locations
taactgctcatcttaactcttaccagccccaagaaatcaactccaatctcctacttcctaaaatcctgaccctgctcactcctgcctaaaagaatctttcacactgtccttgcccacttttttcaaatgtatttgtaaacaatgtccttgttttnttcacagaatcaatatccccccctatctttctgtttgccttagatcaaggaaaa

SEQ ID NO: 155943 - DNA, 358 bp, Glycine max
  unsure (1)..(358): unsure at all n locations
gaaagtgctaagtatttattacctatacttaacagaaaatacttataatcttacgaaataaccattaattgggagagttcgatacaatttatactagttgtatacacaaaagctagtcatcttcaccgactaagaagtcccccaaatttacagttttgcttgtcctcaagcaaagagagaacaactcacttgttctcaagtgacaatgacatgcagtgactatgtacaaaggtgtatgctacaaagngactgattgcatgataagagaatggagtaaaatgccctcatcacttgtctttcacaaggtatgcagttattcaaagagaagaataatattgtacctgaacagattgatgaa

SEQ ID NO: 155944 - DNA, 393 bp, Glycine max
  unsure (1)..(393): unsure at all n locations
gccccactctatcattangattagtacctgacatctcanacaaacaaatcaaacgtaacaagacaattatagttgctggttgaatacctcacccactcaagtgtatcacacaatgatggcttttctctaatgaaacactctttccttttaccactctaattccccttgagttcttaggcaattcaagagattatggccacaacaaagaacaattcaccaatatgtgtaaggtaaggctagagagacaaggaaaaggttaaccaagaaaaggctaacaatgtttttaggcacaaatgaaggaaataaaattcataaattangaattcaagtaacaatcctccatgcaaccaatatattaccttaaagagaattttttaaagttcttcaagcatg

SEQ ID NO: 155945 - DNA, 455 bp, Glycine max
acttagatactcagcttgtaaaagcttatcgattaagctggacctaaaagttttagctttctataaacttgtaaactagttgatttaattaaaattattttgtatgactgactttaagttaattaataaatgtcaaatgatatatttaattgtgtgtaagctctagttaacaaaaaggaaatattttgcttttaatagataaaataaaaatcatgcagggaaacaaatttggtcatatacttattgcacaaatagagaatgattcaacaaataatcatataagtgatatgattcaaaaaatttataactttaagacataatgtagtgatgataattgtcgaattgacaatcgtgtatgtataaggacataaaattaaatattagattcttcttaatcacggacaacaacatataaaatgatttttatttgaataaacggataaataaaatattat

SEQ ID NO: 155946 - DNA, 427 bp, Glycine max
  unsure (1)..(427): unsure at all n locations
agcttgtgcattcaatatcctgatgagggtgttccatatgttctctagactagactaacacatntgctgcccaagtttcatggtcttgcaggtgaagatccttattagcatcttaaggagttccatattatttggttcaccatgaagccccctgatgtccaagaagatcatatctttctaaaggctctttctcattctctggagggagtggaaaaagaatggctatactaccttgctctcatgtctattttcagctgggatgaccttaagagggtgttcttggagaaattctttcctgcatctaggaccactggcatcaaaaaagacatttcacgcatcaggaaactttgtggagaaagctcgtttgagtactaggaaagattcaagaattgtgtgcangctgccctcaccaccagatttcttgagc

SEQ ID NO: 155947 - DNA, 438 bp, Glycine max
  unsure (1)..(438): unsure at all n locations
tnctctaccgtaananaatattatcggccagtganggtaataagaattgcgcaatgtcggcagacaaatatcagtcgtggctatataacgaccgatgtcaggtatttttgtttcaattcaatccctgaataatttttggatattgtccaataggaaatgttcgatcggcgtcatcaggtgacgcttgctttctattttagacctgctggatcggtcatctttcctggccgacatcgactatcatgttttttatcagtgtcggagaataatgttttttggccgacgtgggctgatgtttttctagccgaggtaatgagaacacgccagtgtcggccgaaccacagttctgttgactcctacaaaaacaaaccgaccacattgtagtttgttgcacaccaacacaaaccaacctctctccgaaaaacatatcggctggtt

SEQ ID NO: 155948 - DNA, 389 bp, Glycine max
  unsure (1)..(389): unsure at all n locations
tgtganaacttcatgtgctattcaatgtgttgaaaatctctttggtacttatctggatcgagtcttttcttgattcttgaatcttgagtcttgaattctgatcttgattattcttgattcttgattcttgattcttgattcttgattcttgaaacttgacacttgattcttgattcttgaaatgttcttgactcaatcttgaagtcattctcttgggctttttgtcatcatctttgttatcatcaaaacaccttgaatcaatcttgattcatcatcatgaatcaatcttgattcatgactcaatcttgattcaatcatgaagcttgcttctacagagaaaaggaaagaaagccttaagaggctaacattaaactcccatacttccatgg

SEQ ID NO: 155949 - DNA, 414 bp, Glycine max
actaattaaaaaacctacttgcttgtaaaacaagaacagatactttcttagttaatcgaactcatgccgataatcaaatggattgactctctgaagttagtaataaaatcattaaacaaaaccagggatttgactaggaagaatatatggaataataaataaagagaaattatctaaagatcgtataatgagattgcaaacaaattcttcataaaagaaagattgcaaacaagaaagaaactcttacatatctatataatgatgatttataaacattctataatggtaatgttgattgaagaaattaagtatttgattaacgaaatattgagaataaatttttgttattcgataactaattaataaatcattaatattgattgattaaactcaaatatatttttggtatttaaa

SEQ ID NO: 155950 - DNA, 396 bp, Glycine max
  unsure (1)..(396): unsure at all n locations
atatgggccttctcctgcttctaaccgnctaacaaccttctaacggcctagctaccttgaactgggttccagaacctttcaaccttcctagcctaactaactcagattccatctgcacgaactgcatggcttccttactcatgaacgtagtcctctaagtaagagggaaaagttactctccctttgggcctttctaaagacacccctccactactgtcttccacttgtcctgctaatggcaccccttgcgtctgctgcgtatcactcccatgcccttcaaaccagacctcgtcctcgaggtcataaagtgctcgaaactcataccagtccttccatgaagtgtcctctggtgtgagccctacccactgcaccagcaccatgcgtcgcggcccggta

SEQ ID NO: 155951 - DNA, 229 bp, Glycine max
aggcttgatggtgtcgagaagatatcacatgtttgttatcatcaaaaagggggagaatgtgaatgtatgtatacatgaatttgatgatgccaaagaaaaatcaaacacagttgcttcatatgataagcaatttgcttcaagaataatatcaagagtgcttcaacaaacaaaagccttgtttcaagattcactaaagaccaagccttgccttaaaacaaagtgctttcaa

SEQ ID NO: 155952 - DNA, 491 bp, Glycine max
  unsure (1)..(491): unsure at all n locations
atcctctgagtcacctgcngctcaagcttgacacctctatttctctacctttcatttttnaccctggtggntgagtgacaaaaacttcttcttctagtgagccattaagaaatgcaaattttacatccatttggtgtacttcccagcaattgtagctagccattgctattacaagtctcattgtttccaacctagcaacagggacaaatacttcatcataatccagaccttgcttctacagaaatccctttgcaaccagtctggctttgaactttgttacttctcctctaggattcaacttagttntgtagacccattttactgctatggctttctttcctgttggtagctntgtgagactccatgtcttgtttctctcaatagacctcagctcttcttccattgcttcaacccaatgtgagtgcttcaaagattcttccatgccaataggttccatctcagcaagtaaggccatatggacaaagtcacca

SEQ ID NO: 155953 - DNA, 419 bp, Glycine max
ctggctctgcctcctcccgcagtgggggcattacttctatcttatacttatcccaagattcagaatttctacacctagaccactccttgaaacactcattttttactctaactttgctctgaacattgtcattccaccaccacgattctatacccctatgtccaaaacctctagatttacccaacgtctctttagccactttaataatctcgtgggacattgtgttccacatatcatttgcacttacttgtgatggagcacaccaacccttccatatcttatgtgggagattccttgttttcacccttcagtgcctcatttgattctggtgctccataggactagttctcttgcccatctctattttacatccataccaaaacttatgttggtagtcagctctctccgagaaatttaca

SEQ ID NO: 155954 - DNA, 354 bp, Glycine max
  unsure (1)..(354): unsure at all n locations
gatgctactagtccattaacaaaacctgtgccattgaagaatgagatccatacaaataacattagtgacggcaaatttcagttttttcaagaaggaaagttcttttggtctattgtgcttcttggttgtatgctttctggaataatttcttatggttaaagatgaaaaatgagatacaatatgtgttttgttaatctatataaaattttgctaaatgacactgaccatatgatagaaattgcaaggcctggtgaagcttatctttgctgagtgtgaaatttagaggactaaacattaatggatcatatattntaactcttgaagatttgttatatcatacagacacatgacatg

SEQ ID NO: 155955 - DNA, 391 bp, Glycine max
  unsure (1)..(391): unsure at all n locations
tactcagcttatatcanangcctcccatagagtacaactgatattacttctcactatgtcacattaaatacatataacattgaagaacttctgaaactaataaatgttactaacaacttattattcttataataataaactaatgaatgttactgtcagttacaaatgcaggtaacattaacaaatcaaatttttggttcttagcataaaactaatgaatatcattcatttctcattgtgaaaaccactttctttggcttgccatgcagaatttattgaccaatttcaacaacttcaccaataacatcttctagaaaaacccaaaattaaaaacataacattaacatgttaatcaaatcaattcttcaatcttaaacaaattgaccactac

SEQ ID NO: 155956 - DNA, 336 bp, Glycine max
agcttcatcatatccctatggccttctttagcagctctagcccaatcctcttggaggcttctatccaatacccttgggggtaggattgaataaaaacataaggctttgggatcgatcttgcaccccattgaaggatggcaatggattgtcacactttggtatgtgaccaagtgaaactttcttgatttaaagtcatagagtgatctcaagggtctgtcgatccagctaaaaatgggttgatcccaaaagaatttatacaacaaaggccaccattggattcaaaggaatcctaaggagtccacatgagcgactaacatcagatgtaccctactatca

SEQ ID NO: 155957 - DNA, 374 bp, Glycine max
  unsure (1)..(374): unsure at all n locations
tcactcaccgacttattgggttcatttctagctatcttatacttatnccaagtttcaaaatttctacacctagaccactccttgaaacactccttttntactctaactttgctctgaacattttcattccacaaccacgattctttacccctatgtccaaaacctctatattcacccaacgtctctgtagccactttaataatctcttgggacatcttgttccacatatcatttgcacttccttgtgattgtccacaccaaccctcccatatcttttgttggaagattccttgtttctcacccttcaagtgccaccattttgatccttggtgctaccagaggactttctctctttgcctatctctaattttaca

SEQ ID NO: 155958 - DNA, 415 bp, Glycine max
  unsure (1)..(415): unsure at all n locations
ttcaagcaagcactaataatagcattggcataggtttgatcacacataacacactatagaatattatttgtcataattaccaaacaattctaaaagctatagcgtcatggtactttaacatgacatatagagttttagggttatcaaagaatttcccataacaaatccaggactatatcccaacaatgcaaatagtacaagagcaagcaatcaatatactttatcatctcacacccatactccatgtcaagcattatatntttttcatatttagacataacttggcttaggttctatgccaatattggactatattttcaaccagcttattggactttaaatacatnccgcaacatcaaatgactcanatccattactacagaatacaaatacccagaggaactacaagacaaca

SEQ ID NO: 155959 - DNA, 416 bp, Glycine max
ctattgcctcttctagtgtcttgttcttgattattcttccaccagttgcagcatcaaacatcacctttgttttcccctttacacccccaatgaagatgtataattgatcaatctcatcaataacgtgattgggacaattcatcaagaaagtttttacctctcctaagcctcacataatggttcatcgtcgttcctctggtgaaaacttagtatatcgtgttggctttgcttctttttgactttgggaagaaatgggctaataacttgctttcaacattttcccaagtatagtgaagctttgagatggatgagtattgagccatttcaaggcatctcccatgagagaaaagtgaaaacctatagacaaggttttctcttcattctggcatctctgtaattgacccataatcataaaa

SEQ ID NO: 155960 - DNA, 412 bp, Glycine max
  unsure (1)..(412): unsure at all n locations
atagacncacaaagaataatngacttttganagataattatgttaatgcagaaaaagcatagttaagcaaaaagcaacgtaagttctantctataattcaattgtatgttttggtgaagttgatctctaacttttttcaattataatttttgcacaattgcataaatttccattgttttttaaggctaaattgtaaatttgttctttctattcgtctcaaaatttgattttgtccnctataatttatcttacgaatttagtctctcagttttttcaatctcgttatttcattcctcaatcctgaaatagatgttgacactcgatcgttatgtgttgcatttttataggacaaccttcgataaaatcgtgatatgtaacggtcaacgtctcatcaaagcactagacacgtgac

SEQ ID NO: 155961 - DNA, 452 bp, Glycine max
  unsure (1)..(452): unsure at all n locations
gctatccggtgtnataagcgcagcaaacgcttatctctttatatcacgaagaggggcgcaggtggaggatttttgtatgcccaaaacatgatatcaacgctgacagaactctctcaacctatagcaaattacctaaaacattatgattcgaaaagctaaaaagtagatgaatgaaccataagaaagccataaagctatatggagcataaatactagttcatgaaactgtcaaacatttacggctgcacatccatttcaagattatgaattaatgatcttttattagactaattagaatcaagccatgcaacaaaaaacaaagacactgcacttaanactgcaaccagcagaacttatgtataagacatttggtcttactcctagccacacacatttacaaaactatctttattcattacctctttaatcaacacttatccttaatcttttat

SEQ ID NO: 155962 - DNA, 446 bp, Glycine max
  unsure (1)..(446): unsure at all n locations
agcttagtaaccactaacaagtacaaaccaactttaagaatattntgaaaagtaaagaagagagaaaaagtnaataaacatgtagaacaccattccaccaccaaataacacgtcaattaaagaaatgtgattggacagattatatatatatatatataggagagagatcaaattacattaactntaactttgattaagtattataccgttcaataatttttaattggataatattttcttaaaacctataatgggattgaaattttatttcacttagatcatatatacaaaattttatattaatccaaaattatttgttacctcattcattcagattaaaattgacctaatataaacttttcaaaatatattaaaatatagatcgtttgattaccttattattgttcaattttgacaaaaattcacacaaattatctngataatat

SEQ ID NO: 155963 - DNA, 397 bp, Glycine max
  unsure (1)..(397): unsure at all n locations
agcttgagaaaagttagtgcctttatcaactaataggggttattacacaagttctagcattcaaagtcaaaacctcaatgcataaacaacagatcaacaaacatacatcttttttatatgtccaacaacaaaggattgtatgaaaatgcagtaatcttaagcattcaagacaccaaaaccctttacatttaaaaatgaacctcagaatctcaacaatgaaaaccatggtgttccctatttaagaatcagaacacaacaaagcaaaacaaaaaccctagacttttccctatgagcagaaaatgatgaaaatatgaagtgaaagcatagaggtcatgtataggtagaaagcgactggaattgtgtgatggaagtgatgttcttggaatggaatangcgt

SEQ ID NO: 155964 - DNA, 409 bp, Glycine max
  unsure (1)..(409): unsure at all n locations
tactcagcttgcttctcaacanattctngcgaactngaatccttcacaccaaacaatntccattgtgataaacaacatttaaggttaaaacttgaagganaggccactttnttattgtcttttgggtggcatttgggaaggttatgaaagaatgatcaaggatgtggtgtcagggtttaattttagtatttgctatttntttttcttgctttaattgatcangtgcttacgaacgaagggaaagctaaggtcatggccttcaatgaatcatctntgtgttccaacaatagtttggttttcttgattttggattgcgaagagttgacgttgaaattanggaattatgtaccatattttgtttctttggctaatgttatgtattattggttaaagttggcatgctattttg

SEQ ID NO: 155965 - DNA, 402 bp, Glycine max
  unsure (1)..(402): unsure at all n locations
tctctaagcaccgcggctgcagctgaaaaagataggtataatagggagttttatgaggacagaattgatgagagtaacctttccagccatagataaaattttctggttccatttagacagcttctcttcatatttcctgatcagcggttcccacaccaagctgctggtggactttgccccaatgggaatgcccagataatagaaaggaatctccatatgtctacagttcaaaaattatgctgcctcatgaatccagttgacctcagctctaaagatcccaacttgactntttgcaaagttaatcttcaatccagatgccaattcaaaacccctcagcatagccttcaaagcaataacattatcccacgaagcatgccccacanatactatgtcatctgcata

SEQ ID NO: 155966 - DNA, 412 bp, Glycine max
  unsure (1)..(412): unsure at all n locations
ttgaaccataatttccttttatgaatgatgctctcctacaaccttagacaaggtagaaggagataaactgtacaggctcaaggttcaatcaaacaatcacactttcagctcaaaatgggtgcaagggataaatgaatcatgcacaaggtaagctttttagctaagtggctatcttcaatcaaaacatggccttcatcatcttcaatttcacacgttcattccatactcagagattcatgcaaaaatcattactcaatgttagtcattctctcacaattaaagatcacactctcaccaggttgtggctaatgagtaccttcacaatcaaactgtcaaactgactaacattntcagtcataatcctaatccatgctttntctcttctaatcactgcacactcatttcaaacata

SEQ ID NO: 155967 - DNA, 438 bp, Glycine max
  unsure (1)..(438): unsure at all n locations
ctgaataccacatggtatgcatggcaatatttccttgccccataaattaaatttcaggataataagtaaatagtctcattttgtctttcttaacaaaactcacttgacaaaataggaagttcacctatcggatctacttatcattnttatgtattcaactaatatattaacctagtaatccacataattatccatacattgtggtggatttaaggtgagtctatcaatatatntttttaaaacattttcattctccaaatttcaagttttcttttttggtatacaatggttattagaaaccttagatcttgtgtatactctctaaataaggggttggatagaggattaatttttagttttcaaaaatatatggtgcgacacctattttcatatttgtattaatttaaaaataacttcatgaaaaaaataatcattttc

SEQ ID NO: 155968 - DNA, 420 bp, Glycine max
  unsure (1)..(420): unsure at all n locations
tattttgtcatttgggagtgttttttatataggaccagttattatgctgtacatgttctatccagatgattctacttgactttaaattacagaactcgttttaactatacagttaatacctaattactcgcttatcgcatgcttaatatctgtaattactcttaccgtgtatgcgacatgatatttatctatgtntcctaggtatcagccacagctntctgtagtgacgatatttgtttcttgagagttgacttctttgattctgttgaattatccatatatataggatggcttgattcgtctatatatgacaagtgttagatgcaattcttttacatatnacatgtacagaatatgaacagggttgtaactgaccgcttctgtctggcatttgataggttatggctctatgggtagtct

SEQ ID NO: 155969 - DNA, 315 bp, Glycine max
agcttggagtgcagtaagaacctttgcttcttagcatctatgcacgaagcttatgggaatttgtttagttgttcatcaagtggaatgtagtttccattttccaccatatccatgaggttaatatgaatagaatcgaaatgagttatcatactttccttctagtagccatactttgctcctctaatagtggagaattgttggtggagcacccttcttccatttctttcatttattaggatcttcctctgtatttgttagaatattcaacccaagaggtcgagctttgatgacaactaaaatacaataaatcacaat

SEQ ID NO: 155970 - DNA, 478 bp, Glycine max
  unsure (1)..(478): unsure at all n locations
gtgctcaccaacactagataagaattcctcatgttgtttcatgtaaacctcttcttctagatcaccattcaagaacgccgttttcacatccatttgatgcaactcaagatcaaaatgagctactaatgccaaaattactcgaagagagtctttcttagatacaggggaaaaggtctctctataatcgattccttctctttgagtgaatcctttagcaacaagtcttgccttatgtctctcaatgttgccttctgagtctttctttggtttgaagacccatctacatccgatggcttttacaccaacagacaactcaacgagatcccaaactttggtaaatgccatagaatccatctcatccctcataggcatataccacaaatttgatccttagaactcatggctngtgaaaatgtctcaagatcatttacggctccaatggtgtagtctgattcttgtaggacactacataatcact

SEQ ID NO: 155971 - DNA, 391 bp, Glycine max
  unsure (1)..(391): unsure at all n locations
agcttgcctaattaacctgaaatgagagaattgattattaaacacacaaaatggaagtactaagtattntntacctatacttaacagaaaatacttataacactacaaaataaccataaattggaagagtttgatacaatttacacaagttttatacacaaaagttagtcgtatgcaccgactaacacactgacatcctttgaattttgcaatgcaaggttattatcttcaagaagtctatataagagtcttatagcacggaaattgtgcgcttcctcaaattccatcacaatgtgcttctgatacttgaattcaagcaagcactattgtgttggctcctattttattataaaattggcacctaaaagttgaggaaactgggagcgttagt

SEQ ID NO: 155972 - DNA, 409 bp, Glycine max
ccttatgtcctttctttctttcctcaagcacgctaaataacaagagaaaaatgattgttaacatttgaccaaacatttcaattggtttttgaagttcttttactagctaaaaagtatattttgattatatgctatacaaagtttttttttctatatatctattttctttttgctttgtgagatacttcaaggagcacgagggaaggtggatgcctattaaagttctgaaaaatggtcctactatatctgatctcttttgtgcaaaggatgtcatattttgtgctaaggcaaggtcgttgcaagcttaagagatagcaaccactttggattcattttgtgcgatgtcaggcctcatagtagcacaatgaaggctagggctatggtatcgtaaggggttcctattgatatg

SEQ ID NO: 155973 - DNA, 338 bp, Glycine max
  unsure (1)..(338): unsure at all n locations
agctnggatttccttntagtagggaatctactttttctagatggagccaaacccagncaccctcattaagaactagctcttttcttcctctattgcctttagttgaatacacctttgtttggttctctatttggttcttaaccctctcatgcatcttctttacaaattctgacctagattccccttctttatgtataaaagaagtgtccagtgggaggggaatgaggtctaacggtgttaggggattgaacccatagacaacctcaaaaggggactgcttggtggttctatgaaccccnctgttgtaggcaaattctacatgaggaagatactcatcc

SEQ ID NO: 155974 - DNA, 478 bp, Glycine max
  unsure (1)..(478): unsure at all n locations
ggtgcaagcttgcccaggcgaatggcttgttatggctaaagttntctcttagcccaggcgagctagatgctagccttggcgaatttagggtcagaaatcttcacaaaaagaccattttgcccttccttttagctttgtttctggatctaacaaacaaacagccatcaaaacctacaaaatcacggatgaatctttcatatttaaacaacaatattagtaaatgtcaatatatagttacaactagttttaagggtagtttataagaaaactattacaattaaaggataagtgctaacaatttaatcccaaaaataactgaaatttggcacttatcagttggctctaagctnttaaaacaattcatatcatacatcaaattgttgaagcccaataattaaacttcagtcaatttatcactgatcgaggtcgtacccgaatcanataaatattaaaaatgcagtatctaggaagtgatcat

SEQ ID NO: 155975 - DNA, 496 bp, Glycine max
  unsure (1)..(496): unsure at all n locations
taaggctcactngtgtagagagatagataagtgagacacagagagagacaatttcaatctctntgttatttagttactaaaaatggagagaggtcttaaatttgagtacatgttatatatttatagtgacaacaccatgattcacttcggccacatgtcatgttcctattttcatgtccacatgtaataccaactaagccatttatggattttcctattagactagttctaacaaaaattgacaaatttaagatgtccttaacaagtttagttaatatttatcccaaaacaattaccctcaaatncaaccattttcttagaggatcatttgctntacaagcgtttaagggtggttaatatataccccgaaacanaatatatngtataatagctnnttttctacattagttgttgtgcatggattcaactatagcaacgttaaaaacaatagtgtgcacgtanggtagtggtgacaacctctttgtgtatggataac

SEQ ID NO: 155976 - DNA, 410 bp, Glycine max
catgacagccaatattctcttctgcaaatcattgaaactcacaaaacaatcatcagctaagatattgaatccataatgcctgaccaagttaaccaaacttcttttaatacctaagtatacattgacaaaatgctaaaaaaatagtattatgacttcttgacaagagcactcgggcaaaaacaatcaagagcataggcaaaatttcttcctttgttctaactcaggacatgtataagataataattcctttctaaagacttaaagaaacagaattcccttttgaataccaggactcaccttcagcctatgtatgctagcattctctgaatgttgtcttacttgatgcaccttacgacagatgaaaactgttattacacttttgatttctagaagagcatactgattcttat

SEQ ID NO: 155977 - DNA, 252 bp, Glycine max
aaggaaacatgtggagtataattcttgcatcaaaaacaacaatgtgaagaggtactacctgttggacatattgctgtatcaacgacagtaagctcccttgttgccgaagaaactcagcatcttgaccgctttaacttgtacgtttaatatacgtgagtccattaagcatcgtgagaggacattaacagtcttagatggaaattcttttgtgagattagtatggaaattgacattcttattaactgctatgtc

SEQ ID NO: 155978 - DNA, 345 bp, Glycine max
  unsure (1)..(345): unsure at all n locations
agctttntaaatttaatggtctgtcttatttaatgaaatattattattggttaaattgtgataatttattaaaatcatgcatttatttattttttaaaatattaagcatgataatgtagtaagtttttgtgaaaacttgaaaaaaaattaaaatcatggttacaaaaattttggttgtgaaccccacatgtgatatatatatatatatatatgattacttctatatatatnttttcatatacgtgcatgtcaacattacattataaaattaaagaaacaactttttgatgtcccaattttctgttaaaaagttttccttttatttcatttaaatctcattttttt

SEQ ID NO: 155979 - DNA, 328 bp, Glycine max
  unsure (1)..(328): unsure at all n locations
tggaagcttcgcttccacagatcaaagttagttnttatatataataatataaaaagaaaaaggggtggccaatggtcagcataccctaaatatatgttgaaaactagcaacaaaaacagtgaaacaatgttggccgaacataatcacgatcaattataaaaataagttcacagacattaagttccaaaattttgtgaaatcacttggtgcacatttggaatataactngcgaatccactatctgaaagatgaggattaagctctggatcccgcaatatgttggttgacataatattcttatgaacaactgttggcgaactgacttcat

SEQ ID NO: 155980 - DNA, 461 bp, Glycine max
  unsure (1)..(461): unsure at all n locations
agctntntntagtgcatataaaacanaaactaaaccatgatctaaacacaaaccanacccaacaattacagctgcaagaaaaaacaaaactccgattcaattgtaagtaaggtaatatttctacaaacctttgtgtaccatcgttacgctgcacaaacagtcccatcaatggtatggcatcagcatcatgttcttgtgaagcctgcgcattggtaacagcattacttccctgtgtgctgacacgcgcacctagttgttgtatgtccggctgaatttggagtgcctcttgggatcctttatttgacaactcttttttaatagcctctttcaatgcattggtcattatttccaagctccttttattttcctcttctagctgagtcctcaattcttccttaattngaagtcctcaattcttcctaatctggccagtcatgtcttccctaagccttgaacaactt

SEQ ID NO: 155981 - DNA, 334 bp, Glycine max
ctcgtgggagtacgtgagctcagttgaaagtgggcaacaggggatggtgggtttatatgtgatttgtggatgtggagaaatgttttgcaccatcgcccgaccgccacctagtaccacatgtgatgggtactccataatcctacaagcttgaaatgaggaagtgtggaagggtgagacttcctcactttattcgttgaccacagagtggtacctggagatatgtcgcgggggtcaggagacctttgggacgtcaggtggggtgctattgcccaaaaccaagcttgaccaatcccgacccaacccggacatagtcagtcagtgagaacctatgatg

SEQ ID NO: 155982 - DNA, 330 bp, Glycine max
  unsure (1)..(330): unsure at all n locations
gcttaaagatccagtctccatagaagccctatttcaagctttcatcagntgnncaaagagaaatagggagggtacatcccttgtggatctttggcttgtaaaggattttacaaggttgaaagaaatctcaagaaccgttggttgcttatggactagatgtaagcacgggttgttgccgaaccagtataaatcttgtattggcttcttcttccctacactctttaatttccgctgtgcactttaattatcacttttactttcgagacgtttccgtgggtgatttcgcgaagattttccgccgntcttcgtcggttcttatcattctttcgg

SEQ ID NO: 155983 - DNA, 462 bp, Glycine max
  unsure (1)..(462): unsure at all n locations
tcganactagtcaattgtcttcaagcgcttatatttaatatcacgttctcaacaattgaaaaaaatacgggtganattaattaatattgatatctntatgtgatagcctgtctcttggctctgacattgtgaaggttccatggccatagccatgttctaattcagccatccaattggacatttgaattataaattaaaccttcatggccttatgttatatttccatatgagctgttcagctaagtcaaactccacaaaatcatgcagtacaatagccttataaacaacttcctaatgacaattacaagttctccccattttagtctataaccgaatggcaagttgcaaccaatggcattaacccagaagaaacatacttgaataatgtactcaaacttcaacatgttatcattgtcaagatctttcacaatgccagaagcatcatattatgttgaacacgtc

SEQ ID NO: 155984 - DNA, 451 bp, Glycine max
  unsure (1)..(451): unsure at all n locations
agctntgaaaagtgttggttttcaccttctctttaagccaatctgctggcttagtgagcgtccgctaagcgcaacactcatgggctaagcgcaaggaagactctggaagaagatgagttgtacaggatcgctaagtgcaccacttcatctcactaagcgcaccgcttcagttcatccgctaagcgagaaaggcgcgctaagccaaaaatcactaatgtgcgctaagcggtccataagtgcgctaagcacacgagcacgaacaaggccacctatttaagcctgaaatcagattttgtgaagagagtntggactangatttagagctttgcatgtctaggatttctagagagagaaaggtccaagttctagagagttntgagagaatttgctgtgtgaagatctacagagaccaaagcttgaagcaagagccgatttgagagctagagatgag

SEQ ID NO: 155985 - DNA, 489 bp, Glycine max
  unsure (1)..(489): unsure at all n locations
ctcagcttaacatgaagcaaccagctcggctaggcgagcatgttgcttctagaggaagcttccagctcacctgagctagttgggcggcaacctcctcccttattttntctataaatggacgttggaggatgagaggaaggggttcaacacccttggtattcatatttcacttaaaattagtgaggaaaagaagaaagaaggagaaaatcaaggccgaggcacttccgtaacgcttccgtgatgtttttgtgattaattccatgaacgctcttcgtcgctctttgtccattcttcggcgttcgtcgatcttcaaccggttagttttaaattttgaagctttcaattcattctatgcacccttaggagtccatccttaggagtccattcttgccnttgtatgtttcaccttcatctcgtctactttcggtattctttttcttcgtttaagcgagcttaatcgatcgttgagtcgtatatacttaataatat

SEQ ID NO: 155986 - DNA, 348 bp, Glycine max
  unsure (1)..(348): unsure at all n locations
catgaagcttaagagcttcgccatcgcaggcaagaggggtctcttatagatataatattntggatgcgtgcagatcttgttaggaatctaagtaatatgtgtaatccaaagctacacaaaggtaggcttcagatgccaagactaatcaaggagtatattgatgaggtatcaactcaattgagaatggtttgcaactctgattcaaaggagcttgcattggaagaaaagctttctttcatgcatgaaactagacacgcatttgggaggactgctttgttgttaagtggaggtgcttcccttggagctttcatgttggtgtggtaaaacactggttgaacataaactttt

SEQ ID NO: 155987 - DNA, 468 bp, Glycine max
  unsure (1)..(468): unsure at all n locations
tcatcactaatatatgatgttaatattgttgtgaactatatatgatgctaatatgttatcattaatgtatgaagtgtatgtttggatacgagttacttttccttagacatgagtcatagcagaagcgaccatttgtagccactgtaattntaaatttctgacatgattttaaagcctgacagctgatgcacatattggatggtgaaacaaacacatgggaaatatatggacttgcatttattcaaacttcaagaaaatggaatgtactaaaacgaaatagttgtgagatgtacaaattgcatattcagataactgtagctacattataaaaacataacatgtcacctgactcaagaagttcattgcctctttaacaacctccgtgaatttgcatcatcagcncaccatactttgaatgcgaccaagagttggataaggatccagccaaagggcttcattctggtcttt

SEQ ID NO: 155988 - DNA, 506 bp, Glycine max
  unsure (1)..(506): unsure at all n locations
tcacctgcggcatgcaagcttagcccttctcatggtgcaacgatcaatatacttcgcagtatcatgtgcaccaaacttaaaagcattcaatcttttagcatcttgtgtatttactacatgcacgttagcatttactaactgttgttggcgcaacttcagctacaacacatacctatctcatgttttgcattagattaataacaaacatttattgatatcatgtgcaagctagttcaacgtcttttgaaagtaaaatacaaatagtagtaatcagtcttttgttctgcttttcgcgatcgtgtccacgtttgttaacttaaatgagatatattaggtttttctactttattcgaagggagtagaagaaaaatcttttatttgtaataataagttttaaaataaaagaaataaaaggatagactagcctaaaacanagtatttgtattttctttctctttgtcctctaaaaattaactcagacgtattagattgaagtatgttcttcc

SEQ ID NO: 155989 - DNA, 276 bp, Glycine max
  unsure (1)..(276): unsure at all n locations
ctaagcacctgcggctgcagctaaaagattggncagctttactnatcnaatacatcccgacgaataaagcatgatacctttcacagttntttcttgaaattttttaacaccacggaaaagaaaggccacaaacattttggagctcagagagccttgattctttagtttctccgagtgccaacctcttgccagtaagcggcccaaacagcttcctagaagatatcattacttttggctttgctcagtcgatatcccccagtcaaatgtntgattata

SEQ ID NO: 155990 - DNA, 371 bp, Glycine max
agcttaagtgtgggattgattatttagctattaagagagacggataatctaattcttctcatggagaaaatgaagggtgtgaaaaggatgaaggaggaacgaggaataagatgtaaagggagagaagaaatcatataagatatggaggtaggcaaaaaaaggaagggattgaggcagtgaaggtgaaaatccctactcttaaagggacttgtgatccataagtgtatcttgagtgggagataaaggttgagcaagtctctgcttgctagaactacaattgtagaagcaaagactctgagattgtagaagcaaagactttgccttttattgtttgatgatgccatatgatcgtgatgaattgatgccttatg

SEQ ID NO: 155991 - DNA, 439 bp, Glycine max
ctaagagtttcaattggcactacaaggtgtattcaatcttttaactaatttattcgtacaagttttatgaccttggttagggttaccacaaagagagttgatatggtttcaactcttagggttttcctaattttaaagttcaagttggaagagagtttttgaatttatctgattatgcaatgagcttgtaatctttgaaattcataccctgaaatatccaactacggttgttaggcataactatatgtaagtcctcctgaggactaaactaatagcaataaatcaccactatcatgagatgttgacacataccatgtggtaacagtggtcaagtccagatgtatgtatgtaggtgttgcactaccataacctggatccaagcatcaaaggcctcgcacattcctagtatgcgataaccatggtcaagtcaagatatatg

SEQ ID NO: 155992 - DNA, 392 bp, Glycine max
agcttagccatggacctgagagttgcccagtttcatcgtatcttccataatactcaccacctctatcagttctaataaccttcacctttatgtgtaatcgtctttctacttcatttaagtaaatttctaaggcatccactacttgagatttctcatgaagtaagtagacataaccgtaatgtgaatagtcatcaataaagggtataaagtatctttccttttcgaaagaattaacatcaaaaggtccacaaatatcagtatgcataatttcaagaagcaaagtacttcttggagctcctttctttgtatgtattgtttgtttcccttaatacaatccacacaaatatttagatccatatgatttagatcacgacgatttcattcttattaat

SEQ ID NO: 155993 - DNA, 442 bp, Glycine max
tcatgcggaaaatacttcttttcttttgtaccacaagcaaacaaaagtaataatttgatataatgaaatagtacattgcctaatgatgtctcgaccatctgagaggattgttccacagactgcaagaacctcaaaactcgcttccaatttcctccacatctatcatacagctccctctgagaattcaaacccatccttgcaaaggtaacatgggaggcacacaattgaaatgcagcaaagtcaaccaaggacttgaacttgaaagggtgcaaaccatgactaccaccaaaagttttggaagtcaattctaaacaaacaaggtccatttgactgagcctgcccgagcacagaatttctaataccaaatgtgatggcaattcctcaatggaaaaatgtctgcaacgggtctccatcctcaaaattctctctctttctcttattc

SEQ ID NO: 155994 - DNA, 409 bp, Glycine max
  unsure (1)..(409): unsure at all n locations
ctcaagctgacctcnanatatatntgactatcaaacctaagttntcttactttttttcttatggtattattggggattatctatcgctagaaaaattatttctatcaaataccgagagtatatataagatatgtacttttcctcttgacatgagttatntaataattaagattagcattcaaattccaaatcaccttgttagagcatctgcatcgatcatcaagaaaacaattttgtcaaaacttttgctttctaaagcaatgttgttaagcaataaaaataaaagaaaaaggtatgaaattattattttgtgcagctttctgaaattntgtagatgattaaaagtgannaaaatccagctgttggataaaacattcacgtctagtcgtgtgaaaaaaaaaaatagttg

SEQ ID NO: 155995 - DNA, 403 bp, Glycine max
  unsure (1)..(403): unsure at all n locations
cgaaacaaagaccctcctattcttagcagagtatcactctactcctttactgaaaccccagtacacatagcctccttgtttggacattatagatatgtctgattcttcttcataatagtctcaatttatccactgaattgtacttcaaagggcgttgctctctacattctggcttcagctcaatggcacactgaaatcgtgaaagcgcttttgaggacaaaaccagatatgagtntggtgcgcgacaaagatgcgatgcttcctttccattatgctgtcaatagagggcgcgcgggagccatcatagagtcgatctaagagaagccatactccattcaatagatgatataaagcgaagatggttctgatctcacttgtgcgtcgctataacatctcatgctct

SEQ ID NO: 155996 - DNA, 325 bp, Glycine max
  unsure (1)..(325): unsure at all n locations
agcttgcccagaanaggaatctacagaggatatgcttaccacctcgaaagactggaaagcggtttctaatgactcctctgcggcctccacataaggcatagaggatgggcagctcaccaagatgtcttcctcgcctgatacgatgacaagatgcccttccactacgaatatcaacttttggtggagtgtagagggaacaacgcccactgagtggatccacggacgccccaacagacagctgtagggggggttaatgtccattatttggaaggtaacttggcatgtgtgagggcctatctgcactgggaggtcgatctcttcccta

SEQ ID NO: 155997 - DNA, 458 bp, Glycine max
  unsure (1)..(458): unsure at all n locations
ntataccaaaaaagntcaactacaaagtcctcaacaatcctctctgtttgtttctatcttttaccatttgagtttccaatataattgttccttccaacaacactccactgttcaaatataaactacaatatcatcaactgaacacaataggaacatggaaaaccatagatttataagcaagtctgattcaacaaaagccaagagcaacagaaagcatattagacaacaaaaagtccaccttgatgttcagcatagtgtccatgcaagtctcaatccagcttcatcccacactgaagatgattataaccaaccaaagacaccacctcatagtgttcatgcaactgccgatcgggctccacacgatgctgaagatcattgtgcgttatcaaagttaacatttttatatctttacattcaactcatattagtaaaatatgttgatacaatatccatatata

SEQ ID NO: 155998 - DNA, 478 bp, Glycine max
  unsure (1)..(478): unsure at all n locations
agcttgtaatagtatttactcattatttctcttattctaaggaccatgattattgtgtcattctagttaattattcagttagaccactaggtagaatcctgaacattcattgtagtgttcagttcctaaacagatagtattattggcatgaaagcatgtgtaatcaactaatgtagtttaattgatgagtcctactttnttaagaagcttttgaggaatgctgaatgcttgcttaccttgagaaagctgttgattgttttgtaaagggggtaatgattctgtctataagatggtggtaccctttcaatgagttccatgaatctctttggccccatatctggatctgcagctatattgaataaatatgcatcccacaactccgcaaccctgtaattgctggcttctggggttgggttacacgtgagctagatgctacatatgctgaaattatgctttccatagtcaccaactccatgct

SEQ ID NO: 155999 - DNA, 378 bp, Glycine max
  unsure (1)..(378): unsure at all n locations
ttgataagcgcggattantgatgaatgggtcattatcttttattngtgtctatgaggctagctagttcatttgacaatcaatcgattnnttgttaaccaaggtctaattagttgaactaatactctattntaaactctgctttattacttcctatcatcgccctccattttttttcctgagtaatgttatatatcatccaacttcatcatcttactaggttttatagtaagtattgaatgcaaatatgtatttaatatcttaaagatataaaaacctaccacaaaagatagtaagtaaatttgagaagactgaaagttgacgattaaaaataatctttcttcttaatttgatttactaggaaccctttctttttcttt

SEQ ID NO: 156000 - DNA, 285 bp, Glycine max
  unsure (1)..(285): unsure at all n locations
atgcaactggagagaatgcttaatggacgagatgttttatatgtataaaganagagggggaagcttgaactttaacgacgaaaagggggagagaagttgaacattgagctatgtctcacaacactctcattaatcaaagttaccaaaagtgtttcacatgatttatagcctagggagcttccttattaaacttccttgagaagcctccttgagaaacttccttgagaagctaccttgagaagctagagcttaccttcacacattcctctaataactaagctcacc

SEQ ID NO: 156001 - DNA, 385 bp, Glycine max
  unsure (1)..(385): unsure at all n locations
tactaagcttaggctgctcaattgctttagattgttgaacagaagggcantggtctgtgtggtggttagcaaaagagcataaaccatatagtctggcgacaggtgaagatttttgattcatggcctgttgggttaccaggttaaccaaggcatctagtttaccttcaagtttcttagtctcacctgatgaagatgaattcgtggctacttcatgcactcctctaatgacaatagcatcacttatggcactaaatcgctgggagtttgaagccatcttctcaattaaatatctggcttcagcaagggtcatgtctccaagggctccaccacatgccacatcaatcatacttatcttcatgttactggagtcttcattaaaatattg

SEQ ID NO: 156002 - DNA, 310 bp, Glycine max
  unsure (1)..(310): unsure at all n locations
acatgggaccgacgcactttatttatatattgaaggcgnatctagacaaggtctgagagaccatacaaggttcctaacgatttctaattatgtgggccattaagtctatcatatgctgacaatagccgagaagcccatgaatctcttcgggggtggagtaggagtctgacatcgccttggacttggctaacaagcggtgaaagtcttgactcccgttcaaggaagagcaaacccatccattcacatggttgcctcttggagtaagagtcgatcacccttactcagcctctttttccgcgatacatgacca

SEQ ID NO: 156003 - DNA, 379 bp, Glycine max
actaagcttaagaattggccccggagcaggaccataagcgcaacaaactgctatatagtagaggtagttaattatacttaagacactgagcagtgcataatagtaattcagatgtccactattaatgttagatgatagccagctctcgttttctcctacactagtgaccttgtccacaatgctcaccaacacacttgccactgtattatcagcagctagttcatgagtgaaaataaccattgcaaaactagacatgcgtttgggaatataactggagaaaactcagctgccccacttgactggaagcttatcattcccaggaaaataactaggagctaccttagaccgcattgtctacacactagttgtctcaaacttt

SEQ ID NO: 156004 - DNA, 349 bp, Glycine max
tctctgccagagccagctcaaggagatagccctcatcagaggacaccaaattcctaacaccctctgagcccaagatctcattcctcagctttgagatctcagactctgacagtgacctgtggaggtgcacaagttttgacatcacatttgctacctcaaaagaaagaatacctatggtttctttagtatctgacctcttgtggctctgttttctctttgtcaaagattcaagaagaagggcatgcttgagattggaacttacctggttacccatctttacaatccaagcttctgcaaccatagctgcagccacacacagcactttttcacaaatggggtgtcccaaaac

SEQ ID NO: 156005 - DNA, 306 bp, Glycine max
  unsure (1)..(306): unsure at all n locations
tgagaacttgtgacgtacctaagcaggcgagctcctggcagtcaaccaataaaagaacaaagtccacgaagcaaggaggcttgtgtggcggctgaccanctatttatcttgggtggtatctgaaaattaccctctggtaatcgattaccattcatgggtaatcgattacagggtttaaatatggagacaggatgttaagtagcttctggtaatcgattaccatttgtgtgtaatcgattacatagtgttacctgctactggtaatcgattaccatttatgtgtaatcgattacacagtgtaacttt

SEQ ID NO: 156006 - DNA, 294 bp, Glycine max
  unsure (1)..(294): unsure at all n locations
cttccttgagaagcttctttgagaaaacttccttgagaagctatagcttagctacacacacccctctcataactaagctcacctccttgagaagcttccttaagaagattcctaaagaagctagagcttagctacacatacatctctaatagctaagctcacctccttgagatgagaaactagaacttagctacacaccccctataatagctaagctcacccccatgacataaaacatgaaaatacaaaaaagaagtccttactacaaagactactcanaatgccccgaaatac

SEQ ID NO: 156007 - DNA, 406 bp, Glycine max
aagatgttaccaacggatctacaacactcacacaccttggttagccaactgagctataccacttagatgccttcatttatataaatatatataattcttgttatctattactagtatgtataccccttttctgaattgatggaatatctgaaaatagagctgttgcaacagccatttattgttcaatatcacaactcactagggcattttcttccatttcttctgatatcatgtactcattctctatcggcttctcttcaaaatttggaaagagtttcatctagttcaccatggatgagtacacatggacatccataacgtaatgaagatcttgattgcactctctcgctgaagttactgtatgaacctgttacaatcccttgtggacattccttttgccgatcgt

SEQ ID NO: 156008 - DNA, 337 bp, Glycine max
  unsure (1)..(337): unsure at all n locations
agctggctctatccattcaaaactccatgtgtggttcanagctatgtatcaatgacgatagcaatccagagatagagcattttaagaaaaggtaaatctctttgaagcaccttcttttcaataatatttaaatgttttatatacacttttgattaaatattgttcccgctgccagtttgattgccagtaataccgataacattatcttaagtctaagattgagccaaaaatcttcaagttcccagctcacccatggaggaaaattaacgattaatgcaccagataaatatttaaatgagcttcgtcaaatggataaggtatagcaaattataatttg

SEQ ID NO: 156009 - DNA, 479 bp, Glycine max
  unsure (1)..(479): unsure at all n locations
ttaaaactcagcttgtcaagttccacactctccggcacttctccggtgatgtatgttgccggagaggtcnagggtgcggagttttgtcatgagtcccacctccggtgggatttttccggcgagcgagttggagccgagtctgagagtttggagctgaagcagcccgccaagctcgctggggatctcgccggagagctggttgtcacagaggttgaggagagagagtgaagacagacaacacagcgaccgtgagagtgttcctctgaagttgcggctgcgaagagagagcgaggtgactctgccgagttggcacgtgacgccgagccagtcgcagtgcagcgttgaagggtgccatgaggatagcacgtgaggggtttggagaccgtctttgaatgataggatggaaagcctgtctttgctttgtcttgcatggtgcacacaaatatgtggacacgacgatgtattaatgtccaggttga

SEQ ID NO: 156010 - DNA, 235 bp, Glycine max
taatgtgagtactacatttaaggtgtctgacttaactcttttttatgtaaatgtagaagtcgatatgaggacaaatccttttgaagagggagagagtgatgaggaaaaggcaatgaacctttataaggacttggaggacctatggcaagggctagaacaaagaaggccaagggaagtcttcaacaagtgttaatcatgctatttgaatttacgcccatgttacaagtgaaaaagc

SEQ ID NO: 156011 - DNA, 445 bp, Glycine max
  unsure (1)..(445): unsure at all n locations
tgtaatcgattacacacatactgtaatcgattaccagagggatgttttcagaaacattctcaacagtcacatctttntatctatttcttaaatggccatcaaaggcctatatatatgtgtgacttgngacgaaattgaagagagagttttgcttggcaaaaatgtcttatcctctcacaagaaaatgagagagattccaagagaacttcattgtaaaatgctctctcaagaactcttgggcaaacacttgcaaatccatttaagagttcatccatggatcttcattggaatattcttctcttgaagagagaattcttcttacattcttcttattcaatgagaatggttaagagactgtgagtctcttgttgtaagcatctgaacacacaggatgggttgccctgtgtggtcagacttgtaatggatttacacaatagtgaaactc

SEQ ID NO: 156012 - DNA, 398 bp, Glycine max
  unsure (1)..(398): unsure at all n locations
agcttcaaagtcaatggacaccggctgaaactattcctcacatatccctccttannggatgnaggggaggaggagacctccttacttcaccctacttcttttccgccatgaattagggagatttctttcttctggctctttctttacttttattgcacttgtccaaattttattgattgctttgattgttcttgatctcatgattgtgctacattgaggacaatgtgttgtttaagtgtgaggggggagaagattgttctttaattttgttgcgtattctagtttaattttattacgttttctagtttaagtttgttacgttctacggtaattttgctattttggttttatgtgtgggtacaacattgcatgttcctctttgaatattgggttatgta

SEQ ID NO: 156013 - DNA, 303 bp, Glycine max
tctacttatgtggcagggcgggtttccttcacttatttgtattcaacgcgagctctgcccatcgttcttacttcccgcgatgcttcttttcatgtccgcttgagtgggtttatagcctaaaccatacttcccacgattcccttgtggttttatcaaactagttatgccgccattgtctttgcctaaacccatcccgggtacataaccgttccccaacataactcgggccatcattaccggcgcatctgacaaacaaggttgctcaaagagggagtccaccgaggaaatgctgacccacctcaa

SEQ ID NO: 156014 - DNA, 385 bp, Glycine max
actcgttgtaactctgatgaatgatagacttgtgagacataactctaaggtcaacttccctccctctctctttcttcaatattagtgcaccgcacctcctctctttctctcacctcctttcttttcctcccttgaagcctccttttccagatctttattcaaagctcatattggtggcgaagccccctcttccatggcttattccctaagggatggcgcctcctctcacctcttcttctttgtctttcgctcgctcttcatggtggaaaaccaccatttagggacctcattgtagctcaaagaaccagcctccatagaagctccacagcaagctcccataagtggtttatagcaaagagctctgtaaggcccttaaccccatata

SEQ ID NO: 156015 - DNA, 432 bp, Glycine max
  unsure (1)..(432): unsure at all n locations
ctttggaagctgcttgagctgagtctagtcttacaagagggatcaatggatgaaactcagtttgagttagtctaaacctaagagggctgtctcaattgggcctagtccaataagagggatctgaggacgaagcttggattgattcggtctgacgagggatcgaggtttagtaatttggactacagcataaaacacaagagcatgattgattagagaaatatatttatatgcatcaacttgtttgttagaaagacccaacatttctacctacagctgtcacttttacttactttgcattntatagtttcttagcgtanaagttagtttacattttgtttgaaattatcaatcatacatgttctctcaacaatgcttcatttctgaacttaattcangctaacattagttcccttgtgtcgatactcgaattca

SEQ ID NO: 156016 - DNA, 246 bp, Glycine max
  unsure (1)..(246): unsure at all n locations
ctcgacccggatctctaatcacctgcngcatgcagcttggctgttttatatattttggcttctctacttaccctcctggtgttcgtcacgggcacctctaatagttaagagaatgtgaaagcaccacattgacgaactcatctgcagatctacacctctgctgagaatggacaattacttctaagtgactcttcggaaagctatattctaatgccagataccacacccctacctgtgagcataact

SEQ ID NO: 156017 - DNA, 268 bp, Glycine max
atcctgtcgcgaagcagtatatgtctgacctaacatgcggaatatatcccactcacagacctgctggagcttccagatacttgatcaactgaattataactatgtttcgttccatcatcatcctttacacattcatgctacttgataggtaccatgaagatgatacagatgcggctgaactccatattataatacaccgtgggaggatgctagatatgtcaataaatactactagatatgatactggtagaacattaaatgaactgat

SEQ ID NO: 156018 - DNA, 374 bp, Glycine max
  unsure (1)..(374): unsure at all n locations
cacctgccgcatgcagcttgctcaagggagcccatgcatttttttttttttcctcataccaatatgctcttaataggtggggttgtgactattaacccacgcaatttttttcaattccctcatacttttgcatcttgctaacagagagagaatggtgttttgatgtatcatcctcaattatttggttaatgacaatctcatttacctaggccttatattttattgcttgctatcatctctctattatatccacgacgacgatgttactaatatcacgttcattatttaaacacaaatagattgacagtgcatacgacattatatataactattntttgtcttaattattatgtgnttatgggatgcactcatct

SEQ ID NO: 156019 - DNA, 238 bp, Glycine max
cttacaccctctactgtcctctcagtgccatatatttatctattaccctatcttcaaaatatgttataaggatcgaggagtggaaaaaatgtcaactaatgtccatctttgcacgagatatctcaaaccatagggaaacccaagaattggtggaatggaactgtaacatatgatctttcaagcattgtttgcttgagtagtatagtttgaccacaccatacacttggatgctcacaaa

SEQ ID NO: 156020 - DNA, 442 bp, Glycine max
  unsure (1)..(442): unsure at all n locations
gatcctaagtcacctgcngcatgcaagcttgtagtgcataaagttcacattggcctaatgcatttgtacaaagtagcaacacaagcccaatcccacaagaacagctagactctcctacaattcaagatttgatgggtccatacataattccagtccttagcactgtttcacattgaatcaacttcatcaaacataataaattccattacttccttgaatgaagtcaagtgagaacacaatctttcttgcaatctacctgngtcgggttccacttttcaagtgagtggaacggagaggcccctccttctatttcttcttccatcatctgctgagctctgtcgtccgtgaggtctagtagcaggaccatatncgtctccatgntaattggcaatatgttagctccgatgtcccaaagtaaatggtcttcaactttgtcgaacat

SEQ ID NO: 156021 - DNA, 442 bp, Glycine max
  unsure (1)..(442): unsure at all n locations
acctgcngcatgcagcttgtccgccttggcacagcggccttattgctactttctttcttctggcgggacatggtgagcaggagagagatggccacccatcccaccatttgtcctggcgggacatgactgacgaggagagagggatccatgccgccattcctcctggcgggacatgccaacgtggcagtcccgccactgtctcctgcggaacacgttgacgggacgtgacttgcatgcttgcagtgatgagaatataggcaggcttgcaattaaggtgtgcagttctgaaaagcctattgcatgtgaacgttaaaaaattatgaacgtcggattagttttcagctataaaacaatggttgaagttgatcgttacgcttacattttcttaagtgcgatctctttctttttcttttctgtggagagacttattgtgttcctgctc

SEQ ID NO: 156022 - DNA, 373 bp, Glycine max
  unsure (1)..(373): unsure at all n locations
gttagagccaaccaccagcatggccatctctgcatcctaacactatgttgntcctaacactatgttagtcctaacaatggtatcaatcgaataattactacaatcaatgactctaattcgttacgactaagctcacacatatttctttctcagagttctattccagccatgacccaagagcatctcttttagacttttccaaaacctagtgccaaataattatccaactcgaatagcagctgttggactctaagtttcatctcaagcttaacaatcagtgtcatactattgatcaaaacaaacatgtataaatatgcaatactagactcaagatatgcagctaacactagacctaattcagtgccacagaaat

SEQ ID NO: 156023 - DNA, 301 bp, Glycine max
  unsure (1)..(301): unsure at all n locations
caatctttttccgcacctttatatattttaacttctgcttgtggaattgatactaaaacataatgcttgttggatggttcaactcaatgtgaacgataatgcctaacaggaaaaccccgcccgggctaatggacatatctttaatgtgggaaacccaaacaatgaggctacagttacgcagcctgctgtaatgatgactcacgatagaggatgaagccggattggacgtacctattanaatttctacatggtatttgtgaccattcaacagttatgttcgctcaattccgcccgcttattc

SEQ ID NO: 156024 - DNA, 279 bp, Glycine max
  unsure (1)..(279): unsure at all n locations
cgtataagccatcttctccaaaagctccttgaagaagaactttatattaatcctgagatctaacacaacaatatgaaggatgagactcaaagaaacagttattatctcgagtgaatttactaacactaaggtaatntttggtaagggagggaactagcattaaatttttaatggagagagtactggttggaaaataaggggacctaaacagattagaacctatgggagagatacttgtacctgtgccattaaccataaggaaatgtacatttcctgcaa

SEQ ID NO: 156025 - DNA, 407 bp, Glycine max
agcttctttgacaccaagaaactgagggatattcttcttcttgagattcttttgtgagaactgtgatttgtgagtgattcttcattgttttcaccatcatatatgtgattgtggtggctgagtggggttcttggtagtcaagaacgcgtgtagaggaacctctgagatagcagttgtgtataggaaagtgaaggaggatcaaggtgcaacatggctggcttaaacagtatcattcaaggatctttaccgattctcgatggacaactgcttgatgattggaaggtcaagatgctggcaatctttggctttcaagatgtatttgaagtggtgacatttggatttgaagatcctagaacgaaagccactgaagaacaacaattggatttcaacaaaagcaaaaacttgac

SEQ ID NO: 156026 - DNA, 373 bp, Glycine max
  unsure (1)..(373): unsure at all n locations
ntctccgcgaggtacgtaggtcaactntgtgtatgctaagtttccgtgggtgttcatgttntattgatgataataataataataataatacatcttcagttgtagtattgctgattgaggtatgaggaaagcttanagtttcatgccatnttgttagatctcactgtcattgtcactcgttagggttcgaggtaagcttggactctttttcatttgtagtttacttaggaaacatgttgaagtatgtctctgttaaatctatagactgcttggagtaccagttgagataactaatgataaagatcctgttatcgagagtaatctagctcactatcttattattttgcattaagaacgttcataacaagttact

SEQ ID NO: 156027 - DNA, 488 bp, Glycine max
  unsure (1)..(488): unsure at all n locations
agcttgtaaaatgaactcataacttcaatagtattttttattattaaatttatgatatcaattttcatataataaaaacttaataaataaacatttaatttaattatttactcaatcacactctatattatatatcaattggaataaccaaattgcaataaccatatgttaccaaacaaactgagggctgaaagtgttttagaaaatgttaaaataaggtcgcgtggaattatggtaaaataaatactaaaaattttagagttcggaagaagaaaggggagaataaaattaatacacaatattcttgatttgcatcacttaattgtttgagttgttacgttatcaatggtttccagacatccctaatgatcttcatacaatgatgatgagaaatatggttgaactttgaacctgaaattagtgtatcaaatcgtgtagccacctgcaatgccaacatagagaagaaagatnaatacttattaaaaaag

SEQ ID NO: 156028 - DNA, 473 bp, Glycine max
agtgattcttctcaccaaacgtttccatttattgtataaagcgtttctccaacagaaaatgatcattctcatttccatatatactaaaacaattactttcctatatattaaactgttatgttgaccctaaactctcttccgtacaattgattaatatcctggaccacagatgttgaacagtggcgaaaagttccatttgctcgtgttattgtgcaatgcttgtttgatcaaaccttccgtattagagtgttcaggaacaaatctaaactgttttaaacagctaaattaatctaaataaaacaaaatgcaatcaaccaattaaataactacactcttatttgatttttatttctatattacaaataaactgacctgaaatatattaaattataatgtattctctataaaaatatgcactagaaatagttatatttattaaaattatgtactttaatatattatttatagtagaa

SEQ ID NO: 156029 - DNA, 358 bp, Glycine max
  unsure (1)..(358): unsure at all n locations
ataaagcacattaataacatttaataaaattggtttttttactgtagcatacgttgacagttcatataacatacgttaagagtctataattttggcaatgccactgtaaaacttttacactgtcaagctatnttttttttttaatggctgcgggcaaagcaaacccaaattaaataggaatatcataaataaaaaataaaaacaggagcttgagtaaacattttacataactcataattaattagcaaagccatgggctatcttatttaaattacgagaaataaaagataaatgacaccccaaagttttaccactcatgtggtaaacttattccacaatagagaaaagaggatgatct

SEQ ID NO: 156030 - DNA, 227 bp, Glycine max
gatttgaccgacgaacaatcttggagcgacttgaaactcatgtgctaatgctacctcttccacttgcgaagacgctcaaagtatggctatgaagatggaccacacagagaaacactatggtatctcccactgctttataaacgtataagaactagctctgaaatatgactgtgctcgacagcatccgtcgaaagagctatttcagcaatgaagatcatcaaggctaa

SEQ ID NO: 156031 - DNA, 391 bp, Glycine max
  unsure (1)..(391): unsure at all n locations
agctcaatgtacagccacaccatatggcattttaccgtancataatacggagaacgagacatggaatcgttagagatattcttggcccaagcggatttgattgggatggctctaaacacatgaacacagatgagaatgaaaatgcctgcaatgaatatcgcattgcaagcattctttaatatgttgctatttgtattcaaagtaaattggatatgactttctctctttttccagtcgcataaattgactaaaccgcttcgagccaagatgcttcaaaactggaaagatatagtggattcgtgtgtcaaagaaaagccattggacatggagcttaaaccgctatggatgctgatgaagcgacgagtatggaaacaaatgaagaggaattcat

SEQ ID NO: 156032 - DNA, 335 bp, Glycine max
  unsure (1)..(335): unsure at all n locations
gggtgagggtttgttgaaaccatggaaggattagtctaggtttctancctacgcatgacgacatgagaagggtcaccttataatgatatgaaggaagcctaccccatttgccagggtggggaccacagatggagaggctccctatttgtcacataaacaaaagctttgacagtgcatggtggatgcacgagaatcatattgctgggctatatgaataaaccaaccaagagcaaccatagtgggtcaaaccgtgctgcccgggtttaaattgaaaaactggctgtcatggaacaccccggattttggatctacacaatgaatcattagttgaacct

SEQ ID NO: 156033 - DNA, 413 bp, Glycine max
  unsure (1)..(413): unsure at all n locations
gcagcttatcatatctattctgatactagttctttatatacacatatgatntccaaaatgctcccagctcatcaattaattagcataggtcataacaaaacgttcaacacaagtgttattttacacaatttatagtaaattcatttctcatcccaaaatttaagttttatacatgaaaacataagtcccagatgtatactttaagaatataaattattttcatcataagagaatccttaaattcaagtatcaattttcgtgtagtatgtgcaacaacatattaaacaacttgagtacacaaattttaacaccaacaacatagttgtaaatttcaagcatcataacttttcattgtgcaaagcaatcattataaaacacgtctttaacatatatacatttaggatcaatcattt

SEQ ID NO: 156034 - DNA, 292 bp, Glycine max
  unsure (1)..(292): unsure at all n locations
agcttggtcttgacttatcttctctttgaagtgtcatctgcaatcacctttcctccttctccattctgttgccattgatcttcaagaagcanaggactccattgatgaagatgatccaaggccttcaagctccacatagagatacatcagactggccaagtctgttcactttattcccattaatatcatattttccttggagaagtttacctccctgtatattagtgagattgtcagattacatggtgtgccatctagcatagtgtctgatagagttcctacgtttacctct

SEQ ID NO: 156035 - DNA, 464 bp, Glycine max
  unsure (1)..(464): unsure at all n locations
tagctacacatacctctctaatagctaagctcacctccttgttatgagaagctagagcttagctacacacccnctataatagctaagctcacccccatgagaaaaaacatgaaaataacaaaaaaaagtccttattacaaagacaactcaaaatgccccgaaatacaaggctaaaaccctatactattagaatggccaaaatacaaggcctagacgaaggaaaaacctattctaatatttacaaagataagcgggctcatacttagcccatgggctcgaaatctaccctaaggctcatgagaaccctanggcctttccttggatctctagcccaatctacttggagtcttctagccaatgcccttgcggagtaagatngcatcattcccttcaccttggaaaggaattgacctcaaatcccgagggtcttcatactctgngctccttccctcaacacctgtaaa

SEQ ID NO: 156036 - DNA, 403 bp, Glycine max
  unsure (1)..(403): unsure at all n locations
taagctggctattattttatacatgcaaccaatgagagaaataggtctatagtcatttaaagactgtggatgggttgttttaagaataagagccaagaaggaggcattgctgcctctagggaagcttgcatgaatatggaattcatccacaaatctcctgaattcagggtttanaaccccccaaaattccttaataaaattgaaattaaagccatctggccctgggcatttgtctccaccacaactccaaacaacatctttaagctcttggtctgaaaaagggagcaatttcccctccctttgcctctgatcatcatagggaatataccccatccagagaggtctgaacaattatcttcagaaatctatggagaaagaatngagaacttattcttgactaaat

SEQ ID NO: 156037 - DNA, 352 bp, Glycine max
  unsure (1)..(352): unsure at all n locations
tagcccaattcaattcaatctgaatggtgttaagcaagagtacattcgcttagcgcatcatgtttagtggctaagcatggtgcacttatgctaagccctattctttgcagccaaatcaatggtttaattgagctaagcgcaacgcatacgcactaagtgaacttccttgcggcctggatagcgctaagctagcaaccactcgctaagttcatgcccccttgtacacagggtgcagtatattcgctaagtcgactaagagtgcagcttaatgagagttgcaggttttcttatctgcacacgtcgcttagcgtgctgcttttcgctaagcgcagtgttatgtngtaaaaaaaaa

SEQ ID NO: 156038 - DNA, 431 bp, Glycine max
  unsure (1)..(431): unsure at all n locations
agctngcacaanaatgatttgatcaaccaagaacttagatctttatgttcccaagcttcaaaggatgacaaaaagaaatttggaaccaagactgagagttttgcacgaaaatggtaaggaaacaagaagagaatgaagattaagagtctcttatcaaagctttgagggaagaagccccaaggacaattgtatgaagcttggaagaagaagaagaagaagaaaatggactcctctccctcccttgaagaactcatgaacaacaatggagaatgaaggttccaagtttgatatttttggaggagtgaagagataaggctttaaggcttggtccaaatgaaacttggttaggcttaatgttgataagatcaaattgacaaaatgaatgaccatttgatagccatggtggaagtgctaaatgcggccatatatgg

SEQ ID NO: 156039 - DNA, 427 bp, Glycine max
  unsure (1)..(427): unsure at all n locations
tagagagtcatataacattgaagatgtttcttgccttanaaactatcttcctacttctctatgatgatgcatgatgtacacatagacaaactaaagaaaaaaaacaacaatcaatacaaatgtcactcaataaggagttagggcatgtaaaagtcaaaaaattttcatagcttgatcttctccccctatctctaacatatttgtcttttttttcccaaaatttatgtatcaaaaggaaaaataaaagtaagaaaaactaaatgtcgaaattctaaaagatatattagaaagataaattcaaaatataaatatatgagattaatatgccaaaaatttaataacaaanattaaaatnaagggtagaagttcttattggacgataataattgatgacaanacataacgttgagatgctagatttacttgg

SEQ ID NO: 156040 - DNA, 475 bp, Glycine max
  unsure (1)..(475): unsure at all n locations
agcgtgcaccccngncttcctattctaatttgcatatccagtctcttcaagtggaaggaggagtcctttatgatggactcagtccatggttgcctttgagaggaagcaaccacggttggatgaaccttcaatacatgcatgataaaaaaacagtatttttagagtgttttatgcaaactattatagaaagatgtgggctttttctttgcaagcatatctactacctttcattctctcttttttgtgctttcgaagaaatccaaatacagaggaggctctatccaaatttccttacgatataaaaacagagtgtgatattctaaatattggttatgagaagggagagactggcacaaagactttatactctggaccaaccttggtattgtgagcctaagataaaatttactcatttatttcatgagatgtgctctgtttactctagatgaaattttatacaactctcatgtatgag

SEQ ID NO: 156041 - DNA, 415 bp, Glycine max
  unsure (1)..(415): unsure at all n locations
gtaacagagnagcgacaccaacatactagctcccttgctcattatcattctcgataggaagacacttgtcaccttatagaataagaggtgaactaatcatgcacatgtacttctcaagaatgataggggcctccacatactcggcctcaacgatgttaaatactccatttgcaaaggtaatgctatgttgtaaccaacagtgcccccaagatggtgtgttacatatgatgagacctccacaatattgatatataccctcacctctatggaaataccattgctcaatcatgtctaaagatactttaataatccacactaccgggaccatctatgtgtcaatatatacaaaggaaatggggtgaggtcgtattatttctatgcaccccatggaataaaaagacttttcttctttagc

SEQ ID NO: 156042 - DNA, 485 bp, Glycine max
  unsure (1)..(485): unsure at all n locations
agcttcacattanaggcctgagttgctgatcttattangagaacaatgcctaacttttgtagggaaaatctgagcgattggataccccacctccaaataataagtggagtaaaagcataaatagcaacgttgttatcggacaccatgaaaaaaggaagaaaaaaagtcctctgttgttccaattcgctcatggtggggactgggaatggtacaacttattaattattattgtacctttagaaattgtaatgatcaggaattattttctgtgaagtttatttggtcctttgtgttaaatcatcgatggttgcctatcatgggccaaggattcaactctctactgttgtctataagttgcatccttaaatgctatgtaagatcttaaaaagtaaacattggttaccacgataaatactaaataggtgaagttgtggttggactgtgttcacaactttaagaagttaatggttattttagtttgatac

SEQ ID NO: 156043 - DNA, 410 bp, Glycine max
  unsure (1)..(410): unsure at all n locations
gcacaatcctcacanaaccatgtgacagcatgagttaataccacaggctcttctaaacagtacctgataataaggatatataagaagtcatatgtaaataccatatttatatgaccataaaaaaccatcgcaccaatgtcatagtaagacttatttcagattccacaaggacactangaaattattggaatagtataaacaaatagcttaacattggtgcaacccacagaatatccctcctggaagttactcatgcataatagttcttcatgaaacaaaacagaagataaagatatcataaaccagaattacatgacacattaatggaaagcattatctgaggccaagtttgctagtttaggctacactagcattccaccacaagggatgagcaccattagttctgctgt

SEQ ID NO: 156044 - DNA, 439 bp, Glycine max
  unsure (1)..(439): unsure at all n locations
tctacttatgtggcagggcgagctnacttcaccatcatgtctcaactcgaactttgaccatggttcttccttaccgcgatgctcactttcatgtctgcttgagtgggcttatancctaaaccatactctccacgattaccttgggtatttatcagtctagttatgccgccgttgttttttcctaaacccatcccgggctcataaccgttccccaacataactcgggccatcattaccgctgcatcggacagactatgctgcccatagagggagtccacggaggaaatgctgaccacctcataagactggaaagcagtttctaacgattcttctgcggcttccacataaggcatggaggatgggcagcctaccaagatatcnttctcgcctgacacgatgaccaagtgcccctctactacgaatntcaacttttggtgga

SEQ ID NO: 156045 - DNA, 434 bp, Glycine max
agctacaagctatttatatgctcctggcaatttatcttatctcgaagtggttagttagctggtgtgccctaactaactactaatgcttacaactctaataaccacccttcccgcctaaagctattatgaatatttccccacttgtgccttctcagcccagctgatagtcgtcccaatgcttgggcaacttcttcagtcgacttggtcgtccccgcgccgtgccttcatcttcagtcgacttctacgttcataacataaaaaatgctaatatctttttggtataacgttgataagggatacataaaaaaaatgtatgggggaatctttgtctaaattggaaaagtatgaggcattaaaaatgtatatattgcactatcgacactactcttgttttattcttatatgtaaaagcaagatgctagtaaatctatact

SEQ ID NO: 156046 - DNA, 388 bp, Glycine max
ctaagcttctctcgtaagccaattaggcctcacaacaatggtgaatagaaataaggctcacggattccctcgtctaagtccttcttgtggaatgaattcaactaaaggagtcccgttaaccaatacagatatggaagctgatttaggaagccgacaatccaagtgatccatttggagcaaaaacccagctttcttagcatgtataacagatagtccgcattgactaagttatacgccttctcataggcaactttgaataccatgcaacgtttattgcatcatattaccttctcaaccactctacttgcgatgagaacattgtgcagcatatgtctgccctccataaaagcagatcgggtctcatctatgatatcaggcatcaaccttt

SEQ ID NO: 156047 - DNA, 399 bp, Glycine max
  unsure (1)..(399): unsure at all n locations
tgaaaaaaggttcagccccttaggcacttctctctctttcgaatttgcttggaaaaattgttttcgtgaagaaaatctaagccgaggcgcttccgaaacgtttccgtaacgtttccatgaggaatntcgcacaagtttcgaccgttcttcgaccgtcttcattcgttcttcatcgttctttgatcttcaacgggtaagtacctcgaaccaagcttttcgattcattctatgtacccgtggctgtccacattgtgtttcgtgtaattttattctcgtttcatttactttttatacccccttgtgacgtgcttaagccattttatttaagtcatttctcacttaacctcaaaataaaataaaatnccctcgcatggttggagatggattattcgctaactt

SEQ ID NO: 156048 - DNA, 434 bp, Glycine max
  unsure (1)..(434): unsure at all n locations
aagctagttataaccttgcattaatgaacaaccttagttgatcatgcatcctaaataatggctgaacatgtgttaagatcattacccattcaagtctcacaataacacatagaatagccattgtgacatttcatcaaatagttggtgtgcacatgttaaaacatgtataaacgtgggaaccaactaatggatgctcccatcatgcctgccaagagatcttcctaatttgttgtaccctttttggagcacatgtgatgaccttgtangagacagacaaaactacctttattataaaaaacgtgggataccaaccatacataaagagcaggcgtacaatagacaattcttgcactgctcttctcacatctcaagttgaatgtatcatatggatctgcccatacagggatgaccgagctttccttgctgtggtgata

SEQ ID NO: 156049 - DNA, 491 bp, Glycine max
  unsure (1)..(491): unsure at all n locations
ngagatgaggaagtgttgaagggtgaaacttcctgctnttattcgttgaccacagagnggtacctggagatatgtcgcgggggtcatgagaccttggcgacgtcaggtggggtgctattgcccaaaaccaagcttgaccaatcccgacccaacccgggcatagttagtcagtgagaacctgtgatgtacctaagcaagcgagctcctggcagtcaacagataaaaggaacaaagaccacaaancaaggaggcttgtgtggtggctggccagctgtgaatcttgtgtgatatatgtggtatggcttctggtaatcgaataccaagggtgggtaatcgattacaaggcttagaaatgaagacaggagggtacatctaatgttagtctctcatgcaaaacctctgngaattctcatgcaaaccctttgggatttctttcaaatacaaaggtagcttcgttatataaattctttcgtgatcaacccatgtcatca

SEQ ID NO: 156050 - DNA, 343 bp, Glycine max
tgtcatcgatggctcgtcttttctactatgtggagctagctgataagagaaaggagacatacgtacatcgcttttattgttctcttctccattacgtgtacgactgattttgccattgatgacattcaattttgtctctacatgtatacacttgaaattcacacattagacgaatttcgcatcatacattaagagggaaaattttaatacttcggctagctaatcaacctccagatgctttctggtgcaatacaatcatattgacatttactagcagaatataaatcacttgttgtacttagtttcgcctctatgagctataataacactcaacacattggta

SEQ ID NO: 156051 - DNA, 424 bp, Glycine max
  unsure (1)..(424): unsure at all n locations
aacctgtgatgtacctaagcaggcgagctcctggcaatcaacagatgaaaggaacaaagaccacaaagcaaggaggcttgtgtggtggctggccagctatgaatcttgtgtgatatatgggttatggcctctggtaattgattaccaagggtgggtaatcgattacaaggcttaaaaatgaagacaggagactaagatggtctctggtaatcgattaccagggggtgtaatcaattaccaggcttgaaaacgaggtcaggaagctatgagggcttctagtaatcgattaccaagggggtgtaatcgattaccaggcttataaatgaaggcaacaggttgtggaggtctctggtaattgattaccagtctgtgttatcgattacacagaggaatgggtcattggtaatctgataccangtatgtg

SEQ ID NO: 156052 - DNA, 293 bp, Glycine max
  unsure (1)..(293): unsure at all n locations
ctgagatgaggaagngnanaagggtgaaactacctgtctttattcttttatcacagagtggtacctgtagatatgtcgcggaggtcatgagacctcgaggacgttaggtggggtgctattgcctctaaaccaatcttgaccaatcccgacccatcccgggcatatggagtacatgagaaccttggattgacctaaacaggctagctcctggcagtcaacagataagaggaacaataaccacacaacaaagaagtttgcgtgggttgccacctgtgatatctgtgcgatctatg

SEQ ID NO: 156053 - DNA, 475 bp, Glycine max
  unsure (1)..(475): unsure at all n locations
agcttgggaagagtccatgtatggttatctttatcctcagnccttacataatgcaaaggatagacgtggggaatgccaacaatacattgaaacatgggttaaggaatcccaacgagaggtcttcctaggagcttacttgaatcagtaagtcatatttatcaaatgcacgtaaacaatgtctatgttatatgtatctaattcgtttgaaattcacggcccattggcagttggttgttttgtgtcctatacaagatgttgtcgtttggttttgttcgttgcgaaagaagccttatattcatgtcaaagctgcaattaacaagtaaagttttaacatataacttataatgtgatcttattaaacattgatacataaatattntgtccttgaatatactgtggatagtttttgtaagcagcgcaatgaacacattaaagaactactttcatggtcatactaagcaagctgcacctgagt

SEQ ID NO: 156054 - DNA, 396 bp, Glycine max
  unsure (1)..(396): unsure at all n locations
ngtcagcaaggttacaaagcacaactgttggaatcaatgagagagcgtctaccatggcaacccccaacaagttggaaactctntgattgtagaaaagaaattaactttacaaatcaaattcattttcggatcttttcttgctccaaaagaaacattttggtgttttctttttgtaggtttccccccactctcttattttcaaatctcctttccttcttctcatcactctcggagaatcattcgaaacctgccacaataaccaaaatgaaacacataagcgaagaataaaaaactaataccctctaagagagagaaaaggaagttacagggtcttggaagatttcacagcatggtgcagggtagcacgagcacgtcatcatggtggatcttgtcttg

SEQ ID NO: 156055 - DNA, 426 bp, Glycine max
  unsure (1)..(426): unsure at all n locations
ngagtccgttgttgctgccccatanagcccctcggaacttgtttcgacccccattcttcttttaggccctcttcgtttctcgntctaatgcttcttcggctatggctacgttaacgtctctcagctcgtcatactcttttctgaccctaatggttgttttcttgaacttttccttgaccactcgtgttctttcaagtttcactttcaaggctggcacttcttcactttcctcagggacttcagcctcttccccacttgaactctntagcttcgagagccaagttatcccttgcattcaagccttcaaccattgatgatatccaccaataactccgttgcttgcttctctaagctccttatcctttccttgcaccgcattccttgctttcggactctttgagcatttngcattggggcactgaacct

SEQ ID NO: 156056 - DNA, 466 bp, Glycine max
  unsure (1)..(466): unsure at all n locations
agcattgcagatntggtcttcgccagtgaaaggatcgatgttggtctgaaaaaaaggcatatttgatcatcctactatgacgactgagaaaactggggcaaataaagagggtgaggataagggagaaacccatgttgtgactgccattcctatacggccaagtttcccaccaacccaacaatgtcattactcagccaataacaaaccttctccttacccaccacccagttatccacaaaggccatccctaaatcaaccacaaagtctgtctaccgcacttccaatgacgaagaccacttttagcacaaacaaaaaaaaacaccaacaataaggaattttgcagcaaaaagcctgtaggggtcaccccaaatttcgttgccatatgctaaacttgatctcatatctacttgataattcaatggtagccataaccctaccaaggttatcaacctcatttttcgagata

SEQ ID NO: 156057 - DNA, 453 bp, Glycine max
  unsure (1)..(453): unsure at all n locations
tgcaagctgggtgtcttttcttgcactccaaacaacgttctggttgtccggnatcatgtnataccagatggcaaccatgaacagcttggtgtcattatcattcagttgtcgaaacccgaaagcaaattctcccgagggtgaaagccacgcatcatcggtatccgtgaaaagtggcgagttcagagtaacttttgcaaaagctaaggaaacatgatgaatatagatgagtgtaactataaggagggttaaatataaggcagccatggattcaattacgaggtagaaaactggagatatatatttactgattgaatgtgttatgtgtagatattttgttggttagtttggcttaaatgaagcctcatcgtgtgagactcgatcttctacccggaatccgacctagtcaaaattaaaatcagtgtcgggtcaaagttttaacgtaanacacacacc

SEQ ID NO: 156058 - DNA, 385 bp, Glycine max
gttccatatataccaacttgtacctggagtgtggtgtatattctattactcttctttgaaccgaactgggttcttgaaatgttaatggatggagtatgaagatggccaatagtggatgcgattgcgcagggcatctgagactgttgatgacgctgataaccctccaaggggtgacattaaactaaggttccaattgagtggtaatgcacagaagtattgagtgcaatccgagaatgttatctctagtgatatggaaggtggaactgtctctgactcacaaatccagcttgattaaaatgaaaagaggcactttctgaatcaggattatcgaagcgactacatactagcggttaatgttatggtttgtctattctaacaatgtcct

SEQ ID NO: 156059 - DNA, 373 bp, Glycine max
cagggatggatgggccctaattattctatctctacagcttgtgctacaagtaacttttgtatattgaatgcagcaaaccatatcattagaggtgaagctgtaagtatttttgctttgttatgtgctcttaggatcttagatttctcatattttcccttaccttttcttttttggacaaaatttggttcaatgatgctctctttttgtcaaaaggtgttaacaaatttagtaaacatgaaatttgtctgcaggatgtgatgctttgtggtggctcaaatgctgctattataccaattggtatccttttattactcattctctgtggcttgtgtgaagttatcattccatgaatacaatattaatccagcaatca

SEQ ID NO: 156060 - DNA, 472 bp, Glycine max
  unsure (1)..(472): unsure at all n locations
tagntcattttcgtgaatcgactatagcctatggtgagatgcattttctattatgacaggcatctgtagagagaggtgtaactcatatatctgttggacaattacacttaaagccaagtgaatttaagataaaatctaacatgtagaagttccaataaggagctatagtagattaaatggaaggtagcccaagcactatatacacatggagactgagaaaaactatatgtataacttaagccaagacaacaatttcttatatgttttgtgcaatcaaacgtagtggccaatgaatatactagtgtattaatacgcactacacaaattaattgttttgagtgatctttgctatggaaaatagccctcttaaagtgtggtataggccgtactcaacctataaaactggttataagtgatagtgtccccacatatataaatattttgctttttactaattacggggataaccact

SEQ ID NO: 156061 - DNA, 405 bp, Glycine max
  unsure (1)..(405): unsure at all n locations
tgatgaccaagatgatgaccaaaagcctcaaagaattatttccagggtgagtccaccagttccagatccagattaaatcaagatttatttccagtttccagaaatgacctccagaagaatccagattccagagaagatgacttcaccagggaagtattgaaaagaatttttcaaaaaaaccaaacatagcacagttntgttttacaagaaaagtttttctcaaaattttctaagttaccagagnttttactctttggtaatgattacctagttcctgtaatcgattaccagtgggtaagttggatttcaaagctttaactgaatttgctatgtccaattgatnttaaatggtgtattgatacatatattgtaatcgataccagtgatctgacgttgaaatcaatc

SEQ ID NO: 156062 - DNA, 469 bp, Glycine max
  unsure (1)..(469): unsure at all n locations
agcttatngaagaagcttgaagagaaagaaattatataggaagcaagtgaataacatagaatgacttacaaaaattggttattacaacagattatatagttagttataagaataactaactctcaactaattccactaattgtagttacatgagattaacctattaaccaactctagttacaatgttctatgctaagaagactgtgcaaagcacaagcacaatctacttcactagctttaagttttaacaaccgcgtacaatgttttgtgagtaggcatggcaaaccagacgggaaaaatccgagttgaccgggattggggtcgaggtcagattttccccgatagccaaagttgggttcgggatcgggatgggataattaatacccgccccaaacccgtctccaaacccaccccgtgatcattatttacaaaatatattactatactttatacattaaacatgaactat

SEQ ID NO: 156063 - DNA, 417 bp, Glycine max
  unsure (1)..(417): unsure at all n locations
tgctatagtcatgcanggctgtgcaagcttgctatattcatgcagtggcttgcaagcccttcacccatgttgtgaagttgaagtgtgtgatcgactacctcatattttgggaatttaagaaagtaatttttgaccatttttaacctctaaaaagttgatcaaaaacattatattgatttttaagcaaactgccacaaagattatgttgaaataactaatattaattgtcacattattatttaatagagaaatataatgatagggatcaaaatcatattatgaaataaactaaagatagaaaacaatcacattaaaatttaaatataaaaacattatttatccataaaataatatatattgtctcgtcttgattgcatggtatctttatgtaatataatcatataccaatccataagt

SEQ ID NO: 156064 - DNA, 413 bp, Glycine max
agcttaaagctttctccgcgaggtacgtatgttaacttcgtgtatgctaagtttccatgggtgttcatgctttattgatgataataataataatacgtcttcaattgtagtattgctgattgaggtacgaggaaagcttcaagtttcatgccattctgttagatctcacagccattgtcactgtttgggtttgaggtaagcttggtctctctttcatttgtagtatagtttactctttttcactgccattgtctctgtttcagtgggtgttcactctttttcattgtcactgccattgtcactgtgtgtaaaagtaatataagttactaaattgccctgtactttcttggtcaatggttgtaatagtggttaggtatgaagtgactgattggtgtagtgaaaattgattgggt

SEQ ID NO: 156065 - DNA, 472 bp, Glycine max
  unsure (1)..(472): unsure at all n locations
gggcaatactgtataatctgagtatggacagtgagaaccattcatcacttgtggctgctggagcagtgcaggtcttaaaaagaattgttctagctaatagaacacactgngaacgagctcttcttttactcaggactntgcaaccgtgatgagttcaagggtgtaaatcttgaaacagtttcctcgttgtataatgcactttttttttggtacaattgtataatctacttaatttatgctgtaaagaaaatctttacccttgtaagttattgtataatgcaatacacaaaagtctataatcaatattctatccaaaccaagtccctttcaaatatcaatttcaatttcaagtatcaaatttaagacctgatacttaatatcaatttcagatcccttttcaatatctatccacaagtatattagcatgtttatttgaaatttccccaaacaataattccttgttgactgtttg

SEQ ID NO: 156066 - DNA, 360 bp, Glycine max
  unsure (1)..(360): unsure at all n locations
agctntgagccaaaancctgacttattataatttcttgacccaggtgagaatgtcaatccttaccctcggaagcgaaaagaatagaagggaaatttccaatcaaagaaaaggaaagaaggaagatttccaatcaaagagaaagcaaaaaagaaaagaaggaaaattccccaatcaaagagtgggagatagcaaaaagaaaagaaagaaaattcccaatcaaagaatgggagaaagtaaaaaaggaagaagaagaaggaaagaaagctcctgatcagggatcgaaggaaaacataagaaatgtgcagaaaggtctttggaccggacaatatctgaacaatacagaattttcaccaaatgaa

SEQ ID NO: 156067 - DNA, 356 bp, Glycine max
  unsure (1)..(356): unsure at all n locations
ntcccttccgcagtctntgactctaagaaatatttcttcatatacttttcaacaactacttcccaggttttcagactgttacccttaaatgagtggagccaccttttggcttcttctaccaatgaaaatgaaaatagactaagtctaatggcttcatctggcacacctgcaatctttatagtgttacggatctcaatgaatgttgccaaatgtgcatatgggtctgttagtcactttatacgactaactttgtgatagaaatcaatttccaaagtttgtatagttcccaatttatggtattttgtatgatatttgcaataaacatgtttatagtaatgttactttaaacattcatt

SEQ ID NO: 156068 - DNA, 230 bp, Glycine max
ggacccaagcgacgccgctgcagctggtttttttgtatacttctctaacgggggatgccggaccaacactgcggacgagttttacccatgatcctgatttgacgttttcaaggggccatctccaagaggactgagatatgcgtcgaaaattcaactgcttggattatgccaggcttaaattacatctccacaaacatcttgggtggctcacacaggcccatggacattct

SEQ ID NO: 156069 - DNA, 407 bp, Glycine max
  unsure (1)..(407): unsure at all n locations
agcttgtctaccaggtgtgtttgtattcccttatcagcagactctggcaaaacacaatcanaattgaacttctcttgttcttcaggcttggcagcagtatcaccattcctatcattaataattgattntgggtctttaacggtttggacaacctcagtgatagaacccaaagctctctccttttgacgagctggtaaatgatattaaatgattacttttaaagtcagaatatcacatattactaataatggcttaacatattaccatcataacgaattaatgacttaggtaatccatttggtcgtaatggcctttcattcacgccttctgtatacttgctcactttaacctgcattctgtagtaatagatgtataatgcagtaagcatatttcagctgtactaatac

SEQ ID NO: 156070 - DNA, 378 bp, Glycine max
  unsure (1)..(378): unsure at all n locations
gacactatgaaactcagctttactagaacgtaatcttgacaaatccaagattgaggttttgaattctcggttttctttgagagttcctgatcacgcagatattggatctttttagtcgcttgtatgtgtgggttttgcttataactgcattgttntaatatatggtatgcacacaagtgcacttttgtaacttggtttatcttgaagacgttacaagatcagtgtgagatgggttattcagtgtggaacatcataatttggcaattggcagttgagttgggagacttgtgacattgttttctgttggtgacactgacatgagcaactttcttatcttaaggttcccttttggcatcgttaaggtccaaacttgacatg

SEQ ID NO: 156071 - DNA, 461 bp, Glycine max
  unsure (1)..(461): unsure at all n locations
agcttaatgagtacacacctaagggaggttattgtaattatctctntattntggctcttaatgtataagttcacaactgtgtatttagcacactaatagcattctgattcttacgaactttcatcttcatgcataaccagctctttacacttcaccttttttttttttataaaaaataattgacagatatgaaaaagatcttagaaattgatccctcaaatgatcaagctaggaaaaccattcggcggctagagacccttgctgcagaaaaaagggaaaagatgattggcgagcttttttttttggctttctcttggtttttaatatttatagcttttttgtgtggcggtgcatcagctttctttctttgtctacctggattattttattattattctgggttaatttttgcctataacttgcacttgcacaaaactagatggttgatccctagaatctct

SEQ ID NO: 156072 - DNA, 341 bp, Glycine max
ttcatcaataaagatatgggtatcataattctaaacttatgtcaaaggattatcaagaaaaacaacagggaaaaaaagtgtctttctttttcaccacaaaaacttaaagcagcaccctggccttccaaaccacagccatgcacaggaaaagagagtgagaatgatatgaaagacacagaaaatagactaagagttcacacgcatacttcagataacttatctatataaaaagaactagactggcattatgaagacagacagttaacactatccatatatagtccataaaaagtagaaagttgatgtaacaccctgaagatgggtatgaaaataatacctgg

SEQ ID NO: 156073 - DNA, 422 bp, Glycine max
  unsure (1)..(422): unsure at all n locations
ctacaatatccgcgcggttatgatgaccatgtgaaatcaagacacacgggcacgctctttttcctatccgatcgctcacgtaattctacatgttctccccctttgtttttgagtttagagcttcacttgtacaataagaggaattaactagtccgaactgctctgatataagtgccctactccttctactcgccccgtgttggcagtcannacaaaaagaccgagagtgtcgtaactacaatacactgagtatttagagaaatcagtgcaccatcgtagtccatccgggaatcaatcataacaaactctagactaatcatgaggcgcgacatgaataaaccaaactaaaatatgagccgcattgtcatataacataattcatgaacgttctgttatactaccgcaatattaaaagaaatact

SEQ ID NO: 156074 - DNA, 401 bp, Glycine max
  unsure (1)..(401): unsure at all n locations
ttnataggctctgaatccgtgacattgcgcttagcgcgagttattgtgattgagcttagtgccagtcatgcgctgagcctggctaaagacaatcgtcctgcttagcgcgcgaccttgatatttaagctctgctagattcctcttccacgctaagtgcactgaagctgcgcttagcggtggatgcacgctgagcctaaatggtgagttgagcgcaactaccacttttaacactctaagacttagcttcatttaacctgaaattgagcagatttcatgattatatccaatggaaagtcttctaaagacaactatgacaagaaaactagagttatgtactataccctactgaataactatacattggggaaactatctaatgttcgggagatgtttgtattcaa

SEQ ID NO: 156075 - DNA, 465 bp, Glycine max
  unsure (1)..(465): unsure at all n locations
gacactcacatttcctacttccagtatctcttttaacanattctttcttcctacacctatactgaccactcctttcacaaccaattaacacaaatgaactccttcctctactatcagtctgtgtcagacctcataatgattacaacaaatccatttttatgagcaactgatcaagcccactgcaaaacatcatctcaggtatcaaacacctacaacgcaatccaggcaattttagttttctacaacatattcattttatgaaatcactcacaataacgaacattattacctaagaagtattaaacgcatccgaacaatcaacatgtggttcattcacaccacattcttgttcattntgatcatccatatcaacttctttaggcattatactgtcatgcatccattgatcttcgttcatcttaacaacaaatcanaaattntgacatcatacacaagtctacatac

SEQ ID NO: 156076 - DNA, 406 bp, Glycine max
  unsure (1)..(406): unsure at all n locations
cgcttctccaaatacccaagaaaatgtcattgcatacacatcaaaacattggaatttgtcacaattgaaatattcaacagttaaaaaagaagttttagcaattgttttgtgcatttccaaatttcaatttgatttattaaatcaaaagcttttaatctatgatgactgtaagtcagccaaagatatttcacaaaaggatgtcaaaattcttgccttgaaacaaatttttgcaagatagcaagcaattttaagtgtttttgtttttgaaatagagtatatcaagggcacttcaaactctctacctgactatcttacccgtgaattcttacagaganaatcccatgccacctatggcattcggcacctccctaaggggaggaagaagtacaagataaggattcaaact

SEQ ID NO: 156077 - DNA, 336 bp, Glycine max
  unsure (1)..(336): unsure at all n locations
agcttgtanaggaccttatgagtaggaagctacctatgctctttattttggcatgctcggagctaactctntacaatcataatgatagtactgtgccaacaatttactccacaccatatacaacaccgtaatattatgacactacagtcgctgggagaggcggcatggcgaagtccgtgaacgacggtgacactaccgaggctggtctaaaatggcgggcacgctacagataaggatgcatgaataagagaaagaatattttcatatcaatggggcaaaatcagatctatgatgtggcgtgccacccacgatggacgacgggggcactgattatgt

SEQ ID NO: 156078 - DNA, 368 bp, Glycine max
  unsure (1)..(368): unsure at all n locations
agctngctctaaatttacattgatgttngtatttatgggaggaggttatatgccatctttgctttaagagtaatgtcccactaaaactaactatccaaatgtttgccttcgcaggaatggccccgaggaagcttgcctcaaagaggtccaggaaggacaaggcggtcgaaggaactatttccgccccggagtacgacagtcaccgctttaggagcgttgtacaccagcagcgcttcgaagccatcaagggatggtcgtttctccgggagcgacgcgtccagctcagggacgacgagtatactgatttccaggaggaaatatggcgccggcggtgggcaccactggttactcccatggnnncagttgat

SEQ ID NO: 156079 - DNA, 385 bp, Glycine max
  unsure (1)..(385): unsure at all n locations
agatactgccaattaggtacatatcanatattatctgctagctaggtagcttcagttatttactaagaggtatcatgattctgttatgcttctcggaaagtgtgtgtgcctaactatgtacattatgatgcaggcgatccaagagtaactcctgaagtgaccagagatagttgcttattggctagaatgatggctgctaacttgtactactcccagatagaggatcttatgtttgaagtaatngatgactctataaatcatttaaaatgatctttgttgttggtaattacaatggcactgatttccatgttgttctgaagtgcaatgtgcgctgaatgacaactcttgtcgtcatataactaacaggtcttcagaaaattcatcc

SEQ ID NO: 156080 - DNA, 398 bp, Glycine max
  unsure (1)..(398): unsure at all n locations
agcttatgacaatttgaaattctcgagagctttctaatacgtgtgaaaagttatgaccactttgaaattttgagagattccgttgntcaattttgagcgtctcgatatattatgcgcctgaatttgacttgcctgtgaaaggttatgaccatttgaatttctcaagagcttccgttattcaatttcgagcttctctatatgtgatgtgcctaaatcagacatacgggttaaaagttatgaccatttgaatttctcacaagcttcggtagttcaatttcgagcatctcgatgtattatgcgcctgtatctgacatccgtgtaaaaagttatgaccatattagtttatcgggagcttccgttttcaattntgagcgtctctatatgtgatgcgcctgaat

SEQ ID NO: 156081 - DNA, 342 bp, Glycine max
agggcagatcaaatcactcctacatctcatgtgtagcatgcatactctttctatacccactcctcacgtctggtttttatggaacaacaccatatctaaacgcgccgcatgggatcctatcgcaccagatccaaacctataacgatgggtgatcaacaggagacgcacgaacagatgaaagccgacatgtcggctctgaaagaacaaatggcctccatgatggaggccatgttaagtatgaagcagctcatggagaagaacgcggccactgtcgtcgctgtcagttcggctggcgaagcagacccaactctcttggcactacgcaccatcctccctcaacat

SEQ ID NO: 156082 - DNA, 440 bp, Glycine max
  unsure (1)..(440): unsure at all n locations
gctttaataaatactgacgttttaatccatgtttaaataaaaactattgggcaggcttgtcgcacatttaaaatggttatataccaaataacgggtaaaaaatatatattntatcatttgaaaaccattttcaaagagaggaaccaccgggctctcacgtcaaaattggttccacctaaaattgaatggaatgtgaaagaagagaaggatatttttaactaaaagacagaattgtgtaatatgtccctccttggaccaccggctccttactctcacatccatttgcattctcttcggatgctgtcttctcatctacattaaattcttgtgttgctttttaagagaattgcattcttgacatgtatattatgaactcaaattaagattttgcttaaaaaattatgttcacatattttgaaatatggggacaaatcaattga

SEQ ID NO: 156083 - DNA, 427 bp, Glycine max
  unsure (1)..(427): unsure at all n locations
ctaagctaagacctaggcttctccttcttctccttganagggccaggagagacacaccananaccttcacgaccttgaacctgactccaggaatatcacccacggcatgaccttttcgtccaaatccagctatcaagacttcatcctacaaccatcaaccacataacattaggataagcatatcagcaccaacataacagcaaaataaagtaaatatgattgatgaatcacttacattctcttcatataatttaagcaaccggcatttggcacagatgcagcaatcttcttcccattttgatgagttgaaccctgggcacatntcgaatggagagttgggctgttagcctcaatacactgacatagataccnaatagttcttaacatagatatctattgggaagatgcagtaatgtacacgatgagt

SEQ ID NO: 156084 - DNA, 451 bp, Glycine max
  unsure (1)..(451): unsure at all n locations
tgacggatcttagtactgagctgcagctggaatactnccaccttggttgatcatanctaactggtaaaacaacataacacttaggtgttagagtttatatgtttgagcaaccatgtgtaaacatcattattaatttcaatgtataattatagtttggctctcttactattgtcatgttcgccaattagttcctcaatttctatttttgaaatataatctcttactggtttaattgtgtnaattttggttntccattaacttgacatctaatatttaattgaaatgttgacatgacaatgcatgacaatagtaggataaaaanaatgaaaataagtctaacttcaaagaatataactaaattcatggtggcctcacttctaccccacgggaaagcaatctcttgtgcagttcctcaagtgctagaatttcggaagtatcaacattcatcaag

SEQ ID NO: 156085 - DNA, 388 bp, Glycine max
  unsure (1)..(388): unsure at all n locations
tcaatttaatccttaanaaaagagtattcgcttgatgaaacattaaacatttcaatcaagcgaggatttccatttcgctgttaaagaatatcatgtgtaacctttttgttnttaatttcaaataaattttattgcgaataaaaattaaaatagatttatcatttataactttagagaatgtcacgtgtaaatatttttttataaaacattttcatatgtatacagtatagatttctcagactaatttatggagttcacggaggatatactcatttgtaagaataagctcaccactaaacaacatataagttatatataatgatatgctaataattatattattaattaactttgacgctgcacatacctacttacagagaatcatata

SEQ ID NO: 156086 - DNA, 436 bp, Glycine max
agcttacttgtgctattgaatatgagtgcaaatagggagcaaatatgcacgcaatgcagggagattgaagtactgttgttagtcggttaatacaactaacttttgtgtaagaaactattataaattgtatacaactcagtactcagtatcccaattttgtgtatttaatgatccttccatctcaatttcaggtgaaatatgcaagattggtgaagtgtaaaaattgtcaactcgctaagctaattcatccgctgagtgagcaacccactaagcgcgaccaccattggttgagcatagagaagaatttggaagaaggatgagttgtacagacacgttgagtgagtgtcaacttgctaagcgcaccgcttgcatcctccgcactgagtgagaagactggcacttagccaaaagccacttatgtgcgctaagcgagtca

SEQ ID NO: 156087 - DNA, 320 bp, Glycine max
  unsure (1)..(320): unsure at all n locations
tactcagcttggaatgcacttgngcacacatttcggatccgctatgctgttccatatattaaaacagtcccacaatcctaattttacaaaaatcacattcatatgtcattggggcattttacggagcacttggtggacgcatgtttatacataaattgcaagaaaatgggggcaatgtgtgatgccccattgcttcagaatacaacacaagcctaatgccttcctctacaaaccctcaacttaacaaaacaagcatggattcagaaaagaattgctttatgatattcgcgaaaaatgagcaatttaagcaccataacaca

SEQ ID NO: 156088 - DNA, 309 bp, Glycine max
  unsure (1)..(309): unsure at all n locations
gagcttggctattatttatcctaaccganggtggtggcgcgctaagggaaagtaaacatatatagattactattagtgtaaataataaaccgtctcatgtttttgtttacaatcggatatgcaggattcgctgagctattctgacttttcatgctcacttttttcttagctaggtactaatattatttagtaaccggtgattttattctttgaagaatcatgattcatttacagcgaaaaaagcatcatgcatcattcatgcttggttcactgtaaccccagattttattctggtatcaagatacttat

SEQ ID NO: 156089 - DNA, 337 bp, Glycine max
tactaagcttgggagttaagaagtccagaattgggttttgttggaatgtgaccactttgtgttccctggaggtggcacttcttttcctgaaggggtcaaggcttatgttaatgctctaaaacgtcttcttccggtgcctttggaatctggggacgtcagaacagtgcttgatgttggttgtggggtgagtgagcttgtagtatatctcatgccttttcgctccttctatttctctctctttaaaaattgccttttctctattttgttgtgcctcacttgtttggccctctatataatgaaaaataaagttctcattcggcttttattaacttcacat

SEQ ID NO: 156090 - DNA, 359 bp, Glycine max
  unsure (1)..(359): unsure at all n locations
agctntcaccataatatgttcataaagaagaatagtgtcccacgataatctataacgaatgaaanaacatcatgaaaacagcattttaattaatgctggttttctttttaatttgaattattctatcattttgaaaaactgattcttgaaaagcatttatgaatttcttattttattgacttaaatagtattttaatttatgtaaaattagtaagtttcaattttcgtccttataaatttctttctttgattctcattcctcaaaatattaaaattttattnttatcccttctatcatgtgacacttgttaatgacttctagcggaagggtcaagagacattccacgttaaaattggta

SEQ ID NO: 156091 - DNA, 483 bp, Glycine max
tgtggctgcagccaaagcgagaagagcttattatgctgttgtcaacggaagacccttctcagagaccctcgttgaagtcctctacaacatcaacgagcagcttctaactgaagacgtagacatccctctcacaaaggttatgcctgttaagaaagttgcacttgttgtggtcaccggcgaccgaggtctctgcggcggtttcaacaacgcaatcataaagacagctgaggctagaatcagggaattgaaggagcttggctcggaattcactgtcataacgtgttggcaagaagggatactcttatctcatcagaatgccttatattccggttgacatggttctagaacgtggcacacttccaactgcttaggaagctcacgccattgctgatgatggtttctcactctctgtgaatgaagaggttgacaacgtggagcttctatacaccaaagtccgggcggtggtgaaaatcgatcccgtga

SEQ ID NO: 156092 - DNA, 371 bp, Glycine max
actctcgggaaattcaaatagtcataactattcacacggatgtccgattcgggcgcataatatgtcgagaggatcgaaattgaacaacggaagctcttgagaaattcaactggtataacttttcacaccgatgtccgattcaggcaaatcacatattgagacgctcaaaattgaacaacggaagctcttgaaaaattcaaatggtcataacatttaactcgaatgtccaatttaggcgcatcacatatagtgacactcgaaattgaacaacggaagctctcgtgaaattcaaatggtcataacttttcacactgaggtccgattcatgtttataatgtatcgatacactcgaaattaaacatcggaaactc

SEQ ID NO: 156093 - DNA, 423 bp, Glycine max
  unsure (1)..(423): unsure at all n locations
gcttatgctgaaaaccacatccatgggctntttttattgctaatgagaaaaatacaagtcgttgtgttatatagtatctgtgctaataatagttttttttaaaagaaaaaaaaaacttataaggaagagataatgcaatattagtttataggtcatattttgatgtctaagaggtgagcatgctaatttgcagaggactatatatatatatatatatatatatatatatatatatgctatgggtctttgtataaacttgaaaattatgaagcctttacggngcatgtatctaaacttacttagtgtgttgaggcactatttcctaaaagtttgtaatgaattaagacatagaaatttcttatcataaacctatttatgttaaattatcactgataagtggtaatgtaaacaccaaacacagtg

SEQ ID NO: 156094 - DNA, 399 bp, Glycine max
  unsure (1)..(399): unsure at all n locations
accttagaaactcagcttatatcttatgttagagcacaagttcttctttagagcatgcctgncactttttnagnnatnnaggcatgccatnagggacaacatatagctanacatttgacttctatccctttcatcctttttgaccgatgctatgaagaataacaaacattntttgcagataggatcaagacgagcatttaagatgcataaaaaaaatccatactcaacattagatgattttgcatttattctatatgcatagagagaacaaagctctgtatgttntgtcataaaacccaaatatcagatcttaagattngnttgcataaatcaaaactntgaagagtcctaatttggtctatgactcaacaccctctattattttatatgtgaatctat

SEQ ID NO: 156095 - DNA, 428 bp, Glycine max
  unsure (1)..(428): unsure at all n locations
cagcttgcattgtgtgtggaccattcatggttttatttgccactttggaggggttgggaaaaccttaattacattgcaactgagattcttcattacttggttttgttcttccatgtgggttttaaatgttgtatctcttagatgtgcacatcatgtttttgtcttgaagtctctctatgacttgtgtttttatatattctaaaccacatcattttcaaatattgaaccatatcatacatgactgtattaagatgttccattgttgtttttcatgtctatcatttgagttttggaacaatctggattatactgtgcatatatgctagaatatatatatatatatatatatatatatatatatatatatatatatccttgactttgttcaagattatntgcatacacttatagcatgtgaaaccgctctc

SEQ ID NO: 156096 - DNA, 366 bp, Glycine max
  unsure (1)..(366): unsure at all n locations
aaacttgatgatgagatatttcgntaactatgtcatatgttaacaaagatctcctaaagagaggnagctattntaaatataattnctttctaaatactaaaatttaaaaaaataaagcttaagtaccaaaataaaaaaaaaactctttattttacggctattataaaaagttattttaattttacagtaacaaagcttagacctcaaattgatattagaaacatgtttactttaattatagctnagntaatgaattntattttaattattagcaatatttntaattgttttttacttaattaagntntatatggnccttcattaaaaaaataccatntaaataattttaagataattattttaaaa

SEQ ID NO: 156097 - DNA, 351 bp, Glycine max
actctgctgatattggatattgatgatcaggttaataaacgaatttaattatctggaaaaaaaaatataactattggatataataaataattctaaacatgaataaaataaaaataaggtagatgacacaaagattaaatgatattggtaacaagttcaacaccaacatagattaaatcacggggaactcatattttgccttccttccaaataggagagaaagagatggaaaagttgatttatacaataaaaagaaaaaaaaatgtcaatatcctaaccaaattttttcattaagaatatcgacgttattttatagacatattttttcttcttttttcacttttttataac

SEQ ID NO: 156098 - DNA, 420 bp, Glycine max
  unsure (1)..(420): unsure at all n locations
agcttctgttntcaatgtggagcgtctcttattattatctggactcaattggacatccgaatataaagttttcttcgtttgaatttgctcagagcttctgttctcaattccgtgcgtctcgatatattacgggactcaatcggacatccgagtaaaaagttattgtcgtttgaatttgatcacagcttctgttttcaatttggagcgtcttcatatattacgggactcaatcgcaaatccgaatataaagttattttggtttgattatggtcagagcttctgttctcaatttcgcgctcctcaatatattacgggactcaatcagacatccgagtaaaaagttatagtcgtttgaatttgctcagaacttcttttttcaatttcgagcgtctcgatctattatggtactcaatcatacat

SEQ ID NO: 156099 - DNA, 336 bp, Glycine max
  unsure (1)..(336): unsure at all n locations
gagacgctccaaatagaaataggaagcccgtatcaaattcaaacgacattaacttttgactaggatagccgatagactcccagaatatatcgagacgctccaaatagaaaacagaagctctaagacaattcaaacgacaataactttttattcagaagttcgatagagtcccagaatatatcgagaagctccatatagaaaacggaagctcgtatcanaagcaaaccacaataactntttactcggatgtccgatagatgcccataatatatcgagacgctcnaaatngaaaagggaagctcgnagcaaattgaaaccagcaataacttttaactc

SEQ ID NO: 156100 - DNA, 366 bp, Glycine max
accagggggagaatatcaatccttgccctcggaagaaaacacaaaaagaagggaacttcccaatcaaaagagtggaagaaaacaaaaagagaaaattcccaatcgaagagtgggagaaagcaaaaaaaaggaaagaaaattcccaatcaaagatcggaggaaaacagaagatatatacagaaaggtctttggaccagacaatatctgaacaatacagaattgtcaccaagaaaatatgaaaagaaaggaaaccacgacctaaagtggtcctctccctttgattaccaaccaaaatcctgtgcgtcggtgacttgtttgcctcgcgctaaacaaaaatagaaaataaaaaggccaaaaacactcaaa

SEQ ID NO: 156101 - DNA, 338 bp, Glycine max
  unsure (1)..(338): unsure at all n locations
aaaaagagaacgcaacaaaaagctatggaaaaatctatagcatctttccaattctgtagagaatacctgagaaaagatcggattccataaacatgtttcctttagcatcaactattttaattccaagagagcattgnaggtagcatagnatataagagtttgtcgatgctttcctaatacataagcaaaaccaaagacatccataagaattacaagntaagtgagaactagcatgactatgagttgataaacaataaaaaatattagcatcctgctaacttaactttccttcttttcttaataataaactctgtttcatcaaaacaattcatgaatct

SEQ ID NO: 156102 - DNA, 377 bp, Glycine max
cgaggataagggctacataggagtgcgtgagctcagttgaaaggtgggcaactggggatgctgtgtttatgtttgacttatggaagtgggagagttgatttgcgccatcgcccgatcgccacctagtaccacatatgacgagtaccccataatccactaagcttgatgcgagaaagcgtggaagagtcagtcttccaacttttgtttgttgaccacaaagtggtacctggagatatgtcgcgggggtcaggagaccttggggatgtcaggtggggtgctattgcccaaaaccaagcttgactaatcccgacccaacccgggcatagtcagttagtgagaacctgtgacgtacctaaacaggcgagctcctggcagtc

SEQ ID NO: 156103 - DNA, 453 bp, Glycine max
  unsure (1)..(453): unsure at all n locations
tgaagaggattgcnatggagaaagagngnttttgctgggcatccatgttctgagnnctagagnattattccccctctcataatacaagtcacagattaattaattccttcaacttttggaatttctagttcatgaaccgaaaatcctatgaccacagnttataaaaaagaagaaaaaaacacgtctaattataattattatattccacnataattgatgtattgatttaatatgatcatgattatgaagatatttaaattatgacctactgggtttcctgcaatataacagagtaggcatcaagtatttaatccaagntttatgggctggaggagcaacgcacaaagctagagcataagaagcttatggtgatttaatccaagtcagaanataaaaaatattaattattnttcaacaggatttttctcaatgaatattggtgctcctaaatat

SEQ ID NO: 156104 - DNA, 421 bp, Glycine max
agcttctcaaggaagctacctagtctatatttataagcatgtgtaacacttgttataactttgatgaatgagagtcttgtgagacacaactcaaagttcaacttctctccctttttcttccttcaatttcgtgctcccccctctctctttctctccctctttcgtttcctccattgaagcatcctctccaagcttcttatccaaggctcatctaggtggtgaagctccttcttccatgtcttattccctagtggatggcgcctcctctcacctcttctcctttgtcttccgctgcatctccatggtggaaaatcaccattaaaggacctcatttaagctcaaagatccagcctccatagaagccccacaagcaagcttccatcatctggtctctgtagatcttcacacagcaaaatctcta

SEQ ID NO: 156105 - DNA, 330 bp, Glycine max
  unsure (1)..(330): unsure at all n locations
aaaaaaataagataaagaaaatttccaatcaaaagaaaaaagagaaagaaaatttccaatcaaagatgaagcnaaaaaagagagaaagaaaatttccaatcaaaagaaaaaagagaggaaaggaaattcccaatcaaagagtgggagaaagcaaaaagaaaagaaagaaaattcccaatcaaagaatgggagaaagaaaaaagagaagtaaaaaagaagaaagttcctgatcaaataaactagaagaaatgtgcagaaaagtcttttgaccagacgatatctgaacaatacagatttgncaccaaatgaacaaaagatagaaaaagaaac

SEQ ID NO: 156106 - DNA, 378 bp, Glycine max
  unsure (1)..(378): unsure at all n locations
atattaagtttatttcattacaccggcctaattaaataaaggcctacctatttaagccttctcatttggtcctataattgaataaaacattgtatgttttatgtggaattaataagttaatttggtgataagaaaaaggagaaaaaaaaatcatgggtttgattctcccactaacaaaaaattaaccattaacaattaatatttttcaataaaaaagaataaaatattatgaaaaagataagtaaataactatatttatattaagtgtgtttggataaataatttaattaaagtcttactaaataatactacatatgttatttttataatcaaagatgaaagaagatcgatttngttatatatatatatatatatata

SEQ ID NO: 156107 - DNA, 370 bp, Glycine max
  unsure (1)..(370): unsure at all n locations
ctgcacgctatcaatagcggcggggcttacctcgaagtatcaacagaagtagtatccctttcctccgattcataaagctcacatgtatgatcacttttctcgatggttttagatgaagaaagttgtacaacacgaagatgaaaatcagacataggtgtcaaaaagtacttgtgacggtataagacatcaacaacacggacagtatcataagcattaacctgatccaaaaataacaagttatgaaaaaacatggnttagtacttgagtagagttagaacatgattttgggtctcaagccatggnatgtgtagaagtaaggaaaaaacttgctctctgttgggtcaaaccattagttgcanacaaacacatg

SEQ ID NO: 156108 - DNA, 427 bp, Glycine max
  unsure (1)..(427): unsure at all n locations
agctngttgaataatcgctcgagtatttttaatttatctattacatatccaacaataattattttattatctcaaaacgaacttggaaataaattttttcaacctcattcccagaaagacacaaataaataatttgtgaaacaaaggtcttccaagcaaaaaaaaaaaaaagcaaactaaatgccttctctttttataggctattttagtattacaccactcgtcctatcaaatacataatgagtagtttttgctttattttttccctagatcctaacgctacaagtagtattacaatatcgacttacgtttgtttgtattctttttttttttacaatgattttactgatgttagaattatgattttatatatattattccaattctctcaattagacagattccagtaattcgaacattgagttac

SEQ ID NO: 156109 - DNA, 300 bp, Glycine max
  unsure (1)..(300): unsure at all n locations
gaagcatttccaaaacaatacaacaagatcaaatctctgagagagaaatctacattntagctntaaacctctctgtgagagtgacccacttttgtattgaacttgaaaaatctataataatcttagatagaagaagtgtgacattaaaatcctgagaggaatccctcattgagaggagagataagagttatgcatacgctatcttgatattgaaatcacataacaattatctcattttcttctcttttantgcttcttttgagtaaaacaataagaacttctatcaattcttctcattat

SEQ ID NO: 156110 - DNA, 424 bp, Glycine max
agcttttacatgcatgtgcacactatattttttaaacttagatcaactgatgcaatctatttgattgaaaagataatttatactactcttataatgtagtgtacaactaaaaaaataatataatagaaaatagtgcttaagccattcaagtcaagtcattttgaatctcatcattagtatcatacatctatatgtgtcaaagagaaggagaaacatgcatggtaatgcataacacaacaaaacattataagaaaacatgctttctaaacccaaccaaggtaaaaaagttttcatatttcatgaaatagcatggcttcctatggcggaacaatgatattaatttggtgagtaagtcttgagaatgtttagttaatcgtttttctgaatttgaaaatattactcgaaatacacaaatggtctcatg

SEQ ID NO: 156111 - DNA, 375 bp, Glycine max
  unsure (1)..(375): unsure at all n locations
ctcagcttgcatcggagacatagaagtagattnaacctacntttgttgaaaaanncaccaaanagatagagaaaaatctaaaatcatacatcttagntaaataaagcatgctagcccccaacattattgcattttgattccatctttggacattcaaatagtggnttatttttcctgttatcttttcctttgccttagnctaaatttcgaacttacaattcggnatctctatcttcttttgnttctcctcatttcttaataattggatttgcatcacttaagtacaaccaatagccctttggattcaacagntgaacttcaatttcaatctttactacttgagataaaattaagacacttgncaatctattaaca

SEQ ID NO: 156112 - DNA, 413 bp, Glycine max
  unsure (1)..(413): unsure at all n locations
agcnnaacaaaaggcagtgcgaagtgtttgtananttttacagcaancccccnatgggagcaaacataaaaagggaaaaggccataccgcagccgacgctcnancncggcgncacgcannacacnccatgccagaaacaaaagcgaccggccccgaacgccagaaaaacacgcacgaaaangacgaaacgcccgaaaaaaccccaaaaaagggggaaaaacacacacaaaacggnccctttaaatatgaaggctttcttttgaaagaaaacaaattgtgtgtgcctaaatgctctactanaaatttgcttgtttgtgaagcacatgaacgaggtttaatggggcattttggggtccaaaagactctataaacattacaagaacatttttattggcctcatatgaaaaacgatg

SEQ ID NO: 156113 - DNA, 374 bp, Glycine max
gcacattcccatcacaattattttctgttggattaagtggcctcaaaataattaagaagggggagttgaattaattatgaacgtgtcttgactaattaaaaaattatccttcttaatgttactagattcaattaggctttactactaaattatgagaaagtaaagaacagaaacgataacttagacaaaagtaaagcggaaataaaaagtacacaacggaaagataaagagtgtagggaagaagaagacaaacacaatatttatactggttcggcctcaacccgtgccaacgtccaatctccaagcaaccacgggttcttgagatttccaataaccttgtaaaatccttttacagcaaagatccacaagggatg

SEQ ID NO: 156114 - DNA, 260 bp, Glycine max
  unsure (1)..(260): unsure at all n locations
tgacgagctgatggctagttaatttgcttcccatcagaccttggatgcaactgagatggnatccctatctcacgctaatcttgacgggtattcaagccatcctcagcgcgccttagagagtaaggagcagcctaatcgcactggcacataattattctccacatgcataacatcaatacaatgtctaatcgcctgatcaagccaacacggaagagcatagaacacagaccccctcttccatatacaagtcctactttgat

SEQ ID NO: 156115 - DNA, 382 bp, Glycine max
gaaaaagctctaattgaaagaataatagacaactaagacaaattaaatgacacatgtgagctatgtatctagcccttcctagtaagaataaatgctttgttcgggtgcttactcttttctccataccttaccatatgaactagaatattgtaatggttcactttcattgtaactaagattcatgtgcagttggtgattacaaatccaagcacccacatggatccgcaagccttgtgccctttttgaatatttgaccatactctctatttttataaattctcaattcacaatcaatcaaagtgtttcactccacataaatgtaattcaaaaaatccactcctaagtaatttgagtttcagggcggggatggaaaaaccccgtc

SEQ ID NO: 156116 - DNA, 390 bp, Glycine max
  unsure (1)..(390): unsure at all n locations
agaatcacccataagccanaaggcaaataatccggnagatcactccctgtaagaatnaagataggctgaaaagaagagaagacactttctatgatgaactagatcaaacctaanacaaaagacgtgagagataaacatgccttgaagaaacaagtgaagccaaactaaaaaaagtcatgcacttgntgaatgttaaaaccgnagaggttctgaagagagagaaatgaaagaagttattaaccaagttaagatagaacacttctcacccatacatacttnctccgggttatttacattttaaattacacacacataacaaaggagtgattaactgagaacgtggaaagacttactatctggaaaatacggagaaagatgccaaagctattt

SEQ ID NO: 156117 - DNA, 373 bp, Glycine max
  unsure (1)..(373): unsure at all n locations
tgaatcctaagtggtacaagaaaataagtattaaatttaatcaacaacttaacaatattagatttaagtatttattcaaaagacaatttggcagggggattattatattacttacataagataaaggtttcactagatgtctgggccatccaatgaatgagttcacggcgtccctgacatactgaatctctgaagtgggtaaccggacaatggcttcaccatcgtatacagtgtcaacacacacccttagtacatcatcttcataagcaatagtgtgtatcgtgccacctactccaaagacctttccccctgccaccagctgtgtactgtcaccacaaacaaagtataagcccatactacatgtatcanatgt

SEQ ID NO: 156118 - DNA, 290 bp, Glycine max
  unsure (1)..(290): unsure at all n locations
ctgatcaaaattcaaatgatctattgcccttcatttttatttcttgagcaaactaatgctcagacttggtactttaactaatctttggncttcttttctatgacagccacaaaatgttccaagaataagtgagttggctctatggccgctcatgcttggggcttcaaatacactgcttaacgctgaccattacagagtctatttcaaaagaatgcctctcttgaatggaaaagtgggcataccattctcctttatgtggnaatagggtatctggagtacctgaaaactta

SEQ ID NO: 156119 - DNA, 341 bp, Glycine max
taaccttttcgtaatgaataagttctacaatattgtgtcagaacttcataatgaaaatgtcagatcaacatgctcaaataccatcatctcatatacatcccatacatgtacattaaagagtggacgataattaatgtaaagtataatttattgcattaacataaaaagcttacttgagagttagcaatagaagttagtgatgtggtgttgttggttagcagcttcacttttggttcattatttatgaatatatgtgttttagatggtggcgaatgtgagtgaatgttgttgaagatgagagactaagattatgaattattctccgttattactctgcactg

SEQ ID NO: 156120 - DNA, 387 bp, Glycine max
  unsure (1)..(387): unsure at all n locations
agantttcagaaaaaaatttccaagagtcacatctattcaaatggtttatgaatggccatcaaaggtgacttggaaacaagaatttaaagagagttttcattgcccacaaagtttatcctctcaaaagattaagagtttttctgaactgaactgtcttatcctctcaaaaagattccttggtcaaccacttgcatattcaataaggaattttgattggtcttcattgtacaatctatcccttttaagagagatttcttcttctcttcttcttacttctgaaaagggattaagagactgagagtctcttattgtagaggattcttgaacacaagggaagggttgtccctgtgtggttcaaactttgtaaaaggaagtttacaaagaga

SEQ ID NO: 156121 - DNA, 427 bp, Glycine max
  unsure (1)..(427): unsure at all n locations
gctctatggaagctagagctntgatgatcaattangaccttcaatggtgattttcagccatggagttgtagcagaagataaaggagaagaggtgagaggaggctccatccactagagaataagccatggaaagagaagcttcaccaccaagagtgccttggataagaagcttagagaggaagcttcaatggaggaagagaatgacaaagagagagagagagagagagagaaagtgacatggaaattgaaggagaatagggagagaagttgaactttgaagtgcgtctcacaagtttcacagtcatcaaagttatgacaagtgttacacatgtctctatttatagcatagcacatgggaagcttccttgagaagcaaggaaggtagcttccttgagaagctagaggaagaaagattccttgagaatct

SEQ ID NO: 156122 - DNA, 186 bp, Glycine max
  unsure (1)..(186): unsure at all n locations
tctagccnactggagcgaccttgcttaattcctgagagcgcctacaccccttncttagnanagaagctcattacaagccttaagtgaaaaaccatgatatcaccttacccttaaagaatatgggagctttggaattgttctgggaataagctgggaataagagtgagagtatgtgggggggggggg

SEQ ID NO: 156123 - DNA, 443 bp, Glycine max
  unsure (1)..(443): unsure at all n locations
gatcttaagcgactgagctgcagctttacattgtggtagatgacttttangtatcggngatgnggcaataacatatctaagctcgatgttttagttcttataattacaccattttaacttttcgatccctaaaaataatatgagcaaactttttatattttagttgttgggaataaatttgtatgcccacgatccaagttattatgtaatcaattctaattttaataataaagtattattttatttttattatcatattttactatttgattaaatgatcaatttgataatgtactcgattaaaattaaagacttgttattataatagagattatgataatgaaaaataagtttgttctaattttaatttaaactgttcttgatcatgggattattgtagataggatatcaataatttggatagattaatatatatgtaatag

SEQ ID NO: 156124 - DNA, 378 bp, Glycine max
  unsure (1)..(378): unsure at all n locations
ctacgagagaaaagaagataagttcatgttaataacaatttaagaagcactaacttgaagactctgcactaaaaatgtcacatttactaacaccctatccattaattctgttaagagtataactgttgcagnatagtttccaacaaaggctatatcaccagattggatgccatttttattcaataatggaataaaatcttatattatcaactaattaattnttttaaatatgacncataaaaaaaattggacaagaatcaaccatcttactggntataacagntntatgcttttacgacgaatctaattaaatctaattattgagagngtacgttaacaacaaaattattatatgaataatctaatggaaaaatatac

SEQ ID NO: 156125 - DNA, 426 bp, Glycine max
  unsure (1)..(426): unsure at all n locations
agctntactatgcagagaatatctaatgataataccttcatctgacttagcatcaaattttcctaagttatcttttccattattcaatacaaaacatttacaaccaaagatatgaagatgtgagatgtttggttttctgccattgaacaattcatatggagttttctttaaaatgggtcttattaaagccctatttaaaatgtaacatgcagtgttaatggcttaagcccaaaaatattttggaagaggtgtatcatttaataaagttctagcaatctcttccaaagatctatttttcctttcaacaacaccattttgttgaggggttcttggtgcagaaaaattctgctcaatcccatgcttatcacaaaataattcaaattctttattttcaaactcacccccatgatcactcctaattgatat

SEQ ID NO: 156126 - DNA, 304 bp, Glycine max
  unsure (1)..(304): unsure at all n locations
cgccttatcgctttttgcaaagcgcttttcaattttagcaagaaattctttggcactaattatatcatctgaaacagtgcctttaaagacctcaagaatgccgcgcttaatgatcataagactcatgactcatgcgatttgagtgatcccagttctcatgaagtttcccctatttagaggtattggaatcagccggagaaagaggtttctcaatccttaatgcaagcactagatccatgcagccaaagactatatgtgtgtgtgtgtgtgtatgacccanaattgctaacacttatgatataag

SEQ ID NO: 156127 - DNA, 374 bp, Glycine max
  unsure (1)..(374): unsure at all n locations
ttcattcaatcccgngtattacattcaattctcttttaacccttaatgggttcaattaatccaaacagattactaaaccaatattctattatggtactcctgccttaaaataagtattctctatgtcacttttaatctcatcttaagattgataaacaatcaagtattggttaatcactaagacatttttaagtttccaaacatcaagtctgaatgattacaaatcaaacaactatcataaaaaggatatacaatgagaaactgattacatataaattntgctcaacaaagaataacactctaatcacttagtggttgatcatctagagataaaagttatatcagagcaacaatggcaacaattcaagaatttt

SEQ ID NO: 156128 - DNA, 412 bp, Glycine max
  unsure (1)..(412): unsure at all n locations
agagactagcataaactcctcttcagaggatgacaatattatctaatatttccaagcatacatcaaactgtttcaaaaagtccaactatcattntattcttaataaatgggagttaccagcataaaataaactatggctgcaaaattggacttcaaaaaaatataaaatataacctgatcaaagacatcaatatagacttgttgcagagaatgagatctgcagaactgattaatctcatgatgaatcttgtcatatatccatgtcttatcataatgtacaccatagttgagcaatgtctcaaagacaaattccttatggagttgattcacaacctataagaagaatatgcatcactgctatgaaattattgaagatgtgaaaaagataacactagtaaatctgagattacat

SEQ ID NO: 156129 - DNA, 429 bp, Glycine max
agcttattagaccgaactcaatttattatcatgcactagagtgtttgttattagagaaattttggttaactagaaatgaaacaatggtagtatggtagccatggggtagacaaagaaaggtgggatcaacgtaaaagagactcttggattggattgggaccctccatagtgcattctccccacaacaatttatcaatagataataacaatcatcattccatcttcatccttcattgctttgcaccccacgcatcttcaacgcagttaagggacccttttcattagcacgtgcgtctttcacggttcattaggtctcccaatatttgaaggaatcaatatccattttaaacacatatacatgttatcattttagtgttcttttaagtataatcttataaaatatggtgtttaatatttttcaacagcacc

SEQ ID NO: 156130 - DNA, 423 bp, Glycine max
  unsure (1)..(423): unsure at all n locations
agctnttcgattcattctatgngcctgngttggtccacanngngnnncgngcattnntattctcgttntgtttactttttataccccctgttgacgtgcttaagccattttacttaagtcatttctcgcttaacttaaaaataaaatcaatttccaccgaacgtttgaattgtattatccgttaacttcggttaaaatgaattccgaccgttcggtcgtgccgtaaccacgttggaaatcaaaaagaggtaaaaaataatataaataataaaaaaaaacatcttttagtaaaataaagcggaaaatcaatcggacgttttctctttgggatttctcattcttaatcgaattgattaataactaaagggaaactaaggctaanatcaactcgcctagtcaagctcgtccacaaaaataggcttt

SEQ ID NO: 156131 - DNA, 326 bp, Glycine max
  unsure (1)..(326): unsure at all n locations
agaaactcagctaggatgatgaagagngaaagggaaacttnctgctcctattgttatcccatagaggnacctggagatatgtcacggaggtcaagagaccttggggacgtcaagaggagagctattgcccaaaaccaagcttgaccaatcccgacccaccccgagcatagtcggncagagagaacctgtgatgtacctaaacaggcgagctcctggcagncaacagataaaaggaacaaagaccacaaagcaaggaagttagaggaggctggccagctctgaaacttgattgatatgagagatatgagctctgagaatcgattacc

SEQ ID NO: 156132 - DNA, 437 bp, Glycine max
  unsure (1)..(437): unsure at all n locations
agcttggctgcgcagcagnctctgatttctgntagtatttatagaaagatgaacgcattngtaatcgattacanggtannttggtaatcgatnntacaggcccaataagccttctggtaatncgattacanggaatgttgtaattgattacanggctgcctgttcatgtgtaaatcgattacactnggatggtaatcgattaccagagcctatcctaggctagtttctaagagaatatctatatttatgctcaaatacatcctatatgactaattttcactactaatacactaaattcaatcattcaattactatatacacaagaaatcataaattctatcataaaaacaagaattcaaacaagatcaaacaagataatctacaatcaaaaggtaaaagtaaatcaaccaatcagtcaaccaatcaatcaaccaatc

SEQ ID NO: 156133 - DNA, 277 bp, Glycine max
  unsure (1)..(277): unsure at all n locations
acccactcctcacgntagggtttttaaggaaaacaccataactaaacgcgccgcaaaggatccctatcgcaccagatccaaatctagaacgatgggtgatcaagaggagacacaggaacagatgaaagccgacatgtcagctctgaaagaacaaatggcctccatgatggaggccatgttaagtatgaagcagctcatggagaataacgcagccactgccgccgctgtcagttcggctgccgaagcagacccgactctcttggcaactacgcaccat

SEQ ID NO: 156134 - DNA, 426 bp, Glycine max
agctttacagcagatttagtaatgaccctctttcttataattaaaataacttaatgccattaacctagggaattaaaaaaaacttaatggctgagtgtaactgaaattgtggcaaccaaaagtcacccccaacaaccaacaagtcagccaccatttggtctcccaaaaggctgatgcctaggttgccaattgggcccttattacaacttgaactaaacctaactaaagcccttttagttgattaacccaaaacatatttttggtcagccaactttacaaggattgggccattatttagacaaactaaacactctaaaattgaaacaaagtggtgtcatttagtcctcctccatttgggccatgatacaactcacaaccttggacttttctccttgaaacttgggcttgtattcaaatagtatggac

SEQ ID NO: 156135 - DNA, 405 bp, Glycine max
  unsure (1)..(405): unsure at all n locations
ggctagagcacatattcttaatgatcttgatagcatcaataaagagntntaacatgaaggtacccccacaatcaacatcttaacttgtcctattatgtgaagacactccaccatagaaaatgtgaaatatcctttgttgggagaagccatgatatggacaacttctgatcctttcttataatctctcttaagcttcaagtagactctcttgctctttctgcacaaaattcccaatgtcccttatgtactaggttatcttaaaagagaaatatttccttaagaaagtacttgagcactagntcaatgaggagatactgntctctagcactaaacataaccaatcccatgcattcgnattgagagagaaaggaaaagcataaagnctaatgtattcagctgatacct

SEQ ID NO: 156136 - DNA, 349 bp, Glycine max
  unsure (1)..(349): unsure at all n locations
tttcgaatttggttggaaaaattggttccgtgaagaaaattcaagccgaggcgcttcccaaaaagttccgtaacgtttccgtgaggaatttcgcgaaggtttcgaccgttcttcgacgttcttcattcgttcttcatcgttcttcgatcttcaatgggtaagtacctcgaaccaagctttttgattcattctatgtacccgtggtggtccacattgtgtttcgtgtattttttctcgtttcatttactttttataccccccttttgacgtgcttaagccattttatttaagtcatttctcgcttaaactaaanataaaataaatttccaccgatcgtttgaattgtatt

SEQ ID NO: 156137 - DNA, 369 bp, Glycine max
  unsure (1)..(369): unsure at all n locations
gacaccaagngacatcaagcaaacattaacctagataaaaaagaggtttcattgggcaaattgtttaccttcagataaacaaataatttattgtcaccatcattgcctcatgttgcttattttctgtaaacaaaaagaagccatttcaattcttcggtcgcacctttaacacacagattttctgacactgcaatcgtgtatctatagtagataaacaatgncttctttctacttcatacaaatagagagctataaagatggtctcataaccctaaatagtgtttgttctgataagcccaaaattagagtaaatgtatatcaacatttaatgagactcgggaatggcaatgaaattatatgtctgtatgt

SEQ ID NO: 156138 - DNA, 382 bp, Glycine max
tcttgataagttcaccccctcccctttgctaaatgtactcctttttatttacacacccatgtttactaaatacatcccctctgccctttttttctgattctttttctgtaacgttacggaactttacgaattacgtaacgatacttgttttatttccgtaatgtcatgaaaccttacggattacgcaatcgtcccttctttggcttctggaatgttacaaaactttacggattgcgcattaacacttcctttcaactcccaacatgtcgtggaatttcacggattgcctaacgatgggtgtcaagtacctcgaagtggtcaagcgagggtcgcatcccaacaaacagatggcccccagacgaaattagcgtatgacagacat

SEQ ID NO: 156139 - DNA, 299 bp, Glycine max
  unsure (1)..(299): unsure at all n locations
gcgcaacactcctgggcttagcgcaaagaagactttggaagaagatgagttgacaagttcgcttagcgcaccgnttcatttcatccgctaagcgagaaaggcgcactaagccaaaaatcactaatgtgcgctaagcgcacgagcatgaacaaggccaccaatttaagcatgaaatcagattttgagaaaggagtttggactgggattcagagctttgcatgtctaaggtttctagagagagaaaagtccaagctctagagagttntgagagattttgctatgtgaagagctacagagac

SEQ ID NO: 156140 - DNA, 420 bp, Glycine max
acttcttcatcctcttccggagctttttagttctcttcattgataataattaacttggagagccaatctaaacctcgtgtacgaactttcggccattcatgataaccaccaatgatgccattacgaatgcccctaagttctttatctttcctccgttggtttgcccaagagaggggattaagatggaacccacgcatgatgcatatgcgaaaggtacaatacagggatgtacatagtacgacaatattcacaaacaaatataagcaaaagggtacatgacacttttatgcatggcaggggaaaaatggcatgcagcgtgtttgctccgtgccccttatttaagggacctatatgggagagagctaaaatggtttttagtgataatccccaaggtggtcatatctctcttgttggtctcta

SEQ ID NO: 156141 - DNA, 296 bp, Glycine max
  unsure (1)..(296): unsure at all n locations
cttgactggatgatatgagatgaagtgccaagattgagacttatgttggntgtagatagatggataacctaaacacttgagcttgagtgaaatagagacctcagctttgggagatgatccttccttgatatctgncattcttactagcttatttcagtagagtttcttaataatcatgttcatatcttttaaaagntgcttgtctagagagaagctgntgactgaagcattgnatgtcattcatgtcatgtgaatgaattctttggaataaaaaccttgagaataaccactgtgat

SEQ ID NO: 156142 - DNA, 427 bp, Glycine max
agcttctaaaattttctgaaggaagagagtgatttttgctttttttttaaaaagattttttttttcataaagcaatgccacatgtcccattttaagtggagcaaaagggcccacctttttcccttgatttgacttcatactcagccacaagggagaaaaaaaattgaacctttttggatgctgaaatcctgcctcggtttgcgtgccgcctctctggttccagttccttgcgtttctctgcacctgtcggggcccgttttcgaaagtaagcaatatatatatcaaaacactcagaatgagaccctgagcgtggttcagaggttggttttttttttaattttaagttacacgcaaaacgataatttttagactaattaattgcgaattactctataaccgttcggttatgggttactctttgttaatt

SEQ ID NO: 156143 - DNA, 426 bp, Glycine max
  unsure (1)..(426): unsure at all n locations
agcatgctgaacttacaaaacctctaacctagcacactcccttccacagcagaacaatnatgacctctccagcaatagatacaaccctggatggaagaatcaccctaaccttagatgagccagccctcaacaacaacaacagcagcctgctccttccttccaaaatgctgctggcccaagcagaccatacattcctccaccaatccaacaacagcaacaaccccagaaacagccaacagttgaaggccctccacaaccttccctcgaagaacttgtgaagcaaatgactatgcagaacatgcagnttccagagcttccattcagagctagactaatcagatgggacaattagctacacaattgaatcaacaacatgcccagaattctgacaagctaccttctcaagctggccaaaatctcaaaaat

SEQ ID NO: 156144 - DNA, 376 bp, Glycine max
cctgagactgataaggttgctagtgaacatacaacagatttaatagctgtgttgggaaaggacaatattgactcatgaatattttatcctttaactctagagggttgggtagtggtgtcaagtggtcagccataagaaaaatgaccttgaccaacaatcttgatgttctatgtatccaagaaacaaaaatcgaagccattgataggaggatatgtcagtatttatgggctgactgtaatgttgcctcggaatgtgccccttcaattaatcccactctatttttaataagcaatcagcagacctcctcaattaattctatggggaattttgtggaagagagatgggaatggaagctaacatggagaaggaacttttt

SEQ ID NO: 156145 - DNA, 361 bp, Glycine max
  unsure (1)..(361): unsure at all n locations
ctggatggatttgcacgctncacatttgagtatctcagcggaactactttacatnatnncnnnnagngaggnaataggctaaattattgttccagccaatataattattaaaccttanagttaggnttacttttattttttacttaaatggcaagntgatattgngagtttcattaaactcttcacagctcaaatgggtatgaacaactttcaagagttagntcatacttcatagatatgatggnacatttgatgattaaactctttgcattctgaggtttattctttttttggcgaccttgtagcaactattattgccttgaagagatggaatgaaagncttggagtacagatctagaat

SEQ ID NO: 156146 - DNA, 389 bp, Glycine max
acttaaaaagttgggacttttgaaagaatcttcagaaacaagtcacttgaagaattgtgacttttggaaatgtatttttcgaaatcagttactggtaatcgattaccattaaggtgtaatcgattacacatcaacatatgtgactcttcattttgaattttgcaaattaaaacgtttagaagctctggtaatcgattacaagtattgtgtaatcgattacataagtttgaaatactttaaaattgtttaaatataagttttaactcttgaaatttgaaatcttaacattttaaaacactggtaattgattactaccttctggtactcgattaccagagagaaaaactctttggtaatgattttgtgaaaacttcttgtgctactcaatg

SEQ ID NO: 156147 - DNA, 379 bp, Glycine max
  unsure (1)..(379): unsure at all n locations
agcctcanagatgtccaggaaagataaagcggccgaaagaacctgttnctctcccgagnatgacagccaccgctntaagagcgttgaacaccagcagcgcttcgatgccatcaaaggatggtcatttctctgggagcgacgcgtccatctcaaggacgatgagtataccaatttccaggaagagatagttcgccggcggtgggcatcactggttgcccccatggccaagttcgacccagacatagtcctcgaattttacgccaatgcttggcctacagaagagggcgtgcgagatatgagatcctgagtgaggggtcagaggatcccgttcgatgcagatgctattatccagntcctgagatatcctttagagctggaa

SEQ ID NO: 156148 - DNA, 423 bp, Glycine max
agcttgcataatatacatgctccccctttttcattcaaattcttcttgacatcatcaaaatcttcatgatttacatgaaattcaaattcaattgtgaagagtcacatactttcataaaaagccttgtgtaatcgattacaaggatttggtaatcgattaccagtgtcaagttttgaacacaaatcaaaagatataactcttccaatggttttcaagtttttctaatggttataactcttccaatggttttcttgaccaggcttgaagagtctataaaagcaagaccctgatttgcatttaaaaaaacttacaacctttacaaacaacttttccacatattcttttacaacctttgaatctctttgaacatcttcttgaacttcttcttcttctttctttgcaaaaagctttctataagtttct

SEQ ID NO: 156149 - DNA, 450 bp, Glycine max
  unsure (1)..(450): unsure at all n locations
tagaaactaagctnagatcctaaaaacctgattagaggcagcctaatcctacactagcctaganaggccttcagattcattntgtgtgttcattggtgnatgatatgagatgaaatgcaaaggttgggacttgagttagntgtttatgatggaatgagcctaaacacttgagcttgagagaaacaatgactgtgtatgttagttgaggctctaatgagtatgttcctatctggatggcaaaaagagcgaaatgaccataatttgtctccgcatgtcatcgggctcgccgcctctagatgactaaagggcgcataatgaccataattcgtctctgcgtgccatcggacacgagtgtctccaaatggcgaanaaagtgtgcggaatgaccataatttgtctccgcatgtcatcaggctcaccgcctctagatgacaaaaagggcagaatgac

SEQ ID NO: 156150 - DNA, 424 bp, Glycine max
agcttccatcttcctcttcacccactctttatgtgttggccatctccaacatgagattcaacagcactgcgcccgcttagtatctctagcaaaaccaccccataactatagacatcactcttctctgttatgttcatggagtagccatattctgcattggtgataaaacatggttagaattttaaccaatagcaataaataacaaaatatggatttgtgcacattcttcctaatttggatgtcatgtgactattcaagtctgttcttcctggagcaaatctaagagcattgattttgtaaattatgtaaaggatgtaagaatttaaataaggttaagaaaaaggtaatgaaagccaagtggacttgcctggggcaatataaccataggaaccagcaactctggacattgcatgatgataagttg

SEQ ID NO: 156151 - DNA, 265 bp, Glycine max
  unsure (1)..(265): unsure at all n locations
tgaagtctcatgattcctcataaggtccacgatccatttcacaatccgctgatagattctccacatcttctgacctaaatcatcatcctaggcaatccagagctagaattcccgctccggctgacaagtaaacaagcccaggaaagagactatacaaatgacatgtgggttataataataatttataaaaaaaatgcacaacacataaacattggatagatgagattttcagcatcagctattgaactttntagacagtaaaagc

SEQ ID NO: 156152 - DNA, 428 bp, Glycine max
  unsure (1)..(428): unsure at all n locations
agcttatgcgcatatttccctacaattgtttcttgcccaagacattctattaaccgaaaaaaaatgcacccatatacaatcaaggcagctttgttacctagattatttacacgtacttccaaggtgtatttgttacttacatcacacacatctccttggctaaattcacatacatgcatactccaagcattttggggtaccaaaaattgcacatgtgcacatcttggtatttctaatacctatacatacacaaacttcatgatgaatcttgactatctacacaataaggtgctacatttcatgccttttttcaagtttttgctacctaaagccgcatgcaaattcaagcatattttcctttgctgactaaaattgtattcaaattatatatatatttttttggaatatgttntttttttttcacataa

SEQ ID NO: 156153 - DNA, 314 bp, Glycine max
  unsure (1)..(314): unsure at all n locations
ccatcacgaccatcgnctccctttccatcatagaaggtaccacctgagccgccagatccctccaccttttgagcgagttctttgaaagattccgccccctttttgcaaatgttctgtagtagcatcctatccggaaccatatcaaaattgtactgatactgcctaacaaaggcaaccattaggtccttccaagaatggactcgggaagattccaagttagagtaccatagaacagctaccccacgaagactctcttggaaagaatgtattagcaattcctcatctttagcgagttccccatcttctgacataca

SEQ ID NO: 156154 - DNA, 386 bp, Glycine max
agcttggactgtgctagagagaaattctttgaccaaagtgaacaaagagccatttctagggcaaatttgggtgttgaagagtcaaattttgattcggtgagattttaggtgtaaatccagtttgaacaagtctaaatggatgttatggactggtgtgaggtgagagtttgcctcaaatttacctcattctaaattccacttttcaaacctagaaaacccattgaattgaggggttttggacacctagattttgtgttgttgtggtttgaagcttggctttggtttagacatgattgatacatgatttgggacttgtaggaattgatttgggcaagattggatgagaggaagtgtgattttcgaaatctgcacttatgcagaatttt

SEQ ID NO: 156155 - DNA, 455 bp, Glycine max
  unsure (1)..(455): unsure at all n locations
acctatgaaactcagctnaacatcagaccacttccagagtgctggaactacttctccgtgtcttgatggggcctatgcaagntgaaagccttggaagaaagatgtatgcctatgtagntgaggatgatttctccagatttacctgagtcaactttatcagagagaaatcagacacctttgaagtattcaaagagttgagtctaagacttcaaagagaaaaagactgtgtcatcaagagaatcaagagtgaccatggcagagagtttgaaaacagcaagtttactgaattctgcacatctgaaggcatcactcatgagttctctgcagccattacaccacaacaaaatggcatagntgaaaggaaaaacaggactttgcaagaagctgctaaggtcatgcttcatgccaaagaacttccctataatctctgagctgaagccatgaacacagcgtgc

SEQ ID NO: 156156 - DNA, 411 bp, Glycine max
cagcttttaaactttaaattcaaatttttattatttggtaccaatagtattaacttttggtaatcgattacatgccttggataatcgaatacactggtttaaattcaaattcaaaatttataaaactggttcaaaaattattttagttattagtaatcaattacatcctctagtagtcgattaccaaagagaaaacatcttatttttgaaaacataattttacttacaagtttttgtaagatattttcctctgtcaaacttgtgcagcatcatctaagaaattcttttcaagatcctatgaactaagtacatcgttcttcttgaatttttttattcttgacttagatcgtgctcatctttgacatcatcaaaacttcatatcatatatgcttctgcaatacttttttcact

SEQ ID NO: 156157 - DNA, 311 bp, Glycine max
  unsure (1)..(311): unsure at all n locations
tgataatgaccttattacatctncggaaaagtgaaaaaggaacaagaaaaaaaggataccgaatggntgtgtatgtgccgaatactagcactaggcttacaaagnttcacacaatgcttatttgcttccagtataagcacataaagctcctcctgaaatatataagataccatggcattcttttagaatagtggcaagcaaaaaagatggaagcaatatgctgatttaaaagntaaaaaatcaaagcaacatggagatttagcattcttattttatgttgatctcacagagcatgaacaaagagaacaaac

SEQ ID NO: 156158 - DNA, 289 bp, Glycine max
  unsure (1)..(289): unsure at all n locations
gcttaccagaagcgccatcagtggacttngtgntggtgattnngnctgagctatcatgaataaagatcgtttacccactcattaatacaactagcttattgctagcaaaaccgagtcatattcatagccctgatgctttcaatgttaatttccttattgcgcgaatgcttcttctgatgatgagatggcttttgatctgaggatgaatcttctcccacctgaaaaggatcctgcagcgccagattgaccaaagttgaccaaaaaaagctatcgcgcccatttctctaca

SEQ ID NO: 156159 - DNA, 272 bp, Glycine max
taaaaaataaagcaatttaaatgtaagataatatatatagccatggcactagaaatcaaactttaaaagtataagacccaacactataatagaaaaaaattatggtcggtcgaaaaaatatatcccaatcaaatatatgtatgtgtagtttcattacacccctttaaatacaatatttcctcaactgataaatatctttgctaagtattttcacatccaagcttcattaatccaaaccaacctcagggagctacatgttcaatcttgcccca

SEQ ID NO: 156160 - DNA, 369 bp, Glycine max
  unsure (1)..(369): unsure at all n locations
agctttgcataccccaaggatccattaggatanatttgttaaagagagccataagggtgggctcatgggccactttgggatagacaacacccttgtcttactcaaagaaaagttttattggccccatatgaagaaagatgtctataagcattgcactaggtgtgtggcttgtttacaagccaagtctacggagatgcctcatgggctatacacacccttacccatcccatctgcaccttggatagacattagtatggactttttccttgggcttcctacaacccaaagaggtgtagatcctatctttgtggtggtggctaggtttagcaagatgtgacactgtatatcacgccacagcgtggatcatgc

SEQ ID NO: 156161 - DNA, 242 bp, Glycine max
accctaacagcccaaaaagaaaaagccaattaaccacctattttttggagcaagtgtgctaccaatccaagccgaaattgcttgcatcaatgccaaattaaccacttatttttagagttcttatcaaggagaccttacatgccttattaggcctggaatagaatcacatatcccaacaattgtacagttcaacacatattcatccacttagaataatcgaaaacaaataactccgagaacta

SEQ ID NO: 156162 - DNA, 384 bp, Glycine max
  unsure (1)..(384): unsure at all n locations
cacgaaattntgtgctccaaatgagttttgaaatctgaagtttaatattcaaattatcaaagtttcaaaaaatgcacacacatgacctctttttatagcctgagtgtcacacaaaattggagggaaatttgaatttcaattcaaatttcacttgaatttgaaattgaatttgtggagccaaactttggagccaaaatttcactaattatgactagtgaattttagttatggttcagcccaataatccaagatcaattccaagattctccactaagtgtgcttaggtgtcatgaggcatgtaaagcatgaaggacatgcacaaagtgtgactatatgatgtggcaatggggtgtagtaagcaaatgctcacctccccctctaaaa

SEQ ID NO: 156163 - DNA, 210 bp, Glycine max
ggactcagacaaagggatcccgtagcaccattcctttacaatgtagtagcggaagctttgagtgggttgatgaagaaagctgtggaagaaaacctttatgaaagtttctcagcaggagccaatcaagtcaagataagtatcttacagtatgcagacgacacaatattttttggggaagcatctatagcgaatgttaaagcaataaaagct

SEQ ID NO: 156164 - DNA, 420 bp, Glycine max
  unsure (1)..(420): unsure at all n locations
agctttcttgaganaacttccttgagaagctagagcttatctacacacacccctctcataactaagctcacctccttgagaaacttccttaagaagattcctaaagaagctaaagcttagctacacatacctctctaatagctaagctcacctccttgagatgagaagctagagcttagctatacacaccctataatagctaagctcacccccatgacaaaaacatgaaaatacaaaaaaagtccttactacaaagactactcaaaatgccccgaaatacaaggctaaaaacctatactactagaatggccaaaatacaaggccagacgaaggaaaaacctattctaatatttacaaagacaagcgagctcatacttagcccatgggctcgaaatctaccctaaggctcatgagaaccct

SEQ ID NO: 156165 - DNA, 368 bp, Glycine max
  unsure (1)..(368): unsure at all n locations
cagcaatagtcgaagcgaagatggagaccttatcagagaggttagcacatctcgaagctaacagatataatccacaacaagcacaaccagaagcgacttcattttcggcatcaagatcacacacagcgtcgcatcggatgatactagatgtgccgagattcaatggctctgacgccacaagctggatcttcaagataacgcagntcttcgagtatcacacaacaccagatcatgagagactcacgatcgcatcattctatatggaagggtaagcattagcatggnttcaatggatgcaccggaatggtcaattatcgncttagccagcatttcttcatgctctncattcgcgattcgcatcaaccaca

SEQ ID NO: 156166 - DNA, 375 bp, Glycine max
ttttctgtcctcacaacaccaagtgtctccccttatacactttgcatcctcactttgaaccaacatatttgtactcttgtgatgtcttctcccctatctcgaacctttgtgtgctcctaaccatagctctgatactattgttgggtaattaatgccctcacaaataaaattacccacactcacaaggattgtgagaacacaacaaagactagaccgtaggaaaaataataacaaacacaagaatttaacgtgatttgacatctcttgcctacatccatagaaccgtctcaaaaaatatttcattatcacaaaaatgattacaagattgtaacccaccctaaataatgtatcactctacacacctgagtattctat

SEQ ID NO: 156167 - DNA, 445 bp, Glycine max
  unsure (1)..(445): unsure at all n locations
caacctctcaagtgcatgnaaggttattagctctgcaaggaactacttctctgngaagncgccagactagaccggcgtcaatctaaagncacagagagctaaagaattnaagagggttttggaacaaaaccagaccctcaaagatgtaaacttgtccagatcatgccttaaagacaaaggcattgagtatgtagcagctggtctctttaagaacagaagtctgcaaaccttacatcttagcgagaattggttcaatggagtaagagtggagcatctactatgccctttgagtagattttcagcactgcaaatgcaagccaacactactttgacatgtgttacttttggaggagggaggacaagaatangaaaggatggtctagctgctattatacagntnctaatcagccatgaaacagtgaagaagntggggattcatgatgat

SEQ ID NO: 156168 - DNA, 343 bp, Glycine max
  unsure (1)..(343): unsure at all n locations
agcttnttatcgcaggtaccaaccatgctatgttcaccgaccatgataaggtgaacatcctgaaaaacacctctttgttccaaaccctgaatgagtctccccacaatggcatcaatttccgcaacggcttgagtgatttgagaatcatcagggccaacctggtgaccctgatgatcagggtcttcaaaatagagcgtaataaaggaaggaacttgatgagagggtaaatcgaaatagctgagaacagtgtctactctgtcctgaaaggggacggattcgttgtagggctggcaaaaggctttagggcaagtccaggggcctttgggtacctcggagccgggcc

SEQ ID NO: 156169 - DNA, 412 bp, Glycine max
  unsure (1)..(412): unsure at all n locations
tggagagagagttntcattctaattgttctgtgtttccactccatacgtttatgcaagggnaggcctaatnaactttgatcttcttttctctttaaaaagagaaactaagataaacataattntaagaaaaacaaaatttaaaaatgcagctnttttttaattaagaatttggactatatgatggagcgaatgggattctgcctcaaatggaagagatggattaaagcttgcaaccaatcagctactatttccattcttataaatggcagnccctcaaaagaatttgctccaacaaagggcttgaagcaaagagaccctttagccccgttactctttaacattgnggctgaaggtttgaatggtctgatgaagacagctctgaacaaaagcctttacagcagctacctggta

SEQ ID NO: 156170 - DNA, 421 bp, Glycine max
  unsure (1)..(421): unsure at all n locations
agctnttaatggaagtcaagagcatgatattgctccgataccgttcactggtgagcaggtatatcagcgggttcaacacctgaacactgtatttgggaagacccaaaagaaggataaaagtcagagttgcatatggaagaagaggtccattttctttgatcttccgtactggtgtgatcttagacattgtattgatgttatgcatgtggagaaaaatgtttgtgacagtgtgattgggatgctccttaacattcaaggcaagacgaaggatggcttgaatacccgtcaagatctagctgatatgggtataaaagcacagttgcatccaaggtctgatgggaagaaaatttacttgcccccagcctgccatactttgtccaagaaggagaagataagtttttgtcagtgtcttcgtcgggtg

SEQ ID NO: 156171 - DNA, 250 bp, Glycine max
gcagcgttattaccgaagcagcttcatgtaagtttctctagaagcttcattaagaagcttcctccagaagcttcctcgtggcttctttgagaagctagatacttatctatccacacccctctattaactaaactaacttccttaaaaataattacagatgaaaataacgcaacaaataatcaaacatcaaacataattactaataatatatagatatatataccagagtgttacactcccagacagtctc

SEQ ID NO: 156172 - DNA, 433 bp, Glycine max
  unsure (1)..(433): unsure at all n locations
atccttaagcacctgggctgcagctctaganaactgcgcctctttttatatgggtcaaccaaaagagagaccaagaaagatattgcaggaaattgttaagacaaatctcatgattaataccaatattatgctagttcgagtagaattaaattcacatttgttaaataaaatatagcgttcaagttttatgatgaaaaaagaaaaatattaattgaaaggaaaaatttcacaaaaactaatcaattatattgcaggaaaaacttacatatttaccaaaaataaaataaaaaactcatgatagatcatttgtcttcaagatagtctttggctgagtcaaatggttntgtgcgattcatttaatcaacttcacataactagataagacctttttgttgtttgccctaataggggtccaccatcccttagtttaatg

SEQ ID NO: 156173 - DNA, 301 bp, Glycine max
  unsure (1)..(301): unsure at all n locations
tacccgccatagatagatttctttgcttccattttgtaagtntagcctcgcatttgctaataatgggctgccacacagacctatttttaaagctgacccctacatgaattcctatgtaagacaatggaatatccatttgactacaattgagagaagatgctgcctccctacaccagtgctcggatttgcccaaacacccaaattttctcttattgtagnctatcttaagaccagagaccaattcaaagcttttcaagatacactttagaatattccccgtatcttctccatatgcaatggc

SEQ ID NO: 156174 - DNA, 426 bp, Glycine max
agctgtccataaaatgggggtgatgtctttatttcaatttctcattaagtaaaatggatcattttcaaggtccaacgccttaaaatgatcacctcttaagtaaaaaaaagagtcgcttgataagcaagaactacgtaggtctgatttcctcatcgcaattgaggatacgtaggagcaaaagccccgcttttgtcgaccaccccaagagatcgttaatggtccaatgccttaacgtttctctcctttcaaaaacaagagatcgttaatggcccaacgccttaacgtttctcccctttcaaaatcaaaagaccgtttaatggttcaacaccttaaatgaccttttgttcaataaaaacatattttgcaaaaaaagataaaaacaacttaaccaaacactttgttccgaaagaactacgtaggtctgat

SEQ ID NO: 156175 - DNA, 383 bp, Glycine max
  unsure (1)..(383): unsure at all n locations
tctcccncaatnttctatttataaggggagaagtgatctgtattttttcatccccttaagcacttctctctctttcgaatttgcttggaaaaattgtttccgtgaagaaaatctaagccgaagcgcttccgaaacgtttccgtaaagaatttcgcgaaagttttgaccgttcttcgacgttcttcattcgttcttcatcgntcttcgatcttcaacgggtaagtacctcgaaccaagcttttcgattcattctatgtacccgtggaggtccacattgagtttcgagtatttttattctcgtttcatttactttttataccccctttagacgtgcttaagccattttatttaagncatttctcgcttaacctaaaaataaaata

SEQ ID NO: 156176 - DNA, 419 bp, Glycine max
  unsure (1)..(419): unsure at all n locations
agctntaatgagtttaaaaacatgttgtgtaaagtgttactctcaaacccagggggttgttctacatagacttcctcttatattagtccattgtggaatgcactttttatgtccatttgatataatcttattttagtataacaataaatgacaataaaatgtttattgcctccaaaagagcataagcttttgtataatctataccttcctattgtgagtaaactttaacaactaaccttgccttgttcacataaccttacctgcctcatctaacttgtttttgaacactcatttagcacatacttccttctttccttgggatagttctacaagattccagacaccatttttcttgaattggtcaagttgcccttgcatagatttgacctagttctcatcttccatagcaccatcaacat

SEQ ID NO: 156177 - DNA, 332 bp, Glycine max
  unsure (1)..(332): unsure at all n locations
cctgagcgcaccccacaaatagattagttcacccccattttcgtatcccttgaattgatcacggaaacattacgaaagtgttatagaagcacctcagccttgattntcttcttcattctccctcttttcactaattttaagagaaatatgcttgcccaaagatacagaagcccccaaattccattttatcgcanaatgggggaagagggagcgccctcgcccaagcgagctgggttgcttccacctaaagcgaaaaatgcctagaatcttctagataggcccagatgcgcccattgctagttacacccccagctagataagttcacccccca

SEQ ID NO: 156178 - DNA, 423 bp, Glycine max
  unsure (1)..(423): unsure at all n locations
agcttctttgagaaaacttccttgagaagttagagcttagctacacacacccatctaaaaaataagctcacctccttgagaagcttccttgagaagctagagcttagctacacacacccatctaaaaactaagctcacctccttgacaaaatacatgaaaatacaaaaaaagtccctactacaaagactactgaaaatgccccgaaatacaaggctaaaaccctatactaatagaatgaccaaaatacaaggcccaaaagaaggaaaaacctattctaatatttacaaagaagagtggatccaaccttgacccatgggctcaaaaatctaccctaaggttcatgagaaccctagggccttctttagtagctctagcccaagcctcttggagtcttctatccaataactntggggggtaggatt

SEQ ID NO: 156179 - DNA, 360 bp, Glycine max
  unsure (1)..(360): unsure at all n locations
ctaacaaaaatgaaaactctaaagcctaagcccatctattgtgctnttaaaaccgnaaaaggggacattatgcttgttgcataaatgccagggcgttcctccactcgccaatttcccaactggaaatcaagatggcatggtcggaccaaatccgaagtacttggaacatcatcttcacatatcgcgaacacttgaccttcgtctcccagacccgcacttataaagcttctacttatgtggcaaggcgggcttccttcactttcttgtctccaacgcgagctctgaccactgtccttccttcccgcgatgcttcttttcatgtccgcctgagtgggcttatagcctaaaccatacttccca

SEQ ID NO: 156180 - DNA, 446 bp, Glycine max
gtcccggatcttaagtcacctgggctgcagctgcatcggagacatagggcatgttatctaataaatgtgggttggataaattcacctgattgataaagaaaaaaataaaaaaagtaatacatcttaggcaaataagacatgttaggtcctaacattctcatctcattgaatttcatactatttcttttgttttttattaatagttattattttatattcagctcttttaaatttatcttttatacatcatcttatcttttcttcttataaattggaaattatacaacacaaatacaaaacaaagttcttgtggaaatcgatatcgaacttcccagtctttactacttggacatttggtacactttccaaacggttaacaatacacataagggaattttcctacaccaaagaaaatatactggtggggttttgaaacactttaatat

SEQ ID NO: 156181 - DNA, 336 bp, Glycine max
  unsure (1)..(336): unsure at all n locations
ctagctatgaggggcactgagcaacattctattatatgttaatagcacaaaaagagctaatacttttagatgcttactctaactaacctataattagntaaccgggaaatcctctgctctgcttgaagagatctaatagcttttgtagatgctcaacctgtagntagagttaacaatagaatcataagagttagcagatgtaagataataaaatctacgaagccaaagcagagagagagatttaaaaaacgttatatttatgacacaacttgagcatgattacattntctcaatgtcaacttgagcataatcttggatatacctgagcacttcttt

SEQ ID NO: 156182 - DNA, 388 bp, Glycine max
ctcaaccttggccagcttagcggaccaaatcagccacagatgcaaaggttgggagctaagcgcttgagactcacagcttagcgcatgaacaaagatgcatttagcgcgagacttgcgcttagcgaaaggactattttttttagaaaatctttttctaatttattttttagtcctttttccttgaaattgaaacccttatgttaatccttcaaagattggatgatatactcctatgtacagactatatagcaagttccaaatgatttaattgcataaaaagtaaagataacagaaattaaaactgggttgcctcctaggaagcgcttctttaacgtcattagcttgatgtttttacctcactgggtgatcttatgttttggttcctact

SEQ ID NO: 156183 - DNA, 463 bp, Glycine max
  unsure (1)..(463): unsure at all n locations
agctaaatntgacagaatagaagaaggagagcctgnnnatactactatgtaccaaaggnaggnagggaggctaatatacctatcccatactagaccagacattgcatttgccataagtatgagaagtcagagcatgcactctcttatagaagaacaccttaatgatgtcgataggattttatggtacttgaaatccactccaagcaaacaccttttgtttaagaaaaaatgatttgagaaatgtagagtcgtttacagatgctgattgggcagagccagaggaaaatagaagatcagcttcaggatattggaaaagggttggggtactctagtcactaggagaagcaagaaacattaatctgctgtagctcanatcagtgcagaagcggaactcagaagagntcttgctcaaagaaactgcgagctgatttggctaaagaggctgatggatgaattgaaatgc

SEQ ID NO: 156184 - DNA, 430 bp, Glycine max
  unsure (1)..(430): unsure at all n locations
agctttgattccacttttttcaatgtttgttgtttatcaccaaactgatntatgttccattcttttagtcccccccccccccccaaccagttacagaatttttcatcctgcagtcctgcactactttcttgaatgatttatcctcaagccagcaatcaaaaacccgaaatggcttcggccttcaatcagcactaaaggattgcaacaagcaatgattagaaaattacggtccaagattagctgaatgctgtctagccatttggaagaccactctgccgagacaaggatcctatcaattttgcttttagttgtctcatttagtttgcaccacgtaaattttcaccccacactaggcacgccctcaacctccaagtcagctatccagtcattaaattctttcaagctacccccccatcctttgacacactcc

SEQ ID NO: 156185 - DNA, 354 bp, Glycine max
  unsure (1)..(354): unsure at all n locations
aaaacccaatcgagaatcttttataactctaacaacttcctaatcatcaccaactacacatatgaagatctcataatgtgggatggaaaaaattttcaagctcttcttcaagctatggntagcaattaactaaaatgttctaaaaagctcctcatcctccaaattcatgtccaatttaagagatcagatctacattcaaaatagattaaaaagaaaaaaaatgttctaaaaatgatccagatctagaaccttcttaatccaaacccatgaaaccctaagtttccacccttgcttcccctaaacccaaactcaactcctcaacagccaaagatgagaaacccncttctcatacca

SEQ ID NO: 156186 - DNA, 375 bp, Glycine max
acatcttcatttgaggataaagcatcaagaacatcttcatgctgaacataaaagttttcatgtttataaaaatcataaatcattatagatatgaattattttaaaatttgataaatttatcattacactagtcggtaaatataaaaatttaaatttacactttaacgatgacatatattaaatattaacatctacttatataacatttacgtgatgaatacatatattatttatttttaaaatttaatatgataaaattatgttaaatttttaatttcaataagcattaaataaaatattattatcaacataaatcttaatcttaataaaacccaaattgatgtaatataaaatgaaattcagtgtctccttatt

SEQ ID NO: 156187 - DNA, 366 bp, Glycine max
  unsure (1)..(366): unsure at all n locations
acttttaaccctgaactccgaactccgaaacctggacggcttttcaaatggcctttatgttttttactcgattactaactacaactctatactgaagcttaatcacactagcgtggctaaaattctttctagntcgnttattattttgagatactcaagcatatcaaatgatacgattacagnatactatcttatctattttttaagatttttacgtaaaaaatttaaaaatgcaacaattnttttattctaataaaataattaagtagcatgggatctcatcttttatttctacttcacaataaatatacatgtaaaagacaaattaacattatcttaaatggtaaaaatgacaaataaataaaa

SEQ ID NO: 156188 - DNA, 385 bp, Glycine max
acgcgcaattgaactattttcataacatcagcgagcaatgcaaaaatactcaaataataatgacgatattttttattgagtacaaatttatgaatacaaaaatgattttaccaattagtactctaaagacagtggttaaaaaattaaaagtaaatattttaattaaaaatataataatatattttacattaatttaaataaaattttatctatcgatttcttaattattacttttaagataatagataacaaaactaatacttctatttattagtttaaactaccataaatatccaaaaatatgaaatcttatttagtatttagttagttattgcaattcagagtgaagcggacaaaagagggcggagagttgaatctgaagtca

SEQ ID NO: 156189 - DNA, 404 bp, Glycine max
  unsure (1)..(404): unsure at all n locations
agctntacagcagattgtagtaatgacctattaacctagaattaaaataacttaatgccattaacctaaggaattaaaataacttaatggctgagtgtaactgaaattgtggcaaccaaaagtcacccccaacagccaacaagtcagccaccatttggtctcccaaaaggctgatgcctaggttgccaattgggcccttattacaacttgaactaaacctaactaaagcccttttagttgattaacccaaaacaaatttttggtcagccaactttacaaggattgggccattatttagacaaactaaacactctaaaattgaaacaaagtggtgtcatttagtcctgctccatttgggccatgatacaactcacaaccttggacttttctccttgaaacttggg

SEQ ID NO: 156190 - DNA, 437 bp, Glycine max
  unsure (1)..(437): unsure at all n locations
actcagcttctaaggaggagagctagntatgagatgagagagagagtctagctctagctnctcaaagaagnnnnctcaaagaatctntctcaagaaagcttctcaaggaagctacctagtctataaatagaagcatgtgtaacacttgttagaactttgatgaatgagagtcttgagagacatacttcaaagntccacttctatacctcttttattccttcaatttcgagctcccccctctctctttctctccctctttcttttcctccattgaagcatcttctccaagcttcttatccaaagctcatcttggaggagaagctccttcttccatggcttattccttaatggatggcgcctcctctcacctattttcctttgtcttccgctgcatctccatggaggaaaatcaccattaaaggaccccattgaagctc

SEQ ID NO: 156191 - DNA, 427 bp, Glycine max
  unsure (1)..(427): unsure at all n locations
agctngcaatagtcttctcgtttatgatgtttattgcaacgttcttggctaatgtaaatctgatcacaccaagagcttgtcgatctagcaagttccattcttcttgcttcatgtcgtctggcttaacccctgataagggttgatacaacttcttctgatatagataatcctctatctgcatcttccaaaagctgaaatctctgccgtcgaacttctcgatcttcatcttcccctgttctaatgccattgttcccactgcctcctctaaactgagaagactcccactaattcctctaaattaaggaaatcccgtggagtaaacaaaagctcttgataccagttgttagtatagaggaataagaagaaaagaaaggaataaggagaaaagagagaagacacaaagttttaatgtggttcagcatacaat

SEQ ID NO: 156192 - DNA, 252 bp, Glycine max
  unsure (1)..(252): unsure at all n locations
tatttctattgcttcccagatgtttaaatctattgcttgaatgaaaaacttcatattggttttccaatagatggaaccctcaccattgaagataggtggccaatggatggaatttccttcaagaaacagagaatttgaagaggccatgaatcttgaagaggctaaactttctataagatacctgctctgataccactngnaggataaagaggcctcggaattatttagaaaggggagggggggttgaattaa

SEQ ID NO: 156193 - DNA, 415 bp, Glycine max
  unsure (1)..(415): unsure at all n locations
agctntgcctttagggcttgtacctcatctctttcttccgaagctttaacctcattgtctctcacagtctttagatttgggagccaatccaatccttgtgtccggattctcagccacttatgatagcctccgatgatcccatcactgcttcccctaagctctctgtcctttcttcacgccgcctcccatgccttgcgaactccttggagtaccctcgcgttgtggtcactgaaacctcgtgcgatgaaaggcgtgatgctttcgtctgatggcactcctctcattggacatccttcgcatgaagatagaatcctgattcttccttccttctagcgagggaaccatttaacagacgcccctccatgctagccaagagttggtcccaattcgcctttcctttttcgacgcacgagcg

SEQ ID NO: 156194 - DNA, 326 bp, Glycine max
  unsure (1)..(326): unsure at all n locations
agctncttcttatactagggcaagtccctaacttcatcgattaagttcaactccataggtaggttctcatcattgaggacttcttggaatagagctcttctagatgaaggttcaccgacctagataggaatcacgacatcagagatataagtcaatctaaaaagagtctcctttgtttttgattgaagagagcaattggattccatccacttcttcatgtcgntgaagatgaccttgntggatgtctctacatgcccgntcatctaaaggtgtttcactgaagatatagaatgtttgaccttgagctattgaaagaactgctcata

SEQ ID NO: 156195 - DNA, 429 bp, Glycine max
agcttctataatatgcgaaaacgatgtgttattactatttttgaagacgcaccaatgttgtactagttagatcctaggcggcattaatgcaaagataatgaatttgttggttaagtatccatctctttatctaaaatctaacaaaattcagcaggaaaaaaattcacccaagagaaaattattttccatttggagaaagactgcttccctcaaattagtaacatttattattttcatgacactacaacaattttttatgagaacaatcttattatttgagttagataaattattataaattaaaaaaatcaatttggagaaattcgtctctttaatgacaaataaaatcaatttgttaagtatatatccatctctttaattaaaatctataaattcatcagaaaataactgtcacttaagagaaaatta

SEQ ID NO: 156196 - DNA, 349 bp, Glycine max
  unsure (1)..(349): unsure at all n locations
nnctgatctctggctncagcaagagaagagagctcctccttcttcatgctgnccactntntagctcagattcagcattatttccttgagatccatctgtcatttgatcaagcaaatagattgagcaaagaccataattgacatgaaatggattaccaacacaagtagttgaactaagcaagaattgagaaacattacccaataaatctccagatgttcctgcaaaagtatgcaatggtttcgaaagttatcataaaaacaaaaaaggtttgcaatatttctcactgtttaccaacttcattgaacaatgaaaggtcataacaaaataaaacaaatatatccactaacct

SEQ ID NO: 156197 - DNA, 399 bp, Glycine max
  unsure (1)..(399): unsure at all n locations
agcttctagatgagttatgtctgcgaanctgatatcctgngaaaagntatgaccatttgaatttctcgagtgcttccgttgtttaatttcaagcgtctcgatattttatgtcctcaaatcagacatcggagcgaaatgttatgaccattcgaatttgtcgagagcttccgtttttcaatttcgagcgtctagatgagttatgtcaccgaatcagacatctgagtgaaatgttatgaccattcgaatgtgtcgagagcttccgttgttcaatttcgagcgtctagatgagttaggtcaccgaatcggacatccgtgtaaaaagttatgaccattcggctttgtcgagagcttccgttgttcaatttcgagcgtctcgatatattatgtccccgaatcgga

SEQ ID NO: 156198 - DNA, 317 bp, Glycine max
  unsure (1)..(317): unsure at all n locations
tcatgagagagncanagatcaaattgagatgaantctttatctatgctaaacaagccaacaaaaggagaaagaaaggtgtcttcgaacccggataaatggtttgggtgcacatgagaaaagaaaggtttccggaacaaaagaaatcaaagcttcaaccaaagggagatggaccatttcaagtgcttgaaagaatcaatgacaatgcttacaaagntgagctgcccggagagtataatgttagttccaccttcaatgtctctgatttatctctttttgatgcagatggagaatccgatttgaagacaaatccttctca

SEQ ID NO: 156199 - DNA, 421 bp, Glycine max
  unsure (1)..(421): unsure at all n locations
gctttacagcaaatgcgactactccaagttttctttctatatgttgacaagaaaacacaagtatattcactaggaaaacattgttgtggaaggaaattgtaatgctgtgattcaaaagatccttccacctaagcataaagaccctgggagtgtaaccattccttgttcaattggagaagtcactatgggaaaggctcttattgatctgggagccaatattaacttaatgccactctccatgtgcaaaaggttgggagagttggagatcatgcccactaggatgactttacaacttgttgactgctccattaccagaccatatggagtaattaaagatgtgctggtcagagtaaaacattttatcttcctagcagactntgcggtaatggatatctatgaagataatgacattcctgtaata

SEQ ID NO: 156200 - DNA, 454 bp, Glycine max
  unsure (1)..(454): unsure at all n locations
ttcactgcacaaagctcttaatatttgaagagtttccttcttgtcctncacctgacgaagacactgacaaaaacttatcttctccttcttggacaaagtatggcaggctggaggcaagtaaattttcttcccatcataccttggatgcaatagagattgtatacccatatcaagtagatcttgacaggtattcaagccatccttcgtcttgccttgaatgttaaagagcgtcccaaccacactgtcacaaacatttttctccacatgcataacatcaatacaatgtctaacgtcaagatcacaccagtacagaagatcaaagaanatggacctcttcttccatatgcaactctgactnttatccttctttagagtcttcccaaatacagnattcaagagttgaacccgctgatatacctgctcactagtcaacagtatcggcgcaatatcatgc

SEQ ID NO: 156201 - DNA, 374 bp, Glycine max
tcctccttgaagtaacctgcagaggattatctgaatatggtggggacattaagggtgttgccatgagcctacagatataaaacaaattcagttaggacaaagttagttatgtaatacgcaataagttgtaaatttaattacaaatttatgcattacaattatgcgacatggaataggtatatggtactttatgcttacgcagttacgtaggaatgttctcctataaaccctcgtcatgatcaatatgatttacatatacatcatcctattgttgttcatcattaatcgaaggcatgtctttggagaaaggcagcatgtcagtgacatcaactgttgaaccatcaagatggtgactgctagaaattgttctccct

SEQ ID NO: 156202 - DNA, 456 bp, Glycine max
  unsure (1)..(456): unsure at all n locations
cttaggagaactaagatcaaatttaaccatatggacatgaacctcctcttatnnnatcctatnctaagccattcattttcgntgatagtntagaataggcatggcttatatctctcttttgagtgacaagttggaagcataaactgagaaaaggaagtctcattctagaaagagcttagcatatatccacgcagatctccaaagcttattgntttttcttacaaagagaatgaaaaaggttatttggaggagtataagggaaacttggctgctaagaatttgaaagctttctgtcaagaatatttgccaaagttttcaaaacgaactgacttgaatcatcttgatcaattcagcactactggaaagntgcctatggagctgcttctctccaccaagaaagacactcctgtaatttggcgtagccttagaggcttgtatcacaaacgcattactttc

SEQ ID NO: 156203 - DNA, 445 bp, Glycine max
  unsure (1)..(445): unsure at all n locations
ttaagcaccgagctgcagctggagattaggggacccatcatattggttctaagtggcgggccggccgaggggcacaacatgtttttccacatccacaatgcgcgcataaacccaccatcccctgttgcccacctccaactgagctcacgtactcccacgtagcccatatcctcgtttctctcaacaccgggtccccatcaatcctcccaagcttccacaacatccaagcaaaacaacattcacacagcacaagctatcacagccaagcaaaacagagcaaaggcagaaaactctgccaaaacaccaaccaaaaatcacagcttttcccactcaaagaccccagtaacaattccttcgatccaattcgttaaccgttggatcgactccaaaattttactggaagtctacagtgcataagcctacattntgaccgttgggatctact

SEQ ID NO: 156204 - DNA, 314 bp, Glycine max
  unsure (1)..(314): unsure at all n locations
aagaagaacaagaaaatggattcctctccctcccttgaagaactgattcaaaacaatggagaatgaaagttccaagttaggttttttttggagaagagaagagataagactttaaagccttggccaaatgaaacttacttaagattaaaggttggttataagatcaaattgaaaacatgaatgactatttgatagccatggaggacctaccaaattctatcatatatgaggatttttccttttgaatttttaaccagaaatgactaaagtagatntaagcaaaaatgggaaaaactacttttgactaaactgat

SEQ ID NO: 156205 - DNA, 370 bp, Glycine max
  unsure (1)..(370): unsure at all n locations
attagtgaggaattaccttanaagcttcatgaacaacttcgttggagattttggttcctccaaatgaattcatcatatttccaaagacattaaggccatggagattccattcctaatagcaccaacaaaccccataaacatcaaaaaatgatccaaaggatcatcaaatgagaaaaaggttctataagggcactgtttttgcagtttcatctttggcctcgctgttgtttgagtctttcttgttgttaggatctccattcaagtcaatatcctctgccattttcttcattgaagactntaaacacccttctactaattagtaatcactgtaaacagaaaaaacctttagaaaatgcattatagattcaac

SEQ ID NO: 156206 - DNA, 420 bp, Glycine max
tcacttaagcatgcaatggttgtgatttgacggcggaggaaaagaaataacttgaagagtgcctctatgaccttgattcctcaaaggaggtaactagcaagaacaatacttaagagttagtagttgagaagaagaatgggaagcctaaattggaattaaaggaactctcgtctcatctgaatgtatgtgctctttgagggtgtaacatcccaatttttcatgtgtggtggtagacagtgttgttgctttgtagtgtgattcggtactgtttctaaactattcaaatggtaaaaaaaatgaaatgttatcataggatacctaggcatgattatactcttaaagtttttaatctaaagtttaggaagaataaggataattcaaagaaaattctctgatcaaataatggtcaacttattaatg

SEQ ID NO: 156207 - DNA, 373 bp, Glycine max
agtaatcatcaaggagtatgttttgaggctttatgtcacaatggatgatctgtgtgctacactcttcatgcaaatatagaagtcctctagcaaccccaattgcaatttgtagcctcagttcccaacttggtttctccagaatattgaaaagaagacttgctaaagtgccattactcatatactcataaaccagcaaccttttttcttcagtctcacaaaatccaagtatacggaccaagtttttatggtgcgtgaggccaatggcattcagttcattcttgaattccttatgaacatcttccaagagaaaagtgttcaaccttttcaccgcaacacgagtatcggaacccatgttgatgactccttcatacac

SEQ ID NO: 156208 - DNA, 321 bp, Glycine max
  unsure (1)..(321): unsure at all n locations
tttctttttctttggactctctaaccattttttggacaaaaaatacctatcttgaaaattaaattttgaaacatatttttgaaaaattttgaccatgcaatacattaacactccaaaaataattttttggtatgtattatgtaagggtatgtcntattaattgatagtttaagagattttatttactcacacaagtgattaaatctatagaaaatgctttaatgaattaattaattgatgtgttagagatgttgatcatgtgttctatgtgtattggagatgtttggtgtgtttgggcctanaggaatggacttttgatgt

SEQ ID NO: 156209 - DNA, 418 bp, Glycine max
ttaagcaccgcggctgcaactctcagagctatcaagaatcttttttgaggtgagcttagttattagaggggtgtgtgtagctaagctctagcttctcaaggaagcttctcaagaaagtttctcaaggaagcttctcaaggaagtttctcaagaaagcttctcaaggaagtttctcaaggaagctacctaggctataaatagaagcatgtgtaacacttgttgtaactttgatgaatgataaacttgtgagaaaaacttcaaagttcaacttctctccctctttttctccttcaattttgtgatccccccctctctctcacattcttttcctctattgaagcttcctctctaagctttttatccaaggcattctcttggtggtgaagcttatccttccatgggttattccctagtgcat

SEQ ID NO: 156210 - DNA, 308 bp, Glycine max
  unsure (1)..(308): unsure at all n locations
tcgncctgagagcttgagatgagtttgagaagtcctagatggggaggagacatccccactacttgtatttctgccatctttcatctttctcttctctttgntagaaaggaagcttcccagntatggaaagctaattttaattgcaaacaaaagtctttaaagcgttggaccttgaaacgatgttgttaactttgaaaagcgaagagaattgttaaagcattggaccttgaaatgatcttttaaatttgaaaagaggatagattcattaaagcgttggaccttgaaacgatatcaagtgactctaatga

SEQ ID NO: 156211 - DNA, 424 bp, Glycine max
  unsure (1)..(424): unsure at all n locations
gctacaaggtggggctatatataacacttangatacacaangttttacaaaccaagtgttgtgggacaaaggaactaagaccataaaactctaacaattctcccactgagggactaagttccaaactctagtagctccttgtaagcgatgagttcattgactctttacctagtgtagtgcattcatcttcaattatccttgaaggccaactgaggcaatgcaaagcctcagcttttcagttgtaacagctttagtcaacatatctgctggattctttgatcttaagatcttcagcaaagataagtctccatcatttatcaactccctgataaaatggtctatgtcacatttgttgaatcttgagttgctcataaactcattaaacctcttgtaccactgcctcggtgcttggttcaagccatat

SEQ ID NO: 156212 - DNA, 273 bp, Glycine max
  unsure (1)..(273): unsure at all n locations
tgcaaaaatcagcacccaatgctaatcantctctcacaattaaagntcacacaactcaccgagttgaggctaatgattaccttcacaatttatctggcaaaccaactaacattttcattcatgtccctaattcatgttctttctcttctaattactgcatacttattcaaagcaagtgatctacgcatcacaattcactcaatccatgcgatcgatcaatgcaattcattcacaaacacaaaattttctaatcaaagctaaccactgcataaa

SEQ ID NO: 156213 - DNA, 352 bp, Glycine max
  unsure (1)..(352): unsure at all n locations
cacctccttgagaagattcctaaagaagctagagcttaactacacacaccccctataatagctaagctcaccctcatgccaaaatacatgaaaatataaaaaaaagtccctattacaaagactactcaaaatgccctgaaatacaaggctaaaaccctatactactagaatggccaaaacacaaggcccaaaagaaggaaaaaccaattctaacatttacaaagaagtgagaatccaaccttgacccatggactcaaaaatctaccctaaggttaatgagaaccctagggccttctttagtagctctagccctatcctctttgagtcttctatccaatacccttgnggggca

SEQ ID NO: 156214 - DNA, 356 bp, Glycine max
  unsure (1)..(356): unsure at all n locations
aacccgagcgtacgcacggatctgtattttttnnnatncaacaagnattagaattntttattgtatgattccattggtcctctctcttgtaaagcattaatcatttgagtcatagaagatgttnttttgaccaataagcacataaacacattagattttgtccttatatggtgagaatagnatatgatgagctgcactctatatagagaacaattatggctatgcgggagatatcttatattgcatgatgataataataataataacaataataataatcataataattagaaaggaaagagatagatattngatacgcacataacaaagaatactaacaacatttctacctcaat

SEQ ID NO: 156215 - DNA, 428 bp, Glycine max
agcttgtctcagcgtttatgcgagacggatctctcatgctagctatcattgccaagtaccaagaagagttaggtctagccgcggcccacgagcataggattgcggacgaatatgcccaagtatacgcggaaaaataggctagaggaagggtgatcgactctttacaccaagaggcaaccatgtggatggatcggtttgctcttaccttgaacgggagtcaagaacttctccgattgttagccaaggccaaggcgatggcagacacctactccgcccccgaagagattcatgggcttctcggctattgtcagcatatgatagacttaatggcccacataattagaaatcgttaggaaacttgtatggtctctcagaccttgactagatatgacttcctttttgaaataaaatgagttggtcccatgttt

SEQ ID NO: 156216 - DNA, 399 bp, Glycine max
  unsure (1)..(399): unsure at all n locations
cctttccttggtttgaagctcactacaagccttaaatgaaaaaaccatgatatcaccatatccttaaagaattttggagctttggaattgtttagggaataagagaggagggtttttgtttcattggataactagntttgnaggctatgcttcatgatgtattttgggcgatacttgatgtatattagatacttggtaaatgttggacatgctgaatcaaatgttgnttctcaaaagctatagagcaaaaaaaaaaaaaatcgaataaagaaaaagaatagcaataaagnttagtgaataagatcttaaatggcacaataatgatgaaactcttggctctactctttatgnnnaagnnntatctttacttctttttattntcttattttttcttaatat

SEQ ID NO: 156217 - DNA, 439 bp, Glycine max
cggaccctaagcacctgcggctgcagcttgactgcggagaaaattatcattgatcttagagagtctcaccactcatataatgaaacatttcattgaagttgtcacctgtgttgagtgctctgcagctacactttatcaggtgtgttggtttgctgcatcattgttacttgctcatgctcaagattttaaattgtgttcaggggtgcggtttcattttgtttcttgatattgtgggaaattgtagacaaatgtggcctatgttgtcacaattgcagtggtggacacccctaaaacctctcaacattgtgggtgaaattgcagacgcaaacgttttttaaaaccttggtcatgcttatctattgtttagccttgcaaattttaagtttatagttagtctgttataaggttacaaaacaatgtcaaaatgcacgagtggatt

SEQ ID NO: 156218 - DNA, 429 bp, Glycine max
  unsure (1)..(429): unsure at all n locations
ctagcacaatngangnnactataccaaataatcatgcttcctcttattacaagcagcagtcaagattcaagaacatgaaaaatagatcatcatcaccatacctcttgacatctgtttccacaaaagaagacatccctggaatcatcagtattggcatcatttgcctcaatacaagatctgagatctacaaaagattaaaaaaaaaaaaaaaaattgtattcatatcaatcaaggaaaagctactgctactccacttgcgaaatgagagtctacttaacaaaagattatatatgtgtaaaggacatacatttttcctcacataataggcatgagagtaactttgagacaataagntcatcattgncatccctttggtttgaacttccactaactgatccacataatttgcaacagcaataaatgcagtgc

SEQ ID NO: 156219 - DNA, 356 bp, Glycine max
agcacagcttcaaatttgggcactttagatgtgtcacacaatcaaataaaagggcaactgccaaattgttggaaatcagtaaagcaattactgttccttgatttaagcagcaataaattgtcagggaagattcctatgtccatgggcgcccttgttaatatggaagccttggttttacgaaacaatggtttaatgggtgagttgccttcttctttgaagaattgcagcagtttatttatgctggacctgagtgaaaatatgttgtcgggtccaataccatcatggattggagaaagtatgcatcaattgataatcttgacatgcgaggacacacctctccggaatcacccattcat

SEQ ID NO: 156220 - DNA, 378 bp, Glycine max
aaaaagcttaattgaaagaataatagacaactaagacaaattaaatgacacatgtgagctatgtatctaacccttcctagtaagaataaatgctctgttcgggtgcttactcttttctccataccttaccatatgaactagaatattgtaatggttcactttcattgtaactaagattcatgtgcagttggtgattacaaatccaagcacccacatggatccgcaagccttgtgccctttgtgaatatttgaccatactctctatttttataaattctcaattcacaatcaatcaaagtgtttcactccacataaatgtaattcaaaaaatccactcctaagtaatttgagtttcagggcggggatggaaaaaccccg

SEQ ID NO: 156221 - DNA, 454 bp, Glycine max
  unsure (1)..(454): unsure at all n locations
cacatagaaactaagctgaagacccaaagccgaaggcttaaagccagggggaaattttattgttgaannnaganaggcaganaagaagagatgacactctctatgatgaactagatcaaacctaaaacaaaagacgtgagagagaaacatgcctagaggaaacaagagaagccaaactaaaaaaagtcatgcactagntgaaagttaaaaccgnagagtttctgaagaggagtaaatgaaagaagttattaaccaagttaagatagaacacttctcacccatacatacttcctccggnttatttacattttaaattacacacacataacaagggagagtattaactgagaacgcggaaagacttactatctggaaaatacagggaaagagccaaaagctatttctaaaccagagtgcagacatatatattacataaagaagaagcaatagaatg

SEQ ID NO: 156222 - DNA, 381 bp, Glycine max
gagattggctggtgtcaagggtaatagcctttacaagtagaagggttgcgagtttgtcgagccctcaagcgtggacaagagttgtccggtgtcgagggtggtaacctcggtaggtgcgagagttgttgttagtcggtcaatacgactaacttttgtgtaaaaaacttgtaaattgtatatgactcctcccatttatggttctttttgtaatattgtaattactttttgataatttaggtaataggcaccttgtatcacagttctgtgtatttaatgatcattccacttcaatttcaggtaaaacaagcaaaattggtgaagtgcagatttcatgaactcgttaagccacttatcttctggctaagtgcatcattcgctaag

SEQ ID NO: 156223 - DNA, 384 bp, Glycine max
  unsure (1)..(384): unsure at all n locations
aaaaccctagagtgaaactgntagaatcccttgaacctaagagatagntatgagtcaagtatatcgaagtaaggaacatcgagttgaaggaagagacctagatccgaagattaagaaatcatgtattctcgagagtcacatgtggactaagattggcagagcattggagtcttgaaacttatacctcttttcttgaatcgtcccattttcaaaaaaaagtcagccatgtggccaatcgtgtttccttgagtctggtagttcgtttcaaattctcatcagagcctcctatgatatnacccaactccaaatagnatggcattcatattctagnatcattgagatgtcattatcgngagatatagagaacacatgacttatgatata

SEQ ID NO: 156224 - DNA, 365 bp, Glycine max
gctcttattttattctatcgatcatagcataactcctccttatgatgaaaaataaactatgataagtatcaagataatactatcatatcctattggataacaaacaataaatgataagataattatcctatcttatttttgtcctgaccatcaaacatattctttaacagttctaggaaagttaaacttagtgtatattatttaggaaattaaaatcaattaatttctcttatagaaaaatacggtgtaatatgtttcaaataatttagaggtattagtatagtgtataaaagaatgatgatataatatctttaaaataattaagagggtgagtgtacggataaaaatgagttggaaaaatttat

SEQ ID NO: 156225 - DNA, 386 bp, Glycine max
  unsure (1)..(386): unsure at all n locations
acctcatgggctcatattgggaaccgcgacaggtagacttgggatattttgaagatatatgctaatatatttagaattttttttaccaaaaaaaagaaagaaagataaagatatacctaaaatttgaacgtgtcttccagagtacaggtcattttaccctacccatttgtttattttaagatcttattaatgactagcttaagaatatattaattaaaaatatgtaatgtattttcatttttaattgctttaaaatagtatattgaacattttttattttaatataaaaaacattttattaaatatgtgttaattntattttttagtntaatttttaaataaattaattaacattatttattttttatttatcattctcctaattt

SEQ ID NO: 156226 - DNA, 418 bp, Glycine max
  unsure (1)..(418): unsure at all n locations
tgcacaagactncaaatncaagagtgcactatctcatnnnnacattaattctctnncacatncatcgnatctatgngcattnttttacaataatatttctcccatttagcaactctaccttatatatgattcaaaaatcacattttcccaatatgttttcttcattaaagntctcagtatgtgccctcaaaacttgaaatgaaagcaacatattaccattgagatgtagtggagaagaaataattccttccccataatctccagttggatttttagcatccttcactctgcatgcttccatacaaccccaagagcaaagaaaacaaccactaccactaccacaattctaaccatgaatgcattattatgttttgtaccattacctttagaacccaaaccacttattggaatcccttga

SEQ ID NO: 156227 - DNA, 414 bp, Glycine max
  unsure (1)..(414): unsure at all n locations
ttaacctcatcgtctctcacagtcnttagatttgggagccaatccagtccttgggttcgaactctcagccacttatgatagccgccgatgatcccattactgcttcccctaagctctctgtcctttcttcacgccgcatcccatgccttgcgaactccttggagtaccctcgcgttgtggtcactgaaacctcgtgcgatgaaaggcgtgatgctttcgtctgatggcactcctctcatgggacatccttcgcatgaagatagaatcctgattcttccttccttctagcgagggaaccatttaacagacgcccctccatgctagccaagagttggtgcacaacaaacaattcttgcgccgctcttttcacatccccggtcgaacgtgtcatacatggccaaaatggcgacgatc

SEQ ID NO: 156228 - DNA, 434 bp, Glycine max
  unsure (1)..(434): unsure at all n locations
ntnaggagtagatacatgggacctacattntattgcanaaatctctttatccagncaaagnctgagagaccatacaagtttcctaacgatttctaattatgtgggccattaagtctatcatatgctgacaatagccgagaagcccatgaatctcttcaggggcggagtaagtgtctgccatcgccttggccttggctaacaatcggagaagttcttgactcccgttcaaagtaagagcaaaccgatccatccacatggttgcctcttggagtaaagagtcgatcacccttcctctagcctctttttccgcgtatacttgggcatactcatccgcgattctatgctcgagggccgaggctagacctaactcttcttcgnacttggcgatgatagctaacatgttggnctctgtctcgcataaacgttgagacaag

SEQ ID NO: 156229 - DNA, 403 bp, Glycine max
  unsure (1)..(403): unsure at all n locations
ctggatgcattgttttactnggtaacccagctggccttgaatcagaaatttgtacctgtcgcaagggtttgtggtttgtgctcctctgctgaccaccatacagacctttgcccttccatgcagcaacctggagcaattgaacagcctgaagcttatgctgcaaatatttacaatagacctcctcaacctcagcagcaaaatcaaccacagcagaacaattatgacctttccagcaacagatacaaccctggatggaggaatcaccctaacctcagatggtccagccctcagcaacaacaacagcagcctgctccttccttccaaaatgctgctggcccaagcagaccatacattcctccaccaatccaacaacagcaacaaccctagaaacagccaacagttg

SEQ ID NO: 156230 - DNA, 332 bp, Glycine max
  unsure (1)..(332): unsure at all n locations
atataacctcctcccataaatacaaacatcaaagtaaatttagagcaagcttatgcgcatatttccttacgaacgttctcttgcacaagacattctattaactaagaaaaatgcacccatatacaatcaaggcagcttcgntacctagattatttacatgtacttccaaagagtatttgttacttacatcacacacatctncttggctaaatttacatacatgcatactcaaagcattttggggtaccaaaaattgcacatgtgcacatcttggnatttctaatacctatacatacacaaacttcatgatgaatcttgactatctacacaat

SEQ ID NO: 156231 - DNA, 428 bp, Glycine max
  unsure (1)..(428): unsure at all n locations
agcttacagggttccataaatagcgtgtttttgttgactggagtatgttttgttttttgttttccgcatacaaatatgtataatcggtagtagttaaatttaaagtctatcacatgttttccattgctaacaatcataaaaccaaaatttgaaattaatgtaatcacatttcaagataacaaccataaaaccagtttgtcctaaggagctgagatttgaaaatgtttttggacatggttttcaaacttaagattaggattccccttctgttttcaaacttaagtttgaggttgcttatgctcttgaagacaagcacaaattgaaagtttgaggttgccaaaatttcagtttttggtgcattcattnttctcaaagttttcttgaaaaatagatttcttacccaataaaaggaaagagaanaagtaaac

SEQ ID NO: 156232 - DNA, 295 bp, Glycine max
  unsure (1)..(295): unsure at all n locations
ggactactcttggtatcttcatgacatgtggatgcttcctctgcagataggtcttgcccttgcaattntgnataagaatgttggaattgctgctattgcaacactgattgctacaataatttccatcgncgncactgttcctattgccagagtccaagaaaattatcaagacaaattaatggctgctaaagatgaaaggatgagaaaaacatctgagagcctgaagaatatgaagattctcaaacttcaagcttgggaggacagatatagagtgaaattggaggaaatgcgtgga

SEQ ID NO: 156233 - DNA, 420 bp, Glycine max
agctttagatggttcaattagtattattttgctttctagcgtgtgtgagtgcatgatatcccacaccgtgcgtaagcaattttttcaccatcaacgcttgatttgatgcaatcaacgttatgttagcacaccaaattataggaccgcaactccttgggtcgtgtaatcctttgaggccgcgaagccaagcgcatgtataatactctcaatctcaaataaaacataattttgtccctcgacactggtcagaggatcatgtacgaccccaatgatcgatttcttggtttgggttactacaaatcttcgtggtagtggcaagggccttattcttcgtgtctccaatctgtaaaagaataataattcagattggaaatgattattattttagaaaatccgtttgactcactttaagaacataaa

SEQ ID NO: 156234 - DNA, 348 bp, Glycine max
  unsure (1)..(348): unsure at all n locations
aaaccgaaggaggataatacttataacataggntttcccataactgatgtcatttttgcctttntttgtctatttgctactataccacattggntttggagagaatagatattggataatggatttcaacatcgatttttataatcgatgttaaaaataacctacttttaacaatggncatttcaacatcgactcaaaattgatgttgaatgtgaaaaaaaatcgatgttaaatgtcaattntgtagtagnacaccaacaatgtaaataagacagacaatagtgaaacagnnatggcgacaaccatataatccagccaataacattgaatcaaaaaagaaaggttatg

SEQ ID NO: 156235 - DNA, 425 bp, Glycine max
  unsure (1)..(425): unsure at all n locations
agcttaaagtatgcccgagtcattcattccttatgagatgttgntgaagtattggcgatcagaattgccattccttggattatagggttgaaccaagctcatgcttttacaaaaaggttcatcaagtcaagttgaaatatggaagtaaccgtcctgcaaaattggggcaaaagatgaattgagtcacatcactgcttcgtctactgccaaacatatttaggattgttgatgtccttgttacttccagtttcaccttgacaaagatgtcatggaccatgttgaaaatctaaattgattcaaccccatatcctgcgtaaaaattcgcaatacttcgactgtacatcattcgtatgcatccatgcttttcattggttgcattgctcattgcattctttccttgaaaaataaaataaaataaaataaaa

SEQ ID NO: 156236 - DNA, 384 bp, Glycine max
  unsure (1)..(384): unsure at all n locations
caaccctnctggnatctgaagatcacttgaaattagagaaaaaaatcatttccatgaagaaaatccatgccaagatgcttttgtaacgcgttcgaaacgtttccgtgggtgattccatgaagattttccgccatctttctttcattcttcgncgntcttcggtcttcaaccgataagttcccgaaatcgaactttttaattcattttatgtaccctaggagagccccacttattttgcgtacttttattttcatttggnttactttccgtaccccccttttgacgtgctttagtcatttatttaagtcattntctcgctaatcaaaaaataaaataaatatccaccgatcatttgaatagaacatctgtaatctttgtaaaatg

SEQ ID NO: 156237 - DNA, 379 bp, Glycine max
  unsure (1)..(379): unsure at all n locations
aagcncacccaagcgagccccttatctttgaatgtcacacgtcatagatagcaaaattcactactagcttgttgcgcctgatgctcctgttatctgacaagtgaccttatgacctttcaatcgggaactatttccatataatcgcgtttataggttaaagctgccgctgacgaaacgggaatcggattttcggggattggcttccagccaaagcggggaatcaaagacatacctataatgccaaacgtggctttttctctcttctcatccttcaagtccttgaactggcgaacacttactgatgtctcagcttgaacatcttgctcatatgtcactttctgactgcatcacgtataacttggcacatcccttaaaggga

SEQ ID NO: 156238 - DNA, 365 bp, Glycine max
  unsure (1)..(365): unsure at all n locations
actttgtgataagttggtggaatttggtgatttagccaagaactagatgtaacctcggtggtagagatgaatcagtataaaattttcagtcttataattctttcctttcatctgtgtttttcaagtgacttagagtgtgtgaattcgattttagataaatgattcagttttttttaaaatttgtttttcaatcgtctgattgtcattttgaaaatttgttatctattttcaaacaattcttttatcataccataaaacttgtttttttcttaaaaaaaaaagttttagaattactaaaatcataatctaaccttccttcctgtgatatttgttntttacatgcttcttgattgtctacgtcacat

SEQ ID NO: 156239 - DNA, 431 bp, Glycine max
  unsure (1)..(431): unsure at all n locations
ggaggggaacgatagagaagtgaacngtctctctcttctttgctacaacaattgcaacaagatccactatccacaatgagagaacaagttttatctaaaattttgcatcttgtatgaaagaagttctctctttgggattgagatagatcaaagagccttgtaatcattaagaagtcaccttcttcatgggggtagacttcctcactagactcttcaccccttacttcatcttcactttcactagaagaaagggaagaagtagtctcctcttgactactataaatgtcttgacccctcataatcatggntttctctatggagcattgagaggcaatgtaacctctcccaagacatttgaagcatttaatgttgctagtccttgctagggaactagtcttaagggaggatntatctatggncttacccttatc

SEQ ID NO: 156240 - DNA, 429 bp, Glycine max
  unsure (1)..(429): unsure at all n locations
gaaactaagctagcagatgctctaactctgattagatgctaagaaattatcatgaccaaaccaggcttaactgcaagtggggtgacacactttagtctccccatgccaccttncatacaaagagcctctttgttcacctctaagcaatttatccctgactttatgtattcatcatccaacctctcaaccccttcttgcactttccttatgttaacaaaatttattcgcatctggccagagaccaccgcatattcatgagcctgcaaagagcgtgggacttacgaagttacgctacctttagaagaaaatatattatttacaaattcagatcgggagaatttatttaaactaaaaaagcaattttaaaatacctcntgctcataagtatacctttcaaaagaattatctatacctatatgtctatataaa

SEQ ID NO: 156241 - DNA, 385 bp, Glycine max
  unsure (1)..(385): unsure at all n locations
acagagatctgtatggtgatctgcaaaagaacatagaccacagacacttgcaacaggtgtagattttttattcatggaaagctgagttaccaggttgaccaaggcatcaagttttccttcaagctttttattttcagtagatgaagatgaattcgtggccatctcatggactcctctaagaacaatagcatcatttcttgcactgaattgttgggagttggaagtcatcttctcaatcaaattcctagcctcaacaggggtcatatcaccaagagctccaccattggcagcatcaatcatactcctctncatgttgctaagtccctcatagaaatattgaaggagttgctcagaaatctggtggtgaggacagcttgcacacaat

SEQ ID NO: 156242 - DNA, 230 bp, Glycine max
  unsure (1)..(230): unsure at all n locations
aaaaatcaccattgaaagacctcattgnatctcccnnntccagcctccatagaatctccacaagcaagcttccatcacctagcatgatcacagattcacctccactccttatgttcccatgaacccaggtataagagcctttctcaactcacagagtgtgcaaatagagctggagttagtgagcatcaaatgaataaatatttacctcatgcatacatcttaaaacgcac

SEQ ID NO: 156243 - DNA, 394 bp, Glycine max
ttttatcagatgaagatcaaatgaatatctactcgttatgagacaacggatacatgaagatgagacctacataaactggaaacttttgaagactgaacaagttgtttgtgtgcaaactttgtcttactcttcttattcaacaagactttttgtattttcttgtatgattagagaagtctcttaaaacaccttgaacatcctgagagaaaaggactaagtgcttagattgtttatgctaagatgattctgtgttagtctctgagcaatcaactacaaatcttgtctgatttgtttagagtcaggaatggcttgatagaacaaagaatactaggcgttgatcaaacttggggtagagttcgatttgtaagaactaagagtagttgtgacataatac

SEQ ID NO: 156244 - DNA, 426 bp, Glycine max
  unsure (1)..(426): unsure at all n locations
agctntttattttcagtagatgaagtttatttcatggccacctcatggactcctctaagaacaatagcatcatttcttgcactaaattgttaggagttgaaagccatcttctcaatcaaattcctagcttcatcagggctcatatcaccaagagctccaccactggcagcatcaatcatactcctctccatgttgctaagtccctcatagaaatattgaagaaggagttgctcagaaatctggtggtgagggcagcttgcacacaatttcttgaatcactccctccagagaatgaggaaaagcctttagaaagatatgatcttcttggacatcggggggcttcatggtggaacaaacaatatggaactccttaagatgcttatgaggatcttcacttgtaagaccatgaaacttgggcagcaaatg

SEQ ID NO: 156245 - DNA, 391 bp, Glycine max
  unsure (1)..(391): unsure at all n locations
tcttatccaaagctcatctaggaggagaagctccttcttctatatcttattccctagaggatggcgcctnctctcacctcttctnctttntcttccgctgcatctncatggaggaaagncaccattaaaagacctcattgaagctcaaagatccagcctccatagaagccccacaagcaagcttccatcagtaacattctaatagcttctagtctagctacaagagcataagtggcttcataatctgttccttcctctaggtatatcctttagccactaatctagccttatttctaatgactattccatgttcatccaatntatttctaaatacccatttagttccaataattggatgagcattaagnctatcaactaattcctatacttg

SEQ ID NO: 156246 - DNA, 424 bp, Glycine max
  unsure (1)..(424): unsure at all n locations
agctntntggagtagaaacatgggaccaatttattttatttcaaaaaggaagtcgtatctagtcaaggtctgagagaccatacaagtttcctaacgatttctaattatgtgggccattaagtctatcatatgctgacaatagccgagaagcccatgaatctcttaggggtggagtaggtgtctgccatcgccttggccttggctaacaagcggggaagttcttgactcccgttcaaggtaagagcaaaccggtccatccacatggttgcctcttggtgtaaagagtcgatcacccttcctctagcctctttttccgcgtacacttgagcatactcgtccgcgattctatgctcgtgggccgtggctagacccaactcttcttggtacttagcgatgatagctagcatgttggtctccgtctcgc

SEQ ID NO: 156247 - DNA, 412 bp, Glycine max
  unsure (1)..(412): unsure at all n locations
atggtcgagagactacccgngaaatcgtagatcgagtactcttatgaagatcgncnaagatcaggtgaaacctttgcgaaattcttcacagaaaacgttacagaaacgtttcaggagcgcctcggcttagattttcttcacagaaacaatttttccaagcaaattcgaaagagagataagtgccaaaagggctgaacccttttcttcttcacttcctcccctatttatagcaaaataagggaagaggttgccgcccagctcgcccaggcgatctcagctctcccaggcgagccaagttgcttcctccagaagcaacaaccttctggaagaatattctagatggcccaagtgggcctgggagctatntgcacccncatttntactaagtacatcccctctgcttttttagtga

SEQ ID NO: 156248 - DNA, 403 bp, Glycine max
agcctcacagacctgcaattctcacactcttttatgttatcactctcgacactggacaacacttgtccatgcttaggggctcaactgactcgtcacccttctacttgtcgaggctactacccacgacttcaaacaatctccctcgacatgggacaatctcgtttgacaatggacaacctctttcgcccacaagccggctcagagcttagggtcttatgtactgtccaagatccacaaaaaacatgtgtcatgttatgtggcaatacaagacacacgtcaaccctccatgtcaaccctggcacaggagcacaaacgatgcgcccttaacagttgggctcctcaactgacaagttatatttaacatcttaattatttgaatatattgtcatctctttatctctgg

SEQ ID NO: 156249 - DNA, 404 bp, Glycine max
  unsure (1)..(404): unsure at all n locations
nagcttctatatacaccatnnaaaaaacattaggaatggtgcctcctctttaanagctnnagaaatcaaactntactactggtaatcgattacaagaaactggcaatcaattaccagagagtaaatactctgataacttagaaaaatttggaaaaaattttcttttaaaacaaaactgagctatgtttggnttttgaaaaatctttttcaatacttccattgagaagtcttgacttgtagctttttggtttcttctcttgaatcttgaattcatcttctcttgaatcttgattcttcttgatgtcttttctttaatcttgatcttgaacttgnagactcaatcttgacatcattcttttgggccttttttcatcatcaaaactacttgaatcatacttgattca

SEQ ID NO: 156250 - DNA, 423 bp, Glycine max
agcttcaacgttcattgtcgagcgtctcgttaatttacgggactcaatcagacatccgagaaaaaagttattgtcgtttgaattagctcagaagttcaacattcaatttcgagcgtctcgatatgttacgggactcaatcagacatccgagtaaaaagtcattgtcgtttgtattggctcagagcttcaacattcaatttcgagcgtctcgatatattacgagcctcaatcaaacatccgagtaaaaatttatggtcgtttgtattggctccgagcttcaacgttcattttcgagcgtctcgatatgttacgggactcaatcagacatccgagaaaaaagttattgtcgtttgcattagctcagaagttcaacattcaatttcgagcgtctcgatatgttacgggactcaatcagacatccga

SEQ ID NO: 156251 - DNA, 419 bp, Glycine max
  unsure (1)..(419): unsure at all n locations
agcntagctgtcactacacacaagctaattttcttcctaccgtggcatacccctgattggtccaagattgtccggtcataccccgcatgagcaccataattttctcgctcataaattatttcatagattatgagtatatgtttactagtctgaacccttaataatcatacaaataatataaaataattagcttttatactgtgatttaatcataaatcatattaatataatttttaaaataattattatataaaaataatatatatgtttggtcagtttttttttttttacattgatagtattagatttgaatataagatctcaatgcgtattaattcaaactcctatctcctgtcgttatgccaaccctaatgatttgtattatttttcttataatttccataaatctctctctagta

SEQ ID NO: 156252 - DNA, 422 bp, Glycine max
  unsure (1)..(422): unsure at all n locations
agcttaagcagtgatcaaatntgttctttggaactggctttgtgaacatatcaccaggattgtgcagagtgctgatcttatgaaccttaattcttctttctgattaaatgaagtgatatctaacatctatatgcttgattctatcatgataaacctgatccttggccaagcatatagcactgaggctatcacaatagatgttagcatattcttgattaattccgagatcatttatcacacctttcagccaaattccttcctttgcaacttcagtaagagccatatattcagcctcagtagttgagagggcaatagaaggttgaagtgttgccttccaactcaccaagcagccaccaagggtgtaaacataccctattagggaccttctcttgacaagatcagcagcaaaataagcataagaa

SEQ ID NO: 156253 - DNA, 376 bp, Glycine max
  unsure (1)..(376): unsure at all n locations
ntatcatcaacaaaggtgggaagnagactatcatgtacttgttgctnttaaaggagggagcacaatccaacaaatgagaatgttagcaatgaatataaaagncgactatttttaacaaatcaataagataagtagaagaagaaatgcatcattcactacatattctagattattggtagttttgagatatttacgttgcaattccattntagaatatgtttcatatttatcgnctttggtagaatactcttaaattttatgtagattggataatacatatgtataaattagntggttttgaaatattaattttcatttttatactagtagagaattatttgaacattctaattaatcaacatataaaacaaacacc

SEQ ID NO: 156254 - DNA, 421 bp, Glycine max
agcttgtattatgatatattaaatttcattttaataattgtattaaaagaatatgattttttagttactttacttaaaaataaatgagttattttatcaataaaaagattaggtgattgatataagaattgctaagattatttaataattatgacagaaagtctagcagttccatatactaatataaaggattacaagattattattgtgaagttgtttattatattagtttggataaaatatttgttatatttgaattggtgatccttgagaatgatttgaactaccatgttttatcttattctatctttaaagaaaataaaatattagataatgttaataattagataaatctagataatagagtagaaaaagataaagaaagaattgattagccaaatctattgacaatatatttcat

SEQ ID NO: 156255 - DNA, 359 bp, Glycine max
  unsure (1)..(359): unsure at all n locations
ntatgagtggatncttgggaatgtcattccaaataatctttatgtttctccacgnnnnttcataaagaatgtatttagntgaaattcaatatatagctattggcttttttcaaaattcaaataagagttaaaattgggagtcggaagataagttactagattggttgaattggaactttcatattcccatgtttaagaaacactctcactcctcactaagaataagagtataagaagttatgagaaagttacttttagacctgtataattctagagaagtgagagagcgaaacagagagtgcgtgagtgagatgtcttgtctcaactacgctgggaatgggtacattcaacatgacgca

SEQ ID NO: 156256 - DNA, 416 bp, Glycine max
  unsure (1)..(416): unsure at all n locations
agctttagcttctcatctcaaggatgtgttcttatctattagagaggtatatgtagctaagctgtagcttctttaggaatcttcttaaggaagcttctcaaggaggtgagcttagttatgagaagggtgtgtgtagctaagctctagcttctcaaggaagttttctcaaagaagcttctcaaggaagttttatcaagaaagcttctcaaggaagctacctagtctataaattgaagcatgtgtaacacttgttgtaactttgatgaatgagagtcttgtgagacatacttcaaagttccacttctctccctcttttattccttcaatttcgtgctcccccctctctctttctcntcctctctcttttcctccattgaagcatccttccaagcttcttatcccaggctcatcttggt

SEQ ID NO: 156257 - DNA, 200 bp, Glycine max
  unsure (1)..(200): unsure at all n locations
aatcctttaaagaccttattgatacattatgagaggttggttgtcatgtggtcatatcgacgnncttctctatcataagccatcgnccatttttcctttgaaatgcgatcaatccatgttgctatggctggactcagntgacgaaatttttctaaattttgataaaaaatgagcttgcaaagagagtaagctgcataaaa

SEQ ID NO: 156258 - DNA, 322 bp, Glycine max
agcttatgcgcctattttcttacaaacattctcttgcacaagacatttaaccgaaaaatgcacccatatacaatcaaggcagcttcgttacctagattatttacacgtacctccaaggtgtatttgttacttacatcacacacatctccttggctaaactcacatacatgcatactcaagcattttggggcaccaaaaattgcacatgtgcacatcttggcatttctaatacctacatacgcaaacttcatgatgaatcttgactatctacacaataaggtgctacatttcatgctccttttttcaagtttttgctacctaa

SEQ ID NO: 156259 - DNA, 350 bp, Glycine max
tgctctaaattgacattgatgtttgtatttatggggggaggttatatgccatttttgctttaagagtaatgtcccactaaaactaactttccaaatgtttgccttcgcaggaatggccccgaggaagcttgcctcatagaggtccaggaaggacaaggtggccgaaggaactagttccgccccggagtacgacagtcaccgctttaggagcgttgtacaccagcagcgcttcgaagccattaagggatggtcgattcttccggagcgactcgtccagctcaaggacgacgagtatactgattttcatgaacaaatacggcgcccgccgtgggcaccactggttactccca

SEQ ID NO: 156260 - DNA, 292 bp, Glycine max
agctttttgatcgcggggagaggccctacttttgatcatcccttatgcgaggggaatatcatcggaagttccaccaaaaaacatatataatccagtgcgatatgaaagagcgcgcgcaatgaggagaactagctcaattacaggagatgaaaatgatccgtgctgctttgaaaaaaaaaatactttgatgaaaaaaaaagatatacggtaaaggagaaacgcctccgatcttaagcacctcccacttatcaaattattaatttcaaataaattattaaaacaattaacatgt

SEQ ID NO: 156261 - DNA, 320 bp, Glycine max
agcttccaagcttattttgatgttgccaaagacttaagtcaagaatcaagattcaagcaagtttcaagaatcaaagagtgattcaatcaagaatcaagattcaagtgaagattcaaaagaagactcaagatatgcaagaacctcaagaatagcataaagataagtgtaaaaagaatttttcaaagaaaaatcttttaccagagtttttactctctggtaatcgattaccataagacagtaatcgattaccagaagcccaaaacagttttataattgttttacaaagtagtatcgattaccaatatttttgaacgttgaat

SEQ ID NO: 156262 - DNA, 345 bp, Glycine max
tgccgcccagctcgcccaggcgagcatggttgcttcctccagaagcaacagccttctggaggaatcttctggagggcccaagtgggcatggttgctatttacacccccctgtttactaaatgcacccctccttttttatttttttttttgtaattctttttccgtaacgttatgaaactttacgaatttcgtaacgatacctatttttcttccgcaaggctacgaatccttaccgattatatattttactcttttttagctttctaacaatttaccgaaactcaccgattgtgcaaaaacacctcttgtttatttccgccacattaccgaattttacgaatcaca

SEQ ID NO: 156263 - DNA, 318 bp, Glycine max
agctgggatttcattttagtagggaatctttccttcctaagatggagccaaacccagtccccctcattaagaactagctcctttcttcctctattgcccttagttgaatacacctttgtttggttctctatttgggtcttaaccctctcatgcaacttctttacaaactctgacctagattccccgtctttatgtataaaagaagtgtcaagtgggaggggaatgaggtctaagggtgttaagggattgaacccatagacaacctcaaaaggggattgcttggtggttctatgaacccccctattgtaggcaaattct

SEQ ID NO: 156264 - DNA, 346 bp, Glycine max
tatagaaatcaaacaagataataaattatcctcacattataatagaagcatatgcgcataaataacaaatacgtcataagtcatcaaaacataaatcatttgtctaagtcacttgcatctagaagtcttaattctcttctaatggtgtagaaagaatctttggttagtggttttgtgaagatgtctgcaagttggtttttagtatctacaaattttaaaaacacagccacctttttcctaagactaagtgctaatttactatcaacgcttaccaatatgagtttttattaacatagaaggttttatcatatcaaaataattttatttgaaataaaatataataatt

SEQ ID NO: 156265 - DNA, 303 bp, Glycine max
aagcatgcgatcttccacaatattctaacatcatgaactaccctaaaccaagaaaaaagggcagaggcagaaaactctgcccaaaacacattccaataccacagctttccctactcaaataccccagtaacattctcttcgttccgattcgttaaccgttggatcgactcgaaaattttactggaggtccatagtacataattctacattttgaccgttgggattagctagaaatgtccagaacccaatatgtactacctttcccataaccagcaatgcacaaacagttttctgcacatttgg

SEQ ID NO: 156266 - DNA, 349 bp, Glycine max
tataagaacaaaatttcctcaatcatttccaaatatgcatgtgaattaggaagcatcaacaagaatcaagccaaggctattgtgcaagcaatcaatggggcaaaacacaccaaatgattatgatgatggatggttcaaattctcacaaaggtaaactcatcactttcaaattgagctttcaaaactatcatgacatgtagaggagaatcaaggatttcaagtcacaaaatgtcaagaacttttattttcaaaacaattacccatttcttgaacatatcctataattcaaagaaaaacatgcaaagttgtacatgcacacagaattgacccaaaatattaaactagaaat

SEQ ID NO: 156267 - DNA, 319 bp, Glycine max
agcttgttaaataacttataaaaaatcaagaataagcttgttcgcacatcattcgcatgcatgatatccactcgacaaggtttgaagtaaaggagaccttcaatcctataacgcaacgtggcggacaaaagtggacaattaacttgaatggccattattgtcaatgcggaaagtattatgcgcttcactatccatgttcacacattattgcagcttgtagttacgtgatcatgaactactaccaatatataaatgttgtttacacaaatgagcacatcttaaaagcttactccgcacaatggtggcctcttgggaatga

SEQ ID NO: 156268 - DNA, 348 bp, Glycine max
tttgcacctgttaacttaacaattacatatgtaatgtgtttctaacataaaatgacaagttttatttacaaaaaagaacttattttacgtggcaatattctgcaatgataattatattttatatcaggtgttcaactaaacacaggtcatttataccaaattgatgatttgcgagtcatggcgaatttttaagaggctccacacaattaaatcagccaaatgaatccccttattggacattttcaataaattaatgatagaatcactatgtgaatccatgtgtgctcgaaataaatccagctctcaatattgacaccgtattcctacatacacaacgtgtttcacatg

SEQ ID NO: 156269 - DNA, 312 bp, Glycine max
agcttgttgaaattgtcatgtttggatgagttaaacatacccattctgttttagggtttttgtgatgatgtttgtgatgtttatatgctgaaattgctgatggaaatctgttagagacgaagggtagaactaacctaaggttagaaagtgagaatgtgatgttatgagtggaaaaagagtgagactttgagagttggaaggctaagtctgaattctggggtaaatggaggttaaagtgagttaatactagcttgaaatgtcatttaggacatgtgagaaaggttatgctgatctatagagaaaaacaaatga

SEQ ID NO: 156270 - DNA, 343 bp, Glycine max
tgagatgaggaagtgttgaatggtgaacttcctgcttttattgttgaccacaaagtggtacctggagatatgtcgcgggggtcaggagaccttggggacgtcacgtggggtgctattgcccaaaaccaagcttgaccaatcccgacccaacccgggcatagtcggtcagtgagaacctgtgatgtacctaaacaggcgagctcctggcagtcaacagataaaaggaaaacaagaccacaaagcaaggaggcttgtggtggctggccagctgcgaattttgtgtaatatgtggattgtggcctctggtaatccattaccaagggtgggtaattgattacaaggc

SEQ ID NO: 156271 - DNA, 195 bp, Glycine max
catatttaaatccttactagtcacctgcccatacttcgagaaaattctggcctcattcattgttggggggccagaaaactctacatagggaagaagatgatgaaatcacacgttggtaaaggaataagagaacaacattttcgtgaatagaccaattcaaggaatcatgaacgagaatactgaggaacaacagtg

SEQ ID NO: 156272 - DNA, 343 bp, Glycine max
tcaagcttcaaaagtgtggtggtagactatttttagatgtgaccaacggggtgaaaacatagatatggggtcttcttcttctggccattctgtgatggaattacaagtacggttggaacgtggatggactggcctgaatacgtttgctgagatcatggccactagaggccccaaaactttttcatgcactggcttcttggaagacttcaatatggagactaatcttgtgagttgaagcctctttgagtctctttgtccaagatattctgaagggtcacagagggtgataaccaatgtgcactaagaaatctgttgacaaaatatcttcatgttcccgaacgcg

SEQ ID NO: 156273 - DNA, 317 bp, Glycine max
agctttagaaggtgtggaatctaataggcaagcaacaaaataagtttaaataaagacaacaaataataagtatgaagcacatagtaataaataaatagctatatttcataaaattgaagatagtgtgtagccactaaagaattgcatacaacctccttttctgtgataccaaatggtaacataattttgtgggaaaagcttcctagtattaagactttctttcttctagttgtatcttacaagattaccgcaagaatatcatttccaagtaactaacaagaacatacaaagcttcttttaaacatatggcagtaaca

SEQ ID NO: 156274 - DNA, 341 bp, Glycine max
  unsure (1)..(341): unsure at all n locations
tgtacaaatatttgcacacctctacataaactcctacaagaattaactccaatttttcattttgttgtcttttgggcttgaatccttattagcccatagttttaaatagagattttatgttatagcttagggttccaaatgttgtgcatgaaaaggacaagggatttgagatgttgcatgatggctttgatgcttaaggattcatcttccattatttctccatcaattgcttcttcccccatggttgtgaatggctgcntttgtaatagcccgtttcctttgtttgtttaatataaaataatgaataagaataaaaattaggtcattagatttcttactat

SEQ ID NO: 156275 - DNA, 299 bp, Glycine max
agcgtgttattattatatttggtctctgggatattttattttgcctacatgctaatagcatcctacaccttctatggtgtaaccggaaccatagcatcttacgcgtgctttagcgtaactaggctcatctactcctcagccaaaatgtgataatatctaccaaccagaggttttggacaaatttactacacttgttcaacgaccaaggaccgggttgtcgaaggaatttgaaccttcatgcactgtcatgtacagaatcaaacgtaacctacttcttttacaaccttaaatcgggaaca

SEQ ID NO: 156276 - DNA, 341 bp, Glycine max
agactatagacaactcaagcttcaaacttgcaacaaatgagttgatcatgtaaaaaagattcgtcttcagactcttagaggtgactttgagcgtttgtttatggaggagtccgagtcaatttctgattatttttctcgagtatcggccgtagtcaatcaacttaaaagaaatggtgaagatgttgatgaggtgaatgtcatggaaaaaatacttccaactttatatccaagttttgacttcattgctaccaacatttaataaaacaaggatttaaagaccatgactattgagtaactcatgggttccttacacgcatactaacaaaaacaaactagaaaaa

SEQ ID NO: 156277 - DNA, 313 bp, Glycine max
agcttggaattgcatttgggcacctattatgaatctcctatgttgtccctacatatataaaacaggcccaccatcctaattttacaaaatcatattcatacatcattggggcatttcaccaagcacttggtgggcgtacgtttagacataaattgcaagagaatgggggcaatgtggcatgccccattgcttcaaaatacaacataggcctaaggccttctcttcacaaattctcaactcaacaaatcaagcataaaagcaacccaaaactgccccacaaatatgagcacgttctcacaatttatagcaccaa

SEQ ID NO: 156278 - DNA, 339 bp, Glycine max
tctacatgtctagggtttttctagtttaataaaggtccaagttccagagaatttgatagattttactgtgtgaagacctgcagagaatctagcttgaagaggaagccgtcctgagaacttgagatgagtttatgagtgattgtgaggttctagaggtggaggagacatccccaccacttgtatttctttaatcctttatctttctcttctctttgttgtaaagaaagcttcctagtaatggagagctaaatcctctgctggttcttcctatgtggtactggacgtaaatacctgtatatttttataatgatgttttggtgggtcacctatgctatcaaa

SEQ ID NO: 156279 - DNA, 318 bp, Glycine max
agcttctaaactttattctataatgaagctctgataccactcgttagacaagtggtctcacatatcttaacaatgggggggggggttccacttcctactcactcccctcctttcctcctaccccctcccccccctctcctatcccccccctacatcctctctcaattcctccctcccccacttccctctcaccctccccccccccccctctctcttccccctccttccccccccccctctcccctctcctaccccctccctctccctcccccccctctctcctccttttcccctccttccctccctctcctcttctct

SEQ ID NO: 156280 - DNA, 258 bp, Glycine max
tcaaccttacaaaacctacgcatctctgcaaatatctgcttcctcttgctgcctccagagctctttttccaaaataggctttatggtgtgctgtggcattctgtgtactgggcatttctaccctaattatgcacagaacaggccctcaacacgctataaactcatgatgcagcgcttagcgccactcctcgcgccttagattgagtaagtcgatttgatcttagcgcctgccgtgctctgagcctggctaaatacaac

SEQ ID NO: 156281 - DNA, 321 bp, Glycine max
agcttccatatgctgtttgtagccaagcaagggcattggaggtttcactgaaatgttgatatccaagctatacctttgtcctttactatgtatctgtggagtgtgcccatacagtatacgggctagggtagtgctcatttgtcactgtaccataccttttcaattgttttgatgttattatatggcttttggtagcataaataaatgttgaagcttgacaccatatgagcaccacttgaaaccaattagtcctatctgtcattacatgaaattgcgagctagaattgctgataaagcagttattaatggaattttgttgga

SEQ ID NO: 156282 - DNA, 351 bp, Glycine max
ttggatgagccaatgaaggtgatctttgttgccaactttgtcatcttgagacaaaagaccattgaaaatcactaaatatacaccaaggaaggggtgaaagattggagatttgttgaagaagatcatatgactccattcttctttgtttcttaggatagtcatagaaaccagcaagctaccaaacaagagaacctattttgtgaattttagcatgaatgaaattggataaaaattttctagatatggcattcaaaaaggtgtttccatataagaattaggcccctactttaacccatagaattgacaacaaaacaaccatcaaaagtaatgaagtttttttatttcttcaat

SEQ ID NO: 156283 - DNA, 318 bp, Glycine max
agcttagctctggatatatggttgtggtatttagtcgatgtttgtactaggatcttagttcttggttcatgtttgatttgagttgaaacaacatgaggaagaggagaaaatgaaatggatggctgatttttttattttctcctttaagtgattatggcaatttttaaccacaaaaaactgtaatttaaaattcaaaatgaatattggcatttttaaaactgccataaatcatatttttaaaaagctaacggcaacgacactagttatagagaaacctaacaacaaggataaaaagcaaatttttgttttatcagggat

SEQ ID NO: 156284 - DNA, 345 bp, Glycine max
tctcagaatcatgagaaatggaagtactagcaccgttaagaccaatgttctggtaattttgaatgagaattcggtcattgcaagtagagggatgatctgagtcagcacaagaccctccatcacctggagtaccaattgacaaagtctccatacccttcctaagaataacttcagaattcctgtttgagcaattatcggtgctagtacatccatttgtcatcaaaccagggtcttcctgatcaaatattggtgtttgatcacaatatcttatatgagctgcagactgctccatcagcaacttgagatgcaaacaaagaaaaaatgtaggtgctgcagcaaaagaga

SEQ ID NO: 156285 - DNA, 337 bp, Glycine max
gattatattcaacctgcctgcatgcaagctagtgctattgatattatatgttatacaacgtgggatattttgcccttaaaggtccctgttccatgagctagcagtcccatttaacccatgcaattttcttctaatcaaggccaccaccccataggaacctcctctggatttgggttagtttttccgctaccctattaggaattctgaaaaaagagagatagaaaataggaatagaggttagagttgcttttatgagggtcactcttcgcccataagatagatgtctctgcttccacctagacaatttagattcagtctttcttaggattggatccca

SEQ ID NO: 156286 - DNA, 321 bp, Glycine max
tgtgctcacgcagggtgctgtggattacttgaatcagaggtatgggggtgattatcaagggagtgatgatgaagatgaagaataagaagaagagggatatgaagagggtgaggaggaaggtgtactggatggcgaacaacgtcaatgatcggtgttctgaattgttataaattctctcacggtcaaatgtgtttcagctctgctaattttttctattaaaattggatttacttcttatagtttacaaatgaggattagtttctgaccctctcggttgtactacatctgtgttcttcgacccacgtcccaaaatacatgatc

SEQ ID NO: 156287 - DNA, 319 bp, Glycine max
agcttgctaaacgtttataaagaaagagtgaaacaaattgaagaactggtgccatgatgcttgcttttgctctgttatgttgtttaggatttaaaaagtcaacgaggaaataagcttgattttgttttgcaggaaggaatgtggaaagtttgagggatgaatttgttggaggtaattgttaaaagcagggagggaagaaatgaaggtagggaaaaattgtgtagagagtggttttaggcagggttaactactacctgttgctttacgcgggtaaaaattgttaaggctgggattatttcacaataatctctatttgctg

SEQ ID NO: 156288 - DNA, 348 bp, Glycine max
actcaagcttcacacaagtgttcttgaggcttttttcctaatgctttggtaagagactcttaatcttcattctctttttgtttcctcaccatttctgtgcaaaactctcattcttgggtccaaatttcttttttcatcccgggaacctcgggaacatccagatctgacttcttggttcatttgagcattattgtgtaagctctcatcaatgttagggggatctttccacttcatgaaccttgatattctcatctttggaaactcaaatcaatcgcctgctgcgctgatgtctaaatgtctcatcctatcgcctccctttgtaaagtgtaaaattttttccccatttaa

SEQ ID NO: 156289 - DNA, 318 bp, Glycine max
agcttgcatgatttttataagatgcgtccgaaggctactttcctcaacctggttttggcataattaatcagaaattaacatcacagggtgatgatgatgatgtagcaatgcattctattctatttatgcaagtgcgtgatcaaagggatgccctgccattataaaacattacaatatctccaaacagaaatgaaaatgaaatatccggctttccctaagtaccctctcaagaactgatcatatgtcaaattggaacattatcagctacctcacagtatatgttcctgaaatgaaaaggtctttgtcctaaattttatc

SEQ ID NO: 156290 - DNA, 348 bp, Glycine max
ttatcccacttttctaaatttatttaatgctgtgagttatgatagagaaatagatgtggattgtgggtcaacctttggaagcacacgacttttaagtgaaagttaaatgaaatatattttttttttatcagccaaaaatataatatattcattaataagtaccagaggtactaaaacgatccagatttttaagttaaatgaaatatatgaagtagcaagaggtgcatcaatcctaacttggctctttgagaggccaactcttcttacatttattattctcctccctctgtcagtctttcctatttattttcttaccccctctaactaactacttgtaattcatgacag

SEQ ID NO: 156291 - DNA, 318 bp, Glycine max
gagcgtggacagtgtttttttcttcctgtgaactaaaaaaattgtgtgatatatttatatggctgccacctccacatttttttttcaactgaatttgagatgccaaaatgcattaaccatgtatcagcacaaatcggataatataaatgggatatcccgacaaaaaattactattgattttggaggcaaatactcatgagctttaatgtaaaccggttgtctatatatatctatatatatatatatatatataaatccatatatttatacaaacaaattcatctccgcagaaactatcctatgaatattctctcattt

SEQ ID NO: 156292 - DNA, 166 bp, Glycine max
attttcttaccctcggacaccgcgtgagagtggccttggtggatcgtcgcacgactttctattgcctgatcctgttgccttctctatggcaatctaccatcggtccttatgtcatgctgacctcgggcctactgtccatggtgtcgcccctgatcgaataggagcg

SEQ ID NO: 156293 - DNA, 315 bp, Glycine max
agcttttactcactgtattctatcagttaccaaacccttcacgagaaaatcatcccctttcagatttcttacaatgtcgcaaggacaagcagttccgtttgctgggaagtggcaccattttacagtcaggactgatggagaaaaggtggttccagaaccacatggtgacgccgaacaaacagaaacctgggaatcagaggtgatgatccctttcgcagtggaaagaacagtttacgctttcggtggacccctgccagaccaagaatcactttcgagtacaatgaacaaggtatttccctgctacccaacttgcga

SEQ ID NO: 156294 - DNA, 341 bp, Glycine max
tcaagagctgtgatcctctaatgagatcaatgaacaaaataaagaccctttgtattcaactgctaaagaaatagtgcaagggctgaaaggtcctctcgagaagcccatgcaactctagcatgctccaaagaagtctatgaattcattatctacatggaatgaggcattcaatgaatggaagcaaaaccattttatttgatccactaaatcctcttctgttgtagattattgaattgtaatttgttgatatttttggcattcatgcaatttcctttcgaacaatttgactttaattatctaagttatgggaatttttatttaaagttttcatcggtgtatat

SEQ ID NO: 156295 - DNA, 314 bp, Glycine max
agcttgagatgaggatattgtagaagggtgaaacttcctgcttttattcgttgaccacaaagtggtacctggagatatgtcgcgggggtcaggagaccttggggatgtcaggtggggtgctattgcccaaaaccaagcttgaccaatcccgacccaacccgggcatagtcagtcagtgagaacctgtcatgtacctaagcaggcgagctcctggcagtcaacagataaaaggaacaaataccacaaaccaaggaggcttgtgtggtggctggccagctgtgaatcttgtgtgatatatgggttatggcctctgg

SEQ ID NO: 156296 - DNA, 334 bp, Glycine max
tgcttgtggagcttgtatggaggctggatctttgagcttcaatgagggcctttaatggtgattttccaccatggagatgcagcggaagacaaaggataagaggtaagaggcggcgccatccactagggaataagccatggaagaaggagcttcaccaccaagatgagccttggataagaagcttggagaggatgcttcaatggaggaaaagaaagagggagagaaagagagagggggggggggaaatataactaacttatatcccatgcctggtcggcgtttgtgtaacatatcatactcatcatattaactttcccccacaagtcacaacccc

SEQ ID NO: 156297 - DNA, 316 bp, Glycine max
agcttcacaatatgatatttacttgttgacgcatatacatcgtatttttctttgattggcaggaagacacttaatgagcttggagctattgtctccacggtgcatccaaagatgaaattccccaccctgagggggagattatgactatcaaggtagatgaaaagcaagcacaatagtgctacgcacaaagcctaaagatggcaccttatcctcccaccagggagcttgctaagcctcaccccacaatggttgaaggtactccaagtcatgagcatgaaggaaagacctctaatctgagccctaaccatataccaag

SEQ ID NO: 156298 - DNA, 338 bp, Glycine max
tcggaagaaagtgatgaggtttattctctaaatgcagagcttgaaagagcccatgctgtcaaagagaagttcaagtccatagccatcaaagtctgaaaagagtatgatgaactaagggacgttaatatggtcacagctgaagccttggaaccgagaaaccaagaaggcccgaaaggaagaacatgaccaaagcaaagttttgaggggctttatagggcagtaatagtgagctcaagctcctaataggtgaaaggaatcatcactggtcaaaagcattatcttgacagaccagcctaacgcttgccttacgtcgcaaagaaatttgccccatcacctta

SEQ ID NO: 156299 - DNA, 315 bp, Glycine max
agcttatatcttacttttcacggtatgccattattgtatgaacaagggatattcttctttcaagtgcatgataaaaagatatggagttccaagtgggaaatataagttggttcccaaaggaactagagaggttgctaaccaaaaaggacccaacacaactttggtacctaaatctacattctatacatttttgtaggtgaacctagcaacagataaacaactatggtattttgataacggttgctcaaggcatatgataggagacaagtcaaagtttatgtctctaaaggctaaagaaggaggatttgtaatcta

SEQ ID NO: 156300 - DNA, 344 bp, Glycine max
tttaagacattttgtcaatattatcataattgtcatcagttctaccaagagattgcaattcatttaatatggtttagaagtgtccaaacatgctttgcatgtcttcttcatcctctatagtaaagagttcatacttattgcttttgtgtgcttttctagagccattatggagccctaaatacaaccaccaaatataatgacatcctactctagagccattctaggtttctctttgagtcctagcttgcttttgtgtgcttttcattgctttaattgttgaataatccttgaaaatttgtcttgttgaaactctattggtttagctttcactttattttttttgt

SEQ ID NO: 156301 - DNA, 313 bp, Glycine max
agcttgggactgcatttgggcatctattttgactttcctatgctgtctctacatacacaaaatagccccaccatcccaattttgcaaaatcatattcattcatcattgaggcatttcaccgagcacttggtgagcgcatgtttgaacataaattgcaagaggatggggacaatgtggcatgccccattgcttcagaatacaacctaggcctaaggccttctcatccaaatcctcaacccaagaaaacaaggatcaaagcaaaccaaaactgcctcacaaatataagcatgttcccacaatttagagtacccaa

SEQ ID NO: 156302 - DNA, 333 bp, Glycine max
tgagatgaggaagtgttgaatggttaaacttcctgcttttattgttgaccacagagtggtacctggagatatgtcgcgggggtcaggagaccttggggacgtcaggtggggtgctattgcccaaaaccaagcttgaccaatcccgacccaacccgggcatagtcggtcagtgagaacctgtgatgtacctaagcaggcgagctcctggcagtcaacagataaaaggaaaacaagaccacaaaccaaggaagcttgtggtggctggccagctgtgaattatgtgtaatatgtggattgtggcctctggtaatccattacccaaagtgagtaatc

SEQ ID NO: 156303 - DNA, 321 bp, Glycine max
agcttcttatggagctacatcagatggtttcttttgcaatagtgtgagaaataaatgctttttgtgtatgatatatgtcataccctaatttcgtccggggattattacttgataatatgcaacctttgatcggccgctttgagatacttggcatcctttgtttcacaatatgtgaagtcctgagacatgccggaaatcaaaaggaagcaggcttacgcgatccgtgaaattccgtaatgtggcggaaaccaaaaggaggtgttgttacgcaatccgtgagtttccgtaacttcttcgaaagctaaaaaagagtaaatacat

SEQ ID NO: 156304 - DNA, 350 bp, Glycine max
  unsure (1)..(350): unsure at all n locations
ntagtgactacgtaaccacaaaattttatattgagtgtccgcatggatatgttctacgattggttttgcatgaatttctaattgtcataacatatgattcatggaagtgatctaggcattctttatttctaagccattggccaaacagttgtcccaatgtacattattttctgccatttgcaagccttttgagccagacatttgatttttaccagaaccctgacctacgatgaaagtttcctaccttaccctatgatangagagcacgggtcttttttaagggagatttctatcatcttttgtctactcatggatttttaaaagaaagttaatattcatcaaacaaaaaa

SEQ ID NO: 156305 - DNA, 333 bp, Glycine max
tgcggcttgcaagcttcacaacagatttattcaggaacacgaaatgtatgagctaccattgcaacacatgcagtcccaacctttgcatatgcagttccattacacagaatggaagatgctccaagaaaaactcgtgtgacctcatgcatgacataagaaacagcatttatatgggtatatgtacaactcaggcccctagccaccagtctacgaagtaaggcccggctttcaaactttggtcgtgagtctaccaccacaacacggaactgtttcccaagatcatgggcatataaaaaaatcatctcaacaacacatgatgatccatatgtaaga

SEQ ID NO: 156306 - DNA, 345 bp, Glycine max
tttaagattgtaatttatctttcactttagtcccattattaaaatattaaaagacttttattcaagtggacaattcacctaaaggtaaatagttaaatttattcttgaaatataaaatattaataaattgattttttaaaaaaataaaaactttaaatttaatttttaaataagtaaaaagtgcaacgaatcttgtagacaatttaataacatatttgtctttaaaccttgaaacttgatatcaaattgattattgaaaaatataatttattgtcaaattagtcctttaatattataacttaatgataaaatgatcttacaaatttaacgacaaaattaattcat

SEQ ID NO: 156307 - DNA, 374 bp, Glycine max
  unsure (1)..(374): unsure at all n locations
agcgtgtatatttgnttttacttactttaagaacgcacagttacttcttttatagaaagtctgttcattactctcattatgtatccaaacattacaatcagtataattcctacagttacactcttcacacacttttatgtagtggtgcctctactttatctactttgattgtatcgctagagatttaactcacaattggtgccatctgaaatgatgtgactattctgaattaaggacgaacgtaggccaaaagtcgggccttgtgtcctacttatgtggactgtgcaagggtcagacctttggggtcaaattagaagtctagcctcaaaccaacaaatgaaaaagagggaaaatcacgaaaaataatattcaca

SEQ ID NO: 156308 - DNA, 344 bp, Glycine max
tagcatgttgcgctaagcgcccaactctgatttcagttttatttttttgtttttgtgaaaataacatgtactaatctcttgtgttttgtcttataattttgcagatggcttctaggaaaagaaaggcaccctctacacctacccaagccagatttgatagatctagattcacttcccaagaggcttgggagagatacactgacattgtggtgcctcgtaagcttttaccagaaagaaatgtggtagtctactatacacagttccatgagttcaagaaggaactcgagagacgctattgggatgaggagttgactgactttctggatggcaacattgatgttgcc

SEQ ID NO: 156309 - DNA, 318 bp, Glycine max
agcttggacctcaaatcggtctcatccatactcccttcaagcaacaactaccaaagtgtgtgcacccataacaaggttaagtcagcactagagagggcagagaaagagcctattgttaggaaaagaacctcattcttgaagtcacctcaacgtacatgaagaattcagccatggatttagaagatcattaggcagtagccactgataatgccccaaacacaatatgatcaaaagcagggaggaggtccgatttcatcattccaataataacaacagtacctttttcctactaggtgagatcaattacatggacctagc

SEQ ID NO: 156310 - DNA, 344 bp, Glycine max
ttctagcttttccttggtgtattttgatctccttttggtgctctaaattgtgggaatgtgctcaaatatgtggggcaattttggtttgttttcttgcttgattgggttgaattgggggtttgtatgagatggccctaggcctataatgcattttgaagcaatgggacatgccacattgtcccctttctcttgctattaatgccaaaacgcgcgcccaccaagtgttcggtgaaatgcctcaatggcattagcgcgtgattttcatagggaaacaacccatggggcattttggtttgcacatattttctattttttgggacatgcattcagttccgaaagggcta

SEQ ID NO: 156311 - DNA, 319 bp, Glycine max
agcttaattcgttattgatgcgaaatttcctcttttattttttgatgctatcaatattaccatcttccctccaactgctacccatatttctatcaatactttttatttagtattattgatcgattgctatcacaaaagtttgatgcttacctatgtattgtttgttaaggttttactttatctctgattgtaaattagatgaattctgtaatgcaaggtgcaaggtggttcaattaaagtttccaagaccaaaaaagaggctcctgcaagaaccagcatcacaaaatcaacaatttcttggaacaaattacccgagtta

SEQ ID NO: 156312 - DNA, 347 bp, Glycine max
ttggcactggtattcatgtttcatttaggccttttgagtatgtacatgttgatttatggggaccatctagagtgaaaactcatggtggaagctcatacttcctcaccatcatagatgatttctcaagaagagtatggtcgtatgttttgaaaaataagtcagaagtttatcaaaaattcagagagtggtatactcttattagaaatcaacttggtacaaaactaaaagttttaaggactaacaatggcctggagtttgtttcaaagcaattcaatgatttttgcaggaaagtaggtatcaaaagacacaaaacaatccctcacacaccaccagacaccacaacaaaa

SEQ ID NO: 156313 - DNA, 306 bp, Glycine max
agcttaggatattttatagccttcatcctcaggtcaactcttcactttttattccaactcctatagacttgccacatacatctaaggcactcagctcgagtaacaacactcacatacttttattcttcaaattttctttttcacctacttttcctacctactgccccttcgatattattgagcggctgtttattgtcttaccataattattgtcaaccaacattcttccctcaaattggcacaactcttccctgaaccatcacgcttttctacaacccaataaaacgcacatggacatcacaatat

SEQ ID NO: 156314 - DNA, 347 bp, Glycine max
tagactgggcgcagaaacaacttattattaaggcaaaaagaaaccgagattaaagtcagaagtaactaataagtctctctatatgaccactactagaaaacttgttactagtttggaactgaccaaagagacaagtttttgtttttatgaaagagcagaagaaaaatacaagtaagacagagtttatgatgaagagaagtggaaggtgaagccaatcaatgaaaggtactgctgcaaaccgtaataaataaaacgtactgcagttaaacatagggtaattaaaacaagtaacaacttctttagcaagtcatacaatcacaatttagcccattaactttgctactcat

SEQ ID NO: 156315 - DNA, 281 bp, Glycine max
gggatcataatcacctgagcatgcagggagcccttttattcgcccgtggctgaaaaccttgctcacaagccgcctatatcccaagcacttgaattcccgatggcttgccatgcctaatgccccctgccgctagccaatatactattattttgtaaggggattaggctaacgagccttttcgccaatccatttatgtcggagtgttctcacctagcgaaattcatctaccttaaaaaacccttcccactccctggctaataaaataattttcacccctcaaa

SEQ ID NO: 156316 - DNA, 132 bp, Glycine max
tctaactgtggagtgagtggtttttacagcacatggatcacatgatggtgtttcgtggggcgtatctattaattaatctttcaatctgatgcaatattgactacactcacatgtaacaatcacctatcggat

SEQ ID NO: 156317 - DNA, 356 bp, Glycine max
acccgggatcctattactagtacagcctacctgcatgcatgcaagcttcggaaaaatgcatttctatttgcgtacttggagaccaatgtgaaatgctgccaaaattttgtcaactttaagaaaagagacttaaccttgacgtatgaatttactataaaaaatgccttcctgaatgggatatggccacacctttgatgaaaaagtgagattttcatgcataaaaaactttatgagtatcacagagttaataattagatggatcaaacttggatgaatgcaagtccagtgagtcttgcatatgaggaaggcgtggaatgtgacgtccccaaaataatgactggtttaatacgaacgat

SEQ ID NO: 156318 - DNA, 341 bp, Glycine max
tccacaacatgcaagcgattcaacatcccaaacatcatgaactatcaaaaccaaggaaaacagggcagaggcagaaaactctgcccaacacaaaccaatatcacaacttttctcacttaaaaaccccagtaacattctcctcgttccaattcgataaccgttggatcgactcggaaattttactggaagtctctagcacataattctacattgtgacccgagggatctgctataaaacggccagaacccaatctgtactactctttccagagccggccgatacacaacattttctgcacaaagccaaaattctgctgcacatatttgacagcaaaattctg

SEQ ID NO: 156319 - DNA, 319 bp, Glycine max
agctttgcttctacttcactaacagaagctcctaaatctagcatggcattgtcaaacttattgttccctataatacaaggtatgctgaatgtactcggatccaaggttatcaatatcgagattctacacagactcgtgagaccttctacgagtcaactcgtagagtcgactcgtagactcgtaagagtctacttcgtaaataaaatatatggataataagtaaatatattcaaaatgcaccaatttgcaaacagatgacaataagttcatacttcatattagtctattacaaaacacaacaactgaccctacaatgttg

SEQ ID NO: 156320 - DNA, 342 bp, Glycine max
taaggatggaacacttacttgttggtgatgaaaacaagcgcaaagcggaatcgaagaatgcgaaaagtagagaccctaggggtgcaaactcgtaaattccgtggctatggcttttgaaagtggggaaaagaagtttttgaatgcaaaaacgtcccccctttcgtcacttttatattttggtgcaggggttgctcgcccaggcgagctaacctgcattttttttttttgaggaacattaaccatgtcccctccttccttatgggttagcgtttttcctaacttgaacttacttaagttagaattaggcgttgattacttatttttaaagcaaacaaatagcaa

SEQ ID NO: 156321 - DNA, 314 bp, Glycine max
  unsure (1)..(314): unsure at all n locations
agcttctcttagagatcagaagatgacattgttgaaataggccctaaaactgcaccagtaatcctaaggccaatgtcggatgctgatgaacaactcattgatgttgctcagtctgatacaatagacattgaaagactcagacacttagaagagataaatgaagcatcaaaatttgtctccataggggtcataactaagcgtctagagcaaaaaaagatcacgatgttggctgaagagcctatcanagtgatagaactcttcactatgcttgacagaagactgatgaggcccgatctacaatgagcaatagaatg

SEQ ID NO: 156322 - DNA, 342 bp, Glycine max
ttgggaaatttcttaccctgatctaaactctatgtgtgctcctccagaaaaggtgaaaacaaaaggtgcttagaagaaaccgatgaccaaacaacaaagatcaacaaagcgtgatccgtcttattgggagaatgttaatgcattacattttgtgcagagtagtaattctttagtcaaacgtagtgcatcatcatctaagcaaccaattcaaataaggaacatgccgatgttggatcaatttcatccatgcattcatgattccattgtaaatattgttgatgtcaaaactgatggtaattgtggatatcgtgcaattgctgccttattaggtatgggtgaaga

SEQ ID NO: 156323 - DNA, 311 bp, Glycine max
agcttccttactcgataatgtctctgaaattactggtttttttaccatatactcgatctgaaatttctgcttaaatgtatgtttttatgaaaatttgttaaggtgctaattacaaggattaagcaatatatattttaagtgcaaggttctaaggccagagtattattttgaaacaataactgttttctcaggactgccttttaaatagtgtagtaccttatacctatgtgagttttcattgataattttttcattcgttcaagcttccttactcgagaatgtctctgaaattactggtttttttaccatat

SEQ ID NO: 156324 - DNA, 339 bp, Glycine max
tctagaagttggaacattcattttaataagacaatcgaaaagtttgagtttgttaaatgtgaggaagatccatgtgtttacaaaaaggtcagtgggagtgcaattattttcttagtgttatatgtagatgacatattactaattggaaatgacatactaacattgcaaggcccgaagatttggctatcagaacaattctccatgaaggatttgggaggagcagtctatattctaggtataaagatttatacagatagatctaaaaggttgcttggactttcccaatctatgtacattgatactatcttaaagagatataacatggataattccaaatga

SEQ ID NO: 156325 - DNA, 321 bp, Glycine max
agcttcctttacaacttatagaagagaatgaaagattgtagaaatacaagtagtggggatgtctcctccacctctaggacctcacaatcactcacaaactcatcttaagctctcaagacagcttcctcttccagctctggtctttacagatcttcacacaacaaattctctcaaactctctggaacttggacctttctctctctaaaactctccaattatgtagaagcttcaagaaaaggccaaactccccttaaaaatatgattttaggattaaataggtggctttgttcgtgctcgttcgcttagcgcaattctgagcc

SEQ ID NO: 156326 - DNA, 350 bp, Glycine max
  unsure (1)..(350): unsure at all n locations
tatccagtgtgacatgcgtcttaatttcttaagccaacagccggagataattntggattcaccacattttgacacacaaccttctgcttttgaggacccagacaatccaaaagatcatgatctgcttcaagtcagtggtaaaggatcctccacgtcttgttatcaagacagtggatcacctcaggcatccctgtcatcatcatttaagattgaacacaatgatcctcctggaatgatgttggatagtctcccccgagatgcacctttacccagttcacgtacttatattaaggatctagttcatgtttccttctgtttcatgtacatgctattggtggactgttcacatt

SEQ ID NO: 156327 - DNA, 321 bp, Glycine max
agcttggagagggtgttttaatggaggaaaagaaagagggagagaaagagagaggggggagcacgaaattgaagggaaaaaaagggagagaagttgaactttgagttgtgtctcacaagactctcacatgcttctattaatagactaggtagcttccttgagaagctttcttgagaaaacttccttgagaagctttcttgagaaaacttccttgagaaacttctttgagaaaacttccttgagaaacttctttgagaaaacttccttgagaaacttctttgagaaaacttccttaagaagctagagcttagctacacacac

SEQ ID NO: 156328 - DNA, 349 bp, Glycine max
ttttcccaagtcctagatgacatttcaagctagtattaactcactttaacctccatttaccacagaattcagacttagccttccaaccctcaaagtctcactctttttccactcataacatcacattctcactttctaaccctaggttagttctaccctttgtctctaacagatttccataagcaatttcagcatataaacattacaaacatcatcacaaaaaccctaaaacagaatgggtatgtctaactcatccaaacatgacaatttcaacaaactttcaacaagttccttcacaaataatcatcacacagcagaaaactgacaaaacaacccatcatatctccca

SEQ ID NO: 156329 - DNA, 313 bp, Glycine max
agcttaatgcactgtttcaaattattggggagcaggaactgggcataactgctcttcatatcaagctccgtgccacaggtggaaacaagacaaaaacaccaggtcctggtgctcaatcagctcttcgagcccttgctcgttcaagaatgaaaattggtcgcataagtatctgcctttttaaaaaaaccataattcaatttttttttgcctgttactcaaaagccttgttattggccttttattgtgtgtttacatacatccttttttcacattagtgcgttgtttatctaccttgattactcccaatggttgt

SEQ ID NO: 156330 - DNA, 346 bp, Glycine max
tgcttcaattagcatctggtaacaaattgaaagcacttgcagcacagaaaactgtgaatatcattacaaatgtttcaagtaagcaatgacttctattgcttgttcgtattttacttctccaacttgtggaaaaatatagtttggcacatgaatagttagttaataaatcaatgtaatgctgtaaactgtagagcttctcaatgtttggtagtaattgtaattgtgataacataagacttgagtggggctgtttttcctgtactgctatgcttctcaatcgtatgttattcaaaattaaaattaaaatatatctatgctgctggtaatattataatatttcttaacc

SEQ ID NO: 156331 - DNA, 315 bp, Glycine max
agcttccctgtgaggttttctcctccaaggaatcctatagtcaacaaaaaaaaacaaaattggtttactcatccaacaattattacaaaaaataatcactgacaaatgaaaagtgacttacactcttgtctacgatttcctttgcagcttcagacgtcatttgaccatttttcttcatgtgggccatcttccacttcacatgtcgtctaatgggagattgaggatcaacgactatgtcagtgctcctaaattgggctgcttcctccaatcgtttccccttcacgtgtcatcttatgggagatggaaaaccataac

SEQ ID NO: 156332 - DNA, 346 bp, Glycine max
tcatgatgataaatgcaagttgattcaagatgttttgatgataacaaaagatgatgaaaaaaatcccaaagaatgatttcaagattgagtcaacaagttcaagatcaagattaatttcaagtttcatgagaagaaatcaagaagattcaagaatcaagagaagtttgatttcaagattcaagagaagataaattcaagattcaagagaagaaatcaagaagacttcacaagggaagtattgaaaagatttttcaaaaaacaaacatactacagttttgtttttcaaaagagtttttctcaaaattttctaagttaccagagtttttactctctggtaatcgattac

SEQ ID NO: 156333 - DNA, 318 bp, Glycine max
agcttgcacaacagattgctatattccttgcacttgaaggccaatttttatcatcatatactaatggatcacatccagacagcttagcaaaaggtgttttaattgtgtcggaaattttcgacagactacaaaaatctgtcgattaatatttctgacgaccatttttctaacggatttgtgttcgtcggaaatctatcggaaacatccaattagcgacggatttttagtgttaccgacagattattgccgtcacaaaaatgctttttttgtattgttaggcacatgcattttaatgaatttttgggcccaaaatgccct

SEQ ID NO: 156334 - DNA, 345 bp, Glycine max
tcatcctcagatccctcttgttggactagacttagcttaaatagcttacgaaagtttagcctaatttagcctaagctttgtcctcagatccctcttgttggactagacttagaccaaacaacattattgtaacagcatacttaaaatcaaaacttaatccgcagatccctcttgtaagactaagcttcaattctgtttcattaaagttcgaaggcaacaatacatttcccaatgttaaaatcacctagctaggcacacaaatggttgatcagaccaagagcatacaaaacttaagcactgaagaagcattgaacacaagaaacaaaatcaattatatatgaaaat

SEQ ID NO: 156335 - DNA, 316 bp, Glycine max
ggcgccacaattattttccctccacaacctccattgagaggcttctaacacactccaaacatcttctcaaagatcccatcgggcagatcttggaaaacttgatccgcaaagctgcagacctcctttaaagaatacccaacggttaatgaacgctgcccactgtttttacctaggcagcttcatgtagccttctctacaagcttcattaacaggcctcctctagaaccttcctctaaaacctccctcgcggcttctttgagaaactttcttcaaaggcttctttgaaaatcttcattcttatctatcccccccccta

SEQ ID NO: 156336 - DNA, 315 bp, Glycine max
agcttgacaagattttcatgccgagcaaagtttccatccttgccggtgatagttttcacaacttgaaggtaaatttttattttattggtttgggtttgattgggatgattatgcttaattatttgatgttgactttgggaacatttttaggagattaaaaccgtggaactcatgaagccaactgggtgggtatatctatccttgtctggagctgatcctaggtaagtacagtgttctttctgtatccactttttgttggtttaagtttgtatccagtttttgtcgtttggaggcatggatttttgttgctttgat

SEQ ID NO: 156337 - DNA, 333 bp, Glycine max
tgtcaaagagttgatcgcgttgagataatccaattttgaccagacagaaccttttaaggataggtgtcctgaaattgcatcttttattccgtataagagttgagcaacttctatgccacgtgactaaggttgtcaatacgggccggtccggctcgcttttggcccgctataaacgggccagtttagcccgtcctgctaagcaaaacagcctacctttcttagtttggcccatttcaagttggcccacaggccacccatcaaattatttatttatttttttcagattttgtattgcctattatccttgctggtaatatcaatttttcaatccta

SEQ ID NO: 156338 - DNA, 314 bp, Glycine max
agcttgttactttctggtaatcgattaccagaaggctataatcgattaccgaaagcccaacatttttgaaaatggtttttcaaaggtgtaatcgattaccatgaatttgtaatcgattgccaatgcttataacgttaacaaatattatgaaaaaccttgtaatcgattacacaaaacatgtaatcgattaccaatggctctgaacgttgaaaatttaaattttaaatgaagagtcacaactcttcaaaaaagataattgtgtaatcgattacaccaagatggtaatcgattaccagtgagaagttttcagaaaa

SEQ ID NO: 156339 - DNA, 343 bp, Glycine max
tgtctcaggggtgatgcgagacatagaccaacatgttagctatcgtcgccaagtaccaagaagagttaggtctagccacggcccacgagcatagaatcgcggatgagtatgcccaagtgtatgcggaaaaagaggctagaggaagggtgatcgactctttacaccaagaggcaaccatgtggatggatcggtttgctcttaccttgaacgggagtcaagaacttccccgattgttagccaaggccaaggcgatggcagacacctactccgcccccgaagagattcatgggcttctcggctattgccaacatatgatagacttaatggcccacataattagaaa

SEQ ID NO: 156340 - DNA, 312 bp, Glycine max
  unsure (1)..(312): unsure at all n locations
gagctgggaacatattctcggataacattctcgggcggaatatccttccagagagaaatgtccagatatatcatactgagtttgatgagtttaaagtagaattggagaggttggtttacggcttggtaactcacatggatatgaacattggcgcccttatctcgagtcaaatttcttctattactcaaagtaactcctctaggctcggatttccatccttgattactgctctctgtananctaaaggagttacttctgatagtttgacctatgagagcctgagcccggccattaattggtcctacattaaaa

SEQ ID NO: 156341 - DNA, 276 bp, Glycine max
ttgagttcggagtctaggcaccatgaattgatcttgatggatgcacaggtatgttgtgatttaccttttggttcgcttatctacatgacagggtttatgctctattttgccgttcaggtgttttgatcccctgtattgagttgtaatttatggggatttggttagtcaattcatagacttggttttacgtcttctttctacgattttaggttaggttttgatgttctataatgtctatagtgacttgattgttaaatgaacttgtttttctttctt

SEQ ID NO: 156342 - DNA, 315 bp, Glycine max
agcttgagggaaaacttgatgtcttggtcaacctagtaactcagcttgccatgaatcacaaatttgcatcagcacttgttgcaagagtctgtggtctatgttcttctgcagatcactatacagatctttgtccttctttgcagcaatctagagtcaatgagcaacctgaatcttatgtttcaaacatttataatagaccccctcagcagcaaaaccaacaacagcagaataattatgatctttcaagcaacagatataatccaggttggaagaatcatccaaatttgagatgggcaagtcctccacaacaacaac

SEQ ID NO: 156343 - DNA, 341 bp, Glycine max
tctccgttctttctcaaaccatgatgaaaaatgaatgaatcttgatcattatgaaactgtttttgaaatgcaaaatggttccctaagttgactctcaaaaagtgttttccaaaatataagattgaatcaagagtcattaatgagaaagacactacaaaaaatggagattctacttatggttatttaaccagggttttgttaacccatggcaatgtcaaagttaacttcggtttgtataacccatgctaaattgttagagttaactaggcgcttgacaaaaaatatggttaagtacacaccgctatactagaaccattgagaactttaaataattattgtgt

SEQ ID NO: 156344 - DNA, 312 bp, Glycine max
agcttctatccaaatggacttaccttgaattaattcctttgatagcccttttgagccttgtttccctttccttgttttgaagctcactacaagccttaagtgaaaaaccatgatatcaccatatccttaaggaattttggagctttggaattgttttgggaataagtatggggggtttttgtttcattggacaacttgttttgttggctatgcttcatgatgtattttgggtgatacttgatgtacattgtatattggttaaatgttgggcatgctgaatgaaatgttgcttctcaaaggctatagagtaaa

SEQ ID NO: 156345 - DNA, 333 bp, Glycine max
tccatcaagtggtaatcagagcacaagagtttcaagtaggtgctccttaaacctccattaattttttttctttgccttctcttccattgttgtttcttaatttttctccatgtatctcctcacatgtcttgttctaaattttgttaacatgattctttagagtttccaccgattaaacttgctatagaagttagatttgattttctatggttcaaatttcttgttcttgttcttgaaccatgaattgtgttcagtttacgttcctttgacttttgtcttgttattttttgtggctgaaacctaaaccataaaattcttacaaaaatattaaag

SEQ ID NO: 156346 - DNA, 312 bp, Glycine max
agctttattcaagacaaagaaattaaagatattcaagatggatgatcaagacagtctctagagtcttaggaagggtatattaaataggaagggaattcctatttgaagtaccaaaagatttggccaagaaatataagttaaaaagtctttctcaagagatttactctctggtaatcgattacacatatatggtaatcgattaccagcagttattgaacgtttttaattcaaattttaaagctagtaatccattacacatatactgtaatcgattaccggaggagattctcacaaaatattctcaactgtcac

SEQ ID NO: 156347 - DNA, 340 bp, Glycine max
tatgagagcaaaattgcctcaatcatttccaaatatgcatgtgaattaggaagcatcaacaagaatcaagccaaggctattgtgcaagaaatcaatggggcaaaacacaccaaatgattatgatgatggatggctcaaattctcacaaaggtaaactcatcactttcaaattgagctttcaaaactatcatgacatgaagaggagaatcaaggatttcaagtcacaaaatgtcaagaacttttattttcaaaacaattacccatttcttgaacatatcctataattcaaagaaaaacatgcaaagtcgtacatgcacacagaattgacccaaaatattaa

SEQ ID NO: 156348 - DNA, 320 bp, Glycine max
agcgggatggattaattttgtgttaaaaaaataatcacccgaaaagttttcattaaaatatacacgacaccctcaaacaacaacatggatctaaattcaaatctatctacaaacattacacatgatcaactaccaaaatctttaaagctcttgtccttattactcatctatacttataggaagtaactcatttaaaacattaaaatgatttaaataatcaacccactaaaataattttataattctattaaaataattttaatattatatctcatattaataataatactatctattaaaaacattgttggtaaacgaat

SEQ ID NO: 156349 - DNA, 317 bp, Glycine max
agcttgttgaaggataatttataaggagttgaggaagaggttgtggtcagggcagtgtttgggaaggaagaactccaagacaaaatcaaaatggggataagaagaagtccttagaggaatagcgacggcagaatgcaagtcaaagatgttggcgtggtgagagagaggatattcggccttggtgaaggcggttatgtccatagcaaaacagggcttggcagttgtgaaggccgtaccgacaattccttgtccgcggaaaaggtggtgctgagagcaggcctcctggaaccccaatagctggggctgaccatccccca

SEQ ID NO: 156350 - DNA, 348 bp, Glycine max
tagaacaaacttttgaacaacaaaattaaaacaaagaataacaacaaaaggccaaacctttcaccaattgtccaacttttataacatcttctatgtcatgcacctcattgcatcatcctttctgaagagaaggatgacctttgactttatgagcatttctgcattagattgaaagtttgttatttcagactttcagtaacttcacgaagagtgatatgaaaaaaagataggaagcatgagcggataagcatacactcacttgaattctggacatcctattgcctgatctttcaataatagcttactaagaacattctatgaaaattataagtatgaagattgtaagat

SEQ ID NO: 156351 - DNA, 294 bp, Glycine max
agctgggagggtggtttttttgtacgaccatctccgagaccttaaaaagactctcattaaaaagtttggtctccgaataattgatgtttacacaccagttgttcataggagagacacgaatcgcatgacccactcccttgtgagcgactcagatgcgatcggaagggaacatgatgaaaaaaagatcatatagcttttgatgcctcacaatcccaatgatgatgacaaaagtctttatgttaaccccattgtgggaattggatgcttgggaaaaactacccttgcaaagtttgt

SEQ ID NO: 156352 - DNA, 353 bp, Glycine max
actatgaaactcagcttaatgcatcggggtgacctgcatcaatgtataacatagttggatccgaatctttcgttattaatcaatgtactgatatgaaattatacgtatgtgtaaatatttatatacacattcataatatgtattttataaaattaaaaataattgaaaatttatattaaaattgcaataatataaaacgccaatcatgcttctaatcctttaaattaggggtctatttttttaatcctccaaataaaaattctcactcttatattctcaaaattttttacaaaaaaatattctttttaaccattccactcgaatttgagagaataaaaattatcttttttttg

SEQ ID NO: 156353 - DNA, 312 bp, Glycine max
agcttgtgttggacctctatcaagcaattaactcctctttcagaaccatgctatgtgctcgcgactggtctctttcttcccttcgcaacttgagttcactattgctaccccatagagctccgcgaaatttgttccggtcatactcttccttgcgagccctcttggtctcttgttcaagggctcttgcggtaattgcattctcttcccgtaacccggcacactccttcccaacgtgtgtagcggccaacttgaacttctccttggcaagttttgcctttcctaactcgcttttgagagcttggacttcttcgt

SEQ ID NO: 156354 - DNA, 340 bp, Glycine max
tctatataagctgaaccattttatcaataaacacaagttgagttttattcataaaattagagtttatctcttttatcttagtgagagtgattctcctaaattcttgagtgattcaagaacaccttggctgtatcaaaggacttccacaacctttgtgtgttgccctcgctggaaagagtgattctttccttcctttcatcatcacccttgttctttcaaaccacaattccagaaaatccacctctgcccagaattatctcgtggccataactcccattttacgcactcaaattaagtgattcttgagcctaaattgaatttcaaaacgagacctttcacc

SEQ ID NO: 156355 - DNA, 352 bp, Glycine max
actcaagcttgttcttgagtggggtgaggtactttatcttccttacaacaacatactcgggcttcatttaattatctatgggcttggcgaccactatcaacaaagtattttcgacacctactatatgttgattttaccaaagctgttatcggttcgttgcggccatccttcaataccttatttacacattctgagaggttgattatcatgtgaccatatctacgtgcttctttatcataagtcatgctccatttttccttatcaaattccatcaatccatgtctatatgggtggactcaactgactaaacttttctaaatttagatcacaagtatgtttgcaaggagtgtac

SEQ ID NO: 156356 - DNA, 314 bp, Glycine max
agcttgagctttttttgatttgccttgctcaccgccaggaatggtatgatgtggccttgggccatgaaaggccccattaccacgtgcccctttttcttctttggtgtctctgccttctcaaggagcttaaggaatggtatatgctacaccctgcgctggctttggagtaccacaaaatcgttagtgctctaattgctgtttaaatgtggactcaacaaagcttaaagcccattatgaccgaaataacgatcgtacaaatggacctagcctattaggcttcaacattccatgtgcccggaccatatattttaacc

SEQ ID NO: 156357 - DNA, 343 bp, Glycine max
tttggatgaaattgatcggcttaaagaagaactgcacgattgtgatgagaacataaacacacgtaaatcagaaattactactttggaatctctcattgctcagtcacgtgaagggcttaatcgttacaaagaagagagagacaagttacatggggagagaaagtatgtaacacctcttttctctctctctctctcaaaaaagttctatgtagactttttactagatgaaagaagaaatattgttacagtgaagaatgcatacaccgaaagtgtaggatggggtgccttccttagcaaaagtagaaacgagaaacatactaaactgcaaaagtatattatttat

SEQ ID NO: 156358 - DNA, 318 bp, Glycine max
gaggtgcgctagtattgcataattcaaaccatggatatttcataatcccataccaccaaattcttttttcattctcattttgtcccagtttagccaatttataccttttgatgtcacatatttcgaggcccaccaaaaactattcaccatcttctaaatttggtcttccatagaagcgagaatcaagaagacacttatgcaataagaagggattgcttgagcacaagatttgatcaacatttcctcaccagccatggatagatggtctaatatctattttaagtgctaattcacccatttcccccctagtcttacatt

SEQ ID NO: 156359 - DNA, 345 bp, Glycine max
tttaactgaatgcgcgacggtccaaatgatttttaaatggtgtaatcaattacaatatattggtaatcgattaccagtgtatctgaacgttgaaattcaaattcaattgtgaacagtcacatcttttcataaaatgcattgcgtaatcgatcacatgattatggtaatcgattaccagtgacaagttttgaataaaaggtcaagaggtgtaactcttgacatgattttctcaaggttataactcttccaatggttttattgaccacacatgaagagtctataaaagcaagaccttgacttgcatccaatatttttcttttgaacaattcttcttgaacaactttt

SEQ ID NO: 156360 - DNA, 314 bp, Glycine max
agcttcaccggatgattcctatcgaacatttcctaaccgacgtcatgcaaatttcgttcagggattgaattgagaactcgttaggcgacatctgtcgcgaagtagcgaccgatatttttcagccgacattgcacaattctttttaaaaaagctcgctggtcgataatggtctttttacggcagagtaagttttcttgttttggtgttgcataaaaaagttacaatgtacttcggctaggtttttcgtgcgagttcaaccgacattatgtttccgccaggaaaacattagcccacctctgcaaaaaaaatatttg

SEQ ID NO: 156361 - DNA, 344 bp, Glycine max
tgccgccacggagttttccgactatgctcttgtgtggtggaacaagctacaaaaggagagagcaagaaatgaagagccaatggttgatacatggacggagatgaaaaagatcatgaggaagcggtatgtgccggctagttactcaagggacttgaaattcaagctccaaaaactaacccaaggcaacaagggggttgaggagtatttcaaggaaatggatgtgctcatgattcaagcaaatattgaagaagatgaggaggtaactatggctcgatttcttaatggtttgactaatgatatccgtgatattgttgagctgcaggagtttgttgaaatggatgatt

SEQ ID NO: 156362 - DNA, 314 bp, Glycine max
agcttctatccgtttaactagctacttcagtctagaaaaagaatcagcttaaattaagtgttaaacaaagtcaacattcaaatacgtctagaacaactaatgacaagatatttacaatgtatttaagtacagaggaaacaacctcaattcgattttgatagagtaacattataaaaggtctgagaagatggtatctatatgagaagggaaatcttgatattcatagacaaggatgattgcgctaaagacataagttattgatactaactttggtaggttagtatctatttatagtcacatctagacatgaaata

SEQ ID NO: 156363 - DNA, 330 bp, Glycine max
ttgagaatttgagaacatgacaaatacaagtgacagcaatatccaagatatacaaatgggtgttggtcaatgtaccacatttaatagtacaaactaaaagaacaagaaaaacagaccaatttctaggcgtcttagaaaaaactttaaacaagacagttcacctaataagtttttggattagtagtaatcatatttgtgtaaataaatagcttaccagagttcattggactccatcgctggaacctaaaaggatatggtatgttgagaacagaagcaccagaaacactgttatgcctggaaatgggaagatattgccttccgaaaaacctt

SEQ ID NO: 156364 - DNA, 300 bp, Glycine max
agcttcaatggttcattacttcatttttgttcagtaggttacttgtgttaacagggaaaatcaacattgatggctgaagatattgaatgacatttgtttcaattaggtgtagtttgatagccacattaaagtttcatttatcataggactagataataagatgaccgttgttaattttaaccgggcatttatttgagttccacatttgtcgtccaaacattggcaacaaaaaagttcaaaatttaactctttctaagttgcaatccatatgatccccgagctcatttctttgaataaaaa

SEQ ID NO: 156365 - DNA, 339 bp, Glycine max
tcaagttataagaaataaatacacatggagagagaaaattctctataaatgaaggcgttttatccaattttgaaaataattaaatttctatgtatttactgtaaaaacttgttgaaacttgaaaaaagtaaaaaaaaaaaaaattgtactctatgaaggaaataatctcccaatatcaagagagagatatacccttagtatcaacaaaagtgcagggaattcgttcaatggaattctgtttttctttttttgaataattctgattctacgaaaaccaaatctcctattattgtcattcattgtagaaaacagaaatattttttttccctttccccattt

SEQ ID NO: 156366 - DNA, 317 bp, Glycine max
agcttatcttacctatctatctcccagatgtctttgcaaagattcaatagataaaaaacatgaagttctaattcaagatgttttctttgttgcatgggcataatgcaatcactctatgtctagcaatgattttattaagatgtccctacctttgagttctactaaaaattatcctctctcgagcgactaatccctaaaactgatgcatataaaaccttcaatgtatttctactaaggattaccctctttcaagcgccaaacccctaaagatgatgcaaggatgaaacatataatacatttgttggcattttaggcct

SEQ ID NO: 156367 - DNA, 331 bp, Glycine max
tggagatgcaatagtgctaaggtttctggttttagttaatccatatcgtcgacaattaacttggggtcttgtctttatgatatctaagttaaatgtgccaacctgattttagtatggcctttggcaaatgctgtaaaaacatatgcatgttcattaatcggaacgattcaacacctcattgatatgaacagacttttggcgtatcgctaaactaatcaattccgaatctgatgctatgctaactcgatgatatctactcccatatcatgtattacactccctccataatacaggtttctccctctaaaaaatccaaattcgaaatcattac

SEQ ID NO: 156368 - DNA, 319 bp, Glycine max
agcttctcaaggaggtatagcttagttatgattggggtgtgtgtagctaagctctagcttctcaaggaagttttctcaaagaagcttctcaaggaagttttctcaagaaagcttctcaaggaagctacctagtctataaatagaagcatgtgtaacacttgttgtaactttgatgaatgagagtcttgtgagacacaactcaaagttcaacttctctccctttttcttccttcaatttcgtgctccccactctctctttctctccctctttcttttcctccattgaagcatcctctccaagcttcttatccaaggctca

SEQ ID NO: 156369 - DNA, 348 bp, Glycine max
ttgtgaacatattagttggattctccctcatataaaatttttggattcaaccctctcctccacctcccaaagaagccacaaaacaaattaacggcttccaactaaagagcctcaccatttgtacaccagtcactcgaggggagaaataaaccatgaattttatttctcatccttcaaacaactatctgagtgtgaaaaaaggtagtattcttacttcccaggttaatccattgatcacgtgacttttgaaaccaaagggttcctctttaaaaagagcaagctcatattccttggacaagtcttgatcactaaatcataaagggccctattcaaccttttatgcatctc

SEQ ID NO: 156370 - DNA, 309 bp, Glycine max
agcttgttcctagtgttcttgatcctgagtcttcaagcttaggtaaatgaacttcattcttcatcctagacttgattcctcttcattctcttgttctagcttcttaaataacttgaaattatcattttgtatactcatgaatggaaactttgaaaaaactgaatattctccattctccttcaagatttcgtgagttcatcaagaggtaaggggggtctttccaactcttgaaccctatgattgttgataaacttccttgaacatgttgttgctttgaaatttttgaacttcctgtcatgtcctgaatcc

SEQ ID NO: 156371 - DNA, 344 bp, Glycine max
taaaaaatgtgggtgggagcagtaaggggagatctagaagaggaaagggaacttttcgaagcagcatgtccagcaaaatgaatgatgatagtcacacaaaaatcattaaaatcgaatgcatctaagcagtggaagatgcacaattaaaatcgaatcacacagaggagagttaggtcatgaaaggagagaactcagaggagaaattaccttagcattgtgacgtgaagcaaagcttggagcacgagtgaggaccagtgaggcagcgttggtcgacgatgacggaggacggaggaccatgactgagggctagcgatgacgatgcgagtgaacaacggtgagtaaca

SEQ ID NO: 156372 - DNA, 316 bp, Glycine max
agcttgaggaggctttatttttggtggagagtgaattgaacatgaagatagatttgaaagagcaattttggatattggcaaggaggaatgagtcatttctaagacaaaaatctagatctagatggttagtggaaggagacaacaactcaatattcttccatggtactattaattggaggagaaggaaaaatctacataggggtctacatattgatgggatttaggaggtggatcctaagaaagtaaaatgggaggtgaagaatttctttcaaaaaatattcttggtggaggatttggatcggccaaagcttgatgg

SEQ ID NO: 156373 - DNA, 344 bp, Glycine max
tccgaatcacatgtttgaaaaagattatgaaactcaataaaccaagaggaggtgaattggttttcaaaacaaaatatacctttaaaaatagagttacaaaaaaactttttgtatggatcgtatcacaaaataaatatgaattgaacgtaatcaatacataattaatcattccttaaacataatctttcattaacatcttttctttcacaatcataaaacttgaatctttatgaaaaacttgattaaaacttgaatgagttgattaaaccttgaatgagagaaaaaaatagaacaagagaagaatgacacaatcttttatactggttcattctttatttttagag

SEQ ID NO: 156374 - DNA, 319 bp, Glycine max
agcttgaaggaattattatcgcaggtcatacaaaccccagagcagcatacttatttagcaagattgatgggatatgattaccagataattcatcattctggagccttgaaccaagctgctgatgctctttcgcgtctgccagagcataattcctcattgatgatgttatcggtaccatgtcttactttcatggaggagctccgccggcagctggaagcttcctcagaatatgtgaatcagaggcaagcaattggtcaatctcctaccacattcccaggttattcagttgtcaacaacctcattctgcaccaaaagcgca

SEQ ID NO: 156375 - DNA, 344 bp, Glycine max
tttgaacttcaaatgctttaggatgtgaatcacttctgttgtcctaaatgcttgcatccatgaacatatatagaagaaataattggagaggaatcgttggctgcatgaatcactgaggtgggaggactataagacaagactgattggatgggacagacagggagacaagggcatatggactgccttggaggactttctcgcgtgaaataaaatagatgtcaggcatcagaaataattaaaatgatatatgacctctcgctatccgctgccttataattcatcagccagaaattaccttccagaacatgcccagagcatgtttacaaaaatatggaataccaaat

SEQ ID NO: 156376 - DNA, 317 bp, Glycine max
agcttgtgcttttattaaaaggttcatcaagtcaagttgaagtatggaagtaaccgtcttgcgaaaaattggggcaaaagatggatcgtgttacatcgctccttcgtctactgccaaacacatttagggctgtcaatgtccctgttacttccagtttgaccttgacaaagatgtcatggaccaagttgaaaatctaaattgattcaaccccatgtcctgtgtaaaaattcgtaatacttcaactatgcatcattcgcatacatccatgcttttcattggttgcattgctcattacattcttttcttgaaaaaaaagg

SEQ ID NO: 156377 - DNA, 320 bp, Glycine max
tgaaataacccaatattctttgttttaccaagtcattattagctctatacaaatcaaaagatttgtatttgatttgctcactgactaattattaatcgtcttacaaatgaatatacaatctaagtacttagtattttctctagggtgtttaaggtgttttgagagctttacaatctttactataatacacaaagaactttttacaaaaagaatttgaatgttagtgcgtaggttcgtaactcatatcttcaaagcttctactatttataggtcttcttctttaagtgttctttgtctttaatgaattaattcttctcttg

SEQ ID NO: 156378 - DNA, 236 bp, Glycine max
agctggtgcggttatttctttgccacctgctgtggcgtggactttaacatagagtttgaatgcttttccctttaactccccttaaatcataagggatgacgctatcacaaattgtggataacactgaatctactaatatcccttttcaaagggagttcttaccattactgatacctacctaagaatatatatttcccctaacccttaaaaatcctttgaaactttggtggacaaga

SEQ ID NO: 156379 - DNA, 313 bp, Glycine max
agctttgtgtaatcttttacaaggatttggtaatcgattaccagtgacaagttttgaagaaaaatcaaaagatgtaactattccaattgttttcaggtttttctaaaggttataactcttccaatggttttcttgaccagacttgaagagtctataaaaataataccttgatttgcatttaaaaaaaaaacttacaatacttacaacctttacaaacaacttttccacatattcttttacaacctttgaatctctttgaacttcttcttcttcttcctttgcaaaaagctttctaaagttttctggttttcca

SEQ ID NO: 156380 - DNA, 342 bp, Glycine max
tgagctggtcgatatttcaaatttttggagttttatatttttacattctctaagcaacaatctacctgcatgtttgatagaaattcagtctatatctttatcctatgttcctgatttaatttatattttagttttagaaagtctcttaaggcttaagcaaatcaaaacaaaaataaaacctttaaaatactaagcaattatagggaacaagagtgttgcttgtatttcagtctaataaatatgacataaaattttgcacgttacatttgacatgcaacgatatggtctttatggttgatccgaaactcaactattgtttgtatgattcattagttggatttc

SEQ ID NO: 156381 - DNA, 310 bp, Glycine max
agctttgagccaatttaaacgacaaaaacgttttactcggatgtctgattgagtcccgtcatatatcgagacgctcgaaattgaatgttgaagctccgagccaattcaaacgacaataactttttactcagatgtctgattgagtcccataatataacgagacgctcgaaattgaatgttgaagctctgagctaattcaaacgacaatagctttttactcggatgtctgattgagtcccgtaatatatcgagaccctcgaaattgaatgttgaagctcttaccccattcaaacgacaataacttcttact

SEQ ID NO: 156382 - DNA, 224 bp, Glycine max
taaacattggcggtcgagccttattatatattaccggacccaattaaatatccgagaaaaaagttcttgtcgctcgaattgcctcaaagctttaacatttaatttctggcgtttcgatatatgacaggactcaatcagacattcgagttaaaagttattgtcctcttcatcggctcagaggttcaacattcaatttcgagcgtctccgctattttaccggactc

SEQ ID NO: 156383 - DNA, 316 bp, Glycine max
agcttgcttgtggattttttatagaggctggatctttgagcttcaatgaggccctttaatggtgattttccacaatggagatgcagcggaagacaaaggataagaggtgagaggaggcgccatccactagggaataagccatggaagaaggaggttcaccaccaagatgaggcttggataagaagcttggaaggatgcttcaatggaggaaaagaaagagggagagaaatagagaggggggagcacgaaattgaaggaagaaaaagggagagaagttgaactttgagtagtgtttcacaagactcttattcattaa

SEQ ID NO: 156384 - DNA, 341 bp, Glycine max
ttgagaaaagaagtctcaagaacacttgtatgaagcttggaaaaagaagaagaaaatggattccccttcctcccttgaagaactcgtgcacaacaatggagaatgaaggttccaagtgtgatatttttttagaagtgaagagataataaggcttcaggcatggttcaaatgagacatgattagggttaaagttgacaagatcaaattgacaacatgaatgaccatttgatagccatggtgtgtgacaccctttaccccgacatatatataaataaataaaatatataaaaatattggtaaacaaattcacgtgggtaaaaggttcgcattcacttcaccat

SEQ ID NO: 156385 - DNA, 300 bp, Glycine max
ctcccttgtgtgcaatatcaacctggtcatgtgggctctatataaatgcaaagatggataatgcattacatagtggtttatatccaaactatctattgtgcaggagagagatccctccatagtttctcctcaatgttattgtgggtgactttatattcccatcgaatgcaagtgaattataacccatgaaacaagatgaatgatacctgggccaatctaccaaatgtaaaaacaaacatttcccttattcgttatttaggatactgaagtatctttatcaaaggtttgacaagcagtttt

SEQ ID NO: 156386 - DNA, 118 bp, Glycine max
aatgattttttaataaaccttacacagctttaccattaagctagcggcaatggtatctgaacaaaaggttaattccttatatacacaaaatgttgataataatgggaatcaagtagag

SEQ ID NO: 156387 - DNA, 312 bp, Glycine max
agcttagattaagtgtaacatgtatttagatttttataatgcattggaccgggtttgggtacctacgaaatacatttatgaatccaaaacctgaccgtacttaaacattttaaacaaaacatttcacatgtttaaccaatggactaatccaattcgtcaactatggattttctcggttcaggcatttcgaatctcagtcggttcaacattttatgctcaccactattttttttgtttttttatctatcaataataataataataatatattaatagcacaacaccaggagtgttgaaaatacaaagtgagta

SEQ ID NO: 156388 - DNA, 337 bp, Glycine max
tgtaactcatgacaatttctttaaaactagtcacttaaaaagttatgaattttgaaagaatcttcagaaacaagtcacttgaagaattgtgactttcggaaatgtatttttcgaaatcagtcactggtaatcgaataccattaaggtgtaatcgattacacatcaacaaatgtgactcttcattttgaattttgaaaatcttaacattttaaaacactggtaatcgattacatgattatggtaatcgattatagctttgtaaatcaatttgaaaaacaatgttggctactggtaatcgattactaccttctggtaatcaattaccagagagtaaaac

SEQ ID NO: 156389 - DNA, 316 bp, Glycine max
agcttgcctcaaagaggtccaggaaagacaaggcagccgaaggaactagttccgctccggagtacgacagtcaccgctttaggagcgctgtacaccagcagcgcttcgaagccatcaagggatggtcgtttctccgggagcgacgcgtccagctcagggacgacgagtatactgattttcaggaggaaatagggcgccggcggtgggcaccactggttactcctatggccaagtttgatccaaaaatagtccttgagttttatgccaatgcttggccaacagaggagggcgtgcgtgacatgaggtcctgggttag

SEQ ID NO: 156390 - DNA, 347 bp, Glycine max
tgtgcattcaatatcctgatgagggtgttccatatgttctcaagactggactaatacatttgttgccaaagtttcatggtcttgcaggtgaagatccttaaaagcatcttaaggagctccatattatttgtttcaccatgaagccccctgatgtccaagaagatcatatctttctaaaggcttttcttcattctctggagggagtggcaaaagattggctatactaccttgctcccaggtctattttcagctgggatgaccttaacagggtgttcttggagaaattcttccctgcatctacgaccactgccataagaaaagacatttcatgcatcaagcaacttggt

SEQ ID NO: 156391 - DNA, 317 bp, Glycine max
agcttataaggagaatcgtaagaagaagcaagagatcactgagtaactcttcaagattcaactgaaggagaatgaagaaagtcaaggaaatgagagaagtcaatgaggtcgaggtcgaggtcacggtcgaggaaaggttggacatgggatagtggacaaagttcaaatttcatcaataacaattacgagaaaggaaaaagctcaacaagagaacatggaagaggctatacaagcacaaggtatgataaatctcaaacctgatgctataactgtcaaaagattggccactatgcttcagaatgtagattcaccaagaa

SEQ ID NO: 156392 - DNA, 348 bp, Glycine max
tttggttcaaagatgcttttgaagatggtgaggaggaaaacactttgtccatactgggtcaaggtcacctaataatttctagtgaatccatagaactctctaagttctgtccatccagaaagtagagttgagctcaccagatcttggttatatgtgacagagtgcatgttgccactaaagtgtagcagatgccaagtaggctctagttcatccttccatcttacaacaaatgacctactgacttcaccgtaagactacatttaacaagcaaagtaatataagaaaaagtgttatatcatgtcttatttatttgagagtgttgaaatttctaacccgatccataacatg

SEQ ID NO: 156393 - DNA, 314 bp, Glycine max
agcttatgctttatgtgtcttctttaaataatgatcttgtggtagagaccccaactagaggtttcgtgttaacttcttatgtgtgtttgaattgtcctatagaaatttctggtagaacatgcttcattgatctgatttgtttacctttgagccaaattgatgttattttgggtatggactagttatcttccaaccatgtctagttaaactgttttgataaaactatggtgtttaatgattctagagtgagtaaggataagatgtttatctctgccaataaagtcatgacatctttgaaagaaaatgcccaagtt

SEQ ID NO: 156394 - DNA, 343 bp, Glycine max
tataagaatgaaattgcctaaatcatttccaaatatgcatgtgaattaggaagcatcaacaagaatcaagccaaggctattgtgcaagcaatcaatagggaaaaacacaccaaaagattatgatgatggatggctcgaattctcaccaaggtaaacttatcactttcaaattgagctttcaaaactatcatgacatgtaaaggaaaaacaaggatttcaagtcacaaaatgtcaagagacttttattttcagaacaattacccattgcttgaacatatcctataattcaaagacaagcatgcaaatttaacacaacaaaactaacaaaattaaactagaaccc

SEQ ID NO: 156395 - DNA, 317 bp, Glycine max
agcttggatgtaatgaatgtctttattaacagaaataacaaacttatcaaagggatggcaagagtatatgaaaataacaataagttcgcagaaacttgcaatctgggattatggaatcaattcaaagaaagtttatagtgagaggccatcagattactaataaaaaaaagaatattaccagaagagtagagacaacgagttggagctgccacagtaaacaatgacgtttgacgctgaatttgcgaaaatccattttccttaacctctcacaaactaataccatttaaaaccacctcttcttgggttgttacactatt

SEQ ID NO: 156396 - DNA, 341 bp, Glycine max
tttaaaaatttatgaatgcaacagctcatggaattaagtatcagttgatccaccctcgtgataataaacacaaaattcaatatataattcaaggaataactaaagagatagactttttgttgattaattcattttgaactttcaattagcactatttttatcggaatattttgttaattgttattgtgagataaatctataaaaacactaggaggtgaatgcgtgcgtgagggtgtggatagctgtgtgttgtgaatgtgatagtatacccgatgtagatcgcaaataatatgtatgacagctatattaacatcattttataaataaataattaaatactg

SEQ ID NO: 156397 - DNA, 320 bp, Glycine max
agcttcccgcatccgcacttggaaggatctgattatcgccttccttaggcagtaccagtacaactctgatatggctcttgaccggactcagctacaaaacatgtttaaaagggaaagcgagtcctttaaagagtacgctcagtgttggagggacttggcggcgcaagtagcccctcccatggttgagagggaaatgattaccatgatggtagacaccttgcctgtgttttactatgagaaattagtgggctacatgccctccagcttcgcaggcttggtattcgccggggaaaggatcgaagtgggcttgaaaaaaggga

SEQ ID NO: 156398 - DNA, 345 bp, Glycine max
tataagaacaaaattgcctaaatcatttccaaatatccatgtgaattaggaagcatcaacaagaatcaagccaaggctattgtgcaagcaatcaatggggcaaaacacaccaaaagattatgatgatggatggctcaaattctcacaaaggtaaacttatcactttcaaattgagctttcaaaactatcatgacatgtagaggaaaaacaaggatttcaaatcacaaaatgtcaagagacttttattttcagaacaattacccatttcctgaacatatcctataattcaaagaaaaatatgcaaagttgtacatgcaaagagaattgacctaaaatattaaacta

SEQ ID NO: 156399 - DNA, 315 bp, Glycine max
agcttcttaaaatataaaagataagagatagtttttatttttataaagataaagaaatatgaaattattttaaataattttttctaaaaaaaaggtccaaactcatatctctttaacattataaatagaaaacatctacctgagagaaaagtgtaccacacaaaaactagaaaagttaaagcctagttttagacctaaaaagtagaaagagagtttgctctttagagttccactcatcaaagagttgataacaaagattgatttcagtgtagatatacatagagtctttacaatattgaagaactttatactcta

SEQ ID NO: 156400 - DNA, 342 bp, Glycine max
taaaccctttgtggtgaagcacactcaccagcctcatcgcctccctcaggttcaggttcttcccattgcatacattgtcaatgaggatcgtgtaggtgaccagatcaggcttgacgtccaatttttcgcgcatttcgtcgatgaaggcatagacggcggttatggtgctggacttgcagaggtgcttgacgaggaagttgaaggtgtacgtgtccggggggcagtgtttggaggcgaattctttgatcaattctactgcttggtcgaggcgaccggccgagcatacggaccggactgccacttccgcggcggcagtgtccggggtgatccccgcggccagca

SEQ ID NO: 156401 - DNA, 312 bp, Glycine max
agcttgtaagatattttcttaataacctctcatatgaacatcattttataaagattaaaaaaatataacactagagttaatgttttttttttctttttctgactgcaaagagtttatggttttaacttataatattaatgaaatgtgaacatatatattcataacatgagaaattaaacataatctgtaattattggcatgttcttaacattttataggctcaaagaaaaataataaacgagggccactaatgtataaatatatatattccataatactatattttattatgtataaaatattttctctcca

SEQ ID NO: 156402 - DNA, 342 bp, Glycine max
  unsure (1)..(342): unsure at all n locations
tancagatatgggaaactaatttaattttttttaaaaaatacttcaaaataaatctttattccaacctaacaaaataacttacaaaaaatatgtgataccacacaaatttcgaaaaccacctaacaaaataacttacaaaaaaatattgatatcacagaaattttcaaacccacgaaaacgaaagcaactgcaagggaaaacagctgaaaaaaatggtgaaggaggaggtgtatttaaacaccctaaaacgccaaagccgttggcgttttccatattcttacaatgtcgccaaccccatttgcgcttccatgctgttgctgagcactaaaaagctactcctg

SEQ ID NO: 156403 - DNA, 315 bp, Glycine max
agcttaaatattcaacttctagcgtctcgatatattacgagtctcaatcaaacatccgagaaaaaaagttattgtcatttgaatttgctcagaggttcaacattcaatttcgagcgtctcgttatattacaggactcaatcagacattctagtaaaaagttattgtcgtttgaattagctcagagcttccacattcaatttcgagcgtctcgatatattacgggcctcaatcagacatccgagtaaaacgttattgtcgtttgaattggctcagagattcaacattcaatttcgagcgtttcgaaatatgacggg

SEQ ID NO: 156404 - DNA, 340 bp, Glycine max
tggatcgagggggtgacccgtttattatctaataaccatgaacaacgactgaacaacgtctaagaacggttcaaacttttgcgagattccttacggaaaacgttacggaaacgtttcggaagcgcctcggcttagattttcttcacggaaacaatttttccaagctaattccaaagagagagaagtgcctaaggggctggacccttttcttcttcacttcctcccctatttatagcaaaataggggaggtggttgccgtccatctcgcccaggcgagctcagctcgcccaggcgagcagggttgcttactccataagcaaccgccttctggaggaatctt

SEQ ID NO: 156405 - DNA, 297 bp, Glycine max
agctgggtgtgtttttttctgaggagagtggttttatccaatttgactctatcggaggaaataattatttcttttttccttaattgataactcgactaggaaggcatgagtctactcgattaaaagaaagagtgacgtgtctgatatgttcaaaaagtctgagtgccctattatcataaacaaagtggcaaatctctaaaatgttcattaacacatggtggtggcgagtatgattctaatgaattcaactttttttcttaaaaaaagggcaatattttctaagattactattcccta

SEQ ID NO: 156406 - DNA, 341 bp, Glycine max
cggaaggggcgcggcgccctgacaggataaatgcaagcaactctgtccgcggttttgagttagaagacttttgccatcttgaattgaagtgtcatttttcttctctaaatctctcttttccctaaatcaataaattactaacgatcaaactcaacttctttttaaggattaaatccaaaatttatcatggtgctttctacccgaccaaacaaaatggcgctttctaattacaaacaccttaaacctattctttattacacaatatctatggcacttttgaaaatctaaggattctgaccctgttatcgagaaactcttcttttctcttagtgtgctcaaac

SEQ ID NO: 156407 - DNA, 312 bp, Glycine max
agctgataagaacattattgccttaatcatttccaaatatgcatgtgaattaggacccatcaacaagaatcaagccaaggctattgtgcaagcaatcaatggggcaaaacacaccaaatgattataatgatggacggctcaaattctcacaaaggtaaaatcatcactttcaaattgagctttcaaaactatcatgacatgtagagaagaatcaaggatttcaagtcacaaaatgtcaaaaacttttattttcaaaacaatctacccatttcttgaacatatcctataattcaaagaaaaacatgcaaagtc

SEQ ID NO: 156408 - DNA, 331 bp, Glycine max
ttgactggagagacatggatatatttatatgattccgttgccggattaatgcactaattataggctcaataataatttatttatgagatgaatacgcttaatttttgggagaagattctgtgtatttgacctgaattgtaaatttggactgaacaatcccgtgataatagattaataagataaatgaaatgaaatagaatttaaatacaaatataataacgaataaatttggtgtcgttaggtatataatttaagtgctatattagtgaataatgtggttactttatcacattctggtctatttaatttatagaatctgagtctaaaaaga

SEQ ID NO: 156409 - DNA, 310 bp, Glycine max
agctttttggctcgtccctgtactgtacatgcattaatggcttatttcagtgccatcaatacatcattgagtagtagggtgcagttgatcattgctctgtcagcaactttatagtagttacaatgaatactgtgggcaccgttgaatatgacgagacaatgatgctagaaggatacgatgaaccacctataatatgatgctcccttctatgtaatataggggctctagtatcatcacccttttaaatttcttccgcacaaattactcgcctagtttttatattgctcctgtcctgtgacatttttttttg

SEQ ID NO: 156410 - DNA, 336 bp, Glycine max
tagcggttggggatttcaaggggcatgcgggtaataaacaaaaagaaagaaatgacagtgatagataccgcgatacaatcaatctaatttactcttctagaaaaaatcaacttaatttactttgtttttttagattccgtggctatcactactaaaaaaaataagtttttaaaattagttattaaaattttttaatatcaattataaattgatattgaaattatcgatcttaaaattcactaaataatattgattaacaaaatcaatgctgtaagtgcatcacaacatcaatcttaagaagaaaaattgatattgtgatttgatgttgttttttca

SEQ ID NO: 156411 - DNA, 316 bp, Glycine max
agcttgaactagctattaaagtagaaaagatggacactccttctagccaagttgtaagtatttgggggtagtatctttgatatggcaaacctttttttttttattgactttaattagtacatttcatattatatgcagcaacaaccttttatgggtacatatatttccattctcatcacaaacccatggataggaaaaagaaaaacaaaaaacatctagcttttgatgtagtgcttttgtaacatttgaattccactttaaaagccaaaggaacaagtgatgaatatacaacattaactcagcacgttttgcttta

SEQ ID NO: 156412 - DNA, 345 bp, Glycine max
tactcaaatgagttttgtcataattaacttaagtagtaagtaatgaaatgcaacaaaaaaagtgtaaaaagaaatttggaattgacagctggcaaaatatggatacttctaattcaaataatcatgacacatgtacctatagacatggattggtaacatccataaggaacttcatatcaagtatgtcctgaggaacaaaagtagcgttcattcattgataaaacatttagcctccccttctttaaaatcatatcttgtgtaattctaacaaagtgtacgaaattatgtgatgaatacatcataggtatttttgtttcttcttgtatacatgcgaaattgcatata

SEQ ID NO: 156413 - DNA, 316 bp, Glycine max
agctggatagggatgcattccaatggcagagtgaaaactgttattataagtgaactctatcaatggaagaaaactctcccaacttcccttctgctctaagacacatgctcttaaaaggtcctccaacgactgaatggtccgttcagtttggccatcattctgaggatggttggctgaactcactctaagtttggctcccaacgctctgttcaagctctcccaaaacctagaggtaaatctaggatctctatcagatactatgctagatggcacaccatgtaacctgacaacctcacttatatacaaggtggccaac

SEQ ID NO: 156414 - DNA, 341 bp, Glycine max
tcaaacttctgggtgttcttgtcaagctttttaaataagtcttgtcatcttattgctgtttgttttattattctaatggttgactataaatgggttgttaggagggaaaatctgctctatcaccctagactctgctgaaatacatagatgaacttccattgtgtgcaaggtattacggtttacaaatttttttgttctaatatagatttgcttgacaatgagtttaccccttggttaaaattaatctatgaatcaaacatttgatcatcggactcaaaaaagcatgtctgacggtttgtcacaattggtgacagtgtataatctttgaacactgcaatttt

SEQ ID NO: 156415 - DNA, 318 bp, Glycine max
agcttgtaattagtttgacaaaagtgtccgagacccatcatcattgattatgtgcttcattgcaacattcagattctttgtcatggtacccttatagaccttacctaaaattgaaatccattaataggaattcgttatacatacacattcaatcaagctaggagaatttaaataaataagtggatgtcttcaattggttaggcaaggcaaagaaccaagattttaagtttttaactctaggaacacttatccaattccatgttatgttagtgtgatcctgtatctgcattgatagtaaaatcagcctccacatatagt

SEQ ID NO: 156416 - DNA, 342 bp, Glycine max
tgtcaagacaacgcactcatcctctttttttaggtcctttaacttttgactatatatcgtttgtccaattagtagaatcttgggtgctttgtaaattttgtgaactctctgcttgaaccattttcttttttagttcattttacataaatacaccttataaattatcatcatgcatcatcaatactttaatgtcactaaacaaatctcatctcctcattagttactcttcctcacaccataaccctttattagaaaattgagaaaaaacataaaacaaagagaaagtattgaaataaaaatttaaattctcactattacaatagcaattttttcagtaacaac

SEQ ID NO: 156417 - DNA, 319 bp, Glycine max
agcttggatatatatcttttcttattggggattgtctttcattaaattaaaatttaaaatttagatttaaagttagcatatgcctataatccttaaggacgacaccaaatttagatacatcatcctttagttgaagaattctatgttctatcattttacaatctatctcaaagctcacattctacattcctattcctatgatcgattaaaaaagtaaatatatttactgtcctagaaacataaaaaaaattaatttttactatacaaagtaagattattaaaagaagaatattatcagaagatttattttaaattgatt

SEQ ID NO: 156418 - DNA, 346 bp, Glycine max
ttattatagaatcgtaaattcaccttactagggtttagtagcatttaacaccattatcaatttcagagagcacattttcaaacacaaagcaaaggcaatgctcaaatagggctaacctggggaggaagtcgcgagggaataggccacgaaaccaaatacggcttatttatcacgaggtatcgagaagatgaaacgacgatggcgtcgcagcagaacgtgggttaaggtggtgacaacgttgtagcacaatgcgggtgaggtggtgacaatatcgcagcagaacgtcgtgagttagagtcatgagggagaggaccatcgccaggccaaagggtaagagtgaaagtac

SEQ ID NO: 156419 - DNA, 310 bp, Glycine max
gagcttggagctttcttttccaccccaaactctggttaactaattgacggcccatttaaagagtactttaagagatccatatttctaaataaaagaatgttttcgtgaagcatagacaactcatgatttttctttctattgaaaaatctctaattgtttgattgccagtgagaatgatttaatgccatgaatattaattcttgtctacgggaagagattgactccccaaccttcattttttttactgctaaccattcaatacatctgattacgaaaagcaacttatctattcttggactgtgaccttata

SEQ ID NO: 156420 - DNA, 339 bp, Glycine max
tggccacgatgctctaagaattttttttccattcacgattgaacacttctgataagcacaatcatggtctttatactgattattaaaatgaatcgcaactaataaatagggttaaaaaaagaaatagacaagcaattttcctaaactgtaatcaaatgtaaaaccttttaatttgtacaataaagaatcttcgcacttaaacatagttttcagacgtcctatactcttccaaaactgtaatcaaatgtaaaacctgttaatcctgttttagttaaaaatcaaaaaccaaatattttaaagatacctacatgttccaaaatccccgctataaaaccattt

SEQ ID NO: 156421 - DNA, 313 bp, Glycine max
agcttcctatggacttaattgtgtcaccatagttcaccaactaaaccagcaaagaggtgatccctcttgctgcctgcttttgaattggacaagcacgtaacattggaactatgagcttagcaccaattacaatgtttgcagctagattgtgaagttcactagctagatagatatctagattgtaaacctaggtagctagtgacaagacacagcttgcatgcatgtcccaagcatgcaacaatattgtgacttctctccattagtgtatccttaccccaattttttaagcattcctatcattagttgtgcaacg

SEQ ID NO: 156422 - DNA, 342 bp, Glycine max
ttgaacaatatacttgcccttcatttaactgtctctgcgcttggcggccacgctcaacaaagtactttcgacacctactgtacgttgatttgaccaatgctgttatgggaatgttgcgacaatccttcaaaaccttgttgatacattctgagaggttggttgtcatgtggccatatcgacgtccttctctatcataagccatcgtccatttttcctttgaaatgcgatcaatccatgttgctatggctggactcagttcacgaaatttttctaaattttgatcaaaaatgtgcttgcaaggagtgtacgctgcataaaattagttatgaataacatggataa

SEQ ID NO: 156423 - DNA, 312 bp, Glycine max
agctttagagtggataaatgttttctccacactatttttgcttgtcctttgctcttcttttaattaggatttaagaccatatgtgaattctattccactttatctttcaatcatactaatggataatgccctacaattgaacttttggcatgtgtacatcttcctatgaaaggttcatgctagagttgggaagcatactttctttgcacaaattatagaaaaatacatgctttaaaatggggtcaagaggtttagcatggttataattgggaaggttttgttttatgtactaataagagtggttatgttaag

SEQ ID NO: 156424 - DNA, 342 bp, Glycine max
tgcccagagaaggagtccacggatgaaatgcttaccacctcaaaagactggaaagcagcttctaatgactcctctgcggcctccacataaggcatagaggatgggcagctcaccaagatgtcttcctcgcctgatacgatgaccagatgcccttccactacgaatttcaacttttggtggagtgtggagggaacaactcccactgagtggatccacggccgtcccaacagacaactgtagggggggttaatatccattatttggaaggtaacttgacaggtgtgagggtctatctgtaccgggagatcgatctcccccctaacctctcggcgggtaccgtct

SEQ ID NO: 156425 - DNA, 315 bp, Glycine max
agcttgtttctttgttgaacataatcttttctctgtcaaagtttagtgttaaataacttgttaaggttatctaacaactccttgtaacattaaattcttacacaagaaagactttgttaaccaaagagcacaatttgaccattatactttaatgatcattgggacaatacttcagatatataacataaaccttccaatcataacatgtgctatgcttatggtgtaaacggcagattatcttctggctttgactatcatctcatccaccattgcttagaccaaatattacactgaaattccaagagagtgaatcat

SEQ ID NO: 156426 - DNA, 343 bp, Glycine max
tcaccatcacctatggttccttcttttctttagtggggaatttgatttcaagatttattgcgagcacaaagggggaaagagataccattttcaattgatttcttccctattcttgtactcaacagatttcgcaaaaaaggaaaaagaaaaaatcaccaaaggaagaacaagagggagggaggagatatgagagaaatatattttgtgatgactaaaaacggttagtatccaagtattattaatggtattgattttaaactgataaaattaatcattttgaatcatttaaaaaaataactaaaatcaacattttaaaaaataaaaaagcaaagtaaaaaaataa

SEQ ID NO: 156427 - DNA, 315 bp, Glycine max
agcttcatccttagatccctctggctggactaggctcaacttaagcagcccttgtaggtttagactaatttaaactaagcttcgtccttagatccctcttgttggactaggctcagcttaatcagcttacgaaagtttacactaatttaatctaagcttcgttcgcaaatccctcttgttagactaggcttaaattaaacaacattttcatcacaacatattaagaaaactaaaacttaatcctctgatccctcttgttggacgaagtttcaatcctgcttctatcaatttctaaggcaacagttcattttccaa

SEQ ID NO: 156428 - DNA, 343 bp, Glycine max
tgccgccacggagttgtccgactatgctcttgtgtggtggaacaagctacaaaaggagagagcaagaaatgaagagccaatggttgatacatggacggagatgaaaaagatcatgaggaagcaatatgtgccggctagttactcaagggacttgaaattcaagctccaaaaactaacccaaggcaacaagggggttgaggagtatttcaaggaaatggatgtgctcatgattcaagcaaatattgaagaagatgaggaggtaactatggcttgatttcttaatggtttgactaaatgatatccgcgatattgttgagcttgaggagtttgttgaaatggatga

SEQ ID NO: 156429 - DNA, 312 bp, Glycine max
  unsure (1)..(312): unsure at all n locations
agcttttatgccacttgcaatngctctagcatggtttattgacttgcagtcataaaaaactgcatctaggggaagccccacaaataatcttacaccatctacctgcaaaacatattattctattcatgttagttaccttctaatgcctccagctagacattataattataattatatgaaaaactcagtgtatctggccacctaacatataacataactacatgatatttgaatgaagcacaataataaaccgacttatggttctcattcatcaatgtaatcagggttaacaaaagaataaaacgttacaat

SEQ ID NO: 156430 - DNA, 323 bp, Glycine max
taaaaacttttctttgagacggacgcgaaactgagcaaatcgcttatgccctaaaaatagaggactgtgttgtacgtcagaggcgcgaatctatttgtccgacacaattccttgactgttagagtttattttatggcatgaaacaacttgaagcatacgtctagggtattgatatatcaagcatgtttttgttgaccacgacgatgtctaacactcactctctatgataatacacatggcttaacacgaactaaactcacccttaggaatatccttatttaaaaataacttctgagacccgtcttattcaaatatgataattc

SEQ ID NO: 156431 - DNA, 300 bp, Glycine max
agcttgacaactttttttcttttccatcattaatcttcaatatgtatgataaagtataaagaattggttcctatcactttcacatgggagtggaagaaatagtgcaaaagacaaaacttaaagatcttttggaatttgatgtcctgctattgttaggcacaattatttttcgcatggacattttaagtggacattaaccattttcgaaagttcactagccataacctatcaaaacttgatcaaaaatgattgccaatttttatgaagttacatataccaccaacaatatctatagttccc

SEQ ID NO: 156432 - DNA, 323 bp, Glycine max
tatggaggtaatacattattgtgatttattcctcgtaaaaagtaattgtgtttttaaataatttcatcactgtgtacaactcaatgaatcttgcaacagaacagatcactaatttatccttctctcaaaatctgtaaagaataatcactgaacatcttttactttagatttttttgtacagtctttgggaaaccagccccatgtgacgatcatgtgctcttccattaatacaacagtcgaaagatgctatattcactatatcaatggaaaagcatattggtgggggtctataccactacttattaccatcatcttccgtgcaa

SEQ ID NO: 156433 - DNA, 312 bp, Glycine max
  unsure (1)..(312): unsure at all n locations
agcttattgcttggaaaccaacactagataagataccctgatttttgaatttatctcacaggaataccatcaatgacaatgaagtattgtgtgtgggatgtgttttgactgtaaatatacttgggacttgttctttgaatgcaatttttttctctagagtttgctgcggttactttaggtggtggggtattcattttgcacaatataatgactctccttctaacttctcacaattcgtgggttttccaanttgcaatgattagaatgagttaccgtgataacaatttggtttgtagtgttttggacaaaatg

SEQ ID NO: 156434 - DNA, 336 bp, Glycine max
ttgttagtttccaccaaagaactaatctagccaagttttgagtagtctctcttttcaatcatgttcttgtatatgcaaaactcgaatatgagatgctggttaatggatctaaactccgtttcacttgaaccaacataatgttggttgagattcatggtttgaatttatttctagaatgaaaaatttaaaaagaatttaaaacatctattaattaagatattaaattttattgaaaaaattaaacaagtttaggtatacatgaataatatctacaatattaataattgtttctattattgtacatttataataaatagtcagagacatgtccaaaaa

SEQ ID NO: 156435 - DNA, 66 bp, Glycine max
tacgatgatttaccataaaaactcaccacgttcctgataacacccttgagacttaaaagtcacacc

SEQ ID NO: 156436 - DNA, 443 bp, Glycine max
gtcacctgccgcatgcaagcttatatacttaatgacgcccatgcttttataccaattttgtcctcaacaattttgaagaatctaatgctatttaaataagaatgaatctagaccattgtcacaataatcaattgtatttgtagactttattcttgtcatcaatgtctacattgcaaaaccatttccaatgtatagttgtgccaacggccagccatgtcaataacattaattaccaagcagtaaatttcttcacttcaaatccaaactttttttcatacactcataaaccatgtacgtgatgcttgctgaccgtacaactttgagtaagttaggaaatattcctttgtagaaccccctcaaaccttcatgttgaagggttcttctgaatacatcagccatttccttatatgagcgctgagcctgcattctgaaaacaacatgtc

SEQ ID NO: 156437 - DNA, 265 bp, Glycine max
  unsure (1)..(265): unsure at all n locations
agctngggaagaagaggctacaaacatgatcatataattcaaggtgattttgaaaaaggcttttccaccaccataggtaacatccattgttaggggggaggtgatggttgtgttctcacctgtatttatttctgtgtaacattacacaacatattgtcgttatgtcaaaatgaacgggacgaaacatcggagttgttaattgctatatgttgccaacaatatgtggtttctatattgccaactatttttggttgatcgtttgttc

SEQ ID NO: 156438 - DNA, 415 bp, Glycine max
ttgagggtgcgtagcccaccatctcttcatagtagagtattcattatgtgtctaccatcacgatcatcgtctccctttccatcattgggggtaccacctgggccgccagatccctccaccttttgggcgtgttctttgaaagatccgtccccctttctgcaaatgttctgtagttgcatcctatccggaaccatatcaaaattgtactgatactgcctaacaaacgcaaccattatggtcttccaagaatggactcgggaagattccaagttagtgtaccatgtaacagctaccccagttagactttcttggaaggaatgtattaccaattccttatcttttgcgtattcccccatcttctgacaatacatctttagatggttcttgagacaagtagtccccttgtacttgtcaa

SEQ ID NO: 156439 - DNA, 431 bp, Glycine max
  unsure (1)..(431): unsure at all n locations
agcttgtatatnggatagcaggtggaatatctgtcctatctgtgctattggaaaaaaaagctaggcgtggtgagctagctttatatgttcttcccagagcagtagattcattatggtatatcttggtgaacaggcacctccttccaaatatcaggaatgctgaggtatgccctctagttactttgcactgaattaaaggaaacccttttctgatctgtttttctagcatcctccgaaaataattttctagaactctagtgccaaccatacttttttatgaaatgaaagtcagtttttatggttgatacctctttagatgcttctttagttccaatatctatccgtgcagttagagaatgtgagagttttattaaacgggataagaacaatatctcccaccatgtctctagtggcagtatgcttgtctttgt

SEQ ID NO: 156440 - DNA, 375 bp, Glycine max
  unsure (1)..(375): unsure at all n locations
tttcttttgctgattttcattttagattatccatagcattgtttctggtaggtcactacgtcacagattnttttctctctcatcccttattcccttcaggcctcattctgcaatattttgagctttatttgccttgagacctggtatggtttaactaaccctttntactacctgttctgacgaacaatgcagactcctgtgcacacaattgcttcaaatgccggagttgacggtgctgttgttgttggtaaactattggaacagaatgatcctgatcttggatatgatgcagccaaaggtaagggttcttggttgctttttgcggatgtgcttacttctgtcaaaagatatagccatttcattgttattgattct

SEQ ID NO: 156441 - DNA, 429 bp, Glycine max
  unsure (1)..(429): unsure at all n locations
agcttcccagttggtagactagaacaatatcatttgttctcgatcaatgatcaactaaaaaatagtactagtaggtattcttataatagtaatgtttattttcctacaaatnttactactactttataaaaaaaaaagtattaaacgaaaaaataaacgaatttgatgtcttggaaatataatatgcattcaatacttaccatataaaaaattacgaagatgactacacggatattggataagcatttacaattattcttctcccaaacatcatccagtcatacaaattaacttgggggattaaaatgcatgtctgtactctccattcagtcagttatcatagacatcaatgtgttcaaatgcatccgtacctggaggacattccacagcagcttcaagaactctatggtgcctcccacgagaatcaat

SEQ ID NO: 156442 - DNA, 453 bp, Glycine max
  unsure (1)..(453): unsure at all n locations
tcaagcttgcaaggttctgcttcttcaataatctcttgggtacttttttttggcgcggcagcaaacttatatgtgttctgtgctcgccatgtattntttattttttgggatcaaagcctaatatataacatatgaacactggttgaacaggtttttaatgaagttgaacagtgagaccatatcaattgagctcaagaatggcactattgttcatgacaccattacaagcttcttttcttcctcaatatttctttttttggcggcatataagtgttgaaccatttataaataacatatattagagttggattggaatagtgaggcgcttaattatttgcaagggtactctactccttctgaacattctcatttcttgggtgctctatgttgtacgaattattggtggatgatgcctcgatgctggctggcgactctactgcgctgtgcggaggg

SEQ ID NO: 156443 - DNA, 431 bp, Glycine max
agcttgatctttatcatattaaataattctttctcttgaatgttctaatccaaaatgctattagctgatcagtacacatgttaaacacctaaactaatatacatcaatgagtaattacaagaagggaaatataaaattgagataagatctaatataaagttgaaatttgggcacggccgggcactaaccgacaacaataaattataacattgatatatgcaccatctattatgggactgtaaaaatatacatacagtgatctaaacatgcaaataaatttagatagcatatctagatcaaatagcggaaattaaaagaattacgagcgtacctccagccattgcaaattgaacggaaagctacgcacacaccaacctgaaagacagttttgttcttccagaaccttactcactctgaatagatggtgtatt

SEQ ID NO: 156444 - DNA, 289 bp, Glycine max
ctttctttgtctaacatacatacctgctcacacttatgaaaagaaacacaaactccatcacaatcatgcattcgatccaacaatcaatcataacacccattttcacacaaagataacaaatgtttccctgcataatcatcacaggtccagtccaactgttccatatgcctcaaaacaagcatactaactaaccacacagaacaacaacagcgtatataaacattaaccaaaattcactaacacaatgtacagaaactataatcattataataataatccaaaaagcatc

SEQ ID NO: 156445 - DNA, 423 bp, Glycine max
  unsure (1)..(423): unsure at all n locations
agctntcgtttatggacttcaacaacgtttcttcaacgatgtgtgtgtgattctgttaaacagtgctgaagttgtttttgcgataagtgattaatgtgtcattgtagtatttaatttgggttaaggtgttaactatgatcacttataaattttccatgttgggggtttcgatttttgtggggttttggttgtttgtaaactgatatctataaatttggatttcgatttatgttgattttattttggggaaggggggggtcttaatgggtttaaattgggaataattaatttggcatattaattgtgtttttggtaggttatacaacatggattggacaagagaagaattcatggttgtaatgcaccacatgggacagttcaagtcgagccatccttgcattatgctcgatgtttaaaaggata

SEQ ID NO: 156446 - DNA, 483 bp, Glycine max
  unsure (1)..(483): unsure at all n locations
atttcttcttctctttcctcgatgggagaaattagtctctcctcaagctcttcttgaaatctcttacttttatccatgttgatcccacctaaatcaaactcttcctctttggatagtcctaataagttagatcaaacattttcttgttagtaacttagaatccttagcaataaaacatattcaaagaacacatggtcattgctaaataggtgcatgtttagattaaaatttagtagtacttttgttcttccaaactttaattcaaatatagactatgtctatagcgataagtaagagttgagttattcgtcaatatttgaacttgacttgatcaattaaacttggttgcttaattaaattaataaaatttaagtntaacttgagtttgattatttcaacaagtttaaatctaagttctacaaatttgacattgtctggtaagagagggttataatcgatcttaatctcaagtgtctattattt

SEQ ID NO: 156447 - DNA, 362 bp, Glycine max
  unsure (1)..(362): unsure at all n locations
agcttcatattatcaaattagccatgctgttcactattataaaacttaagggcaggggcaatcgctagcaacaaatagaggtaattaacttatcataggggcaattgctcgtcactgttataaaacttaaaggcaggggcagtatgcttcatattctcatcattggtttgatatttggtatcaacctaatagaactctgcaacaagggaaattgctagcaacaaatggaggtaattaacttatcatagtagtatgaataggaatacctcaagcagccttcaaagaataaggtactnctggtgctcttcttctttagcttgcgattaaagatgaaccggtgaaacaataacaacagtaacaaa

SEQ ID NO: 156448 - DNA, 336 bp, Glycine max
  unsure (1)..(336): unsure at all n locations
cttgggtggtgaaaaaatgacggtttacggtatacgtggtgtttttggagaagatgagagtgaaaattcccgtttttcacgctgaggaagtatntataacctacaaatttcgcttagcgagatttttgcgctaagccaaagtctacttcttgtgcttagcgcaagaatttaagcttagcgcagccccctctgcactagggcgagcttagcgcacccctgngcgctcagcgcaacttcctctctggttgaaattgggcttagcgcacctctacgcactcaatgaaacttcctctattgttaaatngngcttagtggaccctctggcgctcagcacaa

SEQ ID NO: 156449 - DNA, 429 bp, Glycine max
agcttgtctcgggaaatattggttctaatatggtactaatcgcatatttatgggcttgtacagatccaaaaaatttgtttagtggagacaataatttttttatcaatggcaataaaaacaccacaacaactatcatttatatagatagatagataaatatatacccaaatattgttattgatccataataaatttttcttcatttttgttccctgatatttgacatggttttttaaattgtagtcattagttaagtgatgacatgtcactactaaaaaatagggtttcaacattggttattaaggactttccacatctgttattaaccgatgatgaaagtaccaacgttgaaagtaatattcttcacatcgatttttccaaaccgatattaatataaaactacaacatccgctattgaaataactgatg

SEQ ID NO: 156450 - DNA, 333 bp, Glycine max
  unsure (1)..(333): unsure at all n locations
tcctctaatgactatggcatcatttttggcgcttaacctgtgggaagtggaggccatccttctcaataaatttattgcttcaacaggagtcatgtctcacaggcttcaccaatggcaacatctatcatacttctctccatattactgaagtcctcataaaaatattggagaagaagctgttctgaaatctgatggtgggggccactgacacatagtttcttaaatctctcccagtactcatacangctctctccactgagttgtctaatacctgagatatcctttctgatggctgtggtcctggaaacacggaaaatttttctaaaatactct

SEQ ID NO: 156451 - DNA, 411 bp, Glycine max
  unsure (1)..(411): unsure at all n locations
agcttgatttgtgagttgattntagccttattttcactttggttattagtcaattcattcaaggaaacttccaaagaaaaacgttcgattgattattttattatttttttttcgagatattttgattattttattattatttgctttttttggtttaactaaggttatagcgtgaacgatcggttagattttgttttaatagtgattaaacaagattacaacacacatgatcggttgaaattcattttatcatttattaggtgagaaaacgacttaaatacggttaaaagctcgttaaagcggaagaaaagaaaactgaaagtaagcgaaattgaagtgaaagaacacaaaacaagtacggaccactaagggtgcatagaatgaattgaaagattccatttcggaacttac

SEQ ID NO: 156452 - DNA, 390 bp, Glycine max
  unsure (1)..(390): unsure at all n locations
tctagagaaagctacatggagctgcctcggtaaaaactatgcccagcgtttgttaaccgttggatcttctccaaatttggtctgcaactccacaagacaatttttcattatctgaccgttgggatctttgagaagatatctggagtgtgctacaagcctcttaatgaatcttctggaggaagcctcttaatgaagcttcttgagaaaactacatggagctgcctcggtagaaacgctgcccagccttcgttaaccgttggatcttctcgaaatttggtttgcaacttcacaagacactntaccatgatttaaccgctgggatctttgagaaaatatctggagtgtgctagaagctcccgttcccgagagcatctcttatttaagcatttc

SEQ ID NO: 156453 - DNA, 419 bp, Glycine max
  unsure (1)..(419): unsure at all n locations
agctnttatgtatagcacatattgttcatgcatntcagaacattcaaaccttatcttgagtatagtgtaaacaacctgtgatgattgaatttaagttaaaataagttgatttttaaaacttgacctcacctctgtggacttgctaaaggagcaatggcaaacagtcagctttccatcgcggtatcttgaaatgatttttacattatatgtaaaaagtcacataccactgcgcacgtgtgtgtaaaatactaaaattaggttcatgttctgttttatgcacacacccctctgcctcaaaaaaagaaaaaatgataaactaccaaatgattgtttcagaaatgaaagaagtcttacatggtcttttacttacataagaatggaaactgcagagaaagtaacagcaaaagtgttactatctg

SEQ ID NO: 156454 - DNA, 382 bp, Glycine max
  unsure (1)..(382): unsure at all n locations
gatgacggtattgctcgtaagtgcttaactccttgtgctttgttggtgaccaaaatatgtattataagacaccaaatccctatgataggttgtatgacgaatgtaatgagtagtgcaaccctcctttgtaaaatcacctatgcatccaacatcttcatgattcacatacatagggactcattaggtaggttttttcttatttttagtttcaatagaaacttangggctcatatgggacaccttacgtttgtcatactttntggtaggaataatcaacatgaacatatagaaaaggtatggtttattgcattactttccttaatttttaaatagtgatcaatgggttcccacgaaccttaagagaataaaggtcattcatgag

SEQ ID NO: 156455 - DNA, 414 bp, Glycine max
agcttccgtcgtggttaatattatttatttttaacgagtttggttaattagtcatacactgatggcacgactaggattgttaatgggttggtctcttaagccaagcagtttcttctcctttattgctggatcctccaacagaagaaccttgttcttttctctaaccccaaccatatgtagatattcatcatcatctctctctttacccttgaagagaagcctttgctctctgggctcaaaacttgttaccagtgaaagaatcattttcaattctcctgcaaattattagttgttcacaacttttgtcatgcatatatccatatgaggtttatctctaataagtgaaaagaataaaattttgggtgataaataagcatcgagcagcttagaaagaaaataaacactttggttttt

SEQ ID NO: 156456 - DNA, 426 bp, Glycine max
gctttgtgaatactggacatcaagattgcgtttgacacaagtcaatcaattttgttcttagaaatgcgacctaagtgcttatgccataatgctcttgagtttgtattatcaaatctacgcttagtaccacacaattctacattaaaggattcaccataggaagctatagcgtcaagtaaatatagattatcattagccaagagtgaactatttccaacaatatctgaatcgaaagacaacctaaacacattgtttccaaatgaacacaaataaccgaatttgtccaaataagaaactaaaaccaaattccgtctaaatgacggtacaacaaaattgtctttcagatccaaataaataccagtacataataataatctaaaatgccttatagcttccacctctaccaatctaccatatgcaacatag

SEQ ID NO: 156457 - DNA, 347 bp, Glycine max
tctaagcttggacaaatggatgagttggagagaagctcatgatatgattattgaagagtttcaaggctgccttatttacctcctcttctgattcagagcttgatcattctgatgtagcgtttgccatcagatagaggttggcttcttcttcctcttttgcttcttcatcagatgatgtgtcgactagttcttgccatgtgcttattagtactttcttgtcctttgactagaagtacctcttttgggagttgacttatcaagatctagacattctgacttgaagtgtcctgcgttcttgcactcgtaccatatgttggatctttcatctttgccctttctttctctat

SEQ ID NO: 156458 - DNA, 183 bp, Glycine max
aaaaaattaaaaggggtaatgactttcgtttttaacttacaaaagataccccaccccttaatcttgaaggtgaagcctaaagagatgaaaatgtgtcaatgacttggtatttacaccatcaaagggcacacaacctctctatctttaaagcgaagtcccaagagatataaatgtgaataactt

SEQ ID NO: 156459 - DNA, 382 bp, Glycine max
  unsure (1)..(382): unsure at all n locations
cgggtttatatatctgaacatactaccataaccatcataataagaaaatgtctaaactactaaaggaatattcaacacttaaaagacatatcagtaatcatactaagcacaatgacttggcatttcatcaactcaacatctttaattgagcgaacgcctcaaacaacagatagggacataattaagatcctaatctattgcaaaaagaaaaaacgttcatcactacattaaatntctcacactttcattgtggctaactaatactaattaaaattaactaacgagttcggttaattagtcctacactgatggtacgactacgaatgctcatgggttggtttcttacaccaagcagcttcttctcctttatagctggatcctc

SEQ ID NO: 156460 - DNA, 359 bp, Glycine max
  unsure (1)..(359): unsure at all n locations
agctcgacaggctcaagtgcaggtgctgttattgttggatgcactagaatttggttgtcacacctcaaggcgatggccctcacatttttcggattctgcacagtccatcaagacaatttttcataatcttgggactgccntacgttcaactgagcacccatctgccccatctcatacgtcagactctgaatggaggctcttgtctcttgctgaaattgcatattctacatggccatttgcctcactaaatcttctcacgaaggttgaggaggagcctcagctgcttgctgtctttgttgtgattgctgctgctcgcgctgcattggacgaggaacatatggtttgcttggaccaccaat

SEQ ID NO: 156461 - DNA, 300 bp, Glycine max
cacatattttatcaatatccacataaaaaacttttgcacggtaatgatgaagatcactgataacccttccttttgctcttgaacgaccctgaacccgtatctccgccatccatatctggcacccgaatactttcacctacacaaaatccttggacatcggcaaaagaattattccacccactctctctcattgtgcccaacccagctttgacaaccataactaattccatggcattcacaatattaagaccttttctttgcaatacatttgaaacctcgttgtgatacaaacaactttac

SEQ ID NO: 156462 - DNA, 434 bp, Glycine max
  unsure (1)..(434): unsure at all n locations
agctngctctanatcggccaaatgttgattcatatcggctgacttcaccactacatcatcaatataaacttccatattcttatcgatgacatcatggaaaataagattcatgactttctgataggtggctctaacgttcttcaatccaaatgacatcaccaacattttgtagatcccaagtgcaccaagacactagaatatcattttatgaatatcttcttccataaatattttattatacctcctagagtgaccatccataaaggttagtaccctatgtatggccgcaacatctaccagcatatcgactataggcatcacatattcattcttggaagtagctaaattcaagttcctaaagtatgtacaaacctaaaattgcccatttttcataatcatcagtacaatattagataaccattcaacatatctag

SEQ ID NO: 156463 - DNA, 449 bp, Glycine max
taatattctgagaatattcttgtggaaccttcacccgacgaagacactgacaaaaacttatcttcttcttcttggacaaagtatggcaagctgggggcaaataaattttcttcccatcagaccttggatgcaactgtgatcgtatgcccatatcagctagatcttgatgggtattcaagccatcccttattctaccttgaatgttaaggagcgtcccaatcacactgtcacaaacattcttctccacatgcataacatcaatacaatgtctaacgtcaagatcagaccagtacggaagatcaaagaacatggacctcttcttccatatgcaactcttactcttatccttcttttgggtcttctcaaatacaatattcacgtgtcgaacccgctgatatacctgctcaccagtcaacggtatcgacacaatatcatgctcttgacttcat

SEQ ID NO: 156464 - DNA, 439 bp, Glycine max
agcttcatctgctcgttcggaataggcatagttggaaagaatggaggctgctgttgttgttgtgccacaagagagggatccccaacttgtcttgcttgagcttctccatctcctctcctcctcttttgcgactccaaacattgaagaagttgctccaattccctcacaaactctatagcccctccaattatagaagcttgatcaccctatacataaacaaaaaatgaaggaaggaaaaaatacgacaacatatgcaagatttgctatggtattcagagaaatcaaagagttttggtataattggttttttgagtcaatatatagttgaatgagtttctttctgttcataaaaattaaagacatatacaggaggacttctacaacaatttatgcactttgcttaattaattgagttagactttctcaatataattgaatg

SEQ ID NO: 156465 - DNA, 397 bp, Glycine max
  unsure (1)..(397): unsure at all n locations
tctaagcttgtaaattgtcgcgacacgagccacttgttgtacacgatttctcataagaaanaacagtcaatatatggtatagctgtattgcattactagcgatttcacacgattgcttttagctactttcttgagggaaagaatctgatttaatttcctagtatatcaactgtcattctaattaagtaattattctgtcaagacgacggtggatatgacaaggtcattgctctagacctcttatgcattcacttcttattcattatatcatatatgttattgatagttgttgacttgccaattgaaatatgcagcagttagcattcatccaatggtttagttagcagttagtggccatcatcattgataatacaaacataagtgccaagattatcta

SEQ ID NO: 156466 - DNA, 406 bp, Glycine max
  unsure (1)..(406): unsure at all n locations
agctntactgatggcatcgtaaagttacttatacacagtaaccaagccataaacggtagcagcagaggccatggatatggtgagtcacaactcgggtattggtagtacaatattagaaattattgaatagactcggtgcccctgaccatgtgagtgaacagaaaaaaaaaattctgttcatataactatataagaaaaattntaatgttacacctaaattttgggtgcatctgattgagcggcttgcatatgatccggtggataccaatatgtgtggcactgatcactcctgaaggtttcactgggggtgtggtgtcagcgtcaccctctgcatggtgtgatcagcttcacccacaacagatgtacaacgtttagtccaaatgaaacgtttattcggagtggagat

SEQ ID NO: 156467 - DNA, 298 bp, Glycine max
tctcagctcgtgtcccgctagctatcatggcagccttgtgtgataacagattgttagattcagggaggaaatcacaaattcagtgggcataagaaagcttgtctcagatgatgatcatttcattgaacgtttgatctgtttggagatacttgagaatatggcacatgtggctgagtctgtggctacgcttgctaataaatgcagtgatccaattttcaaaggtgttgggaatgccttttaccagtttatcactaccggaagtgatccatatgggtgggaattcactggcacgaaaatg

SEQ ID NO: 156468 - DNA, 221 bp, Glycine max
actgttggcgatcgaaccgccgcattcaaacacgtcaccgataaagaatgaaaaagaaagaacatcgccctggtgatggcctacccaagaaaagatgtacgcttatatcaaaggttacataaagaaaccacctattagcggatacaaaataagttgatatcttatggaatttttttgaataaacagatctattgaaaaaaataactacaaatcatgagaaa

SEQ ID NO: 156469 - DNA, 429 bp, Glycine max
  unsure (1)..(429): unsure at all n locations
agcttgcttctacaaggagatgctttatggtgatgttcaaatcccctggaatgtctagctacaaacccctttaaacatttcatacgtctcctatggtctatccctacatcacaaccatttcccaaaccccttatccttaaaccttccaccaaacttcactcactatgccaaccacaaaatcactttaacctaacctatcatggaaccaaaattccaattaaactaagccataaaacactcaaaactagaaacaagttgagtttgatcccattctcatgtcttacactgagttactacctcacttaattcaaaatggaatggtagcacctatcccaatgaatcttgtagagcccctatatcccaggggatataatgctaatgcaaattatgattatcatgcggcggctatnggtcattccaccaaaattt

SEQ ID NO: 156470 - DNA, 415 bp, Glycine max
  unsure (1)..(415): unsure at all n locations
atggcttattncctaatggatggcgcctnctctcacctcttctnctttgtcttccgctgcatctccatggtggaaaatcaccattaaaggacctcattgaagctcaaagatccaccctccatagaagccccacaagcaagcnttcatcacctctctctgaggaatgaccatctcttgatggtcttgaagcgctgctgatgctctgctctccagaatcggtgcctgtcaaaatatgtgtcagctggctgggcagctctggagccttctccgacagtgtccttcctggacctctctgatggaagctttcttggggccatttcctgcgaaccacatttataaagtcagttcaccaaaaatatcattttatagcaagaaccaagcaaaacggcatacaacttcacccaacacacaaaca

SEQ ID NO: 156471 - DNA, 418 bp, Glycine max
  unsure (1)..(418): unsure at all n locations
agctngtaatttgtaatagacgctttattatgttatatactatatcccncgcgtggaaaccctctgtgacgtgaaaatctatgtccctgcactttaaaacacaaaaacccttttgttgttgtaagtcaaacaatggttgtcaaggttaaaatccactactgtcgttggtctaattgaggctaggttgaaagtctaatacaagtattagcaggttgttgaaattcactggttgcgttgcgtttgtgaaatctcatcttaaagggcgaggactatgcgtagctcaagcttgggctgaaccactataaaaatcaatgtgcactctcttttctttctcctatctgcactatttttgaacaaatttcgttactcagtttgttaacttttaacacagaaaacactttcacaatacacaaaaaac

SEQ ID NO: 156472 - DNA, 303 bp, Glycine max
acctgacgcatgcagcttatgaggtaggaacaactttgttatttactcaccaaaaaaccagccgttcgagccaagacaaacggagaactacatgcacactgcttctcataccggttctctcctctcctctaagctacgtccaaactacatccctcaagatgagagtctccatcaacagaatcagttattgccagactaatcaatcattgggcttcaacaacttgccaccaaacaaactgggctttaaacccagcccaccccactagaccaataacccactagtttacaccttgtgagccactt

SEQ ID NO: 156473 - DNA, 279 bp, Glycine max
  unsure (1)..(279): unsure at all n locations
aacagaaacacctggccagctgccaactacaattgttactggtcaaccaatacattcttctatnttgcacgttacaggctgtaccatctgtggtgaggctcatgaaacaggccaatgtattcccatcgaagaaaacacttaagaagttactatatgggatatccacacacaccacgatatactcaaggaggattctcangcttncagtatggcctttatcatcaacaacgacacgggagatcacaccctcgcaaccaacctaacaaagactacggcgga

SEQ ID NO: 156474 - DNA, 389 bp, Glycine max
agcttaaccgaagttatggttagaccgtctctcggcatgttttcaaccgacatcggtcggtgtaaagccccgactgatatttttcagccgacattgcacaatattttttacaaacgctggccgataatatttttttacggtagaggatgctttttagttcggtgttgccgtaaaaatttacaatgtacgtcagctatgttttttagttcgagctcaaccgaagttatggttcgaccgacagctgaatgttttcatttgctcagcaacaaaaacattatcccacctcggaaaaaaacttgattccccgatactgatcgaaaaaaaatgctagctgacgtcgacgaagaaagatcaacgatcgagggttaaaaaagaagcttcaccggatg

SEQ ID NO: 156475 - DNA, 426 bp, Glycine max
  unsure (1)..(426): unsure at all n locations
tctgatttcaatttcgatcgtcttgatctattacgggactcaatcggacatccgagttaaaagttattgcggtttgcatttgctacgagcttccgctttcaactacgagcgtctcgatatattactggactcaatcgaacatcggagtaaaaagttattgtcgttagaatttgctcagtgctttcgttctcaatttggagtgtctcaatatattacgggactcaatcgaacatccgagtaaaaagttatcgccgttagattttgctcatagcttttgtntgaatttgctacgagctttcgttgtcaatttggagcgtctcaatatattacgggactcaatcggacatccgagtaaaaagttattgtccgttgaaattgctcagagcctctattctccatttcgagtgtctcgatatataacgggac

SEQ ID NO: 156476 - DNA, 428 bp, Glycine max
  unsure (1)..(428): unsure at all n locations
agcttctgagaggcgcatttgctataattctgaagaaaaaaaaaagaatttacacattggcaagatataaggggatgaaaagtgtaatttaccctaaaaaaagaaatatagaaagtcaagatacatgtgtaaaaaataatcagacactggtacttaaaaccaagaccactttttatagaacttagctaaagatgcagcagcacataaaaaagaatcaatactgtattcaacaatagacacctgaggaacatagtatccacaattctaaaatatatactaaatgaaccagataaattttgaattagttggcttacttgaagagcacggatgaatggtagcaaggggcatgatggaaggaacatctcanatgcccttagcaagggcaagaacaatttgtgttcacaaagcactgcaaccatctttgagag

SEQ ID NO: 156477 - DNA, 213 bp, Glycine max
caagcaaaagaaatgaactttctgcaccctctgaaagtgaaaatgaacccaatgagttacaaaaatcgtgacgttagaaattacaatcactagaacgagtgtgaccatgttccagaacccgggttttacggtacgggccaacgggtcacatttccttcttctaatcgaaacgcgtggatgcatacaaaaacaacacaaaaggccccattattg

SEQ ID NO: 156478 - DNA, 256 bp, Glycine max
  unsure (1)..(256): unsure at all n locations
agcttagccctagaggggatggaccttntcatgttttgtagaggatcaataacaatgcctataggttggacctcccagaagagtatggagtcagcaccactcttaacatttctgattaaactccttttgcaggtggacctgatattgaggaggaggaactaacagatttgaggtcaaatcctcttcaaggggaaagggatgatgcattcctccctaggaagggaccattcactagaaccatgaccaagaggctcca

SEQ ID NO: 156479 - DNA, 280 bp, Glycine max
  unsure (1)..(280): unsure at all n locations
agctngccacccagctcgcccaagcgagctatgttgcttcccccagaagcaccgccttctggagaacttcctagaaggcccaagtgggcctggttgctatttgcaccccatgtttactgaatacacccccttgctctttttgttgattctctctccgaaccggtaagaatcttacaaataacctacgatactcgtttcttttcgtattgttatgaaaccttacggataacataatcatcctttttttggcttcggggatgttacggaactttccggatgg

SEQ ID NO: 156480 - DNA, 365 bp, Glycine max
  unsure (1)..(365): unsure at all n locations
atgcttgtcccatatatattaaacagtcccaccatcctaatnttacaaaaatcacattcatatgtcattggggcctttcacggagcacttggtggacgcatgtttacacataaattgccaagagaatgggggcaatgtggcatgccccattgcttcagaatacaacacaggcctaaggcctctccctacaaaccctcaactcaacaaaacaagcatggattcagaaaagaattgcttcatgaatttcgcacaaaatgagcaatttaaagcacccaaacacatcaatggagagccaaataaccaaaggaaattgtacttacttgtggngagtgaattaaagcgtgaaaagagaagcataactcaac

SEQ ID NO: 156481 - DNA, 432 bp, Glycine max
  unsure (1)..(432): unsure at all n locations
agctntcaacaaatgtcttgacaaagaatcatcacacatcttatacctagcaagactacccatcatatgtccccaaaccccatacccacgaaaatcaaaggagaaagaagttcacccaaacctgaaatttcgaagtcccactcgtagacacgcacttcacgaccccgaaaatgccctcctttcacgatttggggcagaaatgatggccaaaggttgaagctttgtttggagcttcaatggagaatgaagaagaaaatggcaacgtgagggagagagagagctgtctgaaaagtgtgggggctgagtgaagagagagaaaagctttttggttttaaataaaagggttttctcttttctattattttatttaaacaatgccacatgtctccatttgagtggagtaaaaagggcccacttttccttttgactgtg

SEQ ID NO: 156482 - DNA, 414 bp, Glycine max
  unsure (1)..(414): unsure at all n locations
tactaacactatcatcatggatgaaactccagagatttaccatgcagccataattgatgacgttgtccatcacgacaaagaacctgcgtccatgcaatccataatctcgaattgagctacatcaagagaaaagggtgaacctgatgctgttattgtctattccaccagctgctttgaactatgcacctcatactgttgtaaccagagatcaagtgcgagacatgattangcaagccatgagatcttttgttgaatgccaatgacaagaaaacgagcagtccatgctctccatacaaaatgctataacgacacagttctaccaccttggcgtattcttcttcagaccttcacacgctcaatgtctatgtacgagctgttgtgcacttgcaccaggcctgtcctgttccccacaca

SEQ ID NO: 156483 - DNA, 430 bp, Glycine max
tgcaagcttgcatgcacaaacataatccttgttatggaaaccatgtttcttggatcattattgtctggtgcagccatgattaaatgtaaaaaattatattcgaaaatattattgctaaaacttcctgtccaaaccaatatttggtttatttgtgataagtggtgagatacatagaaagcataggattacatttatagagggagatgtagaagacataattatgtacctagattgttatacacaactaattaatatacttttctagttaagcatgtagaacgtggttttatattttatacattatggactaatgagaataatgttgatgctaatttagtgatattgagccatatcttctttctcactacttgaatattttgcacggtattgtagtgctgtgtacaaaaagaggatttgtggtatgtgtacc

SEQ ID NO: 156484 - DNA, 393 bp, Glycine max
  unsure (1)..(393): unsure at all n locations
caccacctaacttatatggtttcaaacaacataaaatgattgagaaagggtaaaaaaagtggggtgccctccaataagcacttctttaacatcactagcttgacgtgtatcacctctaagggtcctatanatgcaaaatggtagttaatctctcaattnttccaccatggtgcaacttcaatctttacccattcacaatccagcttttctcaggagttgttgactgaggatccattaactcgactgctccatatggcttcacttctttgatagtgaaaggtccataccatttagacattaatttacatgggaatagctntagccttgagttgaacaatagaacttgttgacctggctggaagtccttcttcagcaacttcttgtcgtgatatg

SEQ ID NO: 156485 - DNA, 434 bp, Glycine max
  unsure (1)..(434): unsure at all n locations
agcttgtanaatggctagacatgatacatgtcttggtttggtttggctcaaggataaaagggatgccccacattatttccatgacacaaatgcaaaaatgatgatttggaaattttatgcaaaactggtcatgcatgcacctatgcggacactcaagtgtcaaatttttatggtcatgtgatgctagggttcacgattcattttctctattttagtcaacccaatgtttccaaaatatgttcttttatcaatttgtgcattcctccgagtccatttcgggcgtgcggggaaatttcacagcattcaccccttaggtgtagacacgtttttttcttcaaaaatcggttatgatcaatgaatgaatttttttcacagaacagctggaaatcgtctcttttcaaaagcatgttggtttttagctagacaacttattt

SEQ ID NO: 156486 - DNA, 450 bp, Glycine max
  unsure (1)..(450): unsure at all n locations
actacagcttctccgctcatactgggaacgcctctagttcaacacccgtgcagtctatagcacccacccagagggaagctccccaagtcccaactccgaacacgactcgaccggccagggacttcaacacgacaaggaatttccctccgaggccattntcggaattcaccccactcccaatgacgtacgaagatcttttgccatccctcatcgccaatcatttggccgtggtaactcccacaagggttctcacaccctctttcccgaagtggtatgaccctaacgcgacttgcaagtaccatggcggtgtcctagggcattccgctgaaatacatggtccaacatttaatggatgctggatggctgactcttcaagaggatcgacccaatgtgagaaccacaccgctcgccaatcatggagggggagcggttaatgcagttgagtccgat

SEQ ID NO: 156487 - DNA, 385 bp, Glycine max
agcttgtagggttcaccccacattctcttgtcatatgctaaacttgatcccatatctacttgataattcaatggtagccataaccctagccaaggttcatcaacctccatttctcccagaatacgactcgaacgcaatgtgtgcttgtcaccgagaagccccagggcgttccattgagcattgtacggctctgaagtgtacggtgccaggtctaattgatgctggctgacattggaggagaatcgtgtgtaaatcctgacattgacaagagatgccacacatggggcaattctggaagctgttgttatgactcatcacgattttcaagtttatgccattattataaaccatagttagaatgctaaatgatatggataaaatggac

SEQ ID NO: 156488 - DNA, 442 bp, Glycine max
tactcagcttctaaacttatacaagaatgaagctctgataccacttgttagacaagtggcctcagatatcttaaaaaggggggggggtgaattaagatattccaaactattctccctaattaaaaatctatttcactttttactcaagttatgaattcccttaatgaccatcttcttaaatattaattcaaatgaaacaatttgaatatgaatataaagaaataataaataaaggagattaacggaagagaaaatgcaaactcagttttatactggttcggccacacccttgtgcctacgtccagttcccaagcaacccgcttgagagtccactatcttgtaattccttttacagttctaacacacaggagaaccttcctttggttagaacttcttacaaaagaactatagctctaatccctaaaatgaaaaaaaaaaacaa

SEQ ID NO: 156489 - DNA, 429 bp, Glycine max
  unsure (1)..(429): unsure at all n locations
agcttagcacctggaatctgttggaccttttgtctcaataacttaagagggataggcttagaatgtagaagaagcaacaatcaatttaataatgttctttaaacatgaaagacaaaatttattgcaacagaataaatgagataagagaatagagaatgcanccacagtttttatactggttcaacaaagttcgtgcctacgtctagttctcaagcaccccacttgaaattttcaactcctttggtaaaaatccgttaacaaagtttgaaccccatagggaaacctcatcccttatgttcaggaatccttacaacttaagagaccctcagtcccttaatcaatctctttgaatgagaagaaacaaagaagaattctctcttgaggagaaggatattacaatcgaagtccatggagaaactcttaatggat

SEQ ID NO: 156490 - DNA, 379 bp, Glycine max
  unsure (1)..(379): unsure at all n locations
tacgcgaactataaaactcagcttatgcatatgtcttagggatcaataggtagatctgttgttgtttattncgatgatatcttagtgtacagcaggagcctagatgatcacttacgacatctcaggccagttctttcagtccttcgaaaaaataccctctatgcaaatatagagaaatgtaccttctgtgtagataatatagctttcttacggcttgtagttggtagaaatggggtccaagtggaccctgagaaaatcaaggtcatccaagaatggcccaccccaaacagtgtgggagatattacgagcttccatgggttagcaagcttctatagaagattcgttcctaatttctctacaactgcttcacctcttaatg

SEQ ID NO: 156491 - DNA, 324 bp, Glycine max
agctttagccttaggttgatcaccatgttgctctctctatctctaacaatctccccctttttggctttgatgatgctaaacttgaatacgacattgagtgcatttggaaagtcttgagattggattgaagacatgatccttagtcttatcctgaacaattccttaacacttaagaagagactaattcattagcatcatcatcatatgtgtcaattcattatcatgtatcatatatatcaatatataacaatgcagtgctaaatgctatgcaatgcgatcaacatgcagtagtgtatattcttctcccctttcttggcattaaca

SEQ ID NO: 156492 - DNA, 459 bp, Glycine max
tgttgtgcaccatcgcccgaccgccacctagtaccacatgttatgggtaccccataatcctacaagcttgagatgaggaagtgttgaagggtgaaacttcctgcttttattgttgaccacagagtggtacctgtagatatgtcgcgggggtcacgagaccttggggacgtcacgtggggtgctattgcccaaaaccaagcttgaccaatcccgacccaacccgggcatagtcggtcagtgagaacctgtgatgtacctaagcaggcgagctcctggcagtcaacagataacaggaacaaagaccaccaagcacggaggcttgtggtggctggcccgctgtgaaacttggttgatatgtgagatatggtctctggtaatcgattaccaaggtgggtaatcgattacaaggcttaacaatgaagacacgagactaggatggtctctggtaattgattacca

SEQ ID NO: 156493 - DNA, 327 bp, Glycine max
agcttgcctaattaacctgaaattgtgataaaatgattattaaacacacaaaatggaagtactaagtatttattacctatacttaacagaaaatacttataacactacaaaataaccataaattggaagagtttgatacaatttacacaagttttatacacaaaagttagttgtattcaccgactaacaactcccccaaatttacagttttgcttgtcctcaagcaaaaagagaacaactcacttgtcctcaagtgacaataacatgcagtgactacgtacaaaggtgtatgcaacaaaagttattgattgcatgataagagaatga

SEQ ID NO: 156494 - DNA, 337 bp, Glycine max
aaattctttctcatcatatatgcagcggaagtgagtttttgtttaaaggactcttggttgatgcaccatgtgtaagaactttccttaaagaagattaatctcctttctccttgaagatcataagttgggtgagtaccacaacaattattttaatgctttaatagtagcttgctcaaaatgccactcaagaagatgcttaagttagaaactccttcttacacaaccttttatatgcttgttcaacatctttcttttcatcggcaggttcagaattggcatctgaagttactttgtcatgaggggatctttttccctcattaccctcttcataatatat

SEQ ID NO: 156495 - DNA, 409 bp, Glycine max
  unsure (1)..(409): unsure at all n locations
agcttggttcgaggtacttacccgttgttgatcgaagaacgatgaagaacgaatgaagaacgtcgaagaacggttgaaacctttgcgagattcctcacggaaaacgttacggaaacgtttcggaagcgcctcggcttatattttcttcacggaaacaatttttccaagcaaattcgaaagagagagaagtgcctaaggggctggacctttttcttcttgcattcctcccctatttatagcaaaataggggaggtggttgccgcccagctcgcccaggcgagctcagctcgcccaggcgagcagggttgcttcctccaaagcaaccgccttctggaggaatcttctggagggcccanatgggcctgcgtgctatntgcacccccatttttactaagtacacccccctctg

SEQ ID NO: 156496 - DNA, 436 bp, Glycine max
  unsure (1)..(436): unsure at all n locations
ggactctgngttanacatgattgatacatgatttgtgacttgtaggaattgatttgggcaagattggatgaggggaagtgtgattttcgaaatctgcacttatgcagaattttgctgtcaaaatgggtgcagcaggattttggcttgtgcagaaaaatgcttgtgtgtggttggctgtgggaagagtagtacagaatgagttctggatgttttctagtagatcccaacggtcataatgtaggcttatgtactaaagacttccagtaaaattttcgagtcgatccaacggttaatgaaccggaacgaaggaattgttactggggtctttaagtgagaaaagctgtgatttggttggtgtcttggcagagttttctgcctttgctctgttttgcttggatgtgatagctcgtgctcgttgaatgttgtttgctttgat

SEQ ID NO: 156497 - DNA, 424 bp, Glycine max
  unsure (1)..(424): unsure at all n locations
agcttcttatccaaggctcatctttgttgtgaagctccttcttccatggcttattccctagtggatggcgcctnctctcacctcttctgctttgtcttctgctgcatctccatggtggaaaatcaccattagaggacctcattgaagctcaaagatctagcctccatagaagtcccacaagcaagctttcatcaacatcttttttcccatatctactacgcagcttgtagtacacatgaatggccgaccaagaatgagaggaatatatgcatcctcttctatgtctatcacaacaaaatcagttgggaatataaggtgtttcaccttcactaaaacatcttcaatcactccatacggtcttgtgatggatcgatttgncaactaaagggtcatgcgtgtaggcattatctcaagctctccaagt

SEQ ID NO: 156498 - DNA, 407 bp, Glycine max
tctaagcttgagccaaatcctgactcaccataaaccttgtttattgtgagaatgccaatccttaccctcggaagcaaaaaaagaatagaggggaaatttccgatccaagaaaaagagaacgaaaatttccaatgaaagcaaaaaagaaatgaacgaaaattccccaatcaaagagtgggagaaagcaaaaaaaggaaaagaaggaaaattccccaatcaaagagtgggagaaagcaaaaagaaaagaaaggaaaattcccaatcaaagaatgggagaaagtaaaaaaggaagaagaagaaggaaagaaagcttctgatcaaggatcgaaagaaaccacaagaaatgtgcagagaggtctttggaccagacaatatctgaacagtacagaattgtcaccaaatgaacg

SEQ ID NO: 156499 - DNA, 332 bp, Glycine max
  unsure (1)..(332): unsure at all n locations
agcttcctgaatcaagggcaagtatgcgtttccagttcgcgaatttatattgaagcgccgttgtttgacacgctggttagtggatttgagcacgcggtaaaatcgttgcaagtgggaccggggatgtcacctgttgcacagattaaccctttggtttctcgtgcgcactgcgacaaagtgtgttcattcctcgacgatgcgcaggcacagcaagcagagctgattcgcgggtcgaatggaccagccggagaggggtattatgttgcgccaacttggtggtaaatcccgtgctaaatgcgcttaatcgtgaagagtgtttggtnccgggtaaa

SEQ ID NO: 156500 - DNA, 383 bp, Glycine max
tttgaaacgaacatcgcccaccgtatattgccacaaatattaatcacgagctaataaatacgacacctttgtattcaatttacttacatcatgcacaactgcacgatagatactggcaaacaaccgtcacctaacattattgcagtcacactccgcacgtgtgatgaaaaagccaccctccacatcatgcatcccaaattttgtctcatcccacgacaactcaatcgggttttggcaaacatcaaacaagctaataaccacatctccgaacggatcaactccatgcactgcattgcccattccacgcatgtgggaatcctacacggctaatcgaaataacaatcatgctaatcttataacacaacttacaacaatgcgagcga

SEQ ID NO: 156501 - DNA, 273 bp, Glycine max
agcttaacttaacataattcagcatcatttacttatcattgggtaacttcacttgtcctaaggatttaatcacaaaatcatattctataccttcacattaatcacatgctcataacaaaacatctcaagtacaacacaacatctctcacacacaattcattacccaccatcacgtagcaagtcacaatgatcatcacacagacgttatgcaacatatatactaagactcaatcctatattgaatgtggtattttgtcagcgaaaaataacact

SEQ ID NO: 156502 - DNA, 313 bp, Glycine max
  unsure (1)..(313): unsure at all n locations
ttcttgcttnctttgcatctttggtttctgctgcttgtaacttcttggtaagtttattctaattgataataaatctgatgcatgcttaggttataaatcttaagtgttatgtgttaaatatgtttaggttaagtttgcttcatatgttaatgctatgtatgtctaggcgctatttataaattctaagctgcaattcgaaatatcgatattatttatattgcatgtatatgttataattttagttagtatgttcgtatttgtattatacgatacattagagctagcttatttgttaatattattagcttgagcc

SEQ ID NO: 156503 - DNA, 377 bp, Glycine max
  unsure (1)..(377): unsure at all n locations
agctntaaataggctctgaaatcgtgactctacgcttatcgccaccctcgcgcttagcgtgagtaagtgaaattgggcttatcacctgatggaagcttgcttgtggggcttctatggaggctggatctttgagcttcaatggagtcctttaatggtgattttccaccatggaaatgcagcgaaagacaaacgaaaaaaggtgagaggacgcgccattcattaaggaataagccatggaagaaggagtttcaccaccaagatgagccttggataagaagctcggagaggatggttcaatggaagaacagaaagacggagagaaagagggaagggggagcaccaaattgtaggaagaaaaagggagagaagttgaactt

SEQ ID NO: 156504 - DNA, 332 bp, Glycine max
gtagtcgaagagaagttcaagtccatagccatcaaagtctgaaaagagtatgatgaactaagggacgtcaatatggccacagctgaagccttggaacgaagaggtgaaaggaatcatcacgggtcaaaggcatgatctccgaagaggtgaaaggaatcgtcatgggtcaaaggcatgatcttgaaggatgagctaaaggtttgccttatgtcgaaaagaaatttgtcccaacagttaagcgagactgaagggaatatgtgggccatcatcgataagtgcaaagagaagctaaatctagtggcgactcacgagcaaaggctagaggatgagta

SEQ ID NO: 156505 - DNA, 381 bp, Glycine max
agcttgtacgattatggggtaccctttatatgtggtactacgtggcgatcgggcgatggtgcaagtcgactctccacatccacaaatcacacataaatccaccatccccagttgcccaccttcaactgagctcacgtactcccacgtagcccttatcctcgttcttctcaacaccgggtccccatcaatccctccaagctttcacaacatccaagcaattcaacatccaaacatcatgcactatcaaaaacaagaaaacagggcagaggcagaaaactctgcccaaaacacaaaccaataccacagctttccttactcaaataccccagtaacattctcttcgttctaattcgctcaccgtcggatcgactctaatatttt

SEQ ID NO: 156506 - DNA, 335 bp, Glycine max
atagcagaatgtgcacctgtgcaatctttggtagccaagatgctctgactatgcatgtatgtaaatttaccctacgaagtgcatgtgatgtaagtagcaaatacaccttggaagtacatataaataatctaggtaacgaaggtgccttgattgtgcatgggtgcatttttcttagtcagaagaatatcttgtgcgagtgaatgttcgtaaggaagtatgtgcatgagtttgctccacaattacattgatgtttgcgcttcatggacgacgttgcatgccatatctgttttcagagtagcatttcctggtaaactaattttcacatgtttgccttc

SEQ ID NO: 156507 - DNA, 386 bp, Glycine max
agcttatgcgcctatttccttacaaacgttctcttgcacaagacattcaaccgaaaaaatgcacccatatacaatcaaggcagcttcgttacctagattatttacacgtacctccaaggtgtatttgttacttacatcacacacatctccttggctaaattcacatacatgcatactcaaagcattttggggcaccaaaaattgcacatgtgcacatcttggtgtttctaatacctatacatacgcaaacttcatgatgaatcttgactatccacacaataaggtgctacatttcatgctctcttttttttttttttatttcaacgttttgctacctaaagccgcatgcaaactcaagcatatttttcttagctgactaaaattgt

SEQ ID NO: 156508 - DNA, 377 bp, Glycine max
tccaccatcgagtctaaggccccatggagtgattgcctaacgttgttcctctatcctccaccctcaaatcttattcggagacccatgaattgattgcctagcgcagtttatgcgtccccaaccatcaagtctggagccccacgaatcgattgcctagcgttgtccatctatcctccaccctcaaatcttattccgagtcccatgacttgattgcctagctcggttcatgcgtcctacaccattgagtctggagctccacgaattgagtgcctagcgttggtcctcatacctccaccctcaatctcattcggagacccatgaattgattacctagcgctgctcatgcgctcaccaccacttgagtctcgagccctcac

SEQ ID NO: 156509 - DNA, 297 bp, Glycine max
  unsure (1)..(297): unsure at all n locations
agcttgcaggttgtagctcctcctttatctattctgacagtggagcagtttttagagaaggtatcccggccaggaaccctgccttctcttgagagagaaggtgggggtcccagtgctcaagtacctcagtaggtacaagatgcatcatctgaggccaccatccctgagccattcatttttgaagccggtgagacatatgtaaggcaggaggttgctactacagagagatcaccacagatttcaccagatccaccctctncagtggtggatcaatcttctcttcaacagccagcagac

SEQ ID NO: 156510 - DNA, 380 bp, Glycine max
  unsure (1)..(380): unsure at all n locations
tatatattggggaatataaaactataggtatttttcaattattcatacatagcatattagaccctncaaatttaacactcttcttatgtatcaaggaccaataataaactaatatccatgatagaaatctaacacatacaccaataacttatagccaatctggttctttttttttgtgaatataaccaatctgttataacaaataattttgataaaagaaaatatctaatctctatctttcacttatttaatatatctaatgattatattattaacattgattcactagtggattacttgatacacttcttcacagattctcttcgaaaatatgacttcacttccaattaatatcttgcgcttccctctcaccattcgtc

SEQ ID NO: 156511 - DNA, 322 bp, Glycine max
  unsure (1)..(322): unsure at all n locations
agcttgtaggattagtggcgacctcttcttatgtggtactaggtggcggtcgggcgatggtgcacaacaagttctccacattcacaaatcgcgcataaacccaccatcccctgttgcccacctncaactgagctcacgtactcccacgtagcccatatcctcgtttctctcaacaccgggtccacatcaatcctcccaagcttccccaacatccaagtaattcaacattcaaacaacacaaactatcacagccaagaaaaagggcaaaggcagaaaactctgcccaaaacaccaaccaaaatcacagcttttctcacttaaa

SEQ ID NO: 156512 - DNA, 433 bp, Glycine max
ttaagagacctgatgcatgcaagcctctagcattgagagacctcgtctattttgtttattttctctaaacagatacatttcttcacttgagcttgcgtctaaagaatgtgatcattgcaacatttattgcatgtactcttcatgctagaaaacctctcttgtgagctttcatgttgatcactatagcagaaaaccacttgctttaagccaacactatacttgtttctatgagattcgataaaaatatacatgtttttcttttgtcttcatacattatttttatatcattcttgtcaacattatacaactttatctctctgtgtcgtccttaatgtgcccttctcatctaacactcttcttcttgtccaaatattacacgatattgatcaacccgcggaacactatgtaacattatgtaaacatcaattgagtt

SEQ ID NO: 156513 - DNA, 261 bp, Glycine max
acaccaagctccgtggtacgacaccttgcacaccaacctatcgttaactctctttcgaatccaagaaacctttatcgctggaccttctccgatcatgcctctccctagaacaacacaactcgaatgagactcactgctcaagacacacatactatgaacatacaatacatacctaccacacacgtggcaattaaactctgaatcacgctcctcctgatctcgggccatgcgcatattgagacatgcgtgcggctcacccca

SEQ ID NO: 156514 - DNA, 406 bp, Glycine max
  unsure (1)..(406): unsure at all n locations
agcttgcacaacaagtttctaaatatttgtttgtacaaaatgaagtaactaactaactccattgatatatataatgactaatcagaacgaaacgatgggcgttggtttagcccatctaatctacctaattaaactaattacacaaaccaaagcccaaatttgcagcccaattattcaagtgcagaggttttaacttccaatcccaatttgacccttgaaatggtagaattggcccacgcatatttttgaaacaatcgaatatcttcttattatctntccaaggactactcacatgctagatntggagttctgtagtgtnctatacgccctgcacaagacaaatggctcacgttagcacaaattatgaaaataagccacaattatcaattcagctcaatcatttgcc

SEQ ID NO: 156515 - DNA, 373 bp, Glycine max
tctcagcttatgatgatgaatcggatatgctccgttgtttttgccgttttgatgacgaccaacaggccacagaatgatttcaagattgagctccccagtttaagatccacattcatttccagtttcatgtgaagaaatccagaagattcaagaatcacgtgaagtttgatttccagattcaagagaagatgaattcaagattcaagagaagaaatcaagaagacttcacacgggaagtcttgaaaagatttttcataaaaaaacatagcacagttttgtttttcaaaagagtttttctctcacaattttctaatttaccagagtttctactctctggtaatcgattaccagcttcctgtaatcgattactagt

SEQ ID NO: 156516 - DNA, 254 bp, Glycine max
agctctagcgacgacagatataaattgttctacatcaatccaatcataagagctaaaccgtctcattgtacgacacatgttaaatgactaaccccatccaagaacccaacttggttcgactggtgccttcgaaacacataggacactagcacttccatacccttctaacgcaacgtctgcattaccactgtgatcgttctgatccctctatctatttttcttcttgtactcaggacattctttattgaagtttt

SEQ ID NO: 156517 - DNA, 368 bp, Glycine max
  unsure (1)..(368): unsure at all n locations
ctgcagcttactcgatgccgattangcttatttatatcgagacacttgatattgaataacagaagctctcgagaaattcgcatggtcataacttttcacacggatgttcgattccggcgcataatatgttcagacgctcgaaattgaacaacggaagctctcgacaaattccaatggtcataacttttcactcggaggaccgattcatgcgcataatatattgagacgctcgaaattgaacaacggaagctccccagaaattcaaatggttataacttttaacttagacgtccgattcacgcgcataatatatcgagacgctcgaaattgaacatcggaagctctctagaaattcaaatggtcattac

SEQ ID NO: 156518 - DNA, 385 bp, Glycine max
  unsure (1)..(385): unsure at all n locations
gaaaacttccttgagaagcttctttgagaaaacttcctcgagaagctagagcttagctacacacacccatctaaaaactaagctcacctccttgagaagcttccttgagaagttagctacacacacccatctaaaaactatgctcacctccttgacaaaatacatgaaaatacaaaaacaagtccctactacaaagactactcaaaatgccctgaaatacaaggctaaaatcctatactactagaatggccaaaatacaaggcccaaaagaaggaaaaacctattctaatatttacaatcgattaaaacttatnttacaaaagaaaagcgattaccgatgacaggagaaggagatgaagatgcacaaaacaataaagagggaccc

SEQ ID NO: 156519 - DNA, 384 bp, Glycine max
ctagtatctctaactttgttatttaatttcctgtttcatactttttttttcttgaactatatcctgaattcgcctaagtttatatgcaattataagattttaagagagaaaatataacaatgaataacacaactttgcaaaggactttttgcaaaaaaaaaaaaaaaaatagctcgcctaggcgagcatgactgtcatgaaaaacataaaagggaggggtgaagccattttcaccccattcttccccaaaatcaaaaccttcaccaagggcttacgggagccaccattgagataatttcttctaatgttcttttagacacaaaattctaatgtcttaaatctcatttttgttatgagaaatctatcacatgctttcattcccat

SEQ ID NO: 156520 - DNA, 220 bp, Glycine max
gttttttgataatgaccaagatgatgacacaccgcccccacaatgactctcagatcgatttcatgagaagccattaagaagatccacaaatcaagagaagttcgattcccagattcaaagagaatatgaattctaaattccagagaagaaatcaagaagacttcccacgggaaatattgaacagatttttcaaaaaacaaacatagcatagtcttgtttt

SEQ ID NO: 156521 - DNA, 440 bp, Glycine max
  unsure (1)..(440): unsure at all n locations
ctttttgacctttgtgaaagtgaccttccatgggatattccacggaggccttctagtctcttctatattgtacttttcttgaattcaaatgttagttattcaaacgtaacagagacaaatggaatttgaataaaacagtacatgtgcactttccttttctgtgatacccagtccttgagagactagacacatgaatttatcgcatgacagtgtgttatattgtcatgaacaacactagatgcttactaaataaagagagctgaacactacattaaaatagagcatactctatctagttgtgggcgatattcctttaacataataatcttgtccacttgtcacaaacacaatagaatatcaatacattatacctatgttatacatcacaatctanggtggatgagacacatgatccgtcatacctaacaggtttctctctc

SEQ ID NO: 156522 - DNA, 349 bp, Glycine max
  unsure (1)..(349): unsure at all n locations
agcccgctcgncttgctgatcttgatcatgctatctttcctgatgatgaccgaggaacaattacggatcaacttgaaacttatgtgcttcaagtgagaagaaatgcttctttttccacttgtgaagatgttcaaagtttggctatgaagatggttcaaactgagaaacatttggtatttccattggtttataaacttatcgagctagctttgatattgccggtgtcgacagcatcccgtgaaagagctttttcagcaatgaagattattaagtctaaattgcgcaataagatcaacgatgtgtggttcaatgacttgatggtatgttacaccgagcggagatattcaag

SEQ ID NO: 156523 - DNA, 365 bp, Glycine max
agcttagagcttgtgtactgtgcagaaatgaatcttctttcattcatctttaatgttcgttagttgtccctaggtgaggtaaacccttgtctttctctctttgtgttaattctcgtttcgccccatgaacaccctccaaacttcatgatagtgttcatttgcaaggttttaatgtgctctttttgttggtcttacggtttgggatggtatggatgatgtacaaccgctgtaaaagtgactgacagttttcattttgaacccaaactctctccctttatttctcttcttcatcccacagcaaactcattgagttgataggtatgggaagctcacctctctcttattttggatgtttcggaatgtta

SEQ ID NO: 156524 - DNA, 324 bp, Glycine max
  unsure (1)..(324): unsure at all n locations
tcacgattgatgaatctgatgtacctggcgaacttgaattttgggaaaactttattattctctttgcactacgtgagcatctctctatgaatgctgtcaagaagcttatggagaagacctggaatttcatttcagaaccagaattatcttacaatgatgacggttactttatcgtgaaacgccacaatagggaagacatggagctggttatcgaacaaggttcctatctcattcaccgtacatcattatcctcccccagtggacatctcgatttgacatcaacgaagatctattgcgagttctnncaatctggataactttacc

SEQ ID NO: 156525 - DNA, 402 bp, Glycine max
agcttgatcatgtggtggcggcgttaatttattcaaaacaagtcaactgtaattctgataaaattgcttatgtaaccacaaaagagtctacatcattaggttcaaattcataaaaacacaccccttatatgacttctgagtcaaataataattaaactactcaaaatttgttgtctaacgatcaacacaatttacattgaaatgtgacaaataaaagttaatgttttcacctcatcccagtccaatccagttgatatatttttagaattgcttttatctccgcgcattccgggttatcttaatcctaatttataaatgcgaactactattcttttattaattgcaattatacaccattacaaattgtctgaaaggcctatttaaaacgttaacaacaaacct

SEQ ID NO: 156526 - DNA, 383 bp, Glycine max
  unsure (1)..(383): unsure at all n locations
taccaatcttgtaattgttaacttacctaccaagatcgatcagccaaaggaaaacacagttagtactcagaaaaccacattggtcacgacatttggacactcatttaaagtgagaattgagacaaaatgatgccaccatttcagggcattaattgaaatccaaagtttgttttctttcacggtagaattggggccagtagcccgttaactatataaatgtaatcatccctatcttagtcaactatataacgtgagcactgagcacattacaagtcaattcagaagcacaactatntgaatagactattgttattataacaatacatctaacgagggttgtgagctccataacctctctataaaaacttacaacgtttcttatc

SEQ ID NO: 156527 - DNA, 359 bp, Glycine max
agcttttcaaatgggtgaaaggctcacattctctttcttctacatcatatccaaactcgtccaaataaataataaagtcatctcgactcacagaaggtcatctaagtctcatacaattaatataaaacctatatcctaatgtcacatcctatcagagcgcggtgttcccgtgtcctctagcatgaggttcttcatagtcatccacctattcatttgctcccccgaacacaaagttcaagatcatcacaagatccaaacacaaacaatagaccgggagtgagttatcacatctctagacactagagagaaacaaaacaacatatagtagccaaataccatttcactagcatatctcacat

SEQ ID NO: 156528 - DNA, 422 bp, Glycine max
ctgatcaaaatgggagaacaattacggcagaagctattttttaatagttctgaataacaactattgtgaaaggatatacatcacacctcaattttttaaaagataagagaccatcttataaaaaaaaataacaaaaaaatctagcctataattgaaatcaataaagaatttttttgcttcagaaatcaatcaagagttgttaaaaacttaaaataatccttattttttaagctcgaattaaaattaattctacaaaattgtggttctttcataaacacaagtcttcatacaatgtcgctgacctatgcactgctttagtctcaacatatctactacctgactgactggtctgccttcgtactctaaaacgaacgacagacaatgttccaatgatatcctaacacgtcaccggtttgactcct

SEQ ID NO: 156529 - DNA, 337 bp, Glycine max
  unsure (1)..(337): unsure at all n locations
agctcgaagggacacgcacatttcctattctcagcgtctcttctgataaattctttnttcctacacctatactcgtcactcctttcacagccaattaacacaaacgtagtccttcctctactacctgtgtttgtgtccgaccataaaatcaccgccacaaatctgttttcatgagccacggatcgagcccaccacgaaacatcctctcggcactcaaacacctacaaaatccacataatttaagttttctactagtattcattttattaaaaatgtgacaaacattaacattatatattgagaagtcttgaacgcatccaaacaatcaacacgtggt

SEQ ID NO: 156530 - DNA, 154 bp, Glycine max
ccggtccgttgaccgtcttcattcgctctctatcgttcttcgatcttcaacgggtaagtaccctcaaccaagctttttgattcattctatgtacctcgggcggtccacattgcgcttcgcgtatctttattctcggttcatttactttttatac

SEQ ID NO: 156531 - DNA, 345 bp, Glycine max
  unsure (1)..(345): unsure at all n locations
atctctagatngatctgcagcatgcaagcttctacacatgaggcacggcgggcttcctttatctanctgnctccaacgccaacttcgaccattgttcttccttcccccaacgctccttttaatgtctgcctgagcgggcttatacgctaaaccatacttcccacgactcccttgagtctttatcacgctacctatgccccccctgttttctactaaacccatcccgggatcaaaaccgttccccaacataactcccgccattattaccgctgcatcagacacacaacgctgcccaaagagggagtccaccgaagaaatgctcaccacctcaaaacaatgcgaaaa

SEQ ID NO: 156532 - DNA, 360 bp, Glycine max
  unsure (1)..(360): unsure at all n locations
agctntaagcccatcaacaaaaaattattttatattagaggttataagtaagaaaggtctcatacatagacaaaaaaatcacatatgttagtaaaaagacctaacttttttaaggcataagtttgaaatgttatttatcgtaagtttcatttttagatttgacttacctattaacctacttaaaggtttatctatataaagtcttataaatgagaagcccttagaaatgactattgtgttcgtgctccatttgttgacacctgtcacatttgttggttttttgggtatttccgcgtgagggtttgtgcctctgttggttgctccacctgtcttcttttaaagcctgatgtggtcattttc

SEQ ID NO: 156533 - DNA, 325 bp, Glycine max
aaaaacaacaccctcctattactagctatttcgaattctttacttcctgaatgtccaaccttcaaattgttgctcgttcctctctttgtcttctgcataaaacaaaataatacaagtcctttacgcactccatcactatctacataatgaaatatttatatatttttgccgataaaaaaaaaccatgcagatcatagcaacacactaacaaaattctgttataacaacttaccaaaatatcttgtatgacatggctataaaaacgggtaatgatgaaataaacacattgacaattattccctgaatttaccttctttttatccac

SEQ ID NO: 156534 - DNA, 339 bp, Glycine max
  unsure (1)..(339): unsure at all n locations
agcttgtatacatgtcgatgtttctctntatcttcgaaatcaggtggctgcttcatatatacttcttcattaatgaattgatttacaaaagcactcttggcattcatctggtataacttaatatctttgtgtgcaacatacgccataagtattatggtggcctttagccttgatactagtgcaaaggtttcttcatagtcaatcctttcctgttgataccaatcttattttgtttctaactacctctcctttgtcattaagcttgttcttgaagacccacttggttccaatcactaattgattcttaagatgtgttcatggttccacacttgctctttg

SEQ ID NO: 156535 - DNA, 372 bp, Glycine max
accgagcagcaacctctacgctcagcgaacgattttctattgtaggaaacatcctcaaacttatggactggaattgtcacaacccctactgacacttgctctatcctgcggaactcggccctctcctcgcgcaagtcgacgcctacattacattgatgtttttctatcttatataaccaaggcactgcgcaatgaaaaatccatttcttatgctaatccgcttgatcgccaaccgtctgtttttatattgcactcaataactccaatctgcatctgcacgtcgctgactcatgaactttaccattcgcaagtgagaatttacacagcatctcacggtgagaacgaacttgaaatggccaaaaagagaatatt

SEQ ID NO: 156536 - DNA, 293 bp, Glycine max
  unsure (1)..(293): unsure at all n locations
agcttcttagtctcagatgacgcagctgtgtttgtatctacctcatgcactcctctaatgactatagcatcatntctggcgctaaactgctgggagatggaagccatcttctcaattaaattcctggcttcagtaggagtcatgtctccaagggctccaccactggcagcatctatcatacttctctccatattactgagtccttcataaaaatattggagaagaagctgctctgaaatctgatggtgggggaaactggcacatagtttcttaaatctctctcagtactcata

SEQ ID NO: 156537 - DNA, 255 bp, Glycine max
tgtacctaaacaggcgagcttctggcagtcaaccaataaaagaacaaagaccacgaagcaaggagccttgtgtggcggctggccacctatgaatcttaagtggtatctaaaaattggcctttggtaatcgattaccaagggtgtgtaatcgattacagggcttaaaaatggagacaggaagttaaaattgcctctagtaatcgattaccaagggtttgtaatcgattacacggcttaaaaatggagacaagatgt

SEQ ID NO: 156538 - DNA, 430 bp, Glycine max
  unsure (1)..(430): unsure at all n locations
agcttaagacatcaagatctgagctccatgtttatctgagcatttntgtgtagcttcatcaaggtaatagggtctctccaattcttgaaccctaatcttttgttgtctttggaagctaagcttcattgcatgttgttttcatgttaaaaaattcatagctactgtatcgactagaactgtatgatgtatggcttttcttgaaattctaatgataaaaatgagttccttgggtgatgcaatcctacaccctaagggcattggatagaagactccaagaagattgggccagagatgcaagagaaggccctacggttcacatgagccttcaggtagattttgggcccatgggttaagtatgagcccacttatctttgtacatattagattaaacgttcattatttttgggccttgtatttanggctccataat

SEQ ID NO: 156539 - DNA, 287 bp, Glycine max
tgattggcagccgcgtatttggctatattattattacatctgaacaattaatatttctttatttgcatggtgtggtggaacaattatgaatcatgttatatgactatgtgattttctatatattcgatctattcatgtttcttgcttcatgactggtctatattttttcatgattgctatgtaaatgcttacttcgatctgtatgctccaaacttgttacgcactttggctctttgttgatgccaaacgcggagagaaatagggattaaatcaagaactcacacgag

SEQ ID NO: 156540 - DNA, 244 bp, Glycine max
tttgattccaccgaccatcgacattcaccaagcacagcaaaaccaacccccacatggctccatcaagaagatgcggcccatggcaaagtggaagcgcagaacaaacccttacacgcttcaaccatggtcttctataagaagactgaaaaacgcacacaaacccatcaccggaagcgggcaactaagaatgcgaaacgggcgacgaaacgaaaagggaatatagtggatgatgcatccaatgctg

SEQ ID NO: 156541 - DNA, 430 bp, Glycine max
  unsure (1)..(430): unsure at all n locations
agctttaacctcatcgtctctcacagtctttagatntgggagccaatccaatccttgtgtccggactctcagccacttatgatagccgccgatgatcccattactgcttcccctaagctctcggtcctttcttcacaccgcatcacatgccttgcgaactccttggagtacctttgcattggggtcactaaaaccccgtggtgaggacatgattataatttatacaaccccttgttcccattaagggaacatttggaaatccttcgcatgaagatagaatcctgattcttccttccttctagcgagggaaccaattaacagacgcccctctatgctagccaagagttggtcccaattcgtctttttttttttggacgcacgagcggtgaccttgtagcggatagacgagcctactctctggaaaaaaagc

SEQ ID NO: 156542 - DNA, 454 bp, Glycine max
  unsure (1)..(454): unsure at all n locations
tagtttcactttgttatttatcaactcattcaaaagaactctcaaagtaaaatgtccgattggagcttatttacccctttttgattaatcgaggttaccgtgtgaacgatcggttgaattttattctaacagtgattaaatgagattacaacacaaatgatcggctgaaattcattttatcatttattaggagagataatggcttatacgatcggtcgaagctcgttaaaaacggaagaaaaggataccaaaagtaaacgagctgaagatgaaagcatacgaagcaagaatggaccactaaggatgcatagagtgaattgaaagcttcgatatcgaaaactaaccggttgaagctcgaggaacgatgaagaacgaacgaagaacggcgaagaaactttcacanaatcgatcacgaaaatgtctttggagcattacngaagcatctcgacttgga

SEQ ID NO: 156543 - DNA, 431 bp, Glycine max
caagctgttgaatacaaatgattattcttttacattcgttaatagtagtcttgttatgtaattcaatttcttgttcagtggaattaatttcaataaaacagcatggcaaagtgcttcagcgactagggcatgttcattctagaaaattatccgttgaacatttcagagggtttttgtataacagaagaaaactcgaaacttgtctaaaattgatcagttttctgacttaacatgctttgtttgccatgctatttagcggctgaagctcttgactattgctgtttaatctggcgtattcataacctagaaatggaaaattaaatgtttcgttcctttggtcggcatcaacattattgctgaaattctaatttaagtatagaaactcaaaaatcatagttaactcaagtataccaacatgtaagtatgttgac

SEQ ID NO: 156544 - DNA, 445 bp, Glycine max
  unsure (1)..(445): unsure at all n locations
atccttagagncacctgatgcatgcaagcttcgagctaatagcttaaactttttttttgtatnccctgacattgtaacagagtttttatgaccaagtacttaataatttgttttcttcaacccccattcttcaaaattaaattaagttttatcaaacaatagagtgactcatgcattgttgatgcttcaagcacaaagggatttcacaagaaaatgcatgttaaacctataaaatcagttttgggcttcctcctaatagtttatgcttttagttcgtccttgaccaaattgaatgggaacttcaaaatcgaagagactggtgttgcattcacgatgatgagaacttatgatatacttaccatcttgccagggtatcccttgacttttgttcatatgggttgatataagagaatatgtggtcatgcttgggggtggagttgactga

SEQ ID NO: 156545 - DNA, 392 bp, Glycine max
  unsure (1)..(392): unsure at all n locations
cgaactaaccggtaatatgtgccgattaaaaaaaacaaaaaaaaactacttggacaagatgaaacaagaactcgcaacaaaactagaaattcacctgaaccagagtatatacccggacttgaggaaaagatcgtcgaatttaatagcatcaataataaggggaaaatagagtaaattcacaggaaaagaagaagaacaaaatccagatccgaatagttgatgaactaaccgctctgcgtagatgcacaaggcggtttcataagcatctaataagaagaggtgttggcagggtgttacaaaggtaataagagaactctgaacagtgaagactatgttgccattaacatctcgtaacagngaagttatcacgtatagtcctctcctttgtgata

SEQ ID NO: 156546 - DNA, 355 bp, Glycine max
  unsure (1)..(355): unsure at all n locations
agcttcaatcaagagaatagcgattatttattttcnattcgcgagttaatgcgacgcggcttctttattgttccttttccaatcgtttatgtgttgctcattaacagttatgttaatatttaattgtgaatctacgacatgaaaatcataaaaattgtgtgattttgaaggggtagcacagagacagctaaagaatgggcaacagaaaagtcaagttctactaagacaaaaggctactatgaggggacatattggtagtagagaacgttagtctttcttttttttgaaaaaaacaagatagtaaaaaagaaaatgatactaattgcaaaatattttttggtaccattttatgatg

SEQ ID NO: 156547 - DNA, 288 bp, Glycine max
taacaaacaggagatctaaaaattaaacatcaaagcatgacggatcactgtaatgtatacctgaaatcttttcatgttttagtatatacacataattaagtctacgaacaaaaccattgcttatgagaacaagataaaaatatcctcacaaaagagacaggcacaatttatatgctataaagttaactagtcaagctgtatgaatgtcataacctacctactgtatgtctactagtataatacagttatagataacaattattgcatctaaaatgtctatctgaaccc

SEQ ID NO: 156548 - DNA, 428 bp, Glycine max
  unsure (1)..(428): unsure at all n locations
agctttattaatattaatcttcaaagaatattcttcttccttacctctaaccttgcaattcatgtgatggatgatctcaatagcaacaaggacattttcaagaataaagcaaccttcaacaaaagaagattgctcttttgagatgcaactaggaagaacacgtctcaatctattggctacctagcactttagagacaaacttatacaacacacactactagaaaaagggttttttatgatggttaataaatgcttttaacgactgttataaaccttcgttatatataacgtcgttaaaacaagaatactttttacgacggttattttaataatcgtctttaaaagttagaatcattttaagacagttattagctaataacccgttttgattgctgtgtcagaatcgacattcanagacgattattagc

SEQ ID NO: 156549 - DNA, 313 bp, Glycine max
  unsure (1)..(313): unsure at all n locations
ctaagctggaagggttgncgatatgaatggatatggctgtaatccgacaattggaaactttgaccaaatggaagaagatgatcaagctgaagctccacaagagcttgcacatcaatggagtccttttaagtcacttatgatttacaagatgaatgctatgcttcacctccatcaagaacagtcaattaaagttcatagtctgttggagaatataactacctggttggaaaacattgagactatgttgaatcttagcatcctccttaaccctgatgaggatgaagcttagtagtgttctaagcgcttgcttttg

SEQ ID NO: 156550 - DNA, 401 bp, Glycine max
  unsure (1)..(401): unsure at all n locations
agcttatgcacggaaaatgttattatgaaattgagatgcccgaagaaaaaccatntcctagttaaccatgcattaggtaccatgttcaattattttgtttttaagtgaaacgggtttatgatcccaacatggttggctcgtggtgcctaacacatgaaactaagaatgtagtgtgaagtttcacgcttccccctttttttgtttttgttttgtagaggaaaacgcaaggatgagcaaacatgaaaacaaatggtatgcaattttgcagatcaaaaagtttgttgaacgcatatgcatgatgatgccatgactcatgcaaaatgtgaggctggaatatgataacggacaaatgcacgatatgtccattatgatgttatgaagagatgctcatgtggtgcatg

SEQ ID NO: 156551 - DNA, 370 bp, Glycine max
  unsure (1)..(370): unsure at all n locations
ggacaaacacccaatactctgtgtcttaccaagtctttttggctctaaacaaataaaaaaggatttgttgtttgggattgttcattgactaanactatgaatatacaatcagctctttagtcttttctctcgatatgttcaaagtgttttaaagcttgcttcacccataagcaacacactcgcctgggcgagtatgtttcttcagcattaagccacaaattcgcctaggcgagctacagcttgcctgggtgaattttcctgcaccccttggctgttttctataaatagccatgcatatgttgaaaaaataatcatccagttgtagagaacaatgtgagaagcccaggaagaagaagaaaatggaaagtgg

SEQ ID NO: 156552 - DNA, 384 bp, Glycine max
  unsure (1)..(384): unsure at all n locations
agcttgagttatctgcatgtctangtntttcttccgnctcgagcnnccgcaaaaccaacagaatatgttgttttatacatacaccttgcccattggatgcagttttggccatctagtttgtggcctgtgatacaaaggataagtctttccattgagttggttatggatggaatacaactatacaagtctctagtttggatgctccctgactcttcagtcttcaccctccttgacagcccatattcgggaaaatatgaacacctttcttttttattgcctctttcaaagcttctctaagcagtctagcatagcgcttttgctgctcaatgaanaccttgtgtagatcttttaatctcttttacactcacccgtcaccttcaaaaa

SEQ ID NO: 156553 - DNA, 296 bp, Glycine max
taagtcacctgccgcatgcaagcttctctctacctataaagacaacatctatgtttaaagaactacaatgaacatgaatagagaaacaagagtccgcgaattacgaaagaagagaaaagaaacacatttgaaacacatacactcagcccaagagaagttatcccttgtgatatacacagtccttatgagagattaacacttcattgtaaatctcactctgagtgttgcaaataatctctaattctatattaaaattttgtttatgaaagccatgagtgacttagcgacaaataata

SEQ ID NO: 156554 - DNA, 372 bp, Glycine max
  unsure (1)..(372): unsure at all n locations
aatttaatcattctggttggacgaatgagaaaactggggcaaatgaagagggcgagaaagagggagaaacccatgctgtgactgccattcctatacggccaagtttcccaccaacccaacaatgtcattactcagccaataacaaacctcctccttacccaccacccagttatccacaaaggccatccctaaatcaaccacaaagcctgtctaccgcactttcaatgacgaagaccacctttagcacaaaccaaaaaacaccaacaaaaaggaattttgcagcgagaaagcctgtagaattcaccccaattccagtgtcctatgctgacttgctnccatatctacttgataattcaatggtagccataaccc

SEQ ID NO: 156555 - DNA, 327 bp, Glycine max
ggcttaaaccctaacggagggcgccacctcctacctcttttactttgtcttccgctgcatcttcatggtggaaaatcaccatcaaaggacgccattgaagctccaagatccatcctcatagaagctccacaaccaagccttcatcaagtgataatcagagcacaacagcttcaagtaggtgtctcctacacctccattaattttttttctttaccctctcctccattcgtcgctcttccattttctccatgcatcctcctcacatgtcttgctctaaatggtgctaacatgattctttagagtctccaccgattaaacctgctataa

SEQ ID NO: 156556 - DNA, 429 bp, Glycine max
  unsure (1)..(429): unsure at all n locations
gcaactacttcatttttgttggaaaaatgattatgttttctacaatttttaattcattttaaatttggaacattctgttatatgtttaattcattattggatcctgcgattgtaccaatttggtttacatgtgaattattgtgaactgagctttgttgctgtaacaatgtcataatagctctatattgttgagaagtcaatctcatttcagcattatgtgtatcttgactttattctagaacaacactatctccttcttccatcgacacattcatgttgttgatgcttgggccttgacgcttatacagcttatgtctanganggtaaccatgtctaacaatgctctgagagtgagcggtctgccttggtcagattctaatcattctatacnggtacggccactgatgtacgtctaaaacacgcatttat

SEQ ID NO: 156557 - DNA, 432 bp, Glycine max
cttaagtcacctgccgcatgcagctttacttatgtggagggcgggctttcttcactttcttgtctcccacgcgagctttgaccactgctctttcttcccgcgatgcttcttttcatgtccgcctgagtgggcttatagcctaaaccatacttcccacgatttccttgggcatttatcaggctagttatgccgccgttgtctttgcctaaacccattccgggttcataaccgctccccaacataactcgggccatcattactgctgcatcggacagacaacgctgcccagagaaggagtccacggaggaaatgctgaccacctcaaaagactggaaagtggtttctaacgattcttttgcggcttccacataaggcatagaggatgggcagcttaccaagatgtcttcctcgcctgacacgatgaacaagtgc

SEQ ID NO: 156558 - DNA, 466 bp, Glycine max
  unsure (1)..(466): unsure at all n locations
gccccactccatcattaggatttttacntgacatctcaaacaaacaaatcaaacgtaacaagacaattatagttgctgtttgaatacctcacccactcaagtgtatcacacaattatggcttttctctaatgaaacactcttgccttttaccactctaattccccttgagttcttaggcaattcaagagattatggccacaacaaagaacaattcaccaatatgtgtaaggtaaggctagagagacaaggaaaaggttaaccaagaaaaaggctaacaatgtttttaggcacaaatgaaggaaataaaattcagaatttaggaattcaagtaacaatccttcatgcaaccaatatattaccttaaagagatctttttnttaaaagttcttcaagcatgaaccattcacgccacatttctttttttntaattttgcttatacgaaattctgctgtctttttttatat

SEQ ID NO: 156559 - DNA, 326 bp, Glycine max
tttggatggcttcactctgaatcccctgccgcatcctgttctgttaatcttatcgatgatcttcatcttccttgacctatcatggtacttttcctaccaacacacggttgcaactgctgaacaacaatcgggttggctactatattgcacccctgtggcgctaattctcatagctcgctggctatcatcaatggaaaattcatattggctcttctctgccttattaccggcggaaaggcggcggcgaattcaccaaggccttttacaagggagctctacattgcgtgtggctgctttgaccctgctgttgctgatcatggcgcaat

SEQ ID NO: 156560 - DNA, 314 bp, Glycine max
agcttcatgattgaatcaagattgagtcatgaatcaagattgattcataatgatgaatcaagattgattcaaggtgttcttatgataaccaagatgatgacaaaaagcccgagagaatgacttcaagattgagtcaagaacaattcaagaatcaagaatccagtttcaagtttcaagaatcaagaatcaagaataatcaagatcaagattcaagactcaagattcaagaatcaagataagactcaatcaagataagtactaaaaagtttttcaaaacattgagtagcacatgaagttttcactaaagcttttac

SEQ ID NO: 156561 - DNA, 453 bp, Glycine max
  unsure (1)..(453): unsure at all n locations
ctgggctcaagtgaaaacatgatcttgcagtgtggttctatattaaggatatcatcaaacaatacaataatgaattgacaaaggaaaaggcaaaagatggtgttcattgtggcttgaaaagatgaaggggcgttgcaaagcccgaaaggcatcaccctgaatttaaagtggccatggtgagttcgaaaagcggttttgcatataccatcttcggacatcaggatttggtggtatccctgcaataaatccatctttgaaaaccaggatgcaccccctaattcgtccaacagttcgtcaatcataggtatcgggaaacgatccttgatcgttagagcattcagtgctctgtaatcaacgcaaaaccgccaggtaccatcatgtntgccgactaatagcacaggggatgaaaatggactcgtgtngngctaatgattcctctctgcaacatggagc

SEQ ID NO: 156562 - DNA, 343 bp, Glycine max
  unsure (1)..(343): unsure at all n locations
gctngatttcttttacagaggtgttaacgaagagtttatgaagtgagagctaacagaaaatacgtattatcatcagagaaaattggagctgagctccttacaactgaggaaattgcactgaaaacagagaatgaaaataaataaaaagaaaacaaagactttttccaatattgcacagttgtaccctatatcatcaccaaattttcccatcctcctttctctctctctctctctctctcttcctctccctctattatatgtaatgttctctccctcttctccatttgattccagaatctcctcacccttcatccccatgccacctgtatccattctgttatga

SEQ ID NO: 156563 - DNA, 368 bp, Glycine max
  unsure (1)..(368): unsure at all n locations
attatattgttactactccctaattgtttttattgattttagtcttttattttttttccatcaagaattaaaaataaagataaaaaggttaagggatgaaaaaaagtaaaaaatttgaccaatagacaaaatattcaagacctaaaaataaaaattttacaaaatntaaggactaaaaagatgagaaatatttttaaaattttacattgccacatccaattaccaaattattgtgtccttacactcttctttctttgagggttatagtgaatgttcaacttgtacatctctaacanccccacacatgtagaaattatgatatgctcttagattatcatgtcttgactaatggtttcatgacatataat

SEQ ID NO: 156564 - DNA, 423 bp, Glycine max
  unsure (1)..(423): unsure at all n locations
cgctcgntcaatgggcgagcgggcctatattttacacaaagctcactccacttttacgagcatcaattaacgccacatctctaggatgaatgtgtgccgttagagcatagtcaactcacaaaccccatcttgattccaaaataaatataaaacgatccttattaatatcacattgcattaactacaaagagaacaagttcattacggctctactacggaaaagacgatgattacaacctcatgaatcacatggccataacattagcctctttgcttataccattatcgctttaccacttttcaccgacaaaccattttcttcccgaaacgaaaaggacacgagcatgcataacttgaaaacataagtcaattcaaaccagtgattgcgttttcattagctacaacaatcgtttttaatattca

SEQ ID NO: 156565 - DNA, 400 bp, Glycine max
  unsure (1)..(400): unsure at all n locations
gcacttctttaacaaggtacacacttttctgcctctctcaagtcaataaaattccctcacgcctgcgggcatccttaactgcaagacaactaacaagaaaattcacactttcgcaagacttctttcatcacggcataaacaccacaacaaaagtcttatcccaatgggtgaagtcgatcacataaatcacacaatgccattgagcttaattaaagaccacaatcttaggaatattattcactgtgagacttcacttaacaacttgctatcatcttttcctcaactaatgtcacaccaatattttctcacacacatcatggaataaacataattcagacanacactactctttcgcccctgagacatacaattaaatacaaacacgcccacagtctacacc

SEQ ID NO: 156566 - DNA, 341 bp, Glycine max
  unsure (1)..(341): unsure at all n locations
agctcggatctcctcttagtatggaacttatcctccctaagatggagccaaacccagtccccttcattaagaactagctcatttcttcctctatttccttttttatcatacacctttggttggatcctaaccctctcatgcaacttctttacaaactctaaccttgatttcccttccttatgtataaaagaagtgtccagtgggaggggaattacgtcttacggtgttagtggattgaacccatacataacctcaaaaggggattgcttggtggttctatgaatccccctgttgtaggaaaattctacatgaggaagatactaatnctaagacttatggaa

SEQ ID NO: 156567 - DNA, 329 bp, Glycine max
  unsure (1)..(329): unsure at all n locations
ccccccccaccgcctggaaccccancccacccccacccccccgcggggtgatgattctgcaccggnnnagaacaacggaaaaggggacggccaggccaaaaattaaaccaccaccccacccgagctggaagggcaaaacacgacacacagcatgcaacacagccacacgcagaaacaaaaaggcccaccgaatggacgagcgggacccaaccccgaaaccaagccgcaccagcacaaaaaaaacgacacccgaaagcccacacagggcacgaaacgaccccgaaaacaagacggacaaaccgcacggacacccagcagcaaaaaaaaac

SEQ ID NO: 156568 - DNA, 284 bp, Glycine max
  unsure (1)..(284): unsure at all n locations
catcctcgccaattccttctaccaagtcttcagttatcgagtcttcgatcntacgccctgtttcaccttggtcttttgttacttggtgatatatgatttctatcaatacttttttgcatgtcattataactatcatatctagatagctttttcattacaaaggcaatgtagttttgggacatcaatttcaatggctcctcttgttgttgtcctatgttgtgtcatgttctaatttctatttttactatgtttaacagatgtcttctccttcggaaattatcgaa

SEQ ID NO: 156569 - DNA, 427 bp, Glycine max
  unsure (1)..(427): unsure at all n locations
agcttctatgcgagaggatgcgactcttcaattttttttcgaatntcaacgttcaaacacattggtaatcgattaccaaaacattgtaatcaattacaacattttgaaatcaattggaacgtcgtaaattcagttgaaagctttttgaaaaccattttgctactggtaatcgattaccaaagagtaaaaactctttggtaaaaggttttgagaaaaattcatgtgctactcagtttttgaaaaacctttttaatacttatcttgattaagtcttttcttgattcttgagtcttgaatcttgatcttgattcttggaacttgaatattgaaacttgattcttgattcttgatatcaaacttcctctttgaactttgaagtgctcttgattcaatctgaactcatctttgattcttgagatcatcatct

SEQ ID NO: 156570 - DNA, 287 bp, Glycine max
ctggtctaccactttataatccgctcttctggatcaggttcagaaattcatcatgatttgcatccttgtcggtcacactacgttgggctatctcctttctttgaccacggccgttcacctgtacttgttcaactaccggatcattcactctttttgaaaacaacgtgcggataacaccctcattcctcagaaacttgctgttactgacgatgttgtctacataagtcgcatgagttagagacgggagaggcacctcctgtccactttccaccattgcgacattatac

SEQ ID NO: 156571 - DNA, 394 bp, Glycine max
agcttctatagaagggtcgttcctaatttctctacaatcgcctcacctctcaatgagctggtgaagaagaatgacgcatttacttggggtgaaagacaagagcaagcctttgctttactcaaagaaaagcttactaaggcacctgttctagctcttcctgacttttctaaaacttttgagctacaatgtgatgcctctagagtgagaattggagctgtattgttacatggttggcaccctattgcttattttagtgaaaaacttcatggtgccaccctcaactacactacctatgataaagagttttatgccttaataagagccctccacacttgggaaacataacttgtttcaacgaatttgtcattcatagtgatcatgaatcaactaagta

SEQ ID NO: 156572 - DNA, 334 bp, Glycine max
  unsure (1)..(334): unsure at all n locations
agctttctgccccagagaagtatgaactatattatatngttnttttataatttgaacactcttgtgtgcaaaaactgaacagtgaacaaccaatctttattaaacacttacggagatagtgaacggtatggatggtatacaaccaggtaataattaagcgcttctaaaatcttcatttccatttcaagtatgtccttgatttcatatctatacttgtcatcagtgtctgcatacaaaatcactgtgctttcagcatagaaaggaaatataatagcatgagacaacttcagaaacaaattttnacttttacgatnagaagttaacatgaagcaaa

SEQ ID NO: 156573 - DNA, 386 bp, Glycine max
atgctgggaatcactaatctgaattgaccaaccattagttggacatccacatgctgggcgattgactaaagctgaaaagacacttattggtgatatgaccaagtcaatggtgaaaccaagaaacattctgctaactctgaacgagtacaatgcccatagttgtacaaccattaaacaaatatacaatgcaagagatgcatatcgttcttcattagaggaagtgatactgaaatgcaacatgtaatgaagcttcttgaacgagatcaatatattcatctgcatagaataaaggatgaagacgtggtacgtgatatcttttagtgtcaccctgatgcagcgaagtagtcaatgcatgtaatttggtgtttttcatagacactacctac

SEQ ID NO: 156574 - DNA, 360 bp, Glycine max
  unsure (1)..(360): unsure at all n locations
agctntagagcagatgcatctctactccttgttcttgaaggatatgttaacaaggaaacataagtatattcaccaggaaaacatcgtagtggaaggaaatagtagtgttgtgattcaaaagatcattccacccaagcataaagaccctgngagtgtaactattccttgttcaattggagaagtcactgtgggaaaggctcttaatgacctgcgagccagtattaatttgatgccactctccatgtgcaaaaggttgggagacttggagatcatgcccactaagatgactttacaacttgccaccgctccattaccagaccatatggagtaaatgaagatgtgctagtcaggtgaaacttt

SEQ ID NO: 156575 - DNA, 389 bp, Glycine max
catgaagctcaatgccagtcatggcagctaagccagattcattgcagcaatatgagcgctcagcgagttcctcttagctaagcacatgctcctctgtacttaagatgcatcagtttagctaagctggccagagcttggcttagcgagagttgcagcttttctaatctgtagacctcgctaagcgggcttatcctcacgctaagccaagtctttattcaaaaaaaaaaaactaattttgaatttgaaatgtcgactaagcgcacgggtccgctaaccgaaagtatcgaacaactgcttaagtgagtgtaacaacagttacactcacatttactagattccaaacagttcatctctacattctctctcgtcaacaatttgcacattttgca

SEQ ID NO: 156576 - DNA, 413 bp, Glycine max
  unsure (1)..(413): unsure at all n locations
agcttagaacaataaacttggccttctcttatttttctntgggcttggcgaccacgatcaacaaagtactttcggcacctactatatgttgacttcaccaacgttgttattggaatgctgcgacaatctttcaacaccttattcacacattctgataggttggttgtcatgtgaccatatcgctcgccagatgtatcgcaagccatgttccttttttcctttgaaatgcgatcaatccatcttgctatggctggactcagttgacaaaatttttttaagttttgatcaaacacatgcttgcaaggagtgtacgctgcatcaaatttgtaatcatcaaaagttgtccgtaaacctcaacctcaaatatttttattgtttaaaataacccttcaccaatttcttgaacatttttt

SEQ ID NO: 156577 - DNA, 383 bp, Glycine max
ataacgtagagagtgatgatatatattaatttgtgtcacatcatctaatacaaagaccacctctaagacataacagaacacctaatggtgattccaacaacaattgcgcacgtatgttgctgttataagcactatgtcttgaaagtatttaaaagtaaaatattcttcttcttcgatcttataacaaaaaaaataatgggaaaaaagaacaacaagatatatgatttgaaggaccacaagcatcggaatcccctactaatatgtataatacaacacaactaatcactatggccaacaagactatttacataatgttattcaatcagactctaatgtacatgtgcgctaattaagtactagtattatacaactatggctccttc

SEQ ID NO: 156578 - DNA, 404 bp, Glycine max
agctttgcaagaagagctcgagcggacatttatgttataagagaagttgataatgacagtccttatggtcaagaaagagtgtgatgagctgaaagacatcaacatgaccacacgctgaagcattacagtgggaaacaaaaagggcccgaacggaagaatagagcacgaacaacttctgacgcgctctgtagggcataagtaatgagctcaagcttacaagggccgggacggacaaatcaaggatggaaagcatggtgttagaggataaattgaagagtcgctagaggtcaaagaaaagtttgacggaccagtcgaccaaaccaaagagaatatgttggccatcatcgatcaatataaagcaaaggcgaacctcgccgctcatcatgggtagaggctggaagatg

SEQ ID NO: 156579 - DNA, 368 bp, Glycine max
  unsure (1)..(368): unsure at all n locations
agctcgttcatgggtccattttttgatatctgcngaangagtgctatatggttcatacgttgtgctgaataatgacatctttcacctcctactcatttccttacaactttggcttaatcttgctcatagaaccttacaagaggcacattattagttttcctgaagcttgttcacgcgtcattttctatgattgtatttgactgagtgctatgtgtttcataagctgtgctgaattatgactttttgcctcctacttattcccttaagtcgaatcttgctcatacatcctttactacgacgtctntatttgatctgctattaacgttcaattgagttaccactagttatgacttcttactccttcccct

SEQ ID NO: 156580 - DNA, 493 bp, Glycine max
  unsure (1)..(493): unsure at all n locations
cctgctttacggacctataaaactcagcttattgtcaggaaagaatacatataacttggttcaatagagtagatactctgtacttgttcagcagaaatggcgtcattaaataaataaacacgaccaatttggccgaacaatggggatgaatcagctatggattcaaatttgagcacattgtcttcatagtgaggcatcttgaatttagcaccaatcatgcaacttgttaatgattcactgactnttgcatacctgaataaacaaaccatacaaaccacatcagagtcacaagaagcaatttagcaattaatcacaaaacataaaaacattgaaatagaaagagaaaaaatatcaaggtttgaacctgcatctttcagatgagacaagatcaccatccaagtaacatctcaacaagctacctgcagaanaggctcttcctatgctatcgagtatgcanagaacatgccatctcctcctgcactaaataacatgc

SEQ ID NO: 156581 - DNA, 288 bp, Glycine max
agcttgatttgcgagtcgattttatctttattttcactctggttattagccaattcattcaaggaaacttccaaagaaaaacgtccgattgattttttttattattttattcaaagatatctcgactattctatcattattctgcattctttttatttaaccgaggttacagcgtgaacgatcggttggattttattttaacagtgattaaagattaccacacaaatgatcggttgaaatccattttatcatttattcaggcagataatggcttaaataaaccgttaa

SEQ ID NO: 156582 - DNA, 428 bp, Glycine max
  unsure (1)..(428): unsure at all n locations
aatatatatcatttttgcctttagtaaaatcttgggaactttgtcacatttttgaactctttactctcactattttcttttttagttcatcctacataaatacaccttataaaatgttatcatgcatcaatatnctcaatactttaatgtcattgaacacaactcatcttctgattagtttctcctcctcacaccataatcctccattagaaaatagaacaaaacaaaacataaaacaaagagaaagtgttgaaataaaaattcaaattcttatcattatagtagtagccctttcaatagcaatgttacaattgagacataaaactcagtccagaacaatggactaaaactagtaaaatgacgaacaagtaatatgtatataccatatgcaacacatagcaagctattactaagcattgcataatact

SEQ ID NO: 156583 - DNA, 430 bp, Glycine max
agcttcctgaatcaagggctagtatgcgttttcagttcgcgaatatatattgaagcgccgttgtttgacacgctggttagtggatttgagcaggcggtaaaatcgttgcaagtgggaccggggatgtcacctgttgcacagattaaccctttggtttctcgtgcgcactgcgacaaagtgtgttcattcctcgacgatgcgcaggcacagcaagcagagctgattcgcgggtcgaatggaccagccggagaggggtattatgttgcgccaacgctggtggtaaatcccgatgctaaattgcgcttaactcgtgaagaggtgtttggtcccggggtaaacctggtgcgagtagcggatggagaagaagcgtttcaactggcaaacgacacggaatatggcttaactgccagtgtctggacgcacaatctct

SEQ ID NO: 156584 - DNA, 268 bp, Glycine max
  unsure (1)..(268): unsure at all n locations
ggagggaaaaaaaagggggagggaaagaaanaaggaaaagaaggaaggggganaaaaggaaacaagaaaaaagaaagagggaaagagggaaaaaaaggaggaaggaaggagaagaaagaaaggaagaagaaaggaagaaagaaaaaggaagaaggaggagagagaaaaaaaagagagaagaagaaagaggaaaagaggacgaaaaaggaaagaaagggagaagagggaagaaaaagggggaaaaacggaggaagggaagaagaaggaa

SEQ ID NO: 156585 - DNA, 374 bp, Glycine max
  unsure (1)..(374): unsure at all n locations
ttcccattttctgtgcatacttncatatgctgaccttttagaatctatgatcatgattcatgaacaccttttgagccacttgaactaatatttttatctctgaaaagtagaatatgtttatcaaatcgagattgataccaaaccctgaaatggcaaaaaaagacattccttatttttgtctttcaaaaactctaaagtgtgatcatagttttgcagacggttgaagcttaacaaatggctaaaattgcctaacgcatttcaaacaacttgtgttgaacagagccacttttattctcactgagtagtgtttgcgttagtaacatgtaaaaaaacatgtttttaaatgcaggtgaaactataactacttatacata

SEQ ID NO: 156586 - DNA, 404 bp, Glycine max
aacgacgatgatgttgcttctgaagatgttgaaaaggcatcttccctgaataacacaaattctcatgatggaaaaacaaattcttaacatgcaaattcatctaattgacaatcaattagaaaatcacatccttgaacaaataaagaagcccaacgacacaaattttcaggtgaaattcattctttctgatgtgtttttagtagatcatgcaaggtatatatgttgtattgaattccctccaaaagttatttggatccgtattcattatcactatttatttggcaaccatatacttgcatgggacttgcttgaacatttgacttacaaatggaacggattatctccaaccaatgatacttgaatcctgtagtcaaaacattcattctggaattgtcacccagaat

SEQ ID NO: 156587 - DNA, 369 bp, Glycine max
cctttgctttgctcaaagaaaagcttactaaggcacctgttctagctcttcccgacttttctaaaacttttgagctaaaatgtgatgcctctggagcgggagttggagctgtattgttacaaggtgggcaccctattgcttattttagtgaaaaactacatagtgccaccctcaactaccccacctatgataaagagctttatgccttaataagagccctccaaacttgggaacattacctttgttccaaggaatatgtcattcatagtgatcatcaatcacttaagtacattagagggcacagcagctaaacaagaggcatgcaatatgggtagagtacctagagcaatttccatatgttatcaaata

SEQ ID NO: 156588 - DNA, 384 bp, Glycine max
  unsure (1)..(384): unsure at all n locations
tatgccctctcccctagcggagagaaatcgttggtattgtacacaacaggggcagcgaattatcgagcacacntctgaaacctactaccgagatagcttgggccacgtgggcctcgctcagaacttatactcacagagcccgatgaagcacagagctcgtgaaagactccaacaccgagaccctggccgcgggattggtgagctgctcgataaccttgaattcgctctgctgaaccatacggaagaactcactggctgcctcgagcgacacctncgtataccatccttgtctacggaagaccatcgccggaacatctgatacgaacgaggggtatacatcatcgcgtgactccacactacagctttcccttgacgatcgcgggc

SEQ ID NO: 156589 - DNA, 361 bp, Glycine max
  unsure (1)..(361): unsure at all n locations
acaaaaagctcaaaggtcaattcatgataatcaaagaatgagttcaagattgaatcnagaacactttcaagttcaagcttccaagaatcaaggtcaagattcaagactcaagattcaagaatcaagagatgacttaatcaagataagtatgaaaaggttttttcaaaaactgagtagcacatgggtttttctcataacatgtttaccaaagagtttttactctctggtaatcgattgccagattattgtaatcgattaccagtaagcaaaatggttttcaaanagctntcaactgaatttacaacgttccaattgatttcaaaaagttgtaatcgattacaatggtttggtcaatcgatac

SEQ ID NO: 156590 - DNA, 444 bp, Glycine max
  unsure (1)..(444): unsure at all n locations
tctctgtagatcttcacacaacaaaanctctcattactctctgtgaactggacctttctctctctagaatctctagatatgcaaagctatgaatcccagcccaaactcccttcacaaaatcagatntcaagtttaaataggtggctttgttcgtgcttgcgcgcttagcgagattataattcgcttatcgcacattagtgaattttcgcttagcgctcttttctcactcaacggatgggctgaagcggtgcgcttgatgagatgaagcgatgcgctcaacgaacctgtacagctcatcttcttccagatccttccttgcgcttagccactaagtgttgcgcttagtggacgctcgctaagccagcagattggcttatcgagaaagtgaaaacaacactttgccaaatcgcctaatttcatctgaattgagagaaattgattatt

SEQ ID NO: 156591 - DNA, 340 bp, Glycine max
aaaaagaaaagagaaaaaaaaaaggaggggggagagaaaaaagaagaaaaaagaagaaaaaagagaaaaagaaagaaaaaaagaagaaaaaagagaaaaaaaaaagagaaagagagaaaaaaaaaagaagaaaaaaaaaaaaaaaaaggagaaaggagaggagaaaaagaaaaaaaaagaaagaaagggaaaaagagagagaaaaagaaaaaaaaaaaagaaagaaaaagaagaaaaaaggaaaaaaaaaaaaaagaaagaaaagaaaaaagaaaaaagagaagaaaagaaaaaaaaaaagagaagaagaaaaaagaggggaagaaaagaagaaaaaaaa

SEQ ID NO: 156592 - DNA, 409 bp, Glycine max
  unsure (1)..(409): unsure at all n locations
tgcagganacactcaggaaggaattcaaaaatattttgatgctctcaacatagatccacactatgctggaattcttcctcatttccttcatttaaccttttattgatcccattttttttttttagttatctgtgtgcatgatatgaatttttttctttctttttatctgtgcttacagccagcatattataaccttggtgtggtctattctgaaatgatgcaatatgacatggccctcactttctatgaaaaggctgcatctgagaggcctatgtatgctgaagcatactgtaatatgggtgtaatatataaaaatcgtggtgatttggaagcagctattacttgttatgagaggtaatacatatatctagagcttgtacttattnttatgggccatgtaatttaatat

SEQ ID NO: 156593 - DNA, 443 bp, Glycine max
  unsure (1)..(443): unsure at all n locations
aacgttagaaactggggttatttattccatatatgnngaatcgaatacacacggcaaattttgaattcaaattttaatagctgttgtaaatcaattttggccactggtaatcgattaccaccgattaccagagagtaaatttcttgtaaaagactttttaacttaattttcttggccaaaccttttgctacttcaattgaaattcccttcctatttaatataccctttctaagactctatagactgtcttgatcatccatcttgaatatctntaattgctntgtcttgaataaagctttgagacgcatgtgatcttttggcatcatcaaaacatcggcttgatcctttgtctacaaatatttgtnggtcatcaattcacgatcctaactgatcactgggagttgaaggaatgatgtcacaagtgtgcgacctctgacaacaac

SEQ ID NO: 156594 - DNA, 82 bp, Glycine max
  unsure (1)..(82): unsure at all n locations
acacaagacactcagcttctaaacttatacagaatgaagctctgatatcacttgnatgacaagcggccttagatatcttaag

SEQ ID NO: 156595 - DNA, 422 bp, Glycine max
  unsure (1)..(422): unsure at all n locations
ctcagcttcctaaattntgtctggaattcatgggcatctttattttgtaactcagaaaagataaaagtgtcctctgagacatttagtcgcctaagaagtttgtgattactagaatcctgtactacaattttttttttttaatttacatgcttctttttaatagcttcaaatacaccatagagtgttgattctgacttggttttcctaacttgttcatgcaagacttggagtatagtaagtttctttatagtttggcattgtttttcttcagggcattgatttggtgaataagactctactaatatctttntctgggttattttgtactttgcctttctgttgatagcttcagtgttcttctgtttgataatgctgctataactatgggctgcacataagatattntctgtaaacatggatcg

SEQ ID NO: 156596 - DNA, 462 bp, Glycine max
tcgatctttcaccaccgccgccaccatcatcttagattttatattattagacttgatttaagccttggattctggctatattattatggtatttgaacaatttactattttcttatttgcatggtatgtttgaacaaatattaagtatgttatttgactatgtgtattttatagttaatctatttatgattgttgcttcatggttcttgcttcatgatttggttgatagtttttccatgaatgttgtatggatgtttaattatatttgaatacttcaaatttgatacgcactatgtgcttttgttgatgacaaacggggagagaaatacggattaaatcaagaactcacattgagtatcaaattaattctaagagaagcataaattcataaaccaagggggagaatatatgtgagtgatcgactaggatacagtgtgtgtgtgtgttcttgattcagaagtg

SEQ ID NO: 156597 - DNA, 248 bp, Glycine max
  unsure (1)..(248): unsure at all n locations
aaggaaagggggggaaagaagagaaaaaaaagaggaagagggggagaagagaaggaaaaaaggaaaagagaaaaagaagaggaggaagggggagaaagggggggagaagggaaagaaaaagagaaggaaaagaagaggggaaggaggaaaggaaagaggaggaagggaaagaaaaagagaaggaagagaagggagganaaaggaaagaagagaagaaggagggagagaaaaagggaggaagagagaaa

SEQ ID NO: 156598 - DNA, 296 bp, Glycine max
agggccttacattgagcccaggcaattcttttgttttcatcaacgattatccggagcctctgcttgacaatctgatgaagatatggattggcgtcttggcatatgatgtgtcaaggaaacgcaaccttatgatgaaggcaacttcgatcgggattattaataactctctagcctattgcatattgtctcggtgacggactcatggcagatctgtccgctcacctcgcaagaaacataagaagtcagtcacattacaatatgtgaggaaaatttggggcttgactcatgtcatgggc

SEQ ID NO: 156599 - DNA, 416 bp, Glycine max
  unsure (1)..(416): unsure at all n locations
ntaataaatgaagctaataattgtgtttgtaatttgtgtgtccctcaaaatgaggattctgaaccgtattgatcatcttgtgcatgtttacagcagctagtaaatctatctagaatgacgaggcacataaagcaaataatcttttactccaataaaaataatgagacattaataatttactaatttaatactatattcaaagcattaaatttatgaaaaaagaatctctacgaacaattggaatattattgatgaatagaataaatccacagacctagacatgattgtcgcgactagtgctgactntgttatgtacccgctcactgcccaagcacacgggcgcgtggattactctgcattttcagaccactcaatgttaacaccaattaccaaaatgagaccatcatgacagacca

SEQ ID NO: 156600 - DNA, 424 bp, Glycine max
ggacacataaatctcagctgctggctttgtatccgatgctgccatgttctcattgtatgactaccagcatttttcgggcaccagaaccgttcttgattttgcagaaataccatccaacctctttgagtaagtagaatgctgcaagaactatggtctttaagtcttaaccttaaatgagatggtagaaaaaatacaagcttaattactcattagatccttatacctgcacaactcttatggtttagtccctatacctggaaactaatcattttaatcatcacacactttttaattcgtttagtcgctacacatacactttttaatccgttctagcccgctataattggatggcagggatagggacttactaaatgaagaccacacttaaataacttggtatataactattacgatctaatttact

SEQ ID NO: 156601 - DNA, 448 bp, Glycine max
  unsure (1)..(448): unsure at all n locations
taaaagagcactcaaaccatgtgtatttaccaccaatgtttatactctgaagagcccgtcaaggcctctccctcctgattcaggtctaacttagaaaacattttaacacgttcaaagtgattaaactcgtcaggttcccacagtggatcccatcataatactcattatgcattaactcatcagccttaaagagtcttacaacatgtgtgattgtacggttcatagctcacaactcaatgtgcacaacatctcaatacatgtgtgatctcacaatttaacacatactcaacttatgacatacacacaatctcaatcacaaagttataatcctaaagtaacatgttatcacacctcatgaatcatatacacatcacacaatatttatatatacattgcacanacacagactntacctgtgaactattgcgatacacatacttactcaatc

SEQ ID NO: 156602 - DNA, 416 bp, Glycine max
  unsure (1)..(416): unsure at all n locations
ngaagaaattntttcttgtacatgcgcaactctctctttttggtttttgcatngatcggcctattatgtgttgcatcttaattctatctttttcatatgtgcatcatgcattatcatgtaagagtaagaagagaggttctaaaatcaaaaaatctcttttgtgtttaaaactctctgttttatttgattataggttgatcgtaatcgattacacaagtgtttgtagcttgcagagaagtttctcatatcgatttaatcgattacaaggtaatcataatcgattacacaattcaaatgagacaatgattggtttttcacgagtctctactttaatcaattaccaggtgatcataatcgattacttctctcttaaaactgtttcagaagtgatcaagaacactttaatcgattacttc

SEQ ID NO: 156603 - DNA, 412 bp, Glycine max
  unsure (1)..(412): unsure at all n locations
tatgctcaagtatatgcggaaaaagaggctagaggaagggtgatcgactctttacaccaagaggcaaccatatggatggattggtttgctcttaccttgaacgggagtcaagaacttccccgcttgttatccaaggccaaagcgatggcagacacttacaccgcccccgaagagattcatgggcttctcggctattgtcagcatatgatagacttaatggcccacataattagaaatcgttaggaaacttgtatggtctttcagaccttgactagatacgacttcctttntgaaataaaatgagttggtcccatgtttctactccaaaaagcttgtgccaatcaaatcactcctacatttcatctctagcatgcattttctttctttacccnctcctcacgtttgggttttt

SEQ ID NO: 156604 - DNA, 344 bp, Glycine max
  unsure (1)..(344): unsure at all n locations
tattcgattccgatatccattcgaagatgggacctaatactctcgctngatgaaggcttatactagaatgcaagatgtgtggctattgcttatgttgaattgggatcttggaaaagttctctcctttcttttgtgcgtcatgttcaagtagtcaattctattgctcaaagtatgctattatatagctgtcatatttatgcctggcctatatatactttgaatatgatatattagtggatgtgcaattttatgtggacaagtaatgtggaaaatagaaaattggtaaccgcctcttatgaaaaaatgtctactctatctgagatgggaaggattcatattatacc

SEQ ID NO: 156605 - DNA, 460 bp, Glycine max
  unsure (1)..(460): unsure at all n locations
taataagnccatctatggattgaaacaagccttctcttcttggtatttaaaaattcatgaggtcatttcttcattcaactttgaagagaatgtcatggatcactgtatataccaaaaggtcagtgggagtaagatttgtttccttgtattatacgtacatgatattctgcttgcgactaatgataagggtatgctatatgaggtgaatcaatttctctcatagaactttgatatgaaggatataggagaggcatcttatgtcataggcataaagatccatacagaaagatctcaaggcattataagcttgtctcaagaaacctatatcaacaaagttttagaaagatttaatatgaaagattgttcaccaagtgtagctcccattgtgaaaggtgacaaactntnncttgatcaatgcccccaaaatgaatttgagcgggaacacatganaaaatattca

SEQ ID NO: 156606 - DNA, 317 bp, Glycine max
  unsure (1)..(317): unsure at all n locations
tattatattggatacgaaccttttcaatttttcttgggtgggttgttgttatatagcagcacaaaaacaaagcaaaagcttctacctttntattcataaaccttggttgtggctcgttttccgcttggnttggcatgtatgatggtatttcaagccaaaaggttcgacctttttgtattttatcatgagttctgtgtgttgtatacgaagcttttcgatttttcttgggtgggttggtggtatataccattatggtcggagtatgttgggctatgatgttgcatgggcatcaattactaactctcttttttattcat

SEQ ID NO: 156607 - DNA, 414 bp, Glycine max
  unsure (1)..(414): unsure at all n locations
tgcacaataagtaactaattgtgttgcttacaaaatgatgtatctaactaactaaaacaactaacactaatatatagagtgactacccaaaaggaatggatgggtcttgattaagctcatctaatctatctaattaaactaattacgcaacacaaagcctaaactcaacccaattattcaagtgaagaggttctaacttccaaactcaatttgaccctcgaaatggtagaattggccaaagcttatttctggcaagattgaagaactttttcttatgtttccaaataatacttacatgctccatttggagttctgtagtgtcctatatgccctacacaaagtaggtagatcaagtnagcacaaaattggaaaattagctacaattctcaattaagctcaatcatttgcctaata

SEQ ID NO: 156608 - DNA, 240 bp, Glycine max
  unsure (1)..(240): unsure at all n locations
acgtgacacttcaatactcagcttgttgctagccactcttggggctcagaagaggccaagatcttattcctcttattactagctatnttgaattctttagttcctgaatgtacaacccttcaaattgttgctcattcccctctttgagaatgatgaggatcttcataggacttcatccaactgatatttgtcgccagtttcatcacccaccacccttttcttctctgccttctcacgttt

SEQ ID NO: 156609 - DNA, 432 bp, Glycine max
  unsure (1)..(432): unsure at all n locations
tgaacaagatanggcagcgcaaaagcaatcctttgatgactgtttattgcacaactcanaaacttagagtttcttatgctcgcatattggttgaggttgatattacccaaaaattggttgaggaaattaccatatctgacagaactggaggaaagaaatagcatattgtggaataccagtggaaaccaaaactttgtgataaatgtcaaaaggctggtcatcaatgtggaaagaagaaagttgtcaataaatggatacctatgaacaagcaatcagatgacgtaaatgctcatacccttccatagacacctgtgcagaatactgaaactgaaggagaggacataccaaaatgttggattactgtggggcaaagctgaagacatatatgcaaactatagaggtaattggacatctaatgattgatgtctaatg

SEQ ID NO: 156610 - DNA, 353 bp, Glycine max
  unsure (1)..(353): unsure at all n locations
tcctaggcacaataatgtctggatatctttcccaagcctcttgggaagtaaatcttgatttggtaaatctaacttgtgtgggtgtagatgatgcctttcttttcctagaagtcatctgccaaatataagaaaaacacacaagattagcacatgtttattctaaaaaaaaatagaaaaataaaattgaaaatatggctgggcgcttagcgcagcatgctggcgcttagcgcaccttatgaaattaacacaagcgctaagcgcagcaagctggcgcttagctcgaagacacagaaaacattttnttctgcagaataggcttagcgcacaggggcacttagcctaagtctacaatt

SEQ ID NO: 156611 - DNA, 475 bp, Glycine max
  unsure (1)..(475): unsure at all n locations
cttacgcgacacataaaactcagcctggtatctccttcttcactacgtcaagaatcattggttttagtcttctctgaggctgncttactggtttagctccatcctttaaatatattcgatgcatacatgtggatgggctaataccaggaatgttcgccaaggtccagcctatagccttcttatgtttcttgagaactgacaacaacttctcctcttgctcatcagcaagggaggcagatataatcactggataactcttgctatcatccaagcaagcgtattttaaatttgatggcagacgcttcaactctggtgtggtctgctggacagtggtanaacgagatggtttctcaacccttacctcataaagaaagtcacacgtatgtgtgctatctganacatggttagtcctatctgactctatagaatcatctcaagacgtaaacaccaccaccatgcatgcaatcaatatcac

SEQ ID NO: 156612 - DNA, 318 bp, Glycine max
  unsure (1)..(318): unsure at all n locations
ataaatactcagcttgatgcacattggagagttatgaacaactatagatgcgctcctgagagttggatcaatggagaattagatgatactgagaaaaaggaggagaagaggaatgatggtgtcctagacaaaaccgaatgatggtttaaactcaacattctccatttaaggaaagaatgatccggagcctactggagtgggagatgaaatanacatgtttctcatgcacaactatatgaggaccaaaagtgaagcttgctgcccggagtttccgacttgctctgtgggcggacaagctcctaagagagacaagaatga

SEQ ID NO: 156613 - DNA, 251 bp, Glycine max
gaagaacgccgaagaacgcggggtacctttgcgagagtcttcacggaaaacgtcaccgaaacggacctgaagcgcctaagcttagactatcttcactgaaacgagactttcaagcgaatactatagagagagaagtgccataggggctgaacattgtgaaacagctccccacccctatacattgaaaaaatggaggtgcctgccgcccgaagacttaaagaggaataattctaagcgcacccgaattacta

SEQ ID NO: 156614 - DNA, 473 bp, Glycine max
  unsure (1)..(473): unsure at all n locations
tcttattattaagttntntatcctacataaaatacaattatttaatgctaataaaaatttacttaattcaatttttattacataatattaaaaaattatttaagtattactgatttgattataattaaatcataattagacatgtgaagtgcaaagtaacaactagcaatctatcgacgatttcaatttttttataacagtctaaaatacttgtaaaacttcggcccgggttgtttaaataaataaacgaaataaactttcaacatattgtgagtcgtacgctactttgagcacatcattagaattgtcaataggcatatgctttatacaagacttgaccttttcatctatnttctcacgtgaatgttttgcatttacttttaattttttttttataaattacattatatctcacttaattaatgacgaaaaatagatatattcatttgtcacatgacacattatgaatatca

SEQ ID NO: 156615 - DNA, 444 bp, Glycine max
  unsure (1)..(444): unsure at all n locations
tctatttccaatcctctatctcatgccttgtcttaccattaccagcgaagcatggatactacaccaaacaaaacttgaattatgtcctagaggagcatccagaaaactccctgaaggaaatcatttagctttgaacacctttgaagcaatagtataatagtcggttaaccatctccaaccttatttccctagcatagcaagaataaaagcatgcaaatgtntgaaacttaaacctccaaatttttccttcattgtaagtttctcccagttgagacaattaattcctttttaggagctattgntagtgtaacacccagattctagatctaaacattgcttggaaaactctcgttgattccttttattattgaaatacatgtcaataaaataantacttcttcaaacttgagtatatattatatattatatatataataaacatat

SEQ ID NO: 156616 - DNA, 440 bp, Glycine max
  unsure (1)..(440): unsure at all n locations
tgaaaacaaacaccattgtcattgtgaacaatggatcctttttgaaaaataaagcctaatgtggagttcacacctgtctaactgcttgtctctcccaaaaatgccatagttnttttgtaagagttgggttacgactgaaacttgtagttttttacagtgttaagcggtgtcatatatatagctgagttttaatatcaatgctgcatttttaaaaattaaaaatacgcgtgcacatgctttctatatgtgttgtcaactacaccaatgatgtgacacgctntaccttgcatcagatctgcatgtgtagtcatgttgtgcaaggtcctgtcacacgctntatgttaatgcagacaacaanttatctacatgctttttcacaatgtgttgtcaactcagacaatgatatatcatacatngctttttagattaagtaataattt

SEQ ID NO: 156617 - DNA, 241 bp, Glycine max
aaaaagaaagagagggagggaaaaaaaagaaaagaaaagaaaagaagaaaaagagagaaaaagaaaaaaaaaaaaaaaaagagaaaaaaaaagaaaaagaaaaagaagaagaaaaaaggagaaaaaaaaaaaaaaaaaaaagaaagagaaaggaaaaaaagagagaaaaaggaaagaaaagaaaagaaaagaaaagaagaaaagggaaaaagaaaagaaaaaaaaaaaaaaaaaaagaaaa

SEQ ID NO: 156618 - DNA, 274 bp, Glycine max
  unsure (1)..(274): unsure at all n locations
aaaaaaaaaaaaaaaaaaaaaaaaagaanaaananaaaaaaaaaaaaagagggaagagaaagaaaaaaaaaagaagaaaaaaaaaagaggaaaaaagaaaaaggaaaaggaagaaaggaaaaagaaagaaaaaaaaaaaaaagaagaaagaaaaaaaaaaaagaaaaaaagggaaaaaaaagaaaaaagaagaagagaaaaaagaaaaaaagaaaaaaaaaaagaagaaaaaaaagaaaaaagagaaaaaaaagaaaaaaaaaagagaaaagaa

SEQ ID NO: 156619 - DNA, 441 bp, Glycine max
  unsure (1)..(441): unsure at all n locations
tagacgagggagcaagtagagaaacagccgngtatatttgtctatctcagnttacgttcagaaaattattttaaacattctatatgtttcttgttattatcccgtgaatataaaaattaaaccaagaaaaatattgcactgcatataagcatgtcttcatagttntaccatacacttttggaagcttcaagttctcaattttgtttgatgggttatagaaagctttggaaagcttgatttttcttcttattattccgagaatatgaaagcaatggaggaaagatattgcatagctaaaaacgtatgtcgtcctaagtatactatacacgttgaaagctgctgctgcttgaagtttttgtaaccgtaaaactttacactgtcatattcgagtgaactgcattntagttctcatatatnattttatagaaacatcatgcgtac

SEQ ID NO: 156620 - DNA, 258 bp, Glycine max
ggcctcctctcacgctctacacctttgtgttccgctgcatcatccctggaggataatcaccattaagggacctcatcgatactttatgatacttcctacataacaacacctcacgcgagcgtacattctgagccttcgccatactaggactacacgttctcgcctcccgaggactacatgtgctcaccatcacaggactacgcgtgctctccttcttatgacatcacgagctcaccttcagagggctacacccctgcg

SEQ ID NO: 156621 - DNA, 368 bp, Glycine max
  unsure (1)..(368): unsure at all n locations
ggacctataaatactcagctntaagcaattcaaatggtcataactttcactcggatgtcttatttatgcgcataatatatcgagacgctcgaaattgaacaatggaagctcttgagcaattcaaatggtcataacttttcactcggatgtgcgaatcaagcgcataatatatcgagacgctcgaaattgaacaatggaggcactcaagaattcaaatggaccaaacgtttcactcggatgttcgattcaggcacataatatatcgagacgctcgaaattgagttatggaagctctcgagaaattcaaatggtcataacctttaactcggaggtgcgattcaaggccactatatatcgagacnctcgat

SEQ ID NO: 156622 - DNA, 398 bp, Glycine max
  unsure (1)..(398): unsure at all n locations
tcttagtctcgcctgatgaggatgaatttgtggctactttatgcactcctctaatgacaataacatcacttctggcactaaatatctgggaattggaagccatcttctcaattaaatttctagcttcaataagggtcatgtctccaagggctccaccactggcagcatctatcatacttctctccatgttgttgagtcctttataaaaatattggacgagaagctgctcacaaatctggtggtgagggcaactagcacataattttttaaatctctcccaatattcatataggctctctccactgagctgcctaatgcctgaaatatcctttttgatgaccgttgtcctcgaaataaggaaaatttnttctaaaatactctcttatgtcatccaactc

SEQ ID NO: 156623 - DNA, 413 bp, Glycine max
  unsure (1)..(413): unsure at all n locations
tgcagttcgaattgtggacttgtggtttgtctatgcgtgtgataagtctangcaccttgaaatggtcctgatggatggaagggtatgttgttatttaacttttgctttgtttaataatgtgacagggtttatgctctgttttgttgttgtgctagaggtataaaatccatgtcatagttaagaaacatgatttagaaacctgngaagttgaacttaaggaagggaaaacatatgcactactggaaaaagtacattcaacgatgattttttgacatattcaaagacaattttgaacagtctttgaagtcaacatcgtagaagttaagactttctacaacggttcctaagaaatcgtcttagaanaactacatttctaaaatgactttcaaacaaataatcgtcttataatgata

SEQ ID NO: 156624 - DNA, 400 bp, Glycine max
  unsure (1)..(400): unsure at all n locations
ttttatctttttaccaaaactttgatggaagaaaccttaagagcacttgtctgaacgttgaaaaaaaagaaagaaatgggcttctctctaccttggctgagctcatgaaaaaagagggaaaaaagcctccaaaacatgctttttaaagacttatgaagataaggtctaaggcttttgtccaaagaaatttgattaagcctaattgacaagcttaattgacggcatgaatgactacttggccggcggccattgagaacatgccaagcatgcctttttgggtgttattgttttcagattnttgccaaaatgctagagttacattagcgacaatggtaaaattgtttttgccaaactagtaatcttatcttaacgctagattatgtgatacctcttaattatt

SEQ ID NO: 156625 - DNA, 351 bp, Glycine max
ttttacacatagagataatggaagaggtcatccaaggatggtgacaaagatggcaagaagagcggcaaaggcgggtgattattggcttggacatatattatgattattattattattattattattatcattattatcattattattattattattattattattattattattattattattattgagaaagacaaattcagattaatgaacaagaaaattgatcatcgtaacacatgagaacaggagtatcgttgttattgaagatcaagacaatgagactacagtgtgtgggtttagcattctcgtcgcacttcaccctttttactaacttcttttataagagtgtca

SEQ ID NO: 156626 - DNA, 414 bp, Glycine max
actcaacttgctagcgttatgcgagacagagaccaacatggtattcatcattttattgtccaagaagaattaaatctagccactgcccacgagcacaaagtggtggacgaatatgcccgagtgtacgcggaaaaagaggctagagggagagtattctactcgttacatcaagaggcgacaatgtggatggaccgatttgctcttactttgaacgggagtcaaaaacttccccgattgctagccagggccaaagcgatggcggacacctactccgcccctgaggagatccacgaactcctcagctattgtcagcacatgatagacttaatggcccatataattatgaaccgctacgaagtttgtattgtcactcacatcttgactagttataactttctgaataaatgaggtcat

SEQ ID NO: 156627 - DNA, 417 bp, Glycine max
  unsure (1)..(417): unsure at all n locations
acattgcctcactgacaattgggatggatatattttgatggtttcaagaagactaactttattagtgctgtgcttgtaatgaaatacatattatcatgtattatatgaataatctatgtcgtctctgtctcataatcaaatttttggtttgacaaagacattgtcgagttaaacattttgataagggcctcgcttttaaatttttaagaatcaaagaaattagaaaaatacaggcacagattttgaatgaatgaacttatcattatcattttgtcataattagaacagaataatttgaccgcatatgtttaaattatatggagatcactccaattnccaaactatgcatgccttttattttatgaaagaaatatcataataatataatcttattttaatcattatcatctaatataa

SEQ ID NO: 156628 - DNA, 161 bp, Glycine max
aaaaaaaaaagaggggggggagaaaaaaaaagaaaaaaaagaaaaaaaggaaaaaaagaggagaaaaaagagaaaaaaaaagggaaaaaaaaaagagaagaaggaagaggaaaagaaaaaaaaagaagaaaaaaaaaaagaaaaataaaatagaaaattaa

SEQ ID NO: 156629 - DNA, 202 bp, Glycine max
gccacttgggatgggtaggttatgtgtgaattgtggatgtggagagttgactttgcccatttccctaccgccacctaataccacatgtgatggataccccataatcctacgagcttgaaatgatgaagtgtgaaaggtgagaacttctacttttattcgttgaccacagagtggtacctggagatatgtcgcgggggtcaag

SEQ ID NO: 156630 - DNA, 317 bp, Glycine max
cacatttaatacatcctttatttggtttttttaacagctttatttgaaacttgttaagactcattacatgcatggtgcgagattcacttcttttttaagtaattaagtataccactcattcttttttgtgattcatagtaatttcgcaaatacaaaaaattctattaaaagaattatagttaaaattggtagaatttctcactctaaagcaatggatcatacgttaccaatatttatcagatgactaacggccatatcctaattctcagtctagtccaaacattagctagttattggttaaaaaataaaattcagaa

SEQ ID NO: 156631 - DNA, 422 bp, Glycine max
  unsure (1)..(422): unsure at all n locations
tgtcaccaagcatgaaatccaacaaggcctgatcttatctctgtncaatttgngctgtcacagttcccacagacacaccttgctgaggcaagaattgcattcattgattcaggtactagtaggagtgtaagctatggtgagctaaaaaggtctatttactcccttgcatcagctntgttccatggacttgagattangaaaggtgatgttgtatttgtattgtcaccaaactcaaccttgtactcagccatatgcctagctgttttatcagttggagcagatcttaccactgccaaccccatcaacactgcaacagatattgcgaagcaagtgcatgattctggtgctaaactagccatctcagcacctgatgagctacacatattggtcccaactggagttcctataattctcacttctcg

SEQ ID NO: 156632 - DNA, 150 bp, Glycine max
ctcagcttttgctagccgctcttgtgctcaaaaatccaaattaaaatccctcttattactagctattttgaattctttagttcctgaatgtacaaccttcaaattgttgcttggtcccctctttgagaatgaggaggatcttcataggac

SEQ ID NO: 156633 - DNA, 423 bp, Glycine max
  unsure (1)..(423): unsure at all n locations
ntgtcctcagaaggaaacaacaccagatatntagccttccataatttcaaccaaaaacagaaaacacaattgaagctaaaggtagaaacgtaaatgaaactagaaatagaaacaagaatgaaactaaagcagaaacgtaaatgaaactaaaggcagaagaagaaataaaaacgaaattgcaattagaagcagaaaatggaaaaatgcattacgtgaacagtaacaataagctccaaaaacgtaaaaccctaaaccctatgctttgaataatagtctaacagaatagcctctacacgaatcccaaggctactatttataagggtcactcanagtcactgggccctattacattattctggcccaaaacgaaataaacactgaacaacatannaataaattacaatcntctaattagaaaatcac

SEQ ID NO: 156634 - DNA, 336 bp, Glycine max
tctcccccaatttctataaatagggggagaagtgaagtgtgtttaggttcaacccctctggcacttctctctctttcgaatttgcttagaaaaattgtttccgtgaagaatatccaagccgtagcgctttcgtaacgttttcataacagttccgtgagtgatctcgcgaaggttttcgaccgttcttcgacgttcttcattcgttctttatcggtcttcaatcttcaacgggtaaagtacttaaacccaagtttttaattcactctatatacccgcggtggtccacaattggtttcatgtatgtttattctcgttttcatattactttgtataccc

SEQ ID NO: 156635 - DNA, 453 bp, Glycine max
  unsure (1)..(453): unsure at all n locations
ntngctacaacnatactatgcacgactatcgatctgtgtatgctttctcctaactgagcatctactgtagcaaacactttcgctagcattgtccataaacaagctggaccactctctggtcaagatcaaaccatacagcttctctctgaatctaaaccgcctagggaggatggaaacatcttaaccagaacgcctctaacaattcaagccacatataggtattctcttctgttttctagttttgttatgataactatatctactttgtctgcgtgagtacagtaaattcgatgcacactgataatgtatgaatagctgccagcaagggtcttaaacgttatgttttatattttatacaaacaatagggcctatgtgcttcatcgttgtgctataactttcctccttacacatgtattgttgattgtgaagttgtagatgaatcgatttaatct

SEQ ID NO: 156636 - DNA, 349 bp, Glycine max
tcatccccttggtcctcatctgcgacgagaagaaaaaatctcgatgcacaacagtgacccctcgtgaacttctcgtcacagttaaagcatagtctgcgctctctgcgacttgcaagttcttcaggagtgagtcgttttaaagggaggggtgggggctttgctggggaaggtaacacgggaatgttacgggtgggtgaaggtatgatggtcggttatggtgaggaaaaattaagccccaaaggcattcgtccacgaaggcccttgcgattttcatggattttctcctcctggagtcaaactaaaccggccgcatgcaccatggtcaaaggctgaagagcctgcacctcac

SEQ ID NO: 156637 - DNA, 433 bp, Glycine max
tccacaatatccaagcaattcaatacccaaacattatgtattatcctaaaccaagaaaatatggtagaggcagaaaactctgcccaaaacacattccaataccacagctttccctactcaaataccccagtaacattctctttgttccgattcgataaccgttggatagactcgaaaattttactggaggttcctagtacataagtctacattttgaccgttgggatcttctagaaaatgtccagaacccaatatgtactacctttcccataaccagcaatgcacaagcattttctgcacaagaacaaaaattctgttgcacaattcaacaacaattttctgcataataaggcagattttgaaatccctcttgccctcatccaatttggctcaaattggattctacaagtcctaaatcatgtataaattgtat

SEQ ID NO: 156638 - DNA, 316 bp, Glycine max
aggacagagagaaacattatgaagagaaagcgacggaatatcgggcatcaaagcgcaaacaccagcggcactggaaactcaagaaaaacacaaaacaacagataagggcgcaccgacatgcgggtgacacaaggacacaaacaaggtcaaccataggagggaaacgcaaacaagagtggcccaaacaataaagaatttgaacggaacccccaaaacaagcacgaagaagcaccgacaagaggaaacatcccagccacaaacggaagccaacgacaaaggaagaaaggaaccagtggaaaagcaagaaacccacacc

SEQ ID NO: 156639 - DNA, 315 bp, Glycine max
  unsure (1)..(315): unsure at all n locations
acttccctttcttgaaggtggcatctttctattcgcccttcttattcatgtacaggtgtctgtatgaagtcttgggttcccttgaccactctcttgtgtgctttactcgagcacttgaatgtggcccctctccaacttcactcgaatagttgggccatggtgaaggcctttgaaatcttgtgcctctttttcaacatacaacctggtgtgccagncttcctatttttctttccaatgaagctgattggcaagattggttgggtcttctcgaacaatgtatcaagaagttgtntgaattcgactcaaacatctttc

SEQ ID NO: 156640 - DNA, 333 bp, Glycine max
  unsure (1)..(333): unsure at all n locations
tgttcagaaacgtgcataggtgtgcaatacactattcttgatacaccacaacaaaatggtgtntcagaaaggcgttatagaactttaatggatatggttaggagtatgttaatcaattagaccttacccgtatctttgtggatgtatgccttgaaaactgccatgtatttgttgaacagggttcctagtaaggcagttccaaagacatctcttgaactgtggacaaataggatacctactataacgcaccctgtatgtctagggttgccaggcagaaataatgatttataatctccaagacagaaaattggatgcgagaacaatcagtggata

SEQ ID NO: 156641 - DNA, 438 bp, Glycine max
cgagcccaccaagggggcccatcattggtggtaaccttctccaattatggcaactttcatacagagacttagcatctttatgtaacaaatatggacctataggttatctaaaattggattaaattgatgtcctcactaccaatgatttttgatattataccccaaattcttcttagccaagatgatgtttttgcctttcgcccacatactcttggtggtgttcatttagcatatgggtgtggtgatgttgcattggcccccctatggcctcattggaagcccatgagaagaaattgcatgaaacatttgtaaagagaaagaagctgagtcattctcaaacatctctagagaagtcaacacctgtcaggatgtttgtccgagccagatgaaagccattacttagggagggttgggcactttcataacatgtactagatg

SEQ ID NO: 156642 - DNA, 399 bp, Glycine max
tactcagcttggctataactagggcaaaggagcagctgaaggaaccagtgttcagaaataggggttttgtgttattggattgtattaagggtttgggaatttcgtgtgtgggaagcttgcttttgtgttactgttgaaattgctacaaatttctagaatattcttaaatataatatgtatgaatatggtagaacaatctagaactatagtatatatgaatatggtagaacaatctataactataatgtgtatgaatatggtagaacaatctagaactataagtgtatgtataagatagaaaaatctagaactatcatgatattaatctatcatgaagactctagaaagacttaaagtaatgtagaaacattcaccaccattgagaggttggtgacttga

SEQ ID NO: 156643 - DNA, 408 bp, Glycine max
  unsure (1)..(408): unsure at all n locations
tctgactcacatagagcagnaggcgaaagtaatatatattnttttttaaaatatgatcagcgacggctttgccagccgaatgcttgcgactaatatcggcttttattttagataggtacactaatatttaagcattattcatgtaagttgttaacttcgcgcattttgaatgaggttaaatagaaaatacagggaatattacaacgaagggtgatttaaattataattagctcactcaaaattggtttatttttattgagttataattggtaaattatattacttgtatgtaatataatttagaaaatatttggaaaataacgtaccaagagttcatttgagtntctgaacaataaataatgattgttatatgtattttttaagcttattctactaaatatatatgcg

SEQ ID NO: 156644 - DNA, 460 bp, Glycine max
  unsure (1)..(460): unsure at all n locations
cttaaaactaagcttgctgataaccatttaattaacctatgtatgcgtgcttagtttatatccatnatcacaaagactacctaccagcaaatcattgatattcactcccagcaccacaagcttgcttgtcattaacaaaataaccgaatattataaatcttatgttcacgatcttttattcattcaacctgcttagataacataaggaagctgtgacattatggcattggactgcaacgacactacatcaggatgctataaccacataacacacactacagagatcctacagttaagcgcaattttcgattaaagatctagtgatgttatttagaactagcaagtctagtaagagtcaatactcaataaaccactactaaccttacattcaagcaatcatggatcaccactcatcagattctatatttgtcagaaacatagaagagtgaaccgtcatgca

SEQ ID NO: 156645 - DNA, 461 bp, Glycine max
  unsure (1)..(461): unsure at all n locations
acactatagaccactcagcttggttttgggcaatagcaccccacctgtcgttttctatgtcttctgacccccgcgacatatcctcagataccactctgtgatcaactaataaaagttggaagactgactcttccacactttctcacacagggtttattggattatggggcacccatcatatgtggtactaagtggcggtcgggcgatgcggcaaagcaaatattccattttcacaagcccaggcataagcacaccatccccaattgcccacctttaatttgagttcatgtacgcgtacgtatttcttctgctcgttcctctcagcaccggattcccatcaatccctccaagccctaacattgtcaaccaccgcaatgcatcatctcttatagtagtaggctctttccggttctctctcggattactctcatnctcaccgccaatcaattcaatacacacat

SEQ ID NO: 156646 - DNA, 428 bp, Glycine max
  unsure (1)..(428): unsure at all n locations
actaagctttgcgctatttnctacatacgaggtgtgcacattattttaaccgaaaaagngcacccatatacaatcaatgcagcttcgttacctaaattatttacacgtactgcccaagcggatttgttacttacatcacacacatctccttggctgaatntacatacatgcatactcaaagcattttggggtaccaaaaattgcacatgtgcacatcttgggatttttaatacctatatatacacaaacttcatgatgaatcttgactatcttcacaaaaaggtgctacaactcatcccttctttcaagtatttgctacctaaagccgcatgccaattcagcatattttccttgccgacaaacatgcattaaaataaaggatattttcgtatatgtttctcacatacatgcacatattattatatttt

SEQ ID NO: 156647 - DNA, 379 bp, Glycine max
  unsure (1)..(379): unsure at all n locations
tgtctcagcgtttatgcgagacggagaccaacatgcttttattatcttcaagtaccaagaagagttaggtctagccaccgcccacgagcataggatcgcggacgagtatgctcaagtatacgcagaaaaggaggctagaggaagggtgatcgactctttacaccaagaggcaaccatgtggatggatcggnttgctcttaccttgaacgggagtcaagaacttccctgcttgttagccaatgccaaggcgatggcggacacctactacgcccncgaagagattcatgggcttctcggctattgtcagcatatgatagacttaatggcccacataattagaaatcgttaggaaactcgtatggtctctcagaccttgact

SEQ ID NO: 156648 - DNA, 387 bp, Glycine max
  unsure (1)..(387): unsure at all n locations
gaatgcaccttttgattatagatatatcaataacgattataatggnttagcttaaaaatatttaccacttatttatagtggggtgggtcatctaattctaatatgaacgaatttatttcaacccctatcattttctgaaaagaaattttacttttttatttctttagtcaatgttcacttttttcaatcaaaattaggtataataacatgaatccaacttcttaagaaaacaattccatatcaatcaaatcaattttaaatctttggaaagtggagagattaatgcctgtattttgtttaaattattcttatatcaacaaatacttcatatcaattaatatcggtctgaatattttactattttaaatcgattatatcacgcaaatt

SEQ ID NO: 156649 - DNA, 440 bp, Glycine max
  unsure (1)..(440): unsure at all n locations
tacccatctctgtttaaggttttatgatgatgctttgttatgtttgngtgctgaaattgctgatggaaaattgatagagatgaagggtagagtttctacctagggttaaaaagtgagaatgtagtgatatgagtggaaaagtgtgatgctttaaggatttgaaaagctaaatctggatttagtggtaattggaggttaaaatgagttaatcctagtttgaaatgtcatttangacttgtgggaaagcttgggcagtgcaaaggaggaaaatgagtgaccaaagtgaaggcaagagccatttctagggtaaattgggtgttgaggagtcaaaatttgattcggtggagttttcatcgtaaaaccagtttgagcgagtttagattaatattatagacttgtttgagatgagagtttgctccaaaattaccccattctcattt

SEQ ID NO: 156650 - DNA, 445 bp, Glycine max
  unsure (1)..(445): unsure at all n locations
ggcttctatactcttcttcttcattcacttttttctcttaccaaacgattcaaaggactaaccgcctgagaattcttttgtttcttcccttctccctcttgataaaagattntaaaggactaaccgcctgagatatcttttgtatccccctcacagaaaattcaagggactaaccgcctaagaattcaattgtagatcagttcaagtggagggtacatccacttggttgttcaaagagaacaagggagggtacatcccttgtggatctttggcttgtaaaggattttacaaggttgaaagaaatctcaagaaccattggttgcttgtggactggatgtangcacangttgttgccgaaccagtataaatcttgtgtgggtcttcttctttcctacactctntaatttccgctatgtccttttaattgccgcttgtactttggtaa

SEQ ID NO: 156651 - DNA, 380 bp, Glycine max
  unsure (1)..(380): unsure at all n locations
ctcagcttgcactgcgcagtaagtgaacaaatgaagtgtccttattcttggatggntgcttggtagaggtacatgctaataactaataagatttcctgtgcagggtatcattgtttttgcatgactgatggctaccttggggctggagattttggttgaatctgcctcaagtgttattttgaaggtaattgagataatcttttgttgctgtttgtttattatatacctaaatttgggttcaagactagttattcaacatgtggattatctaccataagattgttctaataagtgattttatcatttgagcagatgatattatcatttgaccttgcttttgctttgattccgctcctaaagntcagtagcagcaaagtgac

SEQ ID NO: 156652 - DNA, 363 bp, Glycine max
  unsure (1)..(363): unsure at all n locations
gcggagtatctttcggaatactgttttcctggancgcaccacgtctttcctttattcaaatgtgcagatatgttgcgacatactgatcggatctggtgcgtactgaagcttacggcctggagcacaagacaattgtgctcttgggcttcatccccattctgcttaatgcttccaagtatgggacacagtacaattatttatgctcatacaaatgcagagcaggcagctgatctgacttcgcaatctccttgaagcaatctgttctgattcttctgaatacaacatgtgctctttgtgtatgggatcattctggaagacactaactcatatgacgccacaaaatatatctctatgttatacaat

SEQ ID NO: 156653 - DNA, 360 bp, Glycine max
  unsure (1)..(360): unsure at all n locations
gcgtntttacctcaaagatcagtgcgaatcataacacttccgcattttatctctagcatgcattcatatcatgcattgcataagcatctcttcatggcatcataatgaacatatcattcctgcatttgtccgttatcatattccaacatcacattttgcatgagtcattgcatcatcatgcatatgcgttcaacatacttcttgatctacaaactgcatacacttttgtnttcatgttcgatcatgtgtgatacttgcattttcctctacaaaacanaaacaaaaagggaagcatgaaaattcatgatgcattcttaggtgcatatattcggtaccatgagccaaccatgttgggatcat

SEQ ID NO: 156654 - DNA, 310 bp, Glycine max
  unsure (1)..(310): unsure at all n locations
taaaactaactattcttaagactaatactgcctttactatgataataaagcacaatcatgtgcattcaatcaacaagcacaatcaaacacattcgatcaatattcatcgtgcacaaacaaatgaaatcaccctaacaatcaattaactatacacaataactnatattactattaataattcaaacaaagggaagcaatggcaattattaaatgacaagcaacanttaatatgactattaataacactgacaactacactcaaagacaatctattgaacataaagaggataaagctcaatgagtgacctac

SEQ ID NO: 156655 - DNA, 311 bp, Glycine max
  unsure (1)..(311): unsure at all n locations
tgatgacaaaggtgatgaaaataagctcaaagatcaatcaaagaacaactcaagtgaatcaagaacaattcatgagttcaagatgagaatcaagaagaattcaagactcaagaagaaagtgtagagtcaagaatcaagattcaaggttcaagatctcaagaatcaagatcaagattcaagactcaagattcaagaatcaagagaaggcttaatcaagataagtgtgaanaggttttctcaaaaatcgagtaacacatgatttgtctcaaaacatggttaccaaagaagttttactctctgggtaatcgata

SEQ ID NO: 156656 - DNA, 274 bp, Glycine max
aattgaacatagcaggaggtcaacacatgatttttgtttcctttgtttgggatgtctagatggtcgagaatatatagaacagaaaagagaataaggtaaagcatggctgtgtacgcatgcggagaaagggtatgaaaatgttgaagataataaacattgtgaagaagtagaacaaaacgaccaacatacatgacaatgtggcaaacaagcttgggaaacaatcggctaggaaaaacagaatatgagagtaaaacgaagagtgggactgtgggag

SEQ ID NO: 156657 - DNA, 326 bp, Glycine max
  unsure (1)..(326): unsure at all n locations
acattcctctactggatgcaataaagcatattccaagatatgctaaattcttgaacgagttgtgcactaataagcggaagcttaaaggaagtgaaagaattagtatgggaagaaatgtctccgcattgattgtgtaaatttgttccccaaatccctgaaaaatgtaaagatccangtacattcatcataccttgtattataaggaacaatatatttgacaatgccatgctatatctatgagcttctgttagtgttatgcctctatctaattctaattctctatctcttggcgcctgcagtcaactgatgtggtaattcatttaact

SEQ ID NO: 156658 - DNA, 473 bp, Glycine max
acttactcgtgctaagctctattgtggcgctaagcgcgacggcgcaatttcagagcctatttaaagcctgaattatcagaattagggtaagaccgacattattacactcttgcacataattttacacagagaccttggagagtgagctctgaagatagtagaggagaggcagcacagcaaggagcctacggttcatctttgagcaagattagagagtgtttgaatgattgtgaggtgccaagaagatgaggagggatcgccccttctgtgtaagcagcaatttctctatattctctatctaatggtagaaaaagcctccttggtatggcttgctaaaaccctagttggggatttcttatgaacagttgacgtaaacattcttcatatctaattaagtgtggtttatgtgttcattgcttctatcgatgcttcattgttgatgcttttggctgacacacattggtgtgtactgt

SEQ ID NO: 156659 - DNA, 312 bp, Glycine max
  unsure (1)..(312): unsure at all n locations
atatgtatgtatgtaaatgggtagcatgaaaatgccttgcataatatgaatatgcatagcatgaagtgccttacaaagtgtgtgaatgggtagtgtagaagtgtttttcaaatatgtgtatttatgagtaggtaggaaaagaagccttgcaaaaaatgtgtgtatatatataggatgtagcatgaanagggttgtcaaanaatatatgtctatcgtaaagtgcctttcaccaaatttttatgtgtgcaaatgcatgtgtcgtanaatagcacggccccaatatgatttatttataaagtgcatgttgacact

SEQ ID NO: 156660 - DNA, 231 bp, Glycine max
gtaaaatatccaaattaagttttatagttagaggagtacttataggagggctaatagtggcctacgtcttctcggcaactcaagactcatggaagggattatcctacacatgatctagagttagtatccatggtgttcgccttcatgttttggaggcattacctttagtctgatacattgtgagaaaccataggagtgaatctgaggtagaagagatgggcataactctta

SEQ ID NO: 156661 - DNA, 334 bp, Glycine max
  unsure (1)..(334): unsure at all n locations
gttatgtcaatcaatagcttctctaatggagcttatgcatatgtctttcaattctcaagtctatgttgaagttgaaccttatcaaccaatttgaattatgaagtactcacctgttgctctttcttangttaagtatgctgcattggaacaatatacgtggatattaatatggttaatcatatggaatgaaaatgatgctcactggtcttcatcactcgcttncaccctacgctgatgagtatggaggttggaacctcgattattctatggactttaccacgttatgttttcatttaatggcagtgcctgttgctttggctattatactctatta

SEQ ID NO: 156662 - DNA, 479 bp, Glycine max
  unsure (1)..(479): unsure at all n locations
actctgataaagtcataaacattatcatataagcattaaaatggcattattaggtgactgaataaggcacccaaatcatcttataattacttgataaaacatacataggtaagcagggatattatacagattctaagacaactacaacttgaaaaatgaactagcaataagaatataaaaggaaggcatgtgcacaagcttccatcattaaggggtgcagagagggtcaaaatgtattaattttagttaatatattcctttctagaatgttttagaaaataagtaattcagtttctctaataataagttaatgtcatgattgtatttaagccaattaatgctaaataacanatagacaagcatttcattnggaaagcattctccaatagctatactttttaaggaataaagggttaattgaagaatccatacatgaacattctttgataaaattgactgaatcatcttactcaacatac

SEQ ID NO: 156663 - DNA, 402 bp, Glycine max
  unsure (1)..(402): unsure at all n locations
gaagctcactacaagccttaagtgaataaccatgatatcaccatatccttannggaatttggagctctggaattgttctgggaataagtgtgggggggttttgtttcattggataacatgttntgttggctatgcttcatgatggatcttgggccatacttgatgtacattgtgtattggttaaatgttggacatgctgaatgagatgctgtttctcanaggctacaaaanaaatatcgaataagaaaatatcgaacaagaataagaaagcaatacagtgagtgaatacatcttatatggcaaaaaatgatagactcttggtctacttttatgttaaatntatcttaagtcttttatttttctcttttcatttttgctatatgacctattcccattactctc

SEQ ID NO: 156664 - DNA, 277 bp, Glycine max
  unsure (1)..(277): unsure at all n locations
gaacatcttcatcgncttcaatcaaaaactccttgactttgtagcaattggccttttgatgtaggaaaggcttatcaattgctatctaaaattgggtctctagagtagttaggcaagagacttgtgacctatgcatgaagggcaaatgagggttgagcctttgaattcatcgaaatgaagttcccttgatcttatctcctctctattggtagatagcttcatttnttagctcagatccatagtctgataactcccagtattaaaatatcaaacttta

SEQ ID NO: 156665 - DNA, 173 bp, Glycine max
atagtgatgcaagtgtgcggaaagtggtctcgccaatttgaaacaagcttagggaacataaagagacttgggagaaataaacaaggtaaaacattaccaacttatgtaccttgatagatatgccaatataaatggagtgctttgatgagaaaagatactagattgtaactctg

SEQ ID NO: 156666 - DNA, 246 bp, Glycine max
  unsure (1)..(246): unsure at all n locations
ttatatgcagaaatgatgtcttacatctaaaggaagattaaggaagaataatatcacaaaacacaaggatgctatgggcccagaacctctntattattataggataaacagaaagcatctccaaagaagaattcagaaaatgtntaaacccaattacggaattacgtttcgaacaattgttgaaacaaaatctanggccagcctaactagtaactagggatagaataagtatggcacttaactact

SEQ ID NO: 156667 - DNA, 306 bp, Glycine max
  unsure (1)..(306): unsure at all n locations
agcgtgaanaaaagctaagagccttcgagaatgccatctcaagttatggattcttaccaagataagtctgtagctgatattgcttctctttagaacaactcgtgtgaagaactcatgctgaagtcaatcttattatggtaggacatcagtttgttacaatattgggttgcaatctcgcgtgattgaccttatacgttagataaactttgatacatataacattctttgtgccataactctatatgatcggaatcctaatctggacataccctactcaaagtagttgcctgttctacatcattgata

SEQ ID NO: 156668 - DNA, 345 bp, Glycine max
  unsure (1)..(345): unsure at all n locations
gacttacagcaacctnctatccctcttccattcccacctagagcaattccaaacaaaaagatggaagaagcgganaaggagatcttggagaccttcaggaaagtagaggtgaacatacctctgctagatgccatcaagcagattcccagaattgtgttagcattgatagggaaatctgttccttacattcctgagaaatgtaaagacccaggtactttctatataccttgcattnattgggaacagtaaattgagaatgccatgctagatctaggagcattagttagtgtcatgccctctgtccatttcaattntttatctcttggacctttgcaatctacagat

SEQ ID NO: 156669 - DNA, 332 bp, Glycine max
  unsure (1)..(332): unsure at all n locations
aacaagngagaccacaatctaaacaattggtggatgcttcactatgagggaagataaatatgaagaactctaacgaagcaatggagctgattgaaaacatggctactagtgatcacgccatcttgcgtgatagagtgcatgtacccactaagaagagtttgttggagttatcgtcacaggatgcattgttggcatggaataagttgctttccaagcagcttgaagtcttaactaanaccctcaataagttgccaacccaattatctgctagtcaaccttcaccttcttctgttntgtngggtganggtgtgctatttgtggtggagctcatg

SEQ ID NO: 156670 - DNA, 220 bp, Glycine max
aatggcttgagtgggaaaattgacctacttctttacaaaacatgatcttattttattataaagtcatgtaatgacatatttgggcactaagaatgcttctgaaatttctatcaatgcaacaagttgaatgacggagagaggggaatcttttaactcaataacaacctattggtttactcattaccagttggaatactttaaaattacataagactttggt

SEQ ID NO: 156671 - DNA, 380 bp, Glycine max
agattatataatcataaaagaagctgtgaatatattctctggaaaacgaatatctccttaaagaaaaaaataacatatactcacaaagctagtgctatgatgctttctcaccaccgtaatgagctggaatgcaaacgtgaatccgatatgctgcttttatttcgctatggtcaaatatatgctatcgaatcaatcagtccatgtctatgtttctgtatattattggtaaaaatatacccaacaaagcacaataagatgtgcagaattgggaataaaaggctaatacatacgttgatatcactatatatatatatatatatatatacacacactaatggttacataaactatgtataataagtcgactcgagtccttttta

SEQ ID NO: 156672 - DNA, 441 bp, Glycine max
  unsure (1)..(441): unsure at all n locations
aagagaagagcacaaaattgtatgctctaaaagagctctgaaatctaaattgtaattttcaaagttgaaaaaatgcacacacatgacctttatttatagcctaagtgtcacacaaaattggaggggaatttgaatttcaattcaaatttcacttgaatttgaaattgaatttgtagtgccaaacattggagccaaaatttcactaattatgattagtgaattgtatttatggttcagcccactaatccaagatcaattccaagattcttcactaagtgtgcttaggtgtcatgaggcatgtaaagcatgaaggacatgcacaaagtgtgattatatgatgtggtaatggggtgtgtaagcaaatgctcaccnntcgctctaaaatttaatggattgggctttacaattcaatgaattatgtcaccacacacataatattac

SEQ ID NO: 156673 - DNA, 341 bp, Glycine max
  unsure (1)..(341): unsure at all n locations
gcacaacaagtttcacatcacaatgcgcgcataaacccaccattccctggtgccacctncactaagctcacgtactccatgtagcccatatcctcatttctctcaacaccgggtccacatcaatcctctcaagcttccacaacatccaagcaaaacaacattcaaactgcacaagctatcacagccaagcaaaacagagcataggcagaatactttgccaaaacaccaaccaaatcacagcttttctcacttaaagaaccccagtaacaattccttcgttctggttcattataccgtggatcgactcgaaaatttactggaagctctaatactaaacctac

SEQ ID NO: 156674 - DNA, 384 bp, Glycine max
  unsure (1)..(384): unsure at all n locations
aataatggcacatcacacgctgaatgaattaattcatatttatgatacatatagtaagattaatgtacttgttgcgataaagacttgaccagatgtgtcggccaagcaaggaaggtctaaattgcctaccccacttaagaaacctcatgagtgggtacaggaactgaagcatctgcatctataacctcctccacacttacctttacttggccaggcaacaaaggagtgttatgaacaatagtggatccctcataaactctccccagggcaaccaggcgggcaggatctacttcgatgtacaagccgcacctatctgagtcacctatctcaggatcgtttcctgagggatcaacacaactccnctttgtgcttactcgatgacct

SEQ ID NO: 156675 - DNA, 385 bp, Glycine max
  unsure (1)..(385): unsure at all n locations
ttctctctctttcgaatttgcttagaanaattgttccgtgaagaaaatccaagccgaggcacttccgtaacgtttccgtgagtgatttcgcgaaggttttcgaccgttcttcgacgttcttcattcgttcttcatcgttcttcggtcttcaacgggtaagtacctcgaaccaagcttttcgattcattctatgtacccgtggtggccacattgtgttcgtgatttccttctcgtttcattactttccgacccttttgacgtgctaaccatttattaagcattctcgctacctanaaaaaaaaattccccgacgttgatgatatccgtacttcgtaaataattcaccgtcgcgaccgaccacttgaataaaaagagtaatatatta

SEQ ID NO: 156676 - DNA, 437 bp, Glycine max
  unsure (1)..(437): unsure at all n locations
gagcttctatggaggctggatcttcgagcttcaatgatgtcctctcaatggtgatttacaccatggagatgcagcggaaggaaaatgagaagaggagaggggaggcaccatccactatggaataagccaaggaagaaggagcttcaccacaaggaatcgccttggataagaagcttgaaggggatgctntaatggaggaaaagaaagagagaaggcggaagcacganactgaaggaataaaagaaggagagaagtggaactctgaagtgtatctcataagactttcattcatcanagttacaacaagtgttacacatgcttctatntatagtctaggtagcttccttgagaagctctcttgagaaaactctcttgagaagtctctctgagaaaactctcttgagaagctagagtttatctacacacacctctctaat

SEQ ID NO: 156677 - DNA, 442 bp, Glycine max
  unsure (1)..(442): unsure at all n locations
gagatgacatgnttaacctaaacagtaaaccaatactatataattcacaacaaaaactttctcactttataatagttactgtatatttgtttgagatgaaagaaaaacaactaaaggcaagtttaagctatacatttcgaaaagatatatatgtcttttgattatgaaactcttaaagagtcaaatagcggcattattaaagctccaagttaagccgctctttcttgaaattggacccacaaaagttctcaatggacccccctagacaagtactatcaccacccatctnttatatacccntggaaagaagtaagggaaaggtcatcataactactttgatggagggttagtccttttatcttcgatcatggaaaatcgcatcgccgcacgacaatactgtaataaatgtaactnacaagtannaaaaatcttattttaaaat

SEQ ID NO: 156678 - DNA, 502 bp, Glycine max
  unsure (1)..(502): unsure at all n locations
taagctgatcatcaactaactctacttttaacatagcaattattttcttatcatgcagcgtcaaatgcnaaatgactaattcataaatatgtctaagtctgagaatggacaacctgcttagtattaactacaatgttcacttaacggatgagcagttcatcataactgctgataggtagcatttatcttattcttaattaccacttgtacatgcatttgggctattatatatatacgaaccttctaaaacaaaacacccgatcaatattaacttacaagtctaaatcaaacactatgtatatatatatagttgtctggtaatatatatatgtctagaacaagagaacacgtgatcagagagaatagaggaaattctcttcattggcacgcacttagctatatgggttgatattctatttataatagatcgagcaacacatatgcattacacaactcttcaattaagacactcaacggatattatatcataactcttcaatac

SEQ ID NO: 156679 - DNA, 325 bp, Glycine max
  unsure (1)..(325): unsure at all n locations
tagagcattaagacggaaaattccatgtcattctgtngctcactcggcttgatggtaggggtttgagaatgccaagtttggaagctcggcaacttaagggtgtgtgctctcacagctcgcggacagactacacccggtactcatatttacaggggctaatcatgtttagacagggaaaaactatatgctttcatttatagatgaggatgctataaaactacatattcatatggtcgatcttatattttgtatcataaactttttgttcgtggtgctaaacttttttattccaattgaggtcaacctattaccatcttgaggactt

SEQ ID NO: 156680 - DNA, 213 bp, Glycine max
  unsure (1)..(213): unsure at all n locations
cattcacaaagatgcttgaactaacatggattangggtgaccacaattaaaatgacttttcaataaaagagaaaaggaataacagaataattgtgttggttgttttccccatatttgatcgtgctgctgttgaatgtttacttaagcggagtttcacgtaagatgttgntaatgctattcgactaatccggccacttattgatgtttgtttat

SEQ ID NO: 156681 - DNA, 259 bp, Glycine max
  unsure (1)..(259): unsure at all n locations
ttcttctcattccgctgccatttatcttccaagaagcaaaggaatccattgatgaagaagatcctaggcctacaagctccaatggagcttacatcacgtctcaaatgtaggaattgtggcagtgctaagggaggtttcccttgatatgaaaaggtagaagaattgtttaagaaggagtgctcatttgatatcacctttttgtgcaaataattntccttcttaacaatcttcttggaggaatctttttcctctttttcct

SEQ ID NO: 156682 - DNA, 413 bp, Glycine max
  unsure (1)..(413): unsure at all n locations
acctacacactntcattngaattccctgtgtatatttctnnttgtatantttatgtatagttctaaaaagctttcaaaataccttgaacaccttaagagaaaagactaattgctgagattgtatatttgtctgtaagatgctttaagagttagacattgtgcaaacaaacaaccaatctatttgatgcgtgtagagccaacaatgacttggtatgacaaagaatactgggttatatcaagcttgcggtagagtttgttatgtagagataggagtggccgtggcagaatacttgtaactctgagaagttagtgacactctataacaccctagttagtattatgattgttcttaattcattntcaaaattctggaataaaataattaacttaagatgtgntatctaactattctt

SEQ ID NO: 156683 - DNA, 379 bp, Glycine max
  unsure (1)..(379): unsure at all n locations
agcttacacaaacattcattagtccaacacacactctatttatattcatcatccatccatagnaccaatcaatcatgctcagtatgatgcatgcacctgacctcaactctcaaatgcaatgtggtaccatccccaagaaaatagcctaagcgtgtccacacgacactctcacttaggaaaagtaggcaataagtgtcgagatcaccctgtcgtgcataggaaactccccaccccccatggtgatcagcttgagtctcaagggagttccaaaccgagtgacatgcccccaagtacaagtattcctcctcatgagaaactacaagtagttggtgacaaagtctatactatntccatgtcatatgaagtatgaaatatggga

SEQ ID NO: 156684 - DNA, 372 bp, Glycine max
  unsure (1)..(372): unsure at all n locations
acatctgaatgaactattaagaagcangtcaaatagaaagtgtgatggtgacatcatgctgtataaaaacatgaaccaaatttccctagctntagcattcacctaattcgcttatcttgatcttgttctctttcttgtaactactcgtttttttttctgcctcttgtagctgagtttgaatgcacatatatttaaaaataaccaagaaaaaaattaagcaaaaatttgatgttgctacaaccttcaatgagaaataagtaactcaaccaataatggtataaatactaacatcgaatatggaagaaaacaatggcttaattaatcagaaaaccagcattgtaacatatagtcttaccttgcccatgttaccaa

SEQ ID NO: 156685 - DNA, 274 bp, Glycine max
  unsure (1)..(274): unsure at all n locations
acttaccaacactacacacatttgggtctaatgcaacgcctacttcagcactagaaaanaaccgttgtattaaattatagaagagaacggttntttatgcaattggtgtagttcaaaaaattttataatttcatatggaactctntaaaaccattctcttaatttaataggcaacagttaatgaattttaaaatttttatacaacaattataaaccattgcttcaaaatataaaaaactagtcggtaacccgttgtcgcaacctacccttttgc

SEQ ID NO: 156686 - DNA, 308 bp, Glycine max
  unsure (1)..(308): unsure at all n locations
tgcgcaaataactactacatgctcatttgctagatacttgatccataatattgtcctatacaccatatctgtgtatgcacattccagagatgaggcttcagatctgaaggtgtgtaactacaggacttcttattacctgcatcctanacaacaaacttgatctgatggtagtgtggatggtcgtccggaatcatgaggtatgatataagatggtcttgaaactgctactgaccctgactacagatctgatctaacaatacaccttggaaaagtagatgttgcaaagtgtgctcatagtatatgtctac

SEQ ID NO: 156687 - DNA, 376 bp, Glycine max
tcaaatttaaaaatacaaatagattttaaacgtttgtttatgagatgtatcataaataaactttcgaaatatacaaataaattttcaaaagtttagttgaaaatatatgacaaataaacttttgaaaattttattttgagatatacaaatagatttgtagaatttaaattgtgaaacaataaaactaaactcgtatatagtaacactatcggaaataaaattaaaatttataaataaaaataaataagaagatgccgaaagcaattatggcaacttaacacaaacgaggtacagccaaaatagaaaaaacatcatctctttcgggacttccgcatcgttgactatactttggaactctgattctgaataataagta

SEQ ID NO: 156688 - DNA, 466 bp, Glycine max
  unsure (1)..(466): unsure at all n locations
ctaagcttcctgcggtcaacccgnccactgctcctcatttatacactttgtncctttttccgattctggttccttttcgagttccaacttcatcatcactcccttgcttaaaatgttatgttgtgaacgatgacacaaactgaaaaaccccgagtttttaaatgctaacaaatcttgggcagaggaactttcctttcattcattntcattgatattgtaaagttttctcaagtttagagcttttgcagcactcgtaaaggaagatcaatgattcattatgtatgcttaacagttctcctttnttgtttttctcttcccgtgatttctattattngcagggcacctgtatcatcatttctggaagcaaaaccttcgcattcaaaaggtgattttaaaagctaacttagtcttacaacacaccatgacccacttatgtcttctttattttaaatttggatcttttggg

SEQ ID NO: 156689 - DNA, 310 bp, Glycine max
  unsure (1)..(310): unsure at all n locations
catcgctcccttgcattattggggcaccacctgngccgccagatccctccaccttttgggcgtgttcttagaatgatctgtccccctttctgcacatgttctgtagttgcatcatatccggaaccatatcaaaattgtactgatactgcctaacaaaggcaaccattangtccttccaagaatggactcgggaaggttccaagttagtgtaccaggtaacagctaccccagtaagactntcttggaaggaagtgatcaacaattcctcatcttttgcgtattccccatcttctgacaatacatctttaga

SEQ ID NO: 156690 - DNA, 429 bp, Glycine max
  unsure (1)..(429): unsure at all n locations
taagcttcattctctgaagtcatcatggattgacttttctggggatcttttttgtttctttatcatntaccttggaattgtgctcatgaatgttcatatgttctaaagaatctgcaatgtcatctatcatattctttcttgacaatatagcattagattcatcanaggtaacatgaatggattcctcgatattcatagctctcttattatatatcctatatgctctgattggtaatgaatatccaagaaatatgccttcatcagattctgcatcgaatcttcctagattatctttaccattattaagtacaaagcacttgcaaccaannacatgtagatgagagatattangttttctaccattcaataactcatatgggattctctttaaaatacgtcttatcaaggccctattcatgatgtgacatg

SEQ ID NO: 156691 - DNA, 463 bp, Glycine max
acaatcttgttccaaccgcgctcttcgctctgcaatccaggactgttttcttttccactgatcaagctcattatttttctctgcccactttgattgaactgtatatctgctgtttataccatgtctaagatagaaagttgtcatttcattgtcaccttgtatcacttttgtttcttgtggttcttcattcacattttatacctatcctcttgtatagattagataaccacgggtttatcttacaatagttgtaaagtacatatatattatagcatgtatgtcagaacagtcctttgtgtgattatctttcctctttggagatctctatgtgaatatctctagcattacgcattgctcgagtcttgagaaattcatacaaatttgatagcaccaacaatgtataacttaacttataatctcataaggaaatgacgtggttctccttctctgtgtggacttatct

SEQ ID NO: 156692 - DNA, 263 bp, Glycine max
  unsure (1)..(263): unsure at all n locations
ctaagcttcattgtaatgtctagcatctcgatatattacgggactaatcggtcttctgttntanaagtattggcgttggaaattgcttagagcttgtgttctcaattatgagcgtctcgatatatgacagtattcaatcgaacatgcgagtaaaaagttattgtcctctgaatatgctacgagcatgctgtttcaattcggtacgtctcgatatattatcggactcatccggacatccgtgtatgaagttatctgctgcttga

SEQ ID NO: 156693 - DNA, 372 bp, Glycine max
tgctattgatgtgggtaaatatggttggagggctttgtgtctattgagtgatcaacggggaattgtggctggaccaatcatatggagttatttgtatttctgtttgccttgttatataggaatgagcctgattttcaaataacttcactgatctgatcgatataaaacttatgtttcctccgggtgacctactaaggaaccaatatctggtggtcctttattttcttttacctgtgaaattggtgatacaactttgagtctgcgtgtgctgttgtttatcactcatcatctatgtaagctcagactgagaaattttaagatactaaactaaaaggtgatgggtaataaatactttataagtgtatgagtaac

SEQ ID NO: 156694 - DNA, 306 bp, Glycine max
  unsure (1)..(306): unsure at all n locations
cgatctaatttcaatatctgcaaattccataatttacacagggattctggcagagtttcgaagccacccccagaaagattcaagtaccttagatgttttaaaagacctattgaagatgacaatgtttcttgctttaaaaaatcaaggacccgcanagaaagacatttcaacacatcaggatgaggagataagtggcaccatagtgatctggcaatatataggttctcanagaattgactggatgcagcaacacttgaattttggattcncatatacattccacatggacctatgatctaagagatg

SEQ ID NO: 156695 - DNA, 398 bp, Glycine max
  unsure (1)..(398): unsure at all n locations
ctgacaaagggtacttatgctcaactgaccatgaaaacactttgaaagcaactntaattntgcaaccactgtaaccaatacagtttctgaacaattggactctactaataaaaaaagaaaaagaanaagaaaaactccttttttctgtaaaattcagatgtagcttaatggtttagaattgtatctgcatgttcctgcaccactttccaggccatgatgacatgtgttttctcagttaaagttgctcctatggcacacctaataacgaaagcccctcaacaattgatgagtatgtacacaagtctgaacattattaataagcaattgggtgattatttgacatctcagtgtaatatcatttggacctacattacaatcctgcactgacaggtaaatct

SEQ ID NO: 156696 - DNA, 403 bp, Glycine max
  unsure (1)..(403): unsure at all n locations
taatcccatcaaagattcctcaacctncattntctcggggatacaactcgaatgcaacatgtgcttatcatggaggagtttcggggcattccattgagcattgtatgaccctgaaacataaggtgcaaagtctaattgatgcaggctggctaaaattcgaggaggacaattgcatgtgaattctgacattgtcaagcgatactatgcatgatactngnnggaaattgaagggtgttgttagatgtctccaatgacttattangatnnttcaagttatgccattactggaaaccaacagcacaatgctaanaatatggataaaattgatgtccttggctctcattctctaacanatacatctttgcanntattattaacattcactgggatgtgaatgacgtcg

SEQ ID NO: 156697 - DNA, 428 bp, Glycine max
  unsure (1)..(428): unsure at all n locations
tcaatcatntccaaatatgcatgtgaattattattcatcaacaagaatcaagccaaggctattgtgcaagcaatcaatggngcaaaacacaccaaatgattatgatgatggatggctcatattctcacaaaggtaaacttatcacttccaaatcgagctgtcaaaactatcatgacatgtagaggaaaaagaatgacttcaaatcacacaatgtcaagagactgttattgtcaaaacaattacacacttctcgaacatatcctataattcatagatcaacatgcaaagttgtacatgcacacagtattcgacctataatatctaactacgaacccaacaaaataacaaattaacacatctaacaatatttacataaccaccattactatgcaaaccaatgaacactccgtccatacttatacaacaca

SEQ ID NO: 156698 - DNA, 409 bp, Glycine max
  unsure (1)..(409): unsure at all n locations
tgatatttaatttctgatcatatgaanttcaagccctttagtntacatgttcttaatgattgaattcttctcctctttccctattttgcttttttacttcaaaatgtagtgttgtctggagggtcaaccatgctcaaggattntcacaggaggttgcaacgtgatctannaaaaatagtggatgctcgtgtacttttatctgaatcacgcttgaatggggagataaaagtaagagtcaatagttacctttagacaatatttagattgatgattctctttctcgcacacagacagatgagaaattctntatctattcatataaaccttgcttgcactagctgtacggactaaaccaatcaacaaccaatacatcattatgttggatttaaataatacataaatcccttgc

SEQ ID NO: 156699 - DNA, 518 bp, Glycine max
  unsure (1)..(518): unsure at all n locations
aaaaatacataatatgtgatctccataactgtattataattatcacataaattactaacgagataaatgctataacgtgtgcataagattcatatgtaataattcttatgtgtcanaataataattattaagtaattaaataaggatcttattcaaggattgaaccgataaatctaacaatttatatcaaaccaactaaacccaatttcaatatgtttaattattagatntatctttgtttcaaccggaatcaacgatgtccggtcaattggtttttaacttactaatatatcttatactgtggtacttaattgttctctgtctattcgtgtctttcttctcttcttcattcaatttaatattcttataatcttatctagcgttacaaagtgtcttaattcggcatatctattatgaatgttattatatgtaagaaaaaattaatgaatattgatacgcacatacacatataagtaatctatattgttgatgtacaatataaaatcgatgatacaagc

SEQ ID NO: 156700 - DNA, 438 bp, Glycine max
  unsure (1)..(438): unsure at all n locations
taaacaactcaatatattggttttgtatgatggnngcccagtcgaatgcagggaaaacctcccaaattaaagaggtacttatatttacctcaccccaaagagacaagtagttgcttctgtcaaattcgagactctgtcttattccactaggccaacctctcggggttatgcatccatgggagctaaaaccaattattgtgcataggggggaggggtaactaagaaaatttgcactctgcaatcccaagtcccaaccttcgtttccattgcacaactagaatcatactgtaattttctaacaacaaaattgccatattgaacctacacacactgaactcagcantgttcagtaagatgaatatggagagaagagaaaggaaaacatccacatcacacatatcattctcctttcttttccttncaattcccattcaccaa

SEQ ID NO: 156701 - DNA, 390 bp, Glycine max
  unsure (1)..(390): unsure at all n locations
acttaatcatgatctgctttttgctcacaacttgactactatccatatggaccataagaatcttataattcctacagttttgcaatatactctcccacagcctaaacggccttacaaaggaggaattgtgcacttgtggatttctccaataccaaagataatagcatccttgagcccaaacactgtgccaatcatctttagatgtggcattcaagtctctagataaattcatatcaatccactccattagatcaggatagaaaaaattagccacattagactggtctagaagatgaagccaaaccaatatggccagaggacaatccctcaaacatgaagaatatntnctcaaggatacacaatgatggaactagcttgacatttccctat

SEQ ID NO: 156702 - DNA, 383 bp, Glycine max
  unsure (1)..(383): unsure at all n locations
agcttcatcctcagatccctcttggtggtcttgtttatattanacagcattatcatcacaacatattaagaaaactaaaacttaatccgcagatccctcatttaagactacgtctcaatcctgcttctatcaagttctaaggcaacagtacattttccaatgctaaagtcacctaactgaacatacaaatgggtgatcagaccaagcgcatgtagaaattaagcattgaaagaagcattgaacacagaaaacacaatcaattagataataaagtaattacatcagttgttccttagaaattcccaacaagagtgtttagccagccatacagaaaaaccctaacacaatggagattaagagtagagaataattgttccttatac

SEQ ID NO: 156703 - DNA, 457 bp, Glycine max
  unsure (1)..(457): unsure at all n locations
gctgttggccttntcttttgttcttaaaataaggttagcctccttgtgtgatcagcaccttggactaaactctataaatagatatgtaacccctttcatttgaggtttgctccattgtgggggtaagtatggcattggctctctttctggttataggattagaatcttctttgaatcttatcaaaggtctccatacttttgtggtgattcctcacttaacttatcattctgctagagtgtggcaccttccttttcatttcctgtctatgccatctttttcttttgttatttacttctccatctcntttcctcttatttcttactatcacgttctctaaaattngcaccattgttacaagtctttatcttcgcgctaataatatttctgtcttaattccttaanaagataccaactcaaggagacttgtaaaacaatatggcttctgtaaggacatat

SEQ ID NO: 156704 - DNA, 309 bp, Glycine max
  unsure (1)..(309): unsure at all n locations
atgggttggatgatgaagggatgtcctcanttgtcgttctctttcttgatgccatctgcaagaaaagaatgtagacaattacaagagttaagttgaaagcaacataaaggccgcttagcgagatcgaatttgcttagcggaccttcacaaaacaacacataccgcttagcgaaacatagttcgcttagcggatctcanaagagaaagatataaccgcttagcgacctatatagcccgctaagcctataaccagccgcacagatatgcgcttagctctggtacgcatgacttagcgctaggattcaactc

SEQ ID NO: 156705 - DNA, 314 bp, Glycine max
  unsure (1)..(314): unsure at all n locations
ctacaaccttttcttcccctttggcaacatctaaaagccaaagacctcggaaatcaacacagatatgacaaaggagtagaanaatatataaatatcagagtataaaacacaagaagccaaactcacaaagaagaaataatcaaaccagaatccaaataactgataatgtcaacaatcacaaaacatccaagactgaaatgtataaaaccacaagataaataagcaaagtacttagcataataatgtaaattctaagaaactaaaagccaaaatacacggcttataaaagataaataatcagaaactaaaatcta

SEQ ID NO: 156706 - DNA, 336 bp, Glycine max
  unsure (1)..(336): unsure at all n locations
gctcgaaaagacatgagtggtataagagaagctgaagacgacagtcactatggtcgggaaagagtgtgatgagctgaaagatatcaacatgcaccacggttgaagtgttagagcgggaaacaaaaagggcccgaaaggaagaatggagtaggaacaagttccaaggggttctgtggagcagcagtaacgagctcaagcttataaaggccgagagggatgaatcaatgatgganaacatggtgttaaaggataagttaaaggcttgatggaggtcgaagagaagtttgacggaacagttgagcaaaatagaagagaatatgataataatcattgatc

SEQ ID NO: 156707 - DNA, 449 bp, Glycine max
  unsure (1)..(449): unsure at all n locations
ttctatgtacccgtagtggtccgcattgtgtttcgtgcatttntattctcgnnttggttactttgtatacccnctgttgacgtgcttaagccattntacttaagtcatttctcgcgtaacttaaaaataaaataaatttccaccgaacgtttgaattgtattatccattaacttcggttaaaataaattccgaccgttcggtcgtgccgtaaccacgttggaaatcaaaaagaggtaaaaaataatataataatcaaaaagacatcttttagtaaaataaagcggaaaatcaatcggacgttttctctttgggatttctcattcttaatcaaatggattaataactaaagtgaaactaaaggctaatatcaattcgcctagtcaagctcgtcacaaaaataggctgttgaagttgtcatctcaatctctcactaagtanaaatggatca

SEQ ID NO: 156708 - DNA, 351 bp, Glycine max
tgtgaccatgacatgagtttcaataataatcaataatctatctcttacataatcttctttcaacatccttcaatcaatctgtcaatatcttctttcatctctgtcaacactgtcaatatatctttctgatgtatttcccttcatctgtctaaaagtgtttgttcaacactttctcttccaagaaaagttctttgttcaaaaacttgtgttattcatctgtgtcattctcttctccctttaccaaaagaacgaaggactaaccacctgaattctgttgtgtctctcttctcccttataaaagattcaaaggactaaccgcctgagaattcttttgattcttcccttcccctt

SEQ ID NO: 156709 - DNA, 274 bp, Glycine max
  unsure (1)..(274): unsure at all n locations
cttttctgaccttacactcattntctctttctgtnttttgaatttaaatgtcataatatntaaaataattttacattatcatttaatcataaatcattattaataatatctctaaataattattataaacattaacaacattatcatatattataaattgtgattgaatacgttataaaattatcttacgcatataaatacttttttaatttactatctattgttaagcaattatatcataatttattagaatctaagtgtatgcattaacaat

SEQ ID NO: 156710 - DNA, 340 bp, Glycine max
  unsure (1)..(340): unsure at all n locations
atctcgcaacctttcttctatgaaactcacaatccaatcaacagaagcctgatggtgcccatcgtttgcatttcttccacaggtatgtgtcccatcaatacttctaatagtaaatgttggggcattatggagcttgacagcacgaatccgccatggacagccatctgatgcacacttatcaaagtagcgaatcatgtcactgttaatagtacgaagctcaaaatgctgtgcaatggcagcttctttaattgcattccgaaatgccttcacatcatggaactcttgaccgacacaaaaattgtagtcttccatagagtcaagaattacttattnntgtgta

SEQ ID NO: 156711 - DNA, 324 bp, Glycine max
  unsure (1)..(324): unsure at all n locations
ggtcctcggacgaaaatanggtatgacaatcatctgtatatgtaatatagtatttattaccatctaaagatgatactctctgaggtcccccaacatctgtgtgaaccaattgcaacttttgagttgctctccaagctgattgaggaaatggttttctgactagcttaccatattggcaagccacacaatcggctaacttgtcttcaagcattgacacacctttcaccaagggcatgttttgcatgtataaaagttcagcaagatggaagtgcctgagccttttgtgccatagttcaacattggtggtcatgcttgaaaaatcta

SEQ ID NO: 156712 - DNA, 510 bp, Glycine max
  unsure (1)..(510): unsure at all n locations
taagctcttatagagactaaanattctaatgaaatttgtagatgaattatcttgtgaatgcctcttggattaggaatcaagatactaagagatcgctctcaaggtatcctaacggtgtcacatgagagttatatcgataaggtcctagatagattcgacatgaaagatagtaaaccacgagatacctcgatagccaaaggagacaaatttattctcatacaatgccccaataatgaccttgatagaatagagatgcaaaagattccttatgcatcagcagtatgaagtctaatgtacgcctcaagttgcacttgtctcaatatatcatttgtagtaggaagtctgggcatactgttgagtaatcctggaatgtagcattggaaagcagcacaacatgtgatgtgtacctataagaacaaaggatcatgctacttatcaaagatgaaattggaatatatgactaaacctgtttgctgtgtaaatacaatgtcacattgatgattttgctgt

SEQ ID NO: 156713 - DNA, 339 bp, Glycine max
acttttataatataagtcatttatttttaatactaaaataatacttattaacagtataggaattgataattttaagataaaattttaaaaataaaagataccttttaaaaaaacactaaaattacttttaaaaataatgactaacatcaaatagtttttcacaataaaaactaaatatatactaaatgagtcccgacataaccaatgtaacatggtggggggagaatcaaacaatatttttataatgacaactatttgaaggtgtaatctataaatccgcatgcaggggtgtctagtaaagctcactttctttataagaaatcatgtaaatgggtaagt

SEQ ID NO: 156714 - DNA, 308 bp, Glycine max
caactctctgcttcttctacttcgccaccttacctatgtatgtgtcgtctaatcctgtataaatatctgatcgcattcatctatcgcacacttaatgaagtaaacatggctatggtattttatatttaacgcaatatcccttacccttacttgtgtcttgtataaaaagtgcaccccgtacggcattggatagttgatcgtgcgggtgcgattatgctaagatctattatggacctacttattcatattattttcttcacataaaggtacaagtggctgccaggtatgtatctaattgagtttaaatc

SEQ ID NO: 156715 - DNA, 318 bp, Glycine max
  unsure (1)..(318): unsure at all n locations
acaactacgctccactcctaataatatcaggttccatcgaactctctactcatctgcttacctctcgagctcacacacacatntgctcaccactcgagcttacacacacattcgcatatacttacttatttctcctaactcatatgttcacttgagcgtcagagtccttttgtgttgtcccccctcttgtcctcttgacaaaggcatctctcaaagccaacatgtgaagtccaagagccctcttcagccacgtccaccctaacatgtgctagctctagattttggaagaacataatcacaaggtgaaatcttcataaa

SEQ ID NO: 156716 - DNA, 467 bp, Glycine max
cactcgacggtctgtgtacgaatgatctgctaaagcgtgatatttatagaagaggatgctttgtaatcgattacaagactcggtaatcgattacaggagtatgcagcctactgataatcgattacaggcttttgtaatcaattacagccttgttgttcttgtgtaatcgattacaaggaatggtaatcgattaccagaacataaacaagggctttttctcttaaaaaactaactatgtctatgtctaaacttcatctaactatactaatcaaccataatcacaagcattcaattcaatcaagcacaatcaagcatatttaattacgcacactatcaaactcatccaagcaatcaacaatcacaaacaaatctatctatgtacgttaacaattaactaactatacacaataagtttatttctataagaactattaacaagatatgaaaacactattatatacaataca

SEQ ID NO: 156717 - DNA, 479 bp, Glycine max
  unsure (1)..(479): unsure at all n locations
ctaagcttctatccagacactctcttggggngaaacttcttcttacatggcttattctctagtggatggcgcctactctcacctcttctcctttatcttccgttgcaactgcatggttgaaaatcaccattgaaggacctcattgaagctcaaagatccaacctctatagaagcttctcaagcaagcttccatcaattactgctatatgtaattgattacacaagtctttaagaaacttatagagagatcataattatggtttaatcgattaccatatatttgtaattgattacacggctcttttgaaccatgtctgtttttgaggtctatggtgaagaacattnttgtttcttggagctttcanagggaaagtgagttgtaatacacttgtatcaagaatagtgcattcatcaagctttgtcctacttcgaatgaagggtgatctctcctgactttgttatatggtttttacacatgt

SEQ ID NO: 156718 - DNA, 382 bp, Glycine max
  unsure (1)..(382): unsure at all n locations
cttggacgcctttcgagacctcacccagagtggaagctacgcattgggagcttctgccctagtgcatatgtatgacaatttgaatgatgcgtctaagcgcaacggtagacaacttgccggatatatcacactattacagggtaattataatcgaatttaatttttttgttctttgatgttgactattgcactgatttaattnttttagttntgaaaatatgtgtagtgttggattcatgagtattttccatctattgctaaggcattaccactggtttcccacatacattaaagggacactcacattntctactgccagtatctcttcttacaaaatatttcttttttctagacttacactgaccaactctttcacaaccaa

SEQ ID NO: 156719 - DNA, 482 bp, Glycine max
  unsure (1)..(482): unsure at all n locations
ctaagcttgcatagtccgacaatntagtactgatcctgtttgccactattatctgtgtatgagagtaaagtttgacataaactcagtcgctgacggtgacttccttcctattagtatcaatattgttcgtcatagtttgttgtgcccatgatatgttgtatttgatctactcgagtgcctcatatgtatccttcacccaacatcttagcaacaacagtagaactgctagttaagcctctagtggtattattcccatactctgtatattctagcaactactattaaatatacaagggttccaattaagccaaaaattatgcttgctattgctatcactctgtgtgttgggctgctgagagctgtcatagagctgaccattgattgtttttgtgtggactatcacaatcaatgtggacataaataacaatattaatgcagctacaacatattgcacacttattgttgcataattatgttgacat

SEQ ID NO: 156720 - DNA, 284 bp, Glycine max
  unsure (1)..(284): unsure at all n locations
atttgcctcacaagttcttcgagggaagggtgcggaggagcctcaactatttgttgnttctggggcttgttgctgtgttggatnggtggaggaatgtatggtctacttgggccagtancattttggaaggaaggagtatgttgctgttgttgttgagggctacaccatctgagattagggtgattcctccatctgggattgtatctattgctggagaggtcataattgttatgctatggttgaatttgttgctgaggttaaggaggtctattgtaaatgtttgc

SEQ ID NO: 156721 - DNA, 320 bp, Glycine max
  unsure (1)..(320): unsure at all n locations
aatgattattaaacacacattatggaagtactaagtatntattacctatacttaacaganaatacttataacactacaaaataaccataaattggaagaagttgacacaatgtacacaagttttatacacaaaagttagtcgtattcaccgactaacaactgccccaaatttacagttgtgcttgtcctcaagtaaaaagagaacagttcacttgtcctcaagtgacaataacatgcagtgactatgtacaaaggtgtatgcaacanaagttactgatcgcatgataagagaatggagtaaaatgctctcatcacttgtc

SEQ ID NO: 156722 - DNA, 244 bp, Glycine max
  unsure (1)..(244): unsure at all n locations
caacattcaattgcgagcgtctcgntatattacgtgactcaatcaatcatctgagtaaaaagttattgccgtttgaattggttcagagcttcaacattcaattttgagcgtctcgatatattacgggactcaatcagacatccgagtaaaaagttattgtcgtttgaatttgctcanagcttcaacattcaattccgagcgtctcgatatattgcgggactcaatcagacatccgagtaaaaag

SEQ ID NO: 156723 - DNA, 416 bp, Glycine max
  unsure (1)..(416): unsure at all n locations
catacgacaataactntgtactcggatgtctgattgttttccgtaatataacgagacgctcgacaatgaatgttgaacctctcagccaattcaaacgacaatatctttttactcggatgtctgattgagtcccgtaatatatcgagattctcgaaattgaatgttaaagctctgagccaattcaaacgacaataactttctactcggatgtctcgatgagtcccgtaatatatcgagacgctcaaaattgaatgttgaacctctgagccaattcaaacgacaataactntttactcggatgtctgattgagtcccgtaatatatggagacgctcgaaattgaatgttgaagctctgagcaatttcaaacgacaatatacttttactcggatgtctgattgagtcccgtaatatatc

SEQ ID NO: 156724 - DNA, 442 bp, Glycine max
  unsure (1)..(442): unsure at all n locations
tctacttatatcgtattaaaatatcgttggacgttgcacacgtgtttntactanncttnctaacatactggattgagaataataatgttgggtattttggcttttacaatgcaacgcacacaccacatgaatttgataacctaacaagaataaatcaagtatcatcctctttcttaaatagttcttaanataataaaattatacaaataatccctgattaatgtattgaaattcatcaatttcattatgatagatcaaatagctgaaaggggtaattagaaactgaaanactataatttattaaattataagtatgtggataaattagctggtgaaataaataacttaaaataactatacaataataagatctattaatgatgaanaaatatatagttgaaagctagaagcgggagtttctaaaacattattctaaataata

SEQ ID NO: 156725 - DNA, 412 bp, Glycine max
  unsure (1)..(412): unsure at all n locations
tctgatgtcanattttataagagtaccttataaatgttgtgaaaaaaccttctatgagctatggagaaaaaaagaacaaaatctgaaatatcttanagtgtggnggtgtcttgcaaatgttaacatccctattaataagaaaaggaaaatgagaccaaaaattgttgattatctttttgttagatattctttgtataatactacttatagattcttgggtgttaatttagaagtattcgaaatttctaatggtactattatgaaatctagtgatgtcactttctctganaatgttcttccttggaaaaataaattgtctaaatctgtgtgtgatacttctcgttctgaattatcatcttgtagtaatggtaataacgacaatatgtttgaacctacgaggagtaaaagatct

SEQ ID NO: 156726 - DNA, 303 bp, Glycine max
gaaaacgtagaggtaatcttattgtgagacatacacgtactaatagaagatggtgacctcgcaaaatgataaaacaaaatcttatttctctcgcataataaactatatatatgttgcctaccgagatatactaagagacatgtcgtcacaactcacaagctgataaagttatattaatacttattctttataagccttggttacaggaacaaaaaagcgtactgtaatccttaaacatcacataaacaatctatatatgtatggttaacaaataatcttatacattctaccagctgaacatac

SEQ ID NO: 156727 - DNA, 464 bp, Glycine max
  unsure (1)..(464): unsure at all n locations
ctaagcttgtggtgtagtgtaattcataaggcatcgcttcttctaatttgtgtgtctggattatagaatcaattcactagcccaacttattgcacaagtgtaaaattgaataaataanaaaagaaatatcaatgcccataaactttctaaccaactaatgatgtgtatgacatgttttacgataattctttcaccatgagcagatgggtggatgaagtcattccagatgcaccatgggttatcaatcaagagtttcttgacaagcacaaaatagactatgttgctcatgattctctgccgtaagcttaactctaatttttttgctataatccaatngagaataatacttacttatctgttcacaaactctctatcttatgtgcatgaagttacaatattgaaatagtattaaatatatgtttctaattagcactataatattttaaatagtagccatgcataat

SEQ ID NO: 156728 - DNA, 326 bp, Glycine max
  unsure (1)..(326): unsure at all n locations
ctgagctatccaatcttgagatagcttttttcacttgacacatataaacaaattaatcgaatcctctataaactaagttcatcctgctcaatcaagttgtagggcatagtacattttccaatgctaaagtcacctaactatgcacacaaatggatgatcagaccannagcatacaaacattaagcattgaatgaagcattgaacacaaacaacataatcaattagatattaggtaattacatcaactgttcattagaaatccccaactagggtggttagccagccattacaagagaaaccctaacaataataagcttacaaaacct

SEQ ID NO: 156729 - DNA, 422 bp, Glycine max
  unsure (1)..(422): unsure at all n locations
tttccacaactcttgtaaatgggagagatatgttcatctaaagcatacaagtccctaatgttatcaaatcctataatttgagctcctatgaagcaaaacaatgtgtgcctcctatacagggcatcagctaccacatttgtcttctcctttntgtatttgataacatatggaaactgctctatgtactctacccatcttgcatgccttttgtttaactcgctttgccctctaatgaacttaagtgattgatgatcactatgaatgacaaattccttataaacatcgtaatgttcccaagttcggagagctcttataaggcataaagctctttatatacgtagggtagtaaggatggactgatgcaatctcctatgaaggacaatcactaaacatgacagaagctcaaaagatgtgctaactgt

SEQ ID NO: 156730 - DNA, 454 bp, Glycine max
  unsure (1)..(454): unsure at all n locations
gcttgatggttcattctgtattttctgatatattggacctaatcttttatttatttctttctgcatttatctgttgggaatatattgatctaacttgctattattttctgtctgaaagctctttgagagctctgctctgatgcatatatctgctgtaaagtctctcctctctgcattatgtcaactttcacatcaatgcatgacttcaagcagtttgggaccaacaactagtcaaaatattggaagcatcagcttttcagtggaaagaatgatatccatccttgtgaataatgctcacagtatgtagcttcaatacctctgagcatgatagcacatcttttatgctggatgctgttttcttagaatgtgggttngngcctaactcaaccccactagctagctcatatggtgagggttgcaacacttatatatttatctttgactatctatagtc

SEQ ID NO: 156731 - DNA, 292 bp, Glycine max
ttctataggagaatattgggataaagatttatatgatataatccctatggaatcagggcacattttgttaggtagaccatggaaatttgacaagaaagcaatccacaatggtctcaccaatgaaataaccctcacccatggaagcaaaaagttcaaacttgttcctttgacaccttcacaagtggttggggatcaaatacaaattaaactcaaatagatgaggataagaattgaaaggaaaagaaagacacttttaatggtaatgaaagtgaaggaggtagtgtctctctaa

SEQ ID NO: 156732 - DNA, 424 bp, Glycine max
ctaagcttgagccaatatctaactcaccatataccttgaccccaggtgagaatgtctatccttaccctcggaagcaaaatagaagagaacgataatttccaatcaaagaataaaaagagaaggataatctccaatcaaagagaaagcatataaaggagagaaggaaaatttccaatcaaaggaaaaaagagaggaaaggaaattcccaatcaaagagtgggagaaagagaaaagataagaaagaaaattcccaaccaaagagtgggagatagtataaggaaggaaagaaagctcctgatcaaggatcgaaagatatcagaagaaatgtgcataaaggtctttggaccggacaatatctgtacaatacagaattgtcaccaaatgaacatataataaagggaaaggaaaccacgacttgaaagtg

SEQ ID NO: 156733 - DNA, 189 bp, Glycine max
  unsure (1)..(189): unsure at all n locations
gccgcctcttacctcttcttctttgtcttccgctgcatctcgagggtggaaaatcaccattaaaggacctcattgaagctcacagatccagcctncatagaagccctacatgcaagcttccatcactaaagacagtggagagttttcgctacacccttgtgtccacccgaggaatggtgtggaattcat

SEQ ID NO: 156734 - DNA, 255 bp, Glycine max
ttggattccctgggatccgagataaaaaaggaaggccctcctggatcctgaaagactccacaaaggctggtaaacttaaagacttatgagaaaagaaaagggggccaataagagaaaaggaaaggaaactctgaactaagtctccctccttatatactactctgaactcttgaattctaaacaactactcccccctttaatatactctggaaaactactactccacccttatctactacttgcaactgaatcaag

SEQ ID NO: 156735 - DNA, 397 bp, Glycine max
  unsure (1)..(397): unsure at all n locations
acagataaccaacaaagaccagctcacaagaaggagacctacattcaagctcttgttttccatggctccnctgtacaatgcaaaacaagtacaccatattacttttttgcaccctaatccttttatgctatcttgtctcatctcataatatacaaaggcacaatgtatctaggggcacatgattgaaataaaataaaataaaaaagtagatgataattacatgttacaatctgggacagcaacaacattgaagagatccangtcatattcaagtccaaaaacctgttcaggaagcatattatggcaagacagcaaacatcaaaattcacaacaatgtatattgcaatcaaagtagcccatctgatcaaatgaatntanaactaaataaggactgaca

SEQ ID NO: 156736 - DNA, 392 bp, Glycine max
  unsure (1)..(392): unsure at all n locations
atctttggcatcatcaaaacttcgtaacatatatacttctactacaatcatggncatccactttcattgntntgaagacaattacattgccttctagagacaatcaagtccattggcatgcggagagaattatggtcatccacttttgttgtttcaagactgtacggtcttctttgcttccaagacaatcaagtctattgcatgcggagacaatcatggcatcgctccttactttcaagactatcatagtctttgcttgcgagacaacaaggcatccgctccttactttcaagactatcatagcttttgcttgcaaacataaggcatcttgtgacaagggctcgaaaataaaggggtgataatatatgacattactataaatcatctctatg

SEQ ID NO: 156737 - DNA, 403 bp, Glycine max
  unsure (1)..(403): unsure at all n locations
atgcacgggaaatgtaattatgaaaatgagatgcccgaagatacaccatttcctagttaaccatgcattaggtaccatgttcaattattntgtttctaagtgaaacgggtttatgatcccaacatggttggctcgtggtgcctaacacatgaaactaagaatgtagtgtgaagtttcacgcttcccccttttttatttttgttttgtagaggaaaacgcaaggatgagcaaacatgataacaaatggtatgcaattctgcagatcataaagtttgttgaacacatatgcatgatgatgccatgactcatgcanaatgtgaggctggaatatgataacggacaaatgcaggatatgtccattatgatgttatgaagagatgcttatgcgatgcatgatatgaat

SEQ ID NO: 156738 - DNA, 453 bp, Glycine max
  unsure (1)..(453): unsure at all n locations
ctgcatcaatgcatctttaacaagcataccacgaaccaaagcagcaaccaagttgacgatctctcgactctaaaataccatagaaaacaaggtaggtaaaaagtgcaactagtcagatattaatcagatccttcttaaaccataaattaagacattgtccacagcataccagggaaggcatttcaacggctaanaaattagatgccaactgttctgcanaataacatgatggttaaaacacagaagtttcttagcaagtagctaggcagtggcaccacataaatgtaacanaacattggtaatgtttcaatattatgttatggctaagctgaacatacntgtgatgatacntatgttcactctagaatgcatactaganatgtgactangcaagtaaaataaaataaaataaatgctctatcaagataacacccaaaagtaacatctattggt

SEQ ID NO: 156739 - DNA, 276 bp, Glycine max
gtgaaactactttagataacggatagaacagttttttttattttgaataaatttaattgattccgaaaattaactgctttactaagacaactatagcattactgaggtttgatgtgttttaataaactaagtattaatctggaataaagttgttgatatggacagtatgagtgaagtcatttatggaaacatacaaagccaagcctgattaatttgtttactaacaaagacagcttgaaggtactctgtgctcataattcagggaagaggcatgtg

SEQ ID NO: 156740 - DNA, 162 bp, Glycine max
attaatattattcccctggggattaaccacaacacacacacttatggtggtaaactatatattgactttgataatagcatagccaatcttcataccaccttcatttgaaacaaagagagttacaatgatctaatgagatgcggtctattccattacttaatt

SEQ ID NO: 156741 - DNA, 479 bp, Glycine max
  unsure (1)..(479): unsure at all n locations
ctaccttcgctcacacatgggctatcggctttgggatccaatcaataagaaagttgtccttatcacagatgttgtattcttcatagaccaaacgatcgaagacattaaaaattcagagaagctaagattgagaagcagcaagaacactgaactaactccagttcgatgtgaggataatgacacgacaganaatagtgatgctgaagatcatgagcctgtgttagagtaaaacaatcaggagactcatgatgaaccagctcaagaagatcctcaatctagctctctgtcagtgctagagtcaagacaatcctctatggaaagaaggccatccactcgatataacacagaggagtacgtgatgctcactgatgagggggagcctcanagctataaagaagaaatcaatgatattcataaagaagagtggagaagagccatgcaagaagagaatgcaatccttgatgagaataacacctatg

SEQ ID NO: 156742 - DNA, 405 bp, Glycine max
  unsure (1)..(405): unsure at all n locations
ataatcttagagttgtacaattccaacttttactgttcatgcgcactgttcacgtagcaataaaattcattttctgcaattccgttgtctgcttcaatctgcaatttcggtttctacttccaattgcaatttcgttttttgctgattaatggaaggctaagtctccagcgttgttctctcttgaggatcaagcacacccctctntgaggttntgttattactatggaattatgatcagtttttcctcttcaccaattgctctgtatttgttgctattaatccatacatgattagtgcttgattaatggtctctgcgcttaanttacgttcatgcttaatgatcagttccgttcatgaataattngtgtatgtgtggcttaatcacataatgacagcctttatgta

SEQ ID NO: 156743 - DNA, 312 bp, Glycine max
  unsure (1)..(312): unsure at all n locations
atatatatttctatgaaatatantaaattacgtgatgttatgtaagtttttttaataatggattgntttttttaaggggaccacattaacagagcttatctggtttttgaaaatttcttttgaaatttatctgnggccctgtatatatattntgtttgcacgaagaatttatctaaattatccattcagagttgtgtgtgtagcacaaataggacttctgataaaaatgtgttttcttcagggcattctctttgataatcttaaaaaaatagtacatgtatcttaagaggggtatctctatgatctatcact

SEQ ID NO: 156744 - DNA, 318 bp, Glycine max
  unsure (1)..(318): unsure at all n locations
ctaagctatctggcctctataatagggactctatagtaaaatattgcatgccaaggctggcacaacagcagggtcaggcacaacagcagggggaggaccagcagcagccagccgcagatgcaccgccgncacctctacttaaccaccatctctaaagtctatctctgctcacctgcggaggatggagctctagattcatgcatatatgcagcatgtgatcaaccagtaggcgaccaatcatatgggttaggtatagctgaatgagagctnttaccaatacaccctacatcagcagagctacgatcccagccctttctc

SEQ ID NO: 156745 - DNA, 386 bp, Glycine max
  unsure (1)..(386): unsure at all n locations
cacaagagtgggtgatatggggtgattctatcccttttggctagcaatcagctatcagccacgctatgatagtttccatacacctagacgtttatgaattttgttcatcacgaacgtgtaggtgtagaataggtagcaaaatacctttggcaatttacactttgggtatggtagcaaaatacttggatgtatgtacactgtaattttggtagtcaaaatgtctcacaaaaatatgtatatgttgcatgttatgtaaagaaataccttacaaagatacctcttaattngaatgcaatcttagttagcanaagaaaatatacttgaattcgcatgcggctntaggtagcanaaacacttgaataaagcatganatgtagcaccttatt

SEQ ID NO: 156746 - DNA, 382 bp, Glycine max
  unsure (1)..(382): unsure at all n locations
gattaagaatctaaggaattanggattaatcattntagttcgaatcttggttgcattgaattaagagattcattatgaacaaattatgtatgtagaattttatggatttgatctaaacgacattttctacttttgaatttgattttgttacaaaatttcttcaaaagaactataaatagtttattttttccatagagaattcttaattcgctgcaacanaaagccaaaaactcttcttaaaaatagaanatcttgagacattcgccacaacatattgacaacttgctacaacgaatgcttctaanattcaattggtgatttcctatttgttcacatagtctctgtggatacaataactcaaatacttatttgttcttattac

SEQ ID NO: 156747 - DNA, 213 bp, Glycine max
catatctagtcaaggtctaagagaccttacaagtttcctaacgatttctaattatgtgggccattaagtctatcatatgctgacaatagccgagaagcccgtgaatctcttcgggggcggagtaggtgtctgccatcgctttggccttggctaacaatcggggaagttcttgactcccgttcaaggtaagagcaaaccgatccatccacatgg

SEQ ID NO: 156748 - DNA, 490 bp, Glycine max
  unsure (1)..(490): unsure at all n locations
aagcttattaagaggcttcctccagaagcttactcgtggcttctttgataatctttctcaacaagcttctttgagaagctagatccttatctatccacacccctctattaactaaattaacttccttaaaaataattacggatgaaaataacgcaacaaataatcaaacatcaaacataattactaataatatatagatatatatatcagggtgttacaactctgccacccttgtagaaatttcgtcctcgaaatttaccttactcaaacaaggatgggtgagcttcttgcatctgactntctaattcctacctggcatcttctcctgatgcacctccccagatcaccttgaccaacggaatctctttccttcttaaagtgtttgttcgcctatgctcgatcctcaaaggcaatggttcatatgtcaaattctgcttcacttgtacatcatncaattcaatcacatggcatggatcacggatatacttac

SEQ ID NO: 156749 - DNA, 258 bp, Glycine max
ctatatcaaaatcaattggatgtttttcagctgggaaactaagtggtcaaatcttgatatcacaagaactatcactactacaaggcaacttcttcaattatgaccaattaaaataataaacaccccatcctcattgattctaaagcagatgcactcttgtttaaataacaaacaaaaacatcaattagcaatcgattaaaaataaaataaaaattagttaattttgctttgctaacaattcccgcaaaaaatgaaaga

SEQ ID NO: 156750 - DNA, 329 bp, Glycine max
  unsure (1)..(329): unsure at all n locations
tttatgaaaganagagagaaagataccttgttgtcgacaaaaaggaggatgtggttgggaacagcgctgaatttgtggtagaccggacccataacggtggttacagtgtcttccacggttcctacagcagatctcacatagtccgagttttgctttgcgaagccgtagagattcgacacacacactaatgctgtcattgccgcaatcttcacatacccgagatgcttcagttcttcctcactcttcttgttctccatatccctctgcacaaacaaaacaacattaatcattcacacatttattctatgagagatctctgcacacaaaac

SEQ ID NO: 156751 - DNA, 302 bp, Glycine max
  unsure (1)..(302): unsure at all n locations
agcttgtacgtgcatgaatgtgtcggagtcactgcattttttattttattatnancnatggggaaaggtgcggagttacttgatattgaacggtaaacacacgcatgcggaataaagaataataaaagaagaaactgtgttctacgagcggtggcatcgcttatgagttatatgaaggaaacaagtctggttgcattgcatggcatattagtgcagtgttcccttgcttctagtttctctggccttttgtctcacccattaaataagtactattacactacttttactttatttttgttttt

SEQ ID NO: 156752 - DNA, 346 bp, Glycine max
  unsure (1)..(346): unsure at all n locations
atactattataagataaatgaataatttaatcaaatacattcagcattccttgtattntagtgtgtatatttttatattcattctattcttattaggttgttaattgttttgaanaataataaaataataaaatcaaaataatattggatagttcttttttggatgtgagtggggtgtggattaattgaagagagtaattataggaataaaaaaataaaacagatagttgtaagaacaaaatgataaaaaaatacactaaaatatcatttttgtaataataatatagataattatatctttaaagtactgtttctttgtataattattctcacaaattactcacta

SEQ ID NO: 156753 - DNA, 124 bp, Glycine max
caaatccttcttattattagctcatttgaattctttagttcctgaatgtacaaccttcaaattggtgctcgttcccctctttgagaatgaggaggatcttcataggacttcatccagctgatgt

SEQ ID NO: 156754 - DNA, 438 bp, Glycine max
  unsure (1)..(438): unsure at all n locations
atctatnggcttatgagtnggtccatcctctcgaagtactatcgaatcatgagtcatcacataaataactctagcttcacacggtgcagaaatccttatggcagctctcatgtagtcagtgaagacaaagggcatttagatcttgctgaaatatatttcttgtagcatctgtagggctttctgaagtgtatgtctgacnagtgaaatttaattagaagggtagtcaataatccataaacaaatgatggaagtcaagttttatttatcttacnaagttgaaggctatacatgcatgaagcanaaagatggatgatgagtgaagatgcaatgtacttaatacgaattctaactgtaattatgaaagttaatgattataacacaccatggaaacaaatcaccaccattcagtannaatggattacacatcattcaactact

SEQ ID NO: 156755 - DNA, 445 bp, Glycine max
  unsure (1)..(445): unsure at all n locations
taatcatttcaaatatgcatgtgaattaggacgcatcaacaagaatcaagccaaggctattgtgcaagcaatcaatggggcaaaacacaccaaatgattataatgatggatggctcagattctcacaaaggtaaaatcatcactttcaaattgagctttcaaaactatcatgacatgtagagaagaatcaaggatttcaagtcacaaaatgtcaagaacttttattttcaaaacaattacccatttcttgaacatatcctataattcaaagaaaaacatgcaaagtcgtacgtgcacacaaatatgacccaaaatattaaactaanaatccgacgaaactaacaacattaacaaattaacacaactaacaaattaacaaaaccaacataactagcanaaccaaagaaccactccccccatacttaaaaaacacattgtcctcaat

SEQ ID NO: 156756 - DNA, 418 bp, Glycine max
  unsure (1)..(418): unsure at all n locations
catcactacacgtnctcaccttcagaggactgcacgtactcaccttcatatggctacacgccctcacctttagaggactacacgtcctcgccttcagatggctacaagccctcgccttcagagggctacacgccctcgccttcagaggactgcacgtnctcgcctttgtatggctacacgccctcacctttagaggactacacgtcctcaccttcagaggactgcacgccctcaccttcagaggactgcatgtcctcgccttcgtatggctacacgcctcacctttagagagctatacgccctcaccatcagaggactacacctnctccctttatagggctacgcgtcctcgccttcataggactacacatcctcgccattagagggactacacgtctcgccatcagagagctacacg

SEQ ID NO: 156757 - DNA, 260 bp, Glycine max
gaaattaataatgagtgccattttttatggaccaagattctcattgaagcaataataatcttgatttgggaccattaggagtgaattttcacaatgttttataccaagcataatactgtactctacagctacagtcctgtcttacagtgactcttaaaactttttagaacctctagaatggaacttggttccccagcatggtacagtaaaaataacaatgagtttttatgtttgctgacatcaaacttatttggatccaa

SEQ ID NO: 156758 - DNA, 324 bp, Glycine max
  unsure (1)..(324): unsure at all n locations
atcagagaataatcagacaccttctgaagtattgcaaggagtgagtctaagacttcaaagagaaaaagactgtgtcatcaagagaatcacgagtgaccatggcagagagttcgaatacagcacggttactgaattctgcacatctgaaggcatcactcatgagttctctgcagccattacaccacaacagaatggcatagttgagaggaaaaacacgactttgcaagaggctgctanggtcatgcttcatgccaaagaacttncctataatctctgggctgaagccatgaacacagcatgctacattcataacagagtcacact

SEQ ID NO: 156759 - DNA, 235 bp, Glycine max
aaaaagcctgtttttttataaaagagctaaactaactaacaacctccaatgttcttacacaaaccttgcttgaaacacttttgactaaacaactgtcctgtgatacaaaaaccataaatttctctattctaaggaaaccctctaacgaaatatgaattttacttctgcctactaccaggcctcccaaaattaagaagaaattgtaaatggaaaacacggggatgcttttgtttgg

SEQ ID NO: 156760 - DNA, 469 bp, Glycine max
  unsure (1)..(469): unsure at all n locations
cctatatatatgtgtgtctgacttcgaaaagaaaaaaagagagatattctacgagaacttaattgtcaaatgctctctcaacaactctggggtaaacacttacaaatctattgagaattcatccaagaacttcaatttgtattatcatctctaaaagagaaaaattcctctaggatcttcaatttgtatcatctactctaaaggagagaaatctctttatacatctcanaaactcagttgtaatcaagagactcattgtctcttgaatagtgagaattataatcaagagactatttgtctctcggagaatcttgaacacaagggtgagggatcccaaggtgtgttcaaagtcggtataggatctacagagatagtggaaaaatctcaagtgaattgctcgaggactggacgtacgcacgggaagtggccaacgagtataatcgagttcgcaatctctctttcctatctt

SEQ ID NO: 156761 - DNA, 445 bp, Glycine max
aatagctaacctcaaggtgctaagtaacctatcatctgaggattaagaaaagctgagtactacctatgaggatcaagttagacttttgctatacattaacactaacatgatgattagaaaatatcttattgcatagcttgttgtagataacccaacactttactatgctgcaatctaatacttgattttattgtttagcctcacttagttaatttgttctaacataattataatgtgtattcacatgcttattttgaattaactctgctaatactagtcctgagttcgatactcagattcatcgtttaatttaaaacttgacgatcgggtgttttcaggttcatttccttgaatataatgtgagaatggaaaaaagaacatttggaaataacacatatgacatatccgaacgaataagctgcatgaatattatatatatatatat

SEQ ID NO: 156762 - DNA, 293 bp, Glycine max
  unsure (1)..(293): unsure at all n locations
ctgcagctgaaccctggcaggtgtagaaactctgtgttattctcttagctataaanggccgtgctgttatctaacatttgtgggcgcaaatgcctgattgcttatttgactgttaaatttcttgaaaacaagaatttctccttactgcttgaccagtcgtttcttgcctcccacccacacaccacttagggagaactaacacctcgttgtctataacgaacctatagaagagattatgagagctgccctgtctgactggattaacacaaagttgtgtggatttctcttctaaa

SEQ ID NO: 156763 - DNA, 147 bp, Glycine max
  unsure (1)..(147): unsure at all n locations
gccacgccttccgtgatataccatattttctctggacnggtgttaaatacacaacaccccgtgtggggcatttccgggccggttcgcctgtggctcacgacatggggatgttgtaacgtcacgagctcacatcgaaaaatacacccg

SEQ ID NO: 156764 - DNA, 429 bp, Glycine max
  unsure (1)..(429): unsure at all n locations
tgcagctcaaactgccatttatatttatattttttccgggaccagaaataattagctttagctaataattcaaatccgtgaacaagcacatttaaatactactctatgtacacgttaatttatagctgattattgaattgttagctccgctaattaaatcgcgcgaagtaggggagcctaacaacattcacatggaagttaaaacatttctcatacattatcaaccttaaagcaattgattactcatcccaatacttatatcccgctttatagactaaatnttaattagtcataaaaaactaggaaataaaaattcatgctattggtatagcctatgggactcattaaactaatcatttaatntaaaaataattacttattctcatcaaatcaacaacactcacatacaataagtaaattaatttatga

SEQ ID NO: 156765 - DNA, 414 bp, Glycine max
  unsure (1)..(414): unsure at all n locations
actctatatacaatgttcatgcctgcatacgtgtttattgtttttggatcaagaagattacgcgtcagatcatgagatggtttactgataatgatganatagagtaatagacattccattttgatgcatgcacggaatttgaggtggacatgtggtaaagtcattttcctctctgatagaagagcttcttaattaattaataacactaatttcaattccaataaataatagaagctgattatatatgaacttgtgcattttctttaaccatctttcattatagtagtaaaacacacattatacaactgtaattgaagagctccacagtgtatagatccatcatcgtaatctagctactctttcttttcgntgcccccacttaagcaacgactagaaaatatcattatatcatca

SEQ ID NO: 156766 - DNA, 414 bp, Glycine max
  unsure (1)..(414): unsure at all n locations
gcactgcgctgcagctgtcaagactggggaaatcttatcagctctgtccttatntgtcgcggatgaatcactcccaaggtagaatagagaagcttcacccttaacgcaacgggggacaaagggcacaaacttgaatggccattgccatgcgaagattctggctcactatcctgacacacattaggcagctgtggttcgtgacataactactaccctatatatatgtgtcttacaccagccattaaacctacccgacatgtgcctttggaataacggtattctcctttgagaccatgacctatcctaccactcaacctgcaaggcgcaatcacaagataaatggatgttgggcacatcgacccaacaatcataattgaccgaaggctcagcgcctgcaagactacgggagtgcaa

SEQ ID NO: 156767 - DNA, 310 bp, Glycine max
  unsure (1)..(310): unsure at all n locations
caaaatcctaagataatgatttcaagaatgagtcaacaagttcaagatcaagattaatttcaagtttcatgagaagaaatcaagaagattcaacattcacgagaagtgtggcttcaagattcaagagaagatgaattcaagattcaagagaagaaatcaagaagacttcacacgggaagtattgaatagattgttcacaataacaaacatagtacagtcttggttctcataagagtgtttctcaatattgtctaagttaccacgagttgtactctctggtnatcgattacccattacctgtaatcgatta

SEQ ID NO: 156768 - DNA, 406 bp, Glycine max
  unsure (1)..(406): unsure at all n locations
ttaagcacctgcgctgcaagctaagcatgttgtactagcactcaaatctgataatttgaaatactaacaaagccacgccatcggccaccgtgatngacttcactctaaactgtngtgcagaccataatttcttctatgcaaactntgtggatggctngaacatgtctcgctaggggtcctaacaacctcccaagtggctctgataaagaaacaataagggtaataggcaaagaaaagcacaaccaagaagaatgtaaagagaaagaaaaaagaaaccctaccgatgtaaagggaaatgcaacttatgaagctttgaaaatagaaattaaaatgattctatgtttgaaaagactactagacatgaaaggggtttanacacaaatagaatctctaatgacattgatta

SEQ ID NO: 156769 - DNA, 306 bp, Glycine max
ttatgcacttctctctctctcgaaatatctgaggaaaattagttccgtgaagaaaatccaagccgacgcgcttccgtaacgtttccgtgagtaattacgcgaagattctcgaccgttcttcaagattcatcgctcgttcttcattttcttcagtcttcaacgggtgagtacctcataccaagcttctctattcattctatgtacccgcggtggtccacatattgtttcatgtatttctattctcgtgttcacttactgtgtatacccgctcttgacgtgcttaagtcatctatttaagtcatttct

SEQ ID NO: 156770 - DNA, 235 bp, Glycine max
atcatgtttatagattgaaaaaggctttatattggttgatacaagccccaagggcatggtatgaacgtctaagtaaatttcttttataaaaagaattttctagaggaaaagtggataccacactattcataatgagaaagtatgatgatattttgttagttcaaatatatgttgatgatataatatttggatccactaacgattcattgtgcaaggagttacctcttgatatgca

SEQ ID NO: 156771 - DNA, 452 bp, Glycine max
tacacctcaaccaaatagaatccatcttgttccttcttcccacaactcgcgtatatgggagagaaatgttcatctaaagcatacaagtccctaatattatcaaacctacaatttgagctctgagggagcataacaatgtatgtctcctatagagggcatcaactactacatttgtttttcccttcttgcatttgataatatatggaaattgctctaggtactctacccattttgcatgcctctcgattaacttgcttctgcccctaatgtacttaagtgattgatgatcaccatgaatgacaaattccttggaaacaaggtaatgttcccatgcttggagggctcctattaacgcacatagctctttatcataaagctcatggctctagtgactggtgcccttctacggaggattgcatcattttctcatcgcaatcgtggatacatacgag

SEQ ID NO: 156772 - DNA, 409 bp, Glycine max
  unsure (1)..(409): unsure at all n locations
ttcttcttagtcttccgctgcatctctatggtgaanaatcaccaatgaaggacctcattgaagctcatagatccagcctccatagaagttccacaagctagctgtcatcatgcctgatgggaccaaataggtgattctcattctataataaaacttgaatgccatggacctgtgcaatagaaaagtggcttctacacatcaattgatgcaattaccttatgagtacctacaataatggttactacactgcttgtcaccaacatagaccatgcctatgtatgttgcaatacctcctattgtacaaanattcctgtggaaaacacacatgaagactcgtcatataaaaccattgtatggggaaataatatacgatcagtatgcaacagtagcagtgtgtgaaccatggtat

SEQ ID NO: 156773 - DNA, 279 bp, Glycine max
  unsure (1)..(279): unsure at all n locations
atcatgagtctctttatttaagcttagtggtacctaactttgaatgagcacaacttaccatcctcagagtgatggtctgactaaggttctgaatcatgtcctagaacaatgcctttatgttatgttcatcataaaccaaccttatgtggtaaattcctaagtcgtatggagtggtgttacaacacctatgttcatttcactactggcatttcaccttttcaagttagttgtggcaaaactccctctagtgtgcctcattacatttanggtacctttaca

SEQ ID NO: 156774 - DNA, 444 bp, Glycine max
  unsure (1)..(444): unsure at all n locations
gtgactacatatgttatacatggatnngcccacacaaggagaagtgtatcacgacacatatttattactactaaaaaatgtatgctactaaaaacggcacatatttattactactaataaagtaatttatgctgatacaacttagttgtatttattaaatactattctaattctaatattataaaaaacaatatctgtataataatattaaaataattataatattataaaaaataacttttaattctaatactacatatcttttcctgaaataaatactataaataatgtgtgtttacatatattttctaataaaattggatgcatcatcttatttttctttcatattcgatgaatggataacatattctaatattacaatttttctttcctaaacaatatattattattatattaatcaaagcaggaaatctctgtaatatt

SEQ ID NO: 156775 - DNA, 433 bp, Glycine max
  unsure (1)..(433): unsure at all n locations
ctccattctctcggaagttcatcattggatttgaattcttctggatgatcttcattgcttcctttatcatttcctctggaatcttgttcacgaatattcatatgttctaaagaatctgcaatatcatctatcatattctctcttgacaggatagcattagattcatcaaaggtaacatgaatggattcctcgatattcatagttcttgtattatatatcctatatgctctgctttgtaatgaactatcaagaaaaataccttcatcagattctgcatcgaatgttcctagattatctgtaccactattaagcacanagcacttgcaaccaanaacatgtagatgagaaatattatgttctctaccattatataactcatatggcggtgtctttaanatgggtcgtatcaacgccctattcatgatgtaacatg

SEQ ID NO: 156776 - DNA, 240 bp, Glycine max
  unsure (1)..(240): unsure at all n locations
taagctgatcgcatggcatcagcggtcacttgtatcgacattggcagtttcggtacccaagctgactcactgcgcccatgccgctattcagactggcgagacatgctgactcactgcatgtcgccattggtactggcgtgactgcccacgntggcattgtccgccattggcgcctgcggaacacgtatgggatggcatatcatgtgggtttgcagtgtttcaatcttgaaaaagatgggt

SEQ ID NO: 156777 - DNA, 385 bp, Glycine max
  unsure (1)..(385): unsure at all n locations
agagaagtggaactttgaagtgtgtctcgtaagactttcattcatcannagtacaacaagtgtcacacatgcttctatgtatagactaggtagcttccttgagaatctttcttgagaaaacttccttgagaagcttctttgagaaaacttccttgagaagctagagcttacctacacacaccaatctaaaaactaagctcacctccttgagaagctagagcttagctacacacaccgctctaataactaagctcacctgctcgagaagagaagctagagcttagctacacacccctataattgctaagctcaccgccatgacanaatacatgataatacaaaatataagtccctactataaagaccactcataatgtcctgaata

SEQ ID NO: 156778 - DNA, 392 bp, Glycine max
  unsure (1)..(392): unsure at all n locations
ctaagctgctacatggtaaccaatgtcatttgtaccttggaagaagtgttgttgttttaagcatcgctggattangagaacctttgtctaaggcctatagacttgtgagtgcctttttccttatccacttgatttctggattaaaccttcatgtttcttttttgcacagcaaaaatcagataatattataaatgattcagtactaagtgtactgaagataagctgaaatagataccaaggcagagaactgccgaacccaactacatatgataaaagcacagtagttggagggtaagtcgatagaaaattctgctgatactcactcggttgttttttcgtcatcaaaatnataatattattgtagagtaccagggtcgaaatacaagtactgg

SEQ ID NO: 156779 - DNA, 444 bp, Glycine max
  unsure (1)..(444): unsure at all n locations
caaatggacttcctataaataaccatgttgggagatgtgtttanggagttcaaaaagtttgtgatagaggacaaaatgtacgaagacgaagagaagaagaaaaatgaagtcgaggcgccgctcaatcgcgaccgcgggtcattccctacatcgcttctcttgctagccttgtaccttgtgcaacatccgagtagntcttcttcattcttcttttcttgtcttaagaattgaatataatccatatacccttatgggtcctctctcgtattntgtatgtactcatcttctccactttacggttcgcaatatcactttacttgtaagggttagttctagccgatcattagtgttgtgaagtctcttctccttttgggcctataagctataaacataaaaaacgaatctaggaaatcattcccaacaaactattctttatcaatatca

SEQ ID NO: 156780 - DNA, 382 bp, Glycine max
  unsure (1)..(382): unsure at all n locations
tgactctcgcaagtcaacatctggatacatcttcatgatggcttatggagcaatatcttggagaagtgcaaaacaatcattagttgccacttctaccatggaggctgagtttatttcattatttgaagcgacatcacaaggtatttggtaaaaagtttcatggctggctacaagtgatgattctgttctagactgtaaagaatatatgataattactgtgctttctggtaaaacacaaagggatcgagcaacacatcacatantattacctgaggacatgcaagaaatgaatatattgaaactcatctaactatgatgaatcattgcaaaggctcaacaagcattaggatatgtaaagatggactgattgcataagtctttg

SEQ ID NO: 156781 - DNA, 273 bp, Glycine max
  unsure (1)..(273): unsure at all n locations
taactacatgcaagaagatagaatgaaatatagaaaagggaaagaaaagatgggtttgcctcctcgtagcgctcttntaacatcactagcttgacacatcatcctggtatgcagaatcaaataaagttcctacttcaaggaccttcttctcggtggatctttgtctncatcacatgcactctcagacagacattttggctangtggatcttgtcctcatggaacaattcaaagctgatcttctatgcctatctgcaacatcttcttttccatg

SEQ ID NO: 156782 - DNA, 326 bp, Glycine max
  unsure (1)..(326): unsure at all n locations
tcacattgaatctttgttggacattttagtgtaatcgatctctttattatgttaaaataagagtgcacgcttggtttaatgtaataacgagatgttcggtttaggcaaaggttggaagttacatggaagttactaaaacttccatcaacggttggaagttacatggaagttactaaaacttccatcaacggcaatntttaanaataaataacttccatcaaccgccaaaaaccacctgttctttgattataaataatcatcctggttcagaaagcataacatgtgaaaaactcacaagaccaaaacanaactcttgaatataatct

SEQ ID NO: 156783 - DNA, 368 bp, Glycine max
  unsure (1)..(368): unsure at all n locations
agcttctacatcggtggaaaatgagtatctacgacggtgtcctatatccgtctntgttccaggtgtncgtgtatgtcaacaacaacgacatcggtcacactagcacccgtctttgtaatgcaacgagacaacgtcagtgccaacaaaagaacagacgttataaataaggattcaacgacgcacattatgaagaacccgtcgttgttgtgatccatttctacgacaggtagcccataacacgtcgttgattntttccatttcaacgacgggtagcgcaagagacatcgttgtattgtttcatttcaacgtcgggttacaaaggcccgactttgtttggctggttgtcaacgtcggtgtcactagcaccc

SEQ ID NO: 156784 - DNA, 86 bp, Glycine max
  unsure (1)..(86): unsure at all n locations
acgataactatcttaaaaataacacttgttacgacggctactataagaaccgtcttataaaatcttagaanatgtatattcttaag

SEQ ID NO: 156785 - DNA, 262 bp, Glycine max
caatagataaccgtcttaggaaatatctgatcatattctttaaattaagctggttagactaattaattattgattagaaaccttgtggccaactcagtatcgtgttaacttaaggcaagtaggtcagcatttggccacatctttttaagaaatatttgtaggtcagcatttggccacatttttttaagaaaataaaatcctctttgtaaaacaatgagaaacaattatatatcgctaaatgtttaattaaattcaaattcat

SEQ ID NO: 156786 - DNA, 418 bp, Glycine max
  unsure (1)..(418): unsure at all n locations
tcaactgatatttctaacaaaattaatatttaccgataaaaaaattaaatcgatttaaggtagcaagtcatactctagtagcacatgttgaatgcctttaagcacctaatctgatgatcggcttatgtaaataaatatgatatagcactactaattgcagaatgatgtttaaggattctaacatcaattaaaaaatatatctgaatttccttcgtcattcaagggaatatatttgctttttttatatcattagtctattgcctcatgtcttatttctataattaatatgtaagagttcaaatatatgtaataataacagtgccactcgttattgtggtcctatatctctcnagaacagacctgagcttcaccaccgtgtgaacgctgaccttggcccatcatgcgtatattccatgac

SEQ ID NO: 156787 - DNA, 420 bp, Glycine max
  unsure (1)..(420): unsure at all n locations
atgccacatgtctcatcttgagtggagcaaaatgggcccacctcttccccttgatgtgacttcatactcagccacaaagagagaaaaatgtaactttttgaatgctaaaattttacctcggttcgcgtgtcatttctttggttccagttcctcgcatttctctgcacccgtcgggacccgttttcgaaagtaggcaatatatatatcataacgctcagaatgaaacccacagcgtggttcagagggtgtgtttgttaaattttaagttacacgcaaaacgataattttagactaatgaatgagaataatctatactgtcaatttggatactcttcgtattacctaaccgcgatcttttccaatgtcatactttacangaaatattattatatatatatatatatatattattatatttat

SEQ ID NO: 156788 - DNA, 305 bp, Glycine max
tctctattactacatgccagcagaattcagtccgtctcaatcaagagcaaccacaataattttccaataatcagtgtatgtgctaaaagaatgcagtccaacaatggcaaaggttaaagatttccaagtgagacagaatacacaggaaatgatggagaaaagccatataaatcccttggtaagaatcttacataattctactattgtcaagttaatatggactgcaaaaaatgatgtttgtaagaagctaataatattggagcagtaaaattaagtcatagaatgagacaaggatgggacacaaa

SEQ ID NO: 156789 - DNA, 328 bp, Glycine max
  unsure (1)..(328): unsure at all n locations
tgataaaacatcaatggtttcgggtttcatatcagccaatactcgacgagatgacttcatcacattgtccataatcttgggaagttctgccagtgattgtggacctagaacattgatcagggcagcagttgttttgaggcagctagaagtcacagccaagttatgagatgcaatatgtcttgtaacagatccaaggcacanactaaagatggaattattcgaaggaaatctctcagccagaacttctaatgctgaaactgctgccactntcaaggaggtattcgatgaatcatcaagtactcgcataatttctaaacacaatctatta

SEQ ID NO: 156790 - DNA, 389 bp, Glycine max
  unsure (1)..(389): unsure at all n locations
agcttgtgcaaatcaagtcactcccgcatttttctctatcatgcattgatgnnggnnctcgcctttgtcgcgggaagccggaaggtccatatcaccttcttaattgtacacatggggcactgcgcccccaaatgcgcaagtaagaagagaataatttccgggctctcgtgtccgtaaaatgcattcatatcatgcatcgcataagcatctcttcataacatcataatggacatatcctgcatttgtccgttatcatattccggcctcacattntgcatgagtcatggcatcatcatgcatatgcgttcaacaaactntntgatctgcanaattgcataccatctgttttcatgtntgctcatccttgcgtttcctctacaaacaaaaac

SEQ ID NO: 156791 - DNA, 288 bp, Glycine max
  unsure (1)..(288): unsure at all n locations
ccggagtacgacagtcaccgctttatgagcgttgtacaccagcagcgcttcgaagccatcaagggatggtcgtttctccgggagcgacgcgtccagctcatggacgacgagtatactgattntcatgaggaaatatggcgccggcggtgggcaccactggttactcctatggccaagtttgatccacaaatagtctttgaattgtatgccaatgcttggccaacagaagaaggtgtgcgtgacatgagatcctgtgttatgggtcagtggatcccgttcgatgccgac

SEQ ID NO: 156792 - DNA, 315 bp, Glycine max
ctgtcattattgtcgatcaatatccgtgaataatatttttctgccgacgtgggctaatgctttcctggccgaataaatgggaacatgctagtttcggcccaaacacaacgccggctgatctcgcacgaaaaaacctagtcagtctacaatgtcaatttttaatgcaaccccaaaacaagaaaacttcctctgctgtataaaaagaaccatcattggccagcgagcgttttaaaaaaaaataatccgccgagctatatcacgaccgatgtcggttattgagttttctattcaatccctgaatgagatttgcatgat

SEQ ID NO: 156793 - DNA, 345 bp, Glycine max
  unsure (1)..(345): unsure at all n locations
ggagtataaacatgggacccactcattttatttcataataagaaatcatatctagtcaaggtctgagagaccatacaagttntctaacgatttctaattatgtgggccattaagtctatcatatgctgacaatagccgagaagcccatgaatctcttccggggcggagtaggtgtctgccatcgccttggccttggctaacaatcggggaaggtcctgacttccggttcaggtaagagcaaaccgatccatccacatggttgcctcttggtgaaagagtcgatcacaccttctctaacctctttttncgcatatacttgggcatactcatncgcgattctatgct

SEQ ID NO: 156794 - DNA, 368 bp, Glycine max
  unsure (1)..(368): unsure at all n locations
agacgagggagttttcagttaccaaataccaaaagatgaggagcatgcaattatttagttttcaagcattgtttcaacaaattgtaagttacaaatttaggcgtcactcaaagaggataacgtataagtttgttatggcatttgagggtaaaagtgtccaaaaaagtgaagaccaagcagaaggtatctcttttatctattgttataaattaaaagaaatgtggatttgttttaaaattgtgtatcacacatgattgatttcatataggctgatagctnttacaagtattaaagttgcaatgcttttctttgaataattatattggtttataaatatgtatacatgcgatgcggggtgtgtcttttat

SEQ ID NO: 156795 - DNA, 413 bp, Glycine max
  unsure (1)..(413): unsure at all n locations
taggacctatgatactcaagctttaagcgcgcggtctggggacgaaggtcaagtggtcgctatatacgaagatgatgttccgagtacattggatttggtacgaccatgccctcctgatttccagctgggaaattggcgagtggaggaacgccctgacatttacgcaacgagcataatttaaacctttacggttttaaaagctctatagttgggcctacgctttagattttttcttttgttaaggctctgtgtcttttgttctttgaatttataatacaaggatctttcttcatctgttcctacgtctctacccattctcatccatctttatgtttacttctttatttctgaaacggcagattcgatgacgagtcccncgaaggtactaatacctgcgaaccccctatcaactt

SEQ ID NO: 156796 - DNA, 382 bp, Glycine max
  unsure (1)..(382): unsure at all n locations
atcgatggcgacccggtgtttttataatttatgatatgggctatgggggagcacgtgagctcatttggaggtgggcaacaggggcatgggggtttatgctcgatttgtggatgtggaaaacattgttgttgcactatccctcaccgctacctagtaccacatgtgatggataccccataatcctaccaagcttgagatgaggaagtgtcgaagggtgaaacttcctgcttttattcgttgaccacagagtggtacctgcagatatgtcgcgcnggtcatgataccttggggacgtcaggtggggtgctattgtcaaaaccaagcttgaccaatcccgacccaacccgggcatacttagtcagtgagacactgtgatgtacct

SEQ ID NO: 156797 - DNA, 354 bp, Glycine max
acatgatgacacaacactcgagagaatgatctcacgattgcgtcaacaagttcaagatcaagaccaatttccagtgtcatgacaagaaatcaagacgattcaagattcaagagaagctcgatctccagattccagaacagatgaattcacgattcatgacaggaaatcaagaagacttcacaagggaagtattgaaacgatcttttaaaagcaaacatagcacagctttgtttttccaaagagtctttctcacaaccttccaggttacccagagcgtttactctctggtaatcgactaccaccctcctcgtaccgactaccaatggacaagtttgacttcaaaagcttttacct

SEQ ID NO: 156798 - DNA, 405 bp, Glycine max
agctttgagaatgcaacattagctctattgtctctttgtttgcattcgctgaacctttgatgtattatctgatatgttatcgaagattttcttgtttactaacttactctccctttatatctcaattttttatgtgtgcacgtgagctgatgagcatgccaatgactgattactattgtttgaattttacttgattgagatataggaggtgaagatgtcgaccccggcaaggaagagactgatgagggattttaaaagattgcaacaagatcctcctgctggcatcagtggggctccccaagacaataatattatgctttggaatgctgttatctttgggtgtgtaggagtatataaatcatgaacattttgttttcttaagtgtgtgtttctctctactttgcg

SEQ ID NO: 156799 - DNA, 453 bp, Glycine max
  unsure (1)..(453): unsure at all n locations
tcaacgaccacatggttaagagttcaatccttgctgctcttgttcttttacggctaaatgcttaaattaatttaggactattactggatagccttatagtaggctctaagaaggccccatatcactatcggacatttgcacctgtcactattagacagccaaaggtagttacttatcttgaatttattttgatctctattcttcatattttgatgtatacttcaaaatgggttggctctttagtagcttttgaataagcttattcttcgatattatcctctttcttattatgttacgaatagggaagaggaaggaaaaaattctattgcgagatattagacttttcactgctgactttacttatttaatgcgtggctaaaatgttcaacacgcagtgaataaatacgctgaaagacactattaacactntcatatgaactaatctatgggctc

SEQ ID NO: 156800 - DNA, 407 bp, Glycine max
  unsure (1)..(407): unsure at all n locations
gcttctacaaancacaaccgtcgcctacatactttcatattttaaaaatattccatgattcgttcattgcgaatattaatttagtatgtgaaatgtaatactctctattaaaataagcaacactaaaacatcattaatcatgcatgctttttttataaaagaaaaatgctttcgacaaaattacaccatggaattttttaaaagatatgtgttttacttatctcttaaacaaacaattcgagttctttattatctttgtctcaatagaatttttgaaaagatttgtgtgattttagaaaaagaaactttaaattcgagtttgaaattatatcttttgagatttgcttacgcaaccttcttttatatnttacttctatccaatctaatatatcatcatatcaatatat

SEQ ID NO: 156801 - DNA, 272 bp, Glycine max
  unsure (1)..(272): unsure at all n locations
tattactttattacataagccactctatacaatattaaatattntaaaatttatctttaatctctaattatatcatgtcaaattactctcactcttttataaactcaagattattaactaactttaaataattttaaatcatggcgatttcattattagaaaaatcgggatttaggtaaaaaaagccattcgggcagaataattcattggcatggcctatgctagttttactccaataattacctttcctaaaactaattaatgttggacgg

SEQ ID NO: 156802 - DNA, 372 bp, Glycine max
taaaaattttacattcccaatgataatatcaacaacccaccacaactcaatagaaataattctaaactatataagaaaaatgaacggttcaagaaagcaaagtggtttgctttctctggaaagactctactgcatggggggatttgtgcgtgtattttcttcatttatttttcctcaattctgtttaaattttcatctgcattttcattctccttcacaccctctctgaagttttcctgccacaaacatacatataaggtggttattaaatttcaaaattaatatcagttaatgttggctatttccatattagctgtatattatatagagatatttgcagaattgtgccacatgtactatatgttctatgtt

SEQ ID NO: 156803 - DNA, 331 bp, Glycine max
aattgtgacataatccatggaatttaaaaatgtgctacataccacagcatatacttcatttcatgtatgagctgcgcatgtaatagctaagtaattgcatgcttctttttcttttgtcttaaccctcctattcattaagaaaaagagatcttgactaattccaagttcggccaggagttaagtaaagccttgcatgcttatattctatatgattttgatcgcattacattccacgcatctggctacgcaagctaaatgacaaactattgaatgccatattcagccataataacactctaagactgaaacaagcatatttagaacacatatt

SEQ ID NO: 156804 - DNA, 401 bp, Glycine max
  unsure (1)..(401): unsure at all n locations
agcttctccccaattntgctataaatagggggagaagtgaagaagaaaaaggttcagccttcttggcacttctctctctctctcgaaattgctgaggaaaattatttccgtgaagaaaatccaagccgaggtgcgtccgtaacgtttccgtgagtaattacgcgaagattctcgaccgttcttcaagatttatcgttcgttcttcgttttcttcagtcttcaatgggtaagtacctcaaaccgagcttttcaattcattctatgtacccgtggtggtccacattttgtttcatgtatttttattctcgctttcatttgctttttatacccnctttgacgtgcttaagccatttatttaagtcatttctcgcttaaatctaaaaataaaataaatttccacc

SEQ ID NO: 156805 - DNA, 421 bp, Glycine max
  unsure (1)..(421): unsure at all n locations
tattacgtgaacttagatactaagctcttggattcgataaatctggtgagagtttctctctgagnttcttgttgaaccaatctcagacttatcaaggtaatccttgtggcgtctatcctgacttatcttccttcatcgaaagtggcgtcattcaaaatctccgtagcctgtattaagcgatccgctcctagtcaggttcacatcatctccttccagaagcttcattgcctaacagaccaacttacaatagcaagccccaacagactcagcataaggatgcacaagccaaagttgagtatgtgaaaagatcgtatgaccaagtgaaggtgcacattgcaaagaagaatgaaagctatgccaacaagcccataagaaaatgaaggaagtgggtacttgaaccgttgatgatcctcgacattta

SEQ ID NO: 156806 - DNA, 402 bp, Glycine max
agcttgaggggatattttccaatgtttgtgttcccttagaagtcaaaacattggaaggtaacaactactttatgtcttctattgatgaaattactagaaaaatgtggatttatctcagagaaaaagagtgaagtgtttgatatattcatatataagggagtcattggtaagtgcagtgttagagatatgtgaataataaaacttctctccctatctctttctctatctgtgtgtatgcatattcttcatcactaaagaatctgcgagtgtttcaacaaagaaaagttgaaattctacattttcccaatttccctttgaacaacaattgaaacttgagaagaatataaatgtggaattctataatttaaaacactgtaacttataaagaagagaaagatagac

SEQ ID NO: 156807 - DNA, 384 bp, Glycine max
tctattgctggaatatcgcttagaggactcggttgatgatgacgttggtaaagacgcttatgatctacctttaccttctctagcaaatggcaattctgcatctctttcagaagcatcaaaaggagtctctcgtttcatttgcgatgaattagaatatcagctgatgcggccagtgtctgatagagtaattgatcaaaacattcctctcaatatattgagcagactctctggtattgcgacgttctcaaagaccaatgctattctttgtcatattcaccattttgctcagctattccctgcattttacccagctgactggaaatatagaagtaaagtgttcttggatctctgaattttgtctaagccacatcatcatggtttctg

SEQ ID NO: 156808 - DNA, 413 bp, Glycine max
  unsure (1)..(413): unsure at all n locations
gcatgcaagcttanggaaattcttcctccctttatttttataaagcgccgcccgcactactgtagcacactattttggtatcttcctatctttctcaacaataatacaatctcttctcctaattttcattctgtggctgtgcataatctcactttatataggagtttttcctatcaacaataaagactaagagacatctatttaattaccgtgaccaatttgaatagctttgagggttggcaatttttttccaactcaacaagtcttagtcagaaacttaaaaacattccaaacccctacaatgcaaattactaaaacctatcangntnnccatccctttgcctttcacatgaccaaaatttttcctttagcctcccttttctactggcgtacaatctttaatgagggaaaac

SEQ ID NO: 156809 - DNA, 247 bp, Glycine max
agccatcatactaataactaagcacaagcagtgtgtctctctgtagagtgctcgtaccctcagaatgttcccgcgtgtttgtcttcaacctcgaaagcttacaacgagtgttccctgttttctggagtttcacatcactgggggaagtatactttatctcacagtatcacgctcacattacctgatactgggttgctgtcctctcgctacacaactcgatccacggacaactgtactgacataaacg

SEQ ID NO: 156810 - DNA, 406 bp, Glycine max
  unsure (1)..(406): unsure at all n locations
agcttgacagaactaataatctcacatntatcgaagntaccattctcaacactggacaacacatgtccatgcttaagggcttgatgaactcatcaccctcctactcgtcaaggctactaccctcgacatcagacaatctcctttgacattggacaacctctttcgcccacaagccgacttaaagcttgggagaattatgtactatccagggtccacaaaatacatgtggcatgttacgtgatacttcgagaaatatatcaaccctccatgtcagccctgacacaggagcgcgaacgtctaacccttaacaatcgggctccccaatcaacagggtatctctaacctcttattatttgaatatattntcatcttttatctctcggcagatattcaattatctacaaag

SEQ ID NO: 156811 - DNA, 424 bp, Glycine max
taactaagaaacatgttggccaataacctcagagtttgtaagaatgtgtagatcaagttctttaggcttatcgaaattcaccaaaaagggctactggtgttacttcttttacgttggtttatgggtatgaagcagttttgcctatcaaaataaatctaaatttgattcacatttaaagacaaaatgaaatccatgtgcaagactattgggatatgatgtatgatgagttgaatactctggatgaagaatgtttaattgctctacaaaacattatttttcaaaaagaaaaagtttctacacactatagtaaaaaggtgaggagaaaatatttttgaattatagatttggtttggaaagttatattaccactggataacacatcgacaattcttagttaaagcttaccaacatgggatggaccgta

SEQ ID NO: 156812 - DNA, 396 bp, Glycine max
  unsure (1)..(396): unsure at all n locations
cagctgaggataggcaaaacatttaaatcttttcctttaccacccatcaaaatgattgaaaaggtaatttgcacgaaattttgaaactatatagccattttattttgacacataaacataaatccccttttccttttcctttntcttaatctgcacatatctcttcaagaggataaaatttctgaggaagatcagatgaaaagggcactcagccccatttctcctatcctacaatgcaataaaaaatttcatctgattgcatcccttttagttccatcattatacacttctttcttcacagatcaagcaaacacaaaaccattccagggccaggcacttctgatctagctattcccaaagtgcatggactccacacttaaaaggcacagaatggaa

SEQ ID NO: 156813 - DNA, 208 bp, Glycine max
ctagcctatatcactcatacaacagaggcactaaaagtcgagcattacataccgctccctccccaactctatgacgttgtcccactaggacttccatattcgtcatgcgctttattctgcgagacactgctaacatacttggttctccctttaagtgctaacaagcaacacagaaatctgcaagaatgttacatacaatgaacataaa

SEQ ID NO: 156814 - DNA, 346 bp, Glycine max
gcagcttgagcaaattcaaacgacaataactttttactctgatgtctgatcgagccccgtaatatatcgagacgcttcaactggaataccgaagctctgagcaaattcaaacgacaataactttttactctgatgtctgattcagtcccgtaatatatctagacgctccatattgaaagctgaagctgtgagcaacttcaaactacaataactttttactcggatgtctgattgactccccgtatatatctacacgctcaaaattgaatggtgaagctttgagcaaattcaaacgacaataaccttttaccccgatgtctgagtgagacccccaatatatccagac

SEQ ID NO: 156815 - DNA, 298 bp, Glycine max
tactaagcttctcgcatattacgggactcaatcagacatccgagttatatagtgattgtcgcttgaatctgctcatagcttcaacattcaattttgagcgttttgatatattacgatactcaatcggacatcccagtaaaaagttattgtcgtttgaatttgttcagagcttcggcattcacgtccgagcctctcgatatactacgggactcaatcagacctccgagtacaaggttattggcgcttgaatttgcttagaagcttcacattcaagttccaagcgcctcgatatattacc

SEQ ID NO: 156816 - DNA, 408 bp, Glycine max
aacatatatgttatataaatcgagttttttatttatgtggccaacccgatagaaactaaagttccttggagacgcgtcatgcgtcgtgcacgtgaactttacgtgccaagaccctacttggggctgcgtgcggtattgtttttagttggctatacatgtgaacagcgtgacagtcttcgatgatgacaatggatattgttcacccatgaaaaaaaacaaaaagatccactggtgatgccttggggcggagggagggaagatcagtatgatgctagctagaaagagatgaagcatgatggtgcggtcagccaaacagcagcaaaacagaaccaaacaaaggctttcttttgcatagaaaaactcgtttttcagttctgttgcatggagtctgttgctgacacaagctaa

SEQ ID NO: 156817 - DNA, 423 bp, Glycine max
  unsure (1)..(423): unsure at all n locations
ntaattagtctccagtctataattctacgagaccttatgtatattgtttatgcaanttgtgcacaaacctagtatgaaagtaaacgatcatgcagttcacaaagctttaattagtctccaaccagcgtcagattcaatagtatcttgtataatctacaaagctacaaaagaattgctaaagatacactctccaacgtactttttttaacacattagcactaacacactcctacaacacactattgttatttgttagctaatttattaaaattacaaaattaaaaagaaaaaataatgaaccctacaaaattgagatttccaataaacttcatctaataataaaagatatattcacaaaaaaaattagagcatctagcatttttatgctacacatactattaccctatatgacccagcaatttc

SEQ ID NO: 156818 - DNA, 407 bp, Glycine max
  unsure (1)..(407): unsure at all n locations
agcttgtagcgaanatgtccgaaataatattcttattagtttacatgaaactctccgaaaaattgtcccaaaaaaattacatgaaaaataattttgtaaattaataaagaggatagaacaaaatattcagtagtaaaaaaaaaaggaccatcgtgaacatgagataacaaatggacatgaaatccaactaagtaggatactctctctaatcaatgccgtatgtggcaagtaactgccttaaaaaacgcttggcttcatgtaaggaaagaacaacatcgtatattaatgaaaccataaagaaaaccatgggcgaataaattccacccttgcctacagccccacagattttttttttttgataaagcacaaaatcttatttattattcacagtaaaaaaaaaaaaaaac

SEQ ID NO: 156819 - DNA, 426 bp, Glycine max
aaaacaagctacttaataagttgtgactcttaaaagaatcttcagaaacaagtcacttgaagaaatgcgacttttagaaatgtatatttcaaaatcagtcactagtaatcaattaccattaaggtgtaatcgattacacatcaacatatatgactcttcattttgaattttgaaaattaaaacgtttagaagatctggtaatcgattacaagtattgtgtaatcgattacacaagtttaaaatactttaaaactgtttaaacataagttataactcttaaaattcgaaatcttaacattttaaaacactggtaatccattactaccttctagtaatcgattaccagagaataaaactctctggtaatgattctgcgaaaaattcttgtgctactcaatattttgaaaaaaaaacttagtacttatc

SEQ ID NO: 156820 - DNA, 406 bp, Glycine max
gcttccaaattagtgtaccacactaccgctgatcctgtcaagctatcttgaaagaagtgtattaatagcttctcatccttagagtgtgcgcccatcttgcggcagtacatcttgagatggtttttgggacaggtcgtccctttatacttgtcgaagtccgacactttgaacttcggggggataacaacgtcgggcactaagcaaagatccgtcatgtctgcgaacggatagtccccaaatccttccacggctctcaatctttcctcgaggagatccagcttcctcttttcttcggttgctgggggcgcgccttccgtggacaaaactattggttgtgccgcgatgttgggttgaggcaacgtgctgggtgctggcccttcggggatcggaggatagaactcgacat

SEQ ID NO: 156821 - DNA, 371 bp, Glycine max
  unsure (1)..(371): unsure at all n locations
tgactaggcgagttgattttagccttagtttcactttatttatttattcaattcaattaagaatgagaactcccaaagagaaaacgtccgattgattttncgctttactttactaaagaaatattctttggttattatattattattttacctcttttttgatttccaacatggttaccgcacgaccgaacggtcggaattcattttaacaaaaattaccggatgatacaattcaaacgatcggtggaaatttattttatttttacattaagcgaagaatgacttaaataaatggcttaagcacgtcataaggcggtatataaagtaaatgaaaacgagaatgaaaatacctgaaacgcaatgtggaccac

SEQ ID NO: 156822 - DNA, 406 bp, Glycine max
ctgcagctttgtgctatcgctgatattataaagtttgccaagactataaacgagatattggacatgaagataaacttttatatttatgtgtggttagggtagaattcatgtattgctctaactaggtcatattttcatgtgtggtatgggttgggatagttagtacatattttcatgtatctttaagatatgtatttattttgtatttcaatttgtgtttctaataaaataaaatcttgattctttatgcaattgtttacaaatgcttctttgtttccaaatcttgtatcaaaacaacacaaaaaagtactcacatttcacaataattaaaataaataaatgaattagtatgagttatgtcaatgtagcagtgttacacttctcgactatgtagacacatttgttt

SEQ ID NO: 156823 - DNA, 458 bp, Glycine max
cggacctatgatactcagcttggactaaagaatacaagcctttcactattgtatatgtgttagttaggttagtttcttcatcccacccaagccccttatatacgtgttagcttcaacctcttctcttgggtttggatcatggcatatccattagcgtttgggccacactaacgattgggctcgacttccaacatggtcacttagacccatttagcccaagccttttttgtaagagtccatcataacatctttgctctgtttgtcatagaactccaatcctataaatcctaagtagatagatttatagatcgtattacaattaaagaaaaaaattatgaggaatttgattctaacactgtgatgtatcactaaaatcacactttatcaagagcgggtcaccaaatgcatgacacagatgactacttaattgtgcatatacgtgatgcataatatttgct

SEQ ID NO: 156824 - DNA, 366 bp, Glycine max
  unsure (1)..(366): unsure at all n locations
tggggttatcaaattgatgttcttagaggatttccagtactcctgtgttataggaaaatatataatatagtattccaattggtacttgttattttctacaaaagtagttgagatctgctagtgctaatgatatattcactttgtatagaattttgttatttatgaattggccagaagttcttaccttaaaactgtcaatgtaatttggttcattggttatttatatgttcttttgtgccactgtcagtctgttatacttgattaccttgccagcaagactatntgttcagatgatttggtagttgtctcaccagatgttggtggtgttgccacagcacgtgcttttgctaaaaaattatctgatgc

SEQ ID NO: 156825 - DNA, 463 bp, Glycine max
cgaccgcagctagattattatcaacttagcctcaaccattattctcttcacttttgtctcggctagggcatcatcagttaggcctaagttagggccctcttcacttgatctcgattgaaacatattttgtttggtcttgattgaggcatctttcactcaactctaactaattaagacatcttcaaagagttaggaaacatttgtcttaggtttctaagtcttaaattttaaaagtgaattaactcaaggttgaccctagctcacttggccttattggtcatttttccctagcctacatgtgtcacgactaaatggattaagactgactcactttttattatttttttgttcatcagaattgaaggtagcatcaggagattataataagtacactctattcaataataactagttagaccctgacatatagaatgaccatctgtacttattagaaagtaatctg

SEQ ID NO: 156826 - DNA, 402 bp, Glycine max
  unsure (1)..(402): unsure at all n locations
tgcaagcttntcaaggaagctacctagtctatatttataagcatgtgtaacacttgttgtaactttgatgaatgagagtcttgtgagacatacttcaaagttccacttctatacctcttttattccttcaatttcgtgctccccccctctctctttctctccctctttcttttcctccattgaagcatcctctccaagcttcttatccaaggctcatcttggtggtgaagctccttcttccatggcttattccttaatggatggcgcctcctctcacctattttcctttgtcttccgctgcatctccatggtggaaaatcaccattaaaagaccccattgaagctcaaagatccagcctccatagaagccccannngnnagcttccatcaagtggtaatcag

SEQ ID NO: 156827 - DNA, 432 bp, Glycine max
  unsure (1)..(432): unsure at all n locations
gcgacctataaaactcagctcgaggattatggngtatccatcacatgtggtactatgtggcggttangcgacggtgcaaaacaagttctccacatccacaaatcacgtataaacccaccatnccctattgcccacctccaactgagctcacgtactcccacgtagcccttatcctcattcctctcaatgtcgggtccccatcaatcctctcaagctcccacaacatccaagaaattcaacatcccatcatcacaaactaacaaaaccaagcaaaacagggcaaaggcagaaaactctgcccaaaacacaaaccaaaatcacagcttttcacatacaaatatcccagtaaccttttctttgttccaagctcgtaaccggtggatcgactcgaaaaatctactgcaagtctctagtacataagcccacattttg

SEQ ID NO: 156828 - DNA, 400 bp, Glycine max
  unsure (1)..(400): unsure at all n locations
agcttncatagattagttaggcatagtgtgtatccttgtcattttgcgcattttgagcattctgttgagggtgattctgaatattctaattttgagcattccactactaatttttatattgagaacatggctcaacctccacctcatgagaggactcttagggagatggctgcacctgatttcacttatgaaagcttatgcattcaatatcctaatgagggtgttccatatgttctcaagactggactaatacatttgctgcccaagtttcatggtcttacaggtgaagatcctcataagcatcttaaggagttccatattgtttgttccaccatgaagccccctgatgtccaagaagatcatatctttctaaaggttnttcctcattctctggagggag

SEQ ID NO: 156829 - DNA, 477 bp, Glycine max
  unsure (1)..(477): unsure at all n locations
taccatgccgaccacaaattctggagacagaactcgactttttactgtcacataggttctatcctgggggaacaaaaaatttaggactcaaattctatcaaacttagatagaaaagtaaacagttgcatattgataggttttcaatgcaagatgcagtatacatatagaaactaagtgacaacagcaactagagaatctcacgtgcatcacaacaataaatcaagttctttaggaaggtcaataataaaaaaaatggtaaattttttcttatacttgtgagtgtatactgtgtaagttaactctactagttagagttaatccttagttagtatggacagctgtgtacagctgtcagttagttagctgagttagatagagtctgtagctctgtgctctctatatatcangatgtacacagactcactggccaatcgtattcttcttttgatatcagttataacatactaggtggatct

SEQ ID NO: 156830 - DNA, 412 bp, Glycine max
ccccgccgcatgcaagctttgaaaagtgttgtttttcaccttttctctaagccaatcaagctttgaaaagtgttgtttttcaccttttcgctaaactaatttgctggcttagcgagcgtacgctaagcgcaacactcatgggctaatcacgaggaagactctgaaagaagatgagttgtacaggttcactaagtacaccacttcatctcaataagtgcaccactttagttcatctgctaagcgagaaaggcacacgctaagccagaattcactaatgtgcgctaaacggtccatgagtgcgctaagcgcacgagcacgaacaagaccacctatttaagcctgaaatcagattttagagagggactctggactgggatttaaagctttgcatgtctagagtttctagagagag

SEQ ID NO: 156831 - DNA, 405 bp, Glycine max
ctgacctttgagcaccgacgactgtttcagcaccctagtagcaacagtgtatctaaggttttctttgagccaggacaatgtgggttctgtggggttcgagcgacgacaatatgggttttccggcagtgtagggggttctatgggttcgaccaacgacaatgtgggtgtcgacggagcggttttcggcagattttgggcgggaggagaaagagaacagcgatttcaggcaggaggatgacaaagagaagaggtagggcaaggttttcgagcgtgcgcgacttctgaaaattctattctttttaacttataaagacaacaacatccggtttttatggataattgatgttaactgaatgtagttaaccatcagcttgtaaaactgatggtacatcaaatacatacatc

SEQ ID NO: 156832 - DNA, 373 bp, Glycine max
ttagcttagctacacacacccctctcataactaagcttccctccttgagaagcttccttaagaagattcctaaagaagctagagcttagctacccacacctttctaatagctaagctcacctccttgagatgagaagctagagcttagctacacaccccctataatagctaagctcacccctatgacaaaatacatgaaaatacaaaaaaatttcctactacaaagacaactcaaaatgcctcgaaatacaaggctaaaaccctatactactagaatgaccaaaatacaaggcccaaacgcaggaaaaacctattctaatatttacaaagataagcgagctcatacttagcccatgggctcgaaatctaccct

SEQ ID NO: 156833 - DNA, 312 bp, Glycine max
tatggggtcctttaatggtgagttcccaccatggagattcagtagaagacaccggaaaagatgtgagaggaggcgcaatccattaaggaataagccatggaagaaggagcttcaccaccaagatgagccttggataagaagcttggagaggatgcttcaatggacgaatagaatgacagagagaacgagagaggcgggagcaccacattgaacgaagacaaagagagagaagctgaactctgagttgtgtctcacaagactctcattcatcacagttacaacaattcgtacacatgtttctatttatatact

SEQ ID NO: 156834 - DNA, 393 bp, Glycine max
agcttgccagggggagttcttgactctttactgattttttcgagcttgattcctttataatgcatgaatttcaacgaaagtttttcatttcattttaatttattcatttggtctttgcccggtactatccaaacgcatccattcgtttactgtgtatgaatacgttttgtttcttgaacaataatagtccttttcatttttggagtttcttttcttctgaaaacgacttgatttgttttctaagaatttaacattttaggttctacacggatggtaaaaagcataagcaatcgttttggggagcaagagcaactgagcctccagcacttaaacctagcaatttgctaccactagggaaaaatagaattgctgaaacatttagaattggaggat

SEQ ID NO: 156835 - DNA, 483 bp, Glycine max
  unsure (1)..(483): unsure at all n locations
gctattaggaattaaaactcagctctagaattatcacaaacgaactatgattattgaagaatctattcatggcttcttttatgagactaaccctataaggtccagaaaggaaacacttgatgatattacagattctttagaagatactgcacattcataaagaagggcacaaaggcaaaggaaatggaaataatgaagactctcaaattgatgaaactaaaacaagtacaaatacagatcttctgaaagagtggagaacttcaagatgtcatcctcttgataatatcatcggtgacatatcaaaaggggtaacaactagacactctatcaaagatgcatgcaataatatggtttttggttcttaaatgaacctacaaacttaaatgaagcataattaattatcattggatcatcgctatgcaagaagagtcgaatcaacttgaaagaaatcacgtatgggaattagntcgataacctaatgat

SEQ ID NO: 156836 - DNA, 395 bp, Glycine max
aatatttcatcacggacacttttattgagatcattctaacctcttgcgataaaaatattgaaattaaaattaagccaactaatgaaaaaatgtaaaaaaaaaattgatgagtgaaaatctatgtatttaataacacatttaaacaattaaaagttaatataatattatattaacattaatgtgtgttaaatttgatcagatatttgtgttcattatctgataaaaaaatcaagaaaattttttaacaatgaaaattagtgttgtaaaaaaaataacaaaagttagtaaatatgaatttaattatttgattttcaatattctcaattctaattaaacattgataacatcttttaaaggtttataacaattttcagattattaaaattacttaatat

SEQ ID NO: 156837 - DNA, 458 bp, Glycine max
tccatcagttagtaaccatatacacaaaaacacaaaatagttatgtcaacagcaatatagacaataacaaagaaaacgtcaatagcaaactaacaaaaacagtaatgtcaataaaaaaggtgcggtgacctcggtcacgtggcttcgcttcctcccaagaaactgagcaagttcttcatctcctcatccatacgggcctcctctgtatcgccgggagatcctgcaggcgcctcccctgcctaggcctcgggccaatctccgggccatgcgacctcagccctaaactgctctggagtagggcatgcaaaaggagcaaaaccctgcccctgctgactgaggctaagctggtagagacactcatgtatctgcacctgcccccagtggttagccgcctgctggcgaaccaagtgttgtagataacgcctcatgcctagtgacccagcgggatcagcctgatg

SEQ ID NO: 156838 - DNA, 334 bp, Glycine max
tattatacatactctaatattcaaaattcaagttcattctagtcacatgcttatgacgacaactacagtgggtcccacagcacttatacttggaattcaggtgtttgaccacaaatatttactctgcccttgttcgcaaaacaatggattttcttttaagaacgaatcacccatattctgcattattaacaaattttttcacaaatgcccggataccttaccttacgaatatgcataagctgcccccctcaccatctccaattgatcggagcttacttttgatggtctacatttttgaaataacacttgcctttcgaacatcaccttatattat

SEQ ID NO: 156839 - DNA, 453 bp, Glycine max
acttatagcgctagttatgctctgagcgtccttttcaaaatttattgcgcactccctgcagcaagttagatggtctctgactcctgctctatcttcaaaagccacatccttgaaaaataccttgtttctctcttgagcttgaaaatcactgaaaaatgtggtaccacagagaagttacaacaaagctcatcacaatatgacaaggaaagagaggaattttagaataatacaaaaaatctaaaccagacaataatgaactaaatctagaagaataaataattaattaattacctgtcaagatctaaacttaggctgaggatgccaacaggaatcgcgaagggatgaagcctccacatggtttctagggatgggtgacatattttacacctcatgtatgtcttacgagttgaaatcccataagccacaatctactagactcgccactaccacata

SEQ ID NO: 156840 - DNA, 402 bp, Glycine max
  unsure (1)..(402): unsure at all n locations
agcttcacagcttccaccaagttctggtgatcatatacagaagcctccacaaggtgagcaccttgcttcttgaatgaaagcagcatctgcatcatctcaatgtctaaacctatctctggacgttgaagaacataggtttcatggccttgttctaaacttgctttcactattctcctcccaacatacccagttccccccacaacaaagaaccttgctctttcccattgcctgcgcaaaatggaccagcaaaggccaactatatttaaagactttatgataattaaactcaacctttaccttcacgtttggtcattcttgtgcatattcatattgcaccacttttctctaatttagttctagggttatacccaccacctncctcgaaaggaaatatagaaatat

SEQ ID NO: 156841 - DNA, 433 bp, Glycine max
  unsure (1)..(433): unsure at all n locations
tcacgttntatgattagctaanagtcttattaattaaaatcatgacattcttataggtcatgccaatcacctgtttaggcttacaaaatttgttccaagaaattatctgagtcgccccaaacaaaattcataacccaaaaaacaaagtctttcagcatcatatatatatatatatatatatatatatattgatataaactagatttgaattcattgaatttatctacttttacatatactgggatttaacgttacgtatgcaacgaattgaaaggagcaaacatgcaaccctatatgatatgaacacacaagcaataacggatgcgggattttgtttagagttacagaacacaaagacaacaactgttgattaaaaatcacacacaaaagcttcagatatatctaaatataaatctaaatgggtgggtaaact

SEQ ID NO: 156842 - DNA, 412 bp, Glycine max
  unsure (1)..(412): unsure at all n locations
agctttgcggattnnggcctcgccggcgaattgatttatattggtctaaaaagaggcaaacctgatcatcttgctttgataaatgcaaaaaaaaactggggccaatgaacagggtgacgatgaaggagaagcccgtgctgtgactgccattcctataccgccaagttttccaccaacccaacaatgtcattactcagccaataacaaaccttcttcttacccaccgagcagttatccacaaaggccattcctaaaacaaccacaaagtctgtcttccacacttccaatgacgaacatcacctttagctcatacgaagagccccaaccaagaaatgaattttgcggccagaaagcctgtagaatcacgccagttccagtgtcctatgctgacttgctcccatatatacttgat

SEQ ID NO: 156843 - DNA, 271 bp, Glycine max
attgaataaactctatcctatgctctacagttatttttccaggctaatggaatttatctgatcatctattattcaatgcccaacacattattattaaacaaacatgaaattgtttggaaaaaccactacttatgtcgtgagtgtctttacacgtacaattaaaaaacacataactaacctacactaatgctttatattctgtgtgttaacatacaaatcattttgcttgcatgtgaaagcatctccaagataaatatttgctgatgccatc

SEQ ID NO: 156844 - DNA, 239 bp, Glycine max
cgcccttcaatttgcttgccagacctcaaggtgatggcactcacattctttcgattttgcacagtctgtgaaggcaatctgacataatttcggaactgaccctggtttaactgactagccacttgctccatctaatttggcagactctgaatggaggctcttgtctcttattgaaattgcatattccggatggctattcgccctactaactcttctaatgaaggctgacgaggagcctc

SEQ ID NO: 156845 - DNA, 423 bp, Glycine max
  unsure (1)..(423): unsure at all n locations
ctctagctnttcattggtgtgttttgatctncttttggtgctctaaactgcgggaatgtgctcaaatatgtggggcaatcttggtttgttttcttgcttgattgggttgaactgggggtttgtatgagatggccctaggcctataatgcattttgaagcaatgggacatgccacattgtccccgttctcttgctattgatgcctaaacgcgcgcccaccaagtgttaggtgaaatgcctcaatggcattagcgcgtgatttttgtaaggaaacaacccatggggcaatttggtttgcacatattttttgtgacatgcattcagttttcaaagggctagagtaattgccccacatatattctacgcctaggaaccaaagttttatgcaaaagatcacaagaggaggtgcatattgtgtaaagtt

SEQ ID NO: 156846 - DNA, 300 bp, Glycine max
ctttagaatctctcccatgcacaagcttcttgaaaaaaatggccaaaatcccctccacaatctaatttcaggcttaaatacgtggctttgtttgtgctagcacgcttagcgcgattatggaacgctcactgtgcattagtggatttcggcttagcgcgtgtttttctcgctcaaccgatggactgaagcggtgcacttagctggatgacccttcactcagcgcaaatgcacaactcatccttcttccagattcttcgtcacgctcaaccgacgaatgttgccctcagtggatggctcgct

SEQ ID NO: 156847 - DNA, 485 bp, Glycine max
  unsure (1)..(485): unsure at all n locations
ctaaactttatacaagaatgaagctccgatactacttgttatacaagcggcctcagatatcttaagaagcggggttgaattaagatattccaaactacttgcctaattaagaatctatctcactttcttttccagatatcaattcccttaacaatgaacttcttaaatattaattcaaataacacaactcgaatatgatatataaagcaataataaacaaaggagatcatttgaattatattcatttatcactggaaagttttattattgctctataactgtgtaatcgactacacaaacattgtaatcgattaccagcggaaatcttacgaaagcaaatgcttatcatatgaagcaggcttgttagatgcttctttgacatcatcaacatcatgtatacatacattcacagattaacggaagagaaagcgcacactcagattatactgcttcggcacnaccttgtcctacgacagttccaagca

SEQ ID NO: 156848 - DNA, 396 bp, Glycine max
agcttcaatggagcttacatcatgattttgttaataagagtttttgtcaatgcggtagtacttgagcagcactatttccttggtttgatatctgttggcaacttgcccctggacaagttgcgagttagtgtagcatcgcagcttcttgaccctgatttctcttgctagttttagacctgcaatgagtgcctcatactcggcctaattatttaaggctttgaagttaagctagagggctcactctagagtaacatcattaacgccttcgaggatgattcgtaccccgcatcctttcatgttggacgcactgtcaatgtagaggctccaccagcctagggtggtttggtcgtttccagaaaatatttcatgaactgcgtcttcatggggctgtacggt

SEQ ID NO: 156849 - DNA, 391 bp, Glycine max
tggatataattaattaatgtgttgtaccgattgaatatgccaaatatttgagctattcaaaattagttcgtcatggatgagaactggaaagtaactaccaaggaataaggatataggagggggccataaagagagaagtgagagtgagacgccataaagtgtgtaaaatttttatatagtcagtatatgtttgataataagttctttgaaagttctactaacaagaatccagaaataaattatttttggtaattaacaaagtaaaaacaacaattattcaggtcaagacaattaaaatatctgcaagagcagcatatacctcaactctaagtatcagacacgatcacatacttatcctattacatggaccgtgtaattctggaatcttctt

SEQ ID NO: 156850 - DNA, 387 bp, Glycine max
agcttagatttgtgaggataagttcttattttacttatgagtaatataaaaactcattcctaatcccaaaaattaagttacctataattataagacaatgccaacactttttactgatacaaaagatggtatttataccaaactacttaaccactaaaattatccatatctggttcatgattaacttttgataatcatttcataataaaacatgaatgattgcacattgaatataatttggatatcaagcctgacttaaattctatacaaatctcaaaaatatgttggatatcaagattaaaatttcatggaaatataccacacagaaaattgggcccgtctgtctaagcttatttaaaaaaatataaaataaatagctttttctta

SEQ ID NO: 156851 - DNA, 444 bp, Glycine max
tattatgctagtttagtcacaactcattaactcacatttcatgtaattatagcagacactaagactcgagtgcgacataaaaaggacaaatcacgataaaggtttactggtcttttttctaaaaatactattctaattataatttcgagtggcgtcctattattttatatataaaaaagttgaattgtcattggctatactactatttactaaggttttacaacaaaaggaaggcggagggggaattttcattttaataaccattcgatatatgattatataaaaaactacaaatgttatcttaatacaaatttaatgctctcttatctgtgtttatatctatcatatacactcatcactctataaataataaataaaatatccctccttcctttccctcataaaacatacttccaatgtatcatctttattatttacccccta

SEQ ID NO: 156852 - DNA, 411 bp, Glycine max
  unsure (1)..(411): unsure at all n locations
agctttgagccaaaatcctgactcatcatttattttgacccagggtgagaataccaatccttaccctcggaagcaaaaaagaatagaggggaaatttccaatcaaagaaaaagagaaggaaaatttccaatgaaagcaaaaaagaaatgaaggaaaattccccaatcaaagagtgggagaaagcaaaaagaaaagaaaggaaaattcccaatcaaagaatgggagaaagtaaaaaaggaagaagaagaaggaaagaaagctcctgatcaaggatcgaaagaaaccanaagaaatgtgcagagaggtctttggaccagacaatatctgaacacnncaaaattgtcaccaaatgaacaaaaaggaaggaaaggaaaccacgacctacaatggtcttctccctttaattaccaa

SEQ ID NO: 156853 - DNA, 363 bp, Glycine max
  unsure (1)..(363): unsure at all n locations
tctacttatgtggtagggcgggctctcttcactttcttgtctccaacgcgagctctgaccactgttcttcctgtccgcgatgcctcttttcacgtccgcctgagtgggcttatagcctaaaccatacttcccacgatttccttgggtttttatcaggctagttatgccgccattgtctttgcctaaacccatcccgggttcataaccgttccccaacataactcgggccatcattaccgccgcatcggacagacaaggttgctcaaagagggagtccacggaggaaatgctgaccacctcanaagactggaaagcggtttctaacgattcttctgcggcttccacataaggcatggaggatgg

SEQ ID NO: 156854 - DNA, 344 bp, Glycine max
  unsure (1)..(344): unsure at all n locations
gcttgctctaaacttacattgatgtttgtatttatgggaggaggttatatgccattgttgctttaagagtaacgtcccactggttaaactaactttccaaatgttcgccttcgcaggaatggcccccaggaagcttgcctcaaagaggtcctntaaggacaacgcggccgaaggaactacttacgccccggagtaccacagtcaccgctttatgagcgttgtacaccancagcgcttctaagccatcaagggatggtcgtttcttccggagcgacgcctccagctcatggaccacgagtattctgatttccacgaagaaatatgagacccccggagggcaccac

SEQ ID NO: 156855 - DNA, 312 bp, Glycine max
tggtgacacgcggagatatacgtcaacttttgtgtctacaagaattgtcctaccgacgtttgagtcacgttgaccggcgcatatacactagtggttatccggatcaacattcttatctgctgcctgaaatacgaaaagcctgatatgcatgcatagactaacgtagtcttgtgcgccctatcgcaatggccgggcgataagcccggtgacactcatagatttacgttctttgtcagagctacaagatctgtcatactgacattcgattcatgctgacagacggaaatacctcagcggatatccgtataaaca

SEQ ID NO: 156856 - DNA, 402 bp, Glycine max
  unsure (1)..(402): unsure at all n locations
gcatgcaagcttnccangtgtnnnccttgactcttttttgattttttcgagcttgattcctttatgatgcatgaatttcaacgaaagtttttcatttcattttaatttattcatttggtctttgcccggtactatccaaacgcatccattcgtttactgtgtatgaatacgttttgtttcttgaacaataatagtccttttcatttttggagtttcttttcttctgaaaacgactcgatttgttttctaagaatttaacattttacgttctacacggatggtaaaaagcataagcaatcgttttggggagcaagagcaactgagcctccagcacttaaacctagcaatntgctaccactacggaaaaatagaattgctgaaacatttagaattggaggatcc

SEQ ID NO: 156857 - DNA, 480 bp, Glycine max
  unsure (1)..(480): unsure at all n locations
tacggacattgaatctcagctcttaaattataacacaagaactatgattattgaagaatctattcatgggtttttttatgagactaaccctataaggtcaagaaaggaaacacttgatgatattacagattctttagaagatatgcacattcataaagaagggcacaaaggcaaaggaaatggaaataatgaagactctcaaattgatgaaactaaaacaagtacaaatacagatcttctgaaagagtggagaacttcaagatgtcatcctcttgataatatcatcggtgacatatcaaaaggggtaacaactagacactctatcaaagatgcatgcaataatatggttnttgtttcttaaatgaacctataaacttaaatgaagcaataattaattatcattggatcattngtatgcaagaagagttgaatcaatctgaaagaatccngtatgggacatatgttgataacctaatgatc

SEQ ID NO: 156858 - DNA, 406 bp, Glycine max
  unsure (1)..(406): unsure at all n locations
agcttcttctttagacctcaaggatcggtcttcttttctgtgccacgccgactgacattcttttcgatcaatatcggcgaataatatttttctgcccaagtgggctaatgctttcctggccgaataaatgggaacatgcaagtttctgccgaaacaaaacgccggctgagctcgcacgaaaaaacctaatcggcctacaatgtaaatttttaatgcaacacccaaacaagaaaacttcctctgccgtaaaaaaagaaccatcattggccagcgagcgttctaaaaaaaaataatcagtcgagctatttcacgaccgccgccgnnnnttgagttttctattccaatcctgaatgagatttgcatgatgtcgattaagaaatgttcgatcggcgtcatccggtgatgc

SEQ ID NO: 156859 - DNA, 458 bp, Glycine max
  unsure (1)..(458): unsure at all n locations
nnttggagtagaaacatgggaccaactcattgtattttttataaagaaatcatatctagtcaaggtctgagagaccatacaagtttcctaacgatttctaattatgtgggccattaagtctatcatatgctgacaatagccgagaagcccatgaatctcttcgggggcggagtaggtgtctgccatcgccttggccttggctaacaatcggcgaagttcttgactcccgttcaaggtaagagcaaaccgatccatccacatggttgcctcttggtgtaaagagtcgatcacccttcctctagcctctttntccgcatatacttgggcatactcatccgcgattctatgctcgtgggccgtggctagacncaactcttcttggtacttggcgatgatagctaacatgttggtttctgtctcgcatagacgctgagacaagctttcttttggaccttgac

SEQ ID NO: 156860 - DNA, 369 bp, Glycine max
tggccggcagacaagaattaaacaaaccattggtgggttgttccgctcttgaagccatgacaccgccgagacttgagaacacaacagaaaattctgaagacgagagaacgaatgaaagtgtttctttgttcaccggctatatatgtttatttataggagaaacactgcctcgcgattctatcttaagtgtaccttccttttttaaatccttactcattatgactcttacaaattagtattttactaacgagataaaaatagatgctatcactttggatttagatcctctcaactaatttctttttctccggtaatatcctacaaccattcatatctacaacttatacgactaagaatagccttttacta

SEQ ID NO: 156861 - DNA, 484 bp, Glycine max
  unsure (1)..(484): unsure at all n locations
cttntggagtagaaacatgggaccaactcattntatttcttaaagtcgtatcttgtcaaggtctgagagaccatacaagtctcctagcgatttctaattatgtgggtcattaagtctatcatatgctgacaatagccgagaagcccatgaatttcttcggggcggagtaggtgtctgccatcgccttggccttggctaacaatcggggaagttcttgactcccgttcaaggtaagagccaaccgatccatccacatggttgcctcttggtgtaaagagtcgatcacccttcctctagcctctttttccgcgtatacttgggcatactcgtccacgaccctatgcttgtgggccgtggctagacctaactcttcttggtacttggcgatgatagctagcatgttggtctccgtctcgcataaacgctgagacaagctctttttggaccttgacaggcaactaactcctctttcagaccatgctat

SEQ ID NO: 156862 - DNA, 400 bp, Glycine max
acgctttattttcttaggtctccttcaatgtaattacctatttttaagactatatctagtcgaattgtatcccatcctctgaaactcttttgctttggcatttgttgcataataagctccccagtgatgatcaacaccaaaggagaaattattctttcggtgtggctttgctcattatatttggaagtggttgggggatagtctttcatccattattgacacaatctccagctatagaattttgtttctcttggaaggttcttggagcccttgagtgaaggatctaattttagttgttgcgacttatgctcgttggggtatctagtatgctacgaatcagattcggctttagaataaaaaggccacggcttcagagcttactccatccattttgaataaa

SEQ ID NO: 156863 - DNA, 478 bp, Glycine max
tcatggataagtagccttaagcactatgatattccctaatatctttcatgagcatataatgtaaatgtgtgaattcaacgttctgatgatgccaaagcataatcaaacaagattgcttcaacaaacattcaagggtaagcaaatagagattgctctaagattcattcagggtcaagcgaacaagattaaaagaatctcattggttgatcaacttttacctcaaacaccactatttccaacaaatcaaggcattggtaatcgattaccacccagtgtaatcgattaccagacagtgtaatcgattaccagaagacaagtctgcaaatcacgttttcaaaagggttttcacatttgaattatgaaagctgtaatcgattaccattggtgtgtatccattaccagtaacggaactcctgagatctcaatctgaaagtcatgacccttcaaatctaatgtgtatcgataccaaaacctatat

SEQ ID NO: 156864 - DNA, 402 bp, Glycine max
cgcatgcaagcttggtctgaagagagaaggaaatggtgttatatattatcaacttttttcttcatgaatgaaatgaggtaaaaaagaaaattcaagataaatcgcgacttccaatcctcgtcaacaaaacaaaaataaaaaatattaacaattaacgtttgtttgtcgataaaaaaatgtttacaaaatctcacccatctttgtttttcaattatagcccaaataattttgactttcattctctttaaatgaagaaaaatcatgaaattatgtattgtagacatatcttccaagtgagacaccaggtccactagttaagtacagagaagaagaattggaggttgtaagcgccgcgactatgataggatctatgattatgatgtctataatgatttgggaaat

SEQ ID NO: 156865 - DNA, 409 bp, Glycine max
aaaatgttttttaactaatatctctaaaagttaaagatgtataaattgattttaacttatgaaaaaaatttaatactttgtatattcttattttctttacctataaatatttatagaacaatttatccaaaataatatgtcagttatcccaagtaaaatctaaataaagaatctatacagaaaaatgccttgaattggttggctcacctttacatttgtcaagtccacattatgttctatcaagaagccaatgaattccataaagtgcttctttgtacgacagtaatgaccgctgtagggccatattgcctgaataagaataaatgaacatcaatctgcatataacggaagcaaaatgctcttaaactttctccttaatcaatctttcggcgcagcgaaattttatatt

SEQ ID NO: 156866 - DNA, 393 bp, Glycine max
  unsure (1)..(393): unsure at all n locations
agctntgtagaattttacaagagaaagggcttttggttattacaagaaatgttcatatagctgaagctgtggcaatgtttttgcatatccttgctcacaacctaaagtatagagttgtgcactttagttattgtagatccaccgaaacaataagtaagcaattcaagaatgtcctgcgaggtataatgaaagtaagcaaagaatatttgaagttccatgactataatctacagggctccgtggaaatcaaatggagatggtttaaggtaagtttgtcatttgttagtaattataaggtactttaaatgattacaacttattttttattttgaaatgtttttagaattcgattggagcactcgatgggatacatattccggtaacagttactac

SEQ ID NO: 156867 - DNA, 375 bp, Glycine max
  unsure (1)..(375): unsure at all n locations
agaaactcaagcttgtcagaactcagggagaacacatccttggtccacggtttattattatcaggttcacccttggcgaacccttcttttgctaagttctatctccacaggaactcaacgtatgcaaggtctacccttgacaatattttatattcatagctcttatctatgtagggaaactagtctacaggtgcatcacaaacccaaggttcacccttggtaccaaaacccaaggtccacccttggcacatagtcctaaagagcccaagaggcaaaggtccagcgttcacaagatgaactaccaccacaatggtcgataataccttcagtcaactganagtcatacttactcctcataaccatcacgggagaagc

SEQ ID NO: 156868 - DNA, 366 bp, Glycine max
atgaactaataagcactctcttgtatcatctaatgacttgaaaaattctcactttaaaatgctcttactccacacttacgattttctttcattttcttgcttttgatagcagagccttggtcgctttttatagtcttcatgaaagtatccattacgagattagtgcttatctctaaattcgttgtctcgtagatggaggcagtgctatgtgtcgtgctcttatggagagagaaaaaataaaagtacaacacaagtgcatctgctcctttctttagtgataatgacctctgagaaatattcttgtgaattcttctattcccttctattttgtccttactcaaatttcaaatttaacaattcaaaata

SEQ ID NO: 156869 - DNA, 351 bp, Glycine max
cggctatctcattagaggttttggtaacagccacaatcctagtagagacatcgatattgaaataataaatgaatcttgaggtcaagactgcatatggaaattcaaaatccaccagtcgacggcttttcaacataatatcttcaatcaacagtacccaattcatttgaatacctgatttcagcccatacataatctgcaagtcatcatcactgactcgagcatgattgttggatcttggtgccaaaatatacataataatgtataccagcattctgacttccgctgttagaccaccaacactcacattgttccttaaatttctgccatgtcaagacgcatacctctgtatat

SEQ ID NO: 156870 - DNA, 401 bp, Glycine max
  unsure (1)..(401): unsure at all n locations
agctnntgattacattaggtgctgtcatttctactctaagttcaccgtgtaagaaaatatatgaagtatgaccaatatttaattgagaattggctcttgcattgtcataaatgataagattaagtttaaacctgtgtttgcattatcttgctatgcatttttgtttaagtgaaagtttcttaagaaaaaataacaaatgattatttttttaaaagaatttccaaatgtgctgtaaattgtagcctgtaggatatgcttagtctaattcttactctacactctacactcatgttagttcttttgaagaattgaaccaagaacttcatctaaatctctcacaattgagtccatttcacgaatagttctatcaatttattgtcagtactttatgcattaccaat

SEQ ID NO: 156871 - DNA, 283 bp, Glycine max
actaactcatatataaaacgtattgtgcatgcaaattacggatcttgagagatattcgacacaactaccaatgtattagcgcaattcacatataccaatctaataccaaaagtgcaacagaacatctccatagcatttaacacaatgacttctctttattttaagaacgatttacaatcctataatagcctccagctatctctctttggactatatgcataaactgactcagtataacaaatatctatgccctttaaacctaacactcaagtgactatgtacc

SEQ ID NO: 156872 - DNA, 402 bp, Glycine max
catgcaagcttatcattcttagactcgatatatatattataactgcatcgggctggaacagactgttcctccttaatatctcgatcaagtgtcaaaagaatttcctgttgctaccatatagtattcatctgtacatggtgataaataaaccatgagttctcttttttatatcagagatctcataaaatgggctttctatgaaaccccaactaccaatcctcacacgaattgctagaagatccaatgagctcaacattgattccttttgacgtgtcaattgggcaaatgcatccatagtgactagggtggatatctggtatccgaaaacttgcagtttgccctgtcaatcctccagggtccaaataactcagttttctctcatgaactatttgggccaatgga

SEQ ID NO: 156873 - DNA, 399 bp, Glycine max
  unsure (1)..(399): unsure at all n locations
catgcaagcttgcctttagcgctcggcgctattttttttttattgnctctacagtctttagatttgggagccaatccaatccttgtgttcggacctctcagccacttatgatagccgccgatgatcccattactgcttcccctaagctatctgtcctttcttcacgctgcatcccacgccttgcgaactccttggagtactctcgcgttgtggtcactaaaaccccgtgcgatgaaaggcgtgatgcttttgtctaatggcgctcctctcatggggtagccaagttgtcttatggcgagaacgggattataattaatacaaccccttgttcccatcaagggaacatttggacatccttcgcatgaagatagaatcctgattcttccttccttctagcga

SEQ ID NO: 156874 - DNA, 458 bp, Glycine max
  unsure (1)..(458): unsure at all n locations
acccatacatgtggatatttgcggnncggcgatggtgcacaacaagttttccacatccacaatgcgcgcataataccaccatcccctgttgcccaccttcactgagctcacgtactcccacgtagcccatatcctcggtcttctaacaccgggtccccatcaatcctctcaagcttccacaacattcaagcaaaacaacatttaagccgcacaagctatcacagccaagcaaaacagagcaaacgcagaaaactctgctcaaacaccaaccaaaatcacagcttttctcacttaaagacgccagtaacaattccttcgatccaattcggtaaccgttggatcaacttcataattttactggaagtctatagtgcataaccctacacttgtgaccgctgggatctgctaacaaacatccagaacctcttctgcactactctttcacaaccacaaaaaca

SEQ ID NO: 156875 - DNA, 303 bp, Glycine max
agcttggcaaaactgtactgtatagtttgttattgtttataatgtgaaatcaaaatcatattattcatcattgtgactatgacttctgggtggatagtcactggtaaattggaaccaaccagaagcagttacatgcccaaaaccttgaaaaggggacattttccttcttgaggtaattcacggtggtgaacctttcagaattaaatggatggaacctctggaggtcctgggttttttaattggaacctaagattaaccccaaatttttacaaaatgggttcaataaatccaataattattaaa

SEQ ID NO: 156876 - DNA, 431 bp, Glycine max
cgtgcacgtgccttaacatctaattcatcatttgttttcccttgaacctactgattctattgaaactaattataatcatcatactcgtttccctctatcatttgttgcagtttattttttatgctgctacaaagttttgtgtggaaatagctactcatcaacatgggtgttgtgtactacaacgttgcattgattattccaccggaaaatacaaagatatgctggtaaaggaaatatgcagacatgggcatctccttgctcaagatccatttgggtaataagcctttgggatatttggatttaataaatcttttttcactgcttaatttggaaatatacatataattgtttatcatataatgcttttcttgtttggcacacgaattttcttttaattatgtgaggaagagctttagtgcatatccttaaat

SEQ ID NO: 156877 - DNA, 395 bp, Glycine max
tgcaagcctgaatagaacggcgggacaatactctactatcttctaacattcaacggtgtacctactggccacacacaaacacccgcaacctcacactcgaactatatacccttgaaatttcaaaagatatttttttatataaataccattaaatagaatcattgtacaaaagtacagttggtacataaacttaggtcaaacaaaagtaaatgagcatgtatttttatggacggacttgtctgctctgaagctggtatgtcataaaaataaaaaccattgatctttttcatcttcaacctcttttcatgggatgtcaccacactttcatcaaacgctaggcaagttcatttcccatagatcatggaagtgtgagcaacttgtgcaagccataattg

SEQ ID NO: 156878 - DNA, 383 bp, Glycine max
  unsure (1)..(383): unsure at all n locations
actaagcttgttcatctggattctgctgtgaccactctttattaaccacacanaatggactacagttatgtcatccaatattcaagcacactctttccacgtacatgagaccacaatgcatcggttcagaagatttgctgctggcttggaaattgacagactccatcaagagctgcatacatgaccatcattacccataagaacacacagcattgactatttttgaaagacacacacccattttttgtaagatatgtacgaaaggacagtcgaagataactgcacaagttgtcttatgcgtcttatgaatgtctgtcatcgcccttatggtagtaaaactagtacaattagcaaggtatcttttgccctgcatgaatattaaa

SEQ ID NO: 156879 - DNA, 396 bp, Glycine max
  unsure (1)..(396): unsure at all n locations
nagcttatcacccttaccaatgattgttatatgtttttaatggaagtcaaaagcatgatagtgccctgataccgtcaactagtcaataggttcttgagtgggttcagggcatcaatattgtatttggaaagacctaaaagaaggaaaaacgtaaaacttccatatagaagaagagatcgatattgtttgatcttccatactggtttgatctacatgttagacattgctattgattttatcgctgttgagaaaaatgtatgtgatagtgtcatcgacccgcttcttaactttcaaggcaagagagaggatggtttgaatacttgccaagacctagtcgagatgggtatacgagaccaattacatccaaggtttgatggtaacaaactatacttgcct

SEQ ID NO: 156880 - DNA, 400 bp, Glycine max
  unsure (1)..(400): unsure at all n locations
agcttacccgtcaccgtcttcttacctcacncacgcctacaccttgcatttatctacatctcctacctccattgttgccgactgatagaattgcgacattccttattgtccgcacaacttcttaaatcaaaaaggttttcaaaaaagcaaatgtttttatattataatttcttttcgcatcccttttttaagcactccccactttttgttcgtcaaattttatttcaatcatgtccttgtacacatgattatttccaaactattctacatactattggaaatgaacttttggaagggttacacattcccacaaattaaatcttagaagtgctaatcttcttatcatctccaaaactaaattctgcaagcgataaccttaatcaccttccacacactatgg

SEQ ID NO: 156881 - DNA, 406 bp, Glycine max
agcttctggtgggacatcttgacttgctttccaatctgacattcaccacagattctgccttcttctattttcagattgggaatgcctctaacagcacctttgtcaatgattttcttcatgcctcttaaatgcagatgtccaaatctttgatgccatattctgacttcatcttctttggaggatagacatgtggaggagtaactggtttcttgaggtgtccataggtagcagttgtcctttgatctgctgcccttcattagaacttcacacttctcatttgtcactaagcattctgactttgtgaagtttacattgaatccttcatcacacagctgactgatgctgatcaagtttgcagtcagtcccttcaccagcagtactttgtccagactacgaagtccatcat

SEQ ID NO: 156882 - DNA, 492 bp, Glycine max
  unsure (1)..(492): unsure at all n locations
ntanaatctgaatcaaaacattcaatgactgctggtcatcgattatcatccatgtgtaatcaattacacagtgtaaaatttgaattcaaatctctaatggctgttataaatcattttggccactggtaatcgattacatcctctggtaattgattaccagagagtaaatcttttgaaaaatacattttagcttaaatttcttggccaaacctcttgttgtttcaatttggaattcccttcctaaatcactagagatcttcttgatgatgtatcttgaatctcttggatttttgtcttgatctaaacttgagaagcgcatgatcacatggcatcaanagatcatgatcatatggcatcatcaaaacatcaaagtcaaagtctttgcttctacaacgtctcccttctgtatgatgacaatgtacttcctgaaatcaagatacaagatagagtatatgcaagagataacgttatgttcactcattccatactccc

SEQ ID NO: 156883 - DNA, 394 bp, Glycine max
  unsure (1)..(394): unsure at all n locations
aactagatgccttggttaatctgttaacccaactagccatgaatcaaaaatctgcacttgtcgccaaactctgtggtttatgctcctctgccgaccaccacacagaccttttcccttctgtgcaacaatctgaagcaattgaacagcctgaagcttatgctgcaaacatctacaatagacctcctcaacctcagcagcaaaatcagccacaatagaacaattatgacctctccagcaacaggtacaaccccgggtggaggaatcatcccaaccttagatggtcgagtccttcacaacagcagcaacaacaacaactntatttccagaatgctgctggcccaagcagaccatacgttcctccaccaatacagcagcaacaacaacaacaacccca

SEQ ID NO: 156884 - DNA, 452 bp, Glycine max
  unsure (1)..(452): unsure at all n locations
ctgagacgcatgtgaaactntggcatcatcaaaacattcagctcgatctcttgtctacacaatcatctttcttccttctccattccgctaccattgaacttcaagaagcaaaggactccattgatgaagaagattcaaggcctacaagctccacaacgagctacatcatgtgatatcagaacatcttcatctaggctatgctcttttgcttcctctatctttttgttcgatcaattcactctaattctttggtcttcatcttattcttcaagtatatcctccattgctctgtcggttggtgctgcttacagcatattcaaaaaataacccgttaaatttaaattacccttgtcttgcttttatggtcaaatctatagatcactctgaatatgttttggtgatttagtctatattttaatataacttctggcaaccttaactaattgtcaaaa

SEQ ID NO: 156885 - DNA, 394 bp, Glycine max
cgcttggatgatgccgcgggtgcaataacttgtgctttatttcttcttccacttaacacctgttatatgttttaatatgaactgaatttgatgacaaaaaaaaaaaacaaccaaatttgcactaaatcataaaaacgaatgttacattacgaggatttacacatatttcacgctggcatgaagcattctgagtgaaacgatggaaaacatggaccaccataatagaacaagaccggatgcaatcgaaaacactaactatacaatgttgaaggcccttcgcaacttcctaaagcaagaccccactgactcaaccaaagatggtatggaccatgtcaaaatgagtgccactcagaatacttctttgaatgatgaaacactacattgcctaaaccct

SEQ ID NO: 156886 - DNA, 455 bp, Glycine max
tgggaagaagtacgagagagagttctgacgatgtgtcttccacaatcaaagacaggtgaaggcaaggcaccaatttcttccttccatcaatttccagatgagtccctgagtgaaccgcttgaaagagtaactcgaagactcctacagaagcaacggacctcattgagaatattcacgtgaatattttcattgatgatttgagaccgtagtccaagcaattgttagacacttctactgcgggaaagattaagctgaagactcctgaagaagcaataaaactcattaagaatatggctactagtgatcatgctattctgcgtgatagaagtcatgtatccaccaagagaagcatgctagagctttcttcacaagatgcatctgtggcacagaacaagctgctagctaagcagctggaatcactcactagacactcagcacgctgcccacatagttac

SEQ ID NO: 156887 - DNA, 451 bp, Glycine max
  unsure (1)..(451): unsure at all n locations
tgaagaagacaattccagaatgaggcgagctcttgagcatagtatgacacggctaaatagaatgtcagtggattctgattntcttgtcgacaggttggtatgttcttcatcaaagtaatttttaatgcaatatcagcttctggccatgtgacttgggagcccccaacatttctagctgattggttctaaatgaagatgaaatgcttgaagggactatcgtctacaatatttctgtatctatcattaatttcctaaaaagtttttaattggaaatggagtcttacaagtaatgttatttgtcatcatgttgctcctgcttgagaataaattaatatactaatcttgtatttctgacaggcgcattgtgataaaatactgatcacttatttccagagaaaccacagcacagacgtatggaagcccactaacttgcgtgcttaagataccttat

SEQ ID NO: 156888 - DNA, 396 bp, Glycine max
  unsure (1)..(396): unsure at all n locations
ctgagcanattaaacgacaataactgtgtactcgcatgtctggttgagtcccgtattatattgagacgctcgaaattgaatgtcgaagctctgagcaaattcaaacgacaataaccttttactcggatgtctgattgagtcccgtaatatatcgagacgctcaaaattgaatgttgaacctctgatgcaattcaaaggacaataactttttactcggatgtctgattgagccccgtaatatatcgagacgctcgaaattgaatgttgacactatgagccaattcacacgacaataactctttactcggatgtctgattgagtgccctaatatattgagaccttcgaattgaatgttaacctctgagcacattaaatgacaataacttttatctcga

SEQ ID NO: 156889 - DNA, 194 bp, Glycine max
agatcgatgaacatccatggatgaaccgtgacaacggtgaaattttccaaattcctacggaaacgtaacagaatcgttcctgcagggcatcggcttacatctttgttaccggatcaagttattgaaactaatttgaaagagacataagagcctaaagggctgggcccattccttcgtggcttcctcccgtatta

SEQ ID NO: 156890 - DNA, 388 bp, Glycine max
agcttgctatagaaactagatgtgattctctatggtttaaatttcctggtcttgttcttgaaccatgaattgtgttgagtttacgctcctttgagctctgtcctgttattttttgtggctgaaacctaaaccataaaattcttacaaaaatattaaagtagaagaaaacctcaaaaatctagagtgacttgttcacctattgtagttttgtcatagaagtcatgtctagtcatgaaacttatcacataagatttcttatgttgcgctgaatcttattttcttgtttctttgtctaactcatttgttcatgagtgtatgaaattattttaccctactatttgatttgagtcaaatctttcatgttaattagtgcttaacatgttcatgc

SEQ ID NO: 156891 - DNA, 313 bp, Glycine max
  unsure (1)..(313): unsure at all n locations
gagagaagcttgcctcgacaagtccaccaaggacaaggtggccgaaggaactaataccgccccggagtacgacagtcaccgctttatgagcgttgcacaccagcagcgctatcaagccatcaagggatggccgattctacgggagcgacgcgttcacctcatggactacgagtatactgatttccaagaggatatanggcgccggcggtgggcaccactggttacatccatggccaatgctgatccagaaatagtccttgagtttcacgccatgcctggccaacagaggagggcgtgcgtgacatgagatcct

SEQ ID NO: 156892 - DNA, 399 bp, Glycine max
  unsure (1)..(399): unsure at all n locations
agcttancaaatggacttgggtgttgccctttttcatcatatcttccgtaatacttatcacctctatcatatctaataattttcacatttatgtctaattgccattttacttcattgtagtaaatttttaaggcatccattgcctaagaaatctcgggcaataagtagacataaccataacgtgaataatcatcaataatggtgataaagtatctttcctttccgaaagaactaacatcaaaaggtccacaaatatcagtatgcacaatttcaagaagcagagtgcttcttgtagctcctttctttgtatgttttgtttattttcccttaatacaacccacacaaatatttacatccgtcaagtctacataaggaagaatttcattctttattaatctt

SEQ ID NO: 156893 - DNA, 463 bp, Glycine max
cttggagtagaaacatgggaccaactcattctatttcataaagaaagtcgtatctagtcaaggtctgagagaccatacaagtttcctaacgatttctaattatgtgggccattaagtctatcatatgctgacaatagccgagaagcccatgaatctcttcgggggcggagtaggtgtctgccatcgccttggccttggctaacaagcggggaagttcttgactcccgttcaaggtaagagcaaaccaatccatccacatggttgcctcttggtgtaaagagtcgatcacccttcctctagcctctttttctgcgtatacttgagcatactcgtccgcgattctatgctcgtgggccgtggctagacctaactcttcttggtacttggcgatgatagctagcatgttggtctccgtctcgcataaacgctgagactagcttctttcggaccttgacaagcaact

SEQ ID NO: 156894 - DNA, 314 bp, Glycine max
agctttaggcgctcgtctaagaccatacttgttcttattcaacttgtagaccatcctttccttccctttgatctcaaaatctggaggttgagtgacataaaccatctgatccaagaactcatttacaaatgttgatttcacatccatgtggaatacggcccacccatttctactagccaaagctatcaccaatctcactatctccaaccttactggagcaaattctttaatatagcccacccctggcttttgcttgaatcccctcaccactaaccttgctttttgtctagctattcacatatttggattcaatt

SEQ ID NO: 156895 - DNA, 415 bp, Glycine max
tgtactagctcatatttgagtatatcctttgatctatgggttataaggttgtataacttatccactaaaatttcctgctgtctcttgtaaaccacatgcagcatttaggcggcggttttggatctggttttattcccatcgcagattatggaagtgagtttacaaagggttctagccgacaagctgtgaggctattgtacacccgtcagaaccattatgatcttctactatgacgaaccatatcaaccaaggaaaaagaacaaacagagtgggagattccaatgccattttgtaccgattgctgtatgttacaacccacatattttgcctagcgatctatcttactcggatgagctgtgaattattgacaacacattatcttcgattcccgtggattacaagaagattccagata

SEQ ID NO: 156896 - DNA, 380 bp, Glycine max
agcttaaggcatgtttccatattcaaattttatattgtttcgaaagttgtttttttatcaagtccatgcaaaaatatctaagttcatttggtattagggaaagtccctcgttgtttccattcttaatgttttccaaaaaaaaatccttttgttgtgttctaatccaaaaaaatccttttatacattaaaaaatattactcatgaataaagactcgaaattaaggtttagaaatataagacatacgattaaagtaacacaaatgaagacaaagcttaaaaacactaggttgcctcccatgagcgcttcttcaacgtcttttaagttggacgttattgttgtggctgagggttcactatttcatcatccataattcttttct

SEQ ID NO: 156897 - DNA, 368 bp, Glycine max
  unsure (1)..(368): unsure at all n locations
tctttgagaaaacttccttgagaagctagagcttagttacacacacccctctcataactaagctcacctccttgagaagccttcttaagaagattcctaaagaagctagagcttagctacacacacatctctaatagctaagctcacctccttgagatgagaagctagagcttagctacacaccccctataatacctaagctcacccccataacaaaatacatgaaaatacaataaattccctactacaaagactactcaaaatacctcgaaatacaaggcaaacaccctataatactataatggccaaaatacaacgcccanacanagcaaaacctattctaatatttaaaagatagcgggctatac

SEQ ID NO: 156898 - DNA, 400 bp, Glycine max
agcttaaagagtgaaaatgacaaaccgtctttttaaattacattttttagtatatgatataatgcatgttctccatgtaaaagctaaatagcctgctcattataaatcacacattcacaccaacatccaacgattaaaaaacagatgaattaaaaaacaggaaacataaatcccaacattttctcaaacaaataaaaggcagatacttttctttacattatacctagactactttagaaatggaaccatctttgactgaatttcatcatacctagtggtacatcagcaacaagaaatctcattaaaatggcatataagcatacaaggagtgtgtgtgtagcaagaaagtgagagaacctttcttttgaccactacacaatatcctcatccattttattga

SEQ ID NO: 156899 - DNA, 291 bp, Glycine max
ctaggtgtgtattacagtgttctgagactccgtgtgtcttttctgcctggcttaatcatctttttatagctgtcggagtggacttggtcctgcgtactcacacaaagcctgcactgctcgcttaacgcaggtgcctgtattcgtgctaagcctgcacttctcgctcagcatgggtgctcgtatttgcgcttaacgtaactctcttcgcttagcgccagtgcatgttctctcgttgcgcgttgagcgcgtcttgcgttacgtctaatgccaaaatcttcattcttcatattt

SEQ ID NO: 156900 - DNA, 392 bp, Glycine max
agcttaagaaatagtcagagaagttgttggttaagcagtttgtgagacccaatgtgtctccatggggagcactagtgttgttagtgaagaagaaagatataaccatgaggttgtgtgtagactaccgccagttgaataaggtgacgattaagaataagtacccttttcctaggatagacgaccttatggaccaactggtaggagcttgtgcatttagcaagatagaccttaggtcaggttaccataagatctaagtgaagtctgaggatatttcgaagacttgttttaggacctgttatggtcactacgagtatctattcattcccttcgatgcgacccactcttggtgtggttatggattacatgaatagagtcttttactcttacctcaa

SEQ ID NO: 156901 - DNA, 375 bp, Glycine max
tcttatccacgctcatcttggtggtgaagctacttcttccatggcttattccataatggacggagcctgctctcacctcttttactttgtgtttcgctgcatttacatggtggaaaatcaccattaaaggacctcattgaagctgatagatccagcctccatataatccccacaagcaagcgttcatcaagtggtgatcagagcacaatagctgcaagtaggtgctacttaaaccttcattaatcttttttctttaccttatcttccatatttgattcttcatttatctgcatgtatctcatcacatgtattgttctctatgttgactacatgattctttagagcttccaccagataaacttgctatagaagtta

SEQ ID NO: 156902 - DNA, 391 bp, Glycine max
  unsure (1)..(391): unsure at all n locations
agcttcttccctattttgctataaatagggggataatttatataaanaagggttcagcctcttaggcacttctctctctctcaaaattgctgaggaaaattatttccgtgaagaaaatccaagctgagacgcttccgtaacgtttccgtgagtaattacgcgaagattctcgaccgttcttcaagattcatcattcgttcttcgttttcttcagccttcaacgggtaagtacctcaaaccgaacttttcaattcattttatgtacccgtggcggcccacattttgttccatgtatttttattctcgttttcttttactttttatagctccttttgacgtgcttaagccatctatttaagtcatttctcgcctaatctaaacataaaataaa

SEQ ID NO: 156903 - DNA, 214 bp, Glycine max
  unsure (1)..(214): unsure at all n locations
nntatcctcaacacctcacgtcctccattcttgcaagcctgacataacctatacttctttatcggcttgttccttttcggtacaatgaaaatctctgttaccttcccccattttttaaaaacaagcaaaagatcctccaaatttttttctaaaaaatccataaaatagcaattggtgatatcctccctcgtcttggatgatcagagagncttgc

SEQ ID NO: 156904 - DNA, 418 bp, Glycine max
agcattccagctttattaattaaaataagggccacctttttctttaaaagtcctctcacgaggtggaggttgagccacgttctcagtataaaaaataataatggaatgcttaaaatcaaaatattcaaaatcacccttaacagaatgcttaaaatgtacagaatgaccaagatgcacactatgcctaactaatctatgaaaggttctatctatttcaggatcaaagggttgtaaatcacctggattgcccctagtcatgcactatatgctgcaaataatgtggttctcaacagcacctaacaagggggtcaaactacagctatacacaaacaatatcaaaataagctgaaattttgtgaggaacaccctaaaatcatgaaaagatagcacaaaaattttcaaacaaaaattcaaagtc

SEQ ID NO: 156905 - DNA, 486 bp, Glycine max
tataagaacacacatgcctcaatcatttccaaatatgcatgtgaattaggatgcatcaacaagaatcaagccaaggctattgtgcaagcaatcaatggggcaaaacacgcccaatgattatgatgatggacggctcaaattctcacaaaggtaaactcatcactttcaaattgagctttcaaaactatcatgacatgtagaggagaatcaaggatttcaagtcacaaaatgtcaaaaacttttattttcaaaacaattacccatttcttgaacatatcctataattcatagaaaaacatgcaaagtcgtacatgcacacaaaattgatccaaaatattaaactaacaatccgacgaaactaacaaccttaaccaattaaccaaaccaacaaaactagcaaaaccaaagaacacttcctcccccatacttaaacaacacattgtccttcatgtgcacaattaaaacaattaatcatcaatagaatcg

SEQ ID NO: 156906 - DNA, 403 bp, Glycine max
  unsure (1)..(403): unsure at all n locations
agcttgtcaaatccggtcatggaaagacttggctactgccttcattaggcagtaccaatacaacacggatatggctcctgatcggaaccaacttcagagcatgaccaagcgggaacatgagtccattaaagaatattctcaaaggtggagagacctagcagcccaagtcgtcccgcccatgactgaaagggagatgatcaccattatggtagatacgttgcctacgttctactacgagaagctgataggatatatgtcggctaactctgcagacctcctctctccccgagaaagaatcgagttcgggctaagaaaaggcaagtttgaatatgcctncaacgtctgccccaacaacaatagaagagccccattggtgggcacacggaaaaaaggatggagatac

SEQ ID NO: 156907 - DNA, 426 bp, Glycine max
  unsure (1)..(426): unsure at all n locations
aagctgagcggaaatatcaagatgaggcagaatggcggatatggttgactcggaccacgatgtggaggataaacggcgcttggacaaagcaaaggtgctcatcaagaccccatggcggccgatgatacaacacaccatcaacgtagtcattcgtggtgaaactttcaaggtacatgtagctgaagagttcgggggcgtatgccgtgaccataacgagcacaaacgaatcataggaggatcgtcggaggagatcaactccgacgacatccacctggactgcaacacactcgcctcgccggaaaaggggtgtctngaggagcttcagcaccgtcaaaagggggactggtcggcgatgaacgaaatcgaataccactggacaactggtttacccaccggtcgaagcaattgcaccataccactgggcat

SEQ ID NO: 156908 - DNA, 404 bp, Glycine max
agcttctggtgggacatcttgacttgctttccaatctgacattcaccacaaattctgccttcttctattttcagattgggaatgcctctaacagcacctttgtcaatgattttcttcatgcctcttaagtgcagatgcccaaatctttgatgccatattctgacttcatcttctttggaggatagacatgtggaggagtaactggtttcttgaggtgtccataggtagcagttgtcctttgatctgctgcccttcattagaacttcactcttctcatttgtcaccaagcattctgactttgtgaagtttacattgaatccttcatcacacagctgactgatgctgatcaagtttgcagtcagtcccttcaccagcagaactttgtccagactaggaagtccatc

SEQ ID NO: 156909 - DNA, 464 bp, Glycine max
  unsure (1)..(464): unsure at all n locations
cgcttctcaaggatgactctacaacttgctgactgctctattactagaccatatggagtaattgaagatgtgctggtcagagtaaaacattctatcttctcagcagactctgtggtaatgggtatctgtgaagataatgacattcatgtaattttgggaaggccattcatgttaactgcgagctgtatagttgatatggggagaaagaagttggagttgggctttgatgattagaaaattgattctgatttatttgttgaagacaagcctgctccataacaaaatgtttgcttacaggtaatggaagtgggtaacgaggttctggaagtaagaacgaaaatgtgatcacccatcgacgtaaaagcgctaagctaatgacgctacaaagcgcttcttggtggaacccaatctaacttctgtttttttcttttatgatngataatgggacctgttataatatacat

SEQ ID NO: 156910 - DNA, 407 bp, Glycine max
  unsure (1)..(407): unsure at all n locations
actttactggcggccacagagtacatctattttttaccncaacaaacttatagaactgaggagattggccgaattatgatcttttattgcagcactttagtgtgatttttataacggacgaactaagtcactacataatcttaccacagccttgcgacgcaagacaagccaatcatgcgggccattattcaataagtatatagagtacttttggttctgccctgggaagaaacatatgttgctgaaaaaaacataaaactaaattccctcaacacaacatgaatcagaaatattcttacaattcccaagacctccccaatctttattgatgatgcccctctgtgcagtgatctccaatgcatctacaattatttgtgtcatcctctttggatcttgaacaggctata

SEQ ID NO: 156911 - DNA, 391 bp, Glycine max
tctgcgcacgtgccattttttttgtggggaaattgggatcagtgttgatgatgaaggaatcaaccgtttggttctgactgaagaggagggtgatggtatcattgttgagtttatgaaagctagttcagtttctgcttgaaaaacgaaacatgtgaaagaatcgtgtactttctcctagtgtgaacgagagagagtatgtatgataaataaattattctaaactaacgactatgaactatgacagcccatataaacaagagataatactaagggttaaagaataatctggtgaattcttctcgtcggaaactggttttatatattataattaacgttgcataaagggatggatccatgaataccaaatactttcaaactttgtaatcatagc

SEQ ID NO: 156912 - DNA, 288 bp, Glycine max
  unsure (1)..(288): unsure at all n locations
ctctctaatatgtgaggtctggagaattgcggacatattgaaaacgcgaaaaacacaagagcgtagatccctattggttgaaatggcatgaaccttggcttcgatcgcgtggatgtaacaagcccgagagacaccagaagtacaggcccaatcagcgcccttgatccgagagagggcaactttggcggntacaataatgaggcaatgacgtgctacacaacaaacattaaggaaaggatagtgcattacagacgacagcagatgcaaagcctacagcgtgaatacaaa

SEQ ID NO: 156913 - DNA, 394 bp, Glycine max
agcttttgaaaccaaaattttggcatttgtatattgattaccggaacctggtaatgcgattaccagagagtaaaaactctggtaacttagaaaatcttgagaaaactcttttgaaaaacaaaattgtgctatgtttgttttttgaaaaatattttcaatacttcccttgcgaagtcttcttgatttcttctcttgaaacttgaattcatcttttcttgaatcttgaaatcaaatttctcttaattcttgaattgttcttgactcaatcttgaaatcattctcttggactttttgtcatcatctttgttatcatcaaaacaacttgaatcaatctggattcaacatcatgaagcttgcttctacaatctccccctttttgatgatgacaaccctg

SEQ ID NO: 156914 - DNA, 391 bp, Glycine max
ttgatgatgtaaaaaagaatcaacacgactcattctgcttcaagattaatacacgattgctctaacaaacaaagccttgattcaagaattcttcatgaataagccttgtgtcacaatgaaaggattcaagtcattcaaggcacatgtaatcgattaccaatacatgtaatccattaccaatggtttgaaattgtgtaatcgattacacatcatatgtcatcgattaccaaacactctgaatgttggcgaattcaaattttaaatgaatggccacaactgttcacgataaacaactatgtaatccactacactaattctgtactcaatacctgagaggatcttcatgaatatcgctacagtcacatgttatcattgaatttcgatgccatca

SEQ ID NO: 156915 - DNA, 391 bp, Glycine max
  unsure (1)..(391): unsure at all n locations
agctngcggagtccactctgattccttgattcatgagagattaagccttgccattaattcggcatatattaagaagaactgctggaatcttgatgatccaacagtaactttcagaggacccagcaaggccaagggaaagaggtttgaggctcccccatctactgaggttcccccttcctcagctccagcaccaattccatctgtcccatctgcttccacatctatttttccagcttcattctctgcaggaccatctgattttacttttacaccacaaatgctgcactccatgctctagagaatccatagggggcagtccattatcatgcagagccttcagggctcgggcttgccctccattatgagaatggaggagtttgatgcttacgtg

SEQ ID NO: 156916 - DNA, 385 bp, Glycine max
  unsure (1)..(385): unsure at all n locations
ctatacacatactaagctctgctgtgtaaatagaggcagcaccacacgcgcttattattatcttctcatccaataccacttgtactatntctgtctatctcaataatatattatacattatgcctctcagcaaaaagtacaaaaaaaaaaataaaaaagtaaacacagtacggacgcagagatataaacgttgccaacctgactgcctgatctgtgtgtatcccaacaagtacaaaatctccaagactcctatcaagcctcacgatctatataacataaacgtcagttaacacaatataaagccacacatctatttaaacaatctaaatggtagtagcagcctataactaaattatcgcatgagcctactataatttatcattgt

SEQ ID NO: 156917 - DNA, 406 bp, Glycine max
  unsure (1)..(406): unsure at all n locations
ccgccgcatgcaagctngagtcttagtataattgttgcatattttctatgaatcgcttattatgaaatttgtgagtgttgttaggtcttgactcgagcgtgtgattcgtgtataatgtgattgatgatttctataatgaattttaaatgataaagtggtgaagtaacgtggattatagtaggttgagctatgctataaatacttctataatttattttgattacgactttgtttatctgtattttatttagaaatgtgataactcactcattgtgtgatgtttgtgtttgaatcatgtgatgatctcgaaccttgtgtttgtgggaccagatgactaggtggatgactttaaagaacatcgtgctagaggacgctgagacacaatgctctgatatgatgtgacatt

SEQ ID NO: 156918 - DNA, 486 bp, Glycine max
  unsure (1)..(486): unsure at all n locations
ctataaaactaagctttgaacaagtgaaatgatcaagttatatgcaaatgtatatgttaaatatttctcatgaaggtagaaatataattcatttgaacccaataaagggatatacaaataatcaaatttcattgattatcaacagtgtcatgtcaatctaattatatcaactatattgtatgattgccattctgattcaattgaaaacataataccttgcattttttgctttggccactgctctcgatgaaaccaaaagtcaactaaaacacctnttggtctagggaaagtaccttactacgacatccttcttgctgacccaaaataccaatgatctttatttacatggggacttttaagcgattgtaaattaacacgacatctagggcctttatagacctattaatttgataatatcgatatcatcatacaacgtgaacaagttgaatgaacactatcttttatctgctgattgacaccattcaa

SEQ ID NO: 156919 - DNA, 474 bp, Glycine max
  unsure (1)..(474): unsure at all n locations
tgtattaacgacaatcattaatgcttaccattttgtattatgtgatgtctatgaatgtttttaatgtttaccatcacatgtaatattaatgttgacattgtgtttacacattggaacgcccaatgtggctgcatgtataaaagcggataactaataagtgccctaaccttatcatccatatggttattagacttgcattctgtcttacctaatgaggaaaccatatattggaatcaatacaaaatacaacataattattaaatttttttgaacaatgacaaattctgtgacataaaattaaattatgtaacggtaaataaaataacgactgaatactattttggaatagactaaggaaaagtgaaatgggtctaagccacatggttnttatttntaagatcttcttgatatttaaaaagttctattaaaattcaataattaacanaaatgatatggtggtggnctcaaatcttt

SEQ ID NO: 156920 - DNA, 400 bp, Glycine max
agcttgtaggattatggggtacccatcatatgtggtactaggtggcggtcgggcgatggtgcacaacaagttttccacatccacaaagcgcgcataaacccaccatcccctgttgcccacctccaactgagctcacgtactcccacgtagcccatatcctcgtttctctcaacaccgggtccccatcaatcctcccaagctttcccaacatcaaagcaaaacaacattcaaacagcacaagctatcacagccaagcaaaatagagcagaagcagaaaactctgccaaaacaccaaccaaatcacagcttttctcacttaaagaccccagtaacaattccttcgttccggttcattaaccgttggatcgactcgaaaattttactggaagtctttagtaca

SEQ ID NO: 156921 - DNA, 419 bp, Glycine max
  unsure (1)..(419): unsure at all n locations
tatgcacggaaaatgtaattatgaaattgagatgcccttagaaacaccatttcctagttaaccatgcattaggtaccatgttcaattattttgtttttaagtgaaacgggtttatgatcccaacatggttggctcgtggtgcctaacacatgaaactaagaatgtagtgtgaagtttcacgcttcccccttttttgtttttgttttgtacaggaaaacgcaaggatgagcaaacatgaaaacaaatggtatgcaattttgcagatcaaaaagtttgttgaacgcatatgcatgatgatgccatgactcatgcaaaatgtgaggctggaatatgataacggacaaatgcaggatatgtccattatgatgttatgaagagatgcttatgcgatgcatgatatgaatgcattntacggacac

SEQ ID NO: 156922 - DNA, 292 bp, Glycine max
atctatccacacccctctattaactaaattaacttccttacaaataattacggatgaacataccccacccaataatccaacatcaaccatattcccccttattttttaaatttttttttccgggggttcctcctatacctctttgggttgtccctgtgtgggaaaaaacaacggctaaagagagttaaacatctttcggggaggtgtacgagacttaaatatccatggcctttgtacctgatggtgcccaccctcataccctgcatgttgcgtaatttcatgggggggcgca

SEQ ID NO: 156923 - DNA, 443 bp, Glycine max
  unsure (1)..(443): unsure at all n locations
tttaacttcacagcaaggaagcatgacttatgcctanggatttttattttggctntaaatgggcatgaatattacgacatgttcgagagggtttttactagaatttggctgccccatgaggaataccttgcacctaggtagcatggaaaatacccttcaacggtatgaatatatggcataaaaataccttgcaaagtgtgaatgagtaccaagaaaaaaggcctttcaaaatatgtatatttgtggatacgtagtataggaccctttcttttttaaaaaaatgtacccatgtcaaaagtggcacgaggatgctctccgaatgaatatatgatgtggaattgcccctcaagcgtatatggatggcctgaaatttccttttcacaatgcaagtgtgtgcaagacgcgagaccggatctccaatgccatatatgtataataaatgt

SEQ ID NO: 156924 - DNA, 406 bp, Glycine max
  unsure (1)..(406): unsure at all n locations
agcttaccatgtgagagaaaaatattagcttacaatctttctcatgagacactagcagagagtgctctgataaattagcatgagcagcccacagatgaagcccacttggacaagaagtttgaactgtcaaaatatacatatattgatctaaacatgcaaataaatttaaatagcatntttacaccgcgaccgcggaaattacaaacaattactagcgtacctctagccattgcaaattgaacgggaagcggtgcccacaccaacctgaaagacaattttgttcttccagacccttactcactctgaatagatggtgtatttttctgaatagagaacggggtttggtgatacaaaactgacagcacccatcttatttatagagcttgtccatcacagagctctcaac

SEQ ID NO: 156925 - DNA, 430 bp, Glycine max
ctatcggttcgaacaaagttggctagagaaaacggaggaatgtcttgtcattatctcaagttcttgagtttcgagtggtttcaagagagttagctcacatttggagaaatgggaagacacaaattctggccagatctctaaatacataaagtctcctaggaaaaagctagatgagttgcaaaaaaccccaaaccgagatcacccttatgaagtcaagatcgctggatatggaaatggatgactggttaaaggtggaagaattaatgtgggagtaacattctagggagttgtggctcatgcatggcgatcgaaatacaacctttttttcgtacaaaggattctaagaggtagagaaccaattccatatccaagattaacgatatcgagggaaacatattcaacgaggaggatgacatagataaactcttat

SEQ ID NO: 156926 - DNA, 212 bp, Glycine max
  unsure (1)..(212): unsure at all n locations
aagttctgggtttaggtgtctgttcctcttcatagagtttggcccaccaaatttttctgaggagtcatgtatgtgaatcgtgccatgacctcccttctgatatcacgttttaattctcccaccaagcattcccctcaacctccctgtttaatttcttgcactcgattacctaaagccgngaactcgccgtactatgactgacctgacaccaa

SEQ ID NO: 156927 - DNA, 248 bp, Glycine max
ctaagctctacatgcatgtcacaccaatctactatgacttgatcttctgatgcaatctattcgattgaaaagataatatatattactcttctaactgagtcgacaactcaaaaaaatataacagagagtcaatgttaagccaatcaaataagtcattttgaatacatcattactatcatgcctttcaaaaagaacaaaatcacgcctttgtatgcactacccaaccaaacattaaaagaaaacattcc

SEQ ID NO: 156928 - DNA, 398 bp, Glycine max
aacatacgctcagtcaacttcttcaatcttaggtgccgcgccagaatctgttctctcagcaccaggcatgtcatcatgacccgtaggaacatctacaccatgtctagcagcagcaccctggtacattttcgcaatgatggggttgcagatcccttccaacttcttctgcttgtcctcaaactcatccacttccgccaactggttcccctccaaccactgtatcgcatcctccacagccttctcaatcttctccttctcatgcgggctcaacttctctccaatcttctcatcctttattgcgtttctcatattatacgcgtaattctcaagcgagttttcagctccaccttcttcttaacctttatcctccgcttgtactctctgcatccttacatctt

SEQ ID NO: 156929 - DNA, 333 bp, Glycine max
  unsure (1)..(333): unsure at all n locations
cgggcgatggcgcagacaatttcacatcctaaatacgtataacccacctccctgttgccccttcactgagccacctactccaacgtaacccttatcctcgttcctctcaacgctgggtccccatcaatccttccaagcttccacaacatccaggtaattccacattcaatcatcatggactaacaaaattaaacaaaacagggcaaacgcagaaaactctgcccaaaacacaacttacaatcacaactnttcacatacaaataccccaataacatttccttcgatccaattcgtctaccattcggatcgactccataattttactgcaagtct

SEQ ID NO: 156930 - DNA, 209 bp, Glycine max
tccttcaacggcggagtgacaccatggagatgccaccgaacgcaaacgagaagacgccaagggaggccccattcactacggaataagccatggaagaaggatctccatcaccaacatgatccttggatgagaagcttggaatgatgcttcaatggatcgaaaagaaagacggtgataaatagagaggggggagcacaagatcgcaggaa

SEQ ID NO: 156931 - DNA, 272 bp, Glycine max
  unsure (1)..(272): unsure at all n locations
nttctctagctntagaagaactgaaggcccaattatgtatactggagttctctcaccacatagagcctcgatgtttgatttagaaagtaatggtacgcgttcctcggctgagtcaggttgtgcctccttggcctgacctgatgattcctttttacttactttttcaaaactatcaagtatgttactaagatcaagaactgcagattttaaatctttcacagatatcccacgttttagaacacgcttttcttcatttggagcccacctacaat

SEQ ID NO: 156932 - DNA, 390 bp, Glycine max
agctttgatggtgtcgagaagaaatctcatgtttgtcatcatcacaaaggcggagaatgtgaatgtatgtatacatgactctgatgatgccaaacaagaatctaacaaggctgcttcaaatgataagcatttgcttcacgaataattcaagattgcttcaacaaacaaagccttgtttcaagattcactaaagaccaagccttgccttaaaacaatgtgctttcaaaacatgcacggctctggtaatcgattaccaggaagtgtaatcgattaccacaagacagggttgagaaatagctgctgaaaaaggctctgaatttgaattttccacatataatcgattaccatctgtctgtcatcgattaccacccccgaaactttggaaattca

SEQ ID NO: 156933 - DNA, 385 bp, Glycine max
ttctactagcatagttaaacatatatttatttattaatgcggtgtgctaccaacaactaatataaatattatcaacataaattgttagtacctggaaatgaccattttgccctcatgtcactacaagaaaatcatgttttccgacggactacttcccacgaacaaaattgtcagaatgttttgattcttcaacggatattatcgaaggaattaattccgttggaaattttgaaaatactgacggatttgaccgatagacaattattctgtgggaacattaatgatttcaacggattatacacatggaataaggatccatcgaagaatacaatttctcgaaataaacgagctttaccctagccgtctgagtcattatggtggtttc

SEQ ID NO: 156934 - DNA, 397 bp, Glycine max
  unsure (1)..(397): unsure at all n locations
agctnttnataccaagcgagaggagtggtgttattctacattaagtattggtaaggtgattcaatttgcaagttgcaacaactccttgcgagctgtgaaacaatcatacaaatattgcgttggcccgctttgaccttttttaatctttaatttttttttgctgaatgctttgacctattagtaaagcttgctgaaccagaatgcgtccggtctgataaattttgaagatttatgacatatatagatgaatttaagttttttttttcacgttgagaaaaactaatgacaatcacgattaaatatattttttaaattacgttaatactacgtcctttttaataggattgaaacagcgattaagaccaacaataattaatacaaaagctgtgatattgaa

SEQ ID NO: 156935 - DNA, 277 bp, Glycine max
aataggcgattacataatcgcttcaatattatagcctttattacataaccatttcaatattatgcgcgaacctattgaagattaaaatagtttttttttatgaattacatatatatatctatatatatattccaggtgggacccatttcatgttctctctaccaaaaaaattcctgttctacattataccccacataatatatatatatatatatataaagaacaatggaactgaatggaataaaatatatttaattctttagtcaacctaataata

SEQ ID NO: 156936 - DNA, 398 bp, Glycine max
  unsure (1)..(398): unsure at all n locations
agctttagactagaagcactatatttgtttgtaaanccaagcaagcacttcactcttacctttttattcatcccaaatctgcagagcgtataaatagttcatagaagaatacatctgtatttgatgacctattcaaactgcttaatctagaattaggagaacacaccagccacttaagttattggcttttatcatctttatgactgtaatttcttaactacatantgcaaactgcaatacaaaatcatagacaaattacatttatgcttgacaatnttgctttccacactggttccccctaatatccttctgtttccaccacttggattgtttatctgcaagataaatctattcttgcacaccacggatatgttatcatgtaaagctcgagctctgat

SEQ ID NO: 156937 - DNA, 399 bp, Glycine max
ctgagcatagcagcctgtaataccttggaatttgtcaccaggccacccaaatccggaggcaaacaaaccttgtctcacaaaacaataacaagttttgatcagttatccctttcccctgcccagatgaagttttgaatccaagagtcaattatgttccataatgtaatcggccatgcataaatgtgaaaccaataaagcaacaagctctaaataacatatttgatgagaaagctattgggtgatcaacgctcttacaaacaaaattatccacactcacaacggatcgtgagaatacaaccaagagtatcccatagaaaaataataacacataacaatttaacatgattcgacacatcttgcctatatctaccgagctcgttcacaaatattttttatcat

SEQ ID NO: 156938 - DNA, 230 bp, Glycine max
gacctgcagatggcaactgctaattacctgtattgttattttgatttcaacacaccgggaggggcaagtcttaatactatcttcacaacaatcttataacgctcaaataaccataattgcaaagttgatccattatcacgtttttaccaaaggaagtccttcactgctaaagtatatgcctttcaaaactcatgtgttcataagacataaacctttttgcttccgaacaa

SEQ ID NO: 156939 - DNA, 392 bp, Glycine max
  unsure (1)..(392): unsure at all n locations
tattaaaaagaaaagatcnactacaatcttatataaatcttagagataaaatcctacatactggctactaaaaagataagaggattcctagaaataagctattaaagatataaatcatatcccttaaatctccacactatcataacaaattcatatcatatgtcaacaacatgaaaggaatgttagttcttattcttaagttgtattgaaatatctcttactccacttttttctattatgggttactctttctgataacattatctttctttcacctttcttactactcgatcctttctttgtgcttgtctaattaaattagcaaatattactgcttgatgcatatctttgttgtactctgccattgacattgatacatctctacggcatac

SEQ ID NO: 156940 - DNA, 355 bp, Glycine max
  unsure (1)..(355): unsure at all n locations
agcttgctcgtggagctcctatggatgctttatcttcgagcttcaatgaggtccttcggtggtgattttccaccatggccatgccgccnatggaaaaggagaagacgagatgggaggcaccctccactacggaataagccatggaagaaggagcttcacgaccaagaacgtgccttggataacaagcttgcagagtatgctttaatggaggaaaatcaagagagaaggggggagcaccacattgaaggaataacaagagggcgagaagtgaaacttcgacgcgcgtctcataagactttcattcatcaaagttgcaacacgcatcacagatgcttctatttatacactaggtagc

SEQ ID NO: 156941 - DNA, 334 bp, Glycine max
tttgcctcacaacaagtgtttccaagagatcaatgctctggtaatcgattactacgcagtgtgatcgattaccagaagacaattctgaaaaaaaacttttaaaaacggttttgaatttgaattttgaatcatgtaatcgattaccagtcagtgtaatcgattactagaagacaattttgaaaaacagcttttgaacagggttttgaattcgaattttgaatcatgtaatcgattaccaggaacgacactctacaaaacactttaaaaagtcatgaccctttaaaatataactgtataatccgataccacaaacctataatcgattactagtgaa

SEQ ID NO: 156942 - DNA, 278 bp, Glycine max
  unsure (1)..(278): unsure at all n locations
agcttgcctcanagaggtccaggaaggatattgcttttcgaaggaactagtttcgctcctgagtatgacagtcaccgctttaggagcgttgtacaccagcacggttttgaggccttaaaggatgggcgtttcttcggagccacacgcctatcttaaggaccaacaaataccgatttttatgaggagatatagcgccccgggtgggacatactgggcacccccatgggcacaattcagccacaaatagtccttgagttttatgcccatgcttggcccac

SEQ ID NO: 156943 - DNA, 487 bp, Glycine max
cttcatttgatccagcagaggaggagcatacaacctattttactcaagtcacacccacggaattcaagcacaagagactcgatcattgccatcttgaaagaatgctaaacatgaaaaaaaggaaatatgcacaagaaaatttgaagaagtttcaaatgaaggaatgcaaatctgttagcacactaatgaatcaaaaggagaagttcagaaaagaagaaagtgttgataacattgatgaaggatattatgggagcttgattggatgtctaatgtatctcactacaacaagaccaaacattctattttctcaaaagaacaaaactggaattcttgttgacaatcaagtagctattgctattgcaaacaatcccgtgtgtcatgggaagactaaacatttcaatatcaaggtctattatttgataaagatgcaacacagtggagaagtgaacttacattactgcaagtttaaagatgaactggctaacat

SEQ ID NO: 156944 - DNA, 394 bp, Glycine max
agcttagccctagaggggatgtaccttttattgtttgagacgatcaataaccatgcctataggttggacctcctagaagagtatggagtcagcaccacttttaacatttctgatttaattccttttgcaggtggagctgatattgaggaggaggaactaacagatttaaggtcaaatcctcttcaagggggaggggatgttgcaatcctccctaggaagggaccagtcactacagtcatgagtaggaggctccaagaggattgggttaaagctgttgaagaaggccctagggttctcatgaacctcacggtagatttctgagcctatgggccaacgttgggtccaattatctttgtacatattagattaggatgtcattatatttggtacttgt

SEQ ID NO: 156945 - DNA, 409 bp, Glycine max
  unsure (1)..(409): unsure at all n locations
tggaaggggccacattcaagtgctccagcacagcacacttattagcgatcaagggtagaatgacacccaggacctcaaacaaacatctatacaaggtaaagaaaggcagaggaccagacactatcctcaagaacgggaggtcatcactcctgcaagtctgaacggccagcttacaagagtcctcggggttcgctagcttcacctagcgctagctagacaataacaaggtcagacaagacttatattttagcacgtcatccctcacccactcatagccagcaatggctggggtagacaaggatgacctaacactcatgttancgtctatgcggngagacaacctcatatatccggtaccggcgccgttgccagctctttccgcacctcggaagcataatgagtgatgcaa

SEQ ID NO: 156946 - DNA, 405 bp, Glycine max
  unsure (1)..(405): unsure at all n locations
agcttacgctaaattacgctcagctgtcgttttctatttttgctaagtctagtccaacaagagggatcttagatgaagcttactttaagttactccaaacctacgaaggctatctaaattgagcctagtccaacaagagggatccgaggatgaagcttgcattgattcactccaactagggatcgaggtttantaatctatgctatcccatacaacacaaaacaacgattgattacagaaacatccttatatacatcaactggtctgttagaacttaccaacacttctacctacttgtgtcaactctacctactcttattttcactgtctttatcctacacccaccttacttctattttaaaccatctattatcaacgtttttttccacacagccctcatttctg

SEQ ID NO: 156947 - DNA, 362 bp, Glycine max
aaaatttaaatgatgtcaatgtaataattattcgttccgaaagaaaacactcacagagaaaaattataaattcttttatcatttaacctcctcaatatactcataattaagaattctcaatggttcataatcctcaaagtattgaaccttgtcacataaatgcttatgggtcaatcaatttctctagaagtcatctagggtggtcttgtcaccttcgaagcaatgaatctggtgacatatatatttacacagtagtcggcttctctagagggtcatccaagacgaaatacactcaaatttaaattactaacaatatatttaagttctgcaaataaatttgagatagtttacagcttatcgca

SEQ ID NO: 156948 - DNA, 335 bp, Glycine max
tgctcattgttcttgctgaacactcgctatccagctgatattttgcttcgctggtcagcgatgctaatcgacaagtgcaccgagtcgcataactaatataaaatggtcacaaccaagtatggaatccacagggaacttgttctactcacaaaatatatgttcaatgagtaaacatttgtgtaaagcaagtaaatgctgagttggattcatgtataaaaatctagctaaacacaaattaaaacatctagcagtcgacaagtaaaaacagtcaagtaaaaaacacgttgggtcggcctactgaatttcctttgatgccgcaaatatttttctctatt

SEQ ID NO: 156949 - DNA, 387 bp, Glycine max
agcttgagaatatgtatgtgtattatattattgtttcaaaatattctggtgaatttcattatttgtattgtattacatataagcaacgtagcttcttgtactaatttaacctgagtttataaatttcacaaaaataataataataaaaaatcattattctacatcgtttgaattataaacgatgtagaaaatctcctcattctacattggttgagcgataaacgatgtaaaaattcttccaattctacatcggctgactgaagatcgatgtagaaacctttccattcgtgcccattctacattggttcagggataaacgatgtagaaaatctcctcatgctacatcggttgaacgataagcgatgtaaaaaacctttcttttctaca

SEQ ID NO: 156950 - DNA, 372 bp, Glycine max
tgctgacatatatgatggcttattgtctcataatgatgatggaatggctgaaagatcatgcttgggtgaaattgaggaaagcccttttgaaactaagcctgatgcttctgtatgtaatgtcaatgatgataatgatcagagaatcattaacttggatgatgacaactttgacaatttcaccctaagccaacttaaagcaagttgcaaaacaaggaagcgaaaacactcacaaggtctcaactcctctaaaataaacatgaaagttgaagattcatcaatcctggaggactacagagaggagcaaatggcagcagatgattctgatttcctggagactatcagtagctggaaaactaaactatcaaagaatat

SEQ ID NO: 156951 - DNA, 377 bp, Glycine max
agcttctaaccaaatggacttaccttttatttattcctttgatagcccttttgagccttgtttccctttccttgttttgaaactcactacaagccttaagtgaaaaaccatgatattaccatatccttaaggaattttggagctttggaattgttttgggaataagtggggggggtctttgtttcattggacaacttgttttgttgactatgcttcatgatgtattctgggccatacttgatgtacattgtatattggttaaatgttggacatgctgaatgaaatgttgtttctcaaaggccccctccccaattccatccactccacgaaacaggacaccagcagaaagccctaagttgagtgaatacatctaaatg

SEQ ID NO: 156952 - DNA, 398 bp, Glycine max
  unsure (1)..(398): unsure at all n locations
tactctanattacattgatgtctcgatttatggtatgatgctatatgccatttttgctttaagagtaacgtctcactgctaaaactaactttccaaatgtttgccttcgcatgaatggccctcacgaagcttgcctcaaagatgttcaccaaggaccaggcggccgaaggaactagttccgccccggagtactacagtcaccgctttatgagcgttatacaccagcagcgcttcgaagtcattaacggatggtcgcttatccgggagcgacacgttcagctcaaggacgacgagtatactgatttccaggaagatatatggcgccggcggtgggcaccactggtcacttccatggccacagttgatccagacatagtcctttgagtttatgccaatgc

SEQ ID NO: 156953 - DNA, 313 bp, Glycine max
gtggcctcagatatcttaagaagtgggggctgaattaacatattctaaactgtttcccctaattaaaaatctatttcactttttactcccgttatgaattcccttaatgaccatcttcttaaatattaattcccatgaaacaattcgaatatgaatataaagcactaataaataaaggagattaagggaagagaaaatgccaactcaattttatactggttcggccacacccttgtgcctacgttccagtcccaagcaacccgcttgagagatccactatcttgtaaattccttttacaagttctacacacac

SEQ ID NO: 156954 - DNA, 412 bp, Glycine max
  unsure (1)..(412): unsure at all n locations
acacatgtttatttttattcagaaaattagagtgtatctcttttatcttagtgagagtgattctcctaaattcttgagtgattcaagaataccctggctgtatcaaaggactttcacaacctttgtgtgttgccctcactggaaagagtgattatttccttcctttcatcttcacccttgttctttcaaaccacaattccagaaaatccacctcttcccagaattatatcgtgtccataactcccattntacgcactcaaattaagtgattcttgagcctaaattgaatntcaaaacgagacctttcacctcgttttggaatcacctcatttggagccctgtagcttcacttattgtcatttctatnattatgtccagccaccacttaacctatgttttaccattccattca

SEQ ID NO: 156955 - DNA, 401 bp, Glycine max
  unsure (1)..(401): unsure at all n locations
agctnatcatttgtgtccctttgtctttctcttttcctttcttttctttctatctcctaatactcctaaatgaaaatgtacactaaacatttttcttcatttggtctatcaacataaaaggaggccacagaggatcatctaatcataaataataaatttattaatttattaacttttataaaattatcttaaaaattatatcacgaataatttataattgaataactttaacatctccaccattaaacttcaatcaatatgacaatcgtttatattattatttgcggaatctgaaccttaaccaccaccatataaattaatttttcactggatcgagaaaattctcaatgatttataattgctcacaatgcacattactaatgaagttaaaactaactcat

SEQ ID NO: 156956 - DNA, 398 bp, Glycine max
gttatcgatatcccttatgaaatccctacgacgtgccatgctcggagaaaataaatgaaaaaataatcaacaactaatagtaatcatctctctagcacaatctagcaacatgatcaaccacaaaattagctcgtagattagtcttttgtgcaataccaaaacatatagagaaaatgctctccttttgtaggaagaagaatctagaagataagaaagtaaactaactgatcatgcagctagcgaagacctattgttgtttctgcttctttattcgaagtctttgtataatgttgtccattaaaacttttaagatcaataaattataaataattgaagatcatgccgataaagacatgtacgaagaagaattcgagataagacatgaactaactggtcat

SEQ ID NO: 156957 - DNA, 202 bp, Glycine max
ttttttacacacacgcccttctccgctttctttaaaatctctcccgcagacgcagaactcatgcagaacataccatcttattgttaaagaaaacttcgatgaaccttgtcctaggttacagcctgccataatgccctgccacataaaaaagagctaaccgctaaaacgactgctgaatttgatcattattgccatgaacgaa

SEQ ID NO: 156958 - DNA, 450 bp, Glycine max
tcgatgacagacaaggactcacacaccaaccaacatgtattccatcctttagagcgagctacttcactggtagacatggaagtccttatgataactgcgaaatttgaattaattcgatagttaattctggctaacaatgatcgcaatttctttactttacttttgcctttaatgaaacaataaacaaatcaatatctttgcacgtttttattaccacaattcaaaagaagaatatttcaagtgctttataggaaaatcaacgtaaacactggaagaaaaagtcttgaagacaagttggaagaattggacaattcgcttaacgcacgatactagcccaacgcgtgtgcttgcttaacgaacaacttatgtttaccgcaaacacgccaccagaaacctaacgtcactagcgcgacactgtgctaacgcgtgttaaaccgcattctgctcact

SEQ ID NO: 156959 - DNA, 361 bp, Glycine max
agcttggtccccaatgctatgttcatgctctcccaaaatctagaggtaaacctaggatctctatcagacactatgctagatggcacaccgcgtaatatgacaatctcactaatatacaaggaggtgaacttctccacggaaaatttgatattaatgggaatacagtgagtagacatggttagtctatcaataataacccagatagaatctaaacctctgggggttctaggtagtcctacaacaaaatccatggaaatactgccccacttccactggggtatctccaagggttgtaacttccctgaaggtctctataacaaatgccacaacaagaggaaatgaaagaggaacaagtgggaac

SEQ ID NO: 156960 - DNA, 308 bp, Glycine max
gactttagtttttatctgcaatccctaatctctgaacgaactattcaagttccgaattcgcactttaattatctcttaatccgctcctaaagatagatcgcccaatctgttgctaactgcacattactctgttaaagatataatagatttatgtgcgcacgtatttcgggcaagatgtcctggacatcgtatccgacatcgtggatcctgcagcttcaattcttcatttgacatttcatcttgccttgcgcattgtgcagaccaatctgattccttgacataaccgtggatatcatgtgcacgaactc

SEQ ID NO: 156961 - DNA, 400 bp, Glycine max
catgcaagcttaaccataaggtagatgcacacaatatggttttatgcacctaaaatacgccctcatgtagcagcttttaaacttgaagtgtggacaatgcaaagagttgggaattctcaaaggagatggaggttttttataagtacaacataaaagatggagagttgtcaatggccttataccaatgtgggacaatggtcttgcaaccaaacagccccttgcttcattgggaagatgttaaacacattggcttgggcccaattttaaatgatggaagaccattttatactgaagaaaggacacataagtgactggtttactcaagaaggaataaatggaaggatagtgcaacagtgcaagagagaaaacagttaggggtagggaggtgattcttctggaa

SEQ ID NO: 156962 - DNA, 419 bp, Glycine max
  unsure (1)..(419): unsure at all n locations
ntattcgcactcgcttctactcctgtcacttcatttgtctcatcttcaattattcctccaacaggaattatggattgcattgcggaagttgtcgttgaagtatctattgctcatgttgttgttgttgctcataatgatttttcgctaccactcggggtggtgctaggcttgttgatccacatgacgatgatattaatcgtattggtacttcttcaactaagccaactaataggcaatcgatttgcgtgccaatccttaaagtttttttttacccataattaaacatacgcttcaaataagtttgattataggcaacttttagattagctaagtgaccaactggtggtcactattgacaatttgacctttgcttatgttcttcttcccatatttaaggatgaaaacactctaaatacttg

SEQ ID NO: 156963 - DNA, 399 bp, Glycine max
  unsure (1)..(399): unsure at all n locations
agctngaaaaaattaagcaagttggttttttgtaaactcgcaactggtctctttatcctttgccaaccaacaatgccacacgttagaatatctccacagaagattgctgcacatccctaacagtatattttcattgaacttcttacaggaagaaaagttcatttgggcacaccttagctcaacgtcacaataagaagctcctgaaaggagcaaacttgagaattaagtctattgacatttggtaaacttccaatacatttctttaaccttttgaaagcttacgtcttgagagaaggaatgttttatctcagagaagactccaaccagctttatgttccattgagcacctctctttcattgtccttctacattttcgtcttcttcccacctccaatggat

SEQ ID NO: 156964 - DNA, 350 bp, Glycine max
tagaatattgcagcaatattatatgccatcagcccgtgaactatcacgcttagttggagtctgcaaagcgccaatcattcaacactctgctgaaacaatctctggtactacaactattagaagctctgatcagcagccaagatttcccgaaacaaatatgacactgactgatggatattctccgccaacgttcaatatcgctggcgccgcggaatggctgtgtctccgtttggatatgttcgcttctatcacatttcgcttttccttaatattcttaatatctatctcacagggatccatagatccaggtgagttattcgtatctgttacaaatcagaacttaatcctct

SEQ ID NO: 156965 - DNA, 460 bp, Glycine max
aagcacctgagctgcagctatgctgctatattacaatagaccttctttacctcagcagcaaaatcaaccacaacagcacaattatgacctcttcagcaacagatacaaccctggatggaggaatcaccctaatctcagatggtctagccctcagcaacaacaacagtagcctgctccttccttccaaaatgttgctagcccaagcaaaccatacattcctccaccaatccaacaacagcaacagccccagaaacagccaacagttgagacccctccacaaccttccctcagaagaacttgtgaggcaaatgactatgcagaacatgcagtgtcaacaagagaccagagccttcattcagagcttaaccaatcagatgggacaattggctacacaattgaatcaacaacagtgccaaaattctgacaagctgccttcttaagctgtccaaaatcccaaaaa

SEQ ID NO: 156966 - DNA, 419 bp, Glycine max
acaggcctatatgacatctcggactatgattaactccctctaacctccaagtaccagcaaatccagaggtaactctacaaactctcaaagcatcactctttatcactcatagcactacattctcactatctaaccctaggttaactctaccctacatctctagcagatttccataagcaattgcaaaacacagacatcacatgcatcatcatagacacttctaaaccagaacgggaaagcgtgactcacacctgacatgacgaagttaacatgtttcagtgagattctgacagataccatccagaacataaacctagttgactacccatgatatttccaaaacaatcccacagaatatgtgagaagatgctaccaacctgaaattgaagtcccactatagggcgcttacgactccgaaa

SEQ ID NO: 156967 - DNA, 448 bp, Glycine max
agctcgaacttgaaatagggtcaggattgatcttatcgttcctcatggctcttgaagaaataaagagaatgaaaagtacaaataaatattattttatttgtaaggattaaaaatacatttaaacctaaaaattaacacggattatgactattttttataaaattatattgttgttttttttttaattttagataacttatgattgcaatattggttaatgaatataaacttcaccaaaagttaatagttgattttatataattaaaaccaaaagttaatattttataatatatatatatatatatatatatatatatatatatttcatttcagtaagaaaaaatcatattatatataaaaaaagctctatataaatttgcatagagggtctcaactctcaagcaccttaagtcagcctactagggtcatcacaggtacccgaagataa

SEQ ID NO: 156968 - DNA, 356 bp, Glycine max
  unsure (1)..(356): unsure at all n locations
cgccagttnttacgtatactttggaagtatatatattaacatcacgcacttatatgcgagtaagagcagctcttctacgtggtcattgaaggaagatttaagtgttggtattttttgttaacttacataatgttgctctgatgatattccgtgaagaatgttaacgacttctcgttttagccatcctattggtcttttcattcgccgtacatatatatgaattatacttattgcatgagaatattctttacttacttgagactattctaatttgtgtgcctttaccagaatatcttcacgctacactggaatgacaatggtggatgcctctctatgagaaataatgaccacatgtg

SEQ ID NO: 156969 - DNA, 449 bp, Glycine max
agcttgtcatggtatatatatgtttcctaatagtctactctgtgttatataatacttagttaaatatattgtgtatactaaaagcaaatgcttaacattatacgtctttcgtactcaaggatataccaacattgaagggcggactgtcttgatgtagcgattttaacagcgatgacactatctttgttctatatattaactgtcatggagatggagctgtctttgtaaacaatctttgtcattatcagctgaaagatgaacatgttgttcgataggaaaataatgaaataccttatataaatgtattgtaaagttttaagaataaactgctcaaattgccagcagtttgtcgtagaatagtagtgcaaattcatgatgtaaatgtattagaatacagaataaacctatggtgccgttattaattgttatgagaacatcttgggtcttgc

SEQ ID NO: 156970 - DNA, 82 bp, Glycine max
tagcacatgttgttgtccaatgaactcttcttgacagagcatgtgttgaacaggaactcttagaatgatgtgtagaatgaat

SEQ ID NO: 156971 - DNA, 264 bp, Glycine max
gagcaacgcacagctcacattctctgtttcaactcctaaacaatttttaattggtggcttctggatttatgtcaatacatcaaaatcttatgttatacttgtgtcatcatgtaatgcttcctctactactgattcgataaaacagataaaaaaacactaaaaaatgaaacctaatatcatcaacgacataaagcataaattctagtattagtatcaccaaaagttttggctgctggttttgtgcccattcctcacatttgatct

SEQ ID NO: 156972 - DNA, 429 bp, Glycine max
agcttctacttatgtggcagggcgggcttccttttccttcttgtctccaacgcgaactttgaccattgttcttccttcccgcgatgcttcttttcatgtctgcctgagtgggcttatagcctaaaccatacttcccacgattaccttgggtatttatcagtctagttatgccgccgttgttttttcctaaacccataccgggctcataaccgttccccaacataactcgggccatcattaccgctgcatcggacagactatgctgcccaaagagggagtccacggaggaaatgctgaccacctcaaaagactggaaagtagtttctaacgattcttctgcggcttccacataaggcatggaggatgggcagcttaccaagatatcttcctcgcctgacacgatgaccaagtgcccctctactacgaatt

SEQ ID NO: 156973 - DNA, 437 bp, Glycine max
agcttcgaagggatgaaagggatgtgttgagggtgatgagtatgatattagaggataagttgaaggcttgcaaaggtcataatagagtttgaccgagcagttgagttatacagacgagaacatcttgacaatcattgatgggtataaagaagagctaagcctagctgccagtcataggtagagactagaggatgagcacgcgaaggtagtggctctgcaagcggaaggggaagcaagagagagcgtgatataatcattgcacagggaagccgtgaaatggatggatagattcactctcactctgaataggagtcaagaacttccaaggcttttagccagagccaaggaaatggcggatgtgtacccagctctcgaggaagttcatgggcttctcgattattgccaacacatgttcgaatagatgtgcctcataatta

SEQ ID NO: 156974 - DNA, 408 bp, Glycine max
  unsure (1)..(408): unsure at all n locations
tcatgatgatgaaccaagcaattttgatgatgccaaaagcccttgtgattgattcacgacttcaagatcaagcatcaagaatccaatccaagattcaagattcaagagaagaaatcaagaagcaacaagtcaagacttcacacatgataagtattaaaagattttttcaaaaaccaaatagtatagttntgttttacaaaagaattttctcacattgtctaagttaccaaagtgattactctctggtaatcgattaccagttatcagtaatcgattaccagtgaccaacttggtttccaaaatgttttcaaatggtttgcaacgttccaaaatgattttcaacagtgaatcgatacactatatattaatcgttacagtgaatctgacgttgaatcaatctattggaga

SEQ ID NO: 156975 - DNA, 152 bp, Glycine max
tttatgtatgatagctcatatctaatttctgccatcattcttttattatcactattccgcgtatcaacttattttaatgccacataattgtcttataaataaccctcccccttcctctcgagtttgtggtattataatacactgcaacagcc

SEQ ID NO: 156976 - DNA, 423 bp, Glycine max
agcttctgaagcatctacaagatgtattaactgtgttagttgtcagccatgattagaggttgcttcaatatactctattagtttttgtttatctggctattcagtcattattgatgctcatttatcgttatatgtatgggtttgtctttctcgtgattgatgatttgcgaataccattagaaattctaacttcgattgttacgaaagactgatttaatgtgagcttcaaaattgtgctgatatatagatggataaacacatgacgttgatacttatatgactgtggtgcttcaatgtatacacttggttttatgtaggcaacaacttctagaatgtggaggctatgagctcgtgcacatcatgaactcaataatcacttatgtgataatgtatggctggaagtcagtaaacggaatcttgagc

SEQ ID NO: 156977 - DNA, 437 bp, Glycine max
tctcgccattgacaatggcggtacgcgtatctcgccagtacttctggcgacatccatggtaaaacagaccccctctgtaaatacttataaaagagacccctttacgtaaatagtttgtaaaggtgaccctctacagtaaatttaccactttaaaataacgtttggacattggattttcatataagttatggatgcttatataaatagtgtgttggaagcaatgcttgataacccatttttatgcatctaagttaagttacaagaatatacctattacttccttggacgcatgtttagcttgcgtagttcaataaactatatcaattcaccaaagtttaatatctcttattatcattagaactatgaaatctttacgggcttcacattattcatgtttttggttccggcaaaatgttttgaccaacttgccatgtaag

SEQ ID NO: 156978 - DNA, 407 bp, Glycine max
taacttgagcatctctgactatgaatcatgcaacataatagggaacaaattcatagtaaccctcgagtacaagaccgagatgactatagagtagtatcccctcatatttgatgtccccattagcaacagacttagcatatgttttattttcatttgaaaatgttgtgacatgtgtcgcactaaatccaacgaataaacacaaaatacatgttataacaaggattctgtgataaaattatgtgcacctcaggacgtaattctataacatgttcttagttgagtacgaggctttacaccttttgcttgacaatggcaaaggagatgcacatatagagtaactagcgagctatctaaataacctctcgtgacattagaccagcggaaagaaacatgatgaccaaactctg

SEQ ID NO: 156979 - DNA, 325 bp, Glycine max
  unsure (1)..(325): unsure at all n locations
ttcggccgacactggcgtgttcccatgcactccggcgagaacacattgacccacctcgatcagataaaaagacattaaccaccggtcttgatcggaaaaaatgctggttgacgtcggccatgatagatgaccgatcgaggtctgaaaataaaagaatcaccggatgacgccgatcgagcatatcctaattgacatcatccaaatattatccagggattggatagaaaaaacaatagctgataccagtcgttatgtagtcccgactgacatttgtcagccgacattgcacagtatttntttcaaacgctggccgataatatatctt

SEQ ID NO: 156980 - DNA, 344 bp, Glycine max
gctttacggacctatcaaactcagctaggaggattttggagacccgctgttgcgatatacgaggatatgggctacgtgcgagtacgtgagcttaattggaggtgggcaacacgagatggtgggtttatgcgcgcattgtggatgtggaaaacttgtcgtgcaccatcttccgaccgccatctagtaccacatgtgattggtaccgcataatcctacaatcttgtgatgatgaattgttgaaagaggagacttcctgctttattgttgaccacatagtggtacctggagatctgttgccgaggttaggagaccatggggacgtcatgtggggtgctattgcccaa

SEQ ID NO: 156981 - DNA, 420 bp, Glycine max
taatgacattgattatgacatcacacgacttgctatttttagtttcattttttcccaagaaatatcgtgtacctttcgtaaaagaattctgttttcgtccttttgtaaggaaaaaaaaaaaaagagattctgattgaatttgagtaaactattttctaaaataatattattatgagtgacaacttttttcttatcttaacactctgttttgctgtatattaagactctgactcaaaatcatcagacttgtctataaaataagtatcttctacttccatcccagtaaaaatcccacatgaaggacttaacaaagctagattactttgtgactcttataaatataactaagatgattattacgaacacatgctatgggtttatcttcgaaaaggaacacatgaaataactcgattttaattt

SEQ ID NO: 156982 - DNA, 376 bp, Glycine max
agttggaagcaaaacaagggagcaagctttgggaacactttcttcaagaactaaaacaaagtcctttaaccttttccattttcattccttttactatcctcatgtatttctggattggattcttctccttgcatcagtagttctacaaaatagaaggagcagaacacaaggaaattagattatttaggatagtcacatatctcctatgtgtttaatttaagtagcttgaaccattacgtactaactctgatcactctatatgtctattgcttgctatatgattcgctaacacttttgacaaggaactggatgagatgaagcacataactactggaatttgtcgcaagttattattacatcattgtagtttatgttt

SEQ ID NO: 156983 - DNA, 201 bp, Glycine max
gggatgacccctaaccaacatttactaatggaacattatcaactaatatctcgcgattggacataaaatacaatctcatgatcgccgctaatcgtacgttccaaggctactttataggccacatgtacagatctcctcccctgccctgctggtaatacttgtttaatggatgtagacgttctcgtgacctggcgaccatct

SEQ ID NO: 156984 - DNA, 448 bp, Glycine max
  unsure (1)..(448): unsure at all n locations
agctgtgcttctacactaccagcaacaatatgttatcaaagagaanaactctagatgagggttcactgttatcaagcaagtcggagacccagcatgaccacaaattcacctccactccttatgttcccatggacccgggtatagggccccttttcaactcaccgtgtgtacaaatagtgttggtgtttatgtgcatcaaatgaataaatatctatctcatgcttacatttcaaaagcacactaaaagcaaaaaagagttatatacaagaacgtaaaggaaataaaaggaaaccgacaaaagaggaagtcatgatattgcacgagattagaaggcctaactctctaaaaacagtccccagtggagtcgccaaatgtcgcaacctacccttcggcgggagggcgacgcggngctcacgggtgtgtcttccaagggaggaaggctcacgga

SEQ ID NO: 156985 - DNA, 447 bp, Glycine max
  unsure (1)..(447): unsure at all n locations
tgtaggccttgaatcttcttcatcaatggagtcctttgcttcttgaagataaattggaagcggaatggagaaggaggaaaggtgattagagatgccacttcaaggagaagatgagtcaagaacaagttcaccgccatatgaagatatggatataagagcttaaaggtacgagaagatgagtggagggagagggagagaaagggcacgacatttatgcctcagatgaggtatgaaatgtgaagtgtaatttctcanatgatcaaagttaaaaatatgcacacacaaggcctctatttatagtttaagtgtcatacaaaattggaggaaaatctgaatttctattcaaatttcacttgaatttgaatttgtggagccaaatttggagccaaaatttcactaattaggattgcatcatcccttccnctctgaaaatgaattgacctcaaa

SEQ ID NO: 156986 - DNA, 448 bp, Glycine max
  unsure (1)..(448): unsure at all n locations
agcttgtgcaaatcaaatcactcctacgtctcatctctagcatgcattttctttctttacccactcctcacgtgtggttttttagggaaaaaacaccataactaaacgcgccgcatgggatccctatcgcaccagatccaaatctagaacgatgggtgatcaagaggagacacaggaacagatgaaggccgacatgtcggctctgaaagaacaaatggcctccatgatggaggccatgttaggtatgaagcatatcatggagaagaacgcggccaccgccgccgctgtcagttcggctgccgaagcagacccgactctcttagcaactacgcaccaacctccctcaaacatagtatgacggngaagggacacactgnggcacgatggcagccctcacctgtgatacaaccgagcggcttacccttatggattgccgcccaactattca

SEQ ID NO: 156987 - DNA, 399 bp, Glycine max
  unsure (1)..(399): unsure at all n locations
ctgagggaagaagccacaagaacacttatatgaaggtcggatgtataagaagaacatgtattgctctccctcccttgaagaactcgtgcacaacaatggagaataaaggttctaagtttgttttttcttggagaagcgaggacatataaggctttatgcttgcttcaaatgaaacttggttacgcttaatgttgacaagatcaaactgatgacatgaataatcatttgatagccataatgctgccatatatgcatattctgccttttgattntttaactagaaatgactaaagtcgacttaagcaaaaatggtaaaaactccttctgtaaaactgaaaaccttatctaatctttagatagtgtgctacatccttggatatgtgactcataggaacttgc

SEQ ID NO: 156988 - DNA, 448 bp, Glycine max
agcttctccctataacagcttcaaaattctatattcagcacactactgtaatttcaattcactcatgttaggtggcatccctaaattgggaatctatagcctggccatgcttaaatgcttataattttctagatgttccagcttaaatgttttgactgttctcagcatgagaatttacttctcacggtgctcaaacaagtgtgttgggtacagctataaagatctgagtcaatgaggttgttaggcaagcttgtctctgggccctctctttaaattccttgtttcgtccatttgggctcccttctactttatttgttaatgattaatggtgatgggtatttatatatccatttggaaaatgactaatagagtctttgggttagagttcaactgaacataacctactttttttaaaacaataaaatctaccagtgttattacttctcta

SEQ ID NO: 156989 - DNA, 440 bp, Glycine max
tcatcaaggatcttgttgaaatcatccaattgttcagtggttgttttttactctgtcatcttgaaggtgtacagtttttgcttcaagcatagccaatttgcaagggactttgtcatatacaatgactccagtttcaaccacattgaggttgttgtcttttctcttgcaacttctcttaaagctttatctccaaagcatagaatgattgcactgctggctctatcaatcatctctgatttctcctttgagcttagagattcagacatcctttcttctcctttaagagcttctgcacagccatgttgaatcaagattgcttccatcttgactctccataacccgaagtcattgtcccctgaaaacttctcaatatcgtattatgatgatcccatctttcttggtcttgatcttgtccccatagacggcgccacttgttgatt

SEQ ID NO: 156990 - DNA, 447 bp, Glycine max
agcttctaccccattttcctataaatagggggagaagtgaatggtaaaaatgttcagccctcctggtaattcgagaatcacttgaaattagcgaaaaaaattgtttccgtgaagaaaatccaagtcgatgcgcttccgtaacgtttccgtgggtgatttcgcaaagattttcaaccgttcttcgacgttcttcgttcatgcttcgccgttcttcggtcttcagccggtaagtttccgaaatcaaacttttcaattcattctatgtacgcttagtggtcctcatttgttttcacgtgcttctattatcatttcatttactgtccgtacccccttttgacgtgctttattcatttgcttaagtcattttgtcgcctaatcaaatactaacataaatttccactgatcgcttgaattgtaatatccgataatttctgttaaaatgaaatc

SEQ ID NO: 156991 - DNA, 446 bp, Glycine max
gctctctaagtgaaatcaggtgcagccatctccctaagagtcctctcaaaaggtggaggttgagccatgttctcagtatgaaaattagtagtcgaatgctcaaattcagaatgttcagaatcaccatcaacataatactcagaatgcttaaaatgctcaaaatgcacagaatgatcaggatgcacactatgcctaagtaatccatgaaaggttctatctatttcaggaagggttctaaatcacctggattgcccctagtcatgcattatatgcagcaaatcatgtgtttctcaaacaagcaccagtggagggttaaaactacaactatagtcaaatgatatccaaatgagctgaaattttatgagtaacaccctaaaatcatgaaaagatagaacaaaaatttgcagactaaaattcactaactatgaaaactgactaaagaaagt

SEQ ID NO: 156992 - DNA, 204 bp, Glycine max
tgctggtggagcttcgatgtatgctgaatctttgagcttcaatgaggtccttcaatggtgagtgttcaccatggacacgccacggaaagtcataagataagaggataggggaggcacctttcactatggaataatccaaggaagaaggagcttcaccaccaataattgccttggataaaaaacttgcacaagattctttcctgg

SEQ ID NO: 156993 - DNA, 369 bp, Glycine max
  unsure (1)..(369): unsure at all n locations
agcttctagtcgtgcatagaccttctctngggtctgactatcaaacgttgcatctgtgcattcatcgcattcactaacagacgttgagcgccgtccaactgatggtactcgtgaccaccaccacctgctacagccataatttaacaggaaaaaaaaatgtgcaataaaaactattaaggtttcaagacctcacaacactctactcacgtctgttagatgtgagtacactcgtgtttaacgctctcaatatgctatcgtgaaatgtattccctcttgccttttaccactcgagtggactcttaagttcctggatggaccaaattacacacacatggtaatatttaatcagaggagagactatatgatgat

SEQ ID NO: 156994 - DNA, 156 bp, Glycine max
gtggtgctcgtacatggagataatcctcgccattttatggcatcagttttggtataaggagggaatgttgataatcctgcacctctgcccatacttattttctgcccatgagctccattatacgcgctcaaatttactgattcttgggcctatatt

SEQ ID NO: 156995 - DNA, 441 bp, Glycine max
agcttgcctcaaagaggtccaggattgataatgttgccgaaggaactagttccgctcccgagtatgacagtcaccgctttaggagcgctgtacatcagcagcgcttctaagccatcaagggatggtcatttctccgggagcgacgcgtccagctcagggacgacgagtatactgatttccaggaggaaataggtcgccggcggtgggcatcactagttacccccatggccaaatttgatccagacatagtcctcaaattttatgtcaatgcttggccaacagaggagggcgtgcgtgacatgaggtcctgtgtgaggggtgagttgatcctgtttaatgcagatgctatcggccagctcctgggatatccgttagtgttggaagagggccaggagtgtgagtatggccagaggaggaatcggtctgatgggttcgatgagg

SEQ ID NO: 156996 - DNA, 407 bp, Glycine max
cgcatgataaatactgggacagtctcaaaccctgatgtatcagtttcagatccgtggagccaatgcgcagtgggacaagtagagtcgctaaaatcattggtcagactcctacctatgtgtgcctcgggcgtcttgatgatggcgtcccaaggctcattctctaccctgcaagcaactaccttggaccgaaagctatttggcaatttcaagatgcctgcagggtccttcaatcttatcatgatattgaccttatcaatagacattcccttgtatgaccgcataatggtacctctactagccaaatacaggggcttgccgaatggattctgtagtaaaactccaattgggattggattgctgtttgtatgcgcagctaaaggaacatcagctgtagttgaaactattag

SEQ ID NO: 156997 - DNA, 430 bp, Glycine max
gttattcgcgcatattttgctcggtgcgctccatcatacgatccatgacacgccatgcatcctatctgcggaaaaacacaaaatgcttagcgtactaatcaccgtagcttgttaacatgaacgtattaataaatctagtactgcgctcactcacctatgattccggccctgagaagaaaatgaatctggaaaatgagaaggcaacaacaacagcgcgtgacgtaaactcttatgataaggggagagaaatgagattagacgcttacgctatatagaacgatgcattgccgttctttagagatgacgtgacacactaggtgacctcttttgcaaaactaaatttggggcccttgtactaggtactataccttacaacgggttttcggtgtaatgttttctaagatttacagagagttatacatattgttct

SEQ ID NO: 156998 - DNA, 380 bp, Glycine max
  unsure (1)..(380): unsure at all n locations
atcaattcatattggatgcactccaacttgtaatgatgccctattcctttcctcagagactgatgccatgacaccgtcaccctttctttcagaattcagtgaaaacccctctctcttgtgacaactttcgcgccttataacgacattcaaatgttctaaaaattaattggagagtgaagaacaaacctcactacgtgataattgttcccccatccgggccttgtgcaaacattcatgtgataagattttgaaagtgggaatagtagatcgaggccacctaaatggaaattgaaaaaagggtgtcaggtacaattatcacacactnttttacaatgatatattgcttagaattcaaaacattcctaatgtacacaacaccg

SEQ ID NO: 156999 - DNA, 439 bp, Glycine max
  unsure (1)..(439): unsure at all n locations
agctntgtttcatagatacatatatacaactaatataaaatgtaacaaaaatgatgaatgaagataaaaaaaaatattggaatgaaatggctatgacaatgatgaagattaacaaataaccacacgaaatattcaacacaattcatattaaggatcaggttatgaatttcaagactattctcaaataaacatgacatgatataacacatcagtattgcttatattagtttactttaaatgtagccttatggtgaagtaagtaggtcctttgctgtaagatggaaggattaactagaagacacatggcatctgttagatagtaatgacagcatgcactatgttatatgcaacaaagatctggtgaacccaactatactggctggatggacaaaactcggagatttctatggactcacaggatatcatcaagtgaccatga

SEQ ID NO: 157000 - DNA, 410 bp, Glycine max
ctatattttcagtagatgaatatgaatccgcggccacctcatgtactcctctaaggacaatagcatcatttgttgcactgaattgttaggagttggaagccatcttctcaatcaaactcctagcctcagcacgggtcatatcaccaagagctcccccactagcagcattaatcatactcctctccatgttgctaagtccctcatagaaatattgaggaaggagttgctcagaaatctggcggtgagggcagcttgcacacaatttcttgaatctttaccagtactcatacgagctctctccactaagatgcctaatgcctgaaatgtcttttctgatggcagtggtcctacatgcaaggaataatttctgcaagaacactcttaacgtcgtccaagctgaaaatggacct

SEQ ID NO: 157001 - DNA, 432 bp, Glycine max
  unsure (1)..(432): unsure at all n locations
agctatgcggatttggtcttcgccagtgaaatgttcgaagtggatctganaagaggcaaatttaatcatcctgcttagacgaatgagaaaactgcggcaaataaagagggtgaggatgagggagaaacccatgctgtgactgccattcctatacggccaagtttcccaccaaacccaacaatgtcattactcagtcaataacaaaccacctccttacccaccacccagttatccacaaaggccatccctaaatcaaccacaaagcctgtctaccgcacttccaatgacgaagaccacctttagcacaaaccataaaaaacaccaaccaagaaatgaattttgcagcgaaaagcctgtatgattcaccccatattccggtgtcatatgctaacttgctcccatatctacttgataacgcaatggtagccataa

SEQ ID NO: 157002 - DNA, 422 bp, Glycine max
tctatataatctgaaccattctatcaataaacacacgtcgagttgtattcagaatattagagtttatctcttattatcttagtgagagtgattctcctaaattcttgagtgattcaagaacaccttggctgtatcaaaggactttcacaacctttgtgtgttgccctcgctggaaagagtgattctttctttactttcatcatcacccttgttctttcaaatcacaattccagaagatccacctctgcccagagatatctcgtggccataacttccattttacgcactcaaattaagagattcttgagcctatattgaatttcaaaacgagacccttcacctcgttatggaatcacctcatttggagccctgtagcttcagtattgccatttctatatttctgtccagccaccacttaacct

SEQ ID NO: 157003 - DNA, 435 bp, Glycine max
  unsure (1)..(435): unsure at all n locations
agcttcataaatagactgaatcaaggagaaaattatcgtcgacccccanaacataagttatttaacaccacttgtcacgttgttgactagttaatagagtttattatgtttgcatgaaagaacatgtttctaaatgtattaaaaagcttgccctggaaaaatcaagttatgagtatggactagagatgagatgcaaactgcaatcaacatagggtacaataacaaggcttgttctagattttttttttttggaagttgaataaagtttaatctagttgtctttttacaggtatgctttaggtttacttagataagacatgaaacagaaagtgaccactcttgattaactagatattgaggcccttgtaaaaggtactagaccttacaaagtttttcgcatttaattttctctaaatactatagatatttgataca

SEQ ID NO: 157004 - DNA, 428 bp, Glycine max
  unsure (1)..(428): unsure at all n locations
ntgatctagtgtaaaattaactttccctanaagataaaacattcacaggtccagatgattaccgaatttgtaagaacaacaactaagtcatcttgaaagtactcaaacagataatagtgcactatagcttccctcagagacagaggccatgaaaccttcaccctttcttccaaaattcagtgaaaaatcagcattcaaaagtgaaaacttttggcatggtaaaggacattaaaatgttaaaaaaattaattggtgaaggaagaacaaacctcactagtgataattgttccccaatccgggccttttgcaaacattcagctgataagattttgaaagtgggaatagtagattgaggccacctaaatggaaattgaaaaaagggtgtcaggtacaattatcagacactnttttacaatgatatattgctt

SEQ ID NO: 157005 - DNA, 442 bp, Glycine max
agcatttacaatgattaagatatactctttcaagttttttggccataaattagtctgggatctcaatcaagtctcgagactcttgaaggtcaatggtctttaaactcacgaggttctgtaaaaaaaataaaaatacatcacattgaccataaatcattaaaataaaattcttagtatacattgaagctcatcatcctaggtgtggctcttgtgattgtgaatgagtttcattcgagtaagcaaaagactagttaccactttgtcttacgattctctaccctacctttgcaaatagaaagaaaaatgtagtatgtatattcacaatcatacctgaaccccatcccagagctttttgagcttgctacgaggcatggaaatctctacaagtcgttcagcgcagaagttatacggcaaagactcaagacaacattcatgccaatga

SEQ ID NO: 157006 - DNA, 450 bp, Glycine max
gagctttatggaggctggatctttgagcttcaatgaggtccttcaatggtgattttccaccatggagatgcagtagaaggcaaaggagaagaggagaggagaggcaccatccactatggaataagccatggaagaaggagcatcaccaccaagaatgtgccatggataagaagcttgaagatgatgctttaatggaggaaaagaaagagagaaggggggagcacgaaattgaaggaataaaagagggagagaagtggaactttgaagtatgtctcataagacgtccattcatcaaagttacaacaagtgttacacatgcttctatttatagactaggtagcttccttgagaagctttcttgagaaaacttccttgagaagcttctttgagaaaacttccttgagaagctagagcttaactacacacacacttctaataactaagctcacc

SEQ ID NO: 157007 - DNA, 448 bp, Glycine max
  unsure (1)..(448): unsure at all n locations
agcttctcnncctatttgctataaatagggggatatgtgaagataaaaagggttcagccccttaggcacttctctctctctcgaaattgctgaggaaaattatttccgtgaagaagaaaagggttcagccccttaggcacttctctctctctcgaaattgctgaggaaaattatttccgtgaagaaaatccaagcagaggcgctttcgtaacgtttccgtgagtaattacgcgaagattctcgaccgttcttcaagattcatcgttcgttcttcgttttcttcagtcttcaacgggtaagtacctcaaaccgagcttttcaattcattctatgtacccgtggtggtccacatnttgtttcatgtatttntattctcgttttcatttgctttttataccccctnttgacgtgcttaagccatttatntaagtcatttctcgcttaatct

SEQ ID NO: 157008 - DNA, 107 bp, Glycine max
tgctgactgcaatcatcttcgggtacatttacaaggctggtagtagaaatcttgtaaatggaagtcgagtcaaccttgatgcagatgactttatacacgcatgcttc

SEQ ID NO: 157009 - DNA, 265 bp, Glycine max
tgagccctttgctatctcaacactgaggaccttagggcttacccatttgcctcctggatgaaaggataaacacagatttcgaaaagagactacattatggagagggaatatgacatggctaaagatatggaaaagtatcttggtgatggaatatcaaacttcactatgattacttgtaaccataactggttcttttgtatccctatgacagctaaaactactatgtgggaaaatatatgatgcgcgctcatatatgtgaactaaa

SEQ ID NO: 157010 - DNA, 384 bp, Glycine max
tggatctgactgccctgctttatgtgatatacataattgggtataaagacgactagggcgcagtaactgacgtttgtttttatatccaaattgtataacctgtgataaatcatttaaagccattggtcctttattattcattatatgatcaattcttttaccacttctagattgtgagtatcaatgattattcatgatcacaaagcatatgccaaactcagatgatagtatatcaaattactatacttctgatcatgagggcgagccctggtgcatcggtaaagatgtgcctcggtgacttgttggtcatgggttcaaatccagaaacagcctctttgcatatgcatgggtaatgctgcgtacaacatccctaccccatacctt

SEQ ID NO: 157011 - DNA, 318 bp, Glycine max
agctcctgcctcagttaatactcatccgtggctgtgtgatcagcttttagaagatggccacctaggattcttgtgtgcattttccacacgcaagagggttaaccgaaacacatccagcatctaagtcgggaatcgaagttcatggaataatggccgacattctcaaatgggtctatactagattgccttggatgagttgaaactgtcggtgcattatctgaaaatgtgcgtgccctgtaaaggaccatatggataaaggagctgaccacgccatacttatacagatgtacttgtgctacctacttttccctgattacc

SEQ ID NO: 157012 - DNA, 356 bp, Glycine max
agcttgaggtctggaagcagtgcttttactgtttctggatgctatctacaataaaaagaacccatcagtttattagaccagaagttattaagattaaaacagaaaataaaaacgaaaattggcgatgtgcgcttagcgagatgcagctagcttagcacgccttagtaaaaacaacacaccggcttagcgcaatatggttgcgcttagccagtcatgacaaagaaattttctctgcataattggctttgcgagcagtgctagcttagccttatgcatgccgcaacgaatagtgcttagcccatggggatggcacttatcccgagcaacacttccaaaaatttgactatgtaatctgg

SEQ ID NO: 157013 - DNA, 252 bp, Glycine max
tgctagctagggttaatctcaaagcttcataagcatatccttgtcagaggactgtctttagtcatcatatcaggatgattctctatgtgaagcttgccctaaagggaaacaagtgaaaagccattgctataaccaaaaaataccgtttgcacttctacgcccttaacgcctatgtggcccaactataactacatccctctctggacacatatatggtttggtcatcgaggactattacaccagatggacatg

SEQ ID NO: 157014 - DNA, 412 bp, Glycine max
gttgcttcctccagaaggcatcgccttctggggaactacctggaaggccctagtgggcctggtttctatttgcaccccctatttactaaatacacccccttacctttttttgctgattctttttccgtaacgatacggaactttacgaattacgtaacgatacttgttttctattcgtaatgacacgacaccttacggattacgtaatcatcccttctttatcttacgaaatgttatgatactttacggattgcgcataaacactttcttttgacttccgacatgtcacgaaacttcacggattgtgcaacagtgcattctttagacttccagcatgtcacggaactgcacagattgcctaacgatgtgtgctaactacctacgagtggtcatacgagggtctcatcccact

SEQ ID NO: 157015 - DNA, 382 bp, Glycine max
acacagaccaataccacaactttccttactcaaataccccagtaacattgtcttcgttccaatttgttcaccgttggatcgactcgaaaattttactggaggtccctagtacataagtctacattttgaccgttgggatctgctacaaaacgtccataacccaatatgtacaaccctttccacaaccagcaatgcataagcattttctgcacaagcacaaaattatgctgcacatttcaacagcaaaattctgcataatagtgcagattttcgaaatcactcttgccttcttccaatgttgcccaaattggaccctacaagtcctatatcaagtataaatcatacctaaaccacagacaagcttcagaccaaagcaattcaa

SEQ ID NO: 157016 - DNA, 434 bp, Glycine max
  unsure (1)..(434): unsure at all n locations
agcttgtccactacttgaaatgacttagtntaatttataaataacatgccattgcagataagatatacttatattcagttctgtagatgttgtttgcgctgatctcccattagaattagagttctaccctgataatccatcttagtcctttaatgcagactatattttgtagattaccaaaaatgaaactctgattctaattgaataacaacatcaacagccaacaataccaaacaaaccttatctaagttttattcttgaaaatatcacccgtgatcacaagttcacagctatgatattgccataattgataaactgacctgggataagaaatggctggatattatctcatgcgatgttaatgaaccagacaagttattattccttactccaccaagctaagaacggcccactagtttgattttcaacacatg

SEQ ID NO: 157017 - DNA, 440 bp, Glycine max
agcttctttgagaagctagatccttatctatccatacccctctattaactaaattaatttccttaaaaataattacggatgaaaataacgcaacaaataatcaaacatcaaacataattactaataatatatagatatatatatcagggtgttacatcagcacctgcacaacctaaggcgcccgcccccatccagagggaggctccccaagctccggctccaaccacgactcgttctgtcggcaatgcctactttggatccggttccaatgccatgaggaactttcccccgaagccaactccagaattcaccccactcccaatgacgtacaaggacctctttccgtccctcatcgccaaccaaatggtcgtaataactcccgggaagatctaccaaccccctttcccaaagtggtatgatcttaatgcaacttgcatgta

SEQ ID NO: 157018 - DNA, 432 bp, Glycine max
  unsure (1)..(432): unsure at all n locations
agctntgatattatgataattattgctagaagatctcatgccatgatttggaattcctattgactccagtggagtacaatgggtggggcaacattcatcaatataacgtggaacaagtgcacccagtcaaggttatagaggactgaggagaccatacgaacatgttgccttaggagattgaggagtactgagagcttcagaggcaattggagaagacgtctgagaaggagagtgagattcttttaaggacgcatcttagatagttcagtactcttggtgtgataagtggtctattttagtcctagttttcttcattgattttgatgtattctaagagaggtttctccacatatatgtattttgttgaagcaaagatgtaaaaattgattctgcttactttcatattatcatgggttgcgttcgtattatttc

SEQ ID NO: 157019 - DNA, 436 bp, Glycine max
  unsure (1)..(436): unsure at all n locations
taagctccttcaactgcacaatgctcttaatatttgaagagtgtccttgtggaaccttcacccgacgaagacactgacaaaaacttatcttctccttcttggacaaagtatggcgggctgggggtaagtaaattatcttcccatcagaccttggatgcaaatgtgattgtatacccatatcagctaaatcttgacaggtattcaagccatccttcatcttgccttgaatgttcatgagcgttccaaccacactgatacaaacatttttctccacatgcataacatcaatacaatgtctaacgtcaagattacacctgttcggaagatcaaagataatggaccttttcttgcatatgcaactctgacttttatccttcttttgagtacttccaaatgcagtatntaagtgatgaacccgctgatatacctgctcacc

SEQ ID NO: 157020 - DNA, 456 bp, Glycine max
tctgagtcacctgccgcatgcaagctgaacccaaccgatgagttgtgaacttttactgtgagtgaacgactagctgtgactaataatctttgcatcaatttgtgaattttagaatgaaatttataaatgaggacttgatgaaggccatgattgtgcatatacaagccttttgaccaaaaagcttaccttgaattataattgtatcatttgcaccctttgtgagctgaatgattttgtcaataattgaaccctaaacctgaatgattatctccagataccttgtttagattctaggagagcatatggttcaaggcattaccccaaatttaggggagtggaactaattgggatgcaaagaaagagataaagcatcagcacacaacaaataagttgtgtgttaaaaaagaaaaaagacaaagaaagcaatcgaaggaaatgtgtgttgatgtaataagg

SEQ ID NO: 157021 - DNA, 432 bp, Glycine max
agcttatgagcatgagggttagccttttcttgactataaaaataacgttgtttagttcccttgcttactcccataataccaggagccttgtgcatatcgctttttatacataagctaatgagtttctgttgtaacaaaagtgtttgcactacactatttgtcactacattcgcggtacgggctaaggctgattcatttatgcaggttgtcattggtcaagctgctgtgcacaggtgtaatgcaactgtcaacttccttgatgaaacaagaccttcatatcctgcaactgtaaataatggtgacttgcacaagctatctgttgatgtagctggcaatttgcttggcaccaataatgttaatattgacaagacacctatcatggccgctgaagactatgcattctatcaagaggtcatacctggctacttcatc

SEQ ID NO: 157022 - DNA, 433 bp, Glycine max
agcttcggaagatagtgatgaggtacattccctataggcagagcttgaaagagcctgcgtagtcgaagagaagttcaagtccatagccatcaaagtctgaaaagagtatgatgaactaagggatgtcaatatggccaccgatgaagccttggaatgagaaaccaagaaggcccgaaaggaagaacacgaccaaagcaaagttttgaggggctttatagggcagcaatagtgagctcaaactccgaagaggtgaaaagaatcatcacgggtcaaaggcatgatctggaaggacgagctaaaagcttgccttaggtcgaaaagaaatttgtcccaacagttaaagtgagactgaagggaatatgtgggccatcatcgatgagtgcaaagagaagctaaatctagcggcaactcacgagcaaaggctataggatga

SEQ ID NO: 157023 - DNA, 428 bp, Glycine max
  unsure (1)..(428): unsure at all n locations
ntccactcctttggaagatcattatttgcttgagtttcatagtcttgagaatcctcattgctttcatctcttttccttttagaatccctttcatgattatgtatctcttctaagaaatctgaaacatcatctaacacattctttcttggagaaataacattagactcatcaaaggaaacatgaatggattcttcaatattcatagttctcttattgtatattctatatgctttactatgcaaggaataaccaaggaagattccttcatttgccttggcatcaaactttcctaagttttcttttccattatttaatacaaaacatttgcaaccaaagacatgtaaatgtgaaatgtttggttttctaccattgaataattcgtaagggagtttctttaagatgggtcttattaaagccttatttaagat

SEQ ID NO: 157024 - DNA, 442 bp, Glycine max
  unsure (1)..(442): unsure at all n locations
agcttgcaaatggcattatacattaccatgtgactatttnttttgttatatatcagtataccatgtgaccacgagttcaaactcaatttaagccaatcacggtagaagattttatgggtaaaaatagtagaagaattaatggcaagatgattgattggtgtaactacaataaacagtccccccactttggctttaatctgttntttttttttttttcaatccttccactccaaagtagtcatgcaatatgccaccaaataggagaaagtctgcaaatctccttaattactggttggcaagtggagtccatttgacccaccttacctgagcaatggccacagctacttgtccttttcaagttctgggtaaaagggtgactcttcatgatcatatcccattggatatcatattggcctaaaagcataaaatgacataacatcta

SEQ ID NO: 157025 - DNA, 455 bp, Glycine max
  unsure (1)..(455): unsure at all n locations
cgaaccanaaccggtgaaagtgtgattntaaactgtgagtgaatgactagctgtgagtaataatctttgcatcaatctctgaattttagaatgaaatgtataaatgaggacatgattaaggctatgattgtgtatatacaagccatttgaccaaaaaacttaccttgaaattataattgtatcatttgcaccctttgtgagctgaatgaatttgtcaataattgaaccctgaacctaaatgattatctctagataccatgtttagattctaggagagcatatggttcaaggaaaatttaccccatatttgggggagtggaactgattgggatgcaaagaaaaagataaagcattagcacacacgacaaataagttgtgtgttaaaaaaaaagcaatcagagaaaatgtgtgctggtgtaataaggtcaaaagcaaatgaaagtgaaaagctagtg

SEQ ID NO: 157026 - DNA, 422 bp, Glycine max
agcttcaacattcaatgtcaagcgtctcgatatattacgggactcaatcatacatccgagtaaatagttattgtcgtttgaattggctcagagcttcaacattcaatttcgagggtctcgatatattacgggactcaatccgacatccgagaaaaaaattattgtcgtttgaattggctcagaggttcaacattcaattatgagcgtctcgatatgttacgggactcaatcagacatccgagtaaaaagctattgtcattcgaattggctcagagattcaacattcaatttcgagggtctcgatatattacgggactcaatcagacatccgagtaaatagttattgtcgtttgaactggctcagaggttcaacattcaatttcgagcgtctcgttatattacgggactcaatcagacatccg

SEQ ID NO: 157027 - DNA, 406 bp, Glycine max
agcttcttatccaatgctcatcttggtggtgaatttccttctattctggtattagaacgagtggatggcgcgtcctatggaatataatactacttattgggctgctgtttctgagaggaatggcaccataaagtgacctcattatggctcaaggattccaccttttggtcttccacaaagctgatgcttaagctgacaattgtgaactgaatgcaatttgagccaatgtcctttatggtgactaacccaatacttgtattaggtgtatcaatttatacttgattgcgtcattatttagacagactaaactctttaaaattgtaataaagaggtgtgatatactcctaccttagggccatgatacaacggcatatcttggacttttctacttataacatgggcttgt

SEQ ID NO: 157028 - DNA, 464 bp, Glycine max
tgagctctgatggtgcgcagcccaccatcttttcatagtagagtaccgattatgtgtctaccatcacgattatcgtctccctttccattattgggggtaccacctgagccgccagatccctccaccttttgggcgtgttctttgaatgatccgtccccctttttgcacatgttctgtagttgcatcctatccggaaccatatcacaattgtactgatactgcctaacaaaggcaaccattaggtccttccaagaatggactcgggaaggttccaagttagtgtaccaggtaacagctaccccagtaagactttcttggaaggaatgtattagcaattcctcatcttttgcgtattcccccatcttctgacaatacatctttagatggttcttgggacaagtagtccccttgtacttgtcaaagtccagcaccttgaacttgggaatgaccatgtttgggtatta

SEQ ID NO: 157029 - DNA, 449 bp, Glycine max
ctgcagcttgcaagtttaataaagaaactcttaaatctctcttttatctttagatttaaacatgttcttagttacattcaattgtgcatcatcgattcgttttgttattcctagcgaacattttgttttatattgatgattcacaactgtgtaggtaattgtcgttgataaagttttaaccttcatttttcacatcccctatatttctagtcttacaaaatgtcatttctcttgtatctattaattaaaacaaacttttattaaaaaattattatgagcgtgtttcgatccgcaccaaaggcccttggacgtgcgtatttcatggtcaaacatgagaaagtcagttgaccgtgatgtttggcttctccactatactcgattcacctcgtcgaaatcgattttgaagcacagcatggttgaggcagcttccacgtcaagttaaaattgat

SEQ ID NO: 157030 - DNA, 436 bp, Glycine max
  unsure (1)..(436): unsure at all n locations
ctctgttaattgaaagtntaaaatgatgcttattaaggaagtatttgttaattgaaatctcttttaattgaaagtttggaacgatgcttagtgttgaattctggcaatgctaaggtggtcctctgaacatggacaaattatctgttaatggaaattctggctccttcaagggtgggtggagggttctgatactgccttttgagtagtgggttttgttgtggccctttagagtaaactctcacaatttcacaatccgattctacaaataaagtttatggaacttccacgattctacgtaaaatcgagagtttaacaaccatgattggaagtatccgcgctctctatctctttatataccccattaataaagataataattgttgatcagcagactgcctgcgttaagtgtgattactgctggaaatgcagatattat

SEQ ID NO: 157031 - DNA, 425 bp, Glycine max
atttatttaaacctcccactgggcattaagttaggcctacttggttaaaaggaaaaatatatattttttcatagaatggggaacaactaactcaaattaatttacaatgaatatttaaaaatgtggagtgactgagttaaaatggattcacttaatcatgctatatcgagtgactgagttaaaaatttagagctatatatgtcgctagacgcttatcaacagtatatttatctggtttataaattaaagtaaacgacaagaaattacttcttatacattgtgcctacgtgcaatcacaacgatacaaaattccatattataagaattgcgagtataactatgttttcattgagcatttatttattaatggtattgtgctacggcatgtgaggctgtgcgacaagttcatcagatataaatattgt

SEQ ID NO: 157032 - DNA, 192 bp, Glycine max
tgaagctccatagctacgattgacgccaatgactgtaactaacatgactaccatactggacaggactgcctccggatggaattgaggctatctaatacatacaccagattgaactcatgcaagctgttcacttgtcgcgcatgtagaggctgctgtagacgcagtgaacgatgattcttgactaaatgatct

SEQ ID NO: 157033 - DNA, 429 bp, Glycine max
  unsure (1)..(429): unsure at all n locations
agcttgangattatggggtacccgtcatatgtggtattaggtggcgatcgggcgatggtgaaaatcaactatcccacatccacgaatcaaacatgaactcaccatccccagttgcccaccttcaactaagctcacgtactcctacgtagcccttatcctcgttcctttcaacaccgggtcctcatcaacccctccaagcttccacaatatccaagcgattcaatttccaaatatcatgaactatcctaaaccaagaaaacagggcagaggcagaaaactctgcccaaaacacattcacatattacaactgtccttactcaaagaccccagtaacattctcttcgttccggtacgttaaccataggatcaaattgaaagttttactggaggttcctagtacataaatctacattgtgaccgttgggatct

SEQ ID NO: 157034 - DNA, 334 bp, Glycine max
agagatctacaaacattgttgtgcctacaacactactactaacgaggaatgtggtagtgtattacaccgagtttgatgagtactaggaggaactcgagagaagactctgggatgagaagttaactgattttgcagacgatcgcatagacattgctattatgaaggaatcttacgccaacctctatgaccccaagggtaaatcacttattctggtgaaggtgagaggacatctaacgaagtttgatgaagactgcttgaacacattgtaggagaccccgatgactatggaagagggggagaatttgtgtgctgattccaagtttgcactcctgag

SEQ ID NO: 157035 - DNA, 439 bp, Glycine max
  unsure (1)..(439): unsure at all n locations
agctntacagcagatnttagtaatgacccacttttctagaattaaaataacttaatgccattaacctagggaattaaaacaaactaaatggctgagtgtaactgaaattgttggcaaccaaaagtcacccccaacagccaacaagtcagccaccatttggtctcccaaaaggctgatgcctaggttgccaattgggcccttattacaacttgaactaaagcccttttagttgattaacccaaaacatatttttggtcagccaactttacaaggattgggccattatttagacaaactaaacactctaaaattgaaataaagtggtgtcatttagtcctccatttgggccatgatacaactcacaaccttggacttttctccttgaaacttgggcttgtattcaaatagtatggacagcacttgttgaagagcgtccttg

SEQ ID NO: 157036 - DNA, 380 bp, Glycine max
aggctctgagcaaattcaaacgacaataacttttgactcaaatgaccgcttgagtcccgtagtacatcgagatgctcgtaatagaaaagggaagctctgagaaaatgaaacgaccattacttataactacgatgtcggatagagccccggaaaatattgagacgctcaacattgaaaacagaagctcttaggatattccaacgacaatatagtttgactcggatgttcgactgtgtcccgtaatatatcgagactctcgcaaatgacaagagaagctctgcggaaattcgaacgacaataacttctgactctagtttccgcttgtgtcccgtaatatatcgagaggctcgttatagaaaagggaagctctatgataaact

SEQ ID NO: 157037 - DNA, 149 bp, Glycine max
catgcgtgctgggattgatctgatgcctgccttactaacgccatagacgtactcttatcgacatggctccccatcgcactcaagtgcataacatgggaaataaagagagagatagctctatacactacggactatggcgtagagacctg

SEQ ID NO: 157038 - DNA, 376 bp, Glycine max
catgagctagtgaacactctcttcgacatcatgtctgtgctcatataagtgatcatgacgtgcattgagatgttcctgctcaactcgcacgtcgtgcactgtgatacctcgctcctgaagacgcttctttctgatcttcgatggcactacactcttgaggggaacattctgaagaactgcctaccttgtcttcatgtttcctctgacgctggttacgatctttggagaggttggacatacctctcctgaagatatgatacgcattgtacctcacttgtagacagggaaccaagtcacagacacccctccatgctagcccagagttggtcccaattagcctttcattttctacgcacgagcagtgaccttgtggcgg

SEQ ID NO: 157039 - DNA, 438 bp, Glycine max
agcttatcgagaaaagaaattgtataatgtttgtttacaacattgttaagttcaactaaaaccctttgtagagcattattcccaagtgctgtaagaccaactgtaaaagaaaaaaaattaaacacttgacaatggatgcatgcactactatcactataccagctagcttcattcgtctctttcaagcatctatagcaattctttgcaataaaatcttgaaactaacacttggacagctagatctaaccgttgttgtcggagtgtgaccaaattaatggttatatttattatgaataattgaatattaaaatactcttggcagtgcatacctacaaagctcacttgtggacaaaaacattacgggtcttaatggatagataagaattaaaatcaatcaaagtaaagatcagggaggatcatcatcaattttcagcaccc

SEQ ID NO: 157040 - DNA, 447 bp, Glycine max
tacggacctatgatactcagcttgcttccacaaatagtctcggccgaaagacgctgacatcttctggaaaggtgcagatgaccacattggtctctgcgtgtcatcggacttggggtctccgaataacgaggtgcggataaccgtaaagtgctctgcatgccatcgaactcttgggtcgctggatagcaagaaggtgacactaaatagtctcagtcggaagacgctcacagctccaggaagagtgcagattaccacattggtctctacgtgtcattggacttggggtgtccgaatgatgaggtgctaataaccgtaaggtgtctccgcattccaccggactcttgggccgctggatagcaaaattgtgagacaaaaattgtctcgaccggaagatgctgacatctctgttaaaggtgcagatgaccacattggtctccatgtttcatc

SEQ ID NO: 157041 - DNA, 436 bp, Glycine max
agcttccttgagaagaacttaactacacacacttttctaataactaagctcacctccttgagaagcttccttaagaaggttcctagagaagctagagcttcactacacatacccctctaatagttgagctcacctccttgagatgagaagttagagcttaactacatacaccccctataatagctaagctcaccctcatgccaaaatacatggaaaaacaaaaaagtccctactacaaagactagtcaaaattccctgaaatacaaggctaaaaccctatactaatcaaatggccaaaatgcaaggcacacaagaaggaaaaacctattctaatatttataaagaagagtggacccaaccttggcccatgggctcagagatctaccctgaggttcatgataacgctagggccttctgttgcagctctagcccaatc

SEQ ID NO: 157042 - DNA, 429 bp, Glycine max
  unsure (1)..(429): unsure at all n locations
tcaagaatcngatntcacagaatcaagattcaagaatgatcttttttcaagattcaatcaagcttcatgaatcaagattcaagagcaatcaagatcaagattcaggaatcaagaaaagactcaatcaagataagtactaaaagtttttcgtaacattgagtggcacaagaatttttcacaaaatctttaacgagagagttctactttctggtaatcgattaccgagagccaacattggttttcaaaactgatttacaaagcttgtaatcgattaccatgagcatgtaatcgattaccaatattgtaaaatgttagatttcaaatctcaagagtcacaactagtgataaaacattgtcaaatcattgtaaacttgtctaatcgattacacaatacttgtaatcgattaccagagtttctaaacggtttga

SEQ ID NO: 157043 - DNA, 430 bp, Glycine max
  unsure (1)..(430): unsure at all n locations
agctngcttgtggggcttctatggaggctggatcttcaagcttcagtgaggtcctttaatggtgattttccaccatggagatggagcagaagacaaaggagaagaggtgagagaaggcactatccactagggaataagccatggaagaaggagcttcaccaccaagatgagcctaggataagaagcttggagaggatgcttcaatggaggaaaagaaagaaagagagaaagaaagagggggagcacgaaattgaaggaagaaaaagggagagaagttgaactttgagttgtgtctcacaagactctcatttatcaaagttacaacaagtgttacacatgcttctatttatagactaggtagcttccttgagaagctagagcttagctacacacacccctctcataactaagctcacctccttgagaagct

SEQ ID NO: 157044 - DNA, 429 bp, Glycine max
  unsure (1)..(429): unsure at all n locations
ntaacctcatcgtctctcacagtctttagatttgggagccaatccaatccttgtgttcggactctcagccacttatgatagccgccgatgatcccattacggcttcccctaagctctctgtcctttcttcacgccgcatcccatgccttgcgaactccttggagtaccctcgcgttgtggtcactgaaaccccgtgcgatgaaaggcgtgatgctttcgtctgatggcactcctctcatgaggtagccaagctgtcttatggcgaggacgggattataattaatacaaccccttgttcccatcaagggaacatttggacatccttcgcatgaagatagaatcctgattcttccttccttctagcgagggaaccaattaacagacgcccctccatgctagccaagagttggtcccaattcgcctttcctt

SEQ ID NO: 157045 - DNA, 438 bp, Glycine max
agcttgtccttggtttaaacatgattggtacatgatttgggacttgtatgtattaatttgggaaaaattggatgggggaaagactggttttcgaaatctgcactttatgcagaattttgctgttgaaatgtgcagcagaattttgtataagtgcagaaaaatgcttgtgtatggctggttgtaaaaagggtagtacatatggggttctggacatttgctagcagatcccaacggtcaaaatttacacctatgtactagagacttccggtaaaattttagagtcgatccgacggttaacgaattggaacgaagaaaatgttactagagtatttgtatgtgaaaagctgtgattttgagttgtgctttgggcagagtgtctgcctttgccctgttctgcttggttgtgttagtacatgatgatgggatgtggaattacct

SEQ ID NO: 157046 - DNA, 469 bp, Glycine max
  unsure (1)..(469): unsure at all n locations
ctaagctctgctgcaatattacaatagacctcctcaacctcagcagctaaatcaaccacggtagagcaattatgacctctccagcaacagatacaaccctggatggaggaatcaccctaacctcagatggtccagccctcagcaacaacagcagcagcctgctccttccttccaaaatgctactggcccaagcagaccatacattccttcaccaatctcacaacagcaacaacctcagaaacaaccaacagttgaggcccctccataaccttccctcgaagaacttgtgaggcaaatgactatgcagaacatgcagtttcagcaagagaccagagcctccattcagagcttaaccaatcagatgggacaatnggctacccaattgaatcaacaacagtcccagaattctgaatagctggccttctcaagctgtccaaaatcccaaatatgtcagtgccatatcattgag

SEQ ID NO: 157047 - DNA, 110 bp, Glycine max
  unsure (1)..(110): unsure at all n locations
agcttgagagagcccgggtagtcgaagagaagttacaatcctatttcatncacagcccgataagagcatgagtgatgaatgtatccatctatggtctcacgtatatactc

SEQ ID NO: 157048 - DNA, 585 bp, Glycine max
  unsure (1)..(585): unsure at all n locations
ctgtacatccttactngactctaacctcactattccctcaatactaataactctcacaccactcaccatccgacgctgacacattgangaccgtcgaactgtagccgcgcactctatacatgctactgcgngcatgctagcatgcttgaggtgctgttatggacgctgtatttacaagcttcaatgaggtcctttaatggcgaatctccaccacggagatggagcacaagacaaaggacaagaggcgagagaacgctctatgcactagggaataagccatgtgaagaaggagcttcaccactcagacgagcctacgataataatctcggacaggatgctacaatggaggacaacaaagaacgatagatagaaagagggggagcaccaaattgtaagaagaaaaagggagagaagttgaacttcgacgtgcgcctcacatgactctcatttataaaagtaccactgaggctacacacgctattatatatatactacgaacgcttcttgagaggcatagacctaagatacacatcacgcttcttatagcgaagcgcacctccctcgagaagctcccttaacacgacg

SEQ ID NO: 157049 - DNA, 368 bp, Glycine max
ccgccgatgatcccattacggcttcccctaagctctctgtcctttcttcacgccgcatcccatgccttgcgaactccttggagtaccctcgcgttgtggtcactgaaaccccgtgcgatgaaaggcgtgatgctttcgtctgatggcactcctctcatgaggtagccaagctgtcttatggcgaggacgggattataattaatacaaccccttgttcccatcaagggaacatttggacatccttcgcatgaagatagaatcctgaatcttccttcttctagcgagggacccattaacagacgcccctcctgctagccagagttggtcccatttcgcctttcttttcgaccacacggtgaccttgagcg

SEQ ID NO: 157050 - DNA, 459 bp, Glycine max
ctgattgtattttagagtgagtatttatgtcaactacagtcttgctagggtcaccacaaccaatatatcaacctaaagtttatgagcacagtcatggtagattttgtacggacatgttattcacttgtcaaaattagtcctaattgaagatagtaaataggaaaagttgtaaggactacgaatgtggtaatcagcgtcgtcaaaattatggagcatgtgaagttaatgtcttgagaatgattactttttcttaagactgagagaagctagatcagttttttgaatttgacttctctattatcccttttcattctgtcccatgaaaataacattgcatgacatgacaattatattaatatttaattataacatttaattctaaaaatcatcaaaactgtataattttaaaaggacaacacaaggacaaggacaaggacagtacaaggagggacaatagac

SEQ ID NO: 157051 - DNA, 185 bp, Glycine max
acaaaagaggatcttttgcatatctatcttatgtaccggaagctccacattcattatgactgaattatcgctgatcacatgttggctacccccatgatcgtgtacctaatatgtgccttagccatatttaacactacgataactgactactacataattgatacccataaaacctttccagctgt

SEQ ID NO: 157052 - DNA, 612 bp, Glycine max
  unsure (1)..(612): unsure at all n locations
tctctctctaactaccactcaacactcgtcacataattctagtttatattgctataacagatacctgtgtatcgcatactcgcactctaactgcgcaactatctcacatccctacaccattacacatcttaatcactctatatctgttccacctactacactcgataacacatatttcttcttattaaacctatacatctacaatctctatgnaactgcgaatcaccctaacctcagatggtccagcccttaataacaacatcatcagtcctgctcacttgctttccaaacatgctacctaggcccaacacaagactcattacattccttcctaccaatcacaacaactagcaactaactctctagaaacaacacaacacattgaggcccctctataaccttccttcgaagaacttgtgaggcaaatgactatgcacaacatgcagtttcatcacgataccaatacctccattcatagcttaaacaanccgatgggacaattggctacccaattgaatcaacaacagtcccagaattctgaatagctgttcttcttaagctcgccaaaatccataaatgtcatgccatatcattgacgtcgctacacaatct

SEQ ID NO: 157053 - DNA, 394 bp, Glycine max
  unsure (1)..(394): unsure at all n locations
tgtgtaagttattatcattngaatttctcacgagcttccgttgttcaatttcgagcctctcgacatattatgcgcccgaatcggacatacgtgtgaaaagntatgaatatttgaatttctcgagagtttccgatgtttaatttctagcgtattgatatttataagcttgaatcggatatacgtgtgataagctatgaccatttgaatttatcagagctttggtgttcaattctaatctctctcatataagcgcccgatcgcgcattcgtgtgaatgttataccatttgaattacttagagttacgatgcttaattcagcgcttgtttatatttccttgatatccttcttgtataagttgacctctctgcctgcacatctctgtgatataatagg

SEQ ID NO: 157054 - DNA, 372 bp, Glycine max
aaagctctcgagaaattcaaatggtcataactgttcacactgacgtccgattcaggcttataatatattgatatgctcaaaaataaacatcggaagttctcgagatattcaaatggtcataatctttcacatggatgtccgattcgggcgcataatatgtcgagaggctcaaaattgaacaacggaaggtcttgagaaattcaaatggtcataacttttcacacgagatgtcgattaacgcttataatatatcgatacgctcgaaattgaacaacggaactcttccaaaatatagatggtcataacaattaccatgatagaccattctgggcctctattttcatcaggtcgaataaacaacctagctcttcc

SEQ ID NO: 157055 - DNA, 438 bp, Glycine max
agcttatataccaccagcatcgttgtaatagggctgttgatggaacctctccaaatgcaagctttccgcatgacttacggaaagatcttagagttgaccttagcagaggtatccatagaaaccattgcatcactcacccaatactacgaccagcctttgagatgcttcacattcggagacttgcaattagtaccaaccattgaagaatttgaggaacttctaggatgtcctctcgggggaagaaagccatatctttcatccgggtgtctcccctctttgagcataattgcaactgtggtctaggatacaacaagaggtttggaccgcataaaacagactcggaacggcatagcgggcctaccacggatgtacctagaagacaaggcgaggggtatggccaatcaaggagattgggtcccgtctatggatagtgtagct

SEQ ID NO: 157056 - DNA, 368 bp, Glycine max
atatgcgcatacttccttacatacgttgtgtagcacaagacattatattaaccgtaaaatataatgcccccatctacgatcaaggcagctccgacacctaaattatttacacgtacttgcaacgtgtagatgatacttacatcgcacacatgtccttggctaaattgacatacaagcatactcaaaacattttggggtacgcaaaattgcacactgtgcacattatggcatttcttaaacctagacatacactaactcaatgatgaatcttgactatctacacaatacggtgctacatgtcatgctcttttcacatttgtgctccctaacaccgcatgcaaattcaagtatatcatcctttgctgact

SEQ ID NO: 157057 - DNA, 494 bp, Glycine max
  unsure (1)..(494): unsure at all n locations
cgcgctgaccttgtgaccctgtgtgcgcgagcttaagacaacccagcatgctgcttgtttgataaagaacatactacattgtcgttgagctgaagagacccgcattacgtaagcctgtgtcttatatgacacacatattagcttgacttatatatggcaagggttggcgcatgaacatatatatgaacaatggatatgactgctacgtacgcctctctatttcatggacttgacatcatacgagttcttctctcccccttcttgcgtctaagatagctaacgaatatcactgacttatgcactgcgacaagaactgccatacactactgaactatcacaactctgagtccaacatataccttggttaacattattatgaacttctcaagccagggagaaccttgagcaagataccgagtaccgggatgacaatgacaaggatctgagatccatctttactggttctatactgtcatgatcactacgcacgttan

SEQ ID NO: 157058 - DNA, 222 bp, Glycine max
tctcaatatctgttcttgagtctttaacgcgctctgaccggttattgaagccgtgcttgtcgcctgaaagagtgataaaagaatacccaccgagcatatgtggtgcacactcatttactcactttacaaacgaactctggccgatcgtgcacgctataacctacgctaaaccgctgagaggaaagtatgcaatgtatcttgtaacatggttgttaactgatc

SEQ ID NO: 157059 - DNA, 423 bp, Glycine max
  unsure (1)..(423): unsure at all n locations
gtatgatacctgttaactttatgcccaccccggatttcgacattctcaacttgaaacagggtttaggggtgggggaacataacaaaagcgtttaatcggaatgcattgatagtttaagtattttataatgaaatgcaatatatactaatatagtcgcttttcctagcgattcttctaatacatatatttgagatgattatgtaaaaatcattatattaaattagtaatgtatcaaaactaaaattctaaatatatgttgaggcatgacttaatttatgttattttatcaaaataaactctaaaatttattttaagaagctttaaggtcaacactataatataaactatntagtgatactaaactcgctcattcatgattatttgtcgcgttacgaattcacttttactattaactcaaaaagt

SEQ ID NO: 157060 - DNA, 412 bp, Glycine max
  unsure (1)..(412): unsure at all n locations
ttcatgggctaagtaatataaaaagctctctctgatatagtaccagattgcttacattgtaaagcttcatacgatacatactanaggtacccaactttggccatatggtccaatattactaaacaatagaaagggatttataaagttatttctcagaactgaatagattagagctaaacgactatctattacctgagatatgttgatgacaattacgtctacacaaattttgaatatatgttcttctattgttgaaatcaattaaaaattataaaaatttgtcaatattattgcttcctaattaatactttctataattctataattgataatatgtgcgaactaactaataaaacagaatgttttataatatactaccatgttagaaatacttatatactatcagtttcat

SEQ ID NO: 157061 - DNA, 102 bp, Glycine max
tgcgtatttactcagcgtctaaggtcaccaatacctgcattatcacaatacattcattctgcattcatcctgtactgtgacattcattattattctgcgccg

SEQ ID NO: 157062 - DNA, 392 bp, Glycine max
agctagaccaatcctgacccaacccgggcatagttaatcagtgataacctgtgatgtacctaaacaggcgagctcctggcagtcaaccgataaggggaacaaagaccacaaagcatggaggcttgtgtggaggttggccagctgcgaaactttgattgatatatgggatatggactctggtaatcgattaccaaggggcgtaatcgattacaaggcttaaaaagtaagacaggagactaagatggtctctggtaatcgattaccaggcttgaaaactagatcatgaagcttggagggcttctcgtaatcgattaccatggcgtgtaatcgactaccaggcttataaatgagacttgaatgttgaaggagcctctggaaatcgataccaagct

SEQ ID NO: 157063 - DNA, 379 bp, Glycine max
tggtgaggtagccatggaaaagcagagcgtttggaatgatttcgtaaatttcagaaggctattgtgaaatgctggtaaaaacacgaatgccaagcagatataaatttgaatgaggaatgtatagggtcgtgtgaagcaacggtcgaattttccttggttcagtagtgaacgtgctattaatgttaagtgattcgtttgggcacgttcagattgctgtagttgctataattcctctagcacacaaatgcccagcttgcccctcagttgttcaaactgatttgcatccaaagcctttgtgaaaatatctgctattctgtcctcaatgtcaacatgcttcagcgtgatcactttatcatcaacaagatctctgatatagtgg

SEQ ID NO: 157064 - DNA, 449 bp, Glycine max
agcttcgtccgcagatccctcatgtaagactatgtctaaactattcaacattatgtaacaacataattaaaaccaaaacttaacccgcagatccctcatgtaagactaagttttgatcctgcttcaatcaagttctaaggcaacagtacatttcccaatgctaaagtcatctaactgtgaacacaaatgggtgatcagaccaaaagcatactaacatcaagcattgaaggaagcattgaacacagaatacacaatcaattaggtattaggtatttacatcatctgttcatttgaaatccccaactagggtgttccgccacccattacagaagagaccctatcaataattagcttactaaccctaggtatctctgcaaaagctgctcctcttgctacctccagagctcctttccctaaataggcaatgtggctgctgtggaattttgtgc

SEQ ID NO: 157065 - DNA, 459 bp, Glycine max
cgccacccagctcgcccaggcgagcaaggtttcttcctccagaagcaacagccttctggaggaatcttctggagggcccaagtgggtctggttgctatttgcacccccatttttactaaatacaccccctgcctttttttggtgattcttttttcgtaaagttacggaaacttacgaatttcgtaacgatacttgttttctttccgtaatgttacggaaccttgcggattacataatcatcccttttttgacttacggaatgttacgaaacctcactaattgtgcaacgatgcttccttttgatttccggtgtgtcacggaaccttacggattgtgcatcaatattttcttttgatttccggcacgtcacggaatttcacaaattgcctactgatgggtgccaagcaccttaaaaatgaccaaacacaagttgcatgccaccaagcacaggtccctgga

SEQ ID NO: 157066 - DNA, 193 bp, Glycine max
cccaacgcgaactcctggtttcttgtcgttttcaaccacttccacactaatgaaggccatcttttccatcactcacttctcccttgttgctcctcctacccccttgtgtgtccactacttctcctcatgtacgtgtttggtaattcttcttttctctcatgctttatcggccgaatcgtctttctatttctcc

SEQ ID NO: 157067 - DNA, 461 bp, Glycine max
gtcacctgcagctgcagctatcatgccctcacacaatactttgtatgtatattacaccagagatgtttgtttcaccccaggtaaaacaatatggagttatcaagcatttgcccggaattcaaatgatgggtcaggacgaggctgaatgattattccatgtcctatggccaattgaacagtccctttgacaagtgtttcgcacaagggattcaaggatttatattctttcattttccccaagatacagagtgtcctatatgagagagacaggaattgtatggttaagggacagaccatcacccatgcaacagtccaccagtcatacatagacactattagtatatttctctcttacatcataacactgccctattcttaagagataaaaaagggaaaggatccagaatcaggacgcaatacttcacatttgttcataccaattcacattggcctctgctcaa

SEQ ID NO: 157068 - DNA, 449 bp, Glycine max
  unsure (1)..(449): unsure at all n locations
tatctggtcaaggtgaaataaaaatggtctttcaaactaatagttgccagattcaatattctatattttaatccaagtgaacacttccataaggtttggttcagtttctatcaagaacatacatcaaataaaggatgcacagcttttagataaaaagtttatgaactccaacatacctgcaaaagacaactacattcgactcgtttttttgatacactgccacaggtctttataacattcctgtagaacagcttctcaacaacaatgacattcagatggttgaaaatatcaaaaccagactgcttgagtttatcatatttatcaatatgaaatttatgaatgtagcgctgggcatatggcagagtccagtttaccaatgactntttcaaactacaatcagcaagaccataatatattggttcccgagttaccacctgcacaaagtcata

SEQ ID NO: 157069 - DNA, 457 bp, Glycine max
  unsure (1)..(457): unsure at all n locations
ctcatctttatttcgttcattctcgatttcttttcttttgtctttaacgcgcttttaccgtttatttaagccgttttctcacctaataaatgataaaatgaatttcaaccgatcatttgtgttgtaatctcattcaatcacttttaaaacgaaatctaaccgatcgttcacgctataacctcggttaaaccgaaaaaagtaaaataatcaaaatatcttgaaaaataataataaaataatcaaaatatcttcgaataaaataatcaaaaaaatcaatcggacgttnttctttggaagtttccttgaatgaattgattaataactaaagttaaattaagactaaaatcaactcacaaatcaagttttgtccgaaaaatcactaaaaaccgttttaaggtccaacgccttaagcggtcctctttgcttttatcggttaacatggaccgttcaaaagcat

SEQ ID NO: 157070 - DNA, 97 bp, Glycine max
caccgatacaggagcaagaccaagatgcgaggcggcttgagtggtgtgcgaacgtcgcgtgaacacctgcgacggagatatgggcaccggcctgtga

SEQ ID NO: 157071 - DNA, 338 bp, Glycine max
atgacaatgcttaccaagtggagctggccggtgagtataatggtaattccaactacaatgtctctgattcatctctttgtgatgcatatggagaatccgatatgatgactaatacttctcatgacggagagaatgatgatgacgtgaccacaagcaacggcagggatccacttaacgacttgtatgacctatgacaagggctacagcaaggaaagcctaggacgctcttctacaattgctgtccatactatgcgaatacaagctcaagtttgaaagagaaaagtccatgttgtgacttgatcatggcccatatggaagactaaataacaccactttat

SEQ ID NO: 157072 - DNA, 414 bp, Glycine max
  unsure (1)..(414): unsure at all n locations
ttctacaatctcgagccttcanataaccctcctcaccttcttccgcatcattatcatcagtatgaggacgaatattacattcttctctatgccaaatttcagattgatctatccggttttcctcattgggctccacctcaatgctatccttttctgagctagcatggaccaccttatcttctgcacgtgcctttgtcttataaaccatttcagactcattaaaaataacatcatgacttataatgcatcttttgtgtcctggctctaaacaccacaatctgtaccccttaaaaccctgaggatatcctataaacatacacttgatagctctaggttccaatgtgtcttgccttatgtgagcataagcaacacatccaaacaccctacgtctatcattatttggaggatgccctg

SEQ ID NO: 157073 - DNA, 435 bp, Glycine max
  unsure (1)..(435): unsure at all n locations
ctcatctacactgtacttctatataatttgtatgacatagtgcatgatgtataatgatgcctatagtctcgagatgaggcatatacaaattgctatcttgaaaacctaagaccatgcccattaatgtgataaggggacataacaatcaacatgcaaaggataaatagtatacatgacaaacctgtactccaaatgtcggacactattacttggcttctacaaaagccaagtncaattaggatgtaccaaaaaataaagacctaaattaatcaacagtgaaacatcacctactaataaagaatacaccgacaatatggtagggaaccacacaaataaagttggcatttaaagtcaccaaagagatgaagagaaaacatatattgccatcatctgctccatcatatggtaaacacactaaagttaggaaaggaatga

SEQ ID NO: 157074 - DNA, 438 bp, Glycine max
  unsure (1)..(438): unsure at all n locations
agctttcttgcttcttagatntcattcctgttcttggttactgttatcgtccattcctaaaactgccacatcacaacttagatcttaattgaatttttgagcttaccgaaccatattaaataatttcagattagggactatactgattatttcaactgttgttttcatatggtgtttatttgtgcatgttaatctccctcatgacattctgttattcatcattgtatcaacgtaacaaagaaaacagtattattgtgttgtcgaccaatgccacaattaaagagggccaccctgtactatgatatatagttacttatgttgtctttctttcacaacaaatatgttgtttgattattttattatctatgtagttgtttggttattcatatttcttcctggtattgatttcttcagctggagacgagttcttcttacata

SEQ ID NO: 157075 - DNA, 380 bp, Glycine max
aaccctacatggagtgatttgctacatctaaatagtaataacatagacgtctgttatgccgctttaaacacttaaatattataaacatactcaaagagaatgctgctccttatctataattaagggttcaatatgctccttctacctgcttttaattcactctgattcattcaagtgtgcctactataccacatgactatattagatacctgtctgacagcttttctacttccactacctaactatattaattatgtgtcatgcagcatgactcatatattatcacgtgtcattaagatgacatagttagtatgcatggcaatattgacttgatctaatacggatcacagtgaatctttcaaaacttaagaccactttat

SEQ ID NO: 157076 - DNA, 380 bp, Glycine max
acatcttacatagcgagttgatctctctcttagcgcgcggccataaatcttgtgctcttccagatactctcatgctgctaagcacgctgtatctacgcttaacggtagatgctagctgagcccactggatccgcttatcgcgactgctccttgtggaagcaatgacttccaagagtattttgatgatgccaaagaatcaagagtcaagcacgttccattgaatcatgactctggttgctggaagaaccttgtttctgagattcacgattcaagaataatcaagtctcaagaggcaatcaggtctcatgaataatcaagaccatgagtcaagactgttgattcaagacccatgagaagactcaatcgggataagcactaaa

SEQ ID NO: 157077 - DNA, 333 bp, Glycine max
tgcctaacaggccaacttacaacagcatgtcccaagagtctcagctttatgatgcacataccaaagttgactatgtgaaaggatgttatgaccaagtgaaggtgccatttgtcaagaagaatgatggctatacctagcatgcctacatgatgatgtacgaagtggttcttgaacacgatgatgatcctgtacatttgatggctaatgtgcttcaagaatgatggaatgatgagaatactgattctgaccaaatacaggcttcaggcgcttgaggagatggacacacccctggagtggagaatgatgaatgcccatatggagaatgataatggc

SEQ ID NO: 157078 - DNA, 433 bp, Glycine max
agcttgtgatgttgttgttagttggtttggcctctggctctttcacttatagggacagtattttgtattgtgttatgttctgtaatttccttggctctggtacaagtttctaactaatgctctcatgaatgaaatatactgttattaggtgatccttgaacagataaccagttccccatggaacaactttttgttcatgatgtactatggcttggttatagaagctatgctcattcataaaatatgtttgaatttgtatgttacgttacgcctcaatttacacataataattttgaaatatttccattaaagcttaatgtcatcttttgttgttaaagtctcttctgctctgcacccgacatccctactcaaaacaggaaccattcatttttttgctcttccttaattacctgcttttatgtgtatatcatga

SEQ ID NO: 157079 - DNA, 436 bp, Glycine max
attctttacaatcaatctatctactgaataacaattctaaatgtaagtccacattcttgttctttctttgtttgacatgcacatttgctcaacttcatgaaaggaaacacaaatctcatcttaagcatgcattcaatttaaaacaaagtcatacacccgttttcacaaaaagataaaagtgtttcactgccatgtcatctaaaataagttaaactgttcaaaatgcttcaagataagcataataattattcatatataaaactagtagtatatatagacataaaggaaatactgtacgataaccaaaattataataataataaatcaaaaagtgaaaagtgtcaccaggaattaaaattcctgtgactagtcctgagtctcctgtgtttgaccatcctcctcatttgtcagctgaagaactggagtagtgggagga

SEQ ID NO: 157080 - DNA, 280 bp, Glycine max
gtatgacagtcaccgctttatgagcgctttacaccagtagcgcttcgaggccatcaaaggatggtcgtttcgacgggagcgacgcgtccaactcatggacgacgagtatactgatttccaggaagagatagggcaccggcggtggacatcactggttacccccatggccaagttcgatccagaaatagtccttgagttttatgccaatgcttggccaacaaaagagggcgtgcgtgacatgatgtcctgggtaaggggtcagtggatcccgtttgatgcc

SEQ ID NO: 157081 - DNA, 354 bp, Glycine max
  unsure (1)..(354): unsure at all n locations
tctatataagctgaaccattntatcagtggactcaagtggtgttttcttcgcaaactaagagtctatctcttgtatcctactgagagtgactctgcatatttcttgagtgggtcaagaacaccttggctgtcccaaaggactttatcaaccttagtgggtcgccctcggtgggacgagagatgctttccttccgtttatcgtctaccttgttctttcaaatcacaattgtagataatacctcctatgacaataaatatcttgtggtcctaactctccttttatgcactccactttcgtgattgatgggcctcaaacgaactcaaaacgataccttgcacctcatattggaatga

SEQ ID NO: 157082 - DNA, 434 bp, Glycine max
agcttaactgctttgtaaaacgaaatactcgatctatataatctttgttatcattaaatatatttcaaactagttcaatcatatgcatcaaagtatgaaagctttcaaaaaaacatgaaaaccttgaagtagtattctaaacaatatttttctgagtacaatattatgaaaaataactttctaagtgtagtagcaacataataagaatcgttataacataaactaaatttgtcataataacaatgttttgagagatacatttatttatgtaatgatcttctaaacaagagcaaatgcatattgacattaggttctcataatcaagtcaaacattgaataatgagtgttatgactaaccacttagagagcttagttgtcttagtacttgaacctctatgtcaagaatttctggacaccaatgtagtcttgaataa

SEQ ID NO: 157083 - DNA, 425 bp, Glycine max
atactgcattgttgactaattgttgttgttgttatttacatctattttcagactcccaatttgcagattgagttttggggctgctttcttgctgaacaatgtttgttggactatgattgtataatatccttgtcttctatcgcggctgcgtctgttatatttcttttcaaacttattctggctctgaatgcatacttaaggaaatattatgttatggataatgatatacacatctctttaatggaacgatattacccgtgtttcaacgcatgtgttctcatgtgatgaattgatgattaactgttcgccaatataataaaattattgctctttactctaatatatataggtaacgacttaatgttgaagattagagaaggtgtatcccttctactccatcaccattaactatcagctaccttctt

SEQ ID NO: 157084 - DNA, 453 bp, Glycine max
agctggcttgtggagcttctatggaggttggatcttcgagcttcaatgaggtcctttaatggtgattttccaccatggagatgcagcggaagacaaaggagaagaggtgagaggaggcgccatccactatggaataagccatggaagaaggagcttcaccactaagatgagccatggataagaagcttggagaggatgcttcaatggaggacaagaaagagggagagaaagagagaggggggagcatgaaattgaaggaagaaaaagggagagaagttgaactatgagttgtgtctcacaagactctcattcatcaaagttataacaagtgttacacatgcttctatttatagactaggtagcttccttgagaagctatcttgagaaaacttccttgagaagcttctttgagaaaactgtcttgagaagctagagcttagctacacacaccct

SEQ ID NO: 157085 - DNA, 459 bp, Glycine max
  unsure (1)..(459): unsure at all n locations
catgtcctggttacatacttacatagcattaatcacaacatacacgccaataaatacttggtaacaaggaattataccctgcaaacaaagctatttgaaatggaaccacctcccctaaacccaagtataagttaatagggttaattataaaatttgtccccttattttcttatttcactaaatggatcctttaagggaagactagaattgtcttttggagtaaaaggtatactcttttatcataaaattaaatcttatatattacattttaagagataatatattatattataaaaatataataaattaaaaaaattaaattttgaattatttttcttaaaacttacattaatactatattttgtaacatatatttaaatgaacactntgatatagtgataaaagaatatatttcttatctcanagatcatgattcattaaaaaataaagtgatgaaat

SEQ ID NO: 157086 - DNA, 333 bp, Glycine max
accacagagtggtacctgtagatatgtctcgggggtcatgagaacctggggacgtcatgtggggtgctattgcccaaaaccaagcttgaccaatcccgacccaacccgggcatagtcggtcagtgagaacctgtgatgtacctaagcaggcgagctcctgcaatcaacagataaacgataacaagaccacaagcatggaggcttgtggtggctggccagctgtgaattttgtgtaatatgtggatggtggcctctggtaatcgattaccaagggtgggtaatcgattacaggcttaaaaatgaagacaggatgcatagatggtctctggtaat

SEQ ID NO: 157087 - DNA, 461 bp, Glycine max
cggagaagatgcttcaatggaggaaaagaaagagggagagaaagagagaggggggagcacgaaattgaaggaataaaagaggtatagaagtggaactttgaagtatgtctcacaagactctcattcatcaaagttacaacaagtgttacacatgcttctatttatagactaggtagcttccttgagaagctttcttgagaaaacttgcttgagaagcttctttgagaaaacttccttgagaagctagagcttagctacacacacccctctcataactaagctcacctccttgagaagcttccttaagaagattcctaaagaagctagagcttagctacacatacctctctaatagctaagctcacctccttgagatgagaagctagagcttagctacacaccccctataatagctaagctcacccccatgacaaacaacatgaaaataatataaaagaagt

SEQ ID NO: 157088 - DNA, 347 bp, Glycine max
tttaatagtcattgcaccagatctaacctctgcatcagaggctggaagccttctcaaaaacatgaaaaccttgaagtagcattcctaacaatatttgtgagtgttctatattgagaaaaatgactttctaagtgtagtagcgacccaatgagaatcgttgtaacataaacggtactcgtcattactacaaagtgttgagagaggcattcatttatgtaatgaagttctaggcaagagccaacgcctattgacattacgttctcattatcaagtccaacactgtatcatgagtgtgatgactaaccacttatagagcttagggggcttagtacttgaacctctatgtc

SEQ ID NO: 157089 - DNA, 696 bp, Glycine max
  unsure (1)..(696): unsure at all n locations
acgcgctccacntctcgtcccgtgntgtttantgcanttcattacctcccgtcgacagtaatatttgatgtgtgcntctctctacgctcatgcctgtactactcgtcgtctactcccgtcntagtgcactgactcatantcgtacactctcgctcattntatcgctatcactacatgacttactagcgtactcttatgagtgtctctcacattctctctactctcttatctctatcgtatctttctcatgcacatcttctcttcatctctccgatacgtactnnnnccgctctcctctcacgcagatagcacatgtgtgtgctctcgatcatacatatggggtagaatatctcgtagaccttgtgcttgtcggtacagaggtcagagttgtgcctttatacaatatatgacttgtttagaacagctgccgtctatgcttaaatattattatagcacatgctcctgctttctcgttgtgtggacgactacaccaatgttgtgacatgctgtatcttgcatcacatattcatgtgtactcatgctacgcacggtcctttcacgcgcttcatgctcatgcatacctaaaatcatcatacacggtctctcacaatgtggagtcaacccatacacactattatcatacctgcttctttagaatctattgatacctttcttgttgaccctacagatactcct

SEQ ID NO: 157090 - DNA, 422 bp, Glycine max
  unsure (1)..(422): unsure at all n locations
cattatttgattgaaatatctccattatattttaaaagtcttactctctttcactgcaattactcctgctcaagtaagattatctcttatgtaaaactcattcatccatttggtcaaacacaccatgacaataagttttattatcttgaattcttttacacaatttcatttgtacaagtatgcatgagtgtatcagattttagtgcttgagtatttaaaaaaatataatttttgtccccttatgtttctaaatctgtaattttagtccccaattntttaattgacatatgttatctctcactttttaaaaaaaatcataatttcagatcacccgactaatttcaaatgttaattgtgtactttgtattttttttctttaaattaaacttattagtaattaaatacataaaaaaaaatactct

SEQ ID NO: 157091 - DNA, 429 bp, Glycine max
tggctgctgtcatcatgtgcaagcgtcgcgatatattacgggatttagtcagacttccgagtgaaatgttattgtcgattgagatagctgcgagcttcggttggatatggcgagcgtctctatatattgcgggactcaatgagacttactagtgaaatgtgattgtcgtacgcattcgctgctacctatggaacaacaattcgagcggctgacatattgcgggactcagacggacttccgaacgatatgatattgtcgatataatatgctgagagcctccgttataaacatctagcgtatcgatatattacggcactcagtcagacgtcctagtgagatgttaaagtcgttcgaagtcggtacgcgctatggctattaattacgagcgtcacgatatattacgggactcattcagtcttccgagtgatg

SEQ ID NO: 157092 - DNA, 438 bp, Glycine max
  unsure (1)..(438): unsure at all n locations
agctcgtagcctattcgaacaacaataactnttcactcggaagtctgattgagtcctgtaatatatcttgacgctcgaatagtaagaccgaagctcgtagcagattcgaacgacaataacatgtcactcggaagtcctattgagtcccgtaatatatcgagacgctcgaattttaaaaccgaagctcgtagcaaattcgaacgacaataacatttcactcggaagtcctattgagtcccgtaatatatcgagacgctcgaattttaaaaccgaagctctgagcatattcgaacgacaataacatttcactcggaagtccgattgagtcccgtaatatatcgagacgctcgaaatttaaaaccgaagctcgtagctaattcgaacgacaataacatttcactcggaagtgtgagtgagtcccgtaatatatcgagacgc

SEQ ID NO: 157093 - DNA, 508 bp, Glycine max
agaacgcgcatgaaccatgagaacatcgagatccgagatactctccaggcgagctgacgcgtgcgagctgaagatgtcacagtgaactttataagcttatgtgctggccagcataggggacaatcgactatgtatagccaacgtattatcttatgagataaggtgtgatgacggtccttccacattatattattccatggtagattgatcgtctccgctcaaaggaaccgcttgttagagtcaagaatattgagcgtcggtcaacgttatattataagtagacacctatagaggaactaccacgttatattgggttaattgtggtataggcccctatagttgatcgaatcggtcattacactcatttcctctagttatgtctactgaactcatgctttatacttttactatgaatggaatttaacacacctcttatataaccgtccaatgtataacaacattacgagacatggatgtcattatagatgatatgaacctacactgctct

SEQ ID NO: 157094 - DNA, 380 bp, Glycine max
aatggatatggttaggtgtatgttaatcaattagactttatccgtatccttgtggatgtataccttgaaaactgccatgtagttgttgaacagggttcctagtaaggtagttccaaagacaccttttgaactgtggacaaataggatacctagtataaggcacctgcatgtttggggttgccaggcagaaataaggatttataatccgcaagaaagataattggatgcaagaacaatcagtggatatttcattggttatccagaaaagttaaaagggtatatgttttattgttctaatcatagtatgagaattgtcataactggaaatgcaaggttcattggaaatgatgaaatcagtgggagtacagttccacgagaag

SEQ ID NO: 157095 - DNA, 412 bp, Glycine max
acactcacacatatacttagttcaaaattctatgattaagagcatatatctactgaaattaaattcatacacgcacagatgaacacaacacaaaggtttctctgtcagtcggagttgtaattttttagggtgttataactatgtatagtcatttacaaaaataccctccacttgtaaactcttatgacttaattatcccttttatatctcaagatatctaggatgaccaataatcaaccttaattatccccacctaattgctaaccttacattaatgactaagttcttcttttaagcttgtaatttgtatatctagaccaagatctaattatttacatctaggtcattaatgagttgaccattatttgaccaagaaaattctctaaactatctttattctatgtagaagctt

SEQ ID NO: 157096 - DNA, 408 bp, Glycine max
tatacaagtactcttgaggtttcttccatcagagcctcggtattgagctcttaatcttctttttcttcttgtattccttactggattcgtgcaaacttctcattcatggatccaaaatctcattttcattcttacaagcttgaaacatcaaggatctaagatctttgttcatctaataaaatacatgtatcttcatcaacgtaaagagagtctctccaatacttaaaccctaatcttggcgtctttggaagctaaccttcattgaatgttgtttagatgttcaaaatttcatagctactgcatatgctggaactgtatcatgtgttgtttctcttgtaatcttaacgcaaaaaatgagatatttgagtgccaatacttacgcgtaaccttatatctcacctacctcat

SEQ ID NO: 157097 - DNA, 392 bp, Glycine max
  unsure (1)..(392): unsure at all n locations
gcattacattattactcatgcttctaaccatgtctaatattgttngatttctgcgttctgccacaccattttgatctggagaaccaagcatcttgtattgtgcaacactcccatgttcttgaagaaacttcgcaaatgaacctggtgcttgtccatcctctgtgtatctaccataggactccccacctttatgtgatctcacgatcttaatatgttttccacattgtgtcacatctgcatccttaaaaactttaaaggcatctaaagcttcattcttagaatgaagtaagtaaagacacatatatcgtgaataatcgtttataaaggatatgaatactctctgactagtggcattcatgtctgggcaaagtatgtctgtatgtatgatttct

SEQ ID NO: 157098 - DNA, 412 bp, Glycine max
  unsure (1)..(412): unsure at all n locations
tgaatgaaacaccactgtcattgagaacaatggatccatttttaaaaataatacctaatgtgtattcacaactgttgactgcttgctcatccagaatgccatagttttatgaatacttgngttgatactgaaacttgtgctttcttacagggttaggttgtgccatatatatagatgacttttcatatcagtgctgcattttttaaagattaaaaatacacctgctcatgctttctgtatgtgttgtcaactacaccaatgatgtgacatgctttaccttgcatcaaatatgcatgtgtaatcatgctatgcatgagcctttcacgcgctttatgttaatgcagacaaaaatatatcatacacggttttccacaatgtgtatgttactcagaccacaatatatcatacatgc

SEQ ID NO: 157099 - DNA, 425 bp, Glycine max
  unsure (1)..(425): unsure at all n locations
ataaaaaaaatctaatgatgagtcaaaatactcaaagaaataactttgttatgagacatgattagtttttttttatctataaaaattaaagatatatattaaagaatgtataaaattcacatggattatttaatcaattgaattaaactcctttaatataaaatataatcaattaacatttgacactaacacttaaataaataaagtaataactttttttataaaatacaaaagtagtcaatctaatcatcgaataatttaatattatctttgtaattatatataggaagaagtcaaattacaatcatatgtttttacaccaacagttatattgtaaataactctatataaaatataaattttattgatttaattgttaaattctaattatatattatcttgagtgtgggtctcacattctctan

SEQ ID NO: 157100 - DNA, 436 bp, Glycine max
  unsure (1)..(436): unsure at all n locations
tcctggtnaagttntatgcaaacaactatgcttgacattgttgttttctaatttgtatattgggatttatattagtttttcatattggtgttttcaggattcctagtgaggatgcagagtctcaactcttaaaaggcagaaaaaagtgcagtggaagcttttgagacagcccacgctatgggtgttattatgtttgacttgccaaattgccctaagaaacgttgtcaactagagacatcctctgttaatggagaaggatcatctacccatactgttactgcatcttttgaaactgccctgaggtgggcagataagtagttgatgcagtcaaaactgcatttataaggcttgcaaattgtccttcttttagtatcggtgaattcgaggaactactaagacaaattagtaatctggacttgtctgagttctcttcaga

SEQ ID NO: 157101 - DNA, 426 bp, Glycine max
gcacttatgcagtaaagagactgtctaatgcatgtttacaacatggctaagttcgactaaaaccctcttgtacactttatgtgcaagtgctagcagacctactggtgagaaaaacaaatttcacacttgacaatggatgcacgcgctgctatcgctatggccacataacttcattcgactgttgtaagcatctacagcatgtctttgcaatataatgttagatactaacacttggacagctgtatctatgcgttgacggctgagagtgaccacattgatggatatatctatcacgaataagcgtatattagaagactcgaggccgtgcgtgactacaaagtctagttgtggacagaaacatgctcggtctgaatggaatgataagaactaaaatcaatcactgacatgagcagggatgatcatcat

SEQ ID NO: 157102 - DNA, 208 bp, Glycine max
gctgttgtgaaacagatctggccactggtaatacgccacatccctctgggatcgattaccagagagaatgtgtcgcgaaatagactgtgtaggttaacactcttgaccacaggttgtgcgactacaagcgcaatgccctttctatgtaatatgccctgtctaagacgctagagactgtgctgatcatcgatcggggatacctcaaatc

SEQ ID NO: 157103 - DNA, 502 bp, Glycine max
  unsure (1)..(502): unsure at all n locations
cgcgcttgcacattgtgacgcgtttcgcccgcgcatcttgaggcagctgcggtctacagtcatatgcttctggcactctacctcatatttgtaatagccagtgtagttatataaagcctcaagctcatgaccgtctatctatgcgcgcgcgtatgatcacctcgcggacgtttgtctggccaccgatgatgtcatggaatgagaagtcatgcttgccttatctgattaccaacacgcacccctcctgttgaggtgcttgtgagcgctatcaggtactgatctcaaacagagaaagaggaattgcaatgttgcggatcaaatgcttgagcttcactgcctacctaacagcttgcactgtgtcattcatatgttcgtccaaccgtgcctcgtaaccgaacgtaatatgagctccatcatctgtgagtagcgagtgaacattatctaaccncgacttatgtgcaaacgctatgggatgactactccaagatatcacgagagaggg

SEQ ID NO: 157104 - DNA, 380 bp, Glycine max
  unsure (1)..(380): unsure at all n locations
atctaatattcatgtgagttacagaaacccgcacttattgtgatcacactctttgtgatacattattatcattattaattaaaacttataaaatcgagaattaaattccactgatgaataagatgtgaagccgacnattttttagcctttcataaattgtaacagttcgtacaaatcaaagcatattaaaatgtgttttagcatttcttacaatacataatgaaagtggtctcctagtccgtacaacaatttgtcaactagggcaagctcacattaaatatatgggcatggctaacatgattatcgcaaagtttctaacattatatttacccgtaaactattatgaatgcataacagaaatatcaggaatattgttgttg

SEQ ID NO: 157105 - DNA, 424 bp, Glycine max
agctttaaaagtacccatttaccaacctcatagtctacttcacgccatttagtatcatcagtgcgtttcatcgtagcttgcgcttctaatagcttctgacgaatgcaaagaaaaacttcctcacagtgcttcagagtatcatccaccgcatctagtttggaggagctagtgatatagtctggaaaagagaaaggtttccgcccaaacgttatctcatacggcgtagagcccgtgcctgcgttccatgaagtattatgcgataattcgacccagggaaggaatctgccccaagtccccgaccggcggtgcaccatagcccgcaaatattgctctattactctgttcatgacttcactctgaccatcactctgtggatggtaggctgaactcattctaagccttgtaccactcaattaaaaaagct

SEQ ID NO: 157106 - DNA, 427 bp, Glycine max
taggctgtttacaaaatctatttagttaaatatgctacgatttagtttataataaaacctattaagcttgataaattggtctatttattcatttatatataataaaaaattaatatacatgtattatactttaatatttaatatcttaataagttaataattcatatcataaataaaataaatatttgagataaaaagcctttaagtaaataataggtcatatcaggtttttaaaaaggtcaaaccaagcttaaaaaaagtctctgataggataataggttaggtcaaaccttaattttttataataggtcaaacctatttacacagagtctaacatgccttgtatattctcacccctattcttacgtttcaatgtttgaacttcaaaaagaaaaacaatattcataatatttgcttccaatcatgg

SEQ ID NO: 157107 - DNA, 463 bp, Glycine max
  unsure (1)..(463): unsure at all n locations
tcctcaacatcaaagtaatacaacatccaatcatcatggactatcaaaatcaagcaaaacagggcaaaggcagaaaactctgcccaaaacacaactcanaatcacagcttttctcacttaaagaccccagtaaaaattccttcgttccagtttgttaaccgttggatcgactcgaaaattttactggaagtctctagtacataaacctacattntgaccgttgggatctactagaaaatatccagaactccttctgcaatattctttccacagccaatcacacacaagcatttttctgcacttgtgcaaaattctgctgcacaatttcacagcaaaaatctgcacaaagagcagatttcgaaaaccacacttcccctcatccaatctttcccaaatcagatcctacaagtcccaaatcatgtatcaatcatgtctaaaccaaagtcaagcttcaaaacacagc

SEQ ID NO: 157108 - DNA, 401 bp, Glycine max
agcttggttcgaggtactcacccgttgaagatcgatgatcgactatgaacgaatgaagagcgtcgaataacggttgaaacctttgcgagattcctcacggaatacgttacggaaacgtttcggaagcgcctcggcttagattgtcttcacggaaacaatttttcctagcatattcgaaagagagagaagtgcctattgtgctgaacccctttcttattgccttcctcccctatttatagctaaataggggaggtggttgccgcccagctcgcccaggcgagctcaactcgccctggcgagcagggttgcttcctccagaagctaccgccttctggaggaatattccagagggcccaagtgggcctgggtgctatctgcacccacattgtactaagtacacc

SEQ ID NO: 157109 - DNA, 460 bp, Glycine max
  unsure (1)..(460): unsure at all n locations
cgctaagcgagatctgcatgatttaaatacattcttcagggtcaaaaacacaattttctcatccccctctctcaaaactccaccaaaccaccctagaaactcctcctccaccacccaggaccatcggtagccaccacaagccactgttgcttgccgccaaaccaccatacggagaggaaattaaaatgcacagcggacattaaaagagtagggaagaatgagacaaacacacaagagtntgtatactggttcggtaacaacccgtgcctacatccagtccccaagcaacctgtggtccttgagatttctttcaaccttgtaaaaatccttttacaagcaaagatccacaagggatgtaccctcccttgttctctttgaacctagtggatgtaccctccactagaactgatccacaagagatgtaccctctcttgttctcagtcaataacccaagtagatg

SEQ ID NO: 157110 - DNA, 586 bp, Glycine max
  unsure (1)..(586): unsure at all n locations
gcaaaactcccaccatacgcttctactaatcatacatcactctcaatatnacatanaccctcatacacacgccgtgcgtgaaaccattgtaganccgtcgtatctccaaagacgacctcgangcatgcaagctgctacttatgcggcagggcggacttactttactatcttgtctccaacgcgagctatgaccactgttcttccttcccgcgacgcttcttttcatgtccgcctgagtgggtatatagcctaaaccatactttccacgatctccttgagtattcactcaggctagttatgctgacgctgtctttgcctaaacccatcccgggtgcataaccgctacaccaacataactagggccattattaccgctgcatcggacagactaggctgctcaaagagggagtccacggaggatatgtcgaccacctacaaagactgtagagcgtgctctaacgaatctattgcggatcacacaaatgcaaggtagacggtcagcttaacaatatatgatacatgcccgatacgaagcaaacaatgccctcccactaccaaatattagcatatgcccagacgcaatccc

SEQ ID NO: 157111 - DNA, 380 bp, Glycine max
taaacagacaattttaaagacatgaatgtaatgagatttgagtcttgatttgcctaattgcattcaaaactctcattggaaaagaaatccatgtctatgaacttaggatcaataatggaatgagaggagaaaagggttgcgtaccatatccgttgttcttctgatgagaacatcaaggaagaagatatggacgacggaatctgcatttcctgagcctcggagtgccgtttggcttcactcgaagatcccttgcacttttttgatggatctgccatttgaacgagttatttgaaatatcaatcggctcacgtgaaagagaatgacaacagatgaagtttgggctttcggtggagtgatttggacaacactctactgatata

SEQ ID NO: 157112 - DNA, 427 bp, Glycine max
  unsure (1)..(427): unsure at all n locations
tgtttgtcatcatcttaaagggggagaatgtgaatgtatgtatacatgattctgatgatgtcaaagaagaatctaacaaggctgcttcaaatgataagcatttgcttcaagaataattcaagattgcttcaacaaacaaagccttgtttcaagattcactaaagaccaagccttgccttaaaacaaagtgctttcaagacatgcaaggctctggtaatcgattaccatgaagtgtaatcgattaccagaagacagggttgagaaatagctgttgaaaaaggttttgaatttgaattttcaacatgtaatcgattaccatatgtctgtaatcgattaccagcaacgaaactttggaaattcaaattcaaaagtcataacccttcaaattataactgtgtaatctgatacacaaacattgtaatcgatn

SEQ ID NO: 157113 - DNA, 462 bp, Glycine max
agctcgttattaaatacaaaacacacatattattatgaaaaaattgacgttaatgacgtaaattattattaacacttaccactgcatgtctcagctagtcgacatcagaccttgcagatgtcgacggtgctgctgcctccgtgaccggacggatatctgtgtctggatcctgaggggcaactctgggctgcgtagcatgaccatctgcccgaggatctgatggctggcccggcgtcatgaatggatgcgacatgcggaagaatcagtccatgtaatcgctggcacactgccctggcacaacgcagatgtcacctgctacaaccatatggtccgaatagtgcatccacctgttgtgtatatcatcagacgtgacccatgaatcggcaggtggagcatgaatggtctgagtgtatcaaactgccgcatgaccctctttggtcggtaatataaaacaatgggccc

SEQ ID NO: 157114 - DNA, 512 bp, Glycine max
  unsure (1)..(512): unsure at all n locations
cgcgcgttaatccgttgttgannaccgtgctcgtaccctgggatactctagagagatacctgcaagcacgcaagcatatgatactgagagatggaaaacactattttaatgacactaatagggacatagtgttgtattgtattacaccacgtaatccccatgagcctagcacactttcttaacttatgctctcgcgaatgaactataccgttattaggtgagccttgaacagataaccactccctctaggaacaactttttgctcatgatgcactatggcctgtgtatagaagctatgtctcattcataaaatatgcttgaatcttgtatgctacgctacacctcacttacacacaatacttttgtaatactttcattaaacgccaatcgtttcatttgtcggtagatttattctgcttagcaccctacatcccttacaaaaataggcaccatttacttttttgatcctacttcatcacctcgctctatgacggctatcatgaacaataacg

SEQ ID NO: 157115 - DNA, 390 bp, Glycine max
  unsure (1)..(390): unsure at all n locations
tgtcttctgtttatatatgatttatactcgatctaagacttgtctgatgcaatttgctcaatcntggatgacggcaatggtgatttcgaaaatctgcacttatatgcagaattttgctgcttaagtgtgcatcgtaatcttgtgtttgtgcagaaaatgcttatgcatggctgtgtgtggaaagggttgtacatattggggtctggacgttncctaacatatcccaacggtccaaatgtagacttatgctctatggacctccactcaaattttcgagtctatcacacgatgaacgagttggaacgatcagaatgttactggggtctccgagtatgaaccgctgcgggatctgtttgtgttttgggcaggggtctttgcctctgccctatc

SEQ ID NO: 157116 - DNA, 428 bp, Glycine max
gggaaataataatctgccgcagcggatccaagagaaaattaagagaagaaggagaccctctgaaggctatctatgctacggtatgattaacctttacccatcgactttaccttttatgccaattgtgaatctttaatcatgaaggttaagagaaggagcctgtgtagtgtgtagaggagggaaaataagggatgcctataaaaattatgaatggaagcttataaaatatgaagtacaaatacatacaatgttgcacagatctaaagataatggcgaagagtgtcattagttgatacttttttgttatactatttctgtattctgtttgacttttatacgtttctgtcaggcgtcataaaaaagaccgcacatagctaggaagactggtggatgcgatagcctatatagcagtgataggcataaacaca

SEQ ID NO: 157117 - DNA, 118 bp, Glycine max
ctatacccaccgcagcctgagatacgcagtcatttgcaaacatcatatactacttgctgcacaactatacttgcttatgattgccaactagttattacattaatgtaagctttctgtc

SEQ ID NO: 157118 - DNA, 483 bp, Glycine max
cgcgatgaaccatggataccgtgaataccggaacctcggagactcctgcggcgtcgagttaaaaaagacgagtttgcatttttgacgggcgaacgcgtcgcatgatcatgaaacctagacctccttgcactaatgtataaggatgctaaaaagcatactattcgttccaacaatgactctacactgctgtatctcacctcgccttgttgcatgatttactgactaccacgccctgcctttgaaaggatggatttcaacacttgtcacgctctggtaatccgttaccaggaagagttatcgatcaccagaacaccagggccttaattatcagctcaatcagggtttgtatttgtatctgcaacatgtcatctgataacacctgactgtaatttagtaccactcctgagcttaggaagctacgttctaacaacaaaactcctcaaattattcgggggttccgacacaccatctctgataccggcg

SEQ ID NO: 157119 - DNA, 424 bp, Glycine max
ccaggcgacctatgttgcttcccctagaacgcactgtcttctggaggaacttcctggaaggcccaagtgggcctggttgctatttgcaccccctgtttactaaatacaccccctgcctttttttgctgattctttttccgtaacgttatggaactttacgaatttcataacgatacttgttttctttccgtaatgtcacgaaaccttacagattacgtaatcatcccttttttggcttccgggatgatacgaaacttcacggattgtgcaacaatgctttcttttgacttacggcatgtcacggaacttcacggattgcctaacgatgggtgccaagtacctcgaagtggtctaacgagggtcgtcatccaacaaatatatggtccccggacgatatatgggtatgacagttgcccctctttat

SEQ ID NO: 157120 - DNA, 401 bp, Glycine max
tctacttatgtggcacggcgggcttacttcactttattgtcttcaacgcgagctctgaccactgttcttccttgccgcgatgctacttttcatgtgcggctgagtgggcttatatcctaaaccatacttaccacggtttgcttgagcatgtatcaagctaattatgtccgcgctgtgtatgtctacacccatatcgggtcataaccgcgccccaacatagctcgggccatcattaccgttgaatccgacagacaaggctgcccatagagggagtccacggaagatatgctgaccacctcataagactggaatgctgttctaacaattatatttgagcttccacataacgcatggatgatgggaagcttaccaagatgtcttcctctcctgacacgatgacc

SEQ ID NO: 157121 - DNA, 432 bp, Glycine max
agcttctgaagaaggactttactactctggcgcagactaggagcgtcttgtcctacttcaaccttgcccttacatcacatacatcttatctgaacttagatagggcggggttggtgtatggactagatatgaagatggatatgaatcttggagccctcatttctggacagatatctctgatagctcagtccaactcctcccggctaggatttctagcgattatcactgctttatgcatggccacaggagtcaccttagactcgttgactttcaaaactctcagcccagctattaacttggcttacatcaagaagaacttctagaacttggatgacccttcggtcagcttcccagggacccgtaaggccagggccagaggatctgagggtccatcttcaactgctccccaggactctacatgtccagctcccc

SEQ ID NO: 157122 - DNA, 427 bp, Glycine max
  unsure (1)..(427): unsure at all n locations
tagtagcagttacagaagtcaatatttccgccaataactatgatcatttctaccttacctattttccatcatggccttggtttgtgtgtttagattgccaccagagtcctaaatagacaatatctttcattgcaagcttagcaacagtcccaaaacccaatttttgccgaaaccaagtgtcatgatttctatattaccaattttgctagctgttgatgttgcatcatagttttgctatgtcatctacctttggtctcatctctttaccttacaattcaggcaattatatcattaccctttttcaatatatagaattggcaacatgcaaacatatctaatccaggaaattccaccactaatagtcagcctataatccataaccaatgaagtcccccatctccaatttatttcatcatctaattntatt

SEQ ID NO: 157123 - DNA, 407 bp, Glycine max
  unsure (1)..(407): unsure at all n locations
ntcacttcataagttgtcttatgcctaanaatacgttgagttatccttagtaaagggtaaaatattgactcaagtaaagttcaattcccactcaagattggagcaaactacttagcttggcaataattccgaccaaggtccaacctagtaggtaaccattcttgactgtgacgtatcaaggaatgtattcttaacgaataaagttacacggttaagaatgctgccgacagcaacaacaaaatggaaaattttgtttgtgacaggaaaatcttttgtggaccacccatatgttatttcaattaatcttctttttcatcgtgaaatctttttctgtgctgctttcccatttgactctggaaaatgaagaagctatatagatttagatgcagttgtttatttatttattt

SEQ ID NO: 157124 - DNA, 345 bp, Glycine max
gcttcaacggcgatttaccaccatggagatggcgtggaagacaagggagataaggtgaaacgaggcgccctctactacggaataggccatggaagacagagcttcaccaccaagaatgtgccttggataagacagcttggagaggatgcttccctggaggaaaagaggcacagattgacagagagagagagagagaagatcgaccttgaaggaggaacacggggagagaagttaaactctgagttgtgtctcacatgactctcattcatcacatttacgacaagcgatacatgtgctgctatttatagactacgcagcatacttgagaagcattcttgagaaaac

SEQ ID NO: 157125 - DNA, 421 bp, Glycine max
  unsure (1)..(421): unsure at all n locations
tccatcgagtggtaatcagagcacaagagcttctagcaagtgctccttacacctccattaattttttttgctttaccttctcttccattgttgtttcttcatttttctccatgtatctcctcacatgtcttgtgataaatgtttttaacatgattctagagtttccatggattaaacttgctatataagctagagtttccaggatctttaagctcggatggaaagatcttctggatcacagcactgcaatttccttccattatgatgctttcctgattaatatatttgtacttccttgttaacatatctttcaaaaatttatagtacagtggcatctgctacaacgcttctctgaagggcatggttatttccagtttcctgaaaatatctaacaatctcgccagatgacaatcnttttctt

SEQ ID NO: 157126 - DNA, 222 bp, Glycine max
  unsure (1)..(222): unsure at all n locations
gggggggggggganncgtagggggggcgggtggggggtaggatgggggcggcggcnaggggagggtagtctgggggcgntggggggcgggggggcgggggggggggatcgggccggtgggaggggggcggacggcggggcgggggggggtgggagtttgagtctccaggagggctggggggggatggtggcccgtgtgctacgggggagtgggcgaggggtg

SEQ ID NO: 157127 - DNA, 223 bp, Glycine max
caaaaaaaaggggggaaaaaaccacccccccgaaaaaagcaaaaaaaaacaagacaaacaaaaacaaacaaaagaaaaaaacaaaagaagaaaggcaaagaaaacacacacaacgagcgacaccaaaaagaggaaaccaaacaagaaacaaaaaaaaacaacaaacaacaaaaaacaagaacaaaaaaagaagaacaaaaaaaaaaaaaagaaaaacaaacac

SEQ ID NO: 157128 - DNA, 72 bp, Glycine max
attcctaaatatacacttaccttataatacaccacaccaagtattttctcacactccaaaacaaacccaaaa

SEQ ID NO: 157129 - DNA, 156 bp, Glycine max
  unsure (1)..(156): unsure at all n locations
ttgatttttctttatctttttctgggctaggggtgggggtttttaatttccccccccccactatnaaataataatattacgtattaatctacgttttgtacacattatcatcagtctcgttcaacgtatatgcttacttagttcgaactaatctta

SEQ ID NO: 157130 - DNA, 240 bp, Glycine max
  unsure (1)..(240): unsure at all n locations
aggggggggggaaanaaaacacaaccacaaaacccaaaaaagagggaagaaacgaccacaaagaaccaaagcaaagcaacgaacgaaaaaagagaaaggaacaaaaaaaaaaaaacacacgaacaagaaaagagacaaaacaaaacaaagaagaaaacaaagaaaaaaaaacggagaaaaaaacagaaagaaaggaaacgaaaaaaacccaggagaacgaagaaaggaacgaaaagaaca

SEQ ID NO: 157131 - DNA, 217 bp, Glycine max
aaaggaaaagaaaaagaaagaagagcggaaaaaaaaaaaaaaaaaagacaaaagagaaaaaaaaaacgaaaaaaaagaagagaagaaaaaaaaaaaagaaagaaagaagaaaaaagaaaaaagaaaggaaacaaagaaacaaagaggagaaagaaaaaaaaaataaataaaaaaagaaaagaaagagagaggaggaaaaaaacaaaataaaaaaaaa

SEQ ID NO: 157132 - DNA, 64 bp, Glycine max
  unsure (1)..(64): unsure at all n locations
ttaaaaccccaaacttantatccttcttgttttttcagggggtgggaggggggcctataacccc

SEQ ID NO: 157133 - DNA, 102 bp, Glycine max
ctgaacaaccaaaaagacagagaaaaaaagaaaggggggaaaaacaaccaacaacaaaaaagaaaaagaaaacaaaacaaaagaagaagagaacaagaacaa

SEQ ID NO: 157134 - DNA, 53 bp, Glycine max
accacacctgaaacaccaccaagacgccccacaccacaaagccacccccaaaa

SEQ ID NO: 157135 - DNA, 164 bp, Glycine max
ttcctctgcttctattacttaaattccccccccccatgtattttataataaactatctttcccccacatattaaagtctcctaattacaaaatcacttcttttccaggtagactttttaatcttcattccacaaaagatttctcaaagctttatccttcaattc

SEQ ID NO: 157136 - DNA, 488 bp, Glycine max
  unsure (1)..(488): unsure at all n locations
gtgaacagtttagttacacaattaattgtaatctaannnatagccaggtgtgcatctctcccgcggatcttaagtgaccgggatgcactttagcaagtgccacttgtttttttcttgaagccctttaggccggtgcccttccttgtattaagccactacagccctaaaagaaaacctgatatcccgtatttttaaggaattggagcttaggaatagtcagggaaatagagcggggaggtccttgttcataggaaaacttgtaaagccgcaatctcttcagacgattttgggccctcacatgagtccctcgtttacggggaaatgttggacatggcgactggaagcgattctctcaccgcgctgggtcgcaaccacgaactagagaagacattattacgcctcacgtggctgaaggaatctgcacggcccaaatagagagaccttgatccatcttcggacaaacctactgacctcatgacggtggatcg

SEQ ID NO: 157137 - DNA, 447 bp, Glycine max
  unsure (1)..(447): unsure at all n locations
ggtgtatngctacattctactaatatatggaattgcccactgctatgcctgagaataacaatngcttgaccacaacaacgctggaggcggcaagggacaatggtctttcaaataaacctgttgtacatgaacaaacattatatcatgcactgaccgtgccaaacgaaccagcgaagtcattgcataattgttatactaactatattcaatgtacctgaacaaaatgatttccaaacacgtgaccgacacatatgatgcggtggccataagaatcaggtggtgtgtgacttctataagggaaaaatgtcatgtcttgttggcgggacaacgatacaaggattacgttataccgggaagcaatcacatatcccatgtccgttatattcatccactcgtccacgcttacctgaatgaaccaaacatacacatgtaagctaatataacatt

SEQ ID NO: 157138 - DNA, 388 bp, Glycine max
  unsure (1)..(388): unsure at all n locations
agcttcttatcaaggctcatcttggtggtgaagctccttcttccatggcttattccttagtggatggcgcctcctctcacctattctcctttgtcttccgctgcatctccatggtggaaaatcaccattgaaggacctcattgaagctcaaagatccagcctccgtagaagccccacaagcaagcttccatcaagtggtaatcagagcacaagagcttcaagtaggtgctccttaaacctccatntaatttttgctttaccttctcttccattgttgnttcttcattgtttctccatgtatctcctcacatgtcttgtgctaaatgttttaacatgattctatagagctcccactgattaaacttgctatacacgctagatttgattt

SEQ ID NO: 157139 - DNA, 347 bp, Glycine max
  unsure (1)..(347): unsure at all n locations
catagatggatgaatgtatgggacgaggtngtacgctagctctagttccataatggagaccttctgctgaaactaactttccacacttttgcacttcacacgaaagagccccgcacgaaactaggatagacatgtccatgtaaagacagacgctttccaaggaactaccttccgctccccatcatatatggcaacgttctagattgctgtgcaccctctgatcttctaggccattactggactgataattttgcgcgagcgacgacttcagctcatggactaccattatactgattttcatgaggaaatacggcgcctgctgtgggcatgactgtttactcccatgg

SEQ ID NO: 157140 - DNA, 376 bp, Glycine max
  unsure (1)..(376): unsure at all n locations
taagtcacctgcggcatgcaagcttctaaactttatacaagaatgaagctctgataccacttcttggacaagttgcctcagatatcttaagaagggggggttgaattaagatatcacagactattccccaattaaaaattctacttttaatttaatccaacaacccaagattccttttaaacaagaactcctagataataatgcaaattaatcttactaaatagaaataataagcaataaacaataaaggagtctaagggaagagaaaatgcaaactcagatntatactggttcggccacacccttgtgcctacgtccagtccccaagcaacccgctagagaggttcactatcttgcaaaatccctttacaagttc

SEQ ID NO: 157141 - DNA, 415 bp, Glycine max
  unsure (1)..(415): unsure at all n locations
gacactctatagtactacagctnttgttctgttacatctgtttcatgtatatgatgtgatctccaaatatccaccgactagtcatctttaaccagtgcaattttacatgatatcttgttcctgtagaatctcatgtcctgccgaagatgcctgttcaaaatttgccgttacagtgagaaatcctaggaaaaatataagaaaacttgaggaaaaagtgatattatactcttcatttaaaagtagtacaaactacaaacttaagttttagcttttagagcatattcattctccaataagtgaaaataatttggtgcagcatttaggaagaatttaattttctttgatcgttttgcaggatattgctggatttcataacagtatttaaattatgcaacagatcaaacatgggcatatc

SEQ ID NO: 157142 - DNA, 154 bp, Glycine max
caacctctacgtcatatccttattacctgggcagagatttatctcgaataatttttttccatatccgaccaaactcatacttgtggtcagattctatcatatccacatgatcaaatttgatcacaactcctgagaccctaacgaaattttttct

SEQ ID NO: 157143 - DNA, 412 bp, Glycine max
  unsure (1)..(412): unsure at all n locations
agctnntgcggattggtctntgccagtgaaaggatcgatgtgggtccgaaaagaggcaaatntagtcatcctgcttcgacgaatgagaaaactggngcaaatgaagagggtgaggatgaaagagaaatccatgctgcgattaccattcctacatggaaacttcccaccaacccaacaatgtcattactcagccaataacaacccatctccttacccaccacccagttatccacaaaggccatccctaaatcaaaccacaaaacccacctaccacacaaccaatgctaaacaccacttttggcatgaaccgaagcaccaaccaaaagggatttttgcagcataaagcctgtaggatccaccccaaattccggtgtcatatgctgaacttgctctcatatctactcgataattc

SEQ ID NO: 157144 - DNA, 470 bp, Glycine max
tcagccagatcgctaagtgagagcttatccgtggctaagcatgacctattgtcgccaagcgcaattccttacgaccataattgaggtccatgacgctaagcaccagtcatggcagctatgcgagattcattgtggcaatatgagcgctaagcgagtccctctcagctaagcgcatactcctctgtacttaagatgcatcattttagctaagctggccagagcctgttttagcgagagttgtagcttttctaatctacagacctcgctaagcggacataccctcgtgctaagtcgagtttctgctaaaaaaaaaactgattttgaatgtgaaacgtcagctaagcgcacgggtccgctaagcgagccttgttgagaaaccaaacgtctctcttgctcgcttagcacaacggtccgctaggcgaaagtatcgaaaaactgtctaagtgagtgtaacagcagctacactcaca

SEQ ID NO: 157145 - DNA, 474 bp, Glycine max
cggttgtgcatctactcgaccggatcttaagtcactgggctgcagctctagccaatggactaccttgattaattcctttggagcccttttgagccgtgggtgcctttccttggtttgaagctcactacaagccctaaatgaaaaaccatgatatcaccctatctttgacgaattttggagctctggaattgttctgcgaataaacgcggggggctttttggcttcattggagacccgtatcgctagcattgcttcgtgatgtattttgggccccacttgattgacattgtatattggtaaacgttggacatgctgaatgaaactgtgtgtctcacaggctatggagtggggcacctgctttaagaagaggattttgagcgccctaagttgagtgaataaaatcttcaccgtccagaatgtgaaaccctggtctcccttatgtaaaatgaacgtactcttttagttcttaatttt

SEQ ID NO: 157146 - DNA, 456 bp, Glycine max
  unsure (1)..(456): unsure at all n locations
tgcatgatttacattctccctctttctcaagagaattcttaattcttcttgacatcatcaaaatcttcatgatttacattctccccctttctcaagaaaattcttaattctgcttgacatcatcaaaatcttcatgatttacagcctcagctggccttgcccttggtcttctggccccacaaataataattgttggatcatcagggttccaacaattcttccttatgtangccagattaatgaccgggctcagacgttcaaagacaagactgtcggaggcaactcctctggtcctgcataaagctgtgataagagcaggaaacacgagttttgaggagttatactgggccatagaagtaatctgccctaaaatgagggctccgacattcatgtccagctgagtaactaggccaaagattaacctagctcgatccacagtcagatcagatgtgtggg

SEQ ID NO: 157147 - DNA, 504 bp, Glycine max
gcaccggattgatgcgatcctgtctccgagcatgctatcactctaactgcacgcgtgcgcatcccatatcgacggtcactttcggggtattgattcttctagcatggcttatgacatagttggaaggcccctactctcacctatactcactagacttacgctgcatctccgtggaggaccataaccattggaggaccttattggttctcatatatcccccctccgtagaatctccacaaaccatcttccatcaagaggatctcaaatcacacgagcttgaagatactgctacgtaacgcagctcaatttgtcgcttaccttatcttcattagcgctgcttattggatctacgtgtatctgctcacatgtcttgagactaatgtcctaaacatgatatttagagcgaccactgattataattgctatgtaagcataatgtgatcgttatagcgcacatctcttttcttgtatctaacatgaattggtagagtaaaggcctttagc

SEQ ID NO: 157148 - DNA, 146 bp, Glycine max
ccatgtgctcttctctgttaaaagctactacatccttaatgtaaaccatgatgtacccatccttacgaatttggagcagggaagtggggtgaaaaatgagtgggtctcgctcatagacaatcgcttgctggctttcttctgaaaat

SEQ ID NO: 157149 - DNA, 417 bp, Glycine max
  unsure (1)..(417): unsure at all n locations
agctntatggccatgtaaacactatggcttatggtttgttttcccccattcaatcaacccaatgtttccaaaaaacatctcttttatcaagtcacgcacacatccgagtccatttaggcatccgggaaaaatctttcattgcattcacccttcaggcgcacacatttttttcaaaaatctttttatatcctaatctgtgaattttccaaagaaaactggcggtcattttctttcaaaagcatgttggctttttagttttctttctcttagctntttttttcaattaatttctttcagaccaatttttttcagaaaaggtttgtaacctgggcaaagttggtattcgagattacactntatcaaaaggaacaanaggcgtgtgaatgacaataaaccaacacacaagacccctcttat

SEQ ID NO: 157150 - DNA, 426 bp, Glycine max
tcttcgaagggcaaggttatttccagtttcttgaaaatatctaaaaatcttgccagatgacgatctttttccttcttggaaggtaccacaggatatagtacttccacaccttcatccacagctttttcacttctactcttctttgcattcttattttatttattctttttcattttctatttcttattctacttctttttctttttcttggtccttcaattctttattctggaccattatttgtttccctttttcccgattgccttcacctctcacatcatttttcttaacttcagtacctttctttttagtcgctttctccttgtgcactacactttcttcatcctcagcttccacaaacctcttactccttgccatcacagctttgcattcctccttgggattctgttctgtatttgccacaaa

SEQ ID NO: 157151 - DNA, 265 bp, Glycine max
acaggtatgataacaaaatccactgcataccatgtactggaactaccacacccccaatgctttctaatcgaaacaccggctctctacccaccacccagtttcttaaggactcctttttaaacaccatcccctccaacgccattgctaaacgccctttggctgacctccaccaccattggaattgcacaacacccgtggataccccaattacgggcattgctgactctctcaatttaccatgtgcacgaccaaaccctgaagtgct

SEQ ID NO: 157152 - DNA, 464 bp, Glycine max
  unsure (1)..(464): unsure at all n locations
tctcccgcattttcctataattagggggagaagtgacaggaangaacgttcaaccctcctggtatatgagattcacttactattagtgagataaatcgcttccatgaagaatatacacgccgaggcgcttccgtaacgttgatgttacgttttcgtgagtgatttcgcgaagattttcaaccattcttcgacgttcttcttttgatattcgtcgttcttcggtcttcaaccggtaagttcccgatatcgaactttntaattcattctatgtaccgttggtggtccccattcgtttagcgtacttttattttcgtttcatatactctacgtagctccttttgacgtgctttagtcatctacttgcctaatcaataataaaataaatttccaccgatcatttgaatggttacatcacttaatttcagttcaatgagatgtgaccgtttggtcatgccataaccatg

SEQ ID NO: 157153 - DNA, 100 bp, Glycine max
  unsure (1)..(100): unsure at all n locations
acatgttgctccccctatctctaacaagcttctatagttcctgtgatctatatggatactgngatagctacttatatcgccttgcgttgaggacgggcta

SEQ ID NO: 157154 - DNA, 281 bp, Glycine max
ttaacatcctcattgattagtgcagatcaaactactatatccttgaggggacttacatcatacacttgagctgcattttccataaaccagaattcgcaaaggatggaatcaaggaatagcatacataaagatcatgagcatacccacgttttcaaatttgaccataaagggccataaaaataattcttatatttctttaaaagatatattattattaaataacacatagttggtatagaatgttgatgcttacaagagttaaaaaattattctatccaatt

SEQ ID NO: 157155 - DNA, 197 bp, Glycine max
taagtaaacgatcataaacccataatctggcgacaagtgcagataatgagagtcatggctagttggcataacatgttaaccaatgcatctagtttaccttcacgcttcctatttctgttgatgaatatgaattcacggctacttgattcactcctctaatgaccatagcatcacttctggcactaaattgttgggag

SEQ ID NO: 157156 - DNA, 413 bp, Glycine max
cacggagactaatcagacatgggatgcagctatcacgtacatgcttctattctaaaacttctcatcatgtgcttattagctggtcgggtttctctttggctattgaagccataccaattatggacaatattatggtaacaggcagaagatttcgccgatgattcattcttgggatactatggtaagaacttggaatctcatcttcaatgagtcatattgtcataccatgaaatatcatatcttgttgctattgaatgaatcttgtaattactacaaaacacctactgaaattctaaattttttagatcaaatgctaagtacaagtaaaaagatggatgatgatactattctgcaggtcttagctgtgctgtgtacgcgtttcctataattgctattgctatcattggacttct

SEQ ID NO: 157157 - DNA, 596 bp, Glycine max
  unsure (1)..(596): unsure at all n locations
cttcacactcttntcaacatttaantgtgttgtntntanttaatttanntttttnaggccggaatgatgcctcatcactgacannctaaagtaaaccgcagcatgcgacttaacaaccagtagatatgagtgaattaaactacgattacaagaccttgaacaaatgtggaagaatatgattgaagcatactgttatattctagcatatctacacagtacaataacgtacacttaagaattaagccttagcctttcatctttggctgctgcattattcgtgtaaacatagcgcatatgccatatactaacgccgtattactgtaagtgaactcggaggcattacaagaaatgagaattgagacagttcttagtttcgagttgataagataagtgcaccattacaaggtgccaacatttggtcacacccaaccgaaaacaattacagcaataaaaacaaaggtcatgtacacatggtatgtgattatagctttgtacatggatggttctaagatcaaaaagtacgcttgccatttttacgtaatgtggtatcaactttggtcttaggccgaccattaccaaacactacaattgtcatt

SEQ ID NO: 157158 - DNA, 484 bp, Glycine max
  unsure (1)..(484): unsure at all n locations
ntngatgctccgccagcaactccgtaaggtactgatcgaaacctctcaggatagattaggcatcttttatttattttaaacgaacaatagtaataattactgtgaatttaaaggatactgggctgctttatagcagcgccttccgcttgtcccgggctaggcaaaggacgacgacctactggtcgtgaccctagcctctctttgcatccgtccataagtacctaaaagtaggaaacaatgaggtgtggcaaatcgcgaccgcgtcgtcgtcttaccttaatcggtttctgcttttaactttgtctcaacctttgatgattctgccccctgtttatcacaaaatatgcatgtgtatgcgtatgcatgaatgttttcaaacgcaacaaatttttagtgaaagctggtttaggttcgattntaattaagcgcttggggcatcccatgaactgagcgaaagggctcaggtgatcacaaactaacacat

SEQ ID NO: 157159 - DNA, 441 bp, Glycine max
  unsure (1)..(441): unsure at all n locations
ccaacgctctgatcaagctctcccataatctanangtaaatctacgatctctatcagatactatgctagattgcacaccatgtaacctgacaacctcacttatatacgaggaggtcaacttttccatggaaaatctgatattaatgggaatgaattgagcaaacttattcaatctatcaacaataacccatatagaatctaaacctctaagggttctatgtagtcctaccacaaaattcatggaaatgctgtcccacttccactatggtatctctaaaggttgcaacttacctgaaggtctctgatgttatatcttatccttctgacagactangcatgcatacacaaactcactaacctctctctttatgtatagccaccaaaacatcgtctttaaatcatgatacatctgtggagcaccatcatcaatgctcaaattac

SEQ ID NO: 157160 - DNA, 313 bp, Glycine max
taatggttggatttgacatgggatcactaaccgcacatgtgtggctcatagtgccgtccacatgcgtcttacaatgtattgagaatgttaccgcctgcccttactagcttctgatgcgcacaagagagctcgaggatcatctgcttgtatacaaggggtatgctgtaatgcatatcagatagtctgttgagcgcgtatgcacgacgatgccatgactgctgcgacactagatgctggtgtttgataacagacatgagcacgaatgataggataaacgtgatgtgattaacagatgcttatgcactgcatgata

SEQ ID NO: 157161 - DNA, 239 bp, Glycine max
agttaactgaggcgtgcgcgcgcgtgctctgaactagagttcactctactgctgagcttgcgcagatcatggaatatgcagatctaagcagaagctcgaagtgattcatgatacagaccatagctctactaagacgaaataaataaatgagtatcaatcactccaatgagcatgctctatggtgacatcatggattatcacttggcgtgatgaagtgatctgctcgcttatatattaat

SEQ ID NO: 157162 - DNA, 357 bp, Glycine max
attctatagagagaaaggtccacgttccacagagtattgagagattctgcagcgtgaagatctgtacagactagagtcggaagcggaagccgttctgagagctggagatgaatccgtgactggttgtgagatcctacaggtgaaggagacatcctcagcacttgtatttctgcgatctatcgtcttgttcatagctttcgtgtaaaggacgctccttggatatggaaagctcgaatactatgatggatcttcgttgtttgtgcacgatgtctatataaatctatgtatttaatgaagttacgtgagatgcctgtgctataaacattttaattcagtatgcctataccatgttcatat

SEQ ID NO: 157163 - DNA, 458 bp, Glycine max
tgctgcgaaagagagttttgctgcttattgcatgcctatatagctctacaacataattaagagttgtgctgaaagatatgtactccttctgcctatgtaaattatgttttatgtgattatttataacttatattgggaattgcgatatattgcatgagttataaggctgatattattggtatcattatttttttttttttgaaaattatctctttttctatctcgtgtttaggagaatttcttatactatttacttctctttagtagtacctattgcttcctttgtttttttttttttacctcttgaactcctccgatttcgggtctctgaagataatatcatcgcatgctgttctaacaatatacatgtctgtcttatagtcattattcctacggagatgtatggactacaatataatggctaagcgtaagaagaggtaaacactattatatataat

SEQ ID NO: 157164 - DNA, 517 bp, Glycine max
  unsure (1)..(517): unsure at all n locations
cgggttgattggatcctactcgtacccgcgatcctctgagtcacctgcggcatgcaagcgttgatagtaaaaggctgagatgaatgtgcaaccttgatatgcagaccatgatgaagagagcctntgaggtaccttacaatgcgtataacagctgtccaatgagagtccatatgattagccatgatctgacagaccttgttcacagcatagcttaactcatgccttgtaatggctgtgtattggagagcaccaacaacatacctatagagagatggatcactgaataaatccaagccagctttggttaacttgcaattagtagtcataggggaaggaatgactgtgcttctgccattttggttttctgaagtaaatctctgatatagttgctgagtcagtagaatagtcccatcagccacagattggatttctataccaagaaaatattcaaagtttccaattgtgtaagacaacaattggaatgtatcttggtggtgagttgctgaattattacatg

SEQ ID NO: 157165 - DNA, 366 bp, Glycine max
  unsure (1)..(366): unsure at all n locations
atgacgaaatggctcacaagaggatgtaatgatctttcaaagtggagaggaccttacaatatgtcaataccaaccacagagagtccaattaagacatccatagtttccttagtttcacaatatcatatcttaagttggttatatataaatatcactatcatagcttacccacacagtgacaaagcatagacatacactgactctgtcaatttattcccactatgatgggataaaaaacttggcattatgttcagttctactatgtctctattgttctcttctttctatgtgcttgttaatcaatttttgcatgtactttcaactgtaataatangaaaataattttcctttatgggtctcttctag

SEQ ID NO: 157166 - DNA, 254 bp, Glycine max
agcttaagagaccacacctgatccttacacttcactagctggtcatagtgcttctgcatctcatgagtacttcacacaaaactagaggggctaccacaggttgcttcaacaccatgtattttgctgttatctccaccacttatgatcctagtgatgaactctggcatgaccttaatagcaacccttccatcacaacccttcatgtactgaatagggcgtgcaccagacttgatacgggacttgttagggcaaga

SEQ ID NO: 157167 - DNA, 471 bp, Glycine max
  unsure (1)..(471): unsure at all n locations
tgtaacaatattntattgaaagtgagagtattaatagaagataaaaagttatcgattataaatttatagataaaattgaaaaacaactatgtagcttctaatttataagttatatgacatattttaagttagtagcattagcatgtggttgtaggtttttaaaatatgttaaaattccattttagtctcacaaatttaaaatatcttgttctggtctattgtttctagaaataatatagctaacaaaaaaaatacttttaaataatcatattttagtttttaattaattatgaactcttataattttttaaaaaataaattttattaaaatataaataaattatgtaaataatggaataattaaaatgaacagtataatattaaaattatttctaaataaaaatagtattatattataggagacaatatattagagttcttaataagtactttagtcatataatctatcca

SEQ ID NO: 157168 - DNA, 460 bp, Glycine max
tattagaatcgtcattaataagcttatttctaatagtgtcagcgagacattaattgtcctataaagtgaagttgtaagctaatttccccattattcccaaaacacgacttgtttcaatgttaatatatctaattctgaattttggcaacttgaagtatcattcaactaagctttgacaaagtaaggatgccaaattatagattccattaggctctttgcttcgtgggtttggctcttgtacaccatgtgtgttgtttttatgctcctctttcagttgatatatttccaatgcgtagtaagtgatcgctagctgcttacgtgccaacatagttgggattaaagtaactaatgtgatgcatctgcatgttgcaatgttaaaaaagataggataaattgtgactctagttcccctaattcttcaaaaccatgattttaatcccctacattttaattgctacat

SEQ ID NO: 157169 - DNA, 451 bp, Glycine max
  unsure (1)..(451): unsure at all n locations
agcttcacacaatnntattttttttatcaaacttgagttntggaaaaccaattactaagactttcctaactagatgatttaaatgatgcatgttaatatgtgcagccctatgatgccacaatcatgaatcatctatcttactcaccaagcaacttagctcatgaaaagatacatgttcaacattcaacatatagatattacctattctcttactgatctggacaactttaccggatatggcttcacttataagacatcaatttctattgaactctattttgaaccctttatcacaaagttgactaatgcttagaagttatgctttagtccatccacatataacacattcttaatctgagttntatgttgattccctatatcatgagaaatcatatttttccttttgtggtnngtctcaacatgaccatagtttggacttgtcacacgtcat

SEQ ID NO: 157170 - DNA, 397 bp, Glycine max
  unsure (1)..(397): unsure at all n locations
tgtgaagttcttccaggactgtccagagcaacattntgtacacatattggagccattcttgaaaatcatcatgtataggattctaattcctttctcttaatttgtccaattttttaagtatttggttttgtttccttgaatgctttaactatttgataaattagtcttgcatcgacaggacataaacaaagtgttactgcaccaaagtccattttcctcttgtgaagtggaatagttgtacgatgaacaagtatttcacctatattagatggatggcaaagagaattagggattctgccaaagtatgctctaggttatatgcaaggcctaataaattagaagctagattaattctatactctgtagcatgtaattaaatatgggaaaaataatatat

SEQ ID NO: 157171 - DNA, 334 bp, Glycine max
ggatcttaagcaccgaggctgcagcttaacacaattatgcaacaaataatataagtttccataagatataataaatctaaaatgtgctttctaagttgatacctaacatcataataacataagctgattgcaatttcaaagttctttatactcttagaaaaaaggtccatacactcttaatttctccttttctttcaaatctcatgattaagagaacacattctcaaatcaagaaaacaatatcatatgattgaattgaatacttatcttctaatgatgtttctctggtcacaaataacaccaaatggttgaacttacttacgtaataatcata

SEQ ID NO: 157172 - DNA, 460 bp, Glycine max
tatgcttatgaagacttcctgacactgctatgtgtgaagcacctagtaacctctgtcgaacatccctagaccaacagtgcggcagaggcagccaatatactcaccctttgggccctatgcactacactcaacaagtctaacggtccatggaaggaggaactccccagtatactctgggcctatcattgctaaccctagacaatgaccataaaaattcttttgcgactcacatatggcataaacaccatgatccccgtcgaagtcagggaaccgtcaacaaggagattgttgttctagcaacaaaaaaatgaagacaacatgagggtagaacataagacaaccgatgacgtacaagaggtagccaaaatcaaagaagagggtaccaagctccaagcatcaaggagatacaaccttaagtttcaacctcaagccttttaacccggcgacctcgtctggcgag

SEQ ID NO: 157173 - DNA, 309 bp, Glycine max
agcttgtaggatatgtggatcacggtactgtccattatgcacactacacatgctgatgctgttcttgccaacaatacttactcttcaaggacgaatctgaagtacaaagttcttcaattttatttcacagacttactcacttgacgataccaacactttgtgtcaacagactggatgatctctcgtcataaacatagcatgtgttattcaatttatgtgggtcagacaaaggactggaaataacactatcatcgtgttaatagataactcactttataagaaaagtaaaagttctctgctgaaatcttg

SEQ ID NO: 157174 - DNA, 264 bp, Glycine max
  unsure (1)..(264): unsure at all n locations
gacttaaccttgcgactctcaaagacgcactctgtttncactcgtaacatcacattgtcactttcctaccctaggttaactctacatttcatctctgacagtgntgcatgagcaatttttcagcatactacatcgcaaacatcatcacaaaaccctaaaacagaatgggtatgtttgacttcatcaagcatggcgatttgaacaagtgttcagcaaatgtcttcacaaattatcatcacacgccatatacctagcaagactacc

SEQ ID NO: 157175 - DNA, 406 bp, Glycine max
ataagatataataaatctaaaatgtgctttctaagttgatacctaacatcataataacataagctgattgcaatttcaaagttctttatactcttagaaaaaaggtccatacactcttaatttctccttttctttcaaatctcatgattaagagaacacattctcaaatcaggaaaacaaaatcatatgattgaattgaatacttatcttctaatgatgtttctctgttcacaaataacaccaaatggttgaacttagttacgtaataatcatatcatgaaatagcagagaaaggtcagccatcataaaatgaattaatcattcttacaccctaagtagtaatcataacaatcatgtctaatagagctgctaaatatttagctcacctctctgccatctatggaat

SEQ ID NO: 157176 - DNA, 416 bp, Glycine max
  unsure (1)..(416): unsure at all n locations
ntggtccttaggcctaagtgtatcactctagtcgttatgggaactacctacatgctccaacatggccctcattcacgtaccaagtggtttcataggccatttctcaccaaatcatgcgcaaatgccattgaggcatttcaccgagcacttggtgggcgcatgtttaggcacaaatagcaggggggtaagggcaatgtggcatgcccgatcatttcagaatacatcttaggcctaaggccattgcctataacccttcaactcaacataaacaaacaaatattcaaagataacttgctcatattgtttaccatatacatgtaacttggagcaccaaagaagcatcaatggacagctagagagcccatgaatggagtacttacttgttggggatgaataatcatgcctaattgcaataa

SEQ ID NO: 157177 - DNA, 379 bp, Glycine max
agtcaactgacgctgccgcttcattgttcaatttgagcgtctagatatatcatgcgcctgaatctgacattccagcgagaaggatgaccatttctattactcgagagctcttgtggttcaatttccaccgtctccttgagggaggtgcttgacctccacgtccgagtgaaaaaggatgaccattcttatttttcgagagcttccgttgttttatttccagcggctctatatccgatgcgcctgaattggacatccgagtgaaaatttataatcattaagatttctcgagagcttccgcactttcaattcgagcgtctcgatatattatgcacctgaatcggacactcgagtgataaattatgaccattttaatttctct

SEQ ID NO: 157178 - DNA, 227 bp, Glycine max
cttgcctcacagatgtccacgaaggataaggcggccgaaggaactagttccgctcccgagtatgacagtcaccgctttaggagcgctgtacatcagcagcgcttcgaagccatcaagggatggtcatttcttcgggagcgacgcgttcagctcatggacgacgagactgctgatttcgcatatgacacaggtttccgtcacgtgtcatcaatcactacccccatggc

SEQ ID NO: 157179 - DNA, 430 bp, Glycine max
agcttgtaggatagttggttcacggcaatgactcattatgcacacaacacatgctgatgcagtccttgccaacaacacatactcttcaaggacgaatctgaagtacaaagtttatcaattttatttcacagacttactcacttgacgataccaacactttgtgtcaacagtctgtaggatctctcatcataaacatagcatgtgttatccaatttatgtgtgtcagacaaagtactggaaataacactatcatcatgttaatagataactcactttataagaaaagtaaaatttctctgctgaaattcttgcaagctaatttgttcttctttagaatacctacaccagagaatagtagataagtcacttgtagttggaaaacagtggaaagcaacatattctgatcattgcaaattgcaagcagtcaatg

SEQ ID NO: 157180 - DNA, 403 bp, Glycine max
  unsure (1)..(403): unsure at all n locations
tatagtaaaagaagcanagtcaaaattntgtttcattntatcttgttgttaacacctaaaaagttagttgttggagcaacatcttgattggatacaactggcataagaaaactaattggatacaattgatgtggctaaattagggtataaaggtaaaacaactgggatggaacactttgagtgatgtgtaggccgatttaaagaacgtgtaagacaaattgactgataatggagcggctgaagggatgatagccatgatctcctagattttaaggagtgttaatagtgtttcaactaatataaccattagtcaatctctataaataaggcctatcacattataactaacacacagacatcaatacataagaatccattcattatcctgcgtatatattgtatt

SEQ ID NO: 157181 - DNA, 176 bp, Glycine max
  unsure (1)..(176): unsure at all n locations
ttaagtcacctgcngcatgcaagcttcccgtatccgtacttggaaggatctgattaccgccttcctaaggcagtatcagtacaattgtgatatggctcctgaccgtactctactgcagaatatgttcaagaaagagggtgaaacctttaaagaatatgcgcagcgatggagggatt

SEQ ID NO: 157182 - DNA, 313 bp, Glycine max
tattcaacaatgacaaatcacataacataattttaagattctgagcctcactagtagcagtatctaaagcaataatttctgcttccatggtagaatgtgaaataatagtttgttcagcagatttccatgatattacaccaccagctaaagtaaagacataatcacttgtcgattatgtttcatcagaatcaaaaatccaatttgcatcactaaacccctcaattacttcctaatctaccaactacatatgctatgacatgcctatagagagttgtcaattgcatcaaagaaccactaatttgataatattgtg

SEQ ID NO: 157183 - DNA, 564 bp, Glycine max
  unsure (1)..(564): unsure at all n locations
catggcaaccgaaaatcgtaaacggtataaagtatcttaactatacaaaacacncccggttgatgctgccgcgctgacaccgcacancnaactgacgcggcgcacgcgagcaagntgatgaatgaggacccatctcatctgtttctatgtggcaggcagacgaaggagcgcaactagttatccacatccgcaatgcgcgcgtaaaaccaccatcccctgttgacggctccaactgaactcacgtacgtccacgcaacccgtaggcaaagttataatgcagccgaggccccatcaaacctcccaagctgccacaacgaacaatcaaaaaaacatttaaacaggacatgctatcacagccaagcgaaacatagcaaaggcggaaaactctgctcaacacaataacacaaagcgcagcacttgtctcctaagaccacagaaacaatccttcgagcaaagagcttaccgctggaacgagctcaagagtataccagcaagctataaagcataatcgctacacggggcccgccggagggactagcaacaatcagaaacaaggatgacacg

SEQ ID NO: 157184 - DNA, 540 bp, Glycine max
  unsure (1)..(540): unsure at all n locations
tgaacgtggaatgatacatgcgataacgtgacaaccactgtactcgngcgacactananaacacccangcttgcctgtccgatgtagcagtatcgatgggcctagctactgttggcgaacggttaccaacccggaatgggtttaggcaaagaccacgacggtttgactaacctgattaatgccaaaggaactcgtgtgaagctacggttagtctatacgcccactcacgcagatctaaagagaagcatcgtgggaaggaagagcggtagtcaaagctcgtggtcgagactagaaggtgaaggaagcccgcactggcacataagtagaagctttataagcgcggttctgatggacgaatgctaagcggacgtgatataccatcacgatgtgtcgagtacatttggattggcacgacccttgctctaccgatttttagctgtgtaattggcgtgcgctgtgtcatacactaatttcgatggcggactctcccttgacgatcgactaccttcgcttgccctcgtgaggtgtcggttccgaacg

SEQ ID NO: 157185 - DNA, 336 bp, Glycine max
gctctctaagatgatacctatcatcataataacataagctgatagctattaccaagttctttatactcgtacaagaaagggccatacactctgaatttctccatttctttcaaatctcaagaataagagaacaccttctcaaatcaagaggacaaaatcatatgattgaattgaatacttatcttctaatgatgtctctctgttcacaaataaaaccaaatggttgaacttaggtacgcgataaccatatcatgaaatagcagaaaaaggtcggccatcataaattgaattactcattttacaccctacatagtaattcatacaatcatgtctaat

SEQ ID NO: 157186 - DNA, 276 bp, Glycine max
agcatcatcttcttcctccacgccgggaaattgtgttctgcgatcgtggaggccgatggtgtcgagtagcccaggcattttgagggtggtgttctccctccgcgtcagcaatgtcaagaagcactcttcgtttcattgccggctttttattaatccgaagtgtttataggtgatccgtaaaaattggttagcagaagtgaagattaacatcaagttgatccgtaatttaatcctaattatcaaaaaactcactattagtttacggatcaacttgat

SEQ ID NO: 157187 - DNA, 435 bp, Glycine max
catcccactcctatattggcaagtctctcatgacgatcacaagctaacactacccattattgggagctatgcaaaccaaactctctctgatgtaatgattctaaactatatattaatatgatgttgatattgctatttatctttgtgttcattcacatgtcttcgatctgatcatccattttcataaactgtcttaagatttaggcattggaaaatatttatatgctcgaactggggaagaacattcaggtaatccatctctagggatagagtgacattgtctagcctatgcatgcatctttgctcgtaatgcaaattatctaatataacttttaagggattaggagcgatattaggtaatatatgctctctcacttgagggatcatggttagagtatgttagaacgtccaagtaattatcatattatcataaaa

SEQ ID NO: 157188 - DNA, 372 bp, Glycine max
  unsure (1)..(372): unsure at all n locations
agctatacagcagattntagtaatgacccacttacctacaattaaaacaacttaatgccattaacctagggaattaaaaaaacttaatggctgagtgtaactgaaattgtggcaaccaaaagtcacccccaacagccaacaagtcagccaccatttggtctcccaaaaggctgatgcctatgttgccaattgggcccttattacaacttgaactaaacctaactaaagcccttttagttgattaacccaaaacatatttttggtcagccaactttacaaggattgggccattatttagacaaactaaacactctaaaattgaaacaaagtggtgtcatttactcctcctccatttgggccatgatacaactc

SEQ ID NO: 157189 - DNA, 471 bp, Glycine max
ggaaattaaacaatggaagcactcgagatattcaaatggtcataacttatcacacggaggtctgattcatgcgcataatatatcgagacgctcgaaattgaacaacgaatgctctcgagaaattcaattggtcataacttgtcacacggaagtccaattctggcgcatcacatatcgagacgctgtaaattgaacaccggaagctctcgagaaattcatatggtcataacttatcacacagaggtttgatttaggcgcataatatatcgagacgctcgaaattgaacaacgaatgctctcgagaaattcaaatggtcataacttatcacacggaggtctgattcaggcgcataatatatcgagacgctcgaaattgaacaacgaatgctctcgagaaattcaaatggtcataacttgtcacacggatgtccaattctagcgcatcacatatcgagacgctgtaattgaaca

SEQ ID NO: 157190 - DNA, 410 bp, Glycine max
  unsure (1)..(410): unsure at all n locations
agctntagcttccaactcaacaggtaggtgacaagaattgccatagaccaattggaaaggagtaagtcttgtaggagctatgtatgttgttctgcatgcccacaaagcttcatctagcttttgggaccaatccttccttgattgagcaactgttttttctaatattttcttaactttcctattagaaacttcagcttgcccatgtggtaaggcgaagctaccttgggtttgacactgtagtgttggaggactttggtgagttatacattacaaaaatgagatcctccgtcacttattagtaccctgggtgtgccaaaccttgagaagatattatttcttaggaagcaaataacaatttttgcatttgcatgntgtaccactactgattcaacccattttcttacatagtc

SEQ ID NO: 157191 - DNA, 438 bp, Glycine max
  unsure (1)..(438): unsure at all n locations
nttcaacacanaagttagtcgtaaataacgactaacaactcccctaaatttacagttttgcttgtcctcaagcaaagaaagaacagttcacttgtcctcaagtgacaagctcacagtggtaagcaatgctttcaaccaatttatggttcttttcaaccaacaaagaattcaatcacatgaacacaagtggcaagcaatgctttcaaccaacaacttttcacaagatatacagattttcaaagatatgaacatgataattaggcacactaatgaaataagctagcaagcaagacaaatatcaaggaaggttcatcaagccaattcctcatggtcactgtttcactcaagcacaagtgtttaggctatttatcaatcaacaaccagcacaagtcccaaattttgaatgtcatctcatgccatacagtcacaaacacacta

SEQ ID NO: 157192 - DNA, 398 bp, Glycine max
  unsure (1)..(398): unsure at all n locations
agcttgtaggattatggngtacccatcacatgtggtactaggtggcggtcgggcgatggtgcacaacaagttttccacatccacaatgcgcgcataaacccaccatcccctgttgcccacctccaactgaactcacgtactcccacgtagcccatatcctcgtttctctccacccgggtccccatcaatcctcccaagcttccacaacatccaatcaaaacaacattcaaacagcacaagctatcacagccaagcaaaacagagcaaaggcagaaaactctgctcaacacatcaaccaaaatcacagcttttctctcttaaggaccacagtaacaattccttcgatccaattcgttaacccgtggatcgactnncaaaatttactggaagtctatagt

SEQ ID NO: 157193 - DNA, 429 bp, Glycine max
  unsure (1)..(429): unsure at all n locations
ntccggatttagtcttcgccagtgaaaggatcgatgtgggtccaaaaagaggcaaatttgatcatcctactaggacgactgagaaaactggggcaaatgaagagggtgagaaagagggagaaacccatgttgtgactggcattcctatacggccaagtttcccaccaacccaacaatgtcattactcagccaataacaaacctcctccttacccaccgcccagttatccacaaaggccatccctaaatcaaccacaaagcctgtctaccgcacttccaatgacgaagaccacctttagcacaaaccaaaaaacaccaacaaaaaggaattttgtagcaaaaagcctgtagggttcaccccaaattcctttgtcatatgctaaacttgatcccatatccactcaataattcaatggtagccataacccta

SEQ ID NO: 157194 - DNA, 359 bp, Glycine max
tcggacatccgtgtgaaaagttacgaccgtaaggatatgtccagagctatcatagttgaatttcgagcgtctagacatagtatgcgcccgaatcggacatccgtgtgaaaagttatgacgatatgaatatctcaagagctttcgatggtgagtttcgagtgtatcgatatattataatacctgaatcggacctccgtgtgaaaagttatgactatatgcatttatcgagagtttccgatgtatagtttcgagcgtatcgatatattataagcctgaatcggacatccgtgtgaaaagttatgaccattagaatttctcaggagctttcgttgtgcagtttcgagcgtctcgatatatga

SEQ ID NO: 157195 - DNA, 424 bp, Glycine max
  unsure (1)..(424): unsure at all n locations
tagatagatcaacgtanggttctttttccttcaaccttcattctacatnttttccttaaacaaagacatgcatgattttactattgtatttcttctccatctcttccattgaaaagtgcattttttgtactattttatttttctttcttccattgtatatatatatatatatatacctattgatttcttattgcagtcatgatttgagtttttagagcaaactctttgagtcgatggtgctactatcttcgaaaatccttctatgaatcttcgatagtatccaaccaatccaacaaaatgtgtaatctctatagctatcttatgggcgtttcactgcaaaattgtgtctaccttggaaggatccactacattgctacccaccaagatcacatgacctaagatccgtacctcatcaagtcaaaac

SEQ ID NO: 157196 - DNA, 376 bp, Glycine max
gcaactaggatgttcggaagtatcaaagtaatctgggaatggaacattggaaagctataaagaaagttatgagatacttacaaggaacaaaagatcacatgcttacatataggaggtctaatcatcttaaggtgattgggtattcagactcatactttgttggatgtgtggttatgagaaaattcactcttggctatgtatttcttttagtcggaggagtaatatcatggaagagtgcaaagcaaccagttgttgttgttgcatctaccatggaagtagaatttgcagcatgttttgaggctacaagttaagctaattgactgcgaaactttatctcagggctctgaattgacttacgactgctaggcattgaaat

SEQ ID NO: 157197 - DNA, 442 bp, Glycine max
cagtgtgtcgtcccgagctaatcactgagctcactttaaatgggaaaaccgccctactcttatataaagtcggacaccgttcgttttttttccttgaaccaaaccggtaccggttctcccttttttgcccgatggaactaacaacggcccaatttttattcctttcactatttctaactttccgaaaactaaaaataccccccttgttgcttacaaggcaccctgcattttctttatgtttttttgtttacacaacctattaattgaggctgggcttttattttcacatcaatttaatataagccttgctttaaatttctttatatatcccaacctggttattgtggcctgctatattttcacccacaattattttgcacggcaatgtatttttagttaagaccatatattttgctcggttttatttacctgggatactaac

SEQ ID NO: 157198 - DNA, 224 bp, Glycine max
ctaagcttattaagaggcttcctccagaagcttcattaagagacttctagcacactccagacatcttctcaaagatcccaacggtcagatcatggaaaggtgcttggtgaagttgaagaccaaatttcgagaagatccaacggttaatgaaggctggacagtgtttttaccgagccagcttcatgtagctatttctagaagctttattaagaggctttttctag

SEQ ID NO: 157199 - DNA, 443 bp, Glycine max
  unsure (1)..(443): unsure at all n locations
agcttcctcggngccatttcctgcgaaggcttacatttggaaagctagttctaccagtgngatactattcttaaaacaaaaatgacatacaacctcctcccataaatacaaacatcaatgtaaatttagaggaagcttatgcgcatatttccttacaaacgttctcttgcacaagacattctattaaccaaaaaaaaatgcacccatatacaatcaaggcagcttcgttacctagattatttacacgtacttccaaggtgtatttgttacttacatcacacacctccttggctaaattcacatacatgcatactcaaagcattttgtggtaccaaaaattgcacatgtgcacatcttggtatttctaatacctatacatacacaaacttcatgatgaatcttgactatctacacaataaggngctacattntatgctcttttc

SEQ ID NO: 157200 - DNA, 300 bp, Glycine max
tagtggtgagatgaagtaacattgtgtgctagtctagtgtcttttaagtgtacttgaaaagataaaaagagaaaattactaagtttgttagcgacgttagggagtcatctaacaagaaattaatacttttcaaaattttcaagaactccaacatattttacccaatttataatttaaaaattaaacaaagtttttatttttctaaattcatattttaaatatattctaacatgagaaaaaatgttatagtaaaaaaaatgaatcgtaaccaaaaaataaaaatataggtaaattaatagt

SEQ ID NO: 157201 - DNA, 110 bp, Glycine max
cgcttaatagcatgcagtgactaacgtcatcatctttacctctcccggagatgacagcctcttccggtcgataatgacaaaagccctatctgctattcgtcagactcaca

SEQ ID NO: 157202 - DNA, 103 bp, Glycine max
ggtgatgtgcgcgactgatggtaccatgaggtgttcgctggtgtctgacccacgcgcgtaatgaagagacgataagcacatcatactcccaacctacccactc

SEQ ID NO: 157203 - DNA, 432 bp, Glycine max
  unsure (1)..(432): unsure at all n locations
agcttatgcgatccatggggctntccaaaccactaacttcttatgcaagaaatagttaatccattgggagttacatcccgaaggatatgatcaaatagctaactgcgtcattctatctcagtaccaactctattttgttaaatgggtttttttttatggataatcgattctggtgaattgtgaagagttacttcatgtataatgccttctattccacanaactcattaaataaaacatattcaccactcatatcggatctacaccattgtattttcttatttattttattttccactttcgctctatataaaagaaacatataaaacactatacaatatatggatagcatatgaatgaccctttaatgtntttgctacgttatggttgtgacaccacacattactttaacaacccatctcttgacctttttg

SEQ ID NO: 157204 - DNA, 298 bp, Glycine max
atcctctttcgaaacttctagatgatatttaccctttactgatgctaaaaatagcggcgaggaacgtcgagaagcagatcccgtcggagccgtactgggcattcttgattctgtacacatcagtgacactagaataatatcgtctctgccgatctgtctgttcgctgctgtatatgtttgctagtcaagggatattttcattagaatcaaaatgtgctctcagcgttataacaggagagacgacaaatggatttggacaggacaacagaggcttgtgtgagagaaacgttagaacctt

SEQ ID NO: 157205 - DNA, 268 bp, Glycine max
cgatccacgtttaagagaatttggggttagcccaataagcaccttgacatataaaagtttcattgacaattgaagaaaggaattgcatgacagcgactgaccaatgtttcaatttcattcaactaatggaatcgggttgagcctcctattatcccaggcatttccttcctgtgggttatgctgaaaacttttatttaaggtgggtttggtgggagaaatctttatcatatgtttctaacaaaatcgatcttttttaaagtttgaagta

SEQ ID NO: 157206 - DNA, 235 bp, Glycine max
  unsure (1)..(235): unsure at all n locations
tttggtgacgatgccactaccgaggagaaccacttggggatgtatcaccacaattcgtatcatttgttactcaaaccaccacccacataaaatttttgggttattggtggaggtaccaacgccttaatgtatggttagngctattcttgttttatggcttctgccagccctttgttttataaaaatagattcaatcaaaccacgcatatactgagctaatttgataaatcataaa

SEQ ID NO: 157207 - DNA, 102 bp, Glycine max
aaacgaggaaaaaaaatatccgagttctgcggaaggctcgggggaccgggggtctattggagcgacgcttctttgacgatcaacaagaaattaatattctcc

SEQ ID NO: 157208 - DNA, 91 bp, Glycine max
agcttgtagggttaggaatggcggttaagattagagagagagtcaagtaactgtgaagcgactttattctaacagccgcgtgacatgagcc

SEQ ID NO: 157209 - DNA, 132 bp, Glycine max
  unsure (1)..(132): unsure at all n locations
tcacanaagtttgtatggcttgaaacaagcaccgaggcagtggtacaagaagtttaatgagtttatgagcaactcaggattcaaaagatgtgacatgcaccattgctgctatgttaaaaaatatactaccac

SEQ ID NO: 157210 - DNA, 374 bp, Glycine max
  unsure (1)..(374): unsure at all n locations
agctntataagtgcgggtctgngagacgaatgtcaagtgtttgcgatatgtgaagatgatgctccaagtacttcggatttggttcgaccatgccctcctgatttccagctgngaaattggcgagtggaggaacgccccggcatttacgcaacaagcataatgtaaacctttacggatttaaaagctctatagttgggcctaggctttagagatttcattttgctaaggctctgtgtcttttgtttttgaatttataatacaaggatctttcttcatctgttactggtctctacccattctcattcatttgcatgcttacttctttttctgacacggcagattcgatgaccgagcccccgaagggactaatacct

SEQ ID NO: 157211 - DNA, 365 bp, Glycine max
tgtaggattatgtggtacccactcacatgtggtactaggtggcgctcgggcgatggtgcacaacaagttttccacattcacaatgcgcgcataaacccaccatcccctgtgtggcacctccaactgagctcacgtactcccacgtagcccatatactcgtttctgtcaacaccgtgtccccatcaatcctcccaagcttacacaacattcaagcacaacaacattcacacacgccaagctatcacagtcaagcagaacagagcacaggcagaacactctgccaaaacaccaaccagatcacagctattctcactcagcgaccccagtaacaataccttcgctccaattcgataaccgctggatcg

SEQ ID NO: 157212 - DNA, 201 bp, Glycine max
  unsure (1)..(201): unsure at all n locations
tcaccggatgatgccgatcgtacatttnctaatcgactttatccaattgttattcagggattgaatagaatatacaatgtccgttgtcgttcgttatatggccccgactgatatctttcagacgacattgcgcaatttctcttacaaacgctggccgataatgtttttttatttacggtataggaagttttttgttttgtt

SEQ ID NO: 157213 - DNA, 391 bp, Glycine max
tgcttgtggagcttctatggaggctggatcttgagcttcttgaggtcctttaatggtgattttccaccatggagatgcagtggaagacaaaggagaagaggtaagaggcggcgccatccactagggaataagccttggaagaaggagcttcaccatcaagatgagccttggataagaagcttggagaggatgcttcaatggaggaaaagaaagagggagagaaagagagaggggggagcacgaaattgaaagaagataaagggagagaagttgaactttgagttgtgtctcacaagactctcattcatcaaagttacaacaagtgttatacatgcttctatttatagactaggtagcttccttgagaagctttcttaagaaaacttccttg

SEQ ID NO: 157214 - DNA, 326 bp, Glycine max
gcttctttagaggcttactccagatgcttcattatgagacttctagcactctccatacatcttctcatagatcccatcggacagatcatggataggtgtcttggtgatagttgaagcaccatgtctcaagacgatccaacggttactgaatgctggactgctgttttaccgagccagcttcatgtaactctctgtcgaagcttcattacaaggcttctactataggcttcctcgtggcttcgttgagaagctgtgtccagaggcttctttgtgaagctacattcttatctatccacccctctattaactaaattagcttacttaat

SEQ ID NO: 157215 - DNA, 411 bp, Glycine max
gcaagcttgagcattcaatatcctgatgacggtgttccatatctcctcaacactggactaatacatttgaggactaaggttcatggtcttgcacgtgaagattcttataagcatcttaaggagctccatattgtttgctccaccatgaagccccctgatgtccaagaagatcatatcttcttaaaagcttttcctcattctctagagggagtggctaaagattggctatactaccttgctcctaggtccattttcagcctgggatgaccttaagatggtgctcttggagaaatttatctctacatctatggacactgccttcatataagacatctcatgcatcatgcatcttattggggagagcttgcttgattactacgaaagattctacaaattatgtgcaagtatgcc

SEQ ID NO: 157216 - DNA, 355 bp, Glycine max
tctgattctagtaatgatccatgtggcgtccctaaataatgtactggttaataataataaattaaatagcaaaaactatgggattctttcttttctttttctcttctctctctttttcatagcaattaaattcataaggaatattatcactatagagtcctgaatggcctgttcacaactctatgcagagtcatttctttctgatcacttgtaaccctcaaactattttgctctttcaaaagaaaataaaccaaccatcgtttatgtcgcacgtgagaaatataaaatgcggtcgataactctttcaataaaatttgtaacactttctttcaataatacatagtggcatcagagc

SEQ ID NO: 157217 - DNA, 306 bp, Glycine max
atggacttaccttgaattaatttctttgatagccctgttgagcctggtttccctatccttgtttagaagctcactacaagccttaagtgaaaaaccatgatattaccatatccttaaggaattttggagctttggaaatgttttgggaataagagtggggggtttttgtttcattggacaacttgttctgttggctatgctttatgatgtatgttgggccatacttgatgtacattgtatagttggtaaatgttggacatgctgaatgaaatgttgttctcaaaggtaaaaaaaaaaataaaaatt

SEQ ID NO: 157218 - DNA, 470 bp, Glycine max
tgacactataaaactaagcttccataggttattccaagatcatgatgaagaccaagtcaacttgtgtctcatgacaaaatctcatgagaacaacaaagaagaatctgtaaggaagaagtggtacatcgacagtggatgttccaagcatatgacaggagatgtatccaaatttacaaccatttctcctaagaaaagtggacacgttacatatggcgacaacaacaaaggcaaaattattggagtcggtaaaataggtacgagttcttctactcctattgaaaatgttatacttgtacaaggtttgaagcatagcctattaagtgttagtcaattatgtgataaaggatataaagtatcttttgattctgaaaaatgtgttattaagaatgagcatgataaagatatcgaacatatatggttcagagaatataatgtctacatgattgatttataacaacaacctgatatga

SEQ ID NO: 157219 - DNA, 351 bp, Glycine max
gttgaaagacactattatatatatacttaaacatatgcgaatacaattaaccaccgagcataagccaccattatgaaacctgccttgctatgaaaacaaaagggtgcaaatatttttaacaattttgaaatggataattaggtttgcaaggaggcccgagaattataaaatcctgtaattcgtttaaatcatctgttgatatagacaagcatgcggaatcatgttaaacgattctactgtgatttggatatgatagatttatttctaaatacttatcaaacatgtaccacaaatgtggtatggagcattactagagttgcattctgatcgcatatatcacattacagtgta

SEQ ID NO: 157220 - DNA, 433 bp, Glycine max
ctcatctatctccactatgttgcctaatgcctgaaatgttatttctgatggcagtgttcctaaatgtagggaagaatttctctaagaacacccgcttaaggtcatcccagctgaaaatatacctgcgagcaagggaatatagccaatcttttgcactccctccagagaatgaggaaaagcctttataaagatatgatcttcttggacgttatggggcttcatggtggaacatacaatatggaactccttaagatgtttatgaggatcttcacctgcaagaccgtgaaacttacgcagcaattgtattattccagtcttgagaacatatggaacaccctcattaggatattgaatgcacaagctttcataagtgaaatcaggtgcatccatctccctaagagttctttacgaggtggaggttgaccatgttctt

SEQ ID NO: 157221 - DNA, 193 bp, Glycine max
ctttgactctctcaagatgcttctttacataggacgcctgtgctagaccttctttatgcttataaacataagcattaggcataggcaaaagatctacaggagttagagggttaataccataaacaactttccaatgaaaactactagaggtgctatgaacagctatattgttgcaaatcaccatggagtaaac

SEQ ID NO: 157222 - DNA, 366 bp, Glycine max
agcgtctcgatttcttatgcggctgggtcggccatctttacttaatggtctgacacgcgagctttgtccagagctctcgctgttcaatatgcatcgtttcatgatcgtctgcgcgggcttatagcctacaccagacatgccacgaccatcttgagcatttatgaggctccgtatgccaacttcgtgcgtgcctatacacattgcgggttaataaccgttccccaacataagtcaggaccttattactgttgcaagagcctgacaaggttgaccacaaacggattcctctgttgagctgctgactacctcatatgactggaaagtggtgactatcgaattttctgcagatcccacataaggcattta

SEQ ID NO: 157223 - DNA, 152 bp, Glycine max
ttctgggaggcaatttactggagtcgcactccaacacaataagttcttatttctaattcatggtagaagaacatctactttcgtttgcccataagaatgagcttgtatacaagagctatggtgatgaaaatgtacactgtgatttcacttct

SEQ ID NO: 157224 - DNA, 385 bp, Glycine max
tgcaacagcatgctatatacacatctttatattcatgagtgtatgattagatttcgaaatacggtaccgttgaagtagataaatgtatcttccttggaaatatacattgtctttgtctgaaattgaacatgtatttcttggtccagagtttcgcaagtcaaatgactctgttgctatatcttatagaagtgcatcttctgagagaactttattttataaattgaatgaattacgaattaaaagaaatttacgaattagaagactaaaagactcacttattgaattctataaattaacaaacttacgaattgtaagaaataaagtttggaattatcagaactgaataagtgattaataaaaatatgttatttagcaaaaggagata

SEQ ID NO: 157225 - DNA, 135 bp, Glycine max
  unsure (1)..(135): unsure at all n locations
agcttgatgtgagaaagcgtggaatattcattcttcctacttntgtttgccgaccacagagtggtacctggagatatgtcacgcgggtcacgataccttatagacttctatcggcatccttcttggcgaatcctc

SEQ ID NO: 157226 - DNA, 197 bp, Glycine max
  unsure (1)..(197): unsure at all n locations
ntagcaactctntctttntgtttagtcaatacttctaatgctcttaatctctcctcatctaaatcaaccaactcatctgacatcattttccaataatggtcgattggaatgtccatttgttnttgtaccctggctgattgcaaatgtatttcgaccggaagtacagcatcatgcccattaatctatcgaataggggt

SEQ ID NO: 157227 - DNA, 385 bp, Glycine max
agcttatccctagaggggatggacctttttatgttttggagaggatcaataactatgcctcattgttggacctcccacaatagtatggagtctccaccacttttcacaattctgatttaactccttacgtaggcggagctgacattgaggaggaggaactaacatgattgatgtctaattctcttaaagggaaggggatgatgcaatcctccctatgaagggaccaatcactataaccatgatcaagaagctccaaaaaagattgagctaaagctgatgaataacgccctagggttctcatgaaccttacggacatttttgagcccatgagccaaggttgcgtccaattatctttgtacatattacactaggatgccataatatt

SEQ ID NO: 157228 - DNA, 415 bp, Glycine max
agcgtctcaatatattattggcctgaatcagacatccgaatcaaaagttatggctgtttaactatgccatgtgcttccatgttcaattttgagcatctcgatatattatgcacctgaatcgggcatctgagtgaaaagttatgccatatgagttagccgagagcttcgttgttcgatttcgagcgtcatcgacatattattggcctgaatcggacatccgagtcaaaagtgatggcagtttaaactttacatgtgcttccatgtttaattttgagcatctcgatatattatgcacctgaatcggacatctgagagaaaagttatgccatatgagatagctgagagcattcgttgttcattttcgagcgactcgatatattatcggcctgaattggacatccgagtcaaaagttat

SEQ ID NO: 157229 - DNA, 334 bp, Glycine max
agcttcatgatgaatcaagattgattcagtgagttttgatgataacaaagatgatgacaaagagctcaaaagtcaagatcacttcctgataacaaagatgatgacattcaagaatgagttcaagattgagtcaagaacacttcaaggatcatgagcaaatttgatttcaagaatcaagaatcaagattcaagattcaaagattcaagaataatcaagatcaagattcaagaatcaagagaagacttaatcttgataagctttataaagtttgtcagaacattgagtagcacaagaagttttcacacaatcattaccacagagtttttactctct

SEQ ID NO: 157230 - DNA, 400 bp, Glycine max
tctacttatgtggcagggcgggcttccttcaccttcttgtctccaacgcgaactttgaccactgttcttccttcccgcgatgcttcttttcatgtccgcctgagtgggcttatagcctaaaccatacttcccacgatttccttgggtatttatcaggctagttatgccgccgttgtttttgcctaaacccatcccgggttcataaccgttccccaacataactcgggccatcattaccgctgcatcggacagacaaggctgcccaaagagggagtccacggaggaaatgctgaccacctcaaaagactggaaagcagtttctaacgattcttctgcggcttccacataaggcatggaggatgggcagcttaccaagatatcttcctcgcctgacacgatg

SEQ ID NO: 157231 - DNA, 450 bp, Glycine max
  unsure (1)..(450): unsure at all n locations
gcttataatgtcttacgggaaataacccactaacacacacaagggccataagatcaagttaacatgcttaaaaaaacttcctttaatctttattatatatattaacataaattctttttttaatttcaagaaaacattttcacaatatataatacattttttaaaaaataaatatagaggtgttacactggtggttgggagcataggttgaggtggtagtttatgactanggtaataattctcctacaaatgagctatactattggaatatatatttctacaagacggttggaatatgttagagagattaaatgttacgttattgctataaggattggtttgatatcataaaaaattggtgtagtgaactttcatcgcatagtttaaagacatcacaactaaaactaacacgagtgttgtattaatgtcttaacatacgtcttaatcaat

SEQ ID NO: 157232 - DNA, 428 bp, Glycine max
ttgagccaaaatcctaactcaccatataccttgacccatggtgagaatgtcaatccttaccctcggaagcaaataataatagaatgaaaatatccaatcaaagaaaaaaaaaagagaaggaaaatttccaatcaaagagaaagcaaaataaaaaaagagagaaggaaaatttccaatcaaaggaaaaaagataggaaaggaaattcccaatcaaagagtgggagaaagcgaaaagaaaagaaagataattcccaaccaaagagtgggagatagtaaaaggaaggaaagatagctcctgatcaatgattgaaagacatcagaatatatgtgcataaaggtctttggaccggacaatatctgtacaatacagaattgtcaccaaatgaacaaaataaaaagggaaaggaaaccatgacctgaaatggtct

SEQ ID NO: 157233 - DNA, 400 bp, Glycine max
gaagaaattcatatggtcataactattcactcggatgtccgattcaggtgtatcacatatcaagacgctcgaaatttaacaacggaagctctcgataaattcaaattgtcataccttttcacacggaggtcctatttatgcgcttaatatatcgagaagctcgaaattgaacaacggaagctctcgggaaatcaacatggtcataacttatgactcagatgtccgattatgcgaatcatatatcgagaagctcgaaattgatcaatggaagctctcgagaattccaatggtcataacgtttaacatggaggtctgaccatgcgcataatataatgacacgcttgaaattgaacaacggaagctcttgagataaccaaatgagcattacttttcacacgga

SEQ ID NO: 157234 - DNA, 354 bp, Glycine max
gcttataatgtcttacgggaaataacccactaacacacacaaggccaaaagatcaattaaacatgcttaaaaaaacttcctttaatgtttattatatatattaacataaattctttttttaatttcaagaaaacattttcacaatatataatacatttcttaaaaaataaatatagaggtgttacactggtggttgggagcatacgttgaggtggtagtttacgactaagtaataatttctcctacaaatgagctatactattggaatatatatttttacaagacggttggaatatgttagagagattaaatgttaggttattgctataagtattggtttgatatcataaaaaa

SEQ ID NO: 157235 - DNA, 407 bp, Glycine max
tcgatcatccaccaccgccgccaccatcatcttagaattatattttaatattattactactttgattttcagccttgtattttggctatattattatggtatgtgaacaatttactatttccttatttgcatggtatgtttggaccaatgttaagtatgttatttgactatgtggagtgtataattaatctattcatggttgtatgctccatggttttcatggttcttgcttcttgcttgatgatttggttgatatttttttatgaacattgaatggatgtttaaattaaatttgtttgatacgcactgtggctgtttgttgatcccaaaattataatatatgcacagattctgaaacaaagggggagaatctatgtgagtgatcgactaggagatagtgtgtgtgt

SEQ ID NO: 157236 - DNA, 292 bp, Glycine max
  unsure (1)..(292): unsure at all n locations
gcttaacctatcgtctgnacagtctttatatttgggagccaatccaatccttgtgttcggactctcagccacttatgatagccgccgatgatcccattacggcttcccctaagctctctgtcttttcttcacgccgcatcccatgccttgcgaactccttggagtaccctcgcgttgtggtcactgaaaccccgtgcgatgaaaggcgtgatgctatcgtctgatggcactcctctcatgaggtagccaagctgtcttatggcgaggacgggattataattaatacaacccc

SEQ ID NO: 157237 - DNA, 397 bp, Glycine max
gtgacactatatatactaagctttataattatgcacacaacttcaaatcaagccccgactatggtggctttcgaacaaacaaataaaaacccttcgctcaatggcgcattattcttaataaattctaaaaaagaaaaaaaaaagtaagaggttactgtatgagttcttgaaagaatgctgctgcgtataaaggtgcgtctgcaatgagagaagggatgagctatattattatattggtggagaagatggaagaacctcggtattgggagaggagggggaacaggtaaaggggtctcttccttcacctccatgctataccatattcattttacttttatcatatgatgtctcatgatctaatcaaatcctctttaagaagttaaatagaatataaaat

SEQ ID NO: 157238 - DNA, 488 bp, Glycine max
  unsure (1)..(488): unsure at all n locations
gagatgaacctcgagacccgcaccttaagacacccgcggcatgcaagcttgtacgataattgggtacccatcagtttgtgttactatgttggagaatggacacacggctctcataaatataggctcattcacattgcgcgcagaaacgcaccatcccctgatgcccaccaacaactgagcttacgtactgccacgtagcacatatacacgatgatcttcacccgggacctcagaatacctccccagcctacaaacctcctaatcctacagcgttcaaacagtactagcaatcacatccgcgctatcttgatgccgggcgtggaacaatgttcgcacataaacgaagatacctgttatctctttaaggacgcacagaagcattctgaaataatgaacnccggtgggcgacttgagttcaaactgaagccgtatagtctactcatctacggctcacgagatgacggggaaaccccatagtaaaaagtttg

SEQ ID NO: 157239 - DNA, 455 bp, Glycine max
agcttataagaaccaaaatgccttaatcatttccatatatgcatgtgaattaggacgcatcaacaagaatcaagccaaggctattgtgcaagcaatcaatggggcaaaacacaccaaatgattataatgatggatggctcaaattctcacaaaggtaaaatcatcactttcaaattgagctttcaaaactatcatgacatgtagagaagaatcaaggatttcaagtcacaaaatgtcaagaacttttattttcaaaacaattacccatttcttgaacatatcctataattcaaagaaaaacatgcaaagtcgtacgtgcacacaaaattgacccaaaatattaaactgaaaatccgacgatactaacagcattaacatattaacacaactaacaaatttaacaaaccaacataactagcaaaaccaaagaacactctcccccccccccccatact

SEQ ID NO: 157240 - DNA, 486 bp, Glycine max
  unsure (1)..(486): unsure at all n locations
tctagccaatggacttacctcgaattaattcctttgatagcccttttgagccttgattccctttccttgttttgaagctcactacaagccttaagtgaaaaaccatgatatcaccatatccttaaggaatgttggagctttggaattgttttgggaataagtgtggggggtttttgtttcattggataatatgttttgttggctatgcttcatgatgtaattttggcccatacttgatgtacattgtatattggttaaatgttggaaatgcggaatgagatgctgnttctcaaatgctacagagtattaaaaatataattaaaaaataataataattaaaaaatcgaataagaacaagataaccaagaaagttgagtgaataagatcttaaatggaatatgaatgatgagactgcttgatctactctctatggttaaattctatctttatgtcttcttatatttctctatatatgcacttattccc

SEQ ID NO: 157241 - DNA, 428 bp, Glycine max
  unsure (1)..(428): unsure at all n locations
gagcttcttatccaaggctcatcttggtggtgaagctccttcttccatggcatattacctagaggatggcgcctcctctcacctcttctcctttgtcttccgctgcatctttatggtgaaaatcaccattaatggacgtcattgaagctcagagatccagcctccatagaagccccacaagcaagtctccatcaagtggtaatcaaagcacaagagcttcaagtaggagctccttatacctacattaatcttttttctttaccttctcttccattgttgcttcttcatttttctccatgtatctcctcacattgcttgttatanatgtcgttaacatgattncttatagtttccaccaattaaacttgctatagaaactaatttgaatttctatggttcaaattgttcttgttcttgaaccatgaatt

SEQ ID NO: 157242 - DNA, 413 bp, Glycine max
tcagaccacaacaacacaaaatctaggtatccaaaacccctcaatttaatggattttcaaggtttgagaagtgaaattgagaatgaggtaaatttggagcaaactctcacctcacacaagtctataacatcaatttaaacttgctcaaactggatttacacctaaaattccaccgaatcaaaatttgactcctcaacacccaattttaccctagaaatggctctttgttcactttggtcatttgtttttctctcttgtacagcccaagctttctcataagtgctaaatgacatttcaagctaggattaactcactttaacctccaaatgccactaaatccagatatggccttccaactctcaaaaccctactctttttccactcataacaccatattctcactttctaaccct

SEQ ID NO: 157243 - DNA, 196 bp, Glycine max
aggactggtgttttactgcactgcggttagggcaccatggtatgggaatcgcatgactgcccatttgtggattatggacagaaaagatccatggaaacgatacctagcaggcacaccatacactggaatctgatgcaccaatgaagcgtactaaggtgcctcacattcacattcacgttctcatcctcttacacat

SEQ ID NO: 157244 - DNA, 574 bp, Glycine max
  unsure (1)..(574): unsure at all n locations
agattattttatttttcgggantnacgttanntnnttaccgcacgcgctttgataccctgctatccgtgacacttcagagtactcaagctctcgtatcactttacacacacttcctgatagcgccgtcttaggtggcttgcaaacgaacataattaaccccattgctcctaggcgcactactctcaaagaattgcaagatagaagaaaacaagtaacagggtactgtctgagctcttgaaacaatgctgctgcgacataaggcgcttcagacacgagataacgcatgagctatatatatatatgggtggcgaagacggatgaaccttggaattgcgagatgagggggaacacgtataggggtctctccctttacctgctagcaatacctgtatgtgcatactttcatcttacgatgtcccatgatctaatctaaccccctttagagcctaactcattataagatcgatgacttttctctcaattagttatattaatcttcaaattgtagactgcaactacgatttttacgcctacataatcttcatccgctacgctttcacgattccctcatcc

SEQ ID NO: 157245 - DNA, 190 bp, Glycine max
tctaaaaagaggcaaatctgatcatcatgctttgataaatgcaaagaaaaaaaaaaaaaaactacggcaaatgaagagggtgagaatgagggagaagcccatgctgtgactgccattcctatacagccaagttgtccaccaacccaacaatgtcattactcagccaataaacaaaccttgtacttaccca

SEQ ID NO: 157246 - DNA, 378 bp, Glycine max
ttcaggaccttgaatactcagcttgataaggttccgcgtggatcgtcgcaaaacgaaggtgcgaaccttgcttcgattgcttggagaatggctgaccacgacgtgatgaaattgttcctgaacatccattgaaaccagctgagagcttgtccatcgaagtaaaaagaggccactggtcctcaaagaatcgcgatactttgaagatccatcctagaggatcgtggccgtcaaagcggggcacgtcaagcttgacagctggctgtgggtgtggagaatgttgggaagacgctggtgaggcaaaagtaaggtgggagagacgctcgcaccatgcttcgaacttattggccaagtcggagtgtctctcggagagggctgcta

SEQ ID NO: 157247 - DNA, 408 bp, Glycine max
  unsure (1)..(408): unsure at all n locations
agctntaccttcacgaacacataatttcattattccattaatgcatcacacggtactctattagaaaatggatctgttactctgtgcctgcaaggactgctgacccttccacctgatagtttatcgcatcagatagacaaaatatatcatgagatataagtctctaagttcataactagagagagccacacagtctaaataagcaaactaaccatgaatgcaaaaacaaatattgaaataaataataccactattatgtgtagtgcagctttccaacttttgtacctaactgaaggagacttgtcaatcacttgagagcctgtagcagatgcaatactgtaatgaatgaagcttcatcgtgagaactgtggtaaaacctatagtgacagacaattagtcatcattata

SEQ ID NO: 157248 - DNA, 406 bp, Glycine max
tgagtaagcctctctaagagagaatataataatcttatataagtctctatcctcaagcatgagtgagccaccgtagagcgagtctatctcaatacaagagtgaattcactccttggagtgaggaagctataaagtaagagagcctctatgagagagaagataaattttttgggatagactctatcctcaagcttgagtgagtcaccatagaatgagtcaattttgttaacacatccttgctaccctactatcacattgtatagtggaagaatctgcatattggagaattataatcgtgtgctcccatgactactcttaattactaagtgcctattttaactttacgaagcgggatagtccgaatattcactacaaagcctgtatataaaaatacttcatgcatgta

SEQ ID NO: 157249 - DNA, 273 bp, Glycine max
tcttgttaatttagttaaatatcgacctttaacgagttatatacatatcgagatattaacctgattacatccatacctcgtaataacaatgttaatacctcagagagaaaaaatgtcactaaaaattacgttacttgaattaatgggcatcactatatttgttggtattaacacaaagcacagtcactgaaacagaccaagttaaataatagtgacaccaaattacactcactacttgttggagggtgaattcataggtaacactatattctg

SEQ ID NO: 157250 - DNA, 255 bp, Glycine max
  unsure (1)..(255): unsure at all n locations
agctntgcggtggtcggtggcggcaaacatggtacgccgatggcgtctattcgtcgcggacgtacggatggcttccggatcaacttgatccgtaagctacgaatcaagttgatccgtaacatccttccggatcaagttgatccgtaagtnccggatcaacttgatccgtaagcgtattatttttggtatttgcatcggcttttgcatttttgcctctgccttttcatttatttccctttttatttaaaactacta

SEQ ID NO: 157251 - DNA, 463 bp, Glycine max
ctgtcttgacttatttatacccatacccctcaatattatactataatatctatatgtacactatgatattgttgagtctaattaataatcaaaatgttattgtgtattgcttgatttgtcacatgttattgatgtgaaatatttatcaactttagtgataagttaatgactaattgctattgacagagttggctaaccacatctatcagggtctattccgaactattatttttcatacacaagtagtggcaaagtcaaatatttttttaatggggtgaaaaaatagttataatattttcatagatgaaaaataatatgagttttattaaaatggtactaaaggaattagaaatggtaaaaattaaaaagggtaagtggataaaaatagtaccaatttatctattttcacttttaacttttataactttttatattcatcttttttttaagaaaattatcttat

SEQ ID NO: 157252 - DNA, 178 bp, Glycine max
catcagaatgcattctgcgcacgaagaggacatggcattcatcattgatgatgccttctattgctatagagctatgcgcgttcacctatgaacatgctgctcaacgatgcgacaacctagggacccagtcttcaaactacagacaggtcgaaatgccgacgaatatatggactacatg

SEQ ID NO: 157253 - DNA, 460 bp, Glycine max
  unsure (1)..(460): unsure at all n locations
ctattacgtgagactatagaatgactaagctttcaacaagtttcttcacatatgactatcatgaagcagaaaactagcgagagtacccatcatatctcccaaagccccatacccacgaaatgtaagagagaaggatgtgcacccaaacctgaaatttcgaagtcccactcgtagccacgcacttcacgactccgaaaatgccctccttttgcgatatggggcagagatgatggccaaagggtgaagctttgcttggagcttcaatggagaatgaagaagaagataatggcaacgtgagggagagagagagctgtctgagaagtgcgggggctgagtgaagagagagacaagctctttggttttaaataaaagggtgtgctctgtttctattattgtatctaagctatgccgcatgtctncgtttgagtggagcaataagggcccactttaccttttgact

SEQ ID NO: 157254 - DNA, 393 bp, Glycine max
  unsure (1)..(393): unsure at all n locations
tcttgtataatttagttaattattgaccttaaacgagtaatatacatattgatantttcacctggtaacatccatacctcataaaaacaatgttaatacctcagagagaaaaaatgtcactaaaaattatgttacttgaattaatgggcatcactatatttgttggtattaacacgaagcataatcactgaaacaaaccaagttaaattatagtgacaccaaattacactcactacatgtnggtggtcgaattcataggcaacactatattctggtggttaaatttaattatcacaggtgccaccttaccacaatattacaaatattaagtgcaataaaccacatatatagtgcactacattccaacacttgatatattacagaatttctact

SEQ ID NO: 157255 - DNA, 351 bp, Glycine max
  unsure (1)..(351): unsure at all n locations
gcttnctagacgcctactntagatacaactagatcagaatgcatcctccacacgaggagaaaatggcattcatcattgaagatgccaacttttgctatagggtcatgccattcagcctaaaaaatgcaggcacaacataacaacaactaatggaccgagtcttcaaacaacagataggacaaaatgccgaggtatatatggacgacatgattgtcaagtctcaaactataccccaacatgtggtggacctggaagaagttttcggggaactacgaaaatacgacatgcgcctcaaccttgaaaaatgcactcttggggtaggcaaccacaagtccctcactacagcactgg

SEQ ID NO: 157256 - DNA, 501 bp, Glycine max
  unsure (1)..(501): unsure at all n locations
tgaccttcaaactaagcttgtaaattaggactttctctcagctgtcacactccctctgttcataattctcaatgaagttgcagagtgataaaatataatgcaaaaggctaataaaggttggaccggttaataaggattaggtttatatgacttacaagaaccttgctaacggacgatcaataaatatctccataatgacattctttgagtcctaagacatatcgtgtaatgccctacaaaaagacctaagcttgcacctaatgagaaccgttgaacttaagtctatcctaggtcggcctattaatttcagcccaaaatgaaggatgacgaatggataagtgagctntcctaagttgtagagtgataaaatataatgcaaaaggctaataaaagttggaccagataataaggattagatttatatgacttacaagaaccttgctaatgtacgatcaataaatatctccataatgacattctgagtcctaagacatatcatgt

SEQ ID NO: 157257 - DNA, 343 bp, Glycine max
  unsure (1)..(343): unsure at all n locations
aagtttgaatatgatgtataagaaaatgaatgtgaacctttctcccctttgaaagacttgtaaaaaaaatgttttaaaaatacttttaattaatatctgaattttttttccttattagtatatatgtgaggggtagagggtgtcacatcctgcagcaaataatgtgcaatatcataacccctaaactgtatatatcaactttggcaattattggtgcactttntagccattcaggtgccatgtaacctattgttccttttaaattagtggttgttctagtttggtctttgagtaatagcttggaaagccaaaaatctgcaatctttgttgtgtgattggcatc

SEQ ID NO: 157258 - DNA, 468 bp, Glycine max
  unsure (1)..(468): unsure at all n locations
atgagcaacttataggagtcttcacggcttgccagcttcacctgtcattgaagagcaacgacactcgtcgtagaggtgaaagaggacttatatttcaaaatgtcatcgatcatccaatcatagccaacaatggcaggtggggacgatgtcgacccaacgctatggatatgtcacacgaagggagacgccctgacatctncactaccactacctctcctcacaccccaagaagtagaagaggaaaggatcacaataaccaaggtaggcttcctggaagtagtggaagaccgcgccctcccgtgagggcgagaagtaccccgaccagtacaacacaaatccctcaccctctccgaagaggaggacttattgtaggaggcaccataatgagtatcttttgatgaagaacgcaccaaagagatgacctcccacgccatcatgggttgctcaattgagcccctagaatcactg

SEQ ID NO: 157259 - DNA, 60 bp, Glycine max
gagcttgagtctgatttatatattacatatcatgtagtagtatctgtgcgtgagacctat

SEQ ID NO: 157260 - DNA, 124 bp, Glycine max
aagcttaggagttgcttagtccattagtatatatttaagttttagaacatgacgaggaatagtgacagtgctaattacctgtgcgatttaccacattacatgcatctcctattatacatgcaat

SEQ ID NO: 157261 - DNA, 131 bp, Glycine max
atccaattcaatatcctacgaaataatgcatcaatagagtatatgcaatctatcataatgacaagttaatgggaacgaactaccaatcagtaatttgcatagaaaagacatcatctgagtcctaactagga

SEQ ID NO: 157262 - DNA, 438 bp, Glycine max
  unsure (1)..(438): unsure at all n locations
catatgtacgactacggggccgttcgccacggacgaccagaaggcttccagatccacaaggcgccgcaaataccaacaaagtctgatggccacctccaactggactaacggactcccacgtagcccatatcctcgtnatatctccacccgggtccccatcaaatctaccaaacgttcacaacatccaatcagaacaacatgcatacagcacatgctatcacaggcaaccaaaacagagcacatgcagaaaactctgctcaacacaacaaccaaaaacacagctcttctctcttaaggaccacagcaacaatctcctccgatccaacacgtaaaccggtggaacgactcccaaattatactgggaggtctatatggcacaaggcctacttggtgaccgttgggagcagacagcaaacatcacgaacacattacgtgccg

SEQ ID NO: 157263 - DNA, 167 bp, Glycine max
aaccactgtgaggttatccaccacaatgatgttaccaaatccagactcaaactcgagattcttctcctggtaaaccacctcgtcatcactgtaaaaaaagaaaagagtcagaaaagcgcacccctagggttccgtttcaggggccagaacctgaaaagggcgaagta

SEQ ID NO: 157264 - DNA, 341 bp, Glycine max
ctgtcaaggagcttactagttgggtatgtttcgtttaactgacaaaagtcacatattctgtatacttgaagttttttttatataaaattgcatattcggaaaaaaattattcattctcattccttaaatttgatggtttacgtgtatcttctgtttactgattattaacaaaatatttcccgatgagaaacagttaatgattgtcactctttcctttggttttttatacaagagacaaagaactaattcccaaatccaatgaaagtagttaataaatttacaattctaatggcaattgtaattattaattccaatatatccatataattaagtgttctatt

SEQ ID NO: 157265 - DNA, 315 bp, Glycine max
ctgcagctaacaagctgtgttatagagtgtgtttggcctttctgactgaaaaagcgttttaagaatcttgagcttgacctttatactaaacaagccaagcgaagttgagccttaaatatgccgagccaaatgcccttgacaagctgctcaggtcatttccatccttaccgacaatcacatcgatagggattataacttcgataagggccttcttctcactcttcctcacgctcgatatgttataatctccaaacttgagttgacaacaatggacacaaatagcgggatgttaagttagttttacggggatatcaa

SEQ ID NO: 157266 - DNA, 473 bp, Glycine max
  unsure (1)..(473): unsure at all n locations
tattaactctatacaagagtgaagctctgataccacttgttagacaattggcctcaggtatcttaaaaaggggggtagaattaagatacacaagctgtcccccaattaaaatttaactgtctcttttattaacaatgcaatcctctattatgaattactctaagaacaattcaaaaacaaacttctttaaagcaaaatataaacaataataaataatagaaatttaagggaagagagactacgaactcagtttttatactggttcgaccacagcctgtgcctacgtccagtctgcatgcaacccgcttaagagttccactatcttgtaaaataccttttacaaagtctgaagcacacatgaacaacccttcccttgcgttcaaaaaccttacaacttaagagaacatcggtactttaatcaatctctttgagtgagaataagaagaagacttctctatntaggagaaagatat

SEQ ID NO: 157267 - DNA, 433 bp, Glycine max
  unsure (1)..(433): unsure at all n locations
agcttatcacacgtttcaacatatataaatttatgtgctatatttatggatgtttccttgaaataaggcattgaaaaacaggttttcttcacaattatatctgattgtccatcagattttggctatacagattggtaacttcatcatgagaatcagtgggatatgccttcttttaatgctcgccagggaccaagctgttcctcacgggaatgaataacaccaatatgttttattgcatgttgtttcagttgacatttcttcaaagaaaatgctaccaagtgttgttataaacaatactttcacggtcaggaataataaatatagaaaatatggtagaaaacaagaaanagattaanaagtaagtttaataatcatcacaatctannaataatttatattatcaactaaatatcaaaattagaattgatataat

SEQ ID NO: 157268 - DNA, 455 bp, Glycine max
  unsure (1)..(455): unsure at all n locations
gtgagtatagcaattgtttatatagttagttctaaaattgacatagcatttgcgagggattcaaccattttagctatagaacctctagctgattatccttccccatatgaaattcctcatgctgattcaactgaaccaccttcacaagataatagcccttctaatggctcaactgaatacattgagttatattcaatgctattagaatatttcgatctgactcgttatggagtagtggttgatgggaggacagattctagctctgtaagctcttgacttgcctctaagaactggagttatattaatttgtaaaaataataaagtgatgcattaaatgtccacatagattatttgagttaaaatttcaattttgattagacaacaacaacacaaaagcatcaatagaactgtatctgagttntgtcaaatggcaattaattagcaactcggggatg

SEQ ID NO: 157269 - DNA, 347 bp, Glycine max
  unsure (1)..(347): unsure at all n locations
agctttcttgagaaaacttccttgagaagcttctttgaganaacttccttgagaagctagagcttagctacacacacccctctcataactaagctcacctccttgagaagcatccttaagaagattcgtaaagaagctagagcttagctacacatacctctctaatagctaagctcacctccttgagatgagaagctagagcttagctacacaccccctataatagctaagctcacccccatgacaaaaaacatgagaataaaaaaaagtccttattacaaagacaactcanaatgccccgaaatacaaggctaaaaccctatactactagaatggccaaaataaaa

SEQ ID NO: 157270 - DNA, 449 bp, Glycine max
  unsure (1)..(449): unsure at all n locations
ttacagcagaatttagtaatgacccactaacctagaattaaaataacttaatgccattaacctagggaattaaaacaaactaaatggctgagtgtaactgaaattgttggcaaccaaaagtcacccccaacagccaacaagtcagccaccatttggtctcccaaaaggctgatgcctatgttgccaattgggcccttattacaacttgaactaaagcccttttagttgattaacccaaaacatatttttggtcagccaactttacaaggattgggccattatttatacaaactaaacactctaaaattgaaataaagtggtgtcatttagtcctccatttgggccatgatacaactcacaaccttggacttttctccttgaaacttgngcttgtattcaaatagtatggacagcacttggtgaagagncgtcttggctctccttgctct

SEQ ID NO: 157271 - DNA, 418 bp, Glycine max
  unsure (1)..(418): unsure at all n locations
agcttcatggtgaatcaagattgattcatagagttttgatgataacaaagataatgacaaaaagctcaaaagtcaagatcacttcatgataacaaagatgatgacattcaagaatgacttcaagattgagtcaagaacacttcaaggattaagaggaaatttgatttcaagaatcaagattcaagaatcaagaataatcaagatcaagattcaagaatcaagagaagacttaatcaagataagtattaaaaagtttttcagaacattgagtagcacaagaagttttcacaaaatcattactaaagagttntactctctggtaattgattaccagattatagtaatcgattaccagtggttntaaaacgttaagattttcaaaattcanatgaagagtcacatttgttgatgtgtaatc

SEQ ID NO: 157272 - DNA, 413 bp, Glycine max
tatgctgcaaacatttacaatagacctcctcaacctcagcagcaaaatcaatcacagcagaacaattatgacctctccagcaacagatacaatcccggatggaggaatcaccctaatctcagatggtctagccctcaacaacaacaacaacagcctgctccttccttccaaaatgctgctggcccaagcagaccatacattcgttcaccaatccaacaacagcaacagccccagaaacaacaaacagttaaggctcctccgtaaccttccctcgaagaacttttgaggcaaatgactatgcaaaacatgcagtttcaaaaagagaccagagcctccattcagagcttaactaattagatgggacaattggctacacagttaaatcaacaacagtcccagaattctgacaagct

SEQ ID NO: 157273 - DNA, 506 bp, Glycine max
  unsure (1)..(506): unsure at all n locations
acgattgattgttagcgatctagcacgcacccagggatcatctgagnccacccgcatgcatgcanaccttaggcttgtaattgctctctattgttgcacagaagggcaacagtctgtgtggtggtatgtcgaagaacataaaccacataatctggccaccagtgcagattatgtgattcatggctagttgggttaccaggttaaccaaggcaattagtttaccttccaactttttaagttactggtgatgaacactgaattcgaggcaacttcactcactcctctaatgacaataacatcactactggcactaaattggtgggagaatgaagcctcttctcaggaaaattactgcttcaataggggacatgacttcaagggctccaccactggcagcatctattatacttgttttcgtgcttctgagtccttcatggnatattggatgagaatctgctcccatattggtgagaggccaactgaccataatcctcaatctctctacn

SEQ ID NO: 157274 - DNA, 465 bp, Glycine max
  unsure (1)..(465): unsure at all n locations
ttcacctgtctntacataatcagagccatcaacagacttcataaacatggtaccagcttgagagttaatagaaaaattaatgatgcatctttgtttccgatcagtccatgcatcggacataatagtacaaccatacttgacccattgctccctatggcctttcatcaaatttttagtatattcaacttccttcttcaagagtggaactctgatgtcatgatagctaggaatgggcaaatgtggcccatattgaccaatggctgcaaccattttctcaaagcttttcaatataatgaggttgaatgacaaacttgcttggtaccaaaagcgagcaatatgttaatgcacctttcaatacttcattcttatccattgactctcttatgttcatttgcctcagcatctccatttttctccgattgattgcattttctggattcttacaaaattatgccattggtcctt

SEQ ID NO: 157275 - DNA, 512 bp, Glycine max
  unsure (1)..(512): unsure at all n locations
catctattgtatcctcatgctaccaccatngatacantagagcctgcctgcatgcatgcaatcttgagacaacgttcatgtttatcttgtgtcgaagaactaacattcggagcgagtagtgcagtccacacaacaatatccttgatgggacttagatcttacactggagctgcattttgcattttccagaattcgcagcggatgtaatcatagaatatcatacgaaaagatcatgagcttacccaagataactaatacgaacctacacggccctctaaataactcacatattccttcaagacgatatacttgatattaaaacaattcctgattaataatgctgatgcttatgcgacgtaataaaatgcttttatcctatactattattatcgacgatgaatctgccctcacgtgtgaaaaactgtgataatggcgaattgtttcatcatgatgttcgaaatcaagacttggacagtataaaaaaagccgattaacgaccggagtcctttgat

SEQ ID NO: 157276 - DNA, 441 bp, Glycine max
  unsure (1)..(441): unsure at all n locations
tcataccattggcattgattttttttttttttatcattctgtagttcttttgttgagtaactatattatatttgaataaaaattctaaatttgtttttccattgccaacttataccatttcaataaatacccttacaatttacactaattaaataacaatgtaaaaaattccaataattattacataagatcattcgtataaaaanttgacaagtatcaacactaaatttcaaatgacaattttatttttgttttgattgactatgtatatgaagatatcaaatgaggatttatatatataaaactaaagcaccttataatcttgaataacatcattaactaatatgagtacatccttatttttcatttcatacnagttgttttttaacacatcagggtcggtctaataaggaaaggtctgggtatcctacacaagattct

SEQ ID NO: 157277 - DNA, 268 bp, Glycine max
ctaagctgaattgaaaacggaagcttcgaagtctaaacgttcatagccttttcagacttgaagcatgggcgaactggagagtgagaatgtcataagtgatgcatctttgtttccgaacagtccatgcatgggacataattgcacagccatacttgacccattgctatctatggccttgcatcaaagtttgtgtatatagaaatttcttcagcaacagaggaagtcatatgtcatgatacctaagaacaatcaaatgcgatccatattg

SEQ ID NO: 157278 - DNA, 163 bp, Glycine max
tgatcttgaaagatgaattggaggtttgctcatggtccaaacaaaacttgtatcagcggttatgcgaaacagagaccaacatgctagccattgtcagcaggtaccaagaagaactaaatctatccacggcccacgagcatagagtggtggacgagtttgccca

SEQ ID NO: 157279 - DNA, 151 bp, Glycine max
ctcaagcttgtagccacactggactatgactgtgtgaatcttaatatgcctaagctgcggaggagcacccaacatggattctcagaagaaatacgatagtacaacaatttcattcattcatgcctcagtgccacattcacggcatgactaa

SEQ ID NO: 157280 - DNA, 392 bp, Glycine max
  unsure (1)..(392): unsure at all n locations
agcttcaagaacattnttcactggtggtgtttacttcaacttcactagntagctctgctacacataatggcttgtctagtgcaattactgctgctagtaaaagtcctaatgtagtttctaattctgtaatttcatcccctagcaatgttagcttgcggcatgctaggctgggtcaccctaatagcccatgtcatgaagctagtcaatcattgtaacatttcctcatctaataaaaatttccagacttttgctcctcatgctatatgggaaattctcacagatttccttctcactcttttatttttgatactctcctttggagctttttttatagacttgtggggccttctcattaatttcctatgctgtttcanatactatgtcattaattg

SEQ ID NO: 157281 - DNA, 303 bp, Glycine max
ttctaccactcctcaaggtaatagcactcacattcccttttgtattgataattggttgtgctggaatatttccagaaccatgttgctgcaactaattgacaattatagttaactctccaatctgagtctgcatgtcttggatggtggcacaaacattctattgaaactgaatgttgttagtggccattttcttcattggctcctccaaggaaggtccaaaactgctattctgcataggttgtgcatatgtaggtgtagactgccagaattgttggtgtctaaatggaggagctcggtatttga

SEQ ID NO: 157282 - DNA, 227 bp, Glycine max
agcttgtaacgccactggcaatggcgggatttagatgccgtcattggcagcagcgggatggggtatgactcaacttaaaccgccagtacgaatgctgggacaggctgattagtagagacagagtgaccactttacgccatcgtaccttccgtcatcttgtgactctcacctctctcctctcccctcctctgttcttcatctttcttttctaaacctctttctcttct

SEQ ID NO: 157283 - DNA, 196 bp, Glycine max
tggtcaggtcccattggtaatactgctagcattagtgttacaaagcagaagaaacacactacaggtgatgcattggatttatcaaaatcatataaaggtgccctcaaggataaagttaaaggaaagaaaatcatagcttagatatttagtacattcttgcagagttaaattaagaaagaacctgtccctacttcct

SEQ ID NO: 157284 - DNA, 337 bp, Glycine max
tgtttatatgaagaggagtctagttatggacctttaattgaccctgaaacttttgagactaaagttgttggaagcttcataagaatcagatgtgaccctaatgattaccttcagaaaaactcacaccagcttttgcaagtcacaggtaatttggctgctgttcgttgattatgacattgcattcaagtaaattcttttttccctctaaatgtacacttcactttcaataggtatgttcatcaactgcttaagttgaatacttatgtttgctagaagcagaggttacaaacaataaagcaaactgaaatgtacttaattaccttttttacatcattag

SEQ ID NO: 157285 - DNA, 440 bp, Glycine max
  unsure (1)..(440): unsure at all n locations
agctatntcttaaagctttgctacaacctttttctccccctctggcaacatcaaaaagccgaagaactcgggaatcaacacagctataacaatggagtagcaagatataagcatcagagtattaaatataataagccaaactcacaaacaagaaataattaaaccagaatccaaataactgaaaatgtcaacaaccacaaaacatccaagactgacgtgtaaaatccacacgataaataagcaaagtacttagcataataatgtaaattctaagaaactaaaagccaaaatacacggcttataaaagataaataatcataacctaaaagctaagaagacggaggaggtggtggaagatcgaaactctgacgaatgtagccgacatcctcttcaagctgtgtaagacgaatgttcataccggcaaagcgtgaatctaacga

SEQ ID NO: 157286 - DNA, 457 bp, Glycine max
tgtagaattcaccccaattacagtgacctatgctgacttgtctcccatatctacttgataattcaatggtagccataaccctagccaaggttcatcaacctccatttctccgagaatacgactcgaacgcaacgtgtgcttgtcacggagaagccccggagcgttccattgagcatggtagggctctgaagcgtaaggcgcaaggtctaattgatgcgggctggctgaaatttgaggagaattgcgtgtaaatcctgacattgacaagagatgccacacatggggcaattttgaaagctgttgttaggtgtccctaatgactcatcagggtttccaagtttatgccattattgtaaaccacagctacaatgttaaatgaaacggataaagttgatatctttggtcctcatcctctcacagacgcttgcttgcttattcaactctcatcggaatgcgg

SEQ ID NO: 157287 - DNA, 99 bp, Glycine max
  unsure (1)..(99): unsure at all n locations
agcttggagaggatgcttcaatggaggaaatgaatgagggagagaaagagagaggnggcagcacgaaattgaaggaagaaacacgtagagcagctgttc

SEQ ID NO: 157288 - DNA, 246 bp, Glycine max
tcttatatgaggtacattcatggtggtgaagctccttcttccatggcttattccctagtggatggtgcctcccctctcctcttctcctttgccttccgttgcatctccatggtgaaaaatcagcattgaaggacctcattgaatctcaaagatccagcctccatagaaactccacaagcatgcttccatcaaggtgcctgggatgctaataccttccccgtgcgctacaactcacaatccctcatt

SEQ ID NO: 157289 - DNA, 159 bp, Glycine max
ctacagtggacaagtgcgcagggtatgctgtagattagacccaccactcttataagaggacttctcatctcttgtaaactgaatggaaattgctcccactactcagctccgaacttaatggatatcatgcattcactgagagcgcctcactgagaattt

SEQ ID NO: 157290 - DNA, 356 bp, Glycine max
taacaaatattcacacctttcaaccaaatgttccctagtgtggcaagattactcaagtgtagaaacaaaaccatcgatacggctatattgatatcattcgtgagtgctttttaatactatgagtacattaatggagaaaatcaaactcattgtaaaaacatgtgaaatagaatgatgctatgtgagatacactcttctgaatgcagtgtccggctgaaaattactaaatactatacaattgagtgagtctcacataacggtctaacaatattctccaaatttataattttcaagcactactaatatgcgtgtataagagcatatgtggagcactcttcatacatatatatgtgatt

SEQ ID NO: 157291 - DNA, 450 bp, Glycine max
  unsure (1)..(450): unsure at all n locations
agcttcttacatagtccgctnttgcttgttctttatgcttaanaatagaaacattaggcatagacaaaagatcaagatgagttagtaggttaaaaccataaacaacttcaaaaggagaacaattagtagtgctatgaacaactctattgtaagcaaactcaacatgtggtaaacaagcttcccaagtctttaagttcttcctcaaaactgtcctaagcaaagttcccaatgtcctattaacaacttctgtttgcctatcagtttgtgggtgacaagtgggtgaaaataacaatttagtgcccaacttgccccacaaagtcctgcaaaaatggcttaggaacttagagtccctatcactaacaatgctccttggcanaccatggagtctcacacntctcttgaaaacaaatcagccacatgggaagcatcatcaactcttttacatggaat

SEQ ID NO: 157292 - DNA, 396 bp, Glycine max
  unsure (1)..(396): unsure at all n locations
tgcctgtccgatgtagcagtaatgatggcccgagttatgttggngaacggctacgaacccggaatgggtttaggcaaagacaacgacggcatgactaacctgataaatgccaaaggaaatcgtgggaagtatgggttaggctataagcccactcaggcagatataaagagaagcatcgcgggaaggaagagcggtagtcaaagctcgtggtcgagacaagaaggtgaaggaagcccgccctgccacataagtagaagctttataagcgcgggtctgggggacgaaggtcaagtggtcgcgatatacgaagatgatgttccgagtacattggatttggtacgaccatgccctcctgatttctagctgggaaattggcgagcggagtgtcatacccta

SEQ ID NO: 157293 - DNA, 163 bp, Glycine max
  unsure (1)..(163): unsure at all n locations
cttagagngnctgaggcatgcagcttgagaggagttaatggaggaattattgaggaggaaagagaaggggggcctaacttgagaagaaacgctcgactgctcgccctgcttcgcgcggcgggggccgctcttccgtagttcccacttgtttcttggtactcct

SEQ ID NO: 157294 - DNA, 504 bp, Glycine max
  unsure (1)..(504): unsure at all n locations
cgacacgattgggccgttcgtcgcagagaanctntanagtctactcgcaggcatgcacgcctacattatgggcatctggtccctcaacattctctgtcattagaatctaaggaaaagatgaaaggatggcagctggtggtgcaaaaaaaaaagggaccacccctgctggggacctggtttntcctgcccctaaaaaattaactatttgggcattcacattccaacattttcttttaatatacgccaagttgatgaccgggctcaggcttctataaaaagtaagagcatcagatcccactcttcttggcctgcacaaggctatgattaaagctgggacgcctacgcgagaagagtggaatgagccataatgttatctatcanagatcaagccgccaatgtcatgtcattcttggactaaccataaccaactactctgtcatatcaagtctgagtgtggaggatgattatgttgaagaaacagacactcatgtctggcatgtatag

SEQ ID NO: 157295 - DNA, 518 bp, Glycine max
  unsure (1)..(518): unsure at all n locations
ngaagtgcttgattactgacctctgatactcagcttgaagactccgctccgattgaagggctcctctcggtgtggtgtttcaacggagaacaacggaggtccatggaagctactggtttttgtgggtggtgaagaagaagctngngacattgnggaagggttttggaagaaagaaagagaaaggaatggctgtcaaggctacacganaaacaagacttgaaacactcaagtgtttctgctgttgggaaaagagaagtttctcacacaaccgaagacatatcacagatcgcaacggtcagatcgtggacatctgtcctctgaactttcagactanatttcgagacgatccaacggttaacgaatgtaggagggcacttttaccaagacagctttcttgacaagctttctcgtgagggcttcttgagaagcttcttgaaggcttcttgagaactagagtttaactatcacaccccttaatactaactaccttctaaaataaacatgataaatacacacan

SEQ ID NO: 157296 - DNA, 389 bp, Glycine max
gcttgagaatggagaattgcactaagcaatcactacgcatagctccaaactcgaaggtggaggacacatgaacgaaaacacaattcatggggctccgaaaaaggggttgagaatggagaattacactaagcaatcactacgcatagctccaaactcgaaggtggaggacacatgaacgataacgcaattcatggggctccgaaaagattgagaatggagaattgcactacgcaatcactacgcatagctccaaacgcgaaggtggaggacacatgaatgaacacgcaattcatggcgctccgaaaagattgagaatggagaattgcactaagcaatcactacgcatagctccaaactcgaaggtggaggacacatgaatgaaaacgcaa

SEQ ID NO: 157297 - DNA, 462 bp, Glycine max
cttcacaaataatcatcacacagcagagaactaacaaaactacccctcatatctcccaaaaccccatacccacgaaatttaagagagaaagaagtccacccaaacctggattttcgaagtcccactcgtagccacgcacttcacgaccccgaaaatgccctcctttcgcgatttggagcagaaatgagcaccaaaggttggagctttgttggggtttcaatggagaatggaggagaaggaaaaagcaacgtgaggaagagggagagcttctgaattttctgttctggctgagtgaggagagagacaagctttttggtcttaaataaaaggttttcctctttttctattattctattcaagctctaccacatgtccctatttgattggagcaaacagggcccactatctctttttgactgtgacccatactcagtcacaagagtgagaacaatctgacctttg

SEQ ID NO: 157298 - DNA, 451 bp, Glycine max
  unsure (1)..(451): unsure at all n locations
agctntgcaataaagttaaggcagcaaacgatagagaaatgttagattntaacttgcgttgactgtaccatctcaacaatatgttttcactaaattctatgggcagcggaatactcttgtgcataagttattgtcaaacaaacctgaaatatattccttatggaccttatcgcaatatattaataatttatttccagaactgttaaaaattgatttaacataatattactgtagaagcctcagatatgaaagaatgcttctcatttcaacaaataaacttataggttttcccttaaccaaaagcgtaataaattctaatagcttatgttgatataaagatttggagtttcagccatgaatctattgcatttttaagggaccatcgtgaaattttttttcacaacgtgttgcccttaaagacagttcanaatcgtcgtagaagacttctaat

SEQ ID NO: 157299 - DNA, 431 bp, Glycine max
  unsure (1)..(431): unsure at all n locations
agcactcanaccgagtgaccctcaaggcctacactctgaagagtctgtcagggcctctccctcccgattcaggtccaacctagaaaatattttagcacacatactctatatatgaactgtacaaaacacatgactcctcaattgttctcaaaatagttttaactcgtcgcccttaaagagtcttatagtcgtgtgattgtacaattcatagttcataactcaatgcacacaacatctcaatcacgtgcatactcagtttatcacatacactgaatctcaatcacaatggtataatctcaatttaacacgttatcacacttcatgaatcatatacactttacctatgaaccatgcaatacacagaattactcaattattttcanaacccatttaactcgccgggntcccacagtggatctcatcacatactc

SEQ ID NO: 157300 - DNA, 438 bp, Glycine max
  unsure (1)..(438): unsure at all n locations
agctnttctaanagatataactcgtctgaatgactttcttgaccagacatgaagagtctataaaagcaaggctttgttttgcatattaaatcaattattccaagtctttctaacaatctcttacaatcctttacaagccttgagtctctttgaacttcttcttctttgtaccaaaagttttctgaagttttctggttttctaaaccttgaaaacttgtgctattcatccttttcattctcttctccctttgccaaaaagaattcaccaaggactaatcgcctgaattctttttgtgtctctcttctctcttttccaaaagaaggaaggaccaaccgcctgaattcttttgtgtctcccttctcccttgtcaaagaattcaaaacgacacagtctgagaattcttttgattcttcccattccctaatacaaaagcgttc

SEQ ID NO: 157301 - DNA, 340 bp, Glycine max
  unsure (1)..(340): unsure at all n locations
ctgcatatctaacaatcgtggntttaaattgctgttgtcgntgcgatccttgacattgcgtgaaaatgtgtctgtcatgatttggttgcagagaatcgtaaaatctttatgttgcggtcgcaaatgtggttatatatggatcatgatttaaaaccatactaacaattttgcgctgtgtgtttatcaatcgattaattgatgattgaatgtgaaaattaatagaagtttttggcaatgtacggcaatgagaggctccaacaactcaagaaggggcttatcaaaccaatacgatggtccatgcaaggcgacaaaccccattgacaaatgttggagatgtgac

SEQ ID NO: 157302 - DNA, 183 bp, Glycine max
tttttagatcaccacaaacgccacttagccagggcaggcagcaaatcccactatctggccaaactcatggatccaatctgcaccacgcatgtgtaaaaggactctattagcagataacatacatggatagaacaaaacatgctaacgccacacatataggaaaggtttgggaaagaatactac

SEQ ID NO: 157303 - DNA, 431 bp, Glycine max
tacccatcacatatggtactaggtggcggtcgggctatggtgtcttacaattctgcacattcacaaatcacgtataaacccaccatcccctgttgcccacctccaactgagctcacgtactcccacgtagcccttatcctcgttcctctcaacgccgggtccccatcaatcctctcaagctcccacaacatccaagagattcaacatcccatcatcacaaactaacaaaaccaagcacaacatggcagaggcagaaactttgcccaaaacacaactcaaaatcacagcttttcacatacaaataccccagtaaaaattccttcattccaattcgttaaccgttggatcgactcgaacattttactacgagtctctagtacataagtctacattatgacccgtgtgatctgctagcaaacatatagaactca

SEQ ID NO: 157304 - DNA, 421 bp, Glycine max
  unsure (1)..(421): unsure at all n locations
agctatacatanattttctggatttctaaaccttgaaaacttgtgctattcataggtatcattcccttctccctttgccaagaagaattcgataaggactaactgcttgaattctttttgtgtctctcttctcccttttccaaaagaacaaacgactaaaagcatgaattcttttgtgtctcccttctcccttgtcaaagaattcaaaatgacatagtccgagaacttttttgattcttccctttcccatatacacaaagacttcaaaggactaaccgcctgagaattcttccctttcacaaagttgcaaaggtttaaccgcctgagatctttgtcttaatacattggaaggtatatcctttgtcggacaagcagaaggtacatctacttgggttcgactgagaacaagagaaggtacatc

SEQ ID NO: 157305 - DNA, 529 bp, Glycine max
  unsure (1)..(529): unsure at all n locations
acgtttgattgaatcctttctagtacccggngatnctntaaaagtcaactggaagcatgccagcttggaagaacccgggtagtccaagagataattttatgtcatacccttcaagtcttgaaagagtatgatgaacttagggacgtctatatggccacagcttgaaccttggaacgagaaacccagaaggcccgaaaggaagaacaccacccaagcaaaagtttgaggggctttatagggcagcaatactgagctcaagctccgaagaggtgaaaggaatcatcacgggtcaaaggcatgatcttgaaggacgagctaaaggtttgccttaggtcgaaaagaaatttgtcccaacagttaggcgagactgaagggaatatgtgggccatcatcgataagtgcaaagagaagcttaatctagcggcgactcacgagcanaggctagaggatgagtaccgccagatatcancagaaaggggaagcagggaaagggtaattgattcattgcaccagaggaacaatgaggatg

SEQ ID NO: 157306 - DNA, 533 bp, Glycine max
  unsure (1)..(533): unsure at all n locations
nnccttttgatgccatgtantnctgaccttagatactaagcttgacattgntgttngatagaagaagaagaagatggttagccttggtatttcaatatcaaacgatacatcaaggacaaggaatacccgcttgaggcctctaacaatgacaagaggatattacggnggttggcggccagtttctatctgagtggggatgtcctatataaaagaaagcatgatatggtattgctctggtgtgtgaatgtaaatgaagccgagcagatactaacagaggtgcatgaaggatcctttggcacccatgccaatgggcatgccatggctcgaatgattctaagagcctggtgttactgtatcaccatggagaattatttgtgtgttcacgtcangaaatgccataagtgccanacttttgcagataatgttaatggctccacctgtaccattgatgtgtttgcaatgcatggctgntctcgatgtggaagaataacgtgattggggctatcanacccaaagctctcgatgggcatctg

SEQ ID NO: 157307 - DNA, 433 bp, Glycine max
  unsure (1)..(433): unsure at all n locations
agcttgtaggattatggngtacctatcacatgtggtactaggtggcgcgcgggcgatggtgcacaacaagttttccacatccacaatgcgcgcataaacccaccatcccctggtgcccacctccaactgagctcacgtactcccacgtagcccataccctcgtttctctcaacactgggtccccatcaatcctcccaagcttccacaacatccaagcaacacaacattcaaacagcacaagctatcacagccaagcaaaacagagcaaaggcagataactctgctcaacacaccaaccaaaatcacagcttttctcacttacagaccccaataataattccttcgatccaattcactaatccgtggatcgactccaaaactgtactggaagtctacagtgcataaccctacattgggaccgttgcgatctact

SEQ ID NO: 157308 - DNA, 534 bp, Glycine max
  unsure (1)..(534): unsure at all n locations
ggattgcttacctcgattacggacctatgatactcagcttgaggggtaaagtctcacgaatgtcacgtgctcatgcaacaattgttagccgtggctatacgagacatctttcccaaccaagtcaggttaacgataactcgcctgtgctttttcttctattctatatgtagcaaagtcattgatccagtcatgtttgatgagttggaaaatgaggccgcaattatactgtgccagttggagatgtattttccccctgctttctttgacatcatgattcacttgattgtgcatctggtcagagaaatcaaatgttgtggtcctgtttatctacgatggatgtnacccggtgagcggtacatgaagatcttaaaagggtatacaaagaatctatatcgtccagaagcatatattgntgacaggtacattgcagaagaagccattgaatnntgttcataatacttagagaanggctaaacctgttgggcttcctgagtctncgcatgatgacagagtgggtggtaagggttcaagaat

SEQ ID NO: 157309 - DNA, 396 bp, Glycine max
  unsure (1)..(396): unsure at all n locations
agcttgngaggattgatggngacccggtgttgagagaaacgaggatatgggctacgtgggagtacgtgagctcagttggaggtgggcaacaggggatggtgggtttatgcgcgcattgtggatgtgggaaaacttgttgtgcaccatcgcccgaccgccacctagtaccacatgtgatgggtaccccataatcctacaagcttgagatgaggaagtgttgaagggtgaaactttctgcttttattgttgaccacagagtggtacctggagatatgtcgcgggggtcaggagaccttggggacgtcaggtggggtgctattgcccaaaaccaagcttgaccaatcccgacccaacccgggcatagtcggtcagtgagaacctgtgatgtacctaagc

SEQ ID NO: 157310 - DNA, 337 bp, Glycine max
  unsure (1)..(337): unsure at all n locations
agaagaattaaatctagccacggcccacgagcacaaagtggtggacaaatatgcccaagtgtacgcggaaaaggaggctaaaagaagggtgattgactcgttacatcaagaggcaacgatgtggatgtgaccgattgctcttactttgaacgagagtcaagaactttcccgattgctggccaaggccaaagcaatggcagacgactacttcgcccccgaggagatccatggactcctcagctattgtcagcatatgatagacttaatggcccatataattaggaaccgctaaggagtntgtattgtcactcagatcttgattagttataactttctg

SEQ ID NO: 157311 - DNA, 437 bp, Glycine max
  unsure (1)..(437): unsure at all n locations
agctntcataagtgaagtcaggtgcagccatctccctaagattcctctcacgaggtggagattgagccatgttctcagtatgaaaattagcagccgaatgctcaaaattagaatgttcagaatcaccagcaatagaatgctcaaaatgcatagaatgatcaggatgaacactatgcctaactaatctatgaaaggttttatcttctatttcaagatcaaagggttgtaaatcacctggattgcccctagtcatgcactatatgcagcanatcatgtatttctcaaacaagcaccaaagggggtaaaactacaactatactcaaacaatatccaaatgagctgaanatntatgagaaacaccctataatcatgaaaagatagacaaaaattttcagacaaanattcaaagtctaactatgaaaactgcctaagaaaag

SEQ ID NO: 157312 - DNA, 388 bp, Glycine max
ggagcttctatggaggatggatctttgagcttcaatgtggtccttcaatggtgagtattcaccatggagatgcagcggaaggcaaaggagaatatgagaggggaggcaccatccactacggaataatccaaggaagaaggagcttcaccaccaagaattgccatggataagaagcttgaagaggatgctttaatggaggaaaagaaagagagaaggggggagcacgaaattgaaggaataaaagagggagagaagtggaactttgaagtgtgtctcataagactctcattcatcaaagttacaacaagtgttacacatgcttctatctagagactacgtagcttccttgagaagccttcttaagaagactttcttgagaagacttctt

SEQ ID NO: 157313 - DNA, 485 bp, Glycine max
  unsure (1)..(485): unsure at all n locations
ggttgaaatagccatgttggatgagttatacatacttattatgttctacggcttatgtgatgatgtttgcgatgtttatatgctgaaattgctgatggaaaactattagagatgacaggtagaactaacctagggttataaagtgagaatgtgatgctatgagtggaaaaagagtgaggctttgagagttggaacgataagtctgaattctgtggtnaatggaggttaaagtgagttaatactagctcgaaatgtcatttatgacttatgacaaagcttggactgtgctagagagaagaactaatgaccaaagtgaaccaagagccatctctatggcgaacatgggtgtcgagggcgcaaattttgattcggtggagatttcggtgacattcagtttgagcaagtttagaattgatgtatggactagcgtgatgtgagagtttgcttcaagttaccttattctacatgtcacttttgagacctat

SEQ ID NO: 157314 - DNA, 440 bp, Glycine max
  unsure (1)..(440): unsure at all n locations
agcttctctgaagcatgggatgagacaagaacttagaanattctcagtcatccaactcgcttagcgctcttcatgcactaagcgagcgataccttatgcgctgagcgagtagcatctttcgctaagtgcgctaacccccgtccattggttgttggggtctcactaagcgagacagtcgcgctaagcctaaaaacctctcgggttgtgcatttaattgaatagggctaagcgagtcagctcgctgagcgcgacatagtctctcgctaagtctgtctgtgcgctaagctcaaaaggctctctacctggaccttcatggaaattgggctaagcgggccatcccgctaagcccaaaaccctctctggaatggcaacagcaataagcgagaccatctcgctaagcgtaaccccactactgcatcaagagaactttaatccgctga

SEQ ID NO: 157315 - DNA, 435 bp, Glycine max
gctggcttgctggctcctgcttcaattggtgtggctcttgcttcaattgggtgcttactgactggttgcttccttcgctcaagtgtgtgcctttacccccttactcctagtaagtgtttttaaagtaaataaaatttatatatttttgttaataaatattataagtttaagttagctagtattaacacatattgtaagttagtttatatagtattgtgtagttattctaagctagtattaacaaaaatactaagtttaagttagttagtagtagtattgtgtagttattttttacgtattaatattaatagatataccaatggtaggttagttactatgaaaatattatttggttagttagaatgaaaattttatttagttattgcatgatctaactatatgtgtgatatatctatatatatctatatatatata

SEQ ID NO: 157316 - DNA, 532 bp, Glycine max
  unsure (1)..(532): unsure at all n locations
cggctctgattgattccttgccgtcntcgagactctctaaagtcaccctgcagcatggcagcctggtcggntcaattttaattaagcgcttgttacattcctatggactgagccaaaaggctcgggtcattaaagactacgcatcttttaaggcaccaagcaagggattaaacagcgaaacccctatcccacattctttaaaagaatgcgaacagaaaattatagaggacaggaattccttgcgggggggaaccacaaaaaacaaaagcatgtggtgacttttttaattgccccaagtcttaagcgtagtatcgcttgacaacgtcggagttcacgggtgaaggtagttcctcgtcatccatgttggcgagcacaagggtccctccggagaaagccctttttacgacgaaaggcccttcgtagttcggggcccactttcccctatngtctttcagggctggggagactttcttcagtaccaggtccccttcgctgaacctgcgcgagtgtaccttcttgcaaacgcgttctn

SEQ ID NO: 157317 - DNA, 531 bp, Glycine max
  unsure (1)..(531): unsure at all n locations
aatgctattacggccttgaaactcagcttgaggattatggngtacccatcacatgtggtactaggtggttgtcgggcgatggtgcacaacaagttttcctcatccacaatgcgcgcataaacccaccatcccctgttgcccaccgccaactgagctcacgtactcccacgcagcccatatcctcgtttctctcaatactgggtccccatcaatcctcccaagcttccacaacatccaagaaaaacaacattcaaacagcacaagctatcacagccaagcaaaacagagcaaaggcagaaaactctgctcaacacaccaaccaaaatcacagcttttctcacttaaagaccccagtaacaattccttcgatccaattcgttaaccggtggatcgaactccaaaatttactggaagtctatagtacataagcctacattgtgaccgntgggatctactagtanacatncagaactcattctgcactactcttntcacagncaaccacacacaagcacttntcttgcacaagcc

SEQ ID NO: 157318 - DNA, 146 bp, Glycine max
  unsure (1)..(146): unsure at all n locations
agctntagcagataanatatattacaagcactatagaatccatgtacaacatagagaagcagaatctcttttcaatagaaaaacggaggcgaacttatcctccnccactaataatanagtatttgatcagatttcagaaagctcat

SEQ ID NO: 157319 - DNA, 484 bp, Glycine max
  unsure (1)..(484): unsure at all n locations
cggaagaagaaaagggaagcacattgcaatnnttttgggcgtgcgtgaagtgcgaacaaatgtcaattatatttcccttttttttttttgctgaatatcaattatatttccctatcccccttcttctctttcaatggattttaaacgtcaagattgcttctcaaaatcagctagggtttgacttttttttttttgaatctacaggtgtttgacttctttgcaaattctaaacagttagtacaattaaatttgttacaacttttcatcagataatttaaatttgaatccgatgattaatattcgatggagtacaatgtcaactatttgaaattaagaagcaacctanaaacaaaaagaagcaatctccttgctaatttcgtgggagtagtttcgaacgttgtagttggtgtttggttttgtttgtttttctttggaatgcataaaaaacaaatatcaatttccacattaaatatcaacacctcat

SEQ ID NO: 157320 - DNA, 453 bp, Glycine max
  unsure (1)..(453): unsure at all n locations
agcttccacgaaggagatcgaagagagaagacttggtagtttaaataaggtttgaacttaataggatgggtgtacccgccacaactgcatatttaagagaaagaaccgtgctatatataccttgtcttggttcctaatgctatatctttggggtaatggctaaataattaataaatataatttttttaatgggtagtaaacaagtaattttattgtcagcctgtgagaacagaataataaaaacaaaaaaagtacagtcaactttagttgagtcgctagtcttgaatcttaattacccacgactcttctcatcttccaagttccaactacctgtgcaatgcatgccgtcgatgttcagaataaatcataatctgctatttttggattaccctctctccttagtatacaatntaaagtgatgatattatataacttttaaattattattgaata

SEQ ID NO: 157321 - DNA, 445 bp, Glycine max
tgcatacaagtagtattagtattttcttccttcaccagtcaaactatcctcggtttatttgctcgtgattgcccatgcatgaaaagggggctgttggaagggtggcgatgggttgatcattcatgtcggatgagttttggtaatggttgtagaaaccgtatggtcaggagagaatcttgcccctcatttcaagctatacttctctctctgcttatagtgggcttggttttcttggtcaaatgtattttctagttggtaatgcaaatatatataattttctcatttgtatttattttgatttgattcccagtaggataatgttttgttgttgttgttgttgtggtacctattttgattggatgtaatgcattgctagagctaaaccccgtagcagatattaaggaatcaaagaatgatcatgacatgagagaagtaacaggaaatt

SEQ ID NO: 157322 - DNA, 403 bp, Glycine max
  unsure (1)..(403): unsure at all n locations
agcttagtaagtcatgtacctgtgttccttatggatgtgcttagtttatcacctaagtgtgagattgagaatctagtaggtctagtatccatagaaaattgtaaccgtagttcttgggggatgtcttgtatatagttattaagcgtagttgggaaagttatgaggagtagttaggaagcttggtgtgaaaccttaaggggagtgtaaggtcattcgtaaggagttgttggttgcgtatagagaggcttcagagtgagtgttcttgcgtaaggtagatgacctacaggattagtgatgatagtcgtatgtttagtgagatagatcttagttctccttacctgttgatctgncgaaagtctgaggatgctccgaggactaccttangacttgttgtagtctttat

SEQ ID NO: 157323 - DNA, 77 bp, Glycine max
agctgctacccagatttttttgtttgatgaaaagctgatatagactgtgaagtgtataaattaattgtgccatagat

SEQ ID NO: 157324 - DNA, 428 bp, Glycine max
  unsure (1)..(428): unsure at all n locations
agcttgttcttgattntntctaagttctttatcaagctatgaacaatatacttgaccttcatttaactgtctttgggcttggcggccacactcaacaaagtattttcgacacctactgtacgctgatttgaccaacgctgttatgggaatgttgcgacaatccttcataaccttattgatacattctaacaggttggttgtcatgcggccataccgaagtccttctctatcataagacatcgttcattcttcttttgaaatgtgatcaatccatgttgctatggctggactcagttcacgaaattcttctagattctgataaaaaatgtgcttgcaaggagtgtangcttgatcatattagctatgaataagaattttatgtatatattaaacttaaataaacttgaccatgaaatatgaaatcttac

SEQ ID NO: 157325 - DNA, 377 bp, Glycine max
caggggggaatttgcatttctcgaaccttgatcttgctatctttagaagctacgcttctttgcattatggatgtgcaaaaacatccggtcggatcgaaccatattgcaactgactcgactcgaaccagttgcgaaaaaaaacttgccccattttatactcagtttggttcgacccgacccgctttggcaaaaaaaattagtgacctgaacttgaactgcattgctcactctcatcatcctacgatctttttttctgtgcaacttcacttgtttacgaagggaattgtggtttcgaagtttgtacgactaagcgattatggcggatctgaatgaaacgctgagatacaatgtctttctcggaaccttactcggaatgt

SEQ ID NO: 157326 - DNA, 171 bp, Glycine max
atgaatacatcggggcatgatcatttatgagagaaggagcgaacttatcctaccccactcatatttttatatatgatatgaagttatacactcttttttcagagataactcatacacttacactataaaaaaaactgtatcgcctaacttctccgctaacttatactctta

SEQ ID NO: 157327 - DNA, 454 bp, Glycine max
ttcgtaggcgaatatcacataagttggataatatgcggaccattgtctatgataagcataaggaacctcaatgacattctgcacattaacatttcaagcatattatttatttgacattaacataaataaacaaatgtttaagggtgaaaatcgtgacctgctcatgatggaatgacgcctcaaatcggtgcacaattctcggtacatgtaaatttgatgggccctagatgagaaacgtttatgtaatgagtaagtgaacaaacatgtacccattgaaaggagaagataaatatgtgcaatatcgaacatgtactatgaacgaacagagcaaacatacaacgatgaaggatgcatgatgaagcatactctaacatatacttataagaaggtaaacataaaggatggaaaagttcacttacaacatcagacgcattcgatgatgatgattcatagt

SEQ ID NO: 157328 - DNA, 331 bp, Glycine max
agcttgtgcttgttttatttacattcctaggatcatgagcaactaggtgtgtcctactatgacttgagaaacaaagatgatcaaataacacgcaaagatttaaaaggtactaggttgcctcctagcagcgcttctttaacgtcttgagctggacgcgtgatgacttgtcggccacggacctactactttgcttacctttggctttggacttggtcggctgctggtcgaccacgggtcgtaggcaacgctgcagcctttgtagatgagctgatggactctggaggtggcggcgatgcgtctattgcccgctgccggccatacccaagctact

SEQ ID NO: 157329 - DNA, 429 bp, Glycine max
tctagccaaatggacttaccttgaattaattcctttgatagcccttttgagccttgtttccctttccttgttttgaagctcactacaagccttatgtgaaaaaccatgatattaccatatccttaaggagatttggagctttggaattgttttgggaataagtgtggggggtttttgtttcattggacaacttgttttgttgactatgcttcatgatgtattttgggtcatacttgatgtacattgtatattggttaaatgttggacatgctgaatgaaattatgtttctcacaggcgaaataaaataatatgaattaataaggaaaatcaaatgactaacaagaataataaataagaccagcaataagttgagtgaataagatcttatatggcacaagaatgatgaaactcttgtttctactcttcat

SEQ ID NO: 157330 - DNA, 430 bp, Glycine max
  unsure (1)..(430): unsure at all n locations
agcttgacaataattntctgaggtagtgtgcaatgccccagctattagcctttcgtaaagcgccaataaattcttgatcactacctagaaatccttttgcaaagcatgcttccctaaatgtattatacatcacatcattgactattctaatatctatgtaagactgtggaccttatgcagaggaaaacatcattctgaggtaaaacaattcgccagttgaaggtgggacccatataagtctgcctattgtatttccttgttctcttggttgccagcatcttttgtgtgcaacataaacaaatcttgacacatattgaggataagtaagatcctgtccataagggtatactttgttagaatgcatctaggctgtgaacattgattctttgactgtgggctntgatagaactggcaccaattgttgactatc

SEQ ID NO: 157331 - DNA, 466 bp, Glycine max
  unsure (1)..(466): unsure at all n locations
tgtatgtgaatctcggctgtttctagctccggactataaaaggctatggagaaaagtgttgcaaaatattgaaaggaatttgcagccatgttttttgtgaagcttcaaatgataaactgaatatggatatattcttcggagttattggtcagtgatcacacttcatctactttaaagggtaagaatagtatgtaaaatgaactgatgaagataatgatgccagggaacccaaattttggtcccagagaaaaaatagaatcattaattaattaattctataaaaagtaccacaagccccacctttntgggggattntctggaacataacatggcaggtatggtcatcaatagcatgagctaattangttgtttcattttgtaattgcgaccactggtgtgctcanactttttgatcttaagccaatgccactaatngtcacaacttttcatctgctttgattatgtc

SEQ ID NO: 157332 - DNA, 378 bp, Glycine max
  unsure (1)..(378): unsure at all n locations
agctataagacataaacaaattgttattctataaaaaagaattctaacaaaacaaaaataatttttaaatgtttgaaccaattgaaccaatttgacccaacccttntatgattgattatggtcacaaatccaccccaacctaatttattgaattttgattaagttgaatcacagatttaggtcaaatcggtccaactcgacccaagaacacccttaacctgtattctgtctccctccttctctgtgtgtgtgaagtacctgaaaaacactagaaaaggaagggggggggggttgaatagcataatggataaaacttagtctttcgaacaccttgaatgctttttctaaacaaatatcaatggacaatggagtttgtcc

SEQ ID NO: 157333 - DNA, 489 bp, Glycine max
  unsure (1)..(489): unsure at all n locations
tacggacctatgaaactcagcttctattaagctgaaccattctatcaatatacacaagttgagttntattcagaacattagagtttatctcttttatcttagtgagagcgattctcctaaattcttgagtgattcaagaacaccttggctgtatcacaggacttccacaacctttgtgtgttgacctctctggagagagtgattctttccttcctttcatcatcacccttgttctttcaaaccacaattccagaaaatccacctctgcccagaattatctcgtggccataactcccattttacgcactcaaattaagtgattcttgagcctaaattgaatttctaaacgagacctttcacctcgatatggaatcatctcatttggagccctgtagattcagatattgccatttctatatttctgtccagccaccacttaacctacgttctaccatcccattcatccatgttatgccaagaaccacctta

SEQ ID NO: 157334 - DNA, 347 bp, Glycine max
agcttgccgaccaactcgccagttgagcatgtttgcttactccagaacgacaagcttgtggacggcgccaagtgggccagattgctatttgcaccgccatttttactaaaggcacccctttctatttttttgcaattcgttctccgtaacgatacgaaactttaagaaattcgtaacgatacctattttgcttccggacggccacgaatcctgatggagtatatattttactgttttttaccttccgaagaagccacgggaactcacggattgcgcagaatcacctcttttcgacttccgccacattacggaatttcacggatcgcacaagcctgctttcttttgat

SEQ ID NO: 157335 - DNA, 330 bp, Glycine max
ggctaacccatggaagctcctaatatctcccacactctttgtggtgggccattcttggatggccttgagtttctcacggtccacttggaccccatttctaccaactacaaaacctaagaaaactatattatctacacaaaaggtacacttctctatatttgcatagagggtgtttttcctaaggactgatagaacttgtctgagatgtcctaagtgaaaatctaggtctctactatacactaaaatatcatcttaatatacaactacaaatctacctatgagaatccttatgacatgatgcataagcctcatacaggtgcttggggcatt

SEQ ID NO: 157336 - DNA, 452 bp, Glycine max
  unsure (1)..(452): unsure at all n locations
agctagnttgngtgaattaaatggctatgaagtggaacggaatagacactaacaaaaggaaccactatatccatcttttggatgcattatatagaaagccaaatggaatgaagtgttccctataacatttgtggaaagagttacataaaaatttatgaatttccaaatgacaaccaaccataatatagaaataaagttgtatactaataaccaattcatttagtttattgcctcatgcacacacaaacctgtctaaggtggtttgaagtaacaccttatagagacttcttggcaatgaatacaagaagatcagtgacacgttagctgtagaaccgaggacaaagaaggtattagaaccaactgaattaataataataaagcatctaaaaatcgtgtgattagatttttggccaaattaacaacttattgacacactaacccactatcacata

SEQ ID NO: 157337 - DNA, 444 bp, Glycine max
  unsure (1)..(444): unsure at all n locations
atgcaatgattatttaattcaatgtcatatttcttcataatataaaagctatataaacattgcttccttcatcaatttttcataaggtcacaaaatcacccaccactttgtctctaaatcttattagaaacttatattgtttcattcatcagcttttcataaaatcaaaaaattcctaccactctttctctcaatcttattgcaaaaagtaaattcactactataaaaattggtttttctagacatttaacatcggttatgaaccaatgttagaatgagtgccaataaaagatgaccattgttaacattggttataaaaatcaatgttgaaatctactatataagtatggttctcaccanaaccaatgtgatatactagcaaatagacaaaattatttaagaattaattctttntacttataatttatatcattctacatactt

SEQ ID NO: 157338 - DNA, 406 bp, Glycine max
  unsure (1)..(406): unsure at all n locations
agctatgccaatttagttttcgccagcgaatggatcgaagtgggtttgagaagaggcaaatttgattatcctgctttggtgaataggaagcctgngcaaatggagaaaatgagaagaagggacgaacccatgctgtcactgtcgctcctacatggtcaaatttcccaccaactcaacaatatcaatactcagccaatattagcccttctcattacccaccaccctatcaaccaagaacactcaatcatccacaaaggccacccctaaatcatccaataccaaacaccacccttaacaccaaccagagaagggattttccaacaaagaagcttgaagaattcaccccaattctggtgtcatatgctaacttactcctatatctaactcataatgcaatggtagccat

SEQ ID NO: 157339 - DNA, 445 bp, Glycine max
  unsure (1)..(445): unsure at all n locations
tgacctcttcgataaagagccttaaggctcttcgcatcatatgccaaaacctaccatagttaaagcacattaatgcactgctatataaaacagccaactttcaagcaatgaacttaaaataatagcaaattacaatctaagaccataatccaaatttgcattgttacaaaagcaagacaaaagggagcaactattttcttgcataatacaattacaatgtaattttctttccaatcttctaagctgataaatttcctcataataccactacttanatattacagttggctattacaattagcatcatatttcaatggtaagaagaaaaggaattacaaatacctcagaaccttcttttatgcattcattatactggcttggcttcaagtaacaggacatcaagttcagagagcatgccaaaagaagctttctactctggaaagat

SEQ ID NO: 157340 - DNA, 362 bp, Glycine max
  unsure (1)..(362): unsure at all n locations
agcttagcanagcctagtctaacctaaattaattaagtttttcatacctggaaaatatgtcatcacaccctatcactgacatctcaacgcccccatcatcaccttcttccgcttctccttcctctcttactcccttcttccccttctccaaggaaaccaccatctccgcgccaccaccgccgaccgcgctgtccaaccccttcttattctccttcttcctcttctccctctcttcccctttgccttcttccctttctcccctttttccccttggtcttagctgttgtaagtaattgttgcggtgttgttttgaaaaaaaaaaaagacccaaaagagactatgctcagggactcagctgtgct

SEQ ID NO: 157341 - DNA, 303 bp, Glycine max
cctcattcggcactctcttaccctcacgtttctctctctactcttggctttctgtctctcttcttcatcttcttcttcttcttcttcttcctctattgtcttttttcaaacgacgcgcaacaccctcttgctaattaccttctaattatgcaatcgctctattcgatttctagggctattgctattgctatgccttcgctcaccccttctcacaaaaacaaaatgctttctcttccccttcatatctatacgctgctgcattctaatcgatatatctgaccaggagtgagtagttcattgcat

SEQ ID NO: 157342 - DNA, 529 bp, Glycine max
  unsure (1)..(529): unsure at all n locations
cggattgtttgcatccagttcgcgnagccgcgtanagtcnacctgcaggcatcgcagcttcagttcctgagaaactggttcccagaagacaacttggagtgaagattgctgaanactctagccctgcaacaagtcctaaggaagtagacacggagatggacaagaaaatccgcagtattgtgagtagcattctgaaagatgcttctgtgccagatgctgagaaagatgttccaacatcttccaccccgaatggttctgtgcctgatgttgagaaagatgttccaacatcttccgctccaaatgctgaagccgtcccttcacccagtgaagaggaatcaacggaagaagaggatcaagccgcagaggagacccctgcaccacgggcaccagaatctgctccaggtgacctcatcgacctggaagaagtcgaatctgatgaagaacccattgtcaacaggttggcacctggcattgcggaaagacttctaaacagagagggantnaacccccttaagaggtctggacgaat

SEQ ID NO: 157343 - DNA, 483 bp, Glycine max
  unsure (1)..(483): unsure at all n locations
tccttaacatcttgaattctatttgtctggaagtaatatataacaagcagaatgcatacctcctcccgcagtaggccagaaactaaagcatatacctcaacaatatttctgcacagaagagttttcattgaaataagtaattatatatatgactcatattatttgaactcaagatagagaacttacagctttttgtacctttagttttacccaattagcaggaggcccaatatcaatcacaattgtgtccaatctagcaagtcagcggataaactaaactcccaaagtaaacactttctagtttcaaccaaagcaacaggttggcaacacatttcactaattaactagacaaagctgcaagcattaagtaagcacaacacacaagagaaagcaacattgaanatgaagcaatgggatcttaactgtggtttagaatggttactgcatgcagctttgactgcattatccatgtaagaagaagat

SEQ ID NO: 157344 - DNA, 422 bp, Glycine max
  unsure (1)..(422): unsure at all n locations
atctacttcaatacactgattggaaatgatgtggcctaaaactataccttgctcaaccataaaatgacattattcaaaattatgaacaacgttagtttcaatgcatctattcacaactttttccatactattcaaacaaccatcagaagaggatccatatacagtgaaatcatgcatatacacctctatgcaattttctaaaaaatcacttgaaatactaatcatgcaccactggaaggtaccaggggcattgcacaggccgaaaggcattctcctataggcaaaagtgtcgaacgggtangtgaatgtggacttttcctgatcctcacgagcaatagtaatttgcatataaccagaataaccatcaatgaaacagtagtgggatatagctgccaggcgttcaagcatctggacaatgaatg

SEQ ID NO: 157345 - DNA, 530 bp, Glycine max
  unsure (1)..(530): unsure at all n locations
gattctgacatggaactatgatactaagactggtntgggcatagcaccccacctgacgtccccaaggttttctgaccctcgcgacatatctccaggtaccactctgtggtcaacaaataaaagtatgaagactgactcttccacgctttctcacatcaagcttattggattatggggcacccgtcatatttggtactaggtggcgatcaggcgatggcgcanatcaactatcccatttccaccagccaggcataagcacaccatccccagttgcccacctttaaattttagctcacgtgcacatacgtagtcttctcctcgttcctctcagcaccgggtccctatcaacccctccaagctntcacaaaatccaaaaaattcaattccatttgtcatgaaactacctcacacaatgaaaaacagagtggaggcagaaatcttgcacaagaatcattcaaaattcacagaagttttctaccctcatacctcagcaaaaatctctttcgtccaaatcgttacccattgattgg

SEQ ID NO: 157346 - DNA, 400 bp, Glycine max
atgcattggttaacatggtaacccatctgtccttgaaccacaaatctgtacccgtcgcaagggtctgtgatctgtgctcctctgctgaccaccatacagacctttgcccttccatgcagcaacctggagcaattgagcatcccgaagcttatgctgcagacatttacagtagacctcctcagccttagcagctaaatcaaccacaatagaacaattatgacctctctatcaacagatacaaccctgaatggaggaatcaccctaatctcagatagtctagccctcaacaacaacaacagcagcttgctccttactttcaaaatgctgctggcccaagcagaccatacatttctccaccaatccaacaacagcaatagccccagatacagtcaacagttga

SEQ ID NO: 157347 - DNA, 437 bp, Glycine max
agcttgcggatttggtctttgctggcgaaatgatcgaagtgggtctaaaaagaggcaaatctgatcatcatgctttgctaaatgcaaaaactggggcaaatgaagagggtgagaatgagggagaaacccatgcgctgtgactgccattcctatatggccaagtttcccaccaacccaacaatgtcattactcagccaataacaaccctttcaaaagccacctaccacacaaccaatgctaaacatcacctatagcgccaaccaataaatgaattttgcaacgaaaaagcctgtagaattcaccctaattccggtgtcctatgctgacttgctcccatatccacttgataattcaatggtagccataaccccaaccaaggttcatcaaccttcatttctatgaggatacgagtcgaacgcaacgtgtgcttatcatgg

SEQ ID NO: 157348 - DNA, 526 bp, Glycine max
  unsure (1)..(526): unsure at all n locations
aatgtctgacatccattacggacctatgatactcagcttgagaacacctatcaatgtgttttgttggatatggatcatactanaaaggttatcgtgtttaccatccaccatcaaagaaattttatatctctatggatgtgacatttaatgagcacaatttcttttaatgttgattctacactttacggaggaaatgacagtgaagtgcataatcatgatattagtatgtttgatatctcagatataaaattatattgtgaacataaattatcgtgtgaggatcattctgcaagaagtgagctaaccccaaagatggaaaattcttttttggataatacagtgtcttttgatcataaccaattggctcaatcttttccacaagttcggcttgactcttcagaggtaccttctgatcctatctcttataatactaatgtagatgaaactcatcatgaaaattgttctcttgatcctacccctcgatatactanattagattaaactaatcatgaaagtgatccttgtt

SEQ ID NO: 157349 - DNA, 394 bp, Glycine max
aataaaatcttaatcggcctgtattactgccttgatgaatctcataactttgttgaaacaaaccctcccctattttctgatagtcctaactccttaacctgagttcatcttgagaattcagacacatcttattttgcccttgtgaaaattggatctgcatccctcgaaacaaaatgagtatatccttttgaattttgtctcatggttttcattgaatttcttcattgctatcatttaatgctgaatttcttcattgctatcattttctgcttttcattaattgatgcgatccaactaaacatgcaaatgttaatccataaaaagtttgaatatgttggtctatgaatacatgccaaatagtagctcgcaccacttcattattggtaataccacc

SEQ ID NO: 157350 - DNA, 404 bp, Glycine max
  unsure (1)..(404): unsure at all n locations
agagatgcattggagagatgagctcaatcactaccattctcaccacaacacatagattaagtaccgagtgaacaacttttaatttcgttttctctcactcagtgatgcttcttacatccttcgataggaatttttcttttttcaactcaaggcttcatcatctctacaagagctttccggaaactggtgtattcatcagaggctggtcctttccctataatagtcgagtcttgacaccttttcacccttttttcatttgttctatatgtggacagggtccaaccatttttttccccttgtgatatctgcaccatctctcatctggtgccttaaccttacccttattcaaaggggaatgtngtctgacacaatattcacggcaatgtaatttaattcagaatacc

SEQ ID NO: 157351 - DNA, 338 bp, Glycine max
agcttgacaccatatggatcctatctaccgatatagctaattaaagtctcgctttccaacttgacaataaactaaaactttgataggcatttattgtgcacaagttttagcttctacgcgcataaaaatattttccggattgaatattcaaatttcttatcattataattgttaattaaaaacacgacaagtttatgcgcgtccattctgtctcccagcacaagatgatgaaattgacacctttctcttcctaaatttcaaaacaatttgactgtctcaaccacgcaaccttccttcaccagctactatactaacttatcatcctttgtactaactat

SEQ ID NO: 157352 - DNA, 354 bp, Glycine max
  unsure (1)..(354): unsure at all n locations
aatgtactttcgngtcaccaatccacacacaaacacacagacaccggcattttccaacattcccaaagacacagtcctaggataagttaagaacaactcccatctcttgcactgtcttggttccacattattattattaatactactactacttgcgtagcgtgtgtgttccacattgttgcttgttgccctacccatgatcttggaactgagatgagaagccacatcgattaacaagagcaacattagatctcccaagttgaagtctttggagacacccattatgatggngggtgtgagtctgagggaatcatggtgtttctgcaaaggggtcagcaagtctgagagaatgaa

SEQ ID NO: 157353 - DNA, 410 bp, Glycine max
  unsure (1)..(410): unsure at all n locations
agcttgtaggattatggngtacccatcacatgtggtactaggtggcggtcgggcgatggtgcacaacaagttttccacatccacaaatcgcgcataaacccaccatcccctgttgcccacctccaactgagctcacgtactcccacgtaacccatatcctcgtttctctcaacaccgggtccccatcaatcctcccaagcttccccaacatccaagtaattcaacattcaaacagcacaaactatcacagccaagaaaacagggcaaaggcagaaaactctgcccaaaacaccaaccaaaatcacagcttttcccacttaaagaccccagtaacatttccttcgttccaattcgttaaccgttggatcgaactcgaaaatttactggaagtctctagtacataagcctac

SEQ ID NO: 157354 - DNA, 306 bp, Glycine max
tggcttagagagcgtccgttgagcgctacactcgtgggctatgcgcgaggaagactctggaatataatgagctgcacaagttgcctaagcacacctattcatctcactaagtgcaccgcttcatatcatccgctgaccgagaaaggcacgctctaaaccgaaattcactaatgcgcgctaagcgatccataagtgcgctaagcgcacgagcacgaacaagatcacctatttaagcctgaaattacattttagagggagagtttggactgcgattcagagctctgcatgtctacggtttctagagag

SEQ ID NO: 157355 - DNA, 456 bp, Glycine max
  unsure (1)..(456): unsure at all n locations
agcttctgccacaacaaatccaggaatccacatccaacctacttggatcaattgcaaatcaatacttgcaacctattgtcatccaacaaccctttgttcaagctgcacctacctctataccagcaaccttcgaacaagttgaacatgatcaaccttaacatccacatccaaaatcaccacgaaatgaagatccacctcagcagccataaatgataatgatagtttatcattttccatctttcaaacctgtatttgttgattacataagagggagaaattggaattttgatgtatcatgagcttagacttatctttcatctttatatgctttgttggaatatatatgttgtaacatatgttatgttgcttttataaatgaagtgggtggattattcaatttcgcctcttaactatgctntttacatatgtatgcatggccactttgatcttatatat

SEQ ID NO: 157356 - DNA, 321 bp, Glycine max
aacggttgaacctttgcgaaattcttcacggaaaacgttacggaaacgtttcggaagcgcctcggcttagatttacttcacggaaacaatttttccaagcaaattctaaagagagaaaagtgcctaaggggctgaacccttttcttcttcacttcctcccctatttatagcaaaataggggagatgcttgccgcccagctcgcccaggcgagccaggttgcttcctccagaagcaacagccttctggaggaatcttctggagggcccaatggggcctggttgctatatgcacacccattattactaagtacacccccttct

SEQ ID NO: 157357 - DNA, 259 bp, Glycine max
ttacttgttaaaaaaatattgatgttgcatgcacattattaatgaattctttgatacgtgcaaatagagaaagggcatgctacatattgtttaaaaattctgaaagcccagtaatactgcatgagaacgatgtacgtcttgaaattctaagcaaagggatatggctaaattcttcatgagtaacatctcgcacgcaatgtgatatttttctatttttcatgtattatgcctgcacttttacaatttttatgctggtctc

SEQ ID NO: 157358 - DNA, 399 bp, Glycine max
  unsure (1)..(399): unsure at all n locations
agcttgggttcctaggcctagaatcgcatttgtgcactcattttaacctctacgttctgtccttatacatataaatcagccccacagtccaaagctcacaaaaccatgctcatatgtcgttgaggcatttcaccgagcacttggtgggcacatgtttaggcatgaatatcaagataatgggggcaatgtggcatgccccattacttcagactgcaccctaggcctaaggccatcccttacaacccctcaattcaacaaaaacaagcaacaattcaatgataaatccctcacgttttttagcaaatacatgcaacttagagcaccanaatacatcaatggaaagctagagagcccaagaatgaggtacttacttgttggagatngaataatagcgcaaat

SEQ ID NO: 157359 - DNA, 367 bp, Glycine max
agaagttcaagtccatatccatcaaagtctgaaaagagtatgatgaactataggatgtcaatatggccaccgatgaagccttggaatgagaaaccaagaaggcccgaaaggaagaacacgaccaaagcaaagttttgaggggctttatagggcagcaatagtgagctcaagttccgaagaggtgaaaggaatcatcacgggtcaaaggcatgatcttgaaggacgagctaaaggcttgccttatgtcgaaaagaaatttgtcccaacagctaagcgagacttgagggaatatgtgggccatcatcgataagagcaaagagaagctaaatctagcggtgactcacgagcaaaggctagaggatgagta

SEQ ID NO: 157360 - DNA, 524 bp, Glycine max
  unsure (1)..(524): unsure at all n locations
cggatgagttcattgacgaccattgganccccacagnngacctgcaggcacgccagcgtctagaataacctaagcgccatccttgcttctgcatattttgtagagcttattcacacatgaagctgggcagccctgaagtaactatgcatgttgctccctctcctgagccttcctgaagccattcacgggctaccttcgtcattgtgtcttgaaactggcggtttagggatgctgttcctttcatttccgaggtcttaacacaacaccttgtcctcaaggcgatgcaactccttatgagctgcgcagaatacccactactgttacgtccacgtgcaggcgctgcttctgtaccacaaccattatcgtggatacctgagccgcctgaactgtcttgtgacccataataactaagggtgtggcgataggctgcatatccatatccccggaaagaaggttcataactgctatagtattgtgctagcacacgattgggtctaagacggaacgatgaggctcggcatgcg

SEQ ID NO: 157361 - DNA, 530 bp, Glycine max
  unsure (1)..(530): unsure at all n locations
cttctgatcatgtacactatgatactcagctttagccaatggacttaccttgaattaattcctttgatagcccttttgagccttgtttccctttccttggtttgaagctcactacaagccttaagtgaaaaaccatgatattaccatatccttaaggaattttggagctttggaattgttttgggaataagtgtggggggggttttgtttcattgcacaacttgttttgttggctatgcttcatgatgtattttgggccatacttgatgtacattgtatattggttaaatgttggacatgctgaatgaaatgttgtttctcaaaggccaaagagnttaanttanaanataattcatgtnttatataatcattcgaacaaagaaaaagaaaagcaataaagttgagtgaataagatcttaaatggcacaagaatgatgaaaatcttggttctattcttcatggggaattcttatctttacttcttaatatttcttaatttgttagtgtgcacttattcccctcttgctctg

SEQ ID NO: 157362 - DNA, 365 bp, Glycine max
  unsure (1)..(365): unsure at all n locations
tacttttgtcttgaaggcagttctataagcccataatgcatcatccaactngcttgaccaatcctttttagtggaggctacagttttctccaaaatcttctttggctccctgttagaaactctagcttgaccattcgtttgcgggtgatacgatgagactactctgtgcgtgacattgtaatggctcaccatcttctgaagttggttgttgcaaaaatgagagccccgatcactgattaggaccctcgacaccccaaagcaagcaaaaatattcttcttcaagaacctcactatacgttcagcatcgctctttgggcagccactgcttcaacccactggagacataatcacagcccaaggatatt

SEQ ID NO: 157363 - DNA, 438 bp, Glycine max
  unsure (1)..(438): unsure at all n locations
gctgcatgattacatctcccctttctcaagcanattcttcttgatatcatcaaaatcttcatgatttacaaaacctagtcaaattctaaaaaaccctaactgacataagctaaaaaaccctagtcggcatcaacttaaaaatagcactgaccgatgttgatcgaaaaaaccctagctaacatcgactaaaaatagcctggctgatgtcggcaaaaaaaccttagtcgacgtcaaccgaaaatctgtagccgacattggctaaaatatcctagccaaggttgaccgaaaaatcactagctaatattgactaaaaagtagctctaactaatgtcggttgaaaaagcctagttggcatcagccaaaaaaaccatggatgtcggtcgaaaaaacctacctgaagtcaagaaaaaacaacctacccggcattggccaaaaaac

SEQ ID NO: 157364 - DNA, 58 bp, Glycine max
  unsure (1)..(58): unsure at all n locations
agcttgcctgtcgcacatccaaattccaaacattactaatgcgcttttattntcacct

SEQ ID NO: 157365 - DNA, 261 bp, Glycine max
tcattagatgttgcatttcagtatcacttcctctattggaagaacgatatgcacttcttgcattgtaaatttgtttgattgtggtgcaactattggcattgtgctccttcaatgttagcaggatgtttcttggtttcaccatcaactgtgtcatatcaacaataatattcttcctatccttagtcaatcgcccaatgtatggatgtccaactaaggacttgaccaattcatgacttgtgaatcccataaactaacttcacc

SEQ ID NO: 157366 - DNA, 207 bp, Glycine max
  unsure (1)..(207): unsure at all n locations
agcttcctgatgngcctagatggacccagtgctgaaggacacccctctaagacaatggaggatatacatggagaataagatgaagaacaaggaattaaagagaattcaccaaacaaaaagatagaggaagcataagaacatcacctagatgaagatgctcttgataccacatgatgtaagctccattggagcttgtaggcctaggat

SEQ ID NO: 157367 - DNA, 430 bp, Glycine max
  unsure (1)..(430): unsure at all n locations
ccctgcgagagctntttcagacttgaagctcgtaatccctcaagtaactagggatgttgctccctctcctgggccttcctgaagccattctcgggcttccttcttcattgggccttgaagcttgcggttcagggttgttgttcgtaacattcccgcggtcttcaaacaacaccttgtcctcaaggtgatgcagctccttaagacatgcccagtcttcccacgacgtttcatccaggtgcaggccctgccactgcaccagaaccatttttttggacccctagtccgtcggaactgtcttctgacccagaatagctaatggtgtggtgataggctgattatccatagccccggaaggaaaggtctcaactgctattggattgggcgagcccacgaaaggttttaggatggaacaatgaaacacgggatgaat

SEQ ID NO: 157368 - DNA, 520 bp, Glycine max
  unsure (1)..(520): unsure at all n locations
gatttgcacatcgaanacggaaaannaactngaccgccgggacccaccgtggncaagctaanncgcacttattttcgttacttgtgcacgacccacagaaccgaatgccactctaagcctcccgtgctgaaacaagatattaccctctcctcggcgacaactggaaccttgcaatggccgagggagaacagagggacgcgggctaacatcgacgaacaataggctgggtgatgacggcaacaaaaccatagccgcgcctacgaaaatctgtaggcgacttcggctaaagcatcctatccaaggttgacctgaaaacttctagctactatagactataaacgagctctaactaatgtcgcgtgaacacgcctacgctggcatagcccaaaaaaccatggatgaccgtcgaaaataacctacctgaagtcaagaaanacatcctacctgctatcgccatgatacaccctggttgacatatgcaaaagaatctcgctgaagaaacttgcaccagccgcaccct

SEQ ID NO: 157369 - DNA, 60 bp, Glycine max
  unsure (1)..(60): unsure at all n locations
agctttataagcgcaggttagggagacgaagtgtaagtggncgcgatatacgaagatgat

SEQ ID NO: 157370 - DNA, 568 bp, Glycine max
  unsure (1)..(568): unsure at all n locations
aactcgccgtgaaatgcaacaataattttcgaatttaattatntnnntannnnnaagagagcggacgaggcctggaaaccgaacannagcncagcngnagaaaggngacccacacatgggactatagggtttcgggccacggagcacaacaagaantccacatccacaacgcgcgcatacacccaacataccctggggcccacctccaactgagctcacgtactcccacggagcccaaattctcgatgacctcaacaccgggactccacaaatacccccaagcatccccaacatcaaagtaatacaacattccaacaacacaagctaacacagcccagcaaaacagggcagaagcagaagacactgccacaacaccaagcaaatcacagctgttctcacctaaagaccgcagaacaaacccttcggccacacgaagagacgcgctcaccactccggaaatgccctcctttgcgatttggagcggaataggcaacacaaggtcgaagcccgtcgggcaccaaagttgaggataacaaaacaacacgccgcgcgcacgcaaggacacccg

SEQ ID NO: 157371 - DNA, 520 bp, Glycine max
  unsure (1)..(520): unsure at all n locations
ggccttatgaatcttcaatctacgaccgcgatcctntgagtccacctgcacgcatgcaagctngataacaaggctctttagtttagtatctttaanggcatgctcctcttccattntgcatcctgctacaggaaggtgccatttggtacagctaagaattctttagagggctgatggggtttatcaacaaggtagtcccaactaggattggacacttccaccgttggatgataggcatcttctacaatatcctttatttccatgggatcttcattctccttatattgcgcatcctctntggtgttctgcttaaagagtcagaagcattacccattttctcttataatgtgtgaatctggngcattttatttttctagaaaagaaaatacaattatccccatgagactcattagacatccactccananaaaaaatcgttagtcgttaatgttcactatctttgttgacaaattctcgaataattcaactaattatcacacataaggctgacctgttatan

SEQ ID NO: 157372 - DNA, 497 bp, Glycine max
  unsure (1)..(497): unsure at all n locations
aggttcttaaggaatgaaagaaaggagagcacttgatctattttaagatctttnncttcaacaacaacaccttaccaaaactcatgaaaaataataatgcaaaactaacactaataagatgttgcacaaatacccattatgggtaaactcaaagaaagaagaanaaggcttaccatccaatagtggggtcacaagctcaaggaaatagatgagtgcaaattgtcctanagggaaataagccctattcttgagagtgaatgaaaaacctccttatggttggaggagaaaatgggaaagctctgagaaatgagtaaaggtgcatagttccaaagtatggagaatggtaggaaaagaanatggttntatcttaacaaacctcgaggcccatactnctctagaactnttactcatcactaagcttaacctttttctttaaggacanagactacggtacacaactaaactttgtgtcatcgaggaaacaaaaatatgttggt

SEQ ID NO: 157373 - DNA, 372 bp, Glycine max
agcttccatgacaatgagaggttatactcctctttgatgcgaacacgataacgattgatctgcctccctttccatcatacggggtaccacctgtgccgccagatctcctacaacttttgggcgtgctctttgaatgatccgaccccctctttacacatgttctcgcgacgcatcctatccgcaaccatatcaaacttgctctgactctcgcctccaaaaggcatccattatgtcctttcaaaatggactccgcaaggtcaacgttacgtaccaggtaacacgtccccatatgactctctggaggaagcatcgcatctctatctttggcgatcaccctctctgcaatcatctttaatggtcttggacagaact

SEQ ID NO: 157374 - DNA, 482 bp, Glycine max
  unsure (1)..(482): unsure at all n locations
ngcttgtctgttgtcgcatgcataacggaccttaaatactagctggtaccggnntgtaaanaagcggctcttatataatgtngttgcttacgacgaaacacgcgaagtggacctattatatgaaattcttatctttaggagacatatcgagttcatatttgtttcgtatattgaagttacagtcttgtgtacagtggacctggaggagacggaccaataccatgcagagcctattttttttatttttatcaaagatctctacctccatccattcaaattgatgataaagagccttaacattgatgtaataacaccaagttgaaatgtcgttgagctgcagttaacaggacgatgaaacaagcaatatttcttttggccatgcgtttactcaatggtctagaaagatgcaagttatattacatcggttatcactgaagtgaagatgcccctttacatcgctaatacacgtcggtgaaacaatg

SEQ ID NO: 157375 - DNA, 386 bp, Glycine max
  unsure (1)..(386): unsure at all n locations
atctcttgaccctaanagntgctngntgtatgggggagtcttctgcttcctaaaacataacaaaccaccccttacctacaatttatttaatcaatgtgtgtggtcatggtaaccaacaacactctnggattctaagcacaagactattccacttaatttaatataaggcccaaatactcgccacaaaccttccttgtgaagaagatcctaccaaactaagctcatgtggaaacacatgggaagagtggccatatcaatacttcgcaccactctaaaagtattccaaagccgtgccaaaaaaaagagcgggggcttcctccccagaaagccccagaggggtaccccctcatttccatggcggaactctcccaccaccccagtttttc

SEQ ID NO: 157376 - DNA, 534 bp, Glycine max
  unsure (1)..(534): unsure at all n locations
nggagatgtcatgttcgacagccattgcgagnancgnngacacannnnactactccaggctggaggaatatgggggacccatcacatgtgtgcctngtggcttgttggcgaaggngcacaacaagnttttcacattcaccatgcgcgcattaaaccatcatcccctggtggccaacttcaactgagctcacgtactcccatggagcccatatcctcggttctcttaacaacgggtcttcattaattcctccaaactttcccaacattcaagtaataccaccattcaacaacacaagctatcacagcccagcaaaacagggcaaaagcagaatactctggccaaaacaccaaccaaatcacatcttttctcacttaaagaccccaagtacaaatccttcgtccacacgtagagacgccttcacgagtccggaaattgccctcttttgcgattgagccgaaatgggcacacaagttgaactttttgggcacattgttgaggagaaaaaataaaaggctcctgaaaaaagagacttt

SEQ ID NO: 157377 - DNA, 409 bp, Glycine max
  unsure (1)..(409): unsure at all n locations
tccttagagtcacccgcggcatgcaagctntgagggtgcgtagtccaccatcttttcatagtagagtatcgataatgtgtctaccatcacgattatcgtctccctttccatcatagggggtaccacctgggccgccagatccctccaccttttgggcgtgttctttgaaagatccgtccccctttttacacatgttctgtagttgcatcctatccggaaccatatcaaaattgtactgatactgcctaacaaaaggcaaccattaggtccttccaagaatggactcgggaaggttccaagttagtgtaccaggtaacagctaccccagtaagactttcttggaaggaatgtatcagcaattcctcatctttggcgtattcacccatcttctgacaatacatctttagat

SEQ ID NO: 157378 - DNA, 435 bp, Glycine max
  unsure (1)..(435): unsure at all n locations
gctggtgagggtganaatctcagctgggagctgcccagagaagaaattgtggctcatgttgagactagtgaggtttgtgaagatgatgaattgcttccctgaaaccacacctcccaatttcttcatggaaaggtctatggaagttacaattgttgagtcattgttacacttgatgccggaccaagaacatgcataggatttcccagttaattttcctccagagggcaccacccaattgtgcaagctgttgtcatcatctacaagctccgattttaggctgagaagtgcctctgagtaagggtcaattgctagaactgctgatgataccatgaagaaggtaacaagaataagatttttgatgtagaaagcattgaaaatctccattggaacttggagagcatcacaaggtagagagggacaatngtaagtacccta

SEQ ID NO: 157379 - DNA, 447 bp, Glycine max
agctatggagaaccaagccaatcagaatgctatacgaaatatagatgggaatagaggtaacaatggtggtaatgacggaccgaggcagaaccgggttgagggagtaaagctcaatgttcctcccttcaaaggtagaagtgatccagatgcctacctggactgggaaatgaagactgagcacgtatttgcctgcaatgactacactgatgcgcagaaagtcaagctagcaacagctgaattctccgactatgcccttgtttggtggcataaataccaaagagaaatgttgagagaggaaaggcgagaggtagatacatggactgagatgaaaagggtgatgagacaaaggtatgtgcccactagctataacagaaccatgcgacagaaactccaagggctgtcccaaggggaattaaccgtggaagatattataaagagatggaaatg

SEQ ID NO: 157380 - DNA, 431 bp, Glycine max
gagacaacttactcgagaagctagagcttagctacacacacccctctaataactaagctcacctccttgagaagcttccttgagaagattcctaaagaagctagagcttagctacacatacctctctaatagctaagcttacctccttgagatgagaagctagagcttagctacacaccccctataatagctaagctcaccccatgacagaaaacatgagaatacataaaaaaaagtccttactacaaagactacttaatagaatggccaaaatacaaggcccagacgaaagaataacctattctaatatttacaaagataatcgggctcatacttagcccatgggcttgaaatctaccctaaggctcatgagaaccctcgggccttcccttggatctctagcccaatctacttggagtcttctacccaat

SEQ ID NO: 157381 - DNA, 488 bp, Glycine max
  unsure (1)..(488): unsure at all n locations
ccgcttctgatgatgaatcaagttgattcaagtagttntgatgatgataaaaagcccaagagtttgatttcaagattgagtcaacaagttcaagatcaagattaaatcaagattaatttcaagtttcatgagaagaaatcaagaagattcaagattcaagagaagtttgatctcaagattcaagagaagatgaattcaagattcaagagaagaaatcaagaagacttcacaagggaagtattgaaaagatttttcaaaaaacaaacatagcacagttttgtttttcaaaaaagtttttctcaaaattttctaagttccagagtttttactctctagtaatcgattaccaattacctgtaattgattaccagtggcaaagtttgatttcaaaagcttttaattgaatttgcaacgttccaattgttntttaaatggtgtaatcgattacaatatattggtaatcgattaccagtgtatctgaacgttga

SEQ ID NO: 157382 - DNA, 476 bp, Glycine max
  unsure (1)..(476): unsure at all n locations
nggaacatataaaattcaatacaaggccctctcaaggatttattcaaaacatatgcaagttgattgtttgaactaacaaactcggtagaaatctaattggacagtagctttccctcataaaatgacaatcaatttttatgtgcttagttttatcatgaaacacttgattagaagcaatatgaaagtttgtctggttatcacaatacaatttcattggctaaatttcatagaattgtagttcttgaaggagatgtttgatccacaccgactcacatgtggttgtggccatggtcctatattcggcttttgcactacattgagcaacattaaactgtttcttactcttcctagagataagatttccaccaatggagacactatcttgtgttaaagagtctatctataggagaacctgtgcaatcaaaatcacaatacccaaagaattgcgcatctcatttatcttcatgatataacta

SEQ ID NO: 157383 - DNA, 313 bp, Glycine max
agccccatcactacattctcttgtagcaagatatttgtttttatcagctccatgggcaaggacatggcctacatagaccttcttgacactcttgagagatgcaacgattatactccctccatatcgcgatataagacttaattgtctaatccattaagataaaggaaagtgatcaacccagccgataacaataaatttgcgtcacattcatcacttctttcacaactatccccgtagctaatacttctatttcttttaatggcttatcaacatattacctctctttttttaatgaggaacatttctagtctaa

SEQ ID NO: 157384 - DNA, 406 bp, Glycine max
  unsure (1)..(406): unsure at all n locations
ttgatactattattataacaatgaacacttatgaatatttgtgattagatgtaatgtataaactctgatactatttatacaaatattatttttcttaatccacttttttataaaaaaaacagttatgtataaaatactttgcgtagaaaacaatcttgaatatctaatggtcattcgtataaaataatatatgagtaagatgatattttctaataaacatttgaatntaattaaaatacattaataatataaaaaaattatattatcattcaattacaaaaatattatgtataataaatctggtgactctaataataattatctctaaattattttaaaaatgattctttattggatgataatgtaaagatcttttaacactaattgtatatgacaaatagatatg

SEQ ID NO: 157385 - DNA, 398 bp, Glycine max
agctctcttaagacgaatcctatttatgctagagcttagctacacatacctctttaatagctaagctcacctcctttagatgagaagctagagcttagctacacaccccctataatatctaagctgacccccatgacagataacatgataataaaacacaagtccttattacaaagacaactcaggatgccccgaaatacagggctgataccctatactactagaatggccaaaataccatgccttgacgaacgaaaaacctattctaatatttacaaagataagcgggctcatacttagcccatgggctcgaaagctaccctaaggctcatgagaaccctagggcctttccatggatctctaccccaatctacttggagtcttttaaccaatgccct

SEQ ID NO: 157386 - DNA, 416 bp, Glycine max
tgaagaacttttcaagaaagtcataccacgaacttgaattccactcacttaaagttctattacagctaggctatgttacaagagctactctttttcctaccttgactttttatccatataaaaatatgaaggttcttgccgagaaagttttaatgagacctcatcctacaaatattatcaatgaagaaatatttcaacaatcacacttatgtcattatattactccttttttaatattgttccccctagaataccctctttggctaaggttaaacttcattaatcatacattagtagtccctcctgaataccctgttgaactaaggtttaacttccttaatcataaataatagctccttgctataaactctcttcggctaaggctaagctcatataatcataataacagttgaatt

SEQ ID NO: 157387 - DNA, 448 bp, Glycine max
  unsure (1)..(448): unsure at all n locations
agctngacgatgttganaagaaaatatgttgtcataattgaagaatgaacatgtagcttctaatgactctgaaatgtcctacattaatatataattgttatgctacaaattcacataattcttagtatgttacgttaaatttaattggcaaacgtgtataacttatggatatactattatgtcattaatacgaatacctagtacatttaacggttacctaatttaaaataatttgttaacattaaccctaatatttagaggaataaacagagaataaaaattataatccaaaataacttatcatttacaaaatgtgtgggaaaaccaatatgtttgcaaatacatgaaaattatatacatactcgacatatgaaaatataacatggatgatgtctatggctgatccgtgcgctgccttcttcgcgacttgacataaacattgccatct

SEQ ID NO: 157388 - DNA, 417 bp, Glycine max
  unsure (1)..(417): unsure at all n locations
tctcccgcaattttctataaatagggggagatgtgaagtatatgagggttcagccccttatgcacttctctctctttcgaaatagttgaggaaaattagttccgtgaagaacatccaagccgaggcgcttccgtaacatttacgtaacgtttccgtgagtaattacgcgaagattctcgaccgttcttcaagattcaccgtttgttcttcgttttcttcagtcttcaacgggtaagtacctcgaaccaagcttttcgattcattctatgtacccgtggtgggccacatttcgtttcatgtatatttattctcgtctccatttactttttattcccccttttgacgtgcttangccatttatttaagtcgtttctcgcttaatctgnaaataaaataaatttccaccgatcgttcgaa

SEQ ID NO: 157389 - DNA, 405 bp, Glycine max
  unsure (1)..(405): unsure at all n locations
agctnttntaagcatttttaatacttactagcagaattttcaaaccgcanaaactgaatcgaaccaacctacaaaatattggtttggatttcataaataatttaaagtgcaccaaaccgtactgcaaacacccctagatcgtagtattggtagatagctaatgctttctgcatgctgggctctctgaaattcttcgagctaactgaatttgctaaaaacattgttggatagttgccttaattgcagttgtccctagcctgcctttagtgcagtctctttgggttgcctaatttcagtctcacatcaattgaagatatagtcaatataatccttataaaaggcttcaacaatcttgaccttacaagccaattgggttgggtcaagttaaccctaagcccaaattct

SEQ ID NO: 157390 - DNA, 450 bp, Glycine max
  unsure (1)..(450): unsure at all n locations
cgtttttcttaattntatgagtttctatttctattcaattatgtaaatatcatttaaatgttatcttctgttgatcgtggatattggctttgttctgctcaagttcattcatttgcagcatgtgctgatttattatgttcatgagatttcggtgtgtatcaatttgccatccgtgcagcaaattagaatggttaataagtctagatgaatatgatttttcttcaatgcgatcttcagtattattagtttctgaatttgatcatgaggcatatggattgagttttaaacctttcttcttgcaatgtagagtagttatgtgttgcgttctgcatagcatccaatctccgcatgatttggtgatgtctagcccagatcanactctcanattngtcttcaacttcacaattttcttaggtctactatgggtgtttcttgacttacttcctctat

SEQ ID NO: 157391 - DNA, 374 bp, Glycine max
agctttggagcatgacgaaagtttgtcaaggttctaacaattccatcatgcattatgatttgtatagagccaatcccactagtcttacaagagggattgcttcccatcataacattacctacggatttcttatcataggtcaccaaccagctcctatgtggacacatatgataagaacaatctaattcaagaaccccaattcaaaatgacgtcgttattgatcaacaacagagaacaccaaatcagtttttgatgaggaatcattctgaacagaggttgcaatagatttttttttccttcttttctttggacaatattttttctagagacctggttccttgctataattacaaatatccgtttgtttaactttt

SEQ ID NO: 157392 - DNA, 441 bp, Glycine max
  unsure (1)..(441): unsure at all n locations
ttacggacctatgaaactcagctatgctgcnacattacaatagacctcctcaacctcagcagcaaaatcaaccacagcagaacaattatgacctctccagcaacagatacaaccctggatggaggaatcaccctaatcttagatggtctagccctcaacaacaacaacagcagcctgctccttccttccaaaatgctgctggcccaagcagaccatacattcctccaccaatccaacaacaacaacagccccagaaacagccaacagttgaggctcctccacaaccttccctctaagaactcgtgaggcaaatgacgatgcagaacatgcagtttcaacaagagaccagagcctccattcatagcttaaccaatcagatgggacaattagctacacaattgaatcaacaacagtcccagaattctgacatgctaccttctc

SEQ ID NO: 157393 - DNA, 374 bp, Glycine max
agcttgtgctcgaggccttgacctcataattgtctcatcactgtgtttgatccattctgagagtttccagggcttctgccacttccatttaaactgtagcagccattgatgatgacttctcttccacttccaaagttttccggcttgtcctatagctgctagcctcttcgttgacaactctccaatgggtatcatctggatataaacccattaaaacttattgagaaataaacactatcatcatcatcatcagggaaatagaatctagcaaacatacctttcgtgcttcatctaaaaatgtagctgactccctgcctgaccaattaacaactccaggagtgaatttgagttgctctggtgcaggaagcgacatt

SEQ ID NO: 157394 - DNA, 473 bp, Glycine max
  unsure (1)..(473): unsure at all n locations
ntgaagaaacanaaatgaaagctctaaggaaccgaatgcatgcacaaattaaaattataaaaacaaaaaaaagaagtaagaaacaatgaacactcacctagaatggatgaacgcaagaagctttgatgaaggaggaagaggagatcgacattaagagactaggaggttaagaggagacgtaatagagaggaatgaaaagtgatgaatgagaagagattggaaactgataggcttagggtttaatttgtgagagagagactcacaagaggtataatgagagattgagtgaatatgaaataaaaaagttagggttgcacttccttttatatatagataaggttaaatatgtaatatacttacattgcattagtaattaaataaaattagtataagaataatacactatggtaactaaataataataataatatatgatatatgatataatataacacaataatagtaataataat

SEQ ID NO: 157395 - DNA, 448 bp, Glycine max
  unsure (1)..(448): unsure at all n locations
agctagtangattatggtgtacccgtcatatgtggtactaggtggcgatcgggagatggtgcaaatcaactctcccacatccacaaatcacacatgaacccaccatccccagttgcccaccttcaactgagctcgcgtacccccacgtagcccttatcctcgttcctctcagcaccaggtccccatcaacccctccaagcttccacaatatccaaacatcatgaactaccctaaaccaagaaaacagggcagaggcaaaaaaactctatccaaaacacattccaataccacagctttccctgctcaaataccccagtaacattctctttgttcttattcgctaaccgttggatcgactcgcaaattttactggaggtccctagtacataagtctacattgtgacgcgtgggatctgctataaaatgtccagaacccaatatgtactac

SEQ ID NO: 157396 - DNA, 419 bp, Glycine max
  unsure (1)..(419): unsure at all n locations
tcttgcgtagccgctcttggagctcagaanatcccaaaaacaaatccctcttattactagctatnttgaattctttagttcctgaatgtacaaccttcaaattgttgctcattcccctctttgttttctgcaaaaaagaaaatcaatatcaaagaaaacatggatgaagccctaaggatgccatgtacatgtgtatttctgaagatatagtatttatattccatcaagcatacattgactgctgattacatgtaatagactttntataacatggttgccccanatcacaattaanaagcacaactaccaatctttcagagtcctttggttaatttgtcttgtctccttctgtggtggggtttaattaataatattatacattttgccttcaaaaaacacttatgactaatccttttttc

SEQ ID NO: 157397 - DNA, 467 bp, Glycine max
  unsure (1)..(467): unsure at all n locations
ttctttttgtgnacaacacaccttcatgtgtggtgcgtgagcagagagagaaataatttatgcttttcnctccctcactcctttcaatactatccaactgtaatcgcctctactatgctacatgtacccacttgtatatccagatagtatgcctcctatcaactttgcaacttgagctagagtatctaccataatacccactaactaaacggcacccatgtaagagcacctccatataatagaaccgtgtatgaaacgaccagtgcctgaactgagagatatatcttatctatctcatgatcctctatcacgatactcgaactccccaaggatataacatccgataaacttatttctgactcccaatanatatccatatgttcgtagcctctcttaaataaagcctctctttgacgttcaccgcttattgcaacaagaatttcaattctgacctcaatccactaacg

SEQ ID NO: 157398 - DNA, 438 bp, Glycine max
  unsure (1)..(438): unsure at all n locations
agcttgtcaaatatacttatgaatacttttcttaacagatattcaaattcatcgtgtaatgaggaattggccttttgtattaaatttaacctatattggcaatgtttttcactaatgaaaacaaaacatataaataaaataacaattttttaatcagtaaaaagtagatgtaaattggtacaagggtaacaaaacccatatacaaaacttgtgaaaccacacaccctactgtccacttcactggttatttaatattttgctcaacacagagagaaaaaatattttccttcataataaaaagntaacgtcttattattatttatttgtaattattctttaaaaaataaattaagagaaaacgactaatatgataaaaatctttngaatttatcccagattctatcccgataatngtgaaaatcatctcaccataactaa

SEQ ID NO: 157399 - DNA, 408 bp, Glycine max
agcccatgtgtcgttcctgtcatattggtgccaaagaatgatggaagctggaggatgtgctcacattgcagagctttcaacaacatcaccattaagtacaggcatctcattcccaagctagatgatcttcttgatgaattgtatggatcatgttacttctctaagatagatttgaaaagtggatataatcagattacgattagagaaggtgatgaatggaaaacaacttttataaccaagtatggcttatatgagtggaaggtaatgccatttggtttaacaaatgaccttagtactttcatgaggttaatgaatcatgttttgagagagttcttacgacaatatgtggttgtctactttgatgacattcttgtgtataccacaaatgtggatgagcatttgcaacat

SEQ ID NO: 157400 - DNA, 444 bp, Glycine max
  unsure (1)..(444): unsure at all n locations
agcttgtaggattatggngtacccatcacctgtggtactatgtggcggtcgggcgatggtgcacaacaagttttccacatccacaaacaacattcaaacagcacaagctatcacagccaagcaaaacagggcaaaggcagaaaactctgctcaaacaccaaccaaaatcatatctttttctcacttaaagaccccagtaacaattccttcgatccaattcgttaaccgttggatcgactccaaaattttactggaagtctatagtacataagcctacattttgaccgttgggatctactagaaaacatccagaactcattctgcactagactttccacaggcaaccacacacaagcaattntctgcacaaagccaaaatcctgctgcacctattntgacagcaaaattctgcataagtgcagatttcgaaaatcacacttcccc

SEQ ID NO: 157401 - DNA, 466 bp, Glycine max
  unsure (1)..(466): unsure at all n locations
ggcttgccgcacatccaataccaaacaccacacttaatacgaaccataacaccaaccagggaaggaattntccagaaaataagcctgtaaaattcacctcgatttcggtgttgtatgctaacttactcccatatctattcaataatacaatggtagccataatcccagcaaagattcctcaacctccattttcctgaggatacaactcgaatgcaacatgtgcttatcataaaggagttatggggcattctattgagcattgtatgaccctgaaatataaggtgcaaagtctaattgatatggtctaactaaaattcaaggagggcaatcacttgtgaattctgacgttgtcaagcgacactattcatggngcaatttgaaggttgttgttagatgtctccaatgactcattangatttccaggtttatgccattactgtaaataacagtcacaatgctaataata

SEQ ID NO: 157402 - DNA, 448 bp, Glycine max
  unsure (1)..(448): unsure at all n locations
agctntagaaacctacacggcgatccaacgggactagcacaaagaaatataaatcgtttgatttgatgttatcaacaactcagaataattttttttggcaatcctcgtcttttcgaactagccaatggaatgtcattataggtacatgacccactttttattcgatgtatgttctttcaatttgaaattgggttgagatctagagaaaaccaacaactaaactcacccatgtaatgtactccatttatttaatgtgtttaaattatcagttcttaatttgagatatagtattctatttaatgattttctaaaagtatattgtatttttcaattaaataaaaagctataaatttatttttgattcctaataaatatctaattnttgtgtttgctctttaataaacttttctttttcgntgagtccttaattaaacaaaaattttaattt

SEQ ID NO: 157403 - DNA, 484 bp, Glycine max
  unsure (1)..(484): unsure at all n locations
tatgagcatgaaacctttctccaccaaccgagaaagtaacatcaaatgattcctcatcctctaacaacatcccaaaatgttcaccaatatcagattcaggaacctgtattgtgtttaactgagaagaatatatctatggacgacactaaaaccgcaatagtgcaatttatcttcaagcagtcatccttgagaaaatttgacgtctcaaggtgtctccgtttgaaaaaccgcgtatagcccctattacacaacaagtgcatcattgatcactacgtaatgtacaccacaaaaaatggatacaagagctaataaatcatgatgatatccaaatcatatcaccaaaatcacaaggttctctagttcctttgaaaatttaattnttatgtcttatattctaataaaagagctatctctttaacccctgacaatagtgaaaaaagaataaaagaaaaatcaataacactttgctntattntaaagacta

SEQ ID NO: 157404 - DNA, 417 bp, Glycine max
  unsure (1)..(417): unsure at all n locations
ctcttgagtgagcatttaaagtctgcatatcanagcacagtacataagcaaggtcttcattttgaataaataacattgttagtttaccagggagaaaaatcaacaaaacaaagatgtaggaacagagaagcttcctaaacaccctaaggccaatcccagcctagaaataaatgtttctgagtgcaaaatgagagtgaaagatgcagaaaagaaaaaaaatcttaatcttatttgagaagagggaaacctgaaagcacctgcttctaacctatgttcagaattaacttatgagttattatgtgcaaatcctctcagcactaaacttcaatgcaggtgacaaccaatccgtaaacacaaaaaacttttttgaagagtttgcattgataattataattntggaaacatatttttttaact

SEQ ID NO: 157405 - DNA, 479 bp, Glycine max
  unsure (1)..(479): unsure at all n locations
tagttggatganattccatgatcacaccttatagtaagtagataaacatcctanatcaggaagaacaagttgatctagctacctagaaatcaaatgtgtaatcctaacctatgaagtatgccagggatgtcctaccttctctcttacatattgcggcagagcaattgatgccaagttgcacacagccgtttctgttggacttgtatactcaattatctcagtgcacaagtttcatgacttgattgtgcccaaattctgttggttgcttttcctattgcaagtgtcctaggatatagaaaaatgaagaggtttcaatgaaaataaatacaaaatgcactgacagaaacttagcaaaagtcaaacaagcatttgtaaaccaccttataaaatatgtaaggagttccagtttctatctgtgacttcaaaatttcaaaccagagagattctgtgcctgaacaaccttctttgcttttccccat

SEQ ID NO: 157406 - DNA, 436 bp, Glycine max
  unsure (1)..(436): unsure at all n locations
agctntgatgatgtcgagaagaaatcacatgtttgtcatcatcaaaaaggggagaatgtgattgtatgtatacatgattttgatggtgaagaatcaaaacaaggcttatttgcttcaagattaatacaagattgtttcaacaaacaaagccttgattcaagatttcttcaagatcaagccttacctcaaaacgaaaggtttcaagtcaaccaaggcacatgtaattgattaccaatacatgtaattgattaccaatggtttgaaagtgtgtaatcgattaccagagactttgaacgttgggaattcaaattttaaatgaagagttacaactattcaagaaaaataactatgtaatcgattacactaatgctgtaatcgattaccagagaggattntcaacgaatatcgccaacaatcacatcttatcatttggatt

SEQ ID NO: 157407 - DNA, 487 bp, Glycine max
  unsure (1)..(487): unsure at all n locations
tctgcttatgtggcagggcgggctaccttcactttcttgtctccaacgcgagctgtgaccactgttcttccttcccgcgatgcttcttttcatgtccgcctgagtgggcttatagcctaaaccatacttcccacgatttccttgggcatttatcaggctagttatgccgccgttgtctttgcctaaacccattctgggttcataaccgttccccaacataactcgggccatcattactgctgcatcggacagacaaggctgcccagagagggaatccacggaggaaatgctgaccacctcanaagactggaaagcggtttctaacgattcttctgcggcttccacataaggcatagaggatgggcagctcaccaagatgtcttcctcgcttgacacgatgaccaagtgcccctccactacgaatntcaacttttggtggagcgtagagggcacaactcccactgagtggatccacaggcaccccaac

SEQ ID NO: 157408 - DNA, 417 bp, Glycine max
  unsure (1)..(417): unsure at all n locations
agcttcttattcaatgctcatcttggtggtgaagctccttcttccatggcttattccttaatggatggcgcctcctctcacctcttctcctttgtcttccgctgcatctccatggtggaaaatcaccattaaaggacctcattgaagctcanagatccagcctccatagaagccccacaagcaagcttccatcacattntaacgtccctcttgattctgaaccatatattccaatcaagagatctttcttgatcggtgttgctgtggttgtgtcatttggttaccgcaaagagcatgatgactcttgggtaaaaaagggtgctcaaccaaatgatgatgaaggagaattaccggttgaaggggactcttctcttctttagagtattttgacaggnttgatggactcanacctatgtg

SEQ ID NO: 157409 - DNA, 428 bp, Glycine max
cctctatgtctagactctcttaacatcaaaggattcttgagtaaaagtttagaaatgttaaagtttcaagagaagttgacaaagtcataattcaatccccatttcttatgacattctgatcacttcataatcaccagcattgacattttcataagaaggagtggaccgcccaacaccaccagatttttgtgcattatcctcttccataacactcttacctcccacgcatttattttgtttgtgctcatagtgaccacatctaaaatagatggggtgcaaccattcatactcaagaaacatgggatatcccctaaccataatgtgcaaagtcaattgtctatccaaatcaatttcgacacatatacgtgtgaatttaccctagattgtatggacgtcaaattattaatcttaagcatgggttctagcat

SEQ ID NO: 157410 - DNA, 425 bp, Glycine max
  unsure (1)..(425): unsure at all n locations
agcttacctacaagtcctaattgtcattctatactagaatcaattcactttagactccaatttccactaatccccanagttggcttctctaaccctcaaaatctcacacttttctacctacaacattgtcattctcacatttaaccctaaattaaccttccccatcatctctaccagttttctatcaacaaatttcagcacacaaacctcacaaagcatcaccataaaaccctaaaatagaatgggtaaatttgactcacatccaacatgtcaagtttagcatgctttcaacaaatttcttcacaaataactaccataaggcattaacctagtaaaactacccatcatatctcccaaaaacccaatacccacgaaattcatgtgagaagaagtccacccaaacctgaaattcgaagtcccacaat

SEQ ID NO: 157411 - DNA, 381 bp, Glycine max
  unsure (1)..(381): unsure at all n locations
tgcccaggcgagcaagggtgcttcctccagaagcaacaaccttctggaggaagaatatggaaggcccaagtgggcctgattgctatttgtgcccccctttttactaaatgcacctcccttctatttttttggtgattctttttccgtaacgttacgaaactttacgaatttcgtaacgatacttattttctttccgtaaggttacgaatccttacggatcatgtatttactctnttttagctntcgaagaagttacggaaactcacggattgcacaacaacacctccttttggtttccgccacactacggaatttcacggatcgcataaccttgcttacttttgacttccggcgcgtctcgagacttacatattgtgcaac

SEQ ID NO: 157412 - DNA, 329 bp, Glycine max
  unsure (1)..(329): unsure at all n locations
agcttctcccctatnttgctatatatagggggagaagtgaagaagaaaagggttcagcctcttaggcacttctctctctctcaaaagtgctgaggaaaattatttccgtgaagaanatccaagccgaggcgcttccgtaacgtttccgtgagtaattacgcgaagattctcgaccgttcttcaagattcatctttcgttcttcattttcttcaaacttcaacgggtaaggacctcaaaccgagcttttccatttattctataggcccgcggggggtacaacattggttacaggaattttaattctcgtttccattggctttttataccc

SEQ ID NO: 157413 - DNA, 345 bp, Glycine max
  unsure (1)..(345): unsure at all n locations
ttacggacctatgaaactcagcttggagaaaacaagttctggtcatatgagctattntgctagtttagtgttaggagtgtaaaggctntgtgggatcctctcacccgcagaccctttcttttgttcaaagggatgtgaacaaagtagctaatagtttggcttctttagcttccctttttgaggatagagtttggattgaggaagtttcccctcatattctttcccttgtcaatgatgacttacgacctctagccattgtcactaaatcaacatccgttcactcccctattacgacgacctctgccatatacaaccttgaaccagcgtctgcgataacaaatcaaa

SEQ ID NO: 157414 - DNA, 409 bp, Glycine max
agcttgcctaattaacctgaaattgagacaaaatgattattaaacacacaaaatgaaaatactaagtatttattacctatacttaacagaaaatacttataacactacaaaataaccataaattgggagagtttgatacaatttatacaagttttatacacaaaagttagtcgttttcatcgactaacacatgtacactaccaccacatcctccacaatgagaagagtgaaagacaagggtaaggaatccctaatagaattggaagagggtccaaaggtatgtggaatggagacacgcaacaactgcttctgaactaagtcataggtaggaactgtaggactcgataaaatctagtggactgcctcaaggttcgatgtgagtccaacaagaacaaccaccatgaaaaat

SEQ ID NO: 157415 - DNA, 439 bp, Glycine max
tcgtccgtagatccctcatgtaagaatgggcctatactaaacagcattattgtaacagcataattaaaaccaaaacttaacccgcaaatccctcatgtaaggctaagtttcaatcctgcttcaatcaagttctaaggcaatagtacattttccaatgctaaagtcacctaactatgcacacaaatgggtgatcagaccaaaagcatacaaacattaagcattgagggaagcattgaacacagaaaacataatcaattagatattaggtatttacatcagttgttcattagaaatccccaactagggtgtttaaccaaccattacaaagaaaccctaacaataaatgagattaaaagtagagaatgatagttccttacacaagaagagggatttctcctcctcttctcagcatctcacactcactctctactcaataatc

SEQ ID NO: 157416 - DNA, 458 bp, Glycine max
  unsure (1)..(458): unsure at all n locations
agcttganattgaacaacggaagctctccagatactcttatggtcataacttatcacacggaggtccaattgaggcgcataatatatcgagacgctcgaaattaaacaacgaatactctcgagaaattcaaatggtcgtaacttatcacacggaagtccgattcaggtgcataatacaccgagacgctcaaaattgaaccacgaatgttctcgagaaattcaaatggtcataaattttcaaacggcagtccgatttaggcgcataatacatcgagaatcttgaaattgaacaacggaagctatccagaaattcaaatggtcgttacttgtcacacggaagtccgattcaggcgcataatatatcgagacgctcgaaattgaanatcggaagctctcgaganattcaaatggtcgtaacttttcaaacggaaagtccgattaagcgcataatatatcga

SEQ ID NO: 157417 - DNA, 455 bp, Glycine max
  unsure (1)..(455): unsure at all n locations
taacanaaggcatgcgaagtgggtggaattcctagagcaattcccttatgttatcaaacataaaaagggaaaaggtaatattgtagccgatgctctttctcggcgtcatgcattactttctatgcttgaaacaaaattgattggtcttgaatgtttgaaaagcatgtatgaaaatgatgaaacttttggagaaattcttaaaaattgtgaaaaattttcagaaaatggtttctttagacatgaaggctttcttttcaaagaaaacaaattgtgtgtgcctaaatgttctactagaaatttgcttgtttgtgaagcacatgaaggaggtttaatggggcattttggggtccaaaagactctagaaacattacaagaacatttttattggcctcatatgaaaaaggatgtgcagaaattttgtgaacattgcattgtatgtaaaaaggcanagtcta

SEQ ID NO: 157418 - DNA, 440 bp, Glycine max
  unsure (1)..(440): unsure at all n locations
agcttagtatttatatttattactacacttcatgtaatactatactgaaacagagtaaatttggaacttgaatgaaaacctacaaattactaccttccccaatagatagaagtagttcaacacaagacttagctcccccagctaaggctatgtgaagggaaatgccattgtgcatattgcgaatgttcacatcaacaccagcaataagaataacatactcaaaacacaaaaaaacagaacttagttaacattagatacaaaaggcacatacttcagataccaacatgatattgaatattgatggatatttaattattctaatgaagaatttggtttactcaccttaaccaattcatcatcgtcaatcataacagctcactactagaaaataagggtttcacatcggttatttaagactttcaacatcggntattaatcga

SEQ ID NO: 157419 - DNA, 396 bp, Glycine max
  unsure (1)..(396): unsure at all n locations
tgacacagtgcttgtacagagctcatctccacccgcagcacataagaaattatgtggaanaatgaagataaactgtgttaagcaagaccaaaaaacatacaagaagatactgtcagtttgtttcactaattaaatcaaataacaggtttttgtagcttatatatatcattaagaaaccagtacggcagtacctgaaggaagtgaattgtcttttaatcgagtcagaaaccagtatatatcatttaagatatgtaagtgagtgttgtcttttcagacaaatgaagcattagcgaagcgaagacacatcatcatgttgtgcatgtggaggtggcaggagctgaactgcatattcaattctatgtgggcacgttaaggtggaaaatgacactggctggc

SEQ ID NO: 157420 - DNA, 419 bp, Glycine max
  unsure (1)..(419): unsure at all n locations
agcttgattgtagcagtgaatataaaacaaacttaacgatagcaacagaataatttttacaaatttaataccattcatcaattnttcatcactttttcatcttcaatacaaatgaaaatattatgttagtgaactattcatcacttttttcattcattntttttttatcaatggtagacatttatacattgatattccatataatcaactatagactaatagataatagtgtcactaatatcttctcgtatacaatcattttgtatcctatcttttcttgtatggccacacattcatttaatatacctatttctaacacttaaactatgtaaggaatacaccaataggagaggcacaaccaatatacatttgtctgatatcccanaaaagcatgataaaatatacatatcattctaaac

SEQ ID NO: 157421 - DNA, 414 bp, Glycine max
  unsure (1)..(414): unsure at all n locations
ttatattcatgaattgctaagcgaaattcaggattgttcctcagtacactaacattatgcaaaatatagaactttgcttcttccatattttaactcagtagattccaaatatcttttcttatagatgtttcaatttgatcacctttattccatattaaaatgaaacttggtgtaaggcataatttttttttgtcttatattaattaagaaataaataacctatacacacaaaaaattcatacctggctatcaaacaaaatcattttgaacctcacaattggatttccattaatgtggtcaactatttttcatagcttattgacttgagccttcacaatctagcaggtaatagaaggagtaatagccttcattgngattaacatgtatcctanaatttccatcaccttagcacaa

SEQ ID NO: 157422 - DNA, 455 bp, Glycine max
  unsure (1)..(455): unsure at all n locations
agcttctcccncaattntctataaatagggggttaagtgaagtagaaaagggttcagccccttaggcacttctctctctttcgaatttgcttaggaaaattgtttccatgaagaaaatccaagccgaggcgcttccgtaacgtttccgtgagtgatttcgcgaaggttttcgactgttcttcggcgttcttcattcgttcttcatcgttcttcagtcttcaacgggtaagtacctcaaaccaagctttccaattcattctatgtacccgtggtggtccacatttggtttcatgtatttttattctcgtttcattcactttttatacccccttttgacgtgcttaagccattntatttaagtcatttctcgcttaacctagaaataaaataaatttccactgatcgtttgaattgtattatccgttaactttgggtgagatgaattccgaccgatc

SEQ ID NO: 157423 - DNA, 431 bp, Glycine max
  unsure (1)..(431): unsure at all n locations
atatagagtttttgggtcatgctggattctattgatgattcattaaagacttttccaaaattgctaaaccactgagtaatctgatgaacaaggatgctgtgtttatgtttaatgatgaatgcttagaagcctttaatacccttaaagccaagttggtctctgctcctgtgattacagcactagactggggactagagtttgaattaatgtgtgatgcaagtgattatgcagtangtgctgtgctgggacagggaaagggcagaatttttcataccatctactatgccaggaaagtgttgaatgatgctcagatcaattatgccaccactgagaaagaattgttggcaatcgtttatgcacttgagaaattccgatcttatttggtggngtcaaagatagtaatttacactaatcatgcaacaattaaacat

SEQ ID NO: 157424 - DNA, 441 bp, Glycine max
  unsure (1)..(441): unsure at all n locations
agctaggcattntaagtgagtctaatctcacttgagccaatatggtagcctacattcatttcatgtacatattcattatcatttttatgtttgttttgtgcatttgtgtttgtttgtttgttatatgtacatttagaaaacatgaaaacctttttagcatgttatttctataaaaaaaatttgcactatcattcatgataattgattacgagactttgtaatcaattaattcgacctgaggttactatcttagtgtctttaggttagccagtaattaattacattgtatggtaatcgattaccacctgcaccctttctaggtagagctataacaattataataattggtaatcgattacgcagggtttgaaacatttttttttaaatgaaaagacactcgctttgctttatatacagcatacctagacctaaattcttact

SEQ ID NO: 157425 - DNA, 468 bp, Glycine max
  unsure (1)..(468): unsure at all n locations
tcatcttcaatccanaaagaaagtgataaagaagacttaattgatttgaatgaagatgatgatcttagcctttntgtanaaaggttcaacaagttcctgaaaatcagaggaaatcaaaggagaccaaattttaaacctaaaagaaggacaaaagattcatcctctactccaaaatgctttgaatgcaatcaacctgaacatctgagggttgattgcccaatcttcaagaaaagaatggagaaatctgaaaagaaaaattttagtgaaaagaagatgaagaaggcctacatcacatgggatgacaatgatatggaatcatatgaggatttagaanattaagagataaacttgtgtctaatggctaaaagttatgaaagcaatgaagaggtaacatcttcaaataacaacttatccatttcttttgatgaattacaagaatgcattgctgatttgcatagagaatcaatc

SEQ ID NO: 157426 - DNA, 501 bp, Glycine max
  unsure (1)..(501): unsure at all n locations
ctgctgatattcgacantctgagcaataagcctnnaaacctatacaagataatgctacggcggacgcttncatacagccagngaagttgaactggtgctacagcccgcaataaacttgggccgagacagaaacacgacgggtttcaatcggaggtatagtcctcaagcctacccttatggtttgcctccagacttctcttcccgtaccgctccaggcgatatgagccaagcccctaccttcgaagggtagacttctcctcacgctcactattctntgtagaagatgattatggagatgcccatttacgaccttacttctccttatggaaccagtcccgcatgaattgtcctatcatcctactcgtgccttactatttatacgtacatttaagaattgtccccttggcattaaatgttccatagtttacttatcaatcccatgggtttctcggcatttgctttccttttaaacacacattatattatacaaaccccttgccc

SEQ ID NO: 157427 - DNA, 465 bp, Glycine max
  unsure (1)..(465): unsure at all n locations
tagaaaggtctactcanatggatgtatgttaagttgataagtaaaaaaaaatgcaaaaagtagaanatgcaggatcatcacgtgcccattgattcttggtttctaatatcaaataattaataacaagaagaaattcaattaaataattttttgaaatcaccaaatttaatttcctaatttgataaatcaaaggcattaattatataactaaaccttaccatgaaaaattggcatcattatgtatccttctactcctattttaaattttattatattgaacttatatttttttagtcaacattgccaagatgtggatcaggtttggccttccaaagacaatatcaatgatttataataatttatcaaatcatttgatattttgatttataataatttaagacaatatcaatgatttatattaatttatacactctgatgaactanatcccttgacaaatagttaat

SEQ ID NO: 157428 - DNA, 312 bp, Glycine max
gcgagctaggcgaacttgatatttgcagatcgctgatccatcttcttctgtaagagcgcataatgcactgggcgcatcatgattggctgagcgcatagaacaatctggaaaaagatgacctgtacatgtgcgtagagcgagagtcaaacttgcttaacgcaccgcttgcacctccaggctgagcggcaaaaaggggcgctacacctcatgtcacttaatttggctaggcgaaccataatgtggctgatcgaacgaccaattatcagcatcactatttagagactgaagtcagatatggaagagaggaccaat

SEQ ID NO: 157429 - DNA, 410 bp, Glycine max
agcttgtaggattatggcgtacttatcacatgtggtactacgtggcggtcgggcgatggcgcacaacatgctatccacatccacaatgcgcgcataaacccaccatcccctgttgcccacctccaactgagctcacgtactcccacgtagcccatatactcgtttctctcaacaccgggttcccatcaatgctctcaagcttccacaccatccaagcaaaacaacattcacacaggacaagctattacagccaatcaaaacagagcataggcagaaaactctgccaaaacaccaaccaaatcacagctctttctcacttaagaccccacgaacaatttcttccttcctgctcattaaccggtggattgactcgaaaattatactggaagactatagtgcatatgcctaca

SEQ ID NO: 157430 - DNA, 444 bp, Glycine max
  unsure (1)..(444): unsure at all n locations
agctnttgaaatcaaactntatcactggtaatcgattacaggaaactgataatcaattaccagagagtaaatactctggtaacttagaaaattttgagaaaactctttttgtaaaacaaaactatgctatgtttggtttttgaaaaatccttttcaatacttcccttgtgaattcatcttctcttgaatcttgattcttcttgatgtcttttcttgaatcttgaaatcaacttctcttgaatcttgaatcttcttgatttcttgaacttgttgactcaatcttgacatcattctttngggctttttgtcatcatcaaaactacttgaatcatacttgattcattatcatgaagctggcttctacaatctccccttntttgatgaggacaaccctgaaatcaagaaacacatacacattcntttttctagtcgatcactcactta

SEQ ID NO: 157431 - DNA, 459 bp, Glycine max
  unsure (1)..(459): unsure at all n locations
gggttcgaggtacttacccgttgaagatcgaagaacgaatgaagaacgtcgaagaacggtcgaaaaccttcgcgaaattcctcacggaaaacgttacggaaacgtttcggaagcgcctcggcttagattttcttcacggaaacaatttttccaagcaaattcgaaagagagagaagtgcctaaggagctgaacccctttcttcttcacttcctcccctatttatagcaaaataggggaggtgcttgctgcccagctcgcccaggcgagccaggttgcttcctccagaagcaacaaccttctggaggaagcttctggaaggcccaagtgggcctgattgctatttacaccccccttattactanatgcacccgcctttctattatttgtaattctntntccgtaacgttacgaaactntacgaaattcgtaacgatacttattttccttttcgcagggta

SEQ ID NO: 157432 - DNA, 397 bp, Glycine max
  unsure (1)..(397): unsure at all n locations
agcttgtgccttttcacgtctggaatatgaatgtagcatatagatccaaagacccttaggtgctttgctgatggcttcttcccgttccaagcttcaattggagtcttgtcttttacagacttagttggacatctgttgagtatgtaaacagcagtgtagactgcttcaacctagaatgtgttaggtagtcccttctccttgagcatcgatctagccatttccataactgtgcgattctttctctcggacactccattttgttgaggagaatatgcgattgtaagttttcgctcaatgctttcatcctcacaaaatctttcaaactcgcgagatgtgtactttntgttgcgatcacttcttagtacttttatccgttttccacttttgatttcagcaa

SEQ ID NO: 157433 - DNA, 464 bp, Glycine max
atgttctgcaggaaacttgtgtcccttttaagtttatgactttcggtctagatttattttaaaaaattgcaatagttgtagtatggtaatatatgcttctcaccgaaccctctctggaatttgagactactctctctgtagtctttaagctatagttcttttgcctcttcaatttttgttataccctttttagctgttttttgatgcattatttgtagctgattattagatttgactgcttgtggacaataatttctagtccatattctttataaaaattgagaatgactctgatatgctttagctttttaaacaaacctttggccggcaccaaatactgttactttatatacttataactcaattgcaggtatagattggcatattcatcaaactatagccatatcttggatccgttaattgagaacaattaccaattattcatgatcgagaggcttataatg

SEQ ID NO: 157434 - DNA, 382 bp, Glycine max
  unsure (1)..(382): unsure at all n locations
agctttntaggatagcaatgttatcaatggcagatagcggaacatggcagaaggccgaaattccaccatataaacataccattgcaccttatgtcaccaccatggcagacctcccttcacaaattgtctatggcagttgggaaaaaatccgccatgccattccaccatgccagtcccatggcctctatttaatagcactgtagggtagtctaacaacattttccaagtttaatgacattctagcttaagaagcatagaagattgaaaaacttgtctttntgttaaactaacaaaaactagtcatgtgagacacattcaaagcctgttaaacgccccagcannatatattgagcagaaccattatattgcatggtcccatact

SEQ ID NO: 157435 - DNA, 410 bp, Glycine max
  unsure (1)..(410): unsure at all n locations
ntcttgagaaaacttccttgagaaacttctttgagataacttccttgagaagctagagcttagctacacacacccctctcataactaagctcacctccttgataagcttccttaagaagattcctaaagaagctagagcttagctacacatacctctctaatagctaagctcacctccttgagatgagaagctagagcttagctacacaccccctataatagctaagctcaccctcatgacgaaatacatgaaaatacaaaataagtccctactacaaagactactcaaaatggctcgaaatacaaggctaaaaccctatactactagaatgaccaaaatacaaggcctaagcgaaggagaaacttattntaatatttacaaagataagcgggctcatacttagcccatg

SEQ ID NO: 157436 - DNA, 312 bp, Glycine max
agcatacaaaactaatttttgggcctctatatgtctgagggcccaattacaaaaatacagcatacaaaaatgacatactataaaactggacgacaaataaaattgtcttctctcttcaagtccaagccggttcagcccaattccagatccaagctcaatcgcttataattctcctgaaattaaattaaaacacagaattagtcaagtaggctcaaatgataaaactgcataattaatttgacaattaacgctaatcactaattaaaatggtgacagaaaggggtaagaaatatgagaaaataatgacacatc

SEQ ID NO: 157437 - DNA, 315 bp, Glycine max
tcattccttgtttcactcatgtgtccaagtctttgatggcatatggttgaattgttgacagccttagtaactgctaccatatactcatctgcaatcatgtaaagagatcctcgcttctttccacgagccacaatgagattgccttttgttaccttccaagctctatatccaaaagtggtgtaatgcccctcattatccaactaccctatagatgttagatttccctttaaggcaagaatatgtcaaacattgtacagtgtccatagggatccactagaggtcgtgatgtcaatatcacctcttccgacaatgtca

SEQ ID NO: 157438 - DNA, 400 bp, Glycine max
  unsure (1)..(400): unsure at all n locations
agcttgtaggattatggtgtacccatcacatgtggtactaggtggcggtcgggcgatggtgcacaacaagctttcctcatccacaatgcgcgcataaacccaccatcccctgttgcccacctccaactgagctcacgtactcccacgtagcccatatcctcgtttctctcaacaccgggtccccatcaatcctctcaagcttccacaacatccaagaaaaacaacattcaaacagcacaagctatcacagccaagcaaaacagagcanaggcagaaaactctgctcaacacatcaaccaaaatcacagcttttctcacttatagaccacagtaacaattcctttgatcaattcgtaaccgtggatcgactcaaatttactgaagctatagtgataaccta

SEQ ID NO: 157439 - DNA, 391 bp, Glycine max
  unsure (1)..(391): unsure at all n locations
tgagatgaggaagtgttgaagggtgaaacttcctgtctttattgttgaccacagagtggtacctggagatatgtcgcggnggtcaggagaccttggggacgtcaagtggggtgctattgcccaaaaccaagcttgaccaatcccgacccaacccgggcatagtcggtcagtgagaacctgtgatgtacctaagcaggcgagctcctggcagtcaacagataaaaggaaaacaagaccacaaagcaaggaggcttgtggtggctggccagctgtgaatattgtgtaatatgtggatggtggcctctggtaatcgattaccaagggtgggtaatcgattacaaggcttaaaattgaggacaggaggctaagatggtctctggtaatcgattac

SEQ ID NO: 157440 - DNA, 85 bp, Glycine max
  unsure (1)..(85): unsure at all n locations
gtaaatctaaacatatatgattntttatatcgattatacaaataattgatataaatatgatattttttatattaatgatacatat

SEQ ID NO: 157441 - DNA, 462 bp, Glycine max
  unsure (1)..(462): unsure at all n locations
ntaatgctagtccttgaagcatatgaggttgccatatcaaatattcacctatcaagcatgattctaaatgcttaattgtatttttaccctaactttttatgccaaaaattaaaaaaaaatgaaaatgaaaaaatacaattaagccctaaaatttagaaaatatctcttgaaacatttaattgctggaatctcttcatcttgatgattattagttattatacttggagcatctttttttaggctacttgaagcattcttaaccaatttaaatatagtcatcccattaaattaagatgatcatcatcagatttttttgatcgaaattaatcatttagtaaagttaaagacactatgcactgttatgagtaaaaaaacaaattatagtactaatatctaaaggaaaagctaataacactacataataaaaaataaccaatacaagtcaatttaaataaaaaaatt

SEQ ID NO: 157442 - DNA, 162 bp, Glycine max
agcttactcagaggggtacggtggcccagcactctcgccgattatgaggaattggcgaaccgcattgtcggactccccccacccttcctgctgagctgcttcgtgtcggggttgtcgacggacattggccgcgaggtccaggcccaccaaccactgacactc

SEQ ID NO: 157443 - DNA, 377 bp, Glycine max
  unsure (1)..(377): unsure at all n locations
ggactcatgttatctacaatcacttgttacgttgattcttaagaaagtcctctaagacaacaccccatatgccatgtctctcattnggtcccatgactcctatctgatgtccctgcatcaccaataatttaagtgcccaactaatggttccatgcatatccttatgtctatataaatattcaaggccgcaagcattgaggaccaacacaaatcattcacatcataaagtgtttgaaattaaaattctcaacacttctcttcaaccattctcttctcagatcaatacaacaatgggatttcgttacctggcatatataggcattcaaagcggtgacgcacctaaggctatcttgcagtctatgtcggagagaaattga

SEQ ID NO: 157444 - DNA, 288 bp, Glycine max
  unsure (1)..(288): unsure at all n locations
ntggctaattctgtcatttcaaggggtcaaatgagcttggaagtcagaacctctgcacttgaataattgggctacgagtttggactttgttttgtgtaattagtttagttaggtatattagatggacctaatcaaggcatatcacttccttttgtgtagtcactttatatattagtggaagttagttagttagttagttacttcattttgtaaaaaacaaaattagttacttgctgtgcaaactttctcttttctctcaactattcattattcttcttccctttttca

SEQ ID NO: 157445 - DNA, 508 bp, Glycine max
  unsure (1)..(508): unsure at all n locations
tccgaccaccttacttatatattctttattcgtatatanctgttgtttnntaatannnnnncccagcgagttgattgtagcgtgcaagcccttagancaccgccgctgcaactcgcggcaacatgtggctgctcttgctttttcaaaggtcggatactcaccacacacgcgggggcaaaaaacatgcattacttgaccttgcttgttgcattaagacgactcgcacgaactatagtgagctctcgagaccatgtttgaagatggagctgcgctgacaccacgcttgaagccggagttgctgtgatctagatacagctagacacagcttatgcttatcttatgtggtaacgtatccggcgtgtactcagatctgctctaaaaccacatacctttcgctacaccatatcgacccccaagacgatgaccttctcaatgaccgttagacacaagacttgaatcatagcattccatgtccttggacgacaacacacgacagggatcccggccg

SEQ ID NO: 157446 - DNA, 503 bp, Glycine max
  unsure (1)..(503): unsure at all n locations
cttgaggaagcctcttatgaagcttctcaaggaagctacatgaagctgtctcggtaaaaacgctgcccatacttcgttaaccgttggatcttctcgaaggttggtttgcagcttcacaagacacttttccatgatctgaccattgggatctttgagaagatgtctggagtatgcgtgacgtttccgttcctgagagcattgctcacctgtgcgttttgagccttgtagtccaagtagctaaggaaaaacgccattntcttctccttctttcttccaaaaccatttaattaatcaattgaaatattgatcctagggttcgtccctttcattnntgttaaaaccttctattattctgcacaacaaggaaacataaagctttgggatcgatcgtgcgccccatttgaggatggcaatggatttgcaccctttggtatgtgaccaagtgaaactttncttgattaaagtcatagagtgatgccaagggtctgtcaatcccactgaat

SEQ ID NO: 157447 - DNA, 168 bp, Glycine max
  unsure (1)..(168): unsure at all n locations
agcttcttagtctcagatgatgcagctgagtttgtagctacctcatgcactcctctaatgactatagcatcatttctggcgctaaactgctgggagttagaagccatcttctcaatgaaattcctggcctcaacacgagccnnaccaccaagggctccacctaccggc

SEQ ID NO: 157448 - DNA, 522 bp, Glycine max
  unsure (1)..(522): unsure at all n locations
agatgctgctgtancatgcattagtgacctatagatactcagcttaagaagaatggcctcagcaaacttcttatttccttaaggaaattcaatcaatagacctccaatctttaatggagagggttaccactactggaaaacccgaatgcaatattttattgaggcaatagacttaaatattttggaagccatataaatagggccttatatacccaccatagtagaaagaattagaatagatgggagcacaacaagtgaaagcataacaatagaaaaacctagagatagatggtctgaagaggatagaagacgagtacaatacaatntanaagccaaaaaaataattacatctgccctgngaatggatgaatatttcannggttcaaaatgtaagagtgctaaggaaaatgtggacactctacaattaacatatgaaagacaacagatngtaaagatctaggataaacacattactcatgatataacttttangatgatgcaatgaagcatcatacatcaaat

SEQ ID NO: 157449 - DNA, 509 bp, Glycine max
  unsure (1)..(509): unsure at all n locations
cgttgaatcgatcagtgcgtgaccgtatatanaagccacgcctgcnccttactcatagggaagctgtggcccagtatttcttttgacttgaagcaacggctaaccgcattgtccggctcccgcgcaggattcctactaaactgtttcgtgtccgggtcgacgtctgacattcgtcgcgaggtccatgcccaccacccactgacactcgtccaggcggcgggcctggctcgtctttacgaggaaaagttcctcgatggccgcaccctctctcgtactcgttaccctcaacctcatacacattcactctcaaccgacacacactcattctcgaccctaccccatccaccgtgaacctgttttctccatctagatcgctattcgagcatgcggagtgtgttcagtccctatcccatctatgctaccaccacctcgtgttcgtctcctttcctggaagcagtcctctccgaacaatcgtcttgcagcggtacagggctaccatcaaggtgatg

SEQ ID NO: 157450 - DNA, 420 bp, Glycine max
  unsure (1)..(420): unsure at all n locations
gctctgacatcatnacgaacaagacctagctggtgccagagtaggcgcagatcctttttcctttcagctgacctaaagcgaatgtatacaccccactcttccgccatatataggaacatgacatgatcaaatctcctcgcctcaaattagaaatatctttgaacaccaatcgtggatctctcatttgagattatagcactacctcggagcctatcattcgctacttgaacattcgctaccaattaaatttgacccccatatatcacagacctcacagactctcgacggataacattcggaagtaagacctatgcctgtggagaaaaaacaatatgcactatttaaaggaagtaagacttgatttcaatcaccatacagccttttttaacaatcttcactcagaagtctttatgaaccccg

SEQ ID NO: 157451 - DNA, 520 bp, Glycine max
  unsure (1)..(520): unsure at all n locations
cgcccgttgnatcgatccatctcagacccgcgatcntagagtcaccccgccgcatgcaaggcttgctctacagtcttgctntatgattagggaattctatttagcacataacaaacaggtaataaaattttgccccaccaaaaagaggttgcacttgaactcaacatagtagctacaactaattctgtaaaagttgtattctttctttcagctttactgttcatttcaggtgaatatggagcagacgtctcatgtatgattccatgcaaattataaaactcattaaacaaactagaatcatactttgtgcctctatcacttcgaagtttcttaattctcttattgaattgattgtcaatttctgttacatataacttaaacatgtcaagcgcttcactntttattttcataagatatacatatgtataatcagagcagtcatcaataaaagtgataaaatatcgttttccatttctggcaacgttccatcaattcacgatatcagaatgtataaatgcan

SEQ ID NO: 157452 - DNA, 76 bp, Glycine max
  unsure (1)..(76): unsure at all n locations
ntcttggaagagatgggaccaacagcttttcgtccgcagaattcgcccccatctttcggcaatacatcccgaagat

SEQ ID NO: 157453 - DNA, 435 bp, Glycine max
aacatcttatatgttctatgagttaatgacggctgtatcactgcatgggtgtatggtgttaattcattgattttataatgaattggtttggttcaagaacgaattggtgtcttgcactctatgggacgattattgtgtccaatttctggaatatttggattaacatgagaatgaagggcctattattgtattgttgaccaatgccagaattaaagaacgccagggtatactatgatatatagttagttggttttcatcttcattggatccaacttatgctctcatttctgagtggttcaggatcatattcatgctctgttagcaattctttgaatgcttctaaatttgcttttactgagccatgttgctaactgatcacttcaatatatgttttgcctcctattgtacaattaaatctgctctttccctctggct

SEQ ID NO: 157454 - DNA, 482 bp, Glycine max
  unsure (1)..(482): unsure at all n locations
ctagataatgtgntaattttaaggatgtgcgaaataaggcactggccatttagaaagaaaacactgcccctcgcgtgttgtctcgtgagggttatgaatatctagaaaacaagttgatggaggagaagaaaaagaaacaattgtaggaagcagctcaatccgaaagcactgacaccatcattgatcctccaccttccatcagacgacacgtgaaatggaagatgacccgcaccaagaaaactggtcanatgacgcctgaggtagcaaaggaaattgctgacaagaatgtaagtcgctttcgtttgtcaattgttggntattataattattggttgatcgagtaaccaataaatttgcttgtacatgattgctagagggagaggcctcacacggaagcttggtgctatggacatcatgatgactgactgttgcattggcaaccaaacacttggttggccgtgctgtggactggagtccactac

SEQ ID NO: 157455 - DNA, 517 bp, Glycine max
  unsure (1)..(517): unsure at all n locations
agccctgttgtttgatgcgatctcgtgcaccgtgatactatatagcgcatctgcgagcgtgctagcttctgcctcaatattctatagctaaggggtataatagagtgaatactggctgctccccttaagcacttgtctctctctgcgatttgctcgcacacatcgcttccgtgaagatgatactcactcgggcgcttccgaaacgatgacgttacgttttgtgacgaatttctcgaaggtgtcgaccgctcttcgacgatcttcattcgatcatcagtcgttcatcgagcttcggcaggagaatacctcgcaccaagctttgaatgcactctatgaacgcgtggtgcggcacatcgtgtgtctagtattatattctcaacgcatttctatcaatgcctctttaggcgtgcatatgccattgatacttacattcctcgtgtaacctactagtgaatgaattacaccgatccgttgagggtatactccgcatcttcgggaatatgtatactgaccgtcn

SEQ ID NO: 157456 - DNA, 521 bp, Glycine max
  unsure (1)..(521): unsure at all n locations
atgtgtatcatgcattacggacctataaaactcagcttggaccatagcagctcacaatctaggagtctcgtctcctatctctatggatattcaacgttctagaagtgaaaatgataatggagcaattttggagcatactctcatctcacacaaaactatgacattaatctatactcgctcaaactggatatacgacgaatactctagccaatcanaatttgactactctacacccaatttaccctaaaaatggatcttgccatcactctggtgactcatttgcctccttcgcacagaccaagctctcccacaatcctaaatgacattgcaaactacgattaactcactctaacctcctgtctcaacatgcccttcgcgggctagcgagggcgaggatcactcgtgctcttgccataagaagaaagatgcatggagtcgtcacaacgttgatttgcgaaaacgtcggcaaaccgactgaactggtcaaatgaaattctagctcggagttgtttacgctgaga

SEQ ID NO: 157457 - DNA, 257 bp, Glycine max
ctgagagtttgcagggcttctggcacttccatttaaaccgtagcagccattgatgacgacttctcttgcacttacaaaggtttccggcttgtcctacagctgctagcctcttcgttgacaactctgcaatgggtatcatctggatatagacccattagcacttagtgagaaataaacactatcattatcatcatcagggaaatagaatctatcacacatacccttcgagcttcatctaaaaatggagctgactccct

SEQ ID NO: 157458 - DNA, 191 bp, Glycine max
tccaagtataatttggtattcattttcaacattagcacatattttaacaaaatgaaaagagtaagagtgtgtgacactacatgttcggagcaaaaacaataagtgtcggaaacaagaaatgaagagcgagtgggtttcaattaccgatgcttgtaaatgaataagaagactcgggttcgaggatgcctacc

SEQ ID NO: 157459 - DNA, 517 bp, Glycine max
  unsure (1)..(517): unsure at all n locations
gagagttgttcatgagtcgtctagacccgagatcctctgagtcacgctgacgcatgcatgcttgagtcgagatcggcaactcacaaacgatggttatggctcttgcatttggatgatatttaccggaccgacatatgactcaagtatccctgccatgaatttgagaatcaatctgctgttggtgagaggggcatcaacatcggcgagttgatcacgccacaactttgtgtgaatacaatagctatcaatagacgaaaaatttcgcaagtttctcttcaagatgagtagcccaaaaagccttgatgtcctgaaacatagattcgagaccagcccactccccttgagccgtgtcgtctatgagcaacatagcatgaacgagatcggtggatatagtcccgtatatccattcgagcaccgcggcatcgagacgctccatagagcatggtctgagactntggatgcngcatacgtggctaccttctgtgccttcgtacgcctgtgctacgtangagagatg

SEQ ID NO: 157460 - DNA, 523 bp, Glycine max
  unsure (1)..(523): unsure at all n locations
ctgctgtgacccatgcattacggaccttagatactcagctagaatatacataacactntttgcccatccatgaagtccttcttaattatcatgctatcatggaacttcttggtcttttctttgtagaacttgccattctcgtaggcttctatgcggatctcatctaactcactcagttgcaactttctttcctcaccagcttgatccatagagaagttgcaggtcttcattgcccagtatgctatgtgctcaatcttcactggaagatgacatgccttttcaaagacaacccaataaggagacattcctatgggtgctttgtaggcagtcctatgtgcccaaagagcatcatctagcctggtactccaatctttcctgcttggcttgacaatcttctctgaaattctcttgatcgtcctgttagaaacttctgcctcgacatttggttcgatggtggtatggtgtggataccctgtggacaccccatacttntaancaaggcatcatttgatttgtgcaaaat

SEQ ID NO: 157461 - DNA, 442 bp, Glycine max
  unsure (1)..(442): unsure at all n locations
ttaatctgcagttgtaatactntctgagtcttcaagctaagcgccagtccgctgcgcttaacgcctgagtaaaatttcacaacgcgtgctaagctcagcctgctgcgctaagcgcccaatcaaattttcaattttatatttatgattttggagaaaataacctgtgctaatctcttgtggtttgtcttatattctgcaaatggcatctaagaaaaggaaggctccttctacacctacccaggccagatatgacagatccaggttcatatctcaagaagcttgggagagatatacagatattgtggtgcctaagaaactactatcggagaggaatgtagtagtttacttcactgagttngacgagttcaaggaggaactcgagagaagacactacgatgagaagntaactgattntgtacacaaaaatatagacatttgtatn

SEQ ID NO: 157462 - DNA, 460 bp, Glycine max
  unsure (1)..(460): unsure at all n locations
ttaaaacggaagaaataacaccgtattgaacgatatgtatacgaaagctaagaaacacgaaaggaattaaaagtctcggattcgaaaacttacctgttgaagaacgaagaacgaacgaagaacgaatgaagaacgacgaacaaccttcacggattcgctcacagaaacatctcggaaacgttacggaagcacctcggcttggattttcttcacggaaacaattcttttcacccaaaatagctgatatgcatagctaggcggatctgggatccttaccctttcgcctatttataggataaaggtggaggaggttgtcgtccagctcgcccatgcgagctgcattgnttctctataccaaccctgctccaaatactctaaaggccaagtcagatttgaaattttattgcttcccatttgtaagtcaccactctttcgaataacgaaagacggagctttcgag

SEQ ID NO: 157463 - DNA, 369 bp, Glycine max
  unsure (1)..(369): unsure at all n locations
cgccgatagaacaatgtgagtcaacttttatctttgatcaaattnnaaatgtctgaatcgtttctaaacttatcataacctcaaatatgataaaataaaaacaaattcctatctctgaaaaaaaaagtcaattctactttaacctatcgaataaaataatttcaatacaaaattaattttttcactactgctaattcaaacacacacttaccataaacacgcgcgttgcactcgaaaatcaatttctcccgctccagcaaaatcaaattagttaagcgattgccacataaattcatagtaacaaaaaacaatcctcaatgcctcaaagctaaaccccaaaccatctttttcaccttttctctctgcaca

SEQ ID NO: 157464 - DNA, 190 bp, Glycine max
cggaccactcgaaaacgaaacagagcatcaaaggctactgaaagtctggaagcgtatgacgggacactgcaagatgatcatcctccacaaaatgaacggcgcgagcacggggaaacgctgcagaataaggtccttcccctggctgtcgctgcagctatctcttattaaatgcataaagcataacgccccc

SEQ ID NO: 157465 - DNA, 355 bp, Glycine max
  unsure (1)..(355): unsure at all n locations
tctcttctgggncattattaggtggcattttcattttctctactntgtcttcctgcttttgctctacttttccttcccgcttttgctctactttttcttcccgcttttgctcttcctttgcagatcagtcaacttcggatgacctttgtgcctcctctaaaaacactctgagctccttgcgcaaaggtgttcttggtcttggcccacgcaaataaagagcaggtttactgtctctctcttcatacgtggcatcatctattcttgacctcttccttccttgctcccattcaggtctaatctgtctctctatgtcatctccttgcttggatttcttgcgaagatctttctctgcccc

SEQ ID NO: 157466 - DNA, 339 bp, Glycine max
agcttgttgtacacatgttttttaggcccatagatatccgagaaccaaaacgacttttgtgtggttctgtcaacaccaggcattgcgaattgcacaaggtaacaaaaggacttcggtccggtcatgctaacaagcgaattttagttcataagttgcaaaagatttggaagaagtcgtattgaggccatctacgtgatatttaccggaaaacctagaaggatattgccccaagcaacgttgatgtgacagctcatgtatgacacgccaagaaactgggaaggactcataaggtcattcaagtctcgccttggcttgtgagggactggttcaggtacccat

SEQ ID NO: 157467 - DNA, 366 bp, Glycine max
agcttttcgttttctacatccttcatggaaaccatcttctcatggtcaataattttattttgaagacccttaatgatctcaatctttctaatcataaatgagtttttctcattgagggctttgaccaatttcctcttatcctccaaactagccatgaactttgtttccatgtcaacatatttgttcctccaatgatagatggcaacaacagatctgtaaagaaagacttatatagaatccaagttgttgtcggctccaatgaagtccatcatctcagagtcaatctttgtaagtagtctatcagtgatgatgaactcagatcccttgatgttgacatcccataacgaaggaagatcatgagttaca

SEQ ID NO: 157468 - DNA, 378 bp, Glycine max
tataagatcttcagatacgaccatgttgttacacacatctaatatttaaacctttaaaacaaacaacaaatatctgtccacagttcactcatggcattatcagtagattgaaccttgttgaagataatcctttaacttctcctgtctggtaataccgaaaaaagtgttgattatgaagaccatcatggctatttactttgtttacatgtaaagtcatacaaaatcccatgagctgatgttcccacttaattctaattacgaaaacaacaaagcaaaacaactgcttaattcataccattgcatctactcacagctatcaaattaaaataaaaacacaaatctcagagcttattttttctaaggttcaatcttatgata

SEQ ID NO: 157469 - DNA, 362 bp, Glycine max
agctttagggttagggatttttaaaaaattatttttagaatttgtgggactgggttagggattagggttagggattgggtcaccgtaaaatttttttaccattaagggttaaaaatcgcaaactgtttcacgtgcctatcaaacgttgacacgtgacagtcaacgtcattgcttaatggtcaacatccaattgaggcgttcgggaccaacattgcaagattttacaaaacagggagactcaatttgtgaattaaattactgggagaccaaatgcgaaattggagctaaagtgagggactaaaagtgcaattagccattctgaaaatcaagatcctaactctactacttggatatctgattct

SEQ ID NO: 157470 - DNA, 378 bp, Glycine max
tgagagcctaatctagagtgacatttcctgggacttcgaggataatacatgccctgcttggattcgctgtccacgtagaggttccactagtctggggaagtttggtcatttctagaaaattctgtcagaaagtctaccatgaattttatcttcatggggcaacgaggttcgtattggagatcgaactctgacaattctactaaccatgctaccatcctttaggcttttgcaacacatgtttgatggggtagttcatcttaactaccacttcgtgactctgaaagtatggcctgagacgtcagttcgaggtgatgagtgctagtgccaccttctctatcatttggtagcacttctcagtgtcatggagtatgcgactag

SEQ ID NO: 157471 - DNA, 371 bp, Glycine max
agcttatcttcaaatctttgtacatcttagtcattcctagatggaaactaagacgacttttatgtgcttcttccaagatcttaactttcaaatcatccaaagatggtacacatatcctccccttgaatctaattaacccggttgtgtccttcttaaactccatatccttatctcccatcgcatctaacattttgccttgcagaaacgggtcatcctcttgagcctcatgtatgtgatctacgaattcattggtgatttgcaacgctcccacaaataagctcttgggtcgcatctcgattgctagattcagatctcggaattcctctatcaatctatgctccaaactcatcatagtcgcaacatgtaaaaac

SEQ ID NO: 157472 - DNA, 372 bp, Glycine max
ttggagtttccaagtgccaatttgtcttcttctttaatccagccttcttctggcttcaattctttagagggctctccttctgtgtccagcatcttgggatgttcccagcctttgatgacagctttccaggttctgctatccagtgattatgaggaaggccaccattcttgctttccaatattcatagttgcttccatcgagaattggtggtctgttcactggtccgccttctttctccatgttcatcagaatttatctccctagatctcactctgtgatttcgagtgttggctctgataccaattgaaattctgataccaggggacagatgtcgtacaggatgtcacgacatcacgctttagaacatgcaga

SEQ ID NO: 157473 - DNA, 368 bp, Glycine max
agcttaataaatctatatttgatttaaatcaagtctcccatcaggggtaccttaagtttcatgggctaaattcctcatttggttttgatgaaaaccccatggatcaatgcatataccacaaggtaagtgggagtaaaatatattttcttattttatatgtagatgatattttacttacagccaatgatcaagttttgctacataaggtgaaacaatttctctccaaaaattttgacgtgaaggatatgggtgatgcatcttatgttatcggcattaagattcatagaaattgtagaagcaagcttcatgatgatgaatcaagtagttttgatgatgacaaaacagccaaaagaatgatgtcaagattg

SEQ ID NO: 157474 - DNA, 378 bp, Glycine max
tataagaacaaaattgcctaaatcattttcaaatatgcatgtgaattaggaagcatcaacaagaatcaagccaaggctattgtgcaagcaatcaatggggcaaaacacaccaaaagattatgatgatggatggctcaaattctcacaaaggtaaacttatcactttcaaattgagctttcaaaactatcatgacatgtagaggaaaaacaaggatttcaaatcacaaaatgtcaagagacttttattttcagaacaattacccatttcttgaacatatcctataattcaaataaaaatatgcaaagttgtacatgcaaacagaattgacctaaaatattaaactagaaacccaacaaaactaacaatattaacaaaac

SEQ ID NO: 157475 - DNA, 362 bp, Glycine max
agcttgacactaaattttttaaatgaagcaataaacatgtaatctaaatttagtgctttatatagaactaaaagcagaataaaagagaataatgaaagcttttcatatgcatcacaattgagcagagggctgtgtcatctttgccggatatggaaaattaagtgactcattccactcttcttggtttttgccttcaatttaccacaaaacaatcagacaaatgacaaatgaaataacctaataggatcaagcaagtaaaccaaaaaggaaaaaaaaaaatcaaaatagcctagatctatttgacttaaattggtctttcagctttgcatttgatacaaacacaaccacattctaagtgagat

SEQ ID NO: 157476 - DNA, 369 bp, Glycine max
ctttacgatagcaaggttatcaatggcttatagcggaacatggcagaaggccgaaattccaccatataaacataccattgcaccttatgtcaccaccatggcagacctcccttcacaaatagtctatggcagttgggaaaaaatccgccatgccattccaccatgccagtcacatggcctctatttaatagcactgtagggtagtctaacaacattttccaagtttaatgacattctagcttaagaagcatagaagattgaaaaacttgcctttttgttaaactaacaaaaactagtcatgtgagacacattcaaagcctgttaaacgccccagcaaattatattgagcaaaaccattatattgcatgg

SEQ ID NO: 157477 - DNA, 356 bp, Glycine max
agcttgaaagccctgtcttccatcgccttagctggccgagattcctccaattctagcaatcttgccatgatcctcttcacttcagctttattattcttactatgtgctatttccaattcagtccttaacctatccttctcagctgcaatatttagtggtcttgttttggcagattttttctcttgtaacatttgcttcacagtagctgctgagtaaacaaacaagttggtcttttgtatagcttcttttttttctgccacttcttgcttcgttggcatccggccacctcttcgctctacatccttaacccactggatgaactcttcctcctctggaggagagtcgctaaccatagc

SEQ ID NO: 157478 - DNA, 387 bp, Glycine max
aactatgaatctctagctcaacagtataagccgcgactgaccttacattttggagccaaggtttcagaacatgctacccaagtaccgcggctacagcatcggagtaaagaaatcttattgcagtgtttgaggattgcgccactaagacccatgttgtttccataaccaagccatgcattgaatgaaaaaggaggctgagtactgcgaaggaaaataaaggctttttgaaccaggagctggagtactcagtcctttaataagtgctttgtttctcctcacacaacatgccaatgaccaaatatcaccatacattctataaacaaatcacagaaatcttcttgaattctttgccttttaagctctatctactggattatttccgagttc

SEQ ID NO: 157479 - DNA, 361 bp, Glycine max
agcttggtggtactcttattgtttgccgctaccttaaaattcctactagtgaaggaatttttcttggcttcatattgaacactagaggttatgctgatcttctattcataggtgcagcagcaaagcaagtaactgtgagtatatttcttgacttggttgaattacacagtatttggataaacttctctccataggtacttatagaagaagaaaataagaaagtaaattgaattaagtttatagcattagctaaaatcaacttacgcacttaacttctgtaggagctatgtttgattaacttgcccaacagttaaggtgcataagttgatattagcttatggagaagcttaattcattttac

SEQ ID NO: 157480 - DNA, 375 bp, Glycine max
  unsure (1)..(375): unsure at all n locations
tctntaatttcctaactatttctcttttataggagcccttctatccaatctttttttctttctctcgttggatatgtcattcgtatacatctttttatttcttgaatatataacgtcaaatcttcgtcaattgcatcatacatgactaattaaatcgcaaaaaaaattggatgagtatcctcgtcctggacttacgcttatcctctttctgcatgtgttcaacctctgcttcaataaatttaccacatataattttctgctatgtttattcgagcacgacactgttctatctcatctccaccatcctttccagcttgcacgtgccaattgaaaaaggtctccttcttgaccatgctcacagtcacttctgttctc

SEQ ID NO: 157481 - DNA, 345 bp, Glycine max
agcttgttctttgatatggtttgatacaacgaaagaagacatttatgtagtttaaacttgttccaaactttggcgctaatggtgcaatatattttattttggttatcagatgagcacctactcctcaatggatggtgtcctctattgcaagccacactttgaacaacttttcaaggaatctggcaatttcagcatgaactttcaaacaggtaagatgtaaccatcttttgttcagcactttgtttactatttttattcaaccacaatctcattaggtacaaattattatgcacctgtcactttctattgacttggctaacatgttatgttgtttttcatgaacaa

SEQ ID NO: 157482 - DNA, 298 bp, Glycine max
  unsure (1)..(298): unsure at all n locations
acagcatactttactcaagctcgagagatacgaggcagttttttttaaatttancggtgagttaagatacgctggcgcaatttaacctgaggcattttgtatatccagtatgtggacgccgaacaccaacatatgtatttgatgatgagatggatgacattctcacattgggtgggctcatgactatccaattcagcgttgtcacctatcttgaaatgccaaggacccatgaggatctcaaatatggcgtgtattcagatgtttttgtccagacacaatatacccatttaatagaact

SEQ ID NO: 157483 - DNA, 338 bp, Glycine max
agcttattttgtatcaggtttgtgtgttactcttgaactctctttcaagttgcaagcctttaaagttattaaaactaagtttaatttcgatgcgggataaagattgtgtttatacggttaactaactagaaattagttatatataagttttaaaacaattgttacaatagtaagtactttcaaaataatcattacaataatcaattttaacatgcatggaactttaatttataatttgataatactttaaatgaaagtttatactattaacacatcctaattaaagtttacactgcttcggggaaactctagttaatagttcaaggctttgaggtttt

SEQ ID NO: 157484 - DNA, 328 bp, Glycine max
aacgatctctacacaagttttggacagatctcacgtagcgccaaaataattctattgaaagagaaaaaatgtcatttaagacacaaaacttatgtaacgaatgtttgaccggaacagaaaagaggaataaagatagaccaagagtgctaacgaaatgtctaaaatattgaaatctttaagtctcgctacttaaataaacaaatctcaacacctttaactgcttcaaccaccaaatttaagaattattcttgcagccctacaatagaatcgaaatttaacagacaaatttttgctcgaaaattataaataagaattgatttggcgtatg

SEQ ID NO: 157485 - DNA, 371 bp, Glycine max
agcttgtgattgtgatttatttcagcctgtgtgaagagataagtgcagaccttgcgctaagtgtcatctcttcatgcgctaagctgagcttactcacgctaagcgcaaagacccctgattgattggctgaatggttcagctaagagcacatcgctgcactaagcccaacatcttcactgtaagttgcaccttaagcaatgggcttagcgtggatgaggcgctaagcgccacttcctctttgtgaaaatttattatagctgcgctaagcgtgccatcctgcgctaagccacagattcattctgtaagttgagctttgaagctaggcttagtgggaaaggacacgctaagcgccaacatcattttgttttgaa

SEQ ID NO: 157486 - DNA, 372 bp, Glycine max
tcattaaatttagatatttctttaatccttaaaccaccttcctccttaggtaaacatatagtttcccattttacccaggggattttcttgtaatccttgtctcccccccacagaaaatttctttgcagtgttaccaatctatgagctaccttttgagggatcttgaaaaaggaaagcaaatatattggtaaagcattgagcaccgaattgattaaagtcaccttccctgccatggaaatatttttctgtgcccacttagataacttggattcatatttactaatcaaagtctcccacaccatgttgcttgaaggtttagccccaatcggaattcccaaataacagaaaagggtttgcagctacctacatttc

SEQ ID NO: 157487 - DNA, 370 bp, Glycine max
agcttgcttgtggggcttctattgaggctgaatctttgagcttcaatgaggtcctttaatggtgattttccaccatggagatgccccagaagacaaaggagaagaggtgagaggaggcgccatccactaaggaataagccatggaagaaggagcttcaccaccaagatgagccttagataaaaagcttggagaggatgcttcaatagaggaaaagaaagagggagagaaagagagaggggggagcacgaaattgaaagaagaaaaagggagagaagttgaactttgagttgtgtctcacaagactctcattcatcaaagttacaacaagtgttacacatgtttctatttatagactaggtagcttccttg

SEQ ID NO: 157488 - DNA, 381 bp, Glycine max
tccctttctttggccaatgctggacttgtttggtagtgatttccttggcaatttgatgctcagaaacagcaatatccaccactccttcagttggtctgcccaggtatttgttgattacaacaggggagaatctaatacattttcctctgacaaacactttctgatactcatcactctttctgtttgttatgtcagagggaatgttgacaatgaattccctgactaggctttcataacaatctcccaacttggtgactgttttcagcagtccagcagccttgatgagatccatgatctccttgcaatccaaggcatctcttcccagttctctttctacagcagcgttgatatacaaatttccacctttcaacattgccaatg

SEQ ID NO: 157489 - DNA, 364 bp, Glycine max
agcttccctttctttggccaatgctggacttgtttggcagtgatttccttggcaatttgatgctcagaaacagcaatatccaccactccttcagttggtctgcccaggtatttgttgattacagcaggggagaatctaacacattttcctctgacaaacactttctgatactcatcactctttctgtttgttatgtcagagggaatgttgacaatgaattccctgactaggctttcataacaatctcccaacttggtgactattttcagcagtccagcagccttgatgaggtccatgatctccttgcaatccaaggcatcttttcccaattctttttctacagcaagtctgcgttgatatacaa

SEQ ID NO: 157490 - DNA, 377 bp, Glycine max
tgaaatgaggaagtgtagaagggtgaaacttcctgcttttattcgttgaccacagagtggtacctggagatatgtcgcgggggtcaggagaccttggggacgtcaggtggggtgctattgcccaaaaccaagcttgaccaatcccaacccaacccgggcatagtcagtcagtgagaacttgtgatgtacctaagcaggcgagctcctggcagtcaacagataaaaggaacaaagaccacaaagcaaggaggcttgtgtggtggctggccaggtgtgaatattgtgtgacatatgggttatggcctctggtaatcgattaccaagggtgggtaatcgattacaaggcttaaaaatgaagacatgagactaagatggtc

SEQ ID NO: 157491 - DNA, 362 bp, Glycine max
agcttcaagttgcttggattttaacttgttttgggccaacaaagcgtcctgtgatgaaagctccagcaggcttcttttggttaggatgtgtgctctatcacgcaagattgcatggtcactagcagccatattctcaatcaattccatggcttcttcaggggtcttcaattttatttttccccctacagaagcatctaaaagctgcttggattatggccttaacccgtcaatgaaaatagctggattggttctgaaaatccatgagtaggcgtctttcttagtaacccacgaaagctttccaaagcctcactcaaggactcgtctggaaattgatgaaaggatgaaatggcagcttttccttc

SEQ ID NO: 157492 - DNA, 378 bp, Glycine max
tctatataaggggaaccattttatcaattaacacaagttgacttttattcagaaaattagagtttatctcttttatcttagtgagagtgattctcctaaattcttgagtgattcaagaacaccctggctgtaccaaaggactttcacaacctttgtgtgttgccctcactagaaagagtgattctttccttcctttcatcttcacccttgttctttcaaatcacaattccagaaaatccacctctgcccagaattatctcgtggccataactcccattttacgcactcaaattaagtgattcttgagcctaaattgactttcaaaacgagacctttcacctcgttttggaatcacctcatttggagccctgtagcttc

SEQ ID NO: 157493 - DNA, 365 bp, Glycine max
agcttcacatgtctaattgtactcgtccagtgaaatatctacttgatcttgaaggattttctcaagttttaaatgatctttggataaattttaaaaatgtttttgcaagtttttgtaagcttttgaaagaatagatgagttatacaaaaattcatgataagcttttctaaaagactcaaggtcatcgaagtttacctcatcttcttaatttgattcaaattccttacaagttatatttgtcatcaagcatatattggcttcttcatcctgttcattagatgaagtttcatccagatattccaagatacttataagacccttcttttctttggtcttgtagggtttcttcttgtcttggcccttct

SEQ ID NO: 157494 - DNA, 379 bp, Glycine max
cgtttgttgttttgttctgtttgtgtttgtgactgatgtcatcaaattggtaactcgtattgtttttctaaccaatgttattgcaattggcttcatttatttatttttattgtctatacctattcggtaacagggattctcgcacggcagcaagaagataaggtgaaattatgtactaatgttgtgtttaaggtcaaatggagaactgaaaatatggagctttgctgggacagaaaatagggagctctatgaatgctcaagggacaaagacaatctaaagtaaaattggaaaatgaaagagactatgtaacttttttgtttgagtaaattatatggttgtttgagattggacataatttttcagtaatcttttttataa

SEQ ID NO: 157495 - DNA, 371 bp, Glycine max
agcttgcatcactccgtgttaaaattaaaccctccaacatccctaaatcatcttaaacatagccagacctgcatgaaaaatcccgaaattgagactcaaagaagaagcttgatgaacttgattttcaaagaggaagagcattatcaatgagacttagcgtaggtgtcatcattgttgtgatcatgaaggtgtcacgtgtagaagcatatgtaatatgaagttttgatgatgccaaagatgaaagctattcaagtttgatccaagtcaagaatcaagaaattcaagaggaacgatgaaattagtccataggatgttaaaagaattccttaaatgaggttgcacaggtttggccttaggttaactcctcaaaa

SEQ ID NO: 157496 - DNA, 368 bp, Glycine max
  unsure (1)..(368): unsure at all n locations
agcttcttcaagtaggttttccttaaacctccattaattttcagctttaccttctcctccattgttgattcttcatttttcttcatgtatctcctcacatgtattattctaaatgttgttaacatgattttttaagaatttccaccgattaaacttgctataaaagctagatttgatttcctatggttcaaatttcttgttcttgttcttgaacaatgaattgtgttgagtttaggttcctttgacttttgttttgctatattttgnggctgaaaatataaacaacaaaattcttacaaaaacattaaagtagaagaaaacctcaaaaatctatagtgacttgttcacctattgtagttttttcatag

SEQ ID NO: 157497 - DNA, 377 bp, Glycine max
  unsure (1)..(377): unsure at all n locations
tgggctcatgagtggtaagttgaggtctaagtggattggnccttttgttgttactaatgtttttccttatggtacagttgagatcaaaagcgattccacaaacaagagcttcaaggtcaatggacaccgacttaagccattcctcacaaacccttctttagtggacgtagtggtggaagagacttccttactccaccctactcttcctctacaatgacttagggagtttttctttcttatctccttctctacttttattacatttgtccgattctatttgatggtttaattgcttttaatcttttaattgtgccacatttaggacaatgtgttgtttaagtatggggggagtgtgttctttggttttggttttgtta

SEQ ID NO: 157498 - DNA, 363 bp, Glycine max
agcttgtactatgatttattaccaaccgaaaaattaacagtgtggaaaaattaagtagcaaatgaaatcaaagggggaaaataacatggagagaccatatttaattaagcttgtactaccaaccgaaatattaacagtgtgcaaaaataaatttaaaaataagatcccattataaaattattaggtgatctttcatcattatgtagtctataactttaactattctttatatgatacgaaattaagtattattaatattttttaaataaaaaacttaaatatatatcatataaaaattatattagatgggatcataaaaattatcatatttatttatatggccaaagagtacttaataatttt

SEQ ID NO: 157499 - DNA, 373 bp, Glycine max
tggaaggatgcttcaatggaggaaaatatagagggagagaaagagagaggggggagcacgaaattgaaggaataaaagagggagagaagtggaactttgaattatgtctcacaagactctcattcatcaaagttacaacaagtgttacacatgcttctatttatagactaggtagcttccttgagaagctttcttgagaaaacttccttgagaagcttctttgagaaaacttccttgagaagctagagcttagctacacacacccctctaataactaagctcacctccttgagaagtttccttgagaagattcctaaagaagttagagcttagctacacacaccccctataatagctaagctcacccccatgc

SEQ ID NO: 157500 - DNA, 359 bp, Glycine max
agcttacatcaccgtttattgcttaaatctctgcacaaacgtgggttgttttccgcacagctttgataaggttggttcgacataaatacttatttctctctattttatttttatttctttccttgctgagcattgggtgcctaaaatcattactttcacttcatttaatttcatttaatttggatcatgttaccatttgatttatttactgattgggccaattacaattgttccctttatattcaatttaaattagattttgacccgtgcttttcacaagattaacagtcctaaattttataattaaatttggattgcaaataatacaacggggtatattttaatccttatattctcat

SEQ ID NO: 157501 - DNA, 372 bp, Glycine max
tcaggctgatcaatagatccagattgctttatggaatggcaaaggtctgtatggtggacatcataggagcacaaactagaaacccttgccacaggttaagatttctgattcaaggccgaatgggttaccaagctaaccaatgcatccattttgccttcaagcttcttaatctcagatgatgcagctgagtttgtagctacctcatgcactcctctaatgactatggccttatttatggcgctaaactgctgagaatcggaagccatcttctcaattaaatatctggcttcagcaagagtgatgtcttctagggctccaccactggcagcatctatcatacttctatccatattattgagtccttcataaaaa

SEQ ID NO: 157502 - DNA, 337 bp, Glycine max
agctttttctcttcattaatggctgcattttttattttggtatggtgtgttcgtacggatcaacatgatccgtatttgttatatgatccacatgactcatatggatcatgttgatccgtatgactcatatagatcaacatgatccgtattgatacaatcctatcctccaagagcattggatagaagactccaagaagattgagccagagatgcaagagaaggccctaggattctcatgagccttagggtagattttgggcccatgggctaagtatgagcccacttatatttgtacatattagattaggattttattatttttgggccttttatttag

SEQ ID NO: 157503 - DNA, 374 bp, Glycine max
tatctgtgcctcttgtttctcttctcctttctcattacctcctattctgttgagtagtagttgacactaatatataatatctcaacactataattaatcttatttattccagtgaataggcataattgtaaaaattaacagtttcttctttgtttgcttattggtttctgaaactacaacacttactgagcttggcagtgattgaattcattcaattatgttgatttttaagtctttcaatttttggactaccctactttgttcttgtagaaaaatcaatggatggcagcacaaaaattgaagtgaaaaacaaattttggacttgctcataatattgtgcttctcttgtttcactctttgtaggatctctagtg

SEQ ID NO: 157504 - DNA, 362 bp, Glycine max
agcttagctactcatacctttctaatagctaagctcacctccttgagatgagaagctagagcttatctacacaccccctataatagctaagctcacccccatgaggaaaaacatgaaaataacaaaaaaagtccttattacaaagacaactcaaaatgccccaaaatacaaggctaaaaccctatactactataatggccaaaatacaaggcctagacgaaggaaaaacctattctaatatttacaaagataagcgggctcatacttagcccatgggctcgaaatctaccctaaggctcatgagaaccctagggcctttccttggatctctagcccaatctacttggagtcttttagccaat

SEQ ID NO: 157505 - DNA, 370 bp, Glycine max
tggatagaccctatgctttaagctaattatggaagctaaacccttgctgggagaaccactccaagtccaaatacttgggtattctcaaattcttcacactgtatatcatcttgaagttgttcttcttactctcatctataaaccatgtatcaagcctattgagagtggatcgagagcactctccttgtttcctcttggaggacttggctttcttctgagctctggaagggttgctagccattttttagaagagaaatagagtttgggcgtagaagaaatgttgggttcaaaaatggctaattagaggaagtgttggtgtaacttgtgaaaggggttagggttgtcttttatagagaggtagtgatgttct

SEQ ID NO: 157506 - DNA, 347 bp, Glycine max
agcttcttattaaagtgatgaggtacaagccctaaaggcaaagcttgaaagagcccgggtagtcaaagagaagttcaagtccatagccatcaaagtctgaagagagtatgatgaactaagggacgtcaatatggccaccgatgaagccttggaatgagaaaccaagaaggcccgaaaggaagaacacgaccaaaacaagttttgaggggctttatagggcagcaatagtgagctcaagctccaaagaggtgaaaggaatcatcacgggtcaaaggcatgatcttgaaggacgagctagaggtttgccttaggtcgaaaagaaatttgtcccaacatttaagcgagac

SEQ ID NO: 157507 - DNA, 367 bp, Glycine max
  unsure (1)..(367): unsure at all n locations
tgaaggtaggagaagatgagtgaatggagagggacaaaaggagcacgaaattttgtgcctcanatgaggtatgaactttgaagcataattctcaaatgatcaaagttgaaaaaaatgcacacacatggcctctatttatagcctaagtgtcacacaaaattggagggaaatttgaatttctattcaaatttcacttgaatttgaaattgaatttgtggaaccaaattttggagccaaaatttcactaattatgattagcgaattttagctatggttcaatccactaatccaagatcaagtccaagattctccactacgtgtgcttaggtgtcatgagccatgtaaagcatgaaggacatgcacaaag

SEQ ID NO: 157508 - DNA, 367 bp, Glycine max
agctttagagcaattcaaatgctcataacttttcactcggaggtccgattaagtcgcataatatatcaagacgctcgaaatcgaacaatggaagctctttagcaattcaaatggtcataactaatcactcggaggtccgattcaggtgcataatatatcgagacgctcgaaattgaacaatggaagctcttgagcaattctaatggtcataacttttaattcggaggtccgattcaggcgataatatatcgagatgctcgaaattgaacaatggaagctcttgagcaattcaagtgggcataacttttcactcggaggttcgactcaggggcataatatattcagacgctcgaaattgaacaaccga

SEQ ID NO: 157509 - DNA, 378 bp, Glycine max
tttgttctgaatttcgagcgtctcgatatattatgggattcattcagacatccgagtaaaaagttatcattgtttgaatttgtttagagcctccgttttcaaatactagcatctcaatatattacgggattcattcagaaatccgagtaaaaagttattgtcgttagaattttctcagagcttctgttttcaattacgagtgtctcgatatattacgggactcaatctgacatccgagtaaaaagttattgtcattagaatatgctcagagcttctgttttcaattacgagcgtctcgatatattatgggattcattcggacatccgagtaaaaagttattgtcgtttgaatttgctacgagcatccggtttcaatta

SEQ ID NO: 157510 - DNA, 362 bp, Glycine max
agcttgtcgactgtatatttttttgaggcactagtacgtaaagcggcgcccagtacaaacaaaaaaatctcaattgaacaataaaattgaatcacaagaagttgtcatttgaatttgagaatgattatctcagagattataactctaagacattagtaccaaattttattgaaagaacaaagactataaacatactttatatccatataaatctatacatagtttgacagctcgaatccaactttcattttcccattaaatccatctacactgtaagtaatagtgccacacacacattttcttttacatagattatatatgtagaattttatattattttaaaatcatttattatctcgtgg

SEQ ID NO: 157511 - DNA, 364 bp, Glycine max
agctttcttggcctcgccttttcatgactcttgacccatctgacattgtttggtaccaagcagctagtgatgttggagagattattgtgagttgtggtgaatatcccaacgtacctcttttgggtatgcgtggcggaattagctacaacccgcttctcgctcgacgacaatttgggtacccgataaagacaaaaccaaacaaccttgccttgactaatgaattctatcttaaccatggagatcactggaacaaaagggaaagattcgcacaagcttggagcgctatccgcagactcaacagaagtcagttgggaaagaaatcagactatgtgcacgaatcttatacccagtgggttattgatag

SEQ ID NO: 157512 - DNA, 361 bp, Glycine max
  unsure (1)..(361): unsure at all n locations
ttgcggatgnggccttcgctggcgaaatgatctatgtgggtctaaaaagatgccaatctgatcatcatgctttgatacatgcgaaaaaactggggcgaatgaatagggtgagaatgagggagcaaacccatgctgtgactgccattcctatatggccaagtttcccaccatcccaacactgttattactcacccaataataacccatctccttacgcaccacccagatgtccacaaaggcctaccttaattgaaatcagaaaatccacctaccacacatccaatgctgaacaccagtttttgcacgaaccatatcaccaaccactagggaattttgcaccacaatgcctgcatggatatac

SEQ ID NO: 157513 - DNA, 363 bp, Glycine max
agcttgttaaagccccttttttgcatctggtcgtgtatttttggaggtattccccacatttgttgctcagtggtttacgattccgtgcacgtctgtcaaaacttgttttgtagcactttcatgataaatattgaagagtaatattatgtctttttactattcctcttaatattttatgaaaaggatgttaaatgacatagtaaattaataatgtaatattttgacatctttaaaagctttcaatattttggttgtcgcctaataagtaagaaagatttagaattgtttaagaaaactctatccaattattaagagataaaatagaagtgaaagtataaaataagtatataattgctaataaaa

SEQ ID NO: 157514 - DNA, 369 bp, Glycine max
ttttctaaaattcttcattggtaatcgattatatgtttctagtaatcaattccatagttatattttgaaggatcatgacttttcaaattgaattttaggagttccgttactggtaatcaattacacaccaatggtaatcgattacagctttcaaatttcaaatttcaaaacccttttgaaaagttgatttgcaaacttgtcttctggtaatcgattacactgcctagtaatcgattaccaatgccttgatttgttggaaacaatgtgttataggtaaaagttgatcaactaatgaaaatcttttaatcttggatgcttgaccttgaattaatcttgaagcaaattctgtattcttaaccttgaatgttt

SEQ ID NO: 157515 - DNA, 363 bp, Glycine max
agtttgtagaacggctgtttatgatatatgtcagggtgttggtgtacccagcggttcagggataaaggaatatcccacattatttccatgacacgcgtgcaacaatgatgattcaaaaattttatgcaaaacttgtcatgcatgcacctatgtggacactcaagcatcaagttttgtggtcatgtgacactagggctcaagattcatttttcctatttaagtcaatccagtgtttccaaaacatgctcttttatcaattcatgcattcatccgagtccattttgggtgttcgggaaaattttcacagcattcacccttcaggtgtatacatatttcttcaacaaaacacttttgggttttgat

SEQ ID NO: 157516 - DNA, 377 bp, Glycine max
tgcttgaggggcttctatggatgttggttctttgagtttcaatgaagtcctttaatggtgattttccaccatggagatgcagcggaagacaaaggaaacgaggtgagaggaggcgccatccactagggaataagccatggaagaaggagcttcaccaccaagatgagccttggataagaagcttggaaggatgcttcaatggaggaaaagaaagagggagagaaagagagaggggggagcacgaaattgaaggaataaaagagggagaaaagtggaactttgaagtatgtctcacaagactctcactcatcaaagttacaacaagtgttacacatgcttttatttatagactaggtagcttccttgagaagctttct

SEQ ID NO: 157517 - DNA, 371 bp, Glycine max
agcttgtgtaagatttgtttctcaaggatttataatagtgggcggaaaaattggggtattttctttcatcgctcaagagccggctaaaaggagtagcgttaatagagttgcagacacacttgagaccaaaccaatacaatcagttaaaaaaagaaatcataggaagatttttttattgagaaatcctacctgccatcaagaaaaaatggccaagagaagaaattggttgcccaatatttattcaacaagataatgcaaaaacacacattgattttgaagatgaagaattttgtcgagtagcattccaagatggatttgatattcgtttgatgcaccaaccaacaaactgtccaaatttaaatgttgtagat

SEQ ID NO: 157518 - DNA, 371 bp, Glycine max
tttcttttcctttacaaaaaatgtaagattaaaaatcatacaagaattaagtctatccatgtaatcgacatccaaaccagaatttatcccggttaccatcaatattcactattttccgggggtttttttaacaagaaaatatactagagcatatacctgtaaggttcaaagatgtaaaaaatcattatcagatatctcagttcttggaaaatcttcaaccacgtcatgatctaagctccaaactggtaacatctcacttgctcggcctgttctactaatgcagaaagtctcttctggaatctttgcagctacactaggctgtacaagataacataataaatatatcattgcaatcaagaattcaaaggaat

SEQ ID NO: 157519 - DNA, 362 bp, Glycine max
agctttgaatgttgtatatttcaagttcaaggttcttgtattgcaacttgcaaggttcttgtctttataaataccaaacatacaaatcaataggtattaaatagaacttgttgccttctagccgatagctgatagccgatttgagcgtaattacttccaataaaaaatatttgtgatctataaaaagagaaataattcttgtcattattgcatacccttctttctcatttagccgtgtatgtgaggtacagtttgaaatttgaataataataattgttttatccgtaagaattgaatccaataccaaatgagtctaactcaattggttgaacaatatgcgaaagtgttataaactttctgat

SEQ ID NO: 157520 - DNA, 362 bp, Glycine max
tggagaaaaataaaaccttagtaccatatcagattaataaagcatcaccaataacaaagcatccttacaatccccttgtctctctcctcatgtaaccctcttctggaaaataaattgcacaacaatagttatataaccctcttataaaaacaaaataccccattttatatatgctcttaagctcatcctttgaaatttcatgccaacaatgaaaatttaggatgcaaaatcaaatttatcaacattgaaatttgaccattttagaaaaacttctccaaccttgaaaaaatgtctattccgcctaattatccccagaaactaaaataacaaccacaacaataaacaatagagataaacctgga

SEQ ID NO: 157521 - DNA, 359 bp, Glycine max
agcttgtcccaagatgattttggactttttctttcagcctcttgcatggataatcggtatcatcctttgatagggtacatttttcattcttctgagttaagaatgtaccgcacaatgtaaaatatactgtttcttcctctttgcagaatttatttgtataacactcttcaacttgaaaaagggcctttaaaatctttttctgggtgccgaattgaatcattttttgtaaaggtaagcattgcacctgcattccaaactattttgcattcagtttctttcctaattcctgacttctttgtctgatgtgtgcaatttcagtctgcaattagccctgatgcatcgaacatagtcagtggttc

SEQ ID NO: 157522 - DNA, 370 bp, Glycine max
tgtattttttttcgcgggatttgagtttttttttcatggatctcaattctcagtgggttttgtttcccccaattatttgtgtggatatatttgcttaattttattgggaaaaaccaagatacagtatataagtctggtacaactttcactttacaagccagttttgaagggttgagttaacgtcaaacccaaattctaagatagcatcaaagttatcctagatctattaatggaccacctaccatattatccacacaccttttccaaaaatgctgggcatgagggagtgtattaggaaaaactcaagtcccacgttcattatagataataccaagataaagtgtataagtggggggacaaccctcacctt

SEQ ID NO: 157523 - DNA, 357 bp, Glycine max
agcttgaagacatgtatttcaccatcttctcatagtagaacatcggtaatgtgtccattatcattgttatcatctccctctccatcagtgggggtactacttgagctaccagatccctccacctttgggcgtattctttgaaagattcatgctccctcttacacatgttctgtagttgtattctatccggagccatatcagaattgtactaataatgcccaatgaaggcaaccattaggtccttctgggaatggatccgagaaggttccagattagtatatcaggtgacggttgtcctagtaagactttcctagaagaaatgcatcaataatttttcatctttcgcatatgccctca

SEQ ID NO: 157524 - DNA, 376 bp, Glycine max
tattgaattagtattacttgagatcatatattttgggtttaaaaaattctttctctttctggtattatttgtctttttaaaataatgcattatttcataaaaaagttaactacactagctagtatgataaaatcattctccttgactaaaatatcctcattaaaatagttaaaatctaattgtaaattagtttaaatagtaatatttttgccatagcaaagtatacaatataaattgttatttttatataactaaattcataataataaaaaaattaatatgtaaatcatattaaaattaaagttcataataaataaatatttagaacatataaattatattttagatttacaataaataatttatattgtagtac

SEQ ID NO: 157525 - DNA, 353 bp, Glycine max
agctttttgtatgtgatctttatattcattggcacagaataaaggatgaagacgtggttcgcgatatcttttggggtcaccctgattcagtgaagttagtcaacacatgtaatttggtgtttttgatagacaacacctacaaaacaaaccggtacagactctcactgctcgattttgttggagtgacaccaactgagatgacattctctgtcggttttatatatgtggagggtgaacgcattaataatttggtatgggctttacaacgcttccgaggccttttttttaaagcgtgatgccctcactggagttattgtcactaacagagaccaaacattgatgaatgcagtgaa

SEQ ID NO: 157526 - DNA, 371 bp, Glycine max
taggctaaattaggctaaactttcttaagctacttgagctgagtctagtcttacaagagggatttgcggatgaaactcagttaaagttagtctaaacctaagagggctgtctaaatcgagccttgtcttacatgagggatctgcggatgaagcttggattaattcggcctgacgagggatcgaaggtttagtaatttagggtacaacatagaacacaagagcacgattgattagagaaatatatttctatgcatcaacttatttgttataaagacacaacatttctacctactgctgtcattttatttaccttgcattttataatttttagcataatagtttagtttaaattctgtttgaaattatcactc

SEQ ID NO: 157527 - DNA, 354 bp, Glycine max
agcttatcaaagtaacatatataaaagttgaatcatgtatatagtaccagcattgttcctccggatcctgcagataaaataagtacttaataataataaaacaccaccaattgcagcaacggtggaagcaactatcgtttttgggttcttcttgtgttctggagaattataacagataaataaaaggctaagttaagaatgatattagacttttcaaagctgcaattgaaatgagaagattaaaaagttaatggtggttacctaattctgaagcgggcatcctgatatatagatcttgtccaccagtttgaagctgtttcatatcaatgagatctccaaaacacatgacacagc

SEQ ID NO: 157528 - DNA, 369 bp, Glycine max
tgttttatgcttccatcaataaaatccattttacttttcttttaaaaaaaatacaatcaaacttttttttttttcatcttggacaagtattttgatttgtaagagtaaggagacacttctaacactgtattatggacaaaataacatattggagctatcagcataggctatccaaaagattactatatagatctaatcgcgtcacaaacagtttcattcagtcataactagacatcaatgaatctccctaacgaggatttacaattaagctagataacagttacatcataagtacgtattcataaacaggacgagaattaattttagatctttaattacttgtatccactcacatcgaaagaaagaaat

SEQ ID NO: 157529 - DNA, 370 bp, Glycine max
agcttctatggaggttggatctttgagcttcaataaggtccttcaatggtgatttttagccaaggagttgtagcagaagataaaggaaaagaggtgagaggaggcatcatccactagagaataagccatgaaaggagaagcttcaccaccaatagagtgccttggataagtagcttagagaggaagctttaatggaagaagagaatgagagagagagaaagagaaagtggcgtggaaattgaaggagaataaggagagaagctgaactttgaagtgtgtctcacaagtttctcatttgtgacaagtgttacacatgtttctatttatagcctaggtcactaactaaatgaatattccaaagaatatgcca

SEQ ID NO: 157530 - DNA, 363 bp, Glycine max
tgtaatcgattacacatatactgtaatctattaccagagcagatttttagaaaatattctcaacagtcacatctttttatgtggttcttgaatggctatcaaaggcctatatatatgtgacttgagacacgaatttgctaagagtttttcagaacaaaaaggtcttatcctcttaaaaagaaaaatcgttttatcctcttacaaattccttggccaaaacacttgtgattcaataaggaattatttgagtgctcaaattgttcaatctatctctttcaagagagatttcttctttttttcttcttcattctgaaaagggattaagagaccgagggtctcttgttgtgaaagaattctaaacac

SEQ ID NO: 157531 - DNA, 144 bp, Glycine max
cggccgcggaggcagagaggccggccccaggccgcggaaagaaccccccccaacgacaggcccaaggaagagcgacgcaaccacggagaaacaagcccagacaccacagggccccacaggcccccccacccacccccggaagaa

SEQ ID NO: 157532 - DNA, 273 bp, Glycine max
  unsure (1)..(273): unsure at all n locations
cccacgcncgcccacatgagacctcattctctaaatcacctctcacaaaagttgttttcacatccatttgctgcaacccaaggtcaaaatgagcacctaatgccaagacaatacacagagaacatttcttatatactggaaaaaaagagtctgtgcacccgattccttcttttttgtgtaaatcccttcacaacacgtactgccttgtatatctcaatgttgcctaacgaaatcctttcggggtaaagacccacttacattcaatgacctttt

SEQ ID NO: 157533 - DNA, 368 bp, Glycine max
  unsure (1)..(368): unsure at all n locations
ngctatgagccataatcttttttcaccatttaccttgacccagggtgagaatgtcaatccttaccctccgaagaatcaacggaaagaaggaagatttccaatcaaagacaaaggaaaaacggaaagtaaggaatatttccaatcagatagaaaggaaaaaaggaaagaaggaagatttcccatcaaagagaaagcagataaagaaaagaaggaaaattcccaatcaaagagtgggagatagcataaagaaaagaaagaaaattcccactcaaagaatgggagaaagttaaaaaggaagaataataaggaaagaacgctcctgatcagggatcgaaagaaaacagaagaaatgtgcacaaaggtctttg

SEQ ID NO: 157534 - DNA, 338 bp, Glycine max
tcacaaggagaaagatgccgaccatcgtctttgtgctcaagctcatcaagacattgtcctgttgttccatcatcatttcgcataggtacaagagccactgattatgcacttgaataaatatctgaaggatgttgattgattgaaccattctatgttgaggtaatattgatatttcaataataagattggattgtatggcactacatatctattgtctagggctacgagagttttgttaatatattttccatcattacgcctttcataaacgtaatatccatcttggtgaacaacagcttcacgtggccaattttttgaaaaaaaatctataacacttc

SEQ ID NO: 157535 - DNA, 363 bp, Glycine max
agcttataataagaaaatgatttaaaaaacttttaatgttggagatttagtttggaaggttatcctgcccatggatagtaaggatcgagccttgggcaaatggtccccaaattgggaaggaccgtttaaaataattcagatctattcgaatggtgcttatgagttagaggagctaacccctcagaaacgtactttgagcataaatggtaagtatttgaaaaaatataaaccaacactgctcgaagttaaaataagcatagaatgagagaaatactggaaacatagaaatggcgataacagtaaattgccacaaaagggcctgtgtcagtattacatcaaaagtagaatcgaaatacagaattc

SEQ ID NO: 157536 - DNA, 374 bp, Glycine max
tcttagtctcgcctgatgaggatgaatttgtggctacttcatgcactcctctaatgataatagcatcacttctggcactaaattgctgggagttggaagccatcttctcaattaaatttctggctttagcaagggtcatgtctccaagggctccaccgctggcagcatctatcatacttctctccatgttgttgtgtccttcataaaaatattggaggagaagttgctctaaaatctggtggtgagggcaactagcacataattttttaaatctctcccagtattcatataggctctctccactgagttgtctaatgcctgaaatatcttttctgatggtcgtggtcctggaagcagggaaaattttttctaag

SEQ ID NO: 157537 - DNA, 366 bp, Glycine max
gcttataataatcttgtgctcgaaattgaacaacggaagctcttgagaaattcaaatggtcataacttttaactcggagttcaattcatgcgcatcacatatagagacgctaaaaaatgaacaacggaagctctccagaagttaaaatggtcataagttttcacactgatgtccgattcaggcttatattatatcgagacgctcaaaattgaacaacgaaagctcttgagaaattcaaatggtcataactttttacactgaggtccgattcaggctcataatatatcaagtcgctcgaaattaaacatcggaagctctcgagaaattcaaatggtcataacttttcacacggatgtccgattcggg

SEQ ID NO: 157538 - DNA, 373 bp, Glycine max
tggttcgaggtacttacccgttgtttatttaagaacgatgaagaacgaatgaagaacgtcgaagaacggttgaaacctttgcgaatttcttcacggaaaacgctacggaaacatttcggaagcgcctcggcttagattttcttcacggaaacgatttttccaagcaaattcgaaagagagagaagtgccaaaggggctgaacccttttcttcttcacttcctcccctatttatagcaaaataggggaggtggttgccgcccagctcgcccaggcgagctcagctcgcccaggcgagccaggttgcttcctccagaagcaacagccttctggaggaatattctggagggcccaagtgggcctgggtgctatttg

SEQ ID NO: 157539 - DNA, 367 bp, Glycine max
agcttatcaacatcaattttggagaatgagttcttggggtcaagacatgagaagcaatcaagtataatgttacttccttcactaaagcggggatccatctccacacatattttatcaatagcaacataaaaaatctttgcacggtaatgatgaagattagtgatagtcctcccttctgctcttgaacgaccccgaactggtatttcgtcatccatatttgcgaccagaatacttttagcaacacaaaatccttggacatcggcaaaaaaattattccagccactctctctcattgtgcccaaccgagctttgacaacatcaactaattccatggcattcacaatattaagatcttctctttgcaata

SEQ ID NO: 157540 - DNA, 375 bp, Glycine max
tatagccccaagaccattaaacttatcttacaaagtagaactaatcgtttttgaatctgactttctttcatatggcctataaggtcacgcctctactggcaacaacaaatttgcaagtgtttaatgcttggctttttaccaatccaaagttcataaggggtttcgttaactgctttacttgacaccctattaaggatgtaaagtgtggtctttaaggcttatccctaaagtgactctgacaaagaagaatgactaatcatactcctcatcatattcttaagtgcaaaagttttcccgacataatgtattgcggaacaatttcagactctttgaggaaaagtgcaaaaggccccagacgttattctattaatccac

SEQ ID NO: 157541 - DNA, 343 bp, Glycine max
agcttatatgaaaattttttacccaaaccccaaatgaaacctatctattttaagaggaactcgcctcctaagttttatttatagacaacaccataaatcattaccacacttattatgcttaactaaatacattaacattattctttatatatcactaataaaaagttggtattcactccaaacactatcaaaatttataaattaaaaaatatttaatatataaatcttttcaattctattctatatcatcttatatgctttcatttcgaatagcttacattttttattctaccaatccataattaaatcccataatttaatatgcaaatcatctacataaata

SEQ ID NO: 157542 - DNA, 369 bp, Glycine max
tcgtcaagagctcaaccacgccgtttgtgttcacttcgccttccgcatcgagcatctctcgtgcttcgaggtacagtgtgattcagcttctctactttgaactattcttatcgatctgcattgcgtttttgggtttaactttgtggatttcgtgtttgatagggttttgtcggttatgataagcgttgattcgttgatgcctcttcacagtgctgtcgctaatgctaggctcacctccaatatcgccttcgattccacctgctggagctcgctttctcgaggtactacttctctccttgttattttactcgttttgagttatctttttgcgcaataatcgcaattaacaatgatcctttggatgatgat

SEQ ID NO: 157543 - DNA, 359 bp, Glycine max
agcttaaaggaagtgaattaattagtatggacagaaatgtctccacattgattggtaaatctgttccccaaatccctgaaaaatgtaaaaattcaggtacattcaacataccttgtattatagggaacaataagtttgacaatgccatgctagatttaggggattctgttagtgttatgcctctgtctatttttaattgtctatctcttggtcctttgcaatcaactgatgtagtaattcatttagctaatagaagtgttgcctatcctgctggtttcatagaggatgtcttagttagagttggtgaattgattttccctgttgatttttatattttgaatatggaggagggattttct

SEQ ID NO: 157544 - DNA, 367 bp, Glycine max
ttcgaactaaggaagtggcatcatgcattacgtgagacacaaaccacaaaatacctatcttacctttcactttcccttgttccaattttggagtgatattgatcactactcaaaatggatttccatttatccttcgatccgcaggatgacaacatgcatatgcatgcatgcatgttcaatttactaatggtattatgtttaatttactaaaacgcttacgacacccctttgatggagccaaagggctccagatctaatgggcaaaattgaaagcgtaagttctcaagagcttaaaacacaacacaggaaatgcaacacaaatcatcaatccaatgtttattaactgtgcgatcatggattacaaacg

SEQ ID NO: 157545 - DNA, 344 bp, Glycine max
agctttctccaagtcaatttccctcctcaccaattgattggcaaggaagaaaggcatggagaatgtgataaatctttaagtgacattttctccttgatcaccaacacttcccttgcaatgatatggaaggaatttcagggatacatgattttcatggagtctctagctaagaagcgaaaatgcaaggaagatgtgttctatgtggccttcatgccaccttgaaaacatctcgccgtcaagctagtgacgttaaagaagtgcttctgggaggcaacccaggatttctacccttttttcctctttttatgtgacttgtttaataattgtgttacctggtttgtgtg

SEQ ID NO: 157546 - DNA, 376 bp, Glycine max
ttcaactctatgcatcaatttatattattgtttttggccttttgtcagtaatcttttcttcatagccttgtggtactgtgatttcttctgttttctatttaagcatgttgtttggaaatgctcctgatgatacactgtttgaagtggattgatttgagtcattatttgcattgacaattctattattggaagaaattttctggtaactcatcgaaacagctgtctcaactacatcaaagaagagctcacgattgctcttagtgatatactaattaattcacgaaaaatggtgctcattttgaacttattgtggtttcacgcaagagctcatatttctaaggtaactgaggagaggaattctgttgttgagccaaac

SEQ ID NO: 157547 - DNA, 361 bp, Glycine max
agcttgcattttgctattgaagaaaataaatttaaatatgcaatgataaaataatgaaaacaaattcagcaaaatcatgtttggctgcaaaaagtaaaaacaaaaagaagtttaatccacatgtgttgaagcaaaggaactacataagatttataaaagatattcgcatattcaagtgtcgtttgtgatatttctacacacagatataaaggaacaattacaaatatttgttatgttccatgcttcaatatttgattagatacataatagtatcaatcggtagagtttaagcttgaactaccctcacaatacaatttcaaagaaatggaataagagaaaaacaaaacatagaacaaaatac

SEQ ID NO: 157548 - DNA, 369 bp, Glycine max
ttgttcacagatgtctcttgttgaacttagcctaatttaaacagcattataagcatagcataataaaaactagaaccctacacactatgtctagcactatagttatctagccttgctctatcaagtttcaagttaatagtacatttgtcaatgctaaagttcctaatagcacacaccaatgggtgatcaaaccacaagcatgcatacaataagcttagataaaaacattgaacgcatgaaaataacctcaaatagataataaaaatatttacatcaagtactcagtagaaattctcaacaaaggattttagccctccattacaagggagtagctttcacaaataggagaagggtttcagagaaaatacc

SEQ ID NO: 157549 - DNA, 355 bp, Glycine max
agcttgcttgattgtgtatgataatggcaataatggtgatgttgcaccactaacatgtccccgagaccccacaggggtacactccatccttcaaaagtatgagtctaagaagaataatgagaagtctcacaagaactttggtattcaagactttttttagaattgaaagaacatgcttgaagttgagatttcccaagtgcataaacagatcaccaacatcaagtatccaacttgggatccaagcatcacaaacatggaagattagagcttgtgatcatatgttggaaaacaagcatccaagtgaagctagcttcacacgccaaatcaaccttactcctatggagccacttaatta

SEQ ID NO: 157550 - DNA, 367 bp, Glycine max
ttgaatctctatacatggtttgcacatgttgtgtaatttgattagaggctcaaggggtggaatatagacacattagaatgctctctttgttcgtcactatactaaaatgatcgtcttttgtgggttttgaaacaaaagtaacatgttttttttattaaatttcggaaagtactttctgaattttgctttacttcacacagtattttccaaaatataacttttaaattgtatttcagaaagtactattcccaaactataattatgtgttccagaatgatgtttaaatttttttattccaaagagtactttccgaaacacaaaaatttagacattaattttggaatgtacactctaaaatgatggtata

SEQ ID NO: 157551 - DNA, 371 bp, Glycine max
agcttttgagaataaactttgccactggtaatcgattacaggaaactggtaatcgatgaccagaaagtaaaaactgttgtaacttagaaaattttgagaaaaaatcttttgaaaaataaaactgggctatgttttttttttttgaaaaatcttttcaatacttcccttgtgaagacttcttgatttcttcttttgaatcttgaattcatcttctcttgaatcttgaaatcaaacttctcttgattctttaatcttttttatttcttcttatgaaacttggaattaaacttgatcttgaacttgttgactcaatcatgaaatcattctcttgggctttttgtcatcatctttgccatcatcaaaactacttg

SEQ ID NO: 157552 - DNA, 377 bp, Glycine max
ttaggagaaaccattaaaactaaggtggttcctaaacaaaaatcaattgaggaagcctcgacaagttccccattgaaaaatgaaattctgataccaatgccagatgtcgtacaggatgtcacgacatcacgcttcataacatgcagattatctctgagtgaatgaacagattaaacaagtaaataacacaggagaattgttaacccagttcggtgcaacctcacctacatctgggggctaccaagccagggaggaaatccactaaaatagtgttagttcaaggtctaacagccactgtttacaacctttatacctaaccactacccgtgcgacgtttacctaatagccacttctaaaaatgagaaccccctctcact

SEQ ID NO: 157553 - DNA, 370 bp, Glycine max
agcttttatcgctccacctatatcttgccttcaaatgatcaaacttatcactactaacaatcgtgtgtactttttgcaacatggatataaaggcttcttgagacaccacttgtaatttactaaacactatggctaaaagaagcgtcaaatcatgtcatatcatcaacatagtaaagtggtacaatgaataggaatgtatgtaatgtgtcaatgctgtaatttccccctttttggcataataaggcaaaatttcatttttggtccccctagttgtctttaatttccgattttggtccccctttaaaattattcacacattttgtcctccttttttatccaatcacgtaatcttggtccccaagtctagatt

SEQ ID NO: 157554 - DNA, 377 bp, Glycine max
tgaggttaatctcaatgctacaaaagcataaccttgtaaaaggactatcaagtatgtcatacaatggtgaattactttgtgaaactggtcaaaaagggaaaccagttaaatgttctttttcaagcaaaattattgtttccacctcgagaagtttagaactgttacctccttatctatttggcccaactaaaacttcctttattaatgggcaaaaggtatggactcgtcatagtgaacgattactccaaatggacatgggttaggttcctagcccacacagatgaggctcttaggctatcttctttatattatgccaaagagttcacaatgaaaaaggagcatgtcgtacttcaattaaaagtgattatgggggagaa

SEQ ID NO: 157555 - DNA, 363 bp, Glycine max
agcttccatcacctttgtttttctgtgcaacaatctgaagcaattgaacagcctgaagcttatgctgcaaacatctacaacagacatcctcaacctcaatagcaaaatcagtcacaacagaataattatgacctctccagcaacaggtacaatcccggatagaggaatcatcccaaccttagatggtcgaatccttcacaacaacaacagcaacaacaacagacttattttcaaaatgctgctgacccaagcagaccatacgttcctccaccaattcagcagcaacaacaacaacaaccccagaaacagcaaacagttgaggcccctccgcaaccttcccttgaagaacttgtgaggaaaatg

SEQ ID NO: 157556 - DNA, 373 bp, Glycine max
tctaaactttgtacaagaatgaagctcttataccacttgttagacaagtggcctcagatatcttaagaaggggggggttgaattaagatattccaaacttttctcctaattaaaaatctatcttactttttacttaagttatgaattcccttaatgacaatcttcttaaatattaattcaaatgaagcaacttgaatatgaatataaagcaataataaataaaggagattaagggaagagaaaatgcaaactcagttttatactggttcggccacacccttgtgcctacgtccagtccccaagcaacccgcttgagagttccactaacttgtaaattccttttacaagttctaaacacacaaggacaaccctt

SEQ ID NO: 157557 - DNA, 360 bp, Glycine max
agcttctaaactttgtacttgaatgaagctctgataccatttgttagacaagtggcctcagatatcttaagaagggggggttgaattaagatattccaaactgtttcccctaattaaaaatctatttcaccttttttactcaagttatgaattcccttaatgacaatcttcttaaatattaattcaaacaaagcaacttgaatatgaatataaagcaataataaataaaggagattaagggaagagaaaatgcaaactcagttttatactggttcggccacacccttgtgcctacgtccagtccccaagcaacccgcttgagagttccactatcttgtaaattccttttacaagatctaa

SEQ ID NO: 157558 - DNA, 373 bp, Glycine max
tctatataagctgaaccattttatcaatttacactagttgagttttattcagaaaattagagtttatctcttttatcttagtgagagtgattctcctaaattcttgagtgattcaagaacaccttggctgtatcaaaggactttcacaacctttgtgtgttgccctcgctggaaagagtgattctttccttcctttcatcatcacccttgttctttcaaaccacaattccagaaaatccacctctgcccagaattatctcgtggccataactcccattttatgcactcaaattaagtgattcttgagcctaaattgaatttcaaaatgagacctttcacctcgttttggaatcacctcatttggagccctgta

SEQ ID NO: 157559 - DNA, 355 bp, Glycine max
agcttcttgaatgggatcattttattcattggcataaattaaaggatgaagatgtggtacgtgatatcctttggtgtcatcctgatgtagtgaagttatgcaatgcctataatttagcatttatgataaataatacctacaaaacaaacaggtacagactctcattacttgattttgtgggagcgacaccaacgggatgaaattttttgttgatttttcctatttggagggagaacgtctaaataatgtagtctgggctctagaatggttttgaggtcttttctaagacgtgatgccctccttggagttattgttaccaacagacacctatcattaatgaatgccgtgaaaactg

SEQ ID NO: 157560 - DNA, 290 bp, Glycine max
tcttggacccttatttcctacagggtttgacgtttaggtgaaaggaggagtggttgtggaggttcacgtggcgggagcggcctagcatggaacgggaccatgtcaacgaaacggtgccgtattcggtgtggtagatgtacgtggtgaggctcattgagagggtggtgggatcgtggttgggttgctaaactctgaagcaagaagataacggcacagagaggaagaacatctgattggaagtgtggtgttcttctcttggggttttggctttgacaaagcttttttatgtt

SEQ ID NO: 157561 - DNA, 336 bp, Glycine max
agcttagggatggaacatttacttgttggtgatgaacaaaagcgcaaaacggaatcaaaaaatgcgaaaaaggatgaccctagggctgcaaactcgtcaatcccgtgggtatggcttttgaaaagggggaaaagaagtttttgaatgcaaaaacgccccccctttcgtcattcttataatttggtgcaggggtggctcgccaaggctaacccatcttgtccacgcgagctaacctgcacattttttttttctttttttggggggaacattaaccatgtatcctcccttctgatggattatcatattgcttaactcgaacttacttctgtttaaatt

SEQ ID NO: 157562 - DNA, 364 bp, Glycine max
tcaaattcttcttcaattccactcaaaatttcaagctaaagctatttttggagcctaggaacctacctctacatcaagggaccttcaattccaggtacgggtggacttctcctcacttgaaatctgagggtgttgggttcttgggagctataatgggtagctctactaggttatcgcatttaggtagttgtttgtgaaggaaattgttgtaaatcatgctaaaacttgatatgtttaatttaagcaaaactgcccatgttgattgatggttaaataatgatgttttgatgtatatgtatgcttaaaatgcagttagtaaactggtagagaagattggtagaagtagcttacagttaaatgtgag

SEQ ID NO: 157563 - DNA, 364 bp, Glycine max
agcttgtgatactaccttttttccaaattaaattcacgtacaattataagacacactgtcgtatgaaaactttttaacatgcatgcaggatagatcttagagatacttggcattgaagctaaattacctgataccatggcccggtccacaggtaatatctgtggcttctacatgtttagatccatgtacaatagatataccatcgtcacctaacagagatgtattgatcactacttaaaagtagatcctctccaattgaatttttacatgaatttatgtgaaaatttgtatctatatctttcttcacgagtaatatgtaggtggaggccttaatgtgaaataatatattctgcttagagacatt

SEQ ID NO: 157564 - DNA, 326 bp, Glycine max
tccatgaaacgcactggtggcataagatatttttaaaggtttgagtcggacgggaagaataagccaccacagtagacccacggaagaatttgtttaacagaggaatagatacggcaccttgtatgaatctgatacatcctggactatgtcatacctgctacctggaattacctgtggaccaacttaaacaaagttgactatgggggaagagacggggtctggaatcacattactaatcccaggtacacacctgggtttggtacctagcaccaatcgtacacatgccatagttgactttgctcagtttagctatagaggccataatc

SEQ ID NO: 157565 - DNA, 269 bp, Glycine max
cggggaacgttccgggaagaatgaaacttcactcaaccccacctttaatatgtcacgtcatgccaaaaggaggctccgcccaaagcgacgcctaacctttggactaatgttccgttaggaaaacccaaataccctatggctgtgccttgctcgacccctaggatcgccaaaaaactaggcatatccaactatgacttaagaaacatgagggaataaataacaagccggaaattaaaaggcgctaagctaccccctaccagcgggacttt

SEQ ID NO: 157566 - DNA, 371 bp, Glycine max
tgtcgggttcagatgcaattattcacttggggcatccccatggactaagcgaaaaggctcgggtcattaaagactacgcatcttttaaggcataaagcgaggattagaacaatgaaaccccaatcttacgttctttaaaagactgcgatgagaaaattacagaggacaggaatccctggggaacaccatagaaaataaaaacatgcagtgacttccttaattgccccagatcttaagcgtagtatcgcttgacaacgtcggacttcacgggtgaaggtagttccttgtcatccatgttggcaagcacaagggcccctccggagaaagccctttttacgacgaaaggcccttcgtagttcggggcccatttt

SEQ ID NO: 157567 - DNA, 350 bp, Glycine max
agctagaatgcagatttttgcactcatcatattcatgctcaattacaatgtcctcaaaaaattcagcgggattgagtaactgaaaattaatgaaaaaactgattagtttattaattgatgaatggatttttatcaaccgatgaatatgtacatattgcattattaattaatataatacttacttccaaccattcttgagctcctattggttcccatgctgctataccaccttttttactctacaataataaaaaaatgtagtcgtgtcaaatgaaaatcaattagtaaaagtaaaaaaatcaattaccaaagttttttgcacaatccctactttcccattgataaaagat

SEQ ID NO: 157568 - DNA, 374 bp, Glycine max
  unsure (1)..(374): unsure at all n locations
tgngctaggaagaagcatgatgttattctgctgttcaaggatgaaaaaaataagcacgcatcccataaatatgagaaggtcgggatattacttaaaacttactagattctacattcacctcgattataaagaatgtttttaaagaaagatgtgcttctgaatgcatcttaagtaggagcatatcataacttacatcttcattgatgttgtttgctgccaaatacattgagtttgatcacttgttcagagaagatgagaggtgtcgtcgctcaaccttacatttatcctggaatgataacagagccgactgtgaacttaaattgggagagttcatcgtagcttggagactatgcacatagggactcttctgatcc

SEQ ID NO: 157569 - DNA, 357 bp, Glycine max
atctttgagcaaattctatttacaatatttttttactcgcatgtctgattgagtcccgtattatattgagacgctcgaaattgaatgttgaagctttgggccaattctaacgacaataactttttactcggatgtccgattcagtgacgtattatatgcggccgctcgatattgaatgttgaacctctgagccaattcaaactacaatgactttttactcggatgtctgattgagtttcgcgatatatcgagacgctcgaaatcgaatgttgaacctctgagcattttaaacgaaaattaacttttactccgatgtctaatggagtcctgaattatttcgagaccctcgaaattgaa

SEQ ID NO: 157570 - DNA, 377 bp, Glycine max
tccatcagggatggccggcagctttctttagacgcaccgccgccacctctcaaagcccttcagtttattcacaaaaaaagctagcgcattgcctacgaaacatggtcgaccagtatgcgaccaagtccaaagcccaagataagcaaagtactaggtccgtgaccgacaagtcatcaagcgttcatctcaaaacgataaagaagcgctactatgaggcaaccatgtaacttctaaatctctgcttgatatttgatcacctttgtttctcaagtcatagtaggacacacctaattgctcatggtcctaggaatttaattaaaacaagcccaagctcataatgttgtcttaccttcccaaatttattttttgcgtgttta

SEQ ID NO: 157571 - DNA, 358 bp, Glycine max
agcttgtagatccaccgattgtggaggacaagatcagtgttgtgcctcatggcctttcaaccgattcagatgtcgtcaagatgtgtgcattgtttgatttccctttttctcttgttctcttgtttttttgcgtataaacgtgcgtgtgttgttgtgattgaaagggaggcgtatttgatctcgaagagatctctccgaagcaatgcggagaagtttgagttccaagcgcaagtgtcgtggctagcttatggattgtgttctgccccaaaaaccctaatcaaaagcccattcagagcctcaagggccatcatgggcgacaataactatatctgtaggttccaggtaaataataattcaa

SEQ ID NO: 157572 - DNA, 365 bp, Glycine max
tcgaacggtcatcgcttcattcttgtggcgatagattacttcaccaaatgggtcgaagcggcttcttatactaatgtcacgagaggtgtggtggtcagattcataaagagggagctaatttgttgatatggactccctaagaagatcagtactgaccatggcaccaatctgaataacaaaatgatgcaggaaatgtgcgaggatttcaagatccagcatcataactccaccccttatcggccaaagatgaatggggctgtagaggctgcaaataagaatattaagaagattgttcagaagatgacggtgtcatacaaagattggcatgagatgttgcctttcgccctgcacgaatatagaacctc

SEQ ID NO: 157573 - DNA, 353 bp, Glycine max
agctttattaaaaatgattataaaaaattaaaaatagtaaaatttaaaaggataagtaggtgaaattaatatcaatttattatttttttatcttttaccgttattcatattcatcttattaaaaaacttatcttatgggaataatatctatttttttagcttccaaaggagcttcttttgggacaaattgtttacagaaaaatggctagctacttgttcctacgctgttttcccaatttcttctattgtttaatgaaagttacatgatttgaattgattctttgttcattaaaatacttagctaaccaactttggcggtgcactaagtagtgtatctatatctatccatagta

SEQ ID NO: 157574 - DNA, 366 bp, Glycine max
ttgctaggtaaatggaggcagcaccagatgtgctttgtattatattttcattcagcaccacttgtactgtttttgtttatctcaataatatattatacattatgcagtaataaggactctttgtggtggagggatctaaagataatttttcagaacacacaacagggtgagaagatcaaaaaagggatatcgtggaatgtggagagaggggacaagttcaaagtctgggaagatgagtggatacaaggtgaggtctcattaatcacaaagtatcccaggctgtttgtaatctctcaacagcagagcaactcaatccagcagatgggaggcttcaaggataatgaatgggagtggaacttgtcatgg

SEQ ID NO: 157575 - DNA, 369 bp, Glycine max
agcttgagatgaggaagtgttgaagggcgaaacttcctgcttttattgttgaccacagagtggtacctggagatatgtcgcgggggtcaggagaccttggggacgtcaggtggggtgctattgcccaaaaccaagcttgaccaatcccgacccaacccgggcatagtcggtcagtgagaacctgtgatgtacctaagcaggcgagctcctggcagtcaacagataaaaggaaaacaagaccacaaagcaaggaggcttgtggtggctggccagctgtgaattttgtgtaatatgtggatggtggcctctggtaatcgattactaagggtgggtaatcgattacaaggcttaaaaatgaagacaggaggc

SEQ ID NO: 157576 - DNA, 349 bp, Glycine max
tttcactcggagatctgattcaggcgcataatatatcgagacgcttgaaaatgaacaacggaagctctcgagaaattccaatgctcattacctttaactcggaggtctgatttaggcgcctaatatatcaagacgctcgaaattgaacaacggaagctctctagaaattcaaatggtcataacttttcactccgaggttcgattcaagtgcatgatatatccagacgctcgaaattgaacaatagaagctctcgagaaattcaaatggtcataaccttaaactcggaggtccgatttaggcgcataatatatcgagacgctcgaaatttaacaatggaagctcttgggc

SEQ ID NO: 157577 - DNA, 370 bp, Glycine max
agcttatcaacaaggtagtttttcgtgtacaagtgcatggagtcaagatctgtaaggaagctccaataatctcacatcagccttttgcaaacgattgcttcttattcttttatgcaaattcacaagaaattgagatgatgaacgatatcttaaagtcctatgatgaggctatagaagcaaagcttccaagattattttgatgatgccaaagatttttaaaaagatacattcaaacaagattaaagaaatcaagaagattcaagtgaagattcaagagaagactcaagatatgcaagaacctcaagaaaagcatcaagataagtataaaaagaatttttcaaagaaaagattgaatagcacaatttgtcca

SEQ ID NO: 157578 - DNA, 379 bp, Glycine max
ttgagccaaaaaaaaggagaaggaaaatttccaatcaaagaggaagcaaaaaaaaggagagaaggaaaatttccaatcaaaggaaaaaagagaggaaaggaaattcccaatcaaagagtgggagaaagcaaaaagaaaagaaaggaaattcccaatcaaagaatgggagaaagaaaaaagagaaggagaagaaggaaagaaagctcctgatcaaggatcgaaagaaaacagaagaaatgtgcagagaggtctctggaccagacaatatctgaacaaatacggaattgtcaccaaatgaacaaaagaaagaaaaggaaaccataacctaaaagtggtcttctccctttgattaccaaccaaaatcctgtgcgtcggtgac

SEQ ID NO: 157579 - DNA, 363 bp, Glycine max
agcttctaacgaagatgattaagctgtctacctcagacctttcccattctcctaggcaggtcaggcaaagacgtggctctaatcacatccaaacaaaagcctcaacacttaggaagtggtggaggaaaaatgcattgcaaggttcttttctccatctagatttatctgtgcaaaatctgccattgctactttttcctaagggtctgatgaacctttttgtgaaacatgggagagattcaaagctttgttgcagaggtgcccaaaccatagttttgatgatgctgcaaaactacatatcttctacagtggtttgaaacctcaaaccaagatgattcttgatgcctcagatggaggtactatgat

SEQ ID NO: 157580 - DNA, 373 bp, Glycine max
  unsure (1)..(373): unsure at all n locations
tcccagatatggagagctaaatcctctctcggttcttccttgnaggtacttgatgtaaataccggtatatctatttaatgatgttttatgtgttctctgtgctatcagtacgttatttcagtgtgctattgtcttgatcacgtagatgcatgctttgttaggatcattcaacagtgggaacatcagaacttgataagatggggctagtttatcgtattatcacgaggaatcggggtacagtaacctagttatttgtatgtttgtcttaatgcggctctggttgagtttagtccaacaagaggaatctgatgacgatgcttaatcaggattaggctagactatcatgaggaatcggggtttagcatttcaggag

SEQ ID NO: 157581 - DNA, 360 bp, Glycine max
agctttataagcgcgggttctggagacaaaggtcaagcgttcgcgatatgcgaagatgatattccgagaactttggatttggtacgaccatgccctcctgatttccagctgggaaattggcgagtggaggaacgccccggcatttacgcaacaagcataatgtaaacctttacggttttaaaagctctatagttgggcctaggctttagagtttttccttttgttaaggctttgtgtcttttgtttttgaatttataatacaaggatctttcttcatctgttcctggtctctacccattctcattcatttgcatgtttacttctttttctgaaacggcagatccgatgacgagtcccccg

SEQ ID NO: 157582 - DNA, 355 bp, Glycine max
taaggatggaatacttacttgttggtgatgaataaaagcgcaaaacgcaatcgaagaatgcgaaaagtagagatcctaggggtgcaaactcgtaaattccgtgggtatggctttcgaaaggggggaaaagaagtttttgaatgcaaaaacgtcccccctttcgtcacttttatattttggtgcaggggttgctcgcccaggcgagctaacctgcacttttttattttttatttttttttatttttttttttagagaggaacattaaccatgtcccctccttccttatgggttagcgttttgcctaacttgaacttacttaagttagaattaggcgttgattacttatttttaaaa

SEQ ID NO: 157583 - DNA, 364 bp, Glycine max
agctttgctggaaacttgtgtttttgcatacaaatccatattttttttttaagttggattgtgtttttttttgtttttttatgaacaatgatccgtatggtttttttacaaaaattaaattttaaaaaaatgcttaaattgatttttaaaactgtatttgcttttatgtcatatgaattgtgaattcgtatgaactatacggatcactgatctgtatgattttatttttaattttttttttgtgaaccatacggatcactgatctgtatggttaatttttgaaaatttatatatgaaatttaatcatttctaaaatgatttttagggtaattattttttgtagtatcgtaatcatttttgaaat

SEQ ID NO: 157584 - DNA, 377 bp, Glycine max
tatccgcaagcggagaaatcataagaaattggatgtgaacttgtgttattatgcttagttaactacacgggtagttggaggttgggggatctcgtttatccagttttcaaacttatattctaagatcaattaaacaatttgtggttgcaatttataattttttaaggagtgtaataataatttagcggcggtctcgcgtccttgtgttgcataatttcgggaaagtcttgaaaaggcaacatattcttaattccaagtcaatggagtatttgattattgttacccccaactttcacttttggttgacaaagcacttgcctccaaccatgtgttactttatcttcaccacgaaaaattaattttctcatcataaagct

SEQ ID NO: 157585 - DNA, 340 bp, Glycine max
  unsure (1)..(340): unsure at all n locations
agcttggactgagcattgttgaagatgccggngaagcagatgctgacatgcctcctcttgaggacgctgaagcagatgctgagggtagcaagatggaagaagttgattaaatctgactcaattgcctgttacgtttttacaaacaatgattggagaaacagcctttttacaaatgcaaatgtcctttgaattttcgaaaattcggaacgttggctagttaggcgccgcatgtagcagttcctttatggtaaatttgtgtccgctccctggccaaagaatttgggctttcttcgaataatcgggtatgctgattgcggaagtaccagtccgggaatgaaaa

SEQ ID NO: 157586 - DNA, 366 bp, Glycine max
ttgaaacaaagtgggggccaattttcattgatcaggaatgaagtaatcgggatttgtttgacatgcaaacacatgaggaatataagcgatgcatggtgctctctacctgaaaccatcaaatgtactggatgcataaaagaagcatttaccactgacagccagaaattagatacagagagaaaatacagtcatttcaatctatagagaagattcaatccatacttcgtgatagttccattgaagctatctgtataaactaacatgactttattctatcttatagcaaaatgaataacatatatatgcgctgacattgcctcttaacacagagaaccgtttgatttactgatttatattatgacttct

SEQ ID NO: 157587 - DNA, 361 bp, Glycine max
agcttttactcacaggtctttggtcaatagaatcacatggcttttccaagaggtttgaagaggcggatcgaaatctctctgtttcaatgccaatcttccttcttttatgctgaggacaagaatgttccacatcataagtgaaacttttgggggaaattctgaaaatctggaaatcagttgaaaagctggtaatttttccatcactgtgcaatgtcttatgcaacacctcaccatctttacacaaggtaatgctattggggggctgttgtgccaaaccaacattaacatcatccataggagcagaaaatgggaacccaatagtgaaatttgtaacactttcatctgtggatttatgcagatc

SEQ ID NO: 157588 - DNA, 369 bp, Glycine max
tcaggaaactggctggtgtgcatgtcatatgttcaaagagaccaatctacttgataaaatgtatggtctcatcactttaaattttcaacttaaattaaacatgagtcctttttgtttaatctgattataattttataattattttgatttgagcttaactcgaaaaaatctgtaattctttttttaaatatcaaactttctttagatttgaattttattttaaatagtcaaaattaaatccagacttttataacttataataataactcgttataattcataacccgcatttgatcgaataatccattttgatagctctaattaatgctgtcttattgttaaattacccaatgagcagctaattgaaca

SEQ ID NO: 157589 - DNA, 358 bp, Glycine max
agctagtgaccctagtttttttccttaaacctaggcacttaaaaaagtcgtgacttttgaaaaaatctccaaaaacaattcacttgaagaatcgtgactttcggaaatgcatttttcgaaaccagtcactggtaatcgattaccattaaggtgtaatcgattacacatcaccagatgcgacccttcattttgaactctgaaaattaaaacgtttagaagctatggtaatcgattacaagtattgtgtaatcgattacacaattttaaaatactttaaaactatttaaacataagttgtaactctcgaaaattgaaaccttaacgttttcaaacattggtaatcaattattgccttccg

SEQ ID NO: 157590 - DNA, 369 bp, Glycine max
  unsure (1)..(369): unsure at all n locations
tggccaaagcagtggccganggtatctattgggcgcgaagggcttgaacctcacgatagagctcacgagttatgccggacatgaagcagcttaccagaaatgtcacagtgaggtcaacaattcagtttacaagccttgcaaactcagtgacgcaatcgttcaccgaacctcgctattgcactttgaaaagagcaccatgagggtcatcatcgtataacgatgcgaatatggactcgagaacctgcaacatggcagcccatgatgtaaggaagccatttttggacatccattgctaccaacagagggcgggaccctccatgtagaaggatgcgacggtcatccttttgatgtcgggcacaccttgataat

SEQ ID NO: 157591 - DNA, 164 bp, Glycine max
cctgaccccggaaaacaacccgagcacaaggaggggcttccaagccccgccaggaggaaccgacgccccaggaacagccacacccccgaggccccgagcaagaccagaaacccgcccgcgggaacacacggcgaccccaaaaggccccagaaacaacccgcgca

SEQ ID NO: 157592 - DNA, 362 bp, Glycine max
agctttgaaggtgcgtaatccaccatttccataatagaacattggtaacgtgtctactatcattgtgataatctctttctctgttattgggggcgctacttgagctgccaagtctctccatctttgggcgtatcctttgaaagatctgtgccccctttttgcacatgttctgtagttgcatcctatccgaagacattatactgacactgcctaacgaaggcaaccactaggtccttccaagaatggactcgggaaggttccaagttagtgtaccaggtaacagctaccccatttagactttcttggaaggaatgtatctgcaattcctcatcttttgcgtatgcccccatcttccaataata

SEQ ID NO: 157593 - DNA, 375 bp, Glycine max
tgtaggattatggggtacccatcacatgtggtactaggcggcggtcgggcgatggtgcacaacaagtttttccacatccacaatgcgcgcataaacccaccatcccctgttgcccacctccaactgagctcgcgtactcccacgtagcccatatcctcgtttctctcaacaccgggtccccatcaatcctctcaagcttccacaacatccaagcaaaacaacattcaaacagcacaagctatcacagccaagcaaaacagagcaaaggcagaaaactctgctcaacacatcaaccaaaatcacagtttttctcacgtaaagaccacagtaacaattctttcgatccaattcgttaaccgttggatcgactccaaa

SEQ ID NO: 157594 - DNA, 355 bp, Glycine max
agcttgagcttgaggaaggagacaatcattagggacccattctcttccaccgattcaccttcattccttatcccttcaccttttacatccttttgtacatttgagcccttcgtgaccatgaagggctaaacaacccattgttggagagctttccaccaaactctcttgatgtaaagactcttactatccatttaacattattgctagtttcattgttccttcctgtgtttatttccatgtacttggtttgatcatccatttaaatgctatgttaaggtttaagcattgggaaatgtagttaaccttagaacttggaagagcatctaaaatgcttcattgctagggataatatgag

SEQ ID NO: 157595 - DNA, 371 bp, Glycine max
tcatgatgatgaatcaagttgatttcaagtatgtttgatgatggccaagatgatgacattttgcccaagagaatgatttcaagattgagtcaacaagttcaagatcaagattaatttcaagtttcatgaaaagaaatcaagaagattcaagattcaagagaagtttgatttaaagattcaagaaaatatgaattcaagattcaagagaagaaatcaagaagacttcacaagggaagtattgaaaagattttttcaaaaacaaacatagcacaattttgtttttcaaaagagtttttctcaaaattttctaagttaccagagtttttactctctggtaatcgattaccagtttcctgtaatcgattaccagt

SEQ ID NO: 157596 - DNA, 366 bp, Glycine max
agctttagcaaatatattaatttcaaaatataattaaaggttcggggggagagagagagagagagagagaagagtggacaaaaggaaagacagaggttgattcaaatgacaagtccgaccattacttacatccaattcgctcagcttccaccatacgaagatctaatggaatttcttgaaactgtgcagcaatttgacgttctccaagagataaattgttagacacgtatgctttaatcgtacccgctccatttgtaaatcctgtatcaacagtcaagtgtatgggattgggcacttctcgaaaataaaactcgtggattaatgcactaccaccagttactccaagaccggttgaatacctacaaa

SEQ ID NO: 157597 - DNA, 378 bp, Glycine max
tcaaaagctaatcaccaacaacagaaaactccattgaataaaagttgtgcacgagatgatcagatgtccttgtctcaatcatcgcttgaaaaactttcacttgtaaatactgaaaattcaaagaaagtgaaacttgtggagtctacattgagaaacaaagaaagaagcaagctgagaatcaagcctgcctattctctaaaagcatcctatgctatattttatttctgtaacacgactggggtggtttgaactatgatcctactttttgcactcccactagtttagtcacttcaatagacttgccaaaattagggaatatcatacagagaagtacggatgtcgagatacatatttacattactaaaaatcttctggaaa

SEQ ID NO: 157598 - DNA, 367 bp, Glycine max
agcttccatcaagtgataattatagcataagagcttcaagtaggtgctccttaaacctccattaattttcaactttaccttctcctccattgatgtttcttcattttctacatgtatctcctcacatgtcttgtgttaaatgttgttaatatgattctttagaatttccaccgattaatcttgctatagaagctagatttgattttctatggttcaaatttcttgttcatgttcttgaaccatgagttgtgttgagtttaggtttctttgagttttgtcttgatattttttgtggctgaaacctaaaccataaaattcttacaaaaacattaaagtaaaataaaacctcaaaaatctagagtgactt

SEQ ID NO: 157599 - DNA, 377 bp, Glycine max
tttgacggactataccaagctataggatctattgtcggagaaagatctatatataggcttgctaagggtagagagaggaagactagagatctggatcaagtaaagtgtgttaaggatgaagaaggcaaagtcttagtgcatgaaaaagatatcaaggaaaggtggaaggcgtatttccacaacttatttaatgatggatatggatatgactctagcagtctagacacaagagaagaggaccggaactataagtattatagtcggattcagaaacaggaagtaaaggaagcgttgaaaagaatgagtaacggtaaggcggtggggccagacaacatacctattgaagtgtggaaaactcttggagatagaggtcttga

SEQ ID NO: 157600 - DNA, 363 bp, Glycine max
agcttagataaaaacatttaacgcatgaaaataacctcaaatagataataaaaatatttacatcaagtactcagtagaaattctcaacaaaggattttagccctccattacaagggagtagctttcacaaataggagaagggtttcagagaaaataccacattacaaagcaatggggatgtctcctccacctctacctccacctttaagaacctagaaaataactctaaaatctataatctacctaaaagttaggacctttgcttccttgctcagcttttcctctgttctctacacataattcgcagtcaattcagacctctttcacgtcatcacgctctttctcaattttttatgtgcaaat

SEQ ID NO: 157601 - DNA, 372 bp, Glycine max
tgcattttgctattgaagaaaataaatttaaatatgcaatgataaaataatgaaaacaaattcagcaaaatcatgtttggctgcaaaaagtaaaaacaaaaagaagtttaatccacatgtgttgaagcaaaggaactacataagatttataaaagatattcgcatattcaagtgtcgtttgtgatatttctacacacagatataaaggaacaattacaaatatttgttatgttccatgcttcaatatttgattagatacataatagtatcaatcggtagagtttaagcttgaactaccctcacaatacaatttcaaagaaatggaataagagaaaaacaaaacatagaacaaaatacaacgtttaaatgtaa

SEQ ID NO: 157602 - DNA, 360 bp, Glycine max
agcttacatcaagtggatttttgatcacaagagcttcaagttggtgctccttaaacctccattaattttcagttttaccttctcctccattgttggttcttcatttttctccaggtatctcctcacatttcttgttataaatgttgttaacatgattatttagagtttccaccaattaatcttgctatagaagctagatttgattttctatggtttaaatttcttcttcatgttcttgaaccatgagttgtgttgagtttaggttcctttgagttttgtcttgctattttttgtggctgaaacctaaaccataaatatcttaaaaaaaattaaagtagaaataaacctcaaaaatctaga

SEQ ID NO: 157603 - DNA, 370 bp, Glycine max
tttatataagctgaaccattttatcaatttacataagttgagttttattcacaaaattagagtttatctcttttatcttagtgagagtgattctcctaaattcttgagtgattcaagaacaccctggttgtatcaaaggactttcacaacctttgtgtgttgccctcgtcgaaaagagtgattctttccttcctttcatcttcaaccttgttctttcaaaccacaattccagaaaatccacttctgcccagaattatctcgtggccataactctcattttacgcactcaaattaagtgattctagagcctaaattgaatttcaaaacgagacctttcacctcgttttggaatcacctcatttggagccct

SEQ ID NO: 157604 - DNA, 353 bp, Glycine max
agctagggagacaacttttattccaaaaaataaaacaaattacgcataaagcagctctcttgtattagaccctcccggtcgcaattgtgatgccgggacccttacatactactggaaccttaaaattgaggcatgtgccagaactagataattcacatatgctccttttgcctcgctcaccaatcttcgcaattccccaaaacaagatacactaacaagtatatggaaacgctaacttgcctcttctgaatttcaggctgggcaaggctaacacctacttatgcgtcgaactggaatgtcctttaaccctgaaaagtaatgacaaagaccgggttttggcccttgacgaaggt

SEQ ID NO: 157605 - DNA, 358 bp, Glycine max
cgcatgaaggatctctgtgagccgctatctttttgttctgtcttaacaaattaagcatgttcatgctctcttcaataccacaaagaaatgctttttggttaactaacaaggctattgtcctatcacgcgaatgtacacgatctcaggtcacgatctcctagattgttatcgcatcacgggacgactcttacttttaaagagacagaatatagcgttcgctcagaattcgagccttcatttgtttttctagagacttttataggacatgagaagaaatctcttgtagcttctcttaccaatgaaaatatggatgtcggtgcattcagagcaataattcatatctttcacttacttggcc

SEQ ID NO: 157606 - DNA, 363 bp, Glycine max
agcttatgcacggaaaatgttttatgaaatcgagatgcccgaagaaacaccatttcctagttaaccaggcattaggtaccatgttcaattattttttaaagggaaacgggtttatgatcccaacatggttggctcggggggcctaacacatgaaactaaaaatgcagtgtgaagattcacgcttcccccttttttgtttttgctttgtagaggaaaacgcaaggatgagcaaacatgaaaacaaatggtatgcgattttgcagatcaaaaagttcgttgaacgcatatgcatgatgatgccatgactcatgcgaaatgtgaggctggaatatgataacggacaaatgcaggatatgtccatta

SEQ ID NO: 157607 - DNA, 374 bp, Glycine max
  unsure (1)..(374): unsure at all n locations
tctntgagagaacgggcgggatatgctatagcttanctacacacacccctctcataactaagctcacctccttgaaaagcttccttaagaagattcctacagaagctagagcttagctacacatacctctctaatagttaagctcacctccttgagatgagaagctagagcttacctacacaccccctataatagcgaagctcacccccatgacaaaaaacatgaaaataatgacaaaagtccgtattacaaagacaactcaaaatgccccgaaatacaaggctaaaaccctatactactagaatggccaagatacaaggactagacgaaggaaaaacctattgtaatattcacaaagataagcgggctcatac

SEQ ID NO: 157608 - DNA, 363 bp, Glycine max
agcttgggtgttctcccttttgggagagcttcccttggttttggataaaaaaccaaatctgatcttatcaaggcaacttgtggcaataaaatctatgacttatcactcaccttttcacctatttcttgagtgtggtgtcaatatccttctctaaaagaaagctaagtcaatttctaagtctaaaaacttcaaggcaatccatctcgtttccctattcatatcatttggaatcagagccaagttccttaaagttcaagtttgagttttttttcctatgttcaaatcctttttatttttttatttttctagttcttggtcttgagtttgagttcatcctggattcttctctatactatcatggtc

SEQ ID NO: 157609 - DNA, 368 bp, Glycine max
  unsure (1)..(368): unsure at all n locations
tctagccaaatggacttaccttgaattatttcctttgatagcccttttgagccttgtttccctttccttgttttgaagctcactacaagccttaagtgaaaaaccatgatattaccatatccttaaggaattttggagctttggaattgttttgggaataagtgtggggggtttttgtttcattggacaacttgttttgttggctatgcttcatgatgtattttgggccatacttgatgtacattgtatattggttaaatgttggacatgctgaatgaaatgttgtttctcaaaggccaaagagtntaaaacaaaaaaaaaaaaaaagaaaagccttaaagttgagtgaataagatcttaaatggcac

SEQ ID NO: 157610 - DNA, 356 bp, Glycine max
agcttgaagcaagagtttttttgagagcttgagatgagtttgtgagtgattgtgagatcctagaggtgaaggagacatgctcaccacttgtatttttgcaacctttcatcttgttcttctctttgctgtaaagaaggcttcctggtatggaaagctaaatcctttgttggatcttctctgtaggtacctgatgtaaatatatttttatctatttaataattttttgtgagttctctgtgctatctgcttttcactccagtatgcctttaccttgatcacgtaaatgcatgctttgttagggtcattcaacagtggaaactggtctaactctaaaggccttgataggcaggggtaag

SEQ ID NO: 157611 - DNA, 360 bp, Glycine max
catactactttgatatttcttaacaattaaagcatgatccattatcatcacatatatgagataccatgtaaaaatcatagataaagcaagtcctagaattctcataatagaacagctaataataataatcaattcattaaccatttcataaaagctcaatcatcacacactatcatcttcatcagtccatcaatcatcaaataacacaatatttctatgactcaacaagtaacatatcattttcaagtcgcaattatcaatgtacatgtctatctatcacaattaacccaaacacatcccttaacatagcacaattaacccatcttcatcggtccattcctgttagtcaccaccgataac

SEQ ID NO: 157612 - DNA, 359 bp, Glycine max
agcttgagggttacgggtttgggttatttatttttaaaaaattggttttagaatttgtgggactaggttacggattagggttagggggaattgggttaccataatttttttttaccacaaatgggtaaaaattttctagagcctctcagatgttcacacgtggcagtcaatgtcggagcttaacggtcaacgtccaattgaggcgtccgggaccaacattgcaggattttacaaaacagggggacccaatttgtgaattaaattactgggggaccaaatgcgaaactggacctaaggtgggggaccaaaagtgcaatctagcctatgatgtgtcattattttctcctaattcttaaccc

SEQ ID NO: 157613 - DNA, 359 bp, Glycine max
tcagaagagaagatgaagagagtttctctaatgctctgacagcgcaaatatatgaatctgatggactaaataactctgttggatccacatatgataaagtgaaccttatgtctataaaatttaaacaaatgatgaacatgaaaggatatttccaacattcctctacacgtaaagattcaaggttccaaaagaaaaactaggacgaaagtaatgagaccatctactttaagtgtagaaagcttggacacataaaggctgaatctacctatctaaacaagagaagatcctctaaagacctgataaagaaaattttgatggtcacttgggatgaataaaatagtgagcacagttactttttt

SEQ ID NO: 157614 - DNA, 360 bp, Glycine max
agcttaatacctctattatagaccaaatgccctaagactacaccctcatggaccataaatgacatttttcaaagtcaagaacaaggttagtctcaatgcatcgatcaagaactctacagaggctatccaaacatgcatcaaaggaggaaccataaataatgaaatcatccataaacacctccatgcaactttctaataaatcagaaaagatacccaccatgcacctatgcaaggtgccaggagcattgcataggccaaaaggcatgctggtgtaggcaaatgtgccgaatggataggtgaatatggtcttgtgttggtcctttggtgtaatatggatatgcacgtaacctaaaaaaccat

SEQ ID NO: 157615 - DNA, 342 bp, Glycine max
gtgactttttctgcttttattgttgaccacagagtggtacctggagatatgtcgcgggggtcaggagaccttggggacgtcaggtggggtgctattgcccaaaaccaagcttgaccaatcccgacctaacccgggcatagtcggtcagtgagaacctgtgatgtacctaaacaggcgagctcctggcagtcaacagataaaaggaacaaagaccacaaagcaaggaggcttgtggtggctggccagctgtgaattttgtgtgacatgtggattgtggcctctggtaatcgattaccaagggtgggtaatggattacaaggcttaaaaatgaagataggaggc

SEQ ID NO: 157616 - DNA, 351 bp, Glycine max
agcttgggccaattctgttattttgatgatcaaattaatcttgaaagtttgaatctctgcacttgaataattgtgttgtgaatttgggttttgttttgtgtaattagtttaattaggtagattcgatgggcataatcaaggttcatcccttccttctgagtagtaactgtatatattagtggaatttagttagttagttatttcattttgtaccaaaaacaaatttagttacttattgtgtaagttttaggataaaactcttttttttcgcttttttctctcaattgttcttcattcattcttcttcttttcattggtgttcttcctttttcttgcacaaaatttcatggc

SEQ ID NO: 157617 - DNA, 366 bp, Glycine max
agcttgtaggtatttgggaagtatgttgtatgactcttcccaattaccatatacctgctcgagggcccattgttttgccagccatgttttacgatatgtgatggtgtattcgaactcttgtcttacgaatgcgatgaatgtaggaatgattagttgctcgttttcttcaaccatcacaaggatattttttcctacaagttttgaatccatcttattgtgatcttgtgaaatagttggcatgacgcatgtgtgagacttttttatcattgtaatttcccaaatttttagattttttctttcggacgctctaagtttccattggcatccttcagctgggcaacataagacccatgtatcctttgcaca

SEQ ID NO: 157618 - DNA, 372 bp, Glycine max
ttaagaacagaagttgtgtcaccaggaagtttcccagctcttctcttgcgcaagatttcctctcttatatctacaattttctccttataaccctgtatgataaaaattaaaaaagtaaaaagaggtcaatcatatgggaaaagatttgagaaggggaaatgaacaaccatcaacaattcaacatcccttacctgtttcagttcatgctttaattcttgtcttactcgctccatgagggacctctcgctctctgtaggaacaagagggccaaaccccatgccatctgccccatcgaaactactatcaaagagattggcatcactatctacttggtcatcttcatcatcagacattgttgcccctgtaccttct

SEQ ID NO: 157619 - DNA, 363 bp, Glycine max
agcttttgttccttttttataaaaagagaagttctgaaactcatcacgttgtctaaaaaagccttgaggtggatctaagtgctctgatcattcattagcatattcatgttttggtggcatactcaccactgtttgttcctttagggaactcaccataactaaaaaagtgcaaagggacccctataacacccgatccagaagtaagatggataacgaagagggagtgcaagaacagatgaaggccgacctatcgaccttaaaagatcagatggcttctatcacggaggccatgctaaagattcaaaaaaatatagaagataatgctacaacagacgcttccaatacaactagggaagcggaacc

SEQ ID NO: 157620 - DNA, 374 bp, Glycine max
tgcttctacagacatggggttgaatcaattcaaatgacattgtttattacatcttgtcagagtcaaagtgaactggaagtaacagggacatcaacagtcctaaatttgtaaatcatgtgttggcagtagacaaagaagcgatgtaactcgattcatcttttgccccagtttttgtaaaccggttacttccatacttgaccttgacctgatgaaccttaaaagcatgtgcttggttcaaccccataatccgaggaaaataatttttgattggcaatacttcagcaacctatcatggagatgaatgactggggtatgtgttattcggttaatacgactaacttttgtgtaagaaactgttgtaaattgtatacaat

SEQ ID NO: 157621 - DNA, 360 bp, Glycine max
agcttataataatcgatttttttgttgtttttgagacaatgattgatttattcaggagtctttgctttaatcaattatcaggtaatataatccattatttctcttttaaaaagtgtttcagaagtgattaagaacaatttaatcgattatattgagaatctaatcgattacatcgttcttgaaagttttccagtttttgggaagaacactctaattgattgaaatggtaatataatcgattacttcttcgaaacaattgattacattgtatatttaatcgattacaaacggttataactgtttataactattttctctataaatagtcaccttgtgttgtcacttctaacaagtcctaac

SEQ ID NO: 157622 - DNA, 378 bp, Glycine max
tcaagaataatggcctcatcaaacttcttattcccagattgaaattcaaaaaataggcctcctatttttaatggagagggttaccactactggaaaacccgaatgcaaatctttattgaggcaatagacttaaacattttggaagccatagaagtaggaccttatgtacccaccatggtggctggaaatgcaacaatagaaaaacctatagaagagtggactgtagatgaaagaagattagtgcagtacaatttaaaggctaaaaacatcatcacttatgccctaagaatggatgaatattttagggtttcaaattgtaagagtgctaaggatatgtgggacactttacaatttacacatgagggcgcaactgatgtt

SEQ ID NO: 157623 - DNA, 365 bp, Glycine max
agcttaagagagaaaatagcttttcaaggacttgagtaacacacttgtagtgttcaaaattttagaatttgatattaattttgtttaagaaaatatgtatctagaatatttaaataaactcaacatgaagcaactacaacaaaaagttataaatatctgcaaaatgttatcaaacttaaaatttgacgacctttaagactaacttataaaaaaattagtatcgatgaatagaaacaaaattagaagttgaagaccaatcaattaatttcaatagaggaattcttgaaaggaaataatctgattctccaaatacgagtagtcttgcaacaaataccatcacaaagccactttcattgcttgaatga

SEQ ID NO: 157624 - DNA, 380 bp, Glycine max
tgagaaagtccttctgattctgtttatacatttctgacttgatggcatgagatgaaatgcaaagattggatatcctgttagttgttatcaatgaatagcttaaaaacttgtgcttgagtgaaacagtagccgtaagactatggtttgagctactttccttgatatttgtcttatgattaacttcatctaactgtatagttcacattttgttctcctctttgtctagctgcatattctgtgaaaaaaagtgataggtacacattgcttcatctttctcatcatgcaatcaataaattttgatgcatacacctttgtacataaacactgcatatttttccacttgaggacaagtgagttgttctcttttgcttgaggacaag

SEQ ID NO: 157625 - DNA, 354 bp, Glycine max
agcttgttattaggccatttgtttatcaatagtcatagcctccaagtattttatttctttgatgatggcaacaatatgttcaaactttggatctagcgatctaagaattttctccataatttttacattatcaagccttttacccttctctttagttgattggtgattgctaagactttacagaaatagtcaaagatgaactctctttatctcatatgcaaggtttcaaacccaactcttaaagtttgaagatgtaccttcttgacttgatttgtgccacaagtagtagagtattcagaagtccgagtgtcgaatctacaaagactttgtttatactcagattaatacaaaccc

SEQ ID NO: 157626 - DNA, 374 bp, Glycine max
tagaaggctctgaaatttttgcctcatataactaggaaaaatcgtaacaagtttgtggcactctcctattatcaaagagtccaaactgtgaaacgaatgaagaccaatatggggttgccaaatggtattaagtttctccatgccgatgatctccattttcttcaacttaggaaaaacatcaatattctgctgcagaaaaaagtgaatgttaagtgagcagatgaaagacctcaacaattaatgcaattaaacaacaaatgatagtaataatctaagtcaatattaaatgactccacacacctctgcatgttctggacaaaatatatcctccatcatttcacatgcacttacaaaaagggcttgtagattcatca

SEQ ID NO: 157627 - DNA, 366 bp, Glycine max
agcttttctaataggctcttctatagaactaaccctcgggagactaaggagatagagtctcaggttaaagaattgttggagaagggttgggtccaagagagcctaagcccttgtgttgccagtgttgttggtgcccaaaaaaggatggtaagtggagaatgtgtacagattgtagggccatcaacaacattactgtaaagtataggcaccccattcctagacttgatgagttgcatggtgctaatatcttttcaaaaattgatcttaaaagtgcttatcaacaaatcaagatgaaagagggtgatgagtggaaaaccgctttcaagaccaagtttggtatgtatgaatggctagtgatgccttttg

SEQ ID NO: 157628 - DNA, 370 bp, Glycine max
tgtgactcttggaaatttctttaaaaactagtcacttaaaaagttgtgacttttgaaataatcttcagaaacaagtcacttgaagaattgtgacttttggaaatgtatttttcgaaatcagtcactggtaatcgattaccattatattaaggtgtaatcgattacacatcaacagatgtaacttttaattttgaattttgaaaattaaaacgtttaaaagctctggtaatcgattacaagtattgtgtaatcgattacacaagtttaaaatgatttaaaactgtttaaacataagttgtaactcttgaaatttgaaatcttaacattttaaaacactggtaatcaattacatgattctggtaatcgatta

SEQ ID NO: 157629 - DNA, 362 bp, Glycine max
agcttattgggatcgtgattgtggttggaggctaatttagcaatggctttctcgattcgttccatattggacttggatcgtgtggattcggccatggacaacactctcaatgaaggcaccaaagttgttatggccgaaatccctaatctgcaatttcctagaattcgagagctaggactctccagaagcaagatagagaagatgagttttattcattctgccctctttcattacatggtaattgctttatatagtattcttgtgaattgatactaactgaattgaaaaattctggtgctagggcctaacagaaaaaaagctttaaaagattcaagaagattccatcctaacagaattgtaaa

SEQ ID NO: 157630 - DNA, 370 bp, Glycine max
tggcaatgtgctatttaatgttgtagttatatatgtggcaatatatgagttctaaaattagttgttgtggttttatctgggtaaaccatgatgagcaaaggaatgatcaatggagtgtttaggctggtagtgaaggaaccttttaagcaaaaaatgctgaggtaatggttaataattatactttagttttggcttccaagatttaaggacaagattatacgttagacttagatccttctattcatgtctgtattatagaaggaattctctcttgtccatttgctcaaaatgtgatgtctttcagtcaaagtgaaaagatcatggggaaaaaagtgtccaatatgtgagtaggcattgcaagttaattctg

SEQ ID NO: 157631 - DNA, 356 bp, Glycine max
agctttaacccaatctgcttaaatggaaccctaaaaaagagttgtacctggtgatttttggcaaaacatttggaaggtcaatgtggatcctaagtgcaaaaacctggtaccaagagcttgtaagaatattatcccagttagagagaacctccaaaggaagatgcccaacattgatccaatatgcccttgttgtaaaaaggttgaaaaaactattgaacatattttcctcgaaagcaaggaggtcatgagggtttggcttgctaaccggatgagcattcatttattagatcacataccatctttcaaccagtggttagcttcttgttttgacatgaaggatatgatgtttttacgac

SEQ ID NO: 157632 - DNA, 373 bp, Glycine max
tgaccggatgtaagatacatcttcttcaacctttgtcattcttgactccatttcattgaagcgcatatccacttgcaattccaaagtatcaaacctctcaccaacaaaggtttgaagaccatcaagcctttccataatcttcgaaagaagagataaatcttctccttcatgtccttcttcaccaacatttctagcacccttcttcacccaagagccatcatgctcctttatgtaaccaaaggatgctatgtctgaagcgcctataaggaatgatctcttgattggaacataaggttcagaatcaagagggatgttgaaatgttgaaggaaaagggtaacaataggaggataaggtaatgaggcattcaatcgc

SEQ ID NO: 157633 - DNA, 355 bp, Glycine max
agctgagaaaacaaatttttaaatcgaccgattgtaaccactggtatacaaaactatgttctgacgtgaaccatattttttaatccgaacccacaatattattttaaaaaaaagggcgcccatgtttcatatatcacatataaagcataagagggagataagaggtgcatccttaaattatatcgaccataagggggtatatatgatatgtttctgatccaacgacataattattctaaaaatatatatactcctaattctgcttatccaaaggaacaccctataggttaaaccctggtcacaccaaaacaaatattttagcctatagtcctcataaatcacctttcactgtgta

SEQ ID NO: 157634 - DNA, 360 bp, Glycine max
aggctctgggccgcagtctattttttacttgatcatccttttttagaaagcaggtctgcaaatttgacaagggtccaaggagacattcagtcaagtccaatcgacgaagcaataaatggaaattaatacttatagttgcttccgtaatacctaacaatcccgtgtcatgtacatacataatctcactacgaagacaaagcacatcccattactgtttacaacgagagaaaaagcgattaaattctagtttaattgaaccaattgctatcttttcacacagtgcaacttcattccactggtggagttgctttgtttacccaatggactctgctcatctaaagctagaaatatgatgcttct

SEQ ID NO: 157635 - DNA, 355 bp, Glycine max
agcttgttcacaaaaatttgtttttgaagtttgtcatttcaatttctcactaagtaaaatggatcattttcaaggtccaacgccttaaaatgatcacctcttaaagtaaaaaagaatcacttgataagaaagaactacgtaggtctgatttcctcatcgcaattgaggaatacgtatgagcaaagggaaacacccttgtcgaccaaaaaaagagaaaaatataaaaagggtataaaggatataaggacttaaaagggaacataaaaaatcaaggtcatgtttgcacattcgattaaaggctgccgtcccttgggacggacgtgtggggtgctaataccttccctgtgcgtaaata

SEQ ID NO: 157636 - DNA, 372 bp, Glycine max
tccatcaagtggtaatcatagcacaagagcttcatgtaggtgctccttaaacctccattaatttttttgctttaccttctcttccattgttgtttcttcatttttctccatgtatctcctcacatgtcttgtgataaatgtttttaacatgattctttagagtttccaccaattaaacttgctatagaagctagatttgattttctatgggtcaaatttcttgttcttgttcttgaaccatgaattgtgttgagtttaggttcctttgagttttgccttgttattttttgtggctgagacctaaaccataaaattcttacaaaagtattaaagtagaagaaaacctcaaaaatctagagtgacttggtcacc

SEQ ID NO: 157637 - DNA, 352 bp, Glycine max
  unsure (1)..(352): unsure at all n locations
agcttgttactcaaaagatatccacaataatngaatttaaagtttgaggaggtctttggtctaccacaacaattagtaacaaattatgataagttattgttgcttttccatgatgatttctagacaaagcatgccaaaacagaacaaaacacattttttgtccttggagcagcaccgttacagatccgtaatcggagggagggtggatacctaattaaggtgagtccaggttgtggacatgcagggtagcagttcacggcaagtactgcttgcaatcttccattgatttcttcatgtcggtaatcttattgtacaaacttaagaatgaagttgggctgtctttatctttata

SEQ ID NO: 157638 - DNA, 370 bp, Glycine max
tgatatattatttgtggacaaacaaggtttctataatcccaatagaggctataaaagattactcatctcttttcttttcttttgccaccttattataaaagttagtttttggtgcattacctcacgaagagcatcagcataagaactcatatctgtgagtatcacaagaacatgcttgccacattcatatgccaaatattcagcagtagtaagagcaatacgaggagtgatgatacgctcaattgtaggatcatttgcctataatgaatcacagcaacaaaagagagaattttaatgatcagttccttcatacaggtcatgaaatcaaaatttgaaaataacacaatgataatccacaaaaaaaacaact

SEQ ID NO: 157639 - DNA, 203 bp, Glycine max
agcttctcattcgccttgctccagtgcattcctccaccacgcccaaccccataccagtccctcgccactccacctctgttcctgcacaaatccagttcaccccatcatcgtatgaggaccctgtcggcgccctgttcaaactcactcagacggattcagtgctaacatacccgatacgagctgaacacttgcctaatcacaat

SEQ ID NO: 157640 - DNA, 186 bp, Glycine max
cgaaggcgcgcaacccatcattttccatactagaatactggtaatgtgtctactatcattgtcatcattcttttcgacattgaggtgcacctcgagctgccaggctctccacctttgggtgtattcctttgaaagatccccgccccccttttgcacctctctcgtacctgtatcccatcataaccc

SEQ ID NO: 157641 - DNA, 357 bp, Glycine max
ctgatacagaataagtgatagaagatgatttgatgtcatcaaaggaaggccatcctaaagctgaaaaacaaaaaccagccttggggctttcactttcccactcggcaccagaaaccagagattcatgagatccctacattcaattttcattagtaacaaccaacaagaagtaaacatatatgggagttgggatttgctagcagccaatattagtattcctttgctattccgatcttcacaaatttgaagaaagtgtagcctaccacagctcgcgatgatagccaataattaggtataacttccatcttttattattaaaatgctatcccttgaaagcctactctttgtatttgatct

SEQ ID NO: 157642 - DNA, 321 bp, Glycine max
  unsure (1)..(321): unsure at all n locations
tgactcagaagtgcagagaggacagagatctgtatggagagccgcagaagaacatagaccacatactcttgcaacaggtgaatatatctgaaacatggcaagctgaggaactacgttgaccaaggcatcaagatttccttcaagcgttttattttcacgagatgaagataaatgcggggccacctcatggactnctctaagataaatagcaatatatcgtgcactaaactgttgggaggtggaagccatcttcctaatcaacatccgtagcctcagcagatgtcatatcaccaagagctccaccactggcagcatcaaaca

SEQ ID NO: 157643 - DNA, 427 bp, Glycine max
agacacctgcggcatgcaagcttagaaagttgaatgcgaacttcaactatttgttctctctgccacacacgatagggtacgagctgaaaaacctgaaaaagctatcagtgaactccaacaagctggtgttccttcctcggtcgacctctcacctgactgcactgaggattctggacgcgcgtttgaactgcctaaggtctctcccagaagacctggagaatctgataaacctggaaaccctaaacgtgagccagaacttccagtacctggactccctcccctactcggtgggattcctcttgtccctcgtggaactcgacgttagctacaacaagatcagggccctgccggactccatcggatgcctgaagaagctgcatataattaccgtggaagggaactctctgagttcccccgccccggagct

SEQ ID NO: 157644 - DNA, 371 bp, Glycine max
caagaccgaaaatagctcgagcaaaacatgcttatatactttcagtagttacgcatacatattgccataattcagtcttcaatgatgtgcatggacagaacttatagcaatctatacttccacacatccgaatccaatcgtctttcccaaccaaagaggtgctgttctttatttgctaacacatataattgctaaatgttctttttcttgcctaggttgtgtgttattttaatagtgtgtcgtccatgtatatataattcacttaggctatactacgattcttttatataatatagaggaatttagatcataattcgtgagagtacgtgggaataatgatctaacgtgaaactacatgctttaaaggaaat

SEQ ID NO: 157645 - DNA, 411 bp, Glycine max
agcttaatcccttgaaaattgaggaggatattttttctttattcagctagggactactttccttagcacccttatgttcaatatgttggataaataaaaatagtttttttttgctatatgcatgataatttcgatgctagttatcacacaaatgtattatacaaaagtccctatcacataaagagtggctatgcaatttataatgcatcaagaagttttagattacgtggctacattctttggaaccaaaggcatcgcatggaaaaattactacatacccatatctaatgggaatttctattttcctacttggcttttgtgagggagatgtcaccacacgttatgcaggatggtggaagcagccaatattggatcatcatcgtgattttgcaaaaatttactttgcgaaag

SEQ ID NO: 157646 - DNA, 469 bp, Glycine max
  unsure (1)..(469): unsure at all n locations
gacctataaaactaagcttaaaaagtgggtcacttataatataactcattgatttgccaagataactaacggaaaaacgagagtgtgtaatgattattggttttcgtcttgtatgaacatcctatagtaaaatatacatttctctctatatgattaactntggattttgagtcataccttatccaaaactaggcatacatgaacttttatactggtaaagtttataaaatattgtcatatgataagtataagttatgcaatagtattataagtactctatagaaggaaaaaaatgtaaacttgagttttaatataaatttttaatcagataaatatatttatgtataaagttcggtttgggttggattagattgaatgttataatgaatctcaaatctgatttatccaaaccaatgagttgttaatattatttgtcgacttggctattgatttcaatttttgctgatta

SEQ ID NO: 157647 - DNA, 421 bp, Glycine max
  unsure (1)..(421): unsure at all n locations
catgcaacctncttagtctcaaaagatgaaccggattttgnttttacctcattcacaccacaaatgactatggcatcatttctggcgctaaactgctgggagttggaagccatcttctcaattaaatttctggcttcaacaggagtcatgtctccaagggctccaccactggcagcatctatcatacttctctccatattactgagtccttcataaaaatattggagaagaagctgctattgaatctgatggtgggggcaactggcacattgttttttaaatctctcccagtactgatataggctttctccactgagttgtctaatacctgagatatccttcctgatggttgtggtcctggaagcagggaaatttttttcaagaatactctcttaaggtcatcccagctcgtgatggacct

SEQ ID NO: 157648 - DNA, 353 bp, Glycine max
acttacctcttcatctcttttatggtaaagttgttgacattgtgcatggcacaataaacaaggaaaaaactgctgcctgctcgaacaaagaagctgctttcaaggattctgcagaccaatttgtgatgtccccagcacaaactgctagacatgaatttttagcatgctaaaaattgtcctaccccaccccagcaactgcaagaattaagttctattggaacagtaaatacagggctgaaaactgtaaataagactgataaacttgtgcccctatgaagatttagtttctacattctgttcaaactaaatttatataccagaagttaggttgactaatctttctggatttatat

SEQ ID NO: 157649 - DNA, 441 bp, Glycine max
  unsure (1)..(441): unsure at all n locations
ccgcntatgcttaggcagcttatgtgcaacaatttatcaagtgtatcttatgttcaattgtactgaaacgctctatggcaccccatagaatgagccaaacgacttcagatccaatatcgagagtgtgtaccctaaagaaataaaagacacaacacaatagtttgaaatgcaaatcatcaatccaatgtttattaatgttgcaatcttggtttacaaaggactggaagactttggagatcccaaagagtctttggagtacaatcttgtattgattcctctagcttgcccaagggctaagcataatatcatttgacgatattggaattcataagcgaaggcaattcttcatagtccatgctggcaaacaccaatgctcctccacaaaatgctttctttacgacaaaaggtccttcataatgtaaagcccattttcccctatgg

SEQ ID NO: 157650 - DNA, 363 bp, Glycine max
  unsure (1)..(363): unsure at all n locations
ctgtagcctnatcatgaactatttttgtactatctgtcaattctcatatagacacacacacacacatctctcagcaaactaaggctgaggatcctntgtgtgtgcatattttcatactcaaacatttcaagttggtatcagagcgggacgatcccgctctgcgcttttgtctctgtctatcactgatcaccatcaccaccaccactgaccaccgtcaccgatgccgccacacctatcttcgacaatacccagatctgggtcgtcttcttcagcgcatcccaaccgcggaggttttgaagttagaaacattaacatgcactcccacgcaccacttctccacgtgttattcttaagcgtgtgcat

SEQ ID NO: 157651 - DNA, 442 bp, Glycine max
ctatagaatactacacttccttctagtcatgcattgaacacgcaagtttgtttatatattgcagaaggacttgttgtaactttaaaccaaacataagcttaatcctgaatgtaacctaacattctgcaaatacaaggataggtacaaaacaaaagtgctatcataaatcagaaattaagtaataaaccatacacacctacaactcgatactatcaatcaaattaaatgcatacaaaagtgacaccacctactcaaacctttaaaaaaatagaactcctaaactaaaagtagttacttaagagaacaatttattctcgccttgattgaagattcagactgctgtatcttgtgaatgtgagtgactggtgaaataaccacacctttcaagcttggatgtggtgattccttaagtgctccctctgcaaaaattgagcagcagcat

SEQ ID NO: 157652 - DNA, 411 bp, Glycine max
  unsure (1)..(411): unsure at all n locations
agcttcttatccaaggcacatattatttgtttaanctccttcttccatggcttattccctagtggatggtgcctcccctctcatcttctcctttgccttccgctgcatctacatggtgaaaaatcaccattgaaggacctcattgaagctcaaagatccaacctccataaaagctccacaagcaagcttccatcacttacataatggattaagtaacttccttgtttcttaaaccttgtttcttcctgaactaacatattgtgcaattcaggcacattgcatttatctttcatggcactataacttatttgaaatggaccatactcagatgatattgagtttaaaataagctaagcaagacgttctcattcataacccttcctaagggcttaagtctcgctgcaatatttg

SEQ ID NO: 157653 - DNA, 318 bp, Glycine max
  unsure (1)..(318): unsure at all n locations
ntgaatggtcatcgcttcattctagtggcgttagattatntcaccaaatgggtggaagcggcttcttataccaatgtcacgaggagtgtggtggtcagattcataaagaaggaactgatttgtcgatacggactccctatgaagatcattactgacaatggcacaaatctgaataacaaaatgatgcagganatgtgcggtggtttcaaggtccagcatcataactccaccccctatcagccaaagatgaatagggctgtggaggctgcaaataataacattaagaagattattcagaagatgacgatgtcatacaaa

SEQ ID NO: 157654 - DNA, 362 bp, Glycine max
cttaatgattaagtttgtatttgttaactttgatcgacgcgtgaatcttctctccaaagatcttacattttcacacaacaaatttatggtgaacaagattcacattgtctttgccgccatcttcttgtgagagcgtgttagactattgatatgataaaacaatcggatactagttgttataatttaaattaaaattataaataattttgaattaattattcctctgtttcccatatatctcttatatactcacaatctgatttgaataaactcctaaatatctcattctttcgaagaaggggtaaattagtaattggaacgtgcacaaaaataaaaagggtgttgatagaaaaaaggatcct

SEQ ID NO: 157655 - DNA, 415 bp, Glycine max
  unsure (1)..(415): unsure at all n locations
cgcttaagacatgcaacgaaggctactatttttcttgtctcaaccatagactattgctctttntagacttaatgaagaaacaaaaagagggaaaggtaatcttggactcgacatagttgctcctattcatcactataaattaatacgtcaccatgattttggtaatgctttataattcactaaacattagttcacgccaaaggaaaaaggtaattgactatttaaatgctcttcttttttttcaagcttttgtcttaatcagaaaaaaagattatttttatcaaaactttggacaaaacacaacatcaatcactaactacatgcaaatagctgtgactatgtaagccaatgacttgcatcagtcattcgtaatttattcctctaaaagcatgtgaaatttgaattgaacaaaaaa

SEQ ID NO: 157656 - DNA, 419 bp, Glycine max
  unsure (1)..(419): unsure at all n locations
agcttccatcagtaacattctaatagcttttttcttttttttagcataagnnncttcataatctgttccttcctcttggttatatcctttagccactaatctagccttatttctaatgactattccatgttcatccaatttatttctaaatacccatttagttccaataattggatgatcattaggtctatcaactaattcctatacttgatttctttcaaattgatttaattcttcttgcatagcaataatccaatgttcatcaattatggcttcatttatgtttttaggttcaattaaagagacaaaattcatgttattgcatgcatctttaagagagtgtcgagttgttatcccttttgagatgtcacctatgatattatcaagagggtgttaccttgaagttctccactccgttg

SEQ ID NO: 157657 - DNA, 318 bp, Glycine max
  unsure (1)..(318): unsure at all n locations
cctaaagaagctaaagcttagctactcacacatctctaatagctaagctcacccccatgacaaagaaacatgaaaatacaaaaaaaagtccttactacaaagactactcagaatgccccgaaatacaaggctaaaaccctatactactagaatggccaaaatacaatgcccagacgaatgataaacctattctaatatntacaaagataagcgggctcatacttagcccatgggctcgaaatctaccctaaggctcatgagaaccctanggccntccctttgatctctagcccatctacttggagtcttctacccaat

SEQ ID NO: 157658 - DNA, 416 bp, Glycine max
  unsure (1)..(416): unsure at all n locations
gcttgagctcactgttgctgccccacaattttcncattatatttgtcacggccatgctcttccttgcgagccctcttggtttcttgatcaagggcttttgcggtagctgcattttcttctcgtaacccggcacactctttccggacgtctgtagcgaccaacttgaatttttctttggcaagtctcgcttttcctagttcggttttcagagctcggacttcgtcatcctcctccggagcttcgaagttctctttgttgataatctttaacttgaagagccaatctaaaccccgtgtacgaactttcagccattcatgataacccccaatgatgccattacgaatgcccctaagttctttatctttccttaacgggctttcccacgccttatggactctntgtataaccttgaaatt

SEQ ID NO: 157659 - DNA, 284 bp, Glycine max
  unsure (1)..(284): unsure at all n locations
actcaatgtgacacaggatgtgtattgctatgaagatgtttacacgctgcctatatatctacaagaacctaatgcatagagtcgtaatccgcaacattataactacaataatgtcgcagacctgatcctctgcaccacgatattttcatgaatatcaaccttgtcgctacacatctcatgatgagattgactaacatgatcantcattctggacatagagctatagatcccttacacatttataggctatcgtggcattgttatgtccagaaagatttgacttc

SEQ ID NO: 157660 - DNA, 293 bp, Glycine max
aacataaagtccttaaacccatcatttatcttgaccacattctaccaattactgtgcataagagatcagacaccccctcaccccctctataatctcccccatccacaagacagaaacatttagggcgaccaaaaacaccatgcgaagaaaaaatatgaccaatatcaaacctgtaaaattaaaactagaggcgccaggatataactcgcagctgattgtcatcagatgactacgttaatgaatataaaaccatatatagaggccgcatcaacatgaagacacgaaaaaaggac

SEQ ID NO: 157661 - DNA, 420 bp, Glycine max
agctttgatctatgttatagattgtttaactagtgattaggagaaggatctaagggtttgcttggaagacttaaatcatgaagaaaatattcctacaagggggatcggttttgaagaattgaaaaaaagaggtgcatccgagaagaccaaggtggagctaaagatcctacctagccacctgaattgaaaagcggacgcaatgcgctaagcgagctcttatcagtggatgaacaaagccagctgcactgagcgagcaactcccacttaacgcatgcataaagaagaatgaactcgataagcacaacatagtgcactgagcgagttcctagcatatggagaatagggcctggcgaactaagtgagcagcagggtgctcatgaatctggatgaactcgcttcgcacgcagctagcactaagca

SEQ ID NO: 157662 - DNA, 382 bp, Glycine max
  unsure (1)..(382): unsure at all n locations
tcatgganaagatattcaaatgaacaaatcgaaatcttctaacgtagaaagacaagaaagatctaagagatacacggttgaaccagacaaaaatttaaagtgccaagatctttttagtttgcaaaatcatgatgtcctggcgatcatttgttattattaggtgggtttgggctcccttcctagagaaaggttcaaatatatgagtccattatgtctcactaaacctattggaaaggggtcaacattgggagagaagtgagcctcattagagtgagacatatatcaacaaacaccaatagagaagagagaaagaaaacccatcgtgatttttgcacaccaccaaacagtcacttttctgatagtaacttcatattcattcacc

SEQ ID NO: 157663 - DNA, 275 bp, Glycine max
gaccatggcatcatttttggcgctaaactgctgggagctggaagcccttttctaaattaaattactggcttaacaaagaatatgttctccagggctccaccactgccagcatttatcatacttccctccatatcactgagtccttcctcaaaatataggagaggaagctgctattgaatctgatggagggggccactggcacattgtcttataaatctctcccacccctgtaataggctggctccacagagtggactaatacaagaaatattctt

SEQ ID NO: 157664 - DNA, 416 bp, Glycine max
  unsure (1)..(416): unsure at all n locations
tactaagcttgtatntaatctttncaagattttctccaattcttctttatagctactattgcctgaacctaaagtagataaaggtgaaacaagacaaaataccagttattcttaacaattaataaagcacaaactaaatttcaaatagccctcacaggttggtgaatatatagatacaacgagaattatattgtccatcttatgatcataataattcagaacatagggcccaggatattagcatttttattaataaggaatctaatattgttcattaatgaagtactaaattaataccttctaatacgaggtagacacaataggaaatgtaagatcacaacagacccctgcagctatatgagatataaatatattatttgatcgagttgaatattaagctaaacagtaaatacctt

SEQ ID NO: 157665 - DNA, 361 bp, Glycine max
cacccctctaatagctaagctcaccttcttgagatgagaagctagagcttagataaacacacccctataatagctaagctcaccctcatgccaaaatacatgaaaatacaaaaaaattccacactaaaaatactactcaaaatgccctagaatacaaggctaaaaccttatactactagaatggttaaaatacaaggcccaaaagaaggaaaaacctattctaatatttacaaagaagtgtggacccaaccttggcccatgggctcagaaatctaccatgaggttcatgagaaccctagggccttctttagcagctctagcccaatcctctttgagtcttgatgtagctcctatgtggagc

SEQ ID NO: 157666 - DNA, 460 bp, Glycine max
  unsure (1)..(460): unsure at all n locations
nntgctgattantatatgcttacgagaggattctaattggtctgacaagaggcacatttaatcatctcgcttggacgaatgagaaaactggggcaaatgaagagggtgaggatgacggagaaacccatgctgtgactgccattcctatacggccaagtttcccaccaacccaacaatgtcattacttatccaataacaactcttctccttacctaccacccagttatccacaaaggccatccctaaatcaaccacaaaacccacctgccacacaaccaatgcttaacaccacctttatcacgaaccaaaacaccaaccatggaaggaatttgcagcataaacctgtaaattatccaattctggtgtctatgctacttgctcattattacttaaactgcaaggagccataaccctgcttgtttctcacctcatttttcgagatccactcaatgcatgtgtc

SEQ ID NO: 157667 - DNA, 408 bp, Glycine max
  unsure (1)..(408): unsure at all n locations
agctnattaagtntacatggatgtctaattttatatatggcttcactacgggaaggaagttttaatccttggacaatntagaccagggtattattaaattatgaactccaaatatttgatttacgctttgctatggatatattcttttataacttatttagtagtttgccacattctaggttgtctgatgtgataaaaacctggaatgaaccctatgacatttctctgtgtgatgttccaaacaacaagttcaaagtcccagacttagttaatctttttgccgttctcctagaattaaataagcacaaaataattaaatgaaaattgatatttataactgaaactaatatcaatgtctaatcgtctacccattaattaaatttcctcaaataagttgaaaacaaacac

SEQ ID NO: 157668 - DNA, 284 bp, Glycine max
gcgctgcagcttactgggaggggtgtgcttttttgccaggcacacccacctgttaattggaaaaaaatctccctgtcctccaggaaatacaaacaaaaacttctatttaataaaaggttgagaagataacccaccactgagcatgagagtaacgaatctaatgtaagaataacatcataaggggaaaaatgcaagggaggtgttactcctaacgaataaggcaggccaaggaagctactggaaatcaaaaaatccggaggaaaactacatcctacgaatatttt

SEQ ID NO: 157669 - DNA, 318 bp, Glycine max
accagtagaagattcccgcatgctccaagttgatgtgcagccctaacaccatctatatctgccgttctgctccttgtaccgagcacaacatatatgtgtctctggcgtgctccgcgttatgacaaacagaatgactatatcgcagataaactaaggagattttttctggacaatacagtgagttatgactgtatctgtcatttgaaacttgtaataagctataatataaccatacaaacatacattggcaaatcagataagaccaaaatggagcccgagcactactgaggcaaaaaataggatttaaaacacatggct

SEQ ID NO: 157670 - DNA, 221 bp, Glycine max
ggataagaggcattgccccccttttatgatgaccattgctgtgacggtgtcaattgaaggcctgacatgataaattgatttttttggcatatcccgcggtgattgcccaaccacggtatgaccggaggctgtgccgttattggtttgaaacccgatcttactattatgtcgatttatccaagatttaaacttgccaggtttaaaaactgtgttgtggcttt

SEQ ID NO: 157671 - DNA, 418 bp, Glycine max
  unsure (1)..(418): unsure at all n locations
agcttcctcggggccatttcctgttaatgtttacattnggaaagntagttttaccagtgggacactattcttaaaacaaaaatggcatacaacctcctcccataaatacaaacatcaatgtcagtttaaagcaagcttatgcacatatttccttaccaacgttcacttgcacaagacatcctattaactaagaaaaatgcacccatatacaatcaaggtagcttcattacctagattatttacatgtgcttccaaggtgtatttgttacttacatcacacacatctccttggctggatttacatacatgcatactcaaagcattttggggtaccaaaaattgcacatgcgctcatcttggtatttctaatacctatacatatacaaacttcatgatgaatcttgactacctacacaat

SEQ ID NO: 157672 - DNA, 412 bp, Glycine max
  unsure (1)..(412): unsure at all n locations
agcttcgaagaaaacaagtagctgtttggttggagctnngngtngngtaagtgtgaagatataattccaaagtaaaacttgtttttttttactttaacttgtttgtatagctagttgacaagttccagattagcctatgcagactaaaatggattttattttgttttggagttggtcccaactcttggcaactcttcctcttccaaatgtaagaataaccatactttgtcattttttcagtagctactgcacaactgatgtttcaccacatgctagtatgcaataattagtttgcacgtgtactatatagtattagtataatccacttgtttaaaccacatgtgttacatattctaaatcctatcatcttgtggctttgatgtctagagcattgcatggtatgaactcatca

SEQ ID NO: 157673 - DNA, 356 bp, Glycine max
acaaaccactgaccctagcaacaagtacatatatctggttcaatgtccagttgggttaccaaggcacatagttttataaatctctcccaatattcatacaggctctcttcactgaggtgctaatacctgagatatcctttctgatggttgtggtcctggaagcagggaaaattatttctaagaatactctctttcagtcatcccacctcgtgatggacctttgaacaagggaatacagtcagtcctttgcactccctctaaaaatagagaaagccttcaaaatatatatccttctggaaatctgggtttatgtggacagacaaaaaaatcctcaatgttggcgggcttactgcaag

SEQ ID NO: 157674 - DNA, 292 bp, Glycine max
acctgctcggctccgactggtcttttcttccctccgcactggatactattgctccccatgagctcccaaatttgtccggccatcttttcttgcagccctctggtcttgttcaagggctatgggaattgattctttccgacccggacacttcttccaacgtgtgtacggccaactgactttcctggcaggttgcctttctactcgcttgagagctggactatctcctttccgggcttaaactttttgctgcgactttactgggagcatctaacctgtttgaacttagcatcgg

SEQ ID NO: 157675 - DNA, 424 bp, Glycine max
  unsure (1)..(424): unsure at all n locations
agcttgtaggattatggggtacccatcatagtggttcttgtggcggncgggtgatggngcacaacaagttttccacatccacaaatcgcgcataaacccaccatcccctattgcccacctccaactgagcccacgtactcccacatagcccatatcctcgtttctctcaataatgggtccccatcaatcctcccaagcttccccaacatccaagaaatcaacatccaaaatcatcacaaactaacaaaccaagcaaaacagggcaaaggcagaaaactctgcctaaaaaaccaaccaaaatcacaacttttcccacttaaagaccccaataacatttccttcgttccaattcgttaaccgttggatcgactcaaaatttttactggaagtctctagtacataagtatacantttgaccgttggg

SEQ ID NO: 157676 - DNA, 472 bp, Glycine max
  unsure (1)..(472): unsure at all n locations
ntctgattatggatcaatctcattgtgaatgtggaatatccaagtggtcttgaaccatgcatgcccaattgctaccctaatgaagtttccctagtgcaaaagagacccacaactatggagttacttcatgacaagtatcttagggaagaacatcttcctgttccaatttctcaattgcgggttcctttgactagaaatggacaagaccaggattcccctggtgggcacaatgaaatggggtctgattatgatttggaggagtttagcaccttgaatatcaccacaactgttctgatttatctaaacagatccatntaacatgaaagatatgatgcagcttgaattttgntcattattagtacataaaaaaagttattcaatgtgaccgtattctttgacaatattagcctttgttgtcaattgtatttatctggtgatgaaaattgtgctcttatttgtgataaatacactg

SEQ ID NO: 157677 - DNA, 423 bp, Glycine max
  unsure (1)..(423): unsure at all n locations
agctttgccgatttagttttcgccagggatatgtncgtagttaaccngaaaagaggcaaattngattatcctactttgatgaataggaagtctagggcaaatggagagagtaagaatgagggaggaacccgtgctgtgactgccattcatacatggccaaattccccaccagctcaacaatatcaatacttggccaatatcggtccttctcattacccaccaccctatcaaccaagaacactcaatcatcgacaaaggccacccctaggtcatccacaaagcccgccttctacacatccaataccaaacaccacccttaacacaaaccaaaacaccaaccatggaaggaattttccagcaaagaagcctgtagaattcacgccaattccggtggcgtattctaatttgctcccatatctactc

SEQ ID NO: 157678 - DNA, 471 bp, Glycine max
  unsure (1)..(471): unsure at all n locations
gacctataaaactcagcttagtactaggtgtactgaaaataatagataattacttatgcagattctgccaaacccaactacaaaaatatagcccaataagagaaatgtgcactgtccctgccataacatagtgcattccaccctccatatntggatatcaagactctagcccagagctgattctgattgtttgccaattcccacccccatttagcaggcaaggcttcattaaagttggacaggtctttaatcatgagccctcctttgttcatggaaagacacacagagtcccaattaacccaggcaatcttggctgcctcagagcctcctccccataaaaacctcctctggatagatactaccttatgcaccacttntttatggaatttaaagaaagacaataggtnaataggaagggcgtgtaagacagaattgatgaaggatatcctgcgctccatagataggcatctc

SEQ ID NO: 157679 - DNA, 418 bp, Glycine max
  unsure (1)..(418): unsure at all n locations
agcttctacatcataactnttaatctgcctatggcctttttccaatcaggggtagttgttgctcaagctgccatccacatcaactctttcatgtgtgctctcggatacttcttcttccaattaccatacaaatgtttcacacacagacgatgttctacattccttgattaactcaaccaacccctgaaaaaaatagtgcacaaattaaatgaaagccccaattcgaaaccacttccaataaattaaatatttaccttttgttggtcagaaatgaaagcccaacatccttcctaaataccatctaagtcagctatcaagagatcaacaaaccacttccaagatgaataattttcagattccactacagcataagcaataggaaacatttgattatttccatctttacctactgcagtca

SEQ ID NO: 157680 - DNA, 356 bp, Glycine max
  unsure (1)..(356): unsure at all n locations
ctaagcttaatgtggatattncagtagcactacaaaagtgctctgattgaccatcaacactgaccccgctattctgcacactacttttatcatcctgtgactttgtgtagaaagaatactgattgatatcatatcccttccaagttggaacattcatatttggacccacagctagcaatcttaatgtgtctgaagcactgtcatcgacgaagattgtttgtctaaaccacgatatgatagttctattgtgctcctgcaacaacctcatcatgttcatttttgggtgaatacgacacatatgttgtttgtgagcatctatgtaacggattacctcanctgggttgtgtatacatata

SEQ ID NO: 157681 - DNA, 440 bp, Glycine max
  unsure (1)..(440): unsure at all n locations
agagcgacctgcggcatgcaagctntgttgatcacaaatgtatggggagtagttaattattgnnngagatccaaaatcatgttcaaagacattttaaccattatggcagcattgagttgtgcaaaaatgaaaaaaaagttttacaatttggtatagatccatacttttacattgtactttaattcaaaaaatttatctcaatttcatttgttttcatttctttccggtctcctaaatgatacctattcaacgaagctacacattagttcatgctgcctattttgtgactttttcgaaatttttaaaagaaacaagttgtattttaaaggaagagaaataaaaatatctgtcaaaagttaaccttttgtatacaccttatttgtgatatgttgttaactaagtttctcacaaaaatattgcaaccatatttaagttgttga

SEQ ID NO: 157682 - DNA, 368 bp, Glycine max
aaaaaaagagctcatgtgcttgtaacgaaggagagggagaccaaaaagaaaaagcttgtgcagtaatttttccattgaatctctatctgcaacaaagctttgcaaagacaaagggtactggtaaaacgggttttctacgtttaaaccctaggccggtcggtttttgaccggtttaacggtttcttattggttctaatgcaagccggttatatgagtattccggatcggtgaccaagtcggttcactgatttccggttcaaccagttcaatcttcaaaaccatgatatataacaggcaatactcaattgtctatattggcaactaataaaaaaaaataacaggaaattaggaaaataaatattcctaat

SEQ ID NO: 157683 - DNA, 414 bp, Glycine max
  unsure (1)..(414): unsure at all n locations
agctntgcaaagggactacagacttggagctcnatttctctagnnnggaacctgagcaaaagccacaagcaaatggagttcatcacaagacatctcgcatctattagactatattaatcacaatcctttgtgattcaccatccaatctcacttgtcaatggaagagagattttattgttgtgcttgagcacaaattttcatttactttttgagcttccatactccactttcaccttcgttcaccatgtagaactaatcattgaaaaaggtgaattctaatgatgaggcccttactgttgctgctaatatggccatggaagtctacaacgaccctcctccatcctaagagtnatgtaaaattattgagacaaatctactcagaacacgggaggcacttgctgaagctctntaatg

SEQ ID NO: 157684 - DNA, 414 bp, Glycine max
  unsure (1)..(414): unsure at all n locations
ntgactccacaaagcgatgagaagtgctcctcttctttctatntcaatcgcatgactatgggtcttcgggcttatgtgtaacgcttcaattggaagaaaagtattcgaaactgagacatgtccgtgcttcttgcttaatcgacttgctctgcgagacgctgctgtgtggatcataatcaaattactgtgagtgtgtgctttctcttgcgctctcacgtagttcggagtaacgcacatgcgtgtgtgtctatatatatatacactaacacttgcccgggactgaataacaggtcatactcatagatgctgcactccaaactatgatctaaactaatagacataaaaaccgtggctaggcgtttctctctcaacgaactccaattgtcgaagtcaatcggccataacaatcacatc

SEQ ID NO: 157685 - DNA, 266 bp, Glycine max
caaaaagcaaaagaaacccaacaaaacacaacacgcagaaacaaagggaaggagaaaccggagaacacacaacaccaacaacagacaacaccccaaaataaaacccacacacaaaaaaccagaaaaaacggaaggaaatgcaacgccacgaaacaccccggcccacaaaccacgaaagagccccaaaaccaccagcaaccatagaaaaagggggcaaaccccaccgcaagcgcccaaaacccaagaaacccccccaaacgcaaccc

SEQ ID NO: 157686 - DNA, 408 bp, Glycine max
  unsure (1)..(408): unsure at all n locations
agcttcaccaccaagaaagtggctgngtattttaagctcacagaggaagcgaatcagagagagagggggggcgtgggaattgaaggaaattagggagagaagttgaactttgaagtgtgtctcacaagtttcacattcatcaaagttatgacaagtgttacacatgtttctttttatagcctagcacatgggaagcttccttgagaagcaaggaaggtagattccttgggaagctagaggaagaaagcttccatgagaagctagagaggggctactcacactcctccaatagctaagctcacccccatgccaaaatacatgaaaatgcaatggtaagcttccttgacaaggaaggtagcttccttgggaagcaaggaaaaaagctttcttgagaagcaagaggggggc

SEQ ID NO: 157687 - DNA, 403 bp, Glycine max
  unsure (1)..(403): unsure at all n locations
cgacggtnttacaaatctcaatatacgtagtccagtgtgagtatggatcttcatttggtaaaccatgaaacaaatggctctgtattaggctgtatcaatgaaggtgggtaagttaagttttgtgtctgaacctctgggcgtgcaacacttgaaaaatattgcggcaccgaaatacttgagtaatcttccaaggtcactcatcgagggtgctctttagccatgacttccgcttcaaattatgctgtttgagattccctgtgtgttagtgaattagaagatgatgactcaaaaaagtgagcctcttcaggatngatgctactgttctatcgtgcaaagctttcttttctctctgcgttggtcctctaaaagtggttcaatttctaaatcaatgggacaattcacc

SEQ ID NO: 157688 - DNA, 402 bp, Glycine max
  unsure (1)..(402): unsure at all n locations
agcttcagaccaaagcaattataatctattatctaaaacccctcaatttagtggattttcaaggtttgagaatggggtaattttggaacaaactctcatctcaaacaagtctataacattaatctaaactcactcaaactggttttacaatgaaaactctaccgaatcaaaatttgactcctcaacacccaatttaccctaaaaatggctcttgccttcactttggtcactcattttcctcctttgcacagcccaagttttcccacagtcctaaatgacatttcaaactatgattaactcactttaacctccaattaccactaaatccagatttagcttttcagatcctcaaagcatcacacttttccactcatatcactacattctcactttntaacccta

SEQ ID NO: 157689 - DNA, 327 bp, Glycine max
  unsure (1)..(327): unsure at all n locations
atgnaggcatctagatgcataggtaacatggatacctctctggccttgaatcacaaaatgtaccgtgagcaagggtttatgagtatgtgcttcatctgctgtccaccatacatagctttagcctattcttgcagcaaccttgaacaatctgaacaatctcgagcttatgctgcatattgttactatagacctcctcaacctcatcagctaaattaaccacagctgaacatttatgacctttccagcgacaaatacaaccctggatggatgaatcaccctaaccttaaatggtccagccctcatcaacagcaacaatatcctgctcct

SEQ ID NO: 157690 - DNA, 422 bp, Glycine max
  unsure (1)..(422): unsure at all n locations
agctntgagcaaattcaaacgacaataacttttttactcggaagtcggattgagtcccgttatatatccagacgctcgaaattgaatgttgaagctctgagcaaattcaaacgacaataacctttttactcagatgtcggatagagtcccgtaatatattgagacgctcgaaatggaataccgaagctctgagcaaattcaaacgacaataactttttactcggatgttcgattgagtcccgtaatatatcgaaacgctcgaaattgaatgttgaagctctgagcaaattcaaacgacaataaatttttactcggatgtccgattgagtctcgtaatatatcgagaagctcgaaatggaataccaaagctctgagcaaattcaaacgacaataactttttactcggatgtcttattgagccc

SEQ ID NO: 157691 - DNA, 317 bp, Glycine max
tcaacattcaatatcgagcatttcgatatataacgggtctgaatctgacattcgagtaaaaagttactatagtttggagttgctcagagcttcaacattcaatatcgagcggtttgatatattactggactgaatcagacatcagagtataaagttaatgtcggttgaattatctcaaagcttcagtattcatttcgagcgtctcgatatattacggaactccatcagacattcgagaacaaagttactcgcgcttgaatctgctcagagcttcgataatcaatttcgagtgtctcagtatattacgcgactcagtc

SEQ ID NO: 157692 - DNA, 193 bp, Glycine max
acgagagcccggccaccagaggaagatgcgtcctagggacacccacgaacaatacaccaaccaggaagaaccaaaccacgaaaagggagaaatacctaacctgacataagcgcgacccccacagcaaaagatgccgcaaatagcgtgaacgaacgcagggaccagacaaagacctgagccccgcaacgtaaca

SEQ ID NO: 157693 - DNA, 421 bp, Glycine max
  unsure (1)..(421): unsure at all n locations
agcttgtaaaggattgtatgaaataagtgtttattattgaaagaatgaattaattgaaaatgcaaaacaaagccttgcttttatagactcttcatgtctggtcaagaagaccatttagaagagttataacttttcgaaaaacttaaaaccaatttgaaaaagtcaaaacctttttgaagagttacatcttttgatttattcagaaacagtcactggtaatcgattaccaaatctgtgtaatcgattacacaaggcttttatgtgaaaggatgtgactcttcacatttgaatttgaatttcaacgttcaaagacactggtaatcgattaccaaaacattgtaatcgattacaactttttgaaattaatcggaacgttgtaaattcaatttgaaaactntttcaaaacaattttgctactggg

SEQ ID NO: 157694 - DNA, 386 bp, Glycine max
  unsure (1)..(386): unsure at all n locations
ntgattccgttgacaaatcagaaaccagtgaagattcctatttctaatcaattactactgaattccttaattcattgaccacatccggtttgccaactcattctatcaaacttaaaattggaagtcctataatgctcttaaagaacctcgaccaaaatcaaagtctgtgtaatggtactagattagtagtaacaaaaatggcaaaacatgtaatttcagctgaaattattttaggaaaaaacattggcctcattgtttatattccaggaatgtcaatgtccccttcacaatcaccatggtcttttaaactattgagatgacaatttccgattatgctgtcttatgcaatgaaaattaacaagtcacagggacaatcgctattcatg

SEQ ID NO: 157695 - DNA, 416 bp, Glycine max
agcctggccactagagaaaaagtatcagatataattgattccagcttgttgagtataccctctggcaaccaattgagctttgtatctatccgcagagccatccattttatatttaaccttatacaccaatctacaacctatacaatgcttatcaggtggcaagggaacaagtgtctaggtggaattttcctcaagagctttgatttcctcattcattgcttgacgccatttaggatagggggcaactcgatgataaaatcgaggttcatatacagctaaaatcacgttaatgagagctctataaggggagctaagagctaacaagaaacaatgatgctggatcagatatgcagtctttgatattggtgtaacatagtcagacaaggataagggaggcttaatatggcgtgtactcc

SEQ ID NO: 157696 - DNA, 414 bp, Glycine max
  unsure (1)..(414): unsure at all n locations
agcttggatcgaggtacttactttttgaatatctaagaacgatgaagaacgaatgaagaacgtctaagaacgggtgaaacctttgcgagattcctcacggaaaatgttacggaaacgtttcggaagcgcctcggcttaaattttcttcacggaaacaatttttccaagcaaattcgaaagagagagaagtgcctaaggggctggatccctttcttcttcacttcctcccctanttatagcaaaataagggaggtggttgccgcccatctcgcccaggcgagctcagctcgcccaggcgagcagggttgcttcctccagaagcaaccgccttctggaggaatcttctggagggcccaaatgggcctgggtgctatttgcacccacatttttactaagtacaccccactctgctgt

SEQ ID NO: 157697 - DNA, 417 bp, Glycine max
  unsure (1)..(417): unsure at all n locations
ngctnataagaacaaaagcgccttaatcaattctctatatgcangngaattaggacgcatcaacaagaatcaagccaaggctattgtgcaagcaatcaatggggcaaaacacaccaaataattataatgatggatggctcaaattctcacaaaggtaaaatcatcactttcaaattgagctttcaaaactatcatgacatgtagagaagaatcaaggatttcaagtcacaaaatgtcaaaaacttttattttcaaaacaattacccatttcttgaacatatcctataattcaaagaaaaacatgcaaagttgtacgtgcacacgaaattggcccaaaatattaaactgaaaatccggcgaaactaacaacattaacaaattaacacaactaacaaattaacaaaaccaacaaaacta

SEQ ID NO: 157698 - DNA, 418 bp, Glycine max
  unsure (1)..(418): unsure at all n locations
ctaagcttcaaaatcagatcaagattaagactcatgattttaatctagagaagaaataatcacgataagtatgaaaaagtttttctcaaaaactgagtatcacatggattttcctcaaaacctatttaccaaagagtttttactctctggtaattgatcaccagaatattgtaatcgattaccagtagcaaaatggttntcaaaaagctctcaactgaatttacaacgttccaattgatttcaaaaagttgtaatcgattacaatgttttggtaatcgattacaagtgtgcctgaacgttgaaattcaaactcatatgtgaagagtcacattctttcacaaaaagctgtgtgtaatcgagtacacttgattggtaatcgatacccaggatagttctgaacaatcaaaagatgaactct

SEQ ID NO: 157699 - DNA, 409 bp, Glycine max
  unsure (1)..(409): unsure at all n locations
agctngaacaagtttgtagatttttcttatatgtgctngtctgatcatggaaccgatcgtccctccatgaatgatctcttgtggaatctcgaattcgctctcaacctgcaagaaaatgttgaaggtggttcaactctttctgctcgtgctgaggaaagtaactttgaaaatgtaggcttgggagacaacgacatggcacgtcactataaaaacttgagcctcggaagtgagcatgaccttagcagcgattctaatgagaatccaaatgccatcttgtcagaatttgtcaatccacaaggacgataaagataaaatatgctctggataactggttgttttgatgctggggaagtaactcctagcattcatgtgaatcaagcaaataaaaccccctagcttgcgtcgcttc

SEQ ID NO: 157700 - DNA, 376 bp, Glycine max
ctaatagcgaaatggtattattatcataaaagagttatagccatactctacatttcaaaaactatactataataccagagattataataaattaccacgcatatctcattgtatcatcgcttcttttctataatttgatgcatgggacatatgcaagaggtgaacaaccagatttgtcagacaataagcaactttcttagaagaataatgtgaggtgataaacgaaatcaatgggataatattgacaaacagataccatgaacgaataaaataagggtttctgacaagctgcatatacagtacatcggaactcttaacgaattctaccgtgcccatgtatgtcgttgtatacataacctattagtgttcatacaca

SEQ ID NO: 157701 - DNA, 419 bp, Glycine max
  unsure (1)..(419): unsure at all n locations
cctgcggcatgcaagctnggtagggaaagggtatattaaactctttgagagcccacgcgctagccaatggggaggcatcttaacaatatttggctacactggacgagtccattgtaggcatcttaacaattgaactatgtcatctgatgatagagccataacaatattttgcattgtcatgttgcatttaagtgggtgctagaacaaatattgtttccccaaccacaggttcagagaaaataacttaaaagaatggggtcgcaggcgtaggattaccgttaatgaaggccagaggaaatcttcgagcatcagttaatggttcccttggagttgtccttctaaacatggggaggggtgagataggagtgtcatccggggactcactatctaataaggatgaggctggaacgttcttcttt

SEQ ID NO: 157702 - DNA, 330 bp, Glycine max
tgctctcggacgtctcgtcagactgagcctttatggattgcattacgatataccataaaaaactaaatagtacacttcgtgttcaaaaatacgatgacctagcccattctatccagttctaaggatgcaatacattttctaatgctaaagctcctaactttacatacaaatgagtgatcaagccacaagcatgccaaaaataagctcagatagaaacattgaacacacaaaacaactctaaatagataggataagaatttacatcaagctctcagtagatattctcaacaaagggggttagccatccatcacaaagcaacacctttcaca

SEQ ID NO: 157703 - DNA, 351 bp, Glycine max
  unsure (1)..(351): unsure at all n locations
acagaattggagaaaaccaggacttctaaccacaatactaactccctactgaataactcctctcagcctctctttctatttataggcaacatgccttatctatttcttctaactcagcttaactaaggctctcaactaacagacctatcagtactccccccctaaacattcaacttgtactcaaagtgatggcttgtggatgttgaaataaagtcccttttgtgttctagacttctagttatttgaaacaggatgtcctaatagaaccgnnaattattcagtattttcctctgcttcccttgacataaatatgtctgcaacgtctcttatgatgatgtctttcacatcaat

SEQ ID NO: 157704 - DNA, 316 bp, Glycine max
  unsure (1)..(316): unsure at all n locations
tctcaagcatctacagtncttacctgataccaaaaggtaattgcttctctaaaaaaacaagtataaagacttgccatgcaacttgagacattagcacaatgatactcaataactggataagtgcaaacactagtccagctaatctgcatagatgttcgcgtcgccaactaatctgtatgggatgtctgtgtctacactactttgatcccctgatgactggtatcatgaacaagacaatggtagaaattgattaagctgatattatcaagagatatcaatattctattaaataaagaaataatagtgaaactgaccc

SEQ ID NO: 157705 - DNA, 294 bp, Glycine max
tcaagctgttcaatagctccagattgctgctcttaatgtgcaaaggtctgtatggtggacggtagaggagcataaaccacagactcttacgacaggtacagatttctgattcaaagccagctgggttaccaagttaactaaggcatctaatttaacttctaggcaaaagtctgtatggtggtcggtaaaagagcataaaccacaaactcttgcgacaggttcataattctgattacggccagctgaatacaaggtaaccaatgcatctcagaaaccataatcttcatagattca

SEQ ID NO: 157706 - DNA, 408 bp, Glycine max
agcttacaaagtgatgattcggtcatacattatgttgatctgcacaacagcagttaccagaaaaacttcaaccataacaaaagataaccttcgaagcttgtcacttaatgacaaatagtattgggttcccattccaagaatgcaccagttacctcaccatgttggccatcgacatcgacattgggttcctcttcgatatcttcaaatgcaagagttactataccatgtcaacatggagaaatgggttactatattagatctttttgtacgatagtttcctcactttattgaccaacacaactgggttccaaccctaaatctttgtcactatacgtatactttattattctgagattgcgtgcttgtgcaaagaactaagcaatgccatggtagatcccttttgaaaag

SEQ ID NO: 157707 - DNA, 384 bp, Glycine max
  unsure (1)..(384): unsure at all n locations
agcttggtaaaaaagaaaatggattgtataagatatcactattctctcatgaacaaaagtaatnccctttgtcatgatgaagcaaaatattgtagtgcggcgggacacaagataaaattggtgaggaccatactacaagagactatactcacctcaagccataataccaaactagaagaatctcaagttgaccaatgactagatatcangtatgcaggtggaactggattttaatgaacaagtcaagagactatctttcatctattcaccaactgttgaaggtgctcccagacttgtaggaacacggagattcttatttcagacctaagaaacttgacaggctgccttaaactcacttgagcagaaccacgcggatcttaatat

SEQ ID NO: 157708 - DNA, 419 bp, Glycine max
agcttatgcgcatatttccttacatacgttctcttgcacaagacatttaaccgaaaaagtgcacccatatacaatcaaggcagcttcgttacctagatatattacacgtactgccaaggtgtatttgttacttacatcacacacatctccttggctgaatttacatacatgcatactcaaagcattttggggtaccaaaaattgcacatgtgcacatcttggtatttctaatacctatatatacacaaacttcatgatgaatcttgactatcttcacaaaaaggtgctacacttcatcccttttttcaagtttttgctacctaaagccgcatgcaaattcaagcatattttcctttgcggactaaaattgtattcaaattaaaaggtatattttttgtaatatgttttcttcacataac

SEQ ID NO: 157709 - DNA, 410 bp, Glycine max
  unsure (1)..(410): unsure at all n locations
gacctataaaactcaactgccaaataacctganattgagggagaatgattataatctatacttaacataaaatactcatgacactacataataaccataaactgtatagagtttgatacaatttacacaagtgttatacacaaaagttagttgtattcatcgactaacaactcctccaaatttacaattntgcttgtcctgaagcaaaaagagaacaactcacttgtgctcaagtgacaataacatgcagtgactatgtacaaatgtgtatgcaacaaaagttactaattgcattgatagattatgaagtaaaatgatcttatcacttgtctttcacaatgtatgctatcatcctaagagaagaataaatatttacctcgagtaattagatggagttaggcataatacag

SEQ ID NO: 157710 - DNA, 127 bp, Glycine max
  unsure (1)..(127): unsure at all n locations
agcttgtngacacatacctagcggtgctgttatcgcttctccagggaaagagggccacgacacctctagcactatccctcctcctggccgacaaaggtcgtcataatactcaactggtcttaagtac

SEQ ID NO: 157711 - DNA, 412 bp, Glycine max
agcttgtcagttgtgtggagcccactacaatgaccttttttttagctttatgaggcattttcgatggctatgaagaataagttgaagcattccaaaaacaataataacaagagaagatatgtgagtgagaaatatgcattttagcttcaaccctttccgtgagagtaacccacttctgatttatgcttacaaagtctgtaatattcttagatagaagtctgagagttaattccagagtggaatccctcttgtaaggtaaaaatattacttctgtgcaataaaaaatagatccatttttgtgtaaaagaccaacaatgctgggcaaaagtgaaacccaatggtgtagttggtctactcgaggctaggattgaagtctagtggggaactagcaggttgttgaaactagtatttg

SEQ ID NO: 157712 - DNA, 434 bp, Glycine max
  unsure (1)..(434): unsure at all n locations
ttacacaaagattntgagattcttcaaatgaaggaaggagagactttttatgcatatttttctcgtactctaaccatagccaacataatgaaggctcatggtgaaagtatgagtgaaacagtcattactgcaaagattttgagatcaatggtctcaaaatctgattatgtggtatgctcaattgaagaatccaacaacttagacatgatgagtattgatgagttgcaaagtagtcttcttggtcatgagcagatgatgagaagtcgtggagaagaagagcaggttctaaagatctcccacaaagacaaagtaggtaaaggtagatgtaatggttcatccataggagttcgaggcacatgatatggaagccaatcattcaatagagctgctattgatcgtttaaatgtcacaagttaagacactatcatatgaat

SEQ ID NO: 157713 - DNA, 423 bp, Glycine max
  unsure (1)..(423): unsure at all n locations
ccagcagcacgcaagccacgggcngcacaaaggcaccaggatgccgcattttaaggcaaacgcccgnacggtggacagcagaggagcacagaccatanactctcgcgacaggaacagattaatgaagcaaggccagacgggataccaagcaaaccaacgcaccaaaggcgccctctagctcctaagataccgatgatgcaacggaagatgaagccacctcatgcactccaacaatgacaatagcaccattccttacgcaaaacaacggggagggggaagccaccctctcaaataaataccgggcttcagcaggagccatgtcaccaagggcgccaccactggcagcatctacaaacttccctcacaatacggagcccaacaaaaaaaaaaggagagaaacagctccgaaaccgacgggagggc

SEQ ID NO: 157714 - DNA, 188 bp, Glycine max
aaaacccggggggaaacaaaaaaccccagagacgggccaaccaaagacataaaccactcccgctaaccaaaaaaaaaaaaaccccccgaacggaagaaaaggacgaaaacaacagccacaagaaaaaaagaaccccacgcggaggggcgagccacaaaccacattggaaaacaagagaaggggacaaa

SEQ ID NO: 157715 - DNA, 411 bp, Glycine max
  unsure (1)..(411): unsure at all n locations
agcttagctgccatgagaggcgcttagcttaatgaaacctaatttaggatgcaaggaattcagcttatctgtcatgactggcgcttaactccatgaaccccatttctggccgcaaggaaatgagcttggcggcaactagtcgcgcttagccaaaaaatacaatacgcttaacggntaggtcgcctcttatccgaattcaaatcgaattgaaattggcttagctcagtcttggccagcttagcgggccaaatcatcctaaaatgcaagggttgagcgctaagcgcttgagactctcggcttagcgcatgaccaaagatgcacttatcgcgaggcttggcttagtgaaaggactgtttttccaaaaatattttctaagttatttttcagtccctttctcaagaaattgaaacc

SEQ ID NO: 157716 - DNA, 337 bp, Glycine max
  unsure (1)..(337): unsure at all n locations
tactcacgctgaggggtgatggagacccgtactgagaggaatctttatatgggctacgtangagtacgtgagcttaattgaaagtggccaactggggatggtgggttcatgtttgatttgtggaagtgggatatttgatttgtgccatcgcccgatcctagtaccacatatgacgggtaccccataatccaacaagcttgatgtgagaaagcgtggaagagtcagtgttcctactctttgtctgttgaccacagagtggtacctgtagatttgtctcaagggtcaggagaccttggggacgtcaggtgggaatgctttttccaaaactaagcttgac

SEQ ID NO: 157717 - DNA, 401 bp, Glycine max
  unsure (1)..(401): unsure at all n locations
agcttgttagcatactcttcaattgntttgtactccttcatttnctgcatctcaaattctctaatcaaatttagggcttgcattcctttaatcctttcatctccttcgtattcattctagaggaaactccagatttcatatgctgatttgatggtcatgattctattgaaaatttcttttgagatagcaacaaacaaagtaactcttgcctttgactttcttgctttcctttctttttgattttttatctgtgccattgttggattagttggtaagggaagaacttcgtagtcttcctcaatagcttcccagagatcatttgcctccagatgtgccttcatactcgctgcccagaattgataattgtcaccatcaaacatagatggtgctagtgctctgta

SEQ ID NO: 157718 - DNA, 377 bp, Glycine max
  unsure (1)..(377): unsure at all n locations
aaactcacacacttattaaaatatgtctttttatgacacatattttaagacggttatgcggaactgtcttagaatatcacgcggtgatatttttgtaattaggaagaatgatttttttttatgacgcacattctaagacgattttgcttaaccgtcttagaatgtacaacggtagcattcctgtaattagggggaacgtaaatggcaatgaatttacctaaagaaccgtcgttgattttgtaccctcaaattatagtctttctaatccctagttatctggcgcacacctncctggaagatcctcacccactcgccgttgattttgccttcctcactgagttnggtgctcacctttgtggttgtccgctctctactca

SEQ ID NO: 157719 - DNA, 409 bp, Glycine max
  unsure (1)..(409): unsure at all n locations
agcttgtaggataatggttgtcccatcacatgtggnactaggtggcggtcgggcgatggtgcacaacaagttttccacatccacaaatcgcgcataagcccaccatcccctgttgcccacctccaactgagctcacgtactcccacgtagcccatatccttgtttctctcaacaccgggtccccatcaatcctcccaagcttccccaacatccaggtaattcaacattcaaacagcacaaactatcacagccaagaaaatagggcaaaggcagaaaactctgcctaaaacaccaaccaaaatcacagcttttctcacttaaagaccccagtaacaattccttcgttccagttcgttaaccggtggatcgactcgaaaattttactggaagtctctagtacataagccta

SEQ ID NO: 157720 - DNA, 427 bp, Glycine max
  unsure (1)..(427): unsure at all n locations
tcaacccttggccatcatttctgccccaaattttgatatgagagcattttcggagtcgtgaagtgcgtggctacgagtgggacttctaaaatccaggtttgggtggactcctttctctcttaaatttcgtgggtatggggttttgggagatatgatgggtggttttgttagttttctgctgcgtgatgattatatgtgaaggcatttgctgaaaacttgttgaaattgccatgtttggatgagttagacatacccattctgttttagggttnttgtgatgatgtttgtgatgtttatatgctgaaattgctgatggaaaactgttagagatgaatggtagaactaacctagggttagatagtgagaatgtgtatgtatgagtggacaaagagtgagactttgagagtggaaagtaagtctgaattct

SEQ ID NO: 157721 - DNA, 418 bp, Glycine max
  unsure (1)..(418): unsure at all n locations
agcttgactctagaccttgacattggcctctattactttgaagnggnncnagggccttgcgctttttaaataaccctttatcaagacctcccacaattaaaaaatttgaaagtttttggttgtttgtgttatactaatgtaccacaggttaagcgagacaagttggacaaaagaaaggagcctaacatatttatcgggtatagcctaacatttaaagcttatagaaattctcaacctgacacaagaaaaattctaataagtaggaatgtaagcttcatggagaatgagaggtggaactggaacgatggaacaaatcaccagactgatgatttgaatcaagaagagttagttgatcatcctcctgtctgcggcactggattacttgctgacatatatcaaaagtgcaatgttgttgtgc

SEQ ID NO: 157722 - DNA, 349 bp, Glycine max
tagctggcttatgagaccagttgtcagataccgttaataaccatattatttgaagaaccaacagatacccattacacgacaagttcagaaattttaagacatccatctgaaatttcagtacaagggtttcattatgtgtttgataagcaactgtgaacaaacattaatcaagagcaaatacctgtaaatcaaaatccaaatgccatacacagacgcgtggcttcaatgttttgaaactttgtcgatgacaaattcgaaacccttggcggagactaggttcttcggggtatccttcttgggcttgattcttcgctttggcaaacagagagatacaacgatgcctatgcta

SEQ ID NO: 157723 - DNA, 398 bp, Glycine max
  unsure (1)..(398): unsure at all n locations
agcttcgggtgaaatactaattttaaatgttttgtttactaatgtggaaatatggatcattccaacttttgaaaacagcatggtctatcatggcaatttcatttatttccctgctaattatgtctggggtgctggccacttgtttcttcgtccgcaggcatcacataaaaagagaaaggcctcgagctcctcttgttcatgaatttcatggtatgagtagtcacctagtgaaaccaatgccaagtttgatatttactgctgttttggaagataactgcacatcaagaacatgtgctatatgccttgaagactattatgttggtgagaaactcaagtttctgctctgctgtcacagtaagtgttcccatgccaatttttttntttataaattcaacata

SEQ ID NO: 157724 - DNA, 384 bp, Glycine max
cacactaaggtatgtaccaaggaacttggtattgctgttctcatgcattatgaacccattcatatgcatttcatatagaacatgatcctcttgtggatactctatatgcaaaatggctccattctcccatttaaatttgaaattttgatgcaccaaccagaatttaagaaaaataaaatgaattaattagttaaacatgttcaaataacgtataagacatatagatattcaaataaatgaatgaatgtagttttccaacctgatgtttgttcttgtgaatagggctgttaacaggactaccaaaattctcatgttgacaatgagttgcaaaatggcaagtgtgggagcacaaaaaacacttattctatcaacacagctacacat

SEQ ID NO: 157725 - DNA, 380 bp, Glycine max
  unsure (1)..(380): unsure at all n locations
agcttctaaaggaagtttctcngggaaacttcttatgttattaatnancacacgtgtcgccctggatgtgactgttaatgaagataatctggagagacacgcgcctgatttttggttaaaaacttgttctataactggagcctattgcgcctcacccctacttattatatttctattgcaacgtagagtgaaaaaaagttccacaacttgacgcagctccatatggaggtgtgaggcctttcatcttgttcatcaataaaaccctttgcatcttgaagataaatggtctcgaagattaatgccaccggagtggagaacgaacaaagatgattggagacaccccttcaaggagatgagtcaacaacaagctcaccaccgta

SEQ ID NO: 157726 - DNA, 416 bp, Glycine max
  unsure (1)..(416): unsure at all n locations
agctttattggtgagattaaggtcttcattttaacgtactcaatgagngntngagaatctctgatattatttcaaactttaattcgtgaaaatcaagaccaacttagtgattatataatacttgggtattcttagattcatggggagtctaaggattgtgtcagtagtgaccttgaaaatagttgtaagctaggaggggcaagaaagaataattgttgtaaccgagtttgattagtggaaccttttactattttgtaaaggattgaaggatgtagcttaggttaagtgaaccggtataaaactaagtatttttagctaggcaaagtattttcaaagtctattattgacacattcttacacacaagtctttcattaaaaatattgtttatgtatatcacttgacgacagtccatctt

SEQ ID NO: 157727 - DNA, 427 bp, Glycine max
  unsure (1)..(427): unsure at all n locations
ccttacgaacgttcacttgcacattacatcttatcaactaagaaaaatgcacccatatacaatcaaggtagcttcattacctagattatttacatgtacttccaaggtgtatttgttatttacatcacacacgcctccttggctgaatntacatacatgcatactcaaagcattntggggtaccaaaaactgcacatgcgctcatcttggtatttctaatacccatacatatacaaacttcacgatgaatcttgactacctacacaataaggtgctacatttcatgctntttttcaagttttgctacctaaagccacatgcaaattcaagcatattttcctttgctgaactaaattgtattcacaatagaacggtatatattcttttgtataatgtttcctcacataacatgcaacatatttatata

SEQ ID NO: 157728 - DNA, 421 bp, Glycine max
  unsure (1)..(421): unsure at all n locations
agcttgctgtgtaacttgagttaattattttatctacttttaaccatataagcagcacaaagcgaccgagagtgctcactgtgttttcccctacatagtacagaaaagagcaagttgataaactcaaagtagccaccacttatacatggaccatacatgtcacagaagacaaagaactggtacttactgtgagcaaagaacatggttgaaaaactaaacctgtcaaataaataacaaatagaagttacaaccatatccagagctaaacgaatcaaaaatgaaaaccctaccgttggttgatatgattactgtatgtatcatcaacatgggtaggctcaatatagagagcctgagaaagggaggagggagaaaaagaccacatttccttaccacanaattgtgaccatttgttgtttgggag

SEQ ID NO: 157729 - DNA, 326 bp, Glycine max
  unsure (1)..(326): unsure at all n locations
actaagctagatnaattnttttaatatattagagaattacaatttatataaacagtcatatttatgcatttgaaataataaggaattaaacagatcattatgtttaaaaaagagtatatcctactaaatgggatattgtatcagatacatagaataacgtctgaaatacttgtacgcaattgggcttgcaccaaccttatctttggtataatggaagcaaatcacaatagctctagtttaagtcaaatccagatgctcaaatacaacccatattcacaccaaaataatgaataataatatgttatccatagctttaagacaatttc

SEQ ID NO: 157730 - DNA, 411 bp, Glycine max
agcttaaagtacgcccgagtctttcttcctttttagacggcgaagaagaattggcgatcagaattgtcattccttggattatagggttgaaccaagctcatgctcttataaaaaggttcatcaagtcaagttgaaatatggaagtaaccgtcttgcaaaattggggcaaaagatgaatcgagtcacatcactgcttcgtctactgccaaacatatttaggattattgatgtccttgttacttccagtttcaccttgacaaagatgtcatggaccatgttgaaaatctaaattgattcaaccccatatcctgcataaatattcgcaatactttgactgtacatcattcgcatgcatccatgcttttcattggttgcattgctcattgcattctttccttgaaaaataaaata

SEQ ID NO: 157731 - DNA, 414 bp, Glycine max
  unsure (1)..(414): unsure at all n locations
ntataagtgcgggtctgggagacgaaggtcaagtgttctcgatatgtgaagatgatgttccaagtacttcggaattggtccgaccatgccctcctgatttccagctgggaaattggcgagtggaggaacgccccggcatttacgcaacaagcataatgtaaacctttacggttttaaaagctctatagttgggcctanggcttagaagatttcgtttgttaaggctttgtgtcttttgttgttgaatttataatacaaggatctttcttcatctgttcctggtctctacccattctcattcatttgcatgtttaacttcttttctgaaacggcagatcgatgacgagtcccccgaagtactaatacctgggacccgtctatcaactttgagcaaaaaatgaacaaacggaagat

SEQ ID NO: 157732 - DNA, 409 bp, Glycine max
  unsure (1)..(409): unsure at all n locations
agctntgacaaggaacagaaacttaatcatattattttcctgacaaagccttatcagcatgaactaaaaagataataacattagctcgtgtacttgtcatatcaattccctcttcaataggggctactattttgaacttgtcatcttggttactcttccaaggtctaccattgagccaagtaagctccttcttcatactattagtagggggagcagttacatgcatgcatgagagaagcactcttctactacattattttaaaaagctccaaagaaggacatttacacattattgattaagcttgggttacaactctaaaaccaaaaaagaaaactaatcttgcagaaaagtagcttgttagataaaacccttctggttgcaacaatgatgccatgatacttacatact

SEQ ID NO: 157733 - DNA, 429 bp, Glycine max
  unsure (1)..(429): unsure at all n locations
ntgcggatntggtcttcgccagtgaaaggatcgatgtgtgtccgaanagaggcaaatttgatcatcctattatgacgactgagaaaactggggccaatgaagatgatgagaaagagggagaaacccatgctgtgactgccattcctatacggccaagtttcccaccaacccaacaatgtcattactcaaccaataacaaacctcctccttaccccaccacccagttatccacaaaggtcatccctaaatcaaccacaaagtctgtctaccgcacttccaatgacgaagaccacctttagctcatacaaaataaaaacacacaacaaaaaggaattttgcagcaaaaagcctgtagggttcacccccaaatccgttgcatatgctaacttgatccatatctacttataattcatggtaccataccctacc

SEQ ID NO: 157734 - DNA, 412 bp, Glycine max
agcttcttgaagaacagagtttgacatttaatatatcaggtttgaaaagaatgcttctaataaaagcatccaaactttaaaaatagattttcacaaggacagtttttataaaattttgtgcgtacaaagataagtctgaagcaatgcaaaataagcaagttatgacataagctactgtaaaaacacaatgttcatactagttcactcaacatgagttacatctcgttctctttctcaagttccactaatcacaattgattagaaaggagattttactctatcactcttggctacaacaagtattgtctatgtcacttctgatacactcttaatctccccttgagattaaaaacacccaagtattcttttatcaccaagccacttctgactttccaaacaacagtttgaatga

SEQ ID NO: 157735 - DNA, 388 bp, Glycine max
  unsure (1)..(388): unsure at all n locations
aattanttatatataaattnttatatctacaccacttagaaaccttatctttactatttttcatatatatatatataaaattctgcatatgatatttgataaatttgtcttttctttttagcctcgattctattttaagattaatgaagctggtgcaaaacggtattgcaaatggagtatgggaagaaaatgggcagcatatatgcaaagcttatggaatgaattcaacgatccaaccaaaacaagagatgaaatcataaaaaatgtgccgataggcatagataaagatcaatgggctcgttttgtcattatcgtcatanaccatcaacattggtacaattagattggtttaattattgaattgttntatagcctaattatgatacta

SEQ ID NO: 157736 - DNA, 291 bp, Glycine max
tgctcctaccacctaccgcctgtacttttcatgtttgataaaaaatgccgctggaacaagttctaccaaccacttgcaaggtctaatgatcccttttttctgcacaagtaatcatgctctgaatctggggtagtggtaaaaactggagcacagagttgaattattacaggggtttgcattttctcctcttttacagatcagactgaaagaacaacctaataagagggtaacagcttgtctttgtaggtggtcagaacgcttcatacatgcttctccatcagacaaactcca

SEQ ID NO: 157737 - DNA, 409 bp, Glycine max
  unsure (1)..(409): unsure at all n locations
agcttatgaaacctaaataaaacattatttattatgtcaaaataagacaattgatatgatttttgaaaagaaaatattataaaaaaacaaaactaaccatgttggatggcatgtgcttaaatctgtaataacagtagtaaaaacaatcttctttaaaagacccttacacctcaaaattcgaagtggaacgtgctgcatcagtggatgcacactgattattatatctggctgatatttcattaggcctttagcaacctcgctgtaaaaagagaaaaagatattttaactgtgacatttgatgttacatcatatntgagaagagatacacatgcacaagaaagtatttttctgaaacatggaatgcagaaaaagtcaataagttttgtctaatattaacacaatgcacaac

SEQ ID NO: 157738 - DNA, 396 bp, Glycine max
gagaaagaccttggcagagaagccaacaacttcttctcctgctcctcatcagagagatgatcattagcattcaacagttgacttactaactgatagaacttcttgatgtggtcatggaaatctcctcccatctccattgtgagttgatacaactccatcttcaaacagaggcgattgagtagagttcggtggctggcaagtatatcgattcgcacaagtattataaaacggtaagactgagtatcatatcttcacggaattcgtacactcagacttgacattcagtatgcaacagttgatggattaaagcaatgaaatatccagtggatctgcactaaaactattgaacataactaaaatctaaatatgaacggaaactatcaataaaaccgtggc

SEQ ID NO: 157739 - DNA, 422 bp, Glycine max
agcttttgtcatcacctaaaaaccattgttattggtcttactccttgaaatggtccttttcacttttattggttaaacgtggatttttaaaagcctaaaatcaacacatagctttgtcacctctttcaaaaaaccaagagattattaatggtccaatgccttaatgttttctctcctttcagaagaatcaaaagatcatttaatggtccaacaccttaaatgactttttattcaatcaaaatatatcttgcaaaaaagataaaaacaacttaaccaacgtttagttctcaaagaactatgtaggtgtgatttccttatcacgattgaggaatacgtaggagcaagggaaacacccttatcaaccacaaaaagataaaaaatataaaaggcttaaaaagacataaaaagtgtaaacaagggaa

SEQ ID NO: 157740 - DNA, 448 bp, Glycine max
ctcaagctgctggaagctcgactgatctaccagatcttgtatagtgcacatgttcgctcactgcaagtggatcttgacaaccgtggcatgatagttgtctcccatacgataaatcaattcccacagaaataatgatcggatgaagaatgtgctttcactatagaaaacttatcatggtgacagggtatgatcactttccccttccttgtatggatcatatgctacagcggtaggtcggacaagcttattaatgcttcttagatggttattccatctatgaccgaattataatggatcctaaagaccacaggaagacaactctcacttcgtcttttggagttgttcattgcaaagaatccctctgaattggtatgcaccaacacttttcaaggttctgatatctatttcttaattactggacaaactgaggcttatgtaactgttgatg

SEQ ID NO: 157741 - DNA, 412 bp, Glycine max
  unsure (1)..(412): unsure at all n locations
agcttngaggatttggtcttcaccagggaatggatctttgtgggtccnaaaagaggcaaatttgatcatcctactaggacgactgagaaaactggggcaaataaaaagggtgagaaagagggagaaacccatgctgtgactgccattcctatacagccaagtttcccaccaacccaacaatgtcattactcagccaataaccaaccctctccttacccaccacctagttatccacaatggccatccctaaatcaaccacaaggtctgtctaccgcacttccaatgacgaagaccacctttatcacaaaccaaaaaaacaccaatcaaaaggaattttgcagcaaaaagcctgtagggttcaccccaaattccgttgtcatatgctaaacttgatcccatatccactcaataa

SEQ ID NO: 157742 - DNA, 417 bp, Glycine max
agcttgtcagtggtgtggagccaactacattgaccttttttgtagctttaagaggcattttctagggctatgataaataagttgaagcattccaaaaacaatattaactagagaagatgtgtgagtgagaaatatgcattatagcttcaaccctttccgtgagagtaacccacttctgatatatgcttacaaagcctgtaatattcttagatagaagtctgagagttaattccagagtggaatccctcttgtaaggtaaaaattttactcttgtgcaataaaaaatagattcatttttgtgtaaaagaccaacaatgcttggcatacgtgaaacccaatggtgtaattggtctactcaaggctaggattgaagtctagtggggaactagcagtgtgttgaaactattagttgttggt

SEQ ID NO: 157743 - DNA, 201 bp, Glycine max
tatgtaagtgaatatcgtgtatgctttgttttattggtggtcatgatttattgatgatgatactcaccaaataatctttataagcacttattgtgataatactagtaatgatctcacgtgtacaactgcaacatgtgctgattgaggtgcgacgacagctttatgatacaagccatgtggatagaaacattgccattgtac

SEQ ID NO: 157744 - DNA, 422 bp, Glycine max
agctttccatatgaatttaatgtaaatgtcttttctttttcgggtaacaaggagaaaattttgaaggtgcaaaagttgttgtcttgataagcctggaccatgcgcttagcgagactcaactgctatgcgagacatcaatcgcttagcgagtgagatgaatatataagagaattttccatgttatcacgcgctcagcacgtcatcaactcgttcagcaagaagattgtctcatccgctcttagtgcgagaatggcgctaagccaaatttcacttacgggttctaagcttgaagttggtgctaagcgcgccttcgcagaaaaaaagccctttataagcttgaattgtacagaaaaaaagaaggggggggggtctgaatagactacttgagcctagtgctgaacaaagaacagagggatagctga

SEQ ID NO: 157745 - DNA, 281 bp, Glycine max
tgtattgtcgctcatatcttgactagtgatgacgtgctaaatattatgagtggatcccatattttgactccgaagtcattgcgaagtaaatcactcccacattttatatgtaggatgcattcatgtttttacctacccctcacgaattgatgtttgaggaaaatcacctatctaaacgttcccgaagcattcctatgcacttaatcaaatctgaacaagggtgatcatatgagacactgaacagataaagccgactggcggtttgaagaataaatgcttca

SEQ ID NO: 157746 - DNA, 392 bp, Glycine max
agcttggaggggttgatggggatcctgtttttttaggaacgaggataagggctacctatgagtgcgtgagctcagatgaaaggagggcaactggggatggtatgcttatgtttgactcgtgaaagtgggatagttgatttgcgccatcgcccaatcaccacctagtaccacatatgacgggtgccccataatccaacaagcttgatgtgagaaagtgtggacgagtcaaccttcgtacttttgtttgttgaccacagagtggtacctggaaatatgtcgcacggtcaggaaaccttggggacgtcatgtggggtgctattgcccaaaaccaagcttgaccaatcccaacccaactcgggcatagtcagtcattgagaacctgtgttgtccta

SEQ ID NO: 157747 - DNA, 414 bp, Glycine max
gcaagctcatatagtaggaacaatttgtttagagtcgcaccaaccaccccaattgatcactactaacaccttcaaagcttaattccctaagtacaagtctacaattattattttgaggggcaagcatcgatactattttaacctaatttgctgcaacattaattaagcctcagcaatttcagcggattcagcagcagctaggacaagctcaggatgaacgtttcccactgaatccaaagcattgggaagtcccaatgatctcaaagccagatgggctgctttttgccctgaaatcatcattgctccaaatgttggaccctgcatgcaaaatttaacaaagcccaaacaattagtttctccattttaatgttaacacaaggagcttttattgagcaaattttctaaagacaagaa

SEQ ID NO: 157748 - DNA, 294 bp, Glycine max
gcactcaatattgtaagcttacctatcaattaaacaaatcgaatcatgagctgtaattaatatctgacaatattcaaatgaaggcttctcaaaatttggctaaccagatgtgtcaggtatcttttctaaaactttttgcttgaaaatttcaaaagtttcttcattcacgaacttctgctcagaaaattaaaataaaacagaagaaagatacaagtaaatgaataattgtaaagtgaaattcaggtatctttgttaaaccttctcgcttgaaaatttcaaaggtttctcattcac

SEQ ID NO: 157749 - DNA, 352 bp, Glycine max
acaaacgcccaaagcacgacagcagaaaagcaaagataacgcaacacaaagaccaacaaaggagccagaaggaatcgaagaaaccgaacacaagaatgcgagcacacggcgaccaaaaaccagccgagctagaccaagaaccgcgcgaagcaacgaaacgcgaaccaagcggcaacaaaatgaaccgaagaaaccgaacagggaaaacacgaaaccacgaccaactggaactagcaaacagaaaaaagaacagagcgtgctcaccacaacgaagtgcagccagccccaaccagaaacgggaaacggacacaagcacgaagagaaagaggaggacagggaaaacaccgacgag

SEQ ID NO: 157750 - DNA, 412 bp, Glycine max
  unsure (1)..(412): unsure at all n locations
agcttgcagtgggcacactatggccaataatangtctccctttcccccctcctcatttgatcggctcttaaatctaagaaaatccaagtttgcgtgaggagtgatcagaaccataatgaccaatcttagaaatcctagatttaacctctttttggtgtctctcttggttacgttggtccaaatccaaaccaaggtgcggtgctaccagtacaaagttggagatctagattcctggggaatccccatttcaccaagttcacaactatacgacaaatggtccaaataccactacctcagcattggtgattccctccgtaagttcttccttcatatccattcctctttctttccttttttaatggaaaaatgtctattttattagaaatattggtaaaaatattcgaagtcgtga

SEQ ID NO: 157751 - DNA, 228 bp, Glycine max
  unsure (1)..(228): unsure at all n locations
natgctgcanacatntataatagacctccacagcagttttaccaacgacagcaaaataatatgacctttaagcacagaacaatccagatggaggaatcatccaaatctgagatggacaagctctccacaacaacaacaagtcatccctccttacagaaagccgttggtccaagcaaccatatgttcttctcccatcgaacaacaacaattgcattagcaccaacaaaa

SEQ ID NO: 157752 - DNA, 406 bp, Glycine max
  unsure (1)..(406): unsure at all n locations
agcttcctcggggccattttctgcgatattttacatttagaagntagttttaccaaataatgcttatcttaatgcaaaaaatgtcatgctaatccctctaatttggactaaactcatatgatccattcatgcacacacgcatgtgtagaaaacaccctattatttatatcaacatacaaggatattcagaacattctagttaccacacatatataaattttttttggaaagaatacttacacgcatgctcaaggaattgtgcccatatgttcatatcctaaacatttgctatttacaaactacctatacatgttacaaaattttattgtttctctcatattcatttatatgcatgttggaaagctaattacattatgcacacacttttgcatttgaaaaagaactt

SEQ ID NO: 157753 - DNA, 444 bp, Glycine max
  unsure (1)..(444): unsure at all n locations
tctagatgaatcagcaatgagtcttatggtgtttgattatnacaaagatgacaacactagatgatgacacatagtgatgaaccatacagctcaagtgaatcacagaacatccatctcacgtgaatcaaagaacattcaactcaagagaagcatgaacaagttaagagttcaagaatcaagatgagagccttcaaagctagattcaagactcaagatttaagatctcaagaatcaagatcaagattcaagactcgagattcatgaatgaagaaaagactcaatcaagataagtattataaaggtcttcaacactttgatagcacatgagtttttgacacaaccttaccaagaggtttactctttggtatcgatacgcaattgtgtatcgactacactagctaaataagttgaatattttcaaactgattacaacgtccaaatatt

SEQ ID NO: 157754 - DNA, 406 bp, Glycine max
  unsure (1)..(406): unsure at all n locations
agcttaacaccgaaattttgtaggctccttggncgaagcttccgaggacaagaacaattactagtatatgaatacatggttaatggcagcctagacaccttcatttttggtatgtaatatgatgaatgctaaaattaggtgcacttgtgttggtttacttctgtcatattttgtggcttattactctataatatctaatattgaacaacatgtgtgcctggcaaaaaaaaaaaaaaacagataaagtaaacagtaaattgctggattggccacagcgctcccacataatatttggaattgctagagggcttttgtatctccatcaaaattcccaattaaggattattcatagagatctcaaagcaagtaatgttttacttgatgcaaagttaaatccaaaaatatt

SEQ ID NO: 157755 - DNA, 440 bp, Glycine max
  unsure (1)..(440): unsure at all n locations
tgttcttataatctacagttacaatgcttctttctatctagacacgtattccatattctgcacaaagcccacaaccatttaatatatgtataacatcattccggtccattcctataaagaaacaagctatatcaaggaatattcctttctctgtatcatcagttaaaccatcatagcttatttttaatttctcttgtacttcatcattaagaatnttcttaagtttctccaggacattattccactctgttacctccatatcaaacaaataggacccaatgacttcaagagctagtggcaatcccgcagaataagccactacatttctcaaagttcaataaaatcttctcttggactcgcttgcctaaatgcatgccaactaaaaagctcatatgattcgcttcatcattcctttcatctgacactttgtcaactcttct

SEQ ID NO: 157756 - DNA, 436 bp, Glycine max
  unsure (1)..(436): unsure at all n locations
ctccgcccggatcttaagcaccgcggctgcagctttatgaaacgttttcgacttttttcgttncttatnatcaacaacactattgtatattatttaatatgtgtagctgagatttttctgtcattaagattaatatacgcagttatgaagcaagaaatcccactactttcccattacttgtgcatgtagagaatcttatcgtgacgtgtattgttatcttggtagtctttaattacgaaattctgtttgcaagcgtttccacaatgatttaaaatcccaaattattcatttccaagcaataatcttataaaaaaatacaataaaatcatttctagcaaagagtcaagataagcctaatcaggccaaacttaataagaaatactttctctaagaatcaagtttagcttttcttcaagttcatcaacacttcaagctc

SEQ ID NO: 157757 - DNA, 414 bp, Glycine max
  unsure (1)..(414): unsure at all n locations
agctttggagaacttggaaggaagnngtttttgtatttacggctttcnggaagggagatttcttcccttcgttggcttgggttgatgttctaaccggccaaattccaaagtttaaggtcactcttagttccttaaatagtntctttgatcaggtgattgcacaacataaagaaaagatgaataaaagggaagatcatgaacaatctgatacgaaagacttcgtggatatactccttcaacttgaagaagctggtatgcttggctttgagctctcccatgataacctcaaagcaatgctagtggtaggtctttcttccaataatgactttgctccttaagtgtctgtgttctccaaccaaaattaaagtttcactttctgtaatccatgtagtcctttaatgcanacttttataa

SEQ ID NO: 157758 - DNA, 311 bp, Glycine max
  unsure (1)..(311): unsure at all n locations
atataagcaggtcccgtggttaagagagacagaggggttgtatagagcatgaatccggnntcttcttctactgttggggatggatagatatgttgggcttttaggctcatttaactgctgtcttcgttatactagcagccatctccccgtctctccctgatatagtgagagcaagagaatcctgacaacagaaacataaccagtgcccaccacctgatataggaaattctagagagactgggatagagtgcgcttcatattgaaaagaaaggaactctacgagacaatgtgtctgctattccactgtcctg

SEQ ID NO: 157759 - DNA, 355 bp, Glycine max
agcatttttttctatacgagaaaaaccattcaaaagactagaatatggaaagcatcgaccagcgaagggttggtagaataacctttctatacctgtgacaagactccaggcttgtgtagaaatcttaacaaggatgaaagcttgcaaatcctggaggccctgaccaaccattggaacggggtaattttaagcaagatatagaatgagttggcaaagcacatactgcagcataaaataaaacttctttgttgtgtgtggacatcccaatcggccgccaattataaattatatgcgaaggaaaggttattaaaactcctttcgaaatacggcatggaaccaaggatagcatttcaat

SEQ ID NO: 157760 - DNA, 306 bp, Glycine max
aaactaacttctcacattgcgagccagaagatttttgtgcttagcctaagcaggaaaattaccaaaaacctctaagtcatcaactgtaaagacctagatcaggtatttagaaatcttttgctccccttcgagtatgaagaataacctttagaaagatatgatctttctagacactagggggctatatggtgaaataaacaatattgaactcgcttaagatgacttataaggatcatatctctgctaaaccatgatacttgtgctgcatatgtattatgacagttctgagaacatattgaacaccct

SEQ ID NO: 157761 - DNA, 347 bp, Glycine max
  unsure (1)..(347): unsure at all n locations
ttctagcctctcgacacacacgcgcccaatcggacatacggtgaaatcatgatcattcaattctcagagttccagttaatttcgagcgttcatatataaacccctgattcggacctctgtgggacaatgttatgaccattctgaattctgacaaggacgcttcctggtcgtttccaatttcncgaatgatctactatcatggtgcatgccgcctcaaatctggacatctcgagtgaaatgtaaagaccatttggatatcttaagagattcctgtgttcacattcgagcctctcggcatcttattggatcgaatcccacatccgggcgcaaagatatgaccatttcga

SEQ ID NO: 157762 - DNA, 429 bp, Glycine max
  unsure (1)..(429): unsure at all n locations
agccacctgaggcatgaagcttgaaagcatgggatgggaggtttattttanttctgggatgaaaacattatcgccaagatttttgctagaaatgatttcagctgcaatgacatgtttggctagtctagtaactactaatctagtaccattacagagtccttacgtttggtctaagtttcttagcaacattataggactatcgatttttagcttgatacgatgatatggcaaaccatatgtgtttagtgaattgagaaattcagttgtgattgaatggaaatgccaactgtcaatggtttctgacttctctatataatcagagcttaagtatttcatttgttcacctattatatttattttaggtagcatgcaaagttaaatagagaataaatactgagtagaccttagtttttgtaaatttcaaaagtg

SEQ ID NO: 157763 - DNA, 490 bp, Glycine max
  unsure (1)..(490): unsure at all n locations
ggacactaaaaactcagcttatcatgtgacattgaagtctcagctcatactcatcttcttacatctgcatatatatatatatatattacaagagttgattaaaaaatatataatacatgatgagatttagataaataaaaaagtcaaacttatttaatttcttaaaaagattntttatgttttcatatactaacttttcttataataacatctgtttattctcatttctagattttaacaataaatgtaaaattatatattgggtttctaattattgttaattactataattagttcatgattaatctaatacatgtttaaatgtgatgtaataataagcatattttacgagagaagtatattgacattctttattccaacaaatagcagagtatatcaacattgcatttgaaaatattaaaagagagagaatgtggaaaaagataaatttggacttatattaagaaaaaaaaattaataaatctaaatt

SEQ ID NO: 157764 - DNA, 409 bp, Glycine max
cagctcgttgagctccgatttaatattctcttgttctttcctaacccgatcgagctccttcgagttatccaatatcgagacaatgtccggcgacgacatcgttatgattgcgagaacaacaaccacgacacaataccagattctttcaacgagtgtggtttacctttccttccaacgttgctatcaaaatccgaaatcgaaaagcgagagcggaattggaatttccaatttttattttatttttttcgtgtcaaattttacaaggtgggatatttagtttatcctccgctttttattgtttaatttgaaactaaaattaaaatttagagtaaacttataaactataaccaggaactaaaaagttaaaggcgaagtaaaagttgataagttacttaattgaaaatatttg

SEQ ID NO: 157765 - DNA, 412 bp, Glycine max
agctttaactataatgtaagttattggttgtttaagagaaaacttatcagaaagtaaaagcggaaattaaatgcacagcggaaagtaaaatagtagggaaaaagaaaacaaacacacaagaatttttatactggttcgacaacaacctgtgcctacatccagttcccaagcgacctgcggtccttgaaatttctttcaaccttgtaaaaatcattttacaagcaaagatccacaagggatgtaccctcccttgttctctttgaacctagtggatgtactctccactagaactgatccacaagagatgtaccctctcttgttctcagtcaaacccaagtagatgtatcctctacttgtaccacaaaggatgtaccctccaatgtgttgagacaaagatctcaggctgttaaac

SEQ ID NO: 157766 - DNA, 411 bp, Glycine max
  unsure (1)..(411): unsure at all n locations
agcttgtctatccgatgcagcaataatgattgttcgagttatgtnggggaatgattacgaacccggaatgggtttaggcaaagacaacggcggcataactagcttgataaatgccaaaggaaatcgtgggaagtatggtttaggctataaacccactcaagcggatataaagagaagcatcacgggaagaaagagcggtggtcaaagctcgcggttgagacaagaaagtgaaggaagcccaccctgccacataagtagaagctttataagcgcgggtctgggagatgaaggtcaagtggtcgcgatatatgaagatgatgttccgagtacattggatttggtacgaccatgccctcctgatttccagctaggaaattggcgagtggaggaacgccccggcgtttacgcaac

SEQ ID NO: 157767 - DNA, 437 bp, Glycine max
  unsure (1)..(437): unsure at all n locations
ntacattcctccttgcgatatntctctatattagctatataactgctcaatgatctatccaccaattgctttgcaagctgtcccacttggacctcaagattctttatggcagacattgtgctcttctggttggacatagaaacctgcataaactgagctagagtctcttctagtttcattgtgtgatcataaagactangcccttgttgttgtggccttgttgatggtccaccatgatctctattaaactaattttcaaggtggttcctccattgtccctgctgttgattatattgctggccatgttggaatctagaaaatcctcctgcattaaattatttttggctgatttccatgaattgcctcacgagtgggtgtcttaataaaaacagcctcaattcatactcccccaatgtccattgcaaggaatttgtgcg

SEQ ID NO: 157768 - DNA, 413 bp, Glycine max
  unsure (1)..(413): unsure at all n locations
agcttgcaactacaaggggaatttttctnctgattctncnacagcnaanaatgaacttaagagtgtttagaaagagaaagttgtagcggagacccttaccatgttaaagggtcaacttactttgtctatggtatgtttgctcctatgtagtgtgaactttctcaaggaaaatgtttactgctaaacattagctaatttctataaatatgataagatcgtaagcattaaaaacattgtctttttatggtagtagtcctcattagtatgcacttatgaactattgctacaaagggtttcttaaagatattttggtttggatgaaactttgattattttttatatatttttattaagttctttgtggaaatgatattatgtgtggatgcttctttaaaataataataacttctatt

SEQ ID NO: 157769 - DNA, 375 bp, Glycine max
ggctcggcggccacaaacaacaaagtactttgggcacctacgataaacaaaaggcctcagatatctaaagaagggggggttgaaataagatattccaaactattcccccaaataaaaaatctatttcaccctttacgcaagatatgaattcccttaaggacaaccttcctaaatattaattcaaatgaaacaatttgaatatgaatataaagaaataatcacataaaggagattaagggaagagaaaaagcaaactcagttttatactggttcggccacacccttgagcctacgtccaggccccaagcaacccgcttgagagatccactatctaggacactcctttaacaagttctaaacacacaaggacaatcc

SEQ ID NO: 157770 - DNA, 414 bp, Glycine max
accctcaaaaaattctggtgctactattgaacatccttcttactttacaagaactgatcttaatattgtcttaatttctcaagatgcacatccttctgatgctccattgcaggtttcaacttctttcctttcttttgctagtggttcaaatggataaaatgagggtctggatgttggaatctcacatgaggattataataggatgaatgaatcttcctgaaacaagttacaacacaactgaacttagtttaagaagctctagcgggttcgctattaactcaagccctaacccattaatgcctatgacaaatccttattgtgggtcattttatatattatcaaccaagttatcaagctctacagttacattctctgttctagtggaaaatggcgaaccaaatttttgaatttcta

SEQ ID NO: 157771 - DNA, 327 bp, Glycine max
  unsure (1)..(327): unsure at all n locations
tncncaacatcaaagtaatacgacatgcaattgtcattgactaacaaaatcaagcaaaacagggcatatgcagataactctgcccaaaacacaactcaaaaacacaggctttctcacttaaagaccccagtgaaaattccttcgttccagaatgttaaccggtggatcgactcgaaaattttactggaagtctctagtacataaacctacattttgacacgtgggatctacttgaaaatatccagaactccttctgcgatattctttcacagccaatcacacacaagcatttttctgcacttgggcaaaaatctgctggacaatttc

SEQ ID NO: 157772 - DNA, 271 bp, Glycine max
tcatctgaaacaagtctataacattgctttagacttgctccacccggttttaaggtgaaaacatcctccgattaaaaattttggcctctccacacccattgtacccataaacaggctcttttctttcacactcggcatacccctttctaattttcttcatttccaagcttttcttactaagtcctagatagacctgtcttaaacttaggagcaacgtacctttatacttcatatttctcactaaccccaaattggacttttcaaactctca

SEQ ID NO: 157773 - DNA, 375 bp, Glycine max
cgctgcctcatgaggaatgccttgctcttatataactttaaaaagcccttcgataatatgtatggatgtaaatatgtagcataaaatgcctcgcaaaatgatgaataaaatgtcgtgcaaaatatgaatatatatatagcatgaagatgccttgcataatatgaatatttatagcatgaagtgccttacaaagcgtttgaatgggtaatgtagaagtgttttacacatatgtgtatctatgagtaggtatgaaaagaagccttccaaaaaatgtgcgtatatatatacgatgtagcatgaaaaggctcgccaataatatatatggttgacaaaagagcctgcaccaaattttatgtgggcaatcctatgtggcga

SEQ ID NO: 157774 - DNA, 410 bp, Glycine max
  unsure (1)..(410): unsure at all n locations
agctttaaactcattatgacgggnntgtgttattttaagtcccaacggtgatgcaaaccaaacttgttgtttctctagacaagagactagagcatgaaaaatgattccatcctttattccacacaggggacacatacatagtatcaacttgtattcttttcttgaccaagtttgtttttactggaaaaatttatgaacaacattgccacaccatgttgttgcatttagggagcgccttactattcaagatcaaattccaaatcttgtctacttggtttgatgatgattccaaaggttgatatttcatcctagccaaggggtaccatgttctcatcgtgtaaatcatatttggtgtgtacttcgaaattaagaaatcttccaaaaaagatatgtattttcaacaaataaaa

SEQ ID NO: 157775 - DNA, 303 bp, Glycine max
  unsure (1)..(303): unsure at all n locations
tcccaatccaccgcggaatctcgccgctgagcctgnctttggagagggaganccagttcagcttggtgcagttaacaagcccatagggaatgttcccaatcaagtcgttgaaatccaggatcaatatctcgaggcttttcagatacatgagctcctgcagtatttctccatggagctggttgagccagatgatcaagtctttaaacttggaaagagaccctatgcattgaggaatagttcccgtgaggaagttgaaactcaagttcacagcaacgaggtttgaacagatgctgagcgtgggtg

SEQ ID NO: 157776 - DNA, 372 bp, Glycine max
agcttgtagatcaccttctttgttttataaaatgaagtaggaatctttccatattcaaatgcatctttcaatgactccaaaatcatcgtcattgctttattagtcataccgcacaaacattttatattatacaacctcaatagaaaaaacaactttgagtactttcgacacctttcatacaattctttggtaccatctctaagcaaataagaaatttcttcatttacttcattaggcatagtgtctacaaactcagatgcttcttcatacatattaggacacacattatagtgtctattgttcccaaatgcatcatttatcatatctatcactggattttcattttgcaatggttcatctattgctacaatg

SEQ ID NO: 157777 - DNA, 381 bp, Glycine max
tccggtggatctgttgttactgatcacttttcgccacatagggtgcatcaatcatcctcctcctcggatataaatgaaaccatgggcagtatggaacctaaaccaaaattctctctacgaagcttgctatggtctcgattagaacgcctttccggtggttttgggccccttatatcctgacaagtttatacctccggaactattgttctacttcagtgaatgtcactaccaaatatctgtgtacataagatttttttagttaattagcttatttttcctttccctcgtttgatttccttgtagctgatgtagaaaggtaactgggtaagagtgttctaacttgcattttttatgggcattgtacatattctttgtttcttc

SEQ ID NO: 157778 - DNA, 362 bp, Glycine max
  unsure (1)..(362): unsure at all n locations
aaccgcggcatgcaagcatgaagaagagaacccttttttattcataggcagcttaaaggtcccggggctccacanaatgcaagaacttatggggctgaaggacaaccactgggtggaaaaaacgccttacaaccattaatcattgagtttccacatcttaacagtaaggaatatcttgttttgcctgaagagctataaccattagcaaataaaccttctctaatggctgccatagattacataatctttgagaagagtgatgttttcatgccatttcatggaggcaaaatgggccatgcccttcaagtctaacattacataaaatatagatggccgaatctataattatactgtaataactc

SEQ ID NO: 157779 - DNA, 384 bp, Glycine max
tctggaacattgagtctcgggactcgcctttttgttgacatcagcgacgtggccggtagtggggtcgcaagcaacgccttaccaactccggctacagtcgttgcccgaccatgtgttgaacatgcccaagtagggctcggccaaggcaaccttaaaggccattagtgctgcccgttctgacggcgggcagggggtggcggcggacataatggatacgagaagcaacgctacaaagaacaaggacgaagccatgtgcttgtgtgtgtgtcgcgcggaatgcaatgaaatgcatgggtcacgttctatttatacgataagtgtttggtaaataactgaatcaaacacatctagatagcacctatcatagtcatttatgattaatat

SEQ ID NO: 157780 - DNA, 363 bp, Glycine max
agcttcttccagtcttccatgaaggtgtgaagtatggtgctggaattggccctggtgtctatgacatccacttcccaagaataccaccaactatagaaactgctaacaaaatcaacaagatgttggcagtgcttgagaagaacatcttgtgggtgaagactgactgtgggctcaagactcgtaagtacactaaggtgaagtcagccctcacaaacatggttgttgcagcaaaactcatccgcaacgaacttgccaagtgaatggtataagagagtagaatcttccaagtcatttggttctactttataatacaccaaagaaaaattttctctatattgggttgtttcaataactgtgtggaat

SEQ ID NO: 157781 - DNA, 390 bp, Glycine max
tcggtcttttgagtcacttttgcggcaattgtatctaggttcccctacaaactaatgtgtattgtcaattgagttgagctatactcattggataattaaattggatttattcatgtagacctaatacactaaaaaaattgatttgtatgcttaattagctatgttgatataaaaaaattgtctttaaatttttccagtaatctttaattgagtaggctatcacataccaatggaaattatcttaacgatttttgacatgtttagcctttgcacagggaaacattcatattccttaatgttagcttagactgagtgtactgaaatgcaatttggattacagtagtgttcactatgtttaaattatttgtgctatagccgtagaagaattgt

SEQ ID NO: 157782 - DNA, 360 bp, Glycine max
agcttgtgacattaaacattctctattcttgaggcaactcatgattggcatacatttatttactgtttgttgcatgttttcttttaaattattaagacaaattgtctatcagtacaacggtcgtgatcatttggccgtaacccaggcagttagcgtaggtgtcgagtacggccgtggtgactttaccacgatcatagtcggttagttttttagtttcggcattttcattcagttgttatttcagtaaactaaattagtccattttatttaaatcttttatttattttttttcttatttttttatgcattgaggacactacatatattaagtgtggggatgggtatcattgctcccccaat

SEQ ID NO: 157783 - DNA, 390 bp, Glycine max
ttgatagaaaatgactaaataatcacaatggaagaaaaactgaatcagtttaacaaaaatgatgtctggacatttgttccaatgccagaaaacaagagcaccattggaacaagatgaatcttcagaaacaagttggatgaacaaggaaaagtagtatgcaacaaagctaggttagtagcttgaggatataatcaacaaaaagttatagatttctctgaaacctttgttcatgttgctagacttgaagttataagaatcattttagcctttgttgctcacaaaaacattaagctttttcaaaaggatgttaagagtgcctttttaaacggtttcattgaagaagaagcttatgtcaaaaaacctctgttgtttgaggatcaaactttttca

SEQ ID NO: 157784 - DNA, 394 bp, Glycine max
tgttcatcttgagataataggtggtcatcctcatttgaagttgatggtgcaacatatttctttggcctaacatgaactccaatatttttacagcttctaatgttatgattggtttggccacaccttccacatgtaaactcagccaatttcctctttagcttatgtcctgtgacattgtcctcatctacagatctccttctatttttctttggccttcctctttggacccttttatgtggtggaacagggtgtgtatactgtgtctgggcccaatattgtggtccttggactggttcaataaaatgctggtatgtcttattataagcttctattgacagccactcatgacacatgtcctcaggcttccctcctttgtgagttattgttgcaatgg

SEQ ID NO: 157785 - DNA, 367 bp, Glycine max
  unsure (1)..(367): unsure at all n locations
agcttgctagagctgtatttatcaaaggtatctnggtttaatattttgcatctaataggtgtggacttggactattggttgtgttaacagtcatgtatgtgctggtgttgttattaactatactagcttcaccaccaggttatttgcataggttgtgctactttctctttttattgctggtcgaatttgcatcagtattgaattattattcgaaatatcgcaggtttcacaggaatagacgtccaatatgaaccaccgtacagttgtgaggtgtgtaaaagaagaataatatgaacaaattttagtataccatacttaacttacgatgagaaaaatttaattcaattttcccggcatccatctttga

SEQ ID NO: 157786 - DNA, 386 bp, Glycine max
tcttgaagaagcctgttaatgaatcttcttgaggaagctacatgaagctgcctcggtaaaaacactgcccagcctttgttaaccgttggatcttctcgaaatttggtccgcagttttgaaacgatctgaccgttgggatctttgagaagatgtctaaagtgtgctcgaagcttccgttctcgagagcatttcttatttaagcatttcagcctttgctttcgtgtagcttatgaaaaacgccatttcttctcctttctttcttccaaagccatttctaacgttccaagcactttctccatcacccacaaccaccattagccactacaaaccatcattgttctccattgaaaccccacaccgagaggaacccttctaccgaagctgaa

SEQ ID NO: 157787 - DNA, 360 bp, Glycine max
agcttcttatccaaggcactttcttggtggtgaagctccttcttccatggcttattcccttgtggatggtgcctcccctctcctcttctcctttgccttccgctgcatctccatggtggaaaaccaccattgaagctcaaagatccagcctccatagaagcttcacaagcaagctaccatcaagtggtaatcagagcacaagagcttcaagtaggtgctccttaaaccaccattaattttttttctttaccttctctttcattcttgtttcttcatttttctccgtgtatctcctcacatctcttgtgctaaatgttgttaaaatgattctttagagtttcaaccgattaaacttgctat

SEQ ID NO: 157788 - DNA, 387 bp, Glycine max
tgcctcaaagaggtccaggaagggcttggcggccaaaggaactagttccgccccggagtacgacagtcaccgctttatgagaattgtgcaccagcagcgcttcgaagccatcaagggatggtcgtttctccgggagcgacgcgtccagctcaaggacgacgagtatactgatttccaggaggaaatagggcgccggcggtgggcaccactggttactcccatggccaagtttgatccagaaatagtccttgagttttatgccaatgcttggccaacagaggagggcgtgcgtgacatgagatcctgggttaggggtcagtggatcccgttcgatgccgacgctatcagccagctcctgtgatatccgatggtattggaagaaggcca

SEQ ID NO: 157789 - DNA, 331 bp, Glycine max
caatatgctactggacatgtaacatacatccaatctctgaaaatggcgtcaactgcactgctagattacctcaaagccaaagaatcacgtgagttgtcattggattcattcataactccacctttaacacctgtgaagaaaaccagtcctgctttcattaccatgccatcaaaatccttcaccccaacaacaatcgagcttggccccaagacaactttgaaggtgaataacctaaggccgagtggtaatcccgcgatctctgtcgaggaaaggcctccatcgcctgaaatggcccgcgatgaaaagcattctccaatgcatcaacgcggca

SEQ ID NO: 157790 - DNA, 364 bp, Glycine max
  unsure (1)..(364): unsure at all n locations
agctaataatttatttttttatacatgttcgccatatacacagatgatttncaaattggtcccagttcataaattaattagcataggtcataacaaaacgtttaacacaagtgtcattttacacaatttatagtaaattcatttctcatcccaaaatttaagttttatacatgaaaacataagtcccaaatgtatactttaagaatataatttattttcatcataagagaatccttaaattcaagtatcaattttcgtgtagtatgtgcgacaacatattaaacaacttgagtacacaaattttaacaccaacaacatagttgtaaatttcaagcataataactattaattgtgcaaagcaatc

SEQ ID NO: 157791 - DNA, 395 bp, Glycine max
tgagtgagccaccatagagtgagtcaattttgttaacacatccttgtaaccctactatcactttgtatagtggaagaatctccatattggagaagtataatcgtgtgcccccattactaccttttattactaagtgtctatcttaaacttcacgaagcgggaaagtgtgagttttcccaacgcaaataaaggcgtatgtcatactcatgtccaccatcacaaattcacaatgtcacataccaagattccagtagcccttcccatcaataacttacttccttctctatttaaattcaataaacttgaaaaaccatagttccaagaatccccctcaatccaagagtagtgccacaacaaaaacctgctcactatatcttactcttctagatatgaca

SEQ ID NO: 157792 - DNA, 352 bp, Glycine max
  unsure (1)..(352): unsure at all n locations
agctgaccgtatcttttcttttaagganctaattactgccttcctacggcactaccactatacttttgttatggctcccgatcgcacttatctgtttaatatgtccatcaaagagggtgaaaccttaaaacaatactcacagcggtggaaagacctggcggcacaattaactcctcccatggttgaaaaagagatgatcaccatgatggtagacactctgccaatgttctactttgacaagctcctaggttccattgtcgccagcttcacctaccttttgttcttcggggaaaaaatccaagtacggtttaaaagaggaaagttcgattacctttcccccacatctccaatg

SEQ ID NO: 157793 - DNA, 381 bp, Glycine max
  unsure (1)..(381): unsure at all n locations
ctatacaatactcaaactcanggatggaatacttacctcttcttttcttacaaaaccgcacaactgtatcgtaaattgctaaaagcttatctcctagggctgcaaactcgataattccgatagtttggctcttgaatggcgggaaaataactctttaaatgcaaaaacgtccctctttctacgtattttatatcttggtgcatgggttgctcacccatgcgatctcagctcttgcaggctagcttacctgcacttctttctttttagatgaacactaaccatctcccctccttccttatcggtctatctttttgcctttaccatccttactttattaaaattatgcgcttattacttcaaaaaatctgtacatggtactta

SEQ ID NO: 157794 - DNA, 369 bp, Glycine max
agcatgtaggggacatattttttttgcttccagctacctcttggcattgtgcagtatgtaccaataacctaaaatcaaatcccccaaatagattttattacccaagtctcaaaccaaatacatgtagacacttttttatgcttatacaaaaatataaaagcacaaggtgcgcgtgttactatacaagtagcagtctgccacaacctccggtgtgaccttcgatacttgccgcaagctcgtcgtggacattccctctattgcttccagctgtctcttggcattgtgcaatatgtgccaataacctaaaatcaaatcccccaaatagattttattacccaaggctcaaaccaaaaacatgtggacactttt

SEQ ID NO: 157795 - DNA, 346 bp, Glycine max
tcacatgttattggcgaatcatgaaaaatatatatatatatatatatatatatatatatacatatataccacccccactcaatcatgaatcatgatcatctaccctcatttctcgaactcacaacgtggaaagcccggtgattggcactagtattcacattcatccctatatctagcgccaacattgctattgtttaattattcaaagcatttctcaatatagagatcgagccatagctgaacccttatttagattaattattgctacaaaacctcactgcgattctaatgaaatctcctcccctaataactattcttcatgcataaaactcgaacctaaatccct

SEQ ID NO: 157796 - DNA, 369 bp, Glycine max
agcttgcctgtctgatacttcatttatgatggcccgagttatgttggggaacggttacaaacccggaatgggtttaggcaaagacaacggcggcataactagcctgataaatgccaaaggaaatcgtgggaagtatggtttaggctataagcccactcaggcagatatgaagagaagcatcgcgggaaggaagagcggtggtcaaagctcgcgttggagacaagaaagtgaaggaagcccgccctgccacataagtagaagctttataagcgcgggtctgggagacaaaggtcaagtggtcgcaatatgcgaagatgatgttccgagtacattggatttggtacgaccatgccctcctgatttccagct

SEQ ID NO: 157797 - DNA, 361 bp, Glycine max
agcttattaggaaaaaaaacatttagtattttgattttgtttacaacaaatgaaccttattccttgcctcctgtaaaattaaataaaaaagaaactaaatttagtatcatcataaccttaaaaaaatagttaaatatatagtatttaaactttgaagggaattttctttctttaaaagaatatattacctgaaaaaattgtgtttgtatttctgtggacgctagtatgagaagttccaattattggagctcaaggtatggtcgttgatttctaaaacctagtccaagaacacgactaaataaaacaaaaaaattatatatgcttgcttttatttagaataaagaataatttgtttattata

SEQ ID NO: 157798 - DNA, 391 bp, Glycine max
tcaaacacttgatctctctaacaacttcttcaaatgggagattcctccctctcttggtcacctgagaagcctccaatacctgtaagcatatatgatccaagatttggagtgttgagctgaagcaattttcattatcaatatgtgatgtctgatgctgaaattgtttcaggaggctcaataataacagtcttgttggtgaatgcccagagtcactggctaacatgacccagcttaattttctgtaatacacatgaactcttcttttgcataattgtatcttatactttatttcagtttatatttttccagttttcgtattcctaaagatgcttctgattataattcagtgatgtgtcatacaataatcttagtgacccggtgcctaaaattt

SEQ ID NO: 157799 - DNA, 359 bp, Glycine max
agctttcgtatttagttttcattatgattttgagtatgagaactattcatctttatgcagtaatttctttatacataaatagaaagcatgtggttaggattgatgattacaatcaaattaggttgattaattgaatccctacaattgagccacccatacttaattcatgtatgattttggaaattttatttattcaggcatattctaaattttaaatgaatctagatattttatatattgttgcttgatcttaccttttactaaagcataacttccaccaatatttaaatgcaccgttcatctaaagcttaaagtgcatcataactttttgtttgttcttacttttagatgttgctgca

SEQ ID NO: 157800 - DNA, 389 bp, Glycine max
ttgcatcactactatgttcaactggcttcttcacattaaggtctgaatcctaagtggtacaagaaaataagtattaaatttaatcaacaacttaacaatattagatttaagtatttattcaaaagacaatttggcagggggattattatattacttacataagataaaggtttcactagatgtctgggccatccaatgaatgagttcacggcgtccctgacatactgaatctctgaagtgggtaaccggacaatggcttcaccatcgtatacagtgtcaacacacacccttagtacatcatcttcataagcaatagtgtgtatcgtgccacctactccaaagacctttccccctgccaccagctgtgtactgtcaccacaaacaaagta

SEQ ID NO: 157801 - DNA, 255 bp, Glycine max
ataatgaacacagggggcctgcttcatcttcaatattccatacgaatgaggcttatccccttctctctagcttgaaatatgtgttctaatgtttccgaggctacacttctacaacattctatgggactggcgatccgctcttctctccatgacgcgaccaccagaattgctaagagagacactaccactggttcgtgtcattgaattgcacaactgccagtgcaaggctcagggtgaggttcgaccctgttccct

SEQ ID NO: 157802 - DNA, 183 bp, Glycine max
acgacacaaccatccccaagccaccagcacgaagggacacaaccacagacacctacaaagcagaccaaagccaaggccacaaacaaggagtgcaaagctggacacagcaccatcgaaccaaacagcaccaaacacggacgggcccgccgaggaggccgcaggcagggggaaacgaaaggaggc

SEQ ID NO: 157803 - DNA, 367 bp, Glycine max
  unsure (1)..(367): unsure at all n locations
agcggggaagcatctcgtttcttgaaccatccgnacgtccgcgacgcacaaacgccatctacctaccttgtttgccgccaccgaccaccgcaaagcttcacgccggaaacttaaccttcaccgctggactcaaccttgctacccccacgaactatagacaatgccgtaggaaaaagtggaaaactagaagaaagcttcttgaaaatggagtaagaagctgttccggaaaaggaaatggcatttttaaggaagaaagctgatagggacaattttggcattttatatttttgctaggtgcacctaacaacactctttaggctttctgcaaattctttcagatgctttccactctaccatattcaaatgg

SEQ ID NO: 157804 - DNA, 384 bp, Glycine max
  unsure (1)..(384): unsure at all n locations
tgcacctcttcactctcctcagcatttattttcttccccgctcagactctntagctttgggagccaagttatcccttacgttctcgacttcaaccatttgtgatagccgcctatgacaccatggctacttcccctaagctctttatcttttctttcctctctattcaatgccttacggatcctctgaagtgtctttgcattagcttcattgaaacctcacgcgatgaaagatgcaatggtctcctctgatggcgcacctctcataaggtaacctaattgtcttatgggcaacaggattataattaatacaacccatcatccccatcaaagagacatttggaaatccttcacatgagcataacactcatgcccccccttcttttc

SEQ ID NO: 157805 - DNA, 388 bp, Glycine max
  unsure (1)..(388): unsure at all n locations
tgaatattcaatagcacgcaatatgtttttgaagatctgtcaatatcacacataatgcatatctgttaacattgagtaatcagaaaatataagaaattccttgcacatgtagcaactgtggtccaagcatagttaacggagcttttgaatatcttcttccaatttgctatggtgtctgcaactgcaaagttcttatgccacaagttgtctgctggagcaaaaaacactccatcgagtcgaagagcctttgctactgagttctaagaagcagttatcagcaagaacttccgcaatagatcctgcatcacattgaattttcacaataggttcttttctcacttcagttccaactttaaattgacatttgacagatagaaggttnttttac

SEQ ID NO: 157806 - DNA, 359 bp, Glycine max
agctttgaaagcggagctttaaaagacaagactggtgaaggagaagctgaaggtggtagtcactagggtcaggaaagaatgtgataagctaaaagatatcaacatgaccacggttgaagcattagagcgggaaacgaaaaaagcccgaaaggaagaatgacccacataattaggaattgttgatgcatttgcgttgtgttttatgctttggctttggcaagataaacaatgttctttttaatgaaaatgggatttgattcgaccctatgttctactgaatgtcctatgtgaattcaatattttagcaacttatcattgtcatgcattcacgtttatttagttgttgcataactcattgc

SEQ ID NO: 157807 - DNA, 384 bp, Glycine max
tgatgtcattcaaaacacactatgtttacctaaatgaagactaaacatgcattgtttatttaattgtattcattatgcgatataattcgttgtaacccgttactagccaattaatattatcaactactcgtttggttaagcaaggaaattgttggtccaacaaaaatcatttacgcatgcagcatacatcattgtcataattgacaacacataatgacatgcatgcgtattacagtttgagcgtgacaacacattggttgacttcagtacacattttgaaactagcagtcgctcgacaacacattggttgacttgactacacattagcgacaacacattggctgacttgactacacatttacgcgtgtgtatttttttgtaaac

SEQ ID NO: 157808 - DNA, 358 bp, Glycine max
  unsure (1)..(358): unsure at all n locations
agcttttggttttgaatgcttgattgcatgataatgaaagcatgttggtaaggtttccnctctataccagcacttggtttgggctgcatcatgatgatttctttgcactttgatggtgtgaaaatgtttttcaccatgaacatgtagaataggtaccaagaggaaaataccttccaaataaagtgtacatatgttgaataggtaaccaaggcttttcaaaatatgtatatatcatatatgcgaatatagcacaaaaatgcttctcaaaataggaacatatgacatgaaattgcctttcaaaaatgcgaataggtcgcataaaaatttcctttcaaatgaatgtatatatgcgtgagta

SEQ ID NO: 157809 - DNA, 385 bp, Glycine max
tgtaaaatggctagacatgatacatgttttggtttggtttggttcaaggataaaagggatgccccacattatttccatgacacatatgcaaaaatgatgatttggaaactttatgcaaaactggtcatgcatgcacctatgtggacactcaagtgtcaaatttttatggtcatgtgatgctagggctcaggattcatttcctctattttagtcaacccaacgtttacaaaatatgttcttttatcaatttgtgcattcatccgagtccattttgggcgtctgggaaaatcttcacagcattcacccttcatgtgtatacacattgtctcaaaaactagttatgatcagcgaatttttttcaaagaaaagttggaagtcatctctt

SEQ ID NO: 157810 - DNA, 355 bp, Glycine max
  unsure (1)..(355): unsure at all n locations
agcttacatgtccattattattattatagcttccagggcctgaaaatcccctgtttttcttcncacttacaatctcaagtaaaatcactccatagctaaagacatctgatttcacagagaattgcccactcacagcatacccaggaggcatataaccactgaagaaatttttatagtaagataatcaaaagttgaaagagtaatataaaaaaatcaaaattggatagaaactaactaagttccggccactgtatttgtgtttgcctcaacttgatctcccaagaaagatcgagcaaggccaaagtctgatattttgggatccaaattagtgtctactaaaacgttactagttttt

SEQ ID NO: 157811 - DNA, 383 bp, Glycine max
tgttcttggagtccttcttcttgatcttggcttacacacacccactttcttcattttcaagcgcatcaatctataggtatggggagttctacctttaatcttgtagatcatgcttgttagggttgttgttgcgtcttgttgggtggaggaaaactcaaactctgcatcttctatatctaaaactaaaaaatggtgaaagttcatagttttcatgttggtagatgagggaatttatttatttttaaatttttggtgcctgtctcggtcatgcaagacgattactaaggcttttgaggtctctggagccatgggtgaaagttttaaaatgttttaggtggcactcctattttatctggatttttcttttattctggtcaaatatg

SEQ ID NO: 157812 - DNA, 360 bp, Glycine max
  unsure (1)..(360): unsure at all n locations
agcgggccctttaattctttgtaccanaagcatccttgaccaaaacatcaaatgatgtcccaccttgcgcggaaactggtgtcgaataacacagttcagctagcgggaatcaaaacatccgcgaatgatattcctcgtaccaaattagggtccgacactttgtaaagttcaatcttacccaatcactattgttgtgaaggagtctttaaaacgattgcaagttaatacagacatcctagatacaaccatcttataactaattacttttatcacacatcacttgagatcgtatcacggtccaatgccttaatgattctctctacttttcaaaaggtaaaacatcattttccgggccaacgc

SEQ ID NO: 157813 - DNA, 397 bp, Glycine max
ttactaggcttgagttgaatacgtaaggcttgaccttggctcattacctgtcatgggatttttttaaggctcggctcggcttacatgaaagtctggcttggcccacgagcctatttgaaagcttgcttaaagacgtctttgattaattaattattttaaatcctagtgaaatactaactaaaaaaagaaacttataaaatttcgtataagtaatgtacaaattcaaaaataattgataaacaaaatcatattgaattcaagtcgttaaagcacaaagtatattaaaagaaaataaaaaaaagcataatattaaaaaatgtatggattagagatgatttacactaatatagccaaacaaattattattagttaaattgacaaattttaatccaatttt

SEQ ID NO: 157814 - DNA, 353 bp, Glycine max
agctttgagctctttaagtttacaatatctttttactcggatgactgattgagtcccgtcatatatcgagacgctcgaaattgaatgttgatgctctgagcaaattcaaacgacaataatattttactcggatgtttgattgagtcccgtaatatatcgagacgctcgaaatcgaatgttgatgctctgagcaaattcaaacgacaataactttttactcggatgtctgattgagtcccgtcacatattgagatgctcgaaattgaatgttgaagctctgagccacttcaaacgacaacaacattttactcggatgtctgattgagtcccgtaacatatcgagacgctcgaaa

SEQ ID NO: 157815 - DNA, 374 bp, Glycine max
tctacattcaatttcgagcgtctcgatatatgacgggactcaatctgacatcagagtaaaaagttattgtcgtttgaattggctcagagcttcaacattcaatttcgagcatctcgatatgtgacgggactgaatcagacatccgagtaaaaagttattgtcgtttgaattggctcagagcatcaacattcaatttcgagcgtctcgatatatgacgggactcaatcaaacatccgagtaaaaagttattgtcgtatgaatttgctcagagcttcaacattctatttcgagcgtctttatatgttacaggactcaatcatactttcgaataaaaagatatggtcgttaaatttgctaaacatgaacattcaatt

SEQ ID NO: 157816 - DNA, 371 bp, Glycine max
agcttgtaattggatccttatattcctaacccagaaactcttcacccttcctctctagcaactgccaaacattggtcaaagcagcactttcccttatcacacatcaaacaaggttttaaaaaaaaccaccaacctttcatttcatgactaaaactaatacacacattcttcaatcattcatcaattaaaacatcttccacgtaaatgaagagataaaacacatacgtacaaaaactaacaaactaataactaacattcactaataaaaaaaaacactgacacacatattttaatcttaattcttaataagtaacatacgggtccggtatccaagtgggtgggtcgggaccgtaatccttgtaacaaataaa

SEQ ID NO: 157817 - DNA, 386 bp, Glycine max
tctacttcggcttttctcttgatttcttctgtacgtctagcttctatatcagctctgtgcttggcttcttttgttggatcaagtggcctcggaataattaagaagggggggggggggttgaattaattatgaacccgtcttgactaacttaaaatctatccttcttaatcttactaaattcaaataggcttttactactaagctaagatagtcgacaacagaaatagaaacttaactaacattaaaagcgataattaaaagttcacagcggaaattaaagacttcttggaacaataagacaaactgatcatttatactggttctgccacaaacttttccttcattccgtccccaatcaccaactgtccttgatactttctttcaac

SEQ ID NO: 157818 - DNA, 362 bp, Glycine max
agcttcaacattcaatttttagttttttgatatattacgatactcaatcggacatctgagtaaaaagttattgtcgtttgaatttgctcagagattcggcattccatttcgagcatcccgatatattacgggactcaatcagacatccaagtaaaacgttattgtcgtttgaatttgctaagagcttcgataatcaatttcgagcgtctcggtatattacgggactcaatcagacaaccgattgaaaagttattggcgtttgaatttgttgagagctccgatcttcaatttcgagcgtctcggtttattacgggactcactccgacaaccgagtgaaaagttattgtcgtttgaatttgccc

SEQ ID NO: 157819 - DNA, 361 bp, Glycine max
  unsure (1)..(361): unsure at all n locations
agctttctaaacacaacctattttgtatcctaccaaacattaagtatgacaaagacaaaattngtgatgcttgtgtcaagggtaaaaacaccaaatatagtttacactctaaaagtgcagtattatcccataaagtcctagagttactacatattgacatatttggaccaaccaaaacacttagcctgagtgggaaaagatatggatttgtgatagtcgatgacttctctagattcacatgggttttattcctttcacataagaaagttcaaaatgaaaaagaatttgaaaattgtctctgtaaggagtaatcatgagggacaatttgaaaaagctttctttaaaaattactttggtgcaa

SEQ ID NO: 157820 - DNA, 390 bp, Glycine max
  unsure (1)..(390): unsure at all n locations
tgccacccagctcgcccaggcgagcaatgttgcttcctccanaagcaacagccttctggaggaatcttctatagggcccaagtgggcctggttgctatttgcacccccatttttactaaatacaccccttgcctttttttggtgattctttttttcgtaaagttacggaaacttacgaatttcgtaacgatacttgttttctttctgtaatgttacggaacctcgcggattacataatcatccccttttttgacttacggaatgttacggaacctcactatttgtgcaacgatgcttccttttgatttccggtgtgtcacggaaccttacggattgtgcattaataatttcttttgatttccagcacgtcacggaatttcacaaattgcc

SEQ ID NO: 157821 - DNA, 358 bp, Glycine max
agctttccctcttttccatactttcgtatacagtatcatattagtccgctaaagttacagatttattttggcttaacgtaagttttggttcattatatttgtaattattttattttaatatattaacttttaaaagttttatatgtcttttatattttaaaaatatatcactttagtttttttttccaattttattaacttttaaattctaaaataatttaatgtcattttttatcaattatatttcacaattatttttgctttatttaaaagtttaattttgaagtcttactcgcaatcctaataaagagtcacattatgactttctagttcggatctgggttaattggtgatttag

SEQ ID NO: 157822 - DNA, 386 bp, Glycine max
tcatgggataatgtgtttgtcatgaaggctttgcttagaggctttgaaatggtatctgggttgaagattaatttttccaagagcagtgtggggatttttggtgctgataccaattgggttcttgatgcagctcactttctcaagtgcaggcagatggagattccctttcagttcttggggattcctctatgggctaagtcttctagctgcttggtgtgggaacctttcattaaaaaatttgaatcaaagttgtctaagtggaagcagaaagctctatcaatggcagcgaaggtcacattgataaattcagtgttaactgctctaccaatttttttactgtctttttttataattcctacaaagtaactcataaagtgagatcctta

SEQ ID NO: 157823 - DNA, 370 bp, Glycine max
  unsure (1)..(370): unsure at all n locations
gcatgcaagcttgaatagaatggggttctatataaacgnttaaacacccaaaatttaatccaactgaaattgcaagatttgaaaacaaattggcaccccctaacgcaccctcagaggttgggtttgcaaagtgcttcaataaagctattattagctagtaagtaacaagcaatttaataacataaaaacaaaaataaaacgttgtttgttttttcagtcctaaaagagcctataagttgttacgtttcctgtcctataggccgttgcacgttttctattctattctatgccatgccatgccattggaagaaattgtacttacgcttaaaacatcaatgtttgtacattgtactttgtaggactgtaccaa

SEQ ID NO: 157824 - DNA, 388 bp, Glycine max
tgttatcaatttcctcacccccctgtattatttgtgcatcctttagtctttgtgatgcttgaatcatgtatttcacttcacatcatgatgttggtctataggaatgagtcttcgagcatttatcattgacaagtgcattattgtttgctttgcttatttccttctcaactggatcacttttaaggatttaatttggcgtgtgcattaaacttgtttataccttatagggacttgtggtctggaagaagccaatgatagctttttacttgaaaatcaactgacagggaagcctatgccctacgaattataaaaaaactaaaccttgctgctaaatggatttggtgtagttcacttatcaatttgtggtagtttggcgtatatggttgga

SEQ ID NO: 157825 - DNA, 393 bp, Glycine max
  unsure (1)..(393): unsure at all n locations
gagggattatatacaacctgcctgcatgcatgcttgctagaaggtcacttatattgcctagcccanacactctagacccttgctctctaaccacagactaacatcggtcaaaccactctttggccttttctccttgaacacgcataaaacaacgccctcctgtgcatcaatgactaacaattgaacaccctttctctaatgctgcatacatttacacttcacctccttaacctaagagataaaacccgtccctacaaaaccttgatgacctctacctcaccttgtctaatccaaagaggcggagtcacccctaccttaaacggactagttcttaagaaacataccggccccgactccaaccggatgggccagaagctgaatgcccgagccaaa

SEQ ID NO: 157826 - DNA, 392 bp, Glycine max
ttgagcaaattcaaacgacaataacttttttctcggatgtctgattgagtcccgtaatatatcgagacgctcgaactggaataccgaagctctgagataattcaaacgacaataactttttactctgatgtctgattcagtcccgtaatatatcgaaacgctcgatattgaaagttgaagctctgagcaaattcaaactacaataacgttttactcggatgtctgattcagtccagtaatatatcgaaacgctcgatattgaatgttgaagctttgaacaaattcaaacaacaataactttttactcggatgtctgattgagacccgtaatatatccagacgctcgaaattgaataccgaagctcttaacaaattcaaacaacaataacttt

SEQ ID NO: 157827 - DNA, 387 bp, Glycine max
tgaagaaacttgaaaatgttttttctttttcatgtccaactctcttcaatggcatttgtatttattcttgtattatgtgttgcatcttaatctctatcatttcatatgtgcatcatgcatcatcacatatgagtaagaagaaacgcttttaagttagaaatctttagtgtttaaaattctctattttaatcgattataagcatggtcataatcgaatacacaaatgtttgtagcttgcagagaagtttctcttatcggtttcgtcgattacaaggtaattgtaatcgattacacagttcaaataagacaatgattggtttttcaagagtctttgctttaatcgaatactaggtgatcaattacttctctcttaaaaagtgtttcata

SEQ ID NO: 157828 - DNA, 356 bp, Glycine max
agcttgagagcaattttcttttctcttctaattcttatactcttctatggttttaggcaattaaattactgctttagttgtattcttaatctttatcatttgaagagaattatattttatcatttgaagaggtcagtttgaagttcattagtgctggtaaacagatactctcttcatgttgttgatctttaaataagaattatactcttcatgttgcatctttttgcttgtactcttctctatttcattcttcttttgcatctaaaacttatgttcacaacattaatccaataaacacatggtagtaaatcaaatcaataatattgatactcatttatgagttagttttttttttt

SEQ ID NO: 157829 - DNA, 380 bp, Glycine max
ttctacactaacaaggtatgagctctttcttaatttgttgctcttcttagtaagttcttaatcagcgcggtggcattgtccgaaggttcttatcaaattattgagtcattttgtccacttggctaaccatataaaagtatcaataagaattgtaatgtggggtttcattttgttgtggcagctgattgtgctttacgtggttttcaagcttgacgagagttacacgccgagcaaagtttccatccgtgccggtgatggttttcacaacttgaaggtaaatttttattttattggtttgggtttgattgggatgattatgcttaattatttggtgatgactttgggaacatttttatgagattaagaccgtggaactcgtg

SEQ ID NO: 157830 - DNA, 358 bp, Glycine max
agcttgcaaccacattttttttgttttttcaaagttactaaagccctcaaaaacacaacttattgactagagcacctatctggctatgagatacctaggacatggaacatcactcacctaacattctattacagttagaattgtaagtggtgatgcactatttttctactctaatatttttcctaaaaggtttttagcttgaggttttaatgaggcacacacgacttcttttttgaataaaaaagctcttatcatcatcacatatttttatggatctgattaaactattgggttacttacactaaagaaattccattatactttactcacatgtggctcattgatcaaaagatcaaaa

SEQ ID NO: 157831 - DNA, 317 bp, Glycine max
  unsure (1)..(317): unsure at all n locations
acttnctgctgcatgattgctacctgctgctttttcttttaggcatgggcaccaggagctctacataattggttgtgccgaaaacaaacttaggtgcttacatatgaatagtccctgttataactgggtcgctgagtaacgaggaggtcggtcattggatgatgatggacattggatggttgaaactaaacttgcacgtatgacactggctgtcacatgatacgttgctcccgtattcttacatctattgtgagccaccaatacgtgtaacctcctattatgatgatcagactgaggaatttcactgagatcgttca

SEQ ID NO: 157832 - DNA, 340 bp, Glycine max
acaagcttgaaatttttgttttcaaaaacttcttatttgcagaaggaaattcaatccctacacctccaatctttaatggagagggttaccactactggaaaacccgaatgcaaatttttattgaggcaatatacttaaacatttgggaagccatagaaatagggccttatatacccaccacagtataaagaaccacattagatggaagcaccacaatataaaaacctatcgatagatggtctgaagaggatagaatacgatttcactataatttaaaagccaaaaaaaatattacttttcccctaggaatggatgaatttttcagggtttcaaattgtaa

SEQ ID NO: 157833 - DNA, 416 bp, Glycine max
  unsure (1)..(416): unsure at all n locations
gtgtactatataaccctcaagctntacctttctgaatactcgccctttctttttttgcttgtcaactctaagagccactttcgatgagtacccattagcccttggattttattcctgaagattagtgaatatctaaatacaatcaaatgatggaatcttcacactattttgtgctatatctacttaactattaactatccaataacatccaagggtctcaactgtggactgaattgtttcccacccatgggaagtctgatttttaatatttgtgatcgtgaatagtaaaacctatttctacaagcacagcaaccagtttcattaatttctctttgacatgtgtgggagtacatattgctgtttgcatatgaaagtgacagcaaggcatttcatatgatctgaatttgtcaacaata

SEQ ID NO: 157834 - DNA, 354 bp, Glycine max
agcttttagatttttttttatcaagaagtcgttgcctggccccacttgttataaactcaatttttttaactaataaatattaaatatcaatttgatgacaatcttattattattttgggggtaattatcaatacaaattcaaaagcactttggttaggcagttgctgaaggattttctccataataatagcatgtttcttacgttaaagtcatcatttattggatttatttcttgccacataaattatccattgacttgacatttaatgttggtaatggaaaccaaagcaccatacggtacaacacgggcttcttctccaactaccatactctatataaagctatctaacaata

SEQ ID NO: 157835 - DNA, 383 bp, Glycine max
tattaccggaagggtggcacgttttttttctaagccacaaaaaccatgaacatagacgctcacaaataattactcataatgaaggtaaaatgaaaatgctgattccaaatagttctacacttaaactgtgccttaaatgtggagtgtaacaaagaaaatgatgactggaactaatattttgtcaatgatgaaaatgaaaaaaaaattattggcttgctgtatgaaactgaaacgagacatgtcatactttgttctaaaaaaaattacgactctaattaaataatgtatgaaaaatttctcaacttgaaaatctggatgtgtcacatatgaatattcggaagggtgaatacgttgatgaaaggcgtataaatggaagagctata

SEQ ID NO: 157836 - DNA, 366 bp, Glycine max
tgcaagcttcagcccaatggatttgtttctttcattaaaacggagacacaataaactcgagctttctggttgatttgagaaaaaaaaactctacaggaaataatgaatttttttattactttttgttttcaatatttttatacaaagttttaaaatagaaaaaaaaaattcaaagccaaactatttacgatattttatgtaccaaaaacacaaactatttaagatattttggagaaagtgagggttaaaaaactaaaaatgtctttatgtacactgaaagattaagaaagcaaagttggcaagaaactatcagcaattggttttctcttgcgtcatcgtgtaatgaaaggcttaatgcgattgcta

SEQ ID NO: 157837 - DNA, 390 bp, Glycine max
tgaaggtgtgtagcccaccatcttttcatattagaatactggtaatgtgtctactatcattgtcattattttcttctctgtcattgaggtgccacttgagctgccaggtctctccacctttgggcgtattcttttgaaagattcatgccccctttttgcacatgttctgtagttgcatcctatccgaagacattatactgacactgcctaacgaaggcaaccactaggtccttccaagaatggactcgggaaggttccaagttagtgtaccaggtaacagctaccccagtaagactttcttggaaggaatgtatcagcaattcctcatcttttgcgtatgcccccatcttccgataatacatctttagatggttcctatggcaagtagtc

SEQ ID NO: 157838 - DNA, 368 bp, Glycine max
agctttgcttggagcttctttgtgttaatgaagaagaagagaatggcaacgtgagggagagagagagagctgtctgaaaagtgtggggctgagtgaagagagagagagagttgctttttaattttaaaaaaaagctttttcctcatttcttattattttattataaactatgccacatgtctccatttgagtggagcaaaaagggcccactttccctttttgactgtgacccatactcagccacaaaagtgaggaaaatctgacctttgaaacgctaaaatcttgcctcggtttgcatgccgtttctatggttccagttcctcgcgtttctctgcgtccgtcggggccagttttcgaaagtaaccaat

SEQ ID NO: 157839 - DNA, 382 bp, Glycine max
ttgaattcattctatgcaccccttatgggtccattcttgcattgtatgtcttcatcttcattcttctactgtcggtattcattttctttgttttaagcgagtttcgaccgatcgtttaagccgtaatctaacttaatcaatgttcaaatgaatttcaaccgatcgtttgctttgtaatctcgtttaaacacctttaaaataaaattcaaccgatcatttatgttgtaaccttggttaatcatcaaaaaggtaagtttcaaccggtcgtttactttgaaagttcgcttttaatgagttgagaaataaccaagtgaaaccaaagcaaaaatcaactcacaaatcaagctttgtccacaagaaaatcattcgaatccgttcaaag

SEQ ID NO: 157840 - DNA, 356 bp, Glycine max
agcttggaaaattcttcctttctaactatattagaatataacctatatattttccttctgtgtattcattagtatctaagtaactccctaaatttatgtcattttttttgtttctctctatcaggcttcatcatatttgagccttttggaccttgatatttcttatactctccctttagtagcatttgtaacagctgaaattcaggtgataaattagacatctaaatgtatgggggagctacaaatgtaatgttattccttgaactgcattagtcagtccctggcaagacaagaagcataaaaagtaaatcagcttctttttctttctattgactgtttttactttaggcttttct

SEQ ID NO: 157841 - DNA, 390 bp, Glycine max
tccactcttttgataaatagtaggtactttttattagacaagttcttctataagatattaataatataattgttgtcatgtatctcttttttcttttataagatattaataatataattattgtgtaaatgtcaaattcaagccttggattatgactcaattaattactagcaggttttacaatattgcgtcaattacaaaaaccaaaataaatgtaataaattgatataatgatagcataaataaaaatattgataattgaagtatatcaataaacaaaaataatagtgaaatatttattgacagaaatgaaagtgtcatagtctaaatctaacacatgtatatatgaaataatattatataaattctaaactttctagtgttgtaact

SEQ ID NO: 157842 - DNA, 360 bp, Glycine max
agcttttatttaatattcattttttacaaaaaataatattaaattaattaaaaataattatatgtatttaatcatataaatatttatagatagataaacatagatataaatagaagatagacatagatcaatttggtttataaatcaatctagtcaaattatatataatttaagtttaaattatttatttaacaagtttaacttttaattcaaattcaatttatttaaatcatcaactaagttcgacaaattagttgttgaatcgagtcttaaactatatttaaattagtttagttgattgtgaatccaattagtccaattacataccgataaagtttgttacatatagaaaacacataa

SEQ ID NO: 157843 - DNA, 389 bp, Glycine max
  unsure (1)..(389): unsure at all n locations
ntggttcaatgattttctcaaatcatcctcctaaacccaaaatctacgactcttaactttgtacaatcacaaccaaaagcaatttaagaccatagaacaactattcttcttatcctcgtctcaaatcaacaaccctacaaaaatcaaataatccaaaatgacacaaaatgacattgtttacaaatttgttttttaaataacacgcatttagatggacacgccatcatgttttccatgcaaactaatgataggaatgtcacacaaaacttttaaagtttcaggaacccaacaagaaacaaaaaaatttcaaagataaattgcgatattcatatatattttagggatcttgaaaatatttaagcctgcattttattgagaagttatctcat

SEQ ID NO: 157844 - DNA, 366 bp, Glycine max
agcttacatcactaggcctacccagatcatatacatataaatgaaacggtcctatactcagaattttcatctctaacttcccgcctagtgtggaaactacacaaaagcataagtcagcaggcatccacgaataacaaagatgtcgaaggaagtgatccacgcctctggtcacgttgggtatgcaccacttccaattgcattcatcctcaagatggagggtcgactcctcgctagacatctgatcctaaataaacacataaggagtgaatcttcccacttagtcaactagacacaaaaagacttaaacaagatacacatataatctatcaaccatgacgatttggttatatacaccttttatcatgg

SEQ ID NO: 157845 - DNA, 394 bp, Glycine max
tcatacgacacgtgaccccccacccatgtgttcaatagtagatcactatattacttcttctttaggcataaagatggttgtaaccaatcatacatatagagtggtgtcattttttcgttttacataccaaccaatactatgacctgactcttgccatctctcaaaccaattcgctctttaaagatttgcactaaacaacatatagtttctttatagccctatactcaagaccatagtaaactagacagatttccatttaacattccctgctagggagtgcaaaaaccggttcaaaaaaaaaataatcgaactgttttaacaaatttgattgtaaatctaaatagtcaaactatgttagaaaattggttccaaactagattgatcttaaaaaatc

SEQ ID NO: 157846 - DNA, 362 bp, Glycine max
agctttgcctttagtttttttcctcatcactttcttccgaagctttaacctcattgtctctcacagtctttagatttgggagccaatccaatccttgtgtccggactctcagccacttatgatagccgccgatgatcccattactgcttcccctaacctctctgtcctttcttcacgccgcatcccatgccttgcgaactccttggagtaccctcgcgttgtggtcactgaaaccccgtgcgatgaaaggcgtgatgctttcgtctaatggcactcctctcatggagtagccaagctgtcttatggcaaggacgggattataattaatacaaccccttgttcccatcaagggaacatttgga

SEQ ID NO: 157847 - DNA, 392 bp, Glycine max
  unsure (1)..(392): unsure at all n locations
ttgcgagattcctcacggaaaacgttttttttacgtttcggaagcgcctcggcttacattttcttcacggaaacaatttttccaagcaaattcgaaagagagagaagtgcctaaggggctggaccctttccttcttcacttcctcccctatttatagcaaaataggggaggtggttgccgcccagctcgcccangcgagcaaggttgcttcctccagaagcaaccgccttctggaggaatattccagagggcccaagtgggcctgggtgctatttgcacccccatttttactaaatacacccccctctgctgttttttggtgattcttttttcgtaaagttacggaaacttacgaatttcgtaacgatacttgttttctttccgtaatgtta

SEQ ID NO: 157848 - DNA, 364 bp, Glycine max
agcttgtaagaactacttttacttacaaaatattgtgcttgaacttggcctttgtatctaagtaagtaactccacgaccaataattggggaagtggaggtggaggttgagcatcctttgctgttgaggaacaattggggaagtggaggtggaggtggagctaagagactaagagctaacaataatgtaattggtgctaagttcattctactttgagtaagagactaagagctaacaactgtgcttcaaattggttttgcttattctatgcaattattgtttggcactaataaatcgtttatttacttttcttaaaatatgttgggtttgaggcctcactttgtggccatgaacttaaagcgggt

SEQ ID NO: 157849 - DNA, 389 bp, Glycine max
ttgcacatattattcatggaaacattaaagatcatctacctgggtctcaaaggaaaaactttgagttgcatttgaaccactttgagaatctatagaagtgcctgatgtttgattcacattgtcaaggcttttctcatcactagatggcaaattgcctgaaaccaccatatcaacaccatcttcactagagattgagtagctgctatcattactaaggtatgtatacttccttagaagagaaccattctggtaaataaacaacaaaggtgtaagcttctaataagcaagtaagaggagagggggggcaaataaattttggattcccaacaagaatttgcagtgcagtactcgtagtgttcttaaggtatacattttacaaattatattgg

SEQ ID NO: 157850 - DNA, 359 bp, Glycine max
agcttccataatttgtattttctatagtgatcaccatgcctaaactcacattcgcggtgatattgggtaaaagggaaaagtcaaagtgttcgaggccaatagggtggacagtgatgttaggatccttgggtttaaagacgttgaaaaacaaggtcacaatcacaatggtaacaatgatcaagaagagtagagacacgatcaaacaaaatttgaggcctttattagccatggcttctgattctgcctgggtattgagggatggaaaattcaatgctcgtatgtaaagttgtgattctgttgaattatatagtgtgtgtgattaaatgaatataaattgaatttatattgattcaattggt

SEQ ID NO: 157851 - DNA, 388 bp, Glycine max
taatcattcattcgcctatttttcttatttttttctccctcccttttgtcaaaacaagtggaatcacaaatttctttctccatctttaatgaccaaattgacctttaggcaagattggtaaaagacaaatggactaaaatacagacacgtgtgattacgtgaagaagtggcaccccatgtccttgtctagtagaactcgtccatagaatgatcactttgttataaaaaggctttatattcttatattcatctacaccaagctacaccatttgttcaagaaactaccaagtagcaagcttgattattattattattattatcattatcccattgagcttctaaaaatgtgcaaaggtgcagaaggagaaaagcaacatggtttctgcac

SEQ ID NO: 157852 - DNA, 357 bp, Glycine max
  unsure (1)..(357): unsure at all n locations
agctttgattaccatttttatttatcgnctcaaagataaagtgtaaattaccagttaccggtaccgtgattaccactgctagacgattagggttacgagttggtccattaattgctgtggttgctaaaggtataggctttgaaaatccaaatccccacccccttttcctcttaatcagtactaccgtttatcatgcattcagttttagggtagcaattcaatcatggaaaataacaattaacattgtaacctattttttactcctttgttcttgatttagggtgctttagagtagggtgcaaattgatctacaaccgatcaaacctcttttaaaaaaaaaattattctgaagaaaaa

SEQ ID NO: 157853 - DNA, 354 bp, Glycine max
  unsure (1)..(354): unsure at all n locations
agcttgtgaagaaaatatttttttatatctcgnctaaattagatggttctgctaaagccntctcatcaagtagaaggtgaatttggatttcgggaactttgtgtctgtgtcctttttttaatattaactggaaatgcaaatcttatataactctttgacagtgaatgcttcaagttttatgaattgggccatcatataattataaggagtttaagcttttacattgatagtgaataaaaatgatcagtttaaagttcttgacaccatcatgctatttttatcaaaatgcatgattaatggtgatagtgtataactcagtggatgaaaatttaatcgcatttgtagataactagt

SEQ ID NO: 157854 - DNA, 402 bp, Glycine max
tatacaactactaagctttacggctgcaaataatgcattatttttttggtttctttccaatattactatttggaggaaaaagatatatttgctcacaaaactatctttttatgtgcatacacacacgtttcattggtattttttttttaaatgagtaatatctttcatactaaataatacttagttatatatttaattttgttttaagacataaaagtaaaatagtttatattatgtatttttaaacaagtgaggtattttatttttcacaatggtgacaatgagattttgatttagaatattgtacaaactatctaaacctctaataactaaacggattctagtgggtatgttaaatggagtatattataaagttttcttcattaaaaggaaacctgccgt

SEQ ID NO: 157855 - DNA, 360 bp, Glycine max
agctttaaacatattcttttttcccaaggagtacttgctaaatgataaagcatttttatgggactctgatttatcatctggccgtgagagctcatcatttaacattctcccccaataacttgatttgaatatttgagagaattcatccactgaaacatatttgtaaggaatatcagtgcggtaccagtattgcctttgatccttcttagagattacctgtacatagttgaaaattgaggctatgttatgaggccaaagtgaattaaacaagaaggaaaactctcttgagctttggctgaatggtagctaagtactgaacaaaagttaaggtccagttagcaatgcctggctccctatgac

SEQ ID NO: 157856 - DNA, 395 bp, Glycine max
gcttgttaaaacggaagataagaaaaccgtttgttttctaaataaagatgaaagccaacaaaacaagaaatgaattgaaagtctcggattctaaaacttatcggttgaagaacgaagaacggtgacaaacgacaagcttttctcatgacattagggccaaaaatgtctcggaagtgttacggaagcacctcggcttggattttattcacgaaaacatggtttttcgcccaaaaccgtccaaatgcataacccatggggttaagggccctttggaacagcccccctctgcctatttattagaaataggggaggaggttgccgccttacatgcccacgtgagctgatttgcttcctcctttactaaccaagcttcgaaaattcgaaaaatctgaaat

SEQ ID NO: 157857 - DNA, 363 bp, Glycine max
agcttgtgtggaatttttatattttttattgaattctatatacattcgttcatgtattcttgtcattcttagcctatctttggaattttgagtctaattcatgcatgttatttagttcataacatgttctaaatcaattcctaaaaatagtcttgttgttgaactctttattttttctaagtttcctacatgatgcctatgatgaagttgagttgtggtgctgaattgtggctggatttgtgaatcaaataagtcttaagctctcttgaattgtgttattcaagataattgagcataagcaaacacaaattgtaactatccaagccttaagcaacataaacactactcttgatttctaggttg

SEQ ID NO: 157858 - DNA, 365 bp, Glycine max
agcttgcaacacgcgcgcttatctctcgatctacacgcgctgagcgagggggtgtcgcgctgagtgcgcctacgaagacccaaagcccacttcaacaactataaatagagggtcagtccaaaggaaagaaaacaccacgacagaaccccctctcctaggggtttcatttactccctttctttctttcacccctcccctcattataaagccctcaatggccatgagtggctaaacccttatttaaggtctggcaggcctaaaagccaatgtgatgtatgatgtactcttcactatttatcaatgcaataccaggtttttctttcctattttcttttctgtttttaccttgcatactcatctttata

SEQ ID NO: 157859 - DNA, 373 bp, Glycine max
ccaatgtggcaccagccaactggcatttttaagtgagggcacctattagtcatgtgagggcgaccatgatcaacacaaccacaaaaattactacctaatactataatttaaagtgctttcttgtaacaaagaatgggtacatttgaataataaggattacaaaagtatctgataaagaagtctatagcttctccacaaattgtatttagtgaactacatttaaagtatgccttgacacaaaatgggtctaagccaaatttctaatcataggtaaactaacgtatgatctcaaatctcaaatgctctattatgcttgtccaacaatgttacctcattaaaaaatacaaccttatatcaaccctatgtgtcaaat

SEQ ID NO: 157860 - DNA, 358 bp, Glycine max
agcttggattgcctttattatatattccatccttcctaagatggagccaaacccagtccccttcattaagaactagcttcattcttcctctattgccattagttgaatacacctttgttgggttctctatttggttcttaaccctctcatgcaacttctttacaaactctgacctagattcccctcctttatgtataaaagaagtgtcaagtgggaagggaatgaggtctaagggtgttaggggattaaacccatagacaacctcaaaaggggattactcggtggttctatgcacccccctattttaggcaaattctacatgaggaagatacttaacacaagacttatggttgccttt

SEQ ID NO: 157861 - DNA, 389 bp, Glycine max
agcttgtggtggtcattctctacgccattttcttctttgccgcatgtaaaatgacggtcaaggctcttaatacagcactgcaaagatgtaaggtatgataatagcaaggcaaattgaaatagaatatgtatattgttatttcattgatcctttgcatgatatatataatacatgtacaagaatgttctataccaattctaaggcatgacagacgtgatccataatcagtggcatctgatttattctatgcattataaggtaaataaatatagaatcaaggtaacataggaaagtaaatatatacacagcatatttgcaatcatgtagaagatatttcctaatactccccctcaagttggtgagtgaatatcgtgaagtcccaacttgtt

SEQ ID NO: 157862 - DNA, 393 bp, Glycine max
tcaaatgatgttcacctcgctcacaatattttccaagatgcccataaattcgatctaaccatgattttttttgggccataataaagaggttgataaagatgcaccagtataagttgacactagtactaaggatattattgaatgtaatgatgaacatgttggaaagtcagtatcaaatgacctggtatatgatagtcaacaaacctctgcccttgaagattcttgtaagaaaagtgaactaactgaacctcaaacaacaacttccaatgaggaggaccaaagtcattctactgtgagtgagagacaagagctaacaactatgcttcaaattggtttggcttattctatgcaattattgtttggcactgataaatcgtttatttactgttctta

SEQ ID NO: 157863 - DNA, 363 bp, Glycine max
agcttgcacattgcttctttatttaagaggagcaggatggtaaaccttgatacttcgatatcaagcgatatgtcgaagagaatgttgtgatggttggcagctggcttcttcctgagtggaaatatccggtacaaaaggaaccatgatatggttttgctccgatgtgtggatgccagggaggttgagcagatgctcgtggaagtgcatgagggatcctttgggacacatgccaatagacatgccatggctcggaagattttgagagcagggtattactggctcactatggaaaacatctgttgcatccatgtgagaaagtgccacaagtgccaggccttcgccgataatgtcaatgctccgccc

SEQ ID NO: 157864 - DNA, 356 bp, Glycine max
agcttggtatatggtattctattttaatttctttattgttcctttgtcagtttggcattaaaaaattatgatacaagttaggtggacttggctcgaaagttaaatgctctttgctatgtaagtaaaatagggatggggactgaagatactttaaataccattatgttttatgattcatttattttttctacgctgcttatgtgtctgttgtgatgacgtggtatatggtgatgccccagaaaaaataaagataaaaggctgaggtgtgtgcaatataaggacaccacgttggcttttatgttattccaaaatttgcaatatgaaatcatatttcctactgcattacctgaaagatg

SEQ ID NO: 157865 - DNA, 384 bp, Glycine max
tttcttcctcacttttgtttttcctatttatcttgggttggactgtatgcccaaaggtttgaatatcggtgtatatcggtttatgtttttttgatgatgcatgtctatcagagaatacgtttttgttttattcttaagtttttgcaggacaacgatacaaaaggttagacctttgggcatgtctaccaaatttgttgtgtttggtcttcgttttaggtcttcgttttaggtctttttgatgatgcatgtctattagtgaatacgtttttgttttattgttaagtttttgcaggacaacgatacaaaaggttagacctttgggcatgtctaccagatttgttgtgtttggtcttcgttctacgtctttttgatgatccatgtcta

SEQ ID NO: 157866 - DNA, 356 bp, Glycine max
agcttgtggcaaattcattccactataacttttaactcggatgtctgattgagtccgggaatttatctagacgctcgtaaatgaatacggaagcacgtagcaaatgcaaaccgcaataacttttaactcagatgtccgaaggaatcccgtaatatatcgagacgctcgtaattgaaaacagaagctctaagcaaattctaacgacaataactttttactcggatgtctgattgagtctcgtaatatatcgagacgcttaaaattgaaaacagatgctctgagcaaattcagacgacaataaattttaactcggatgtctgattgagtcccgtaatatatcgagacgctcgcaattg

SEQ ID NO: 157867 - DNA, 384 bp, Glycine max
tctattttcaatttggagcatctctttatattacgggactcaatcggacatccgagtaaaaagttatagtcgtttgaatttcctcagagcttctgttttcaatttcgagtgtctagatatatcacaggactcaatcagacatccgagttaaaagttattatcgtttgaatttgctacgatcttccgttttaaaatgcgagcgtctagatatactaagggacacaatcgtacatccgagaaaaaagtacatgtcgtttgaatttgctcagagcttctgttttcaatttcgagcgtcttgatatattatgggactcaatcggagatccgaataaaaatttattgctgtttgaatttgctcagaccttctgttttcaatttcgagcg

SEQ ID NO: 157868 - DNA, 363 bp, Glycine max
agcttttgtcactcttcttatatctggccttcacattaaccagacttaacaccaccgacatcaacatcaaggaattcttgcaccccggatacaaaggcttctttgaatcagtttgcaatgtatcatacatagacgcatgtgcttattgaataaaacttttgtccaaggtcacgaatcatatcctccaagcaatctcccatttcttcatcaaacggttcagattgggacccactctacatgtctgtcaattcaccacgccatatccacgttgtataattcttcttaatcccatcacacaacagatgctcccatatgtcgttgagtttttgtcgtctcccgttcaaacaatttatgcacagacaa

SEQ ID NO: 157869 - DNA, 389 bp, Glycine max
tcttatccaaggcttatcttggtggtgaagctccttcttccatggcttattccctagtggatggcgcctcctcccacctcttctcctttgtcttccactgcatctccatggtagaaaaccaccattaaaggacctcattgaagctcaaagatccaacctccatagaagctccacaagcaagcttccatcacgagcccattgacgtgcagagactaacatcatcttctgcaccttttgccatccatgggcagcgagtcagatagcaggcgaagataccttatggtcatccgcacctttcgtcaaccgaggggaacgaattcgacggtatcaggatgatgttggacgttcggttctgattattttcaaaatttttgcaggttttactctcc

SEQ ID NO: 157870 - DNA, 356 bp, Glycine max
agcttaaaattttttcttttaacatcaaaatttatcccaaaaacattaaaaactatctttttagtttctaaaatgattttttacaatttatttgcaaaaacaacaggtattaacaaaaatcctatgaaaaaaactactataattgctaaaaaaaataaggtgtgataagaaattatcaccttttggtcaccaatgatgacaccattcttgatttctctaggccacaatgtgaaaaaacaaaccaattaaatcactttctcattttctcctctgtgattcccacaaaaaaaactctctccttggttgaactctatatgacaagttgtcattctcactcttagccaccataatgagac

SEQ ID NO: 157871 - DNA, 380 bp, Glycine max
tgagaagctctctatgaaatgttattattgattgccccattttgtaatcaattaccaagtttctaggaatggaaaattagagggatttgaatgaattaattgattatctcatttgttaatcaattaaatttgttttttctgttaaaactatatatacacttacttgttcattcttattagtgactcttgattagatcttatgttttaaaaatcctttctaaggttatctaacggaaccattctgcatttcaatgagagattcatggtgttcaacatttgttcattttttatcatggtttgagcaaggaaagaatgacttgaagatattgtgatatgcacattttggtgtattcaatcatgtttcgatttctttctagttt

SEQ ID NO: 157872 - DNA, 362 bp, Glycine max
agcttggcttgggtgtagacttgttttttacatgatttgggacttgtaggatttgattcgaccaacattggatgaggggaagtgtgattttcgaaatctgcacttatgcagaattttgctgtcaaaataggtgcagcaggattttaccttggtgcagaaaatgcttgtgtgtggttggctgtggaaagagtattacagaatgagttctggatgtttgctagtagatcccaacggtcacaatgtaggcttatgcactatagacttccagtaaaattttggagtcgatccaacggttaacgaattggatcgaaggaattgctactgtggtctttaagtgagaaaagctgtgattttggttgatg

SEQ ID NO: 157873 - DNA, 363 bp, Glycine max
agcttcttaccactcacatttttatatttgttgtttcaaatgtaataattttggtatgtatattttggaatatcaattgttccatcagttttgaagttgaaaagccaaatattgaatgactactaatggatggtaatgattactaattggtggtaatgactactaattggtggtaatgactactaaatacattcttgatggtagaatatctatgtataacatatatgtttggtccctgggttcacctctttcaatttttgtctgatacaccatctacacagggagagaacttaaaagaatcaaaacaaaacagtttttcatggtaatgatttgaggtatattttgcttttgtttttccgcatt

SEQ ID NO: 157874 - DNA, 393 bp, Glycine max
tcattgctaagggacatgcctgaaatagttgttttgcattatcaacaatagctccacaatgataacaaatagaggctaaagaaaaaaaaaaccctacattcaaattatcatccgtagatgaacaatcatgaatccatctccaaaacaaaaaggattttgatggcgagattccttctttacgtaagatcttatgccaagataatgattgcaagttagtttggaagaaagaaaacactcctttaaaagtcatgtttcctaaatttgaggggatccaaatgggtttatctatgatctcctctaaaggaataataaaaaatttaatgtcttccgctagctaggaaaagatagtgtgaactcttgaggaagcacccaacatttattcctatttaagcc

SEQ ID NO: 157875 - DNA, 354 bp, Glycine max
  unsure (1)..(354): unsure at all n locations
agcttcagcaacagtaatttcttttttgtccanaaaaaaaagattatatctcttgcaggttgctcccatctcttgcttgaatattcgaaacagacaccaggatacttattatatatactgatcttacttatgctctcgaaatcattaaaatacttgatctgctgcatgttttcaaaatggagcacgatgaatccaaaaaagaagagattgatcggagttacattgagtttgttgataataaagatgtcccggatctcattgaaaaggtttttccttctcactcaggcactccacaatcattctgttgattggcttttatcttttgtaccaatattttataataaatgttccttt

SEQ ID NO: 157876 - DNA, 386 bp, Glycine max
tgaccaaccaacctgagcaacaggcatttcttatcttttaaggaaatacaaagctccctcacacaatatggtaaatatccatcaaaggctcaagcaatatgtcctaattatatgaaatgtttctaatcatattacagcctgagaccaacagaagcctttcgaacaagctttgttcaataatcccaagaaatttcaaatatggaaactactaatgttggaacagattaatatcttaattaactaaaaattaccaaatatgcctcaagcatctaatctacagttacataaatttgtcagaactacatacactttacagcgttaatagatggataagaatttttttaccaacaaatttacattaaatatatgataagaccattaattca

SEQ ID NO: 157877 - DNA, 355 bp, Glycine max
  unsure (1)..(355): unsure at all n locations
agctgtttgtggtggtttattatcaagcggaagtttccaaacttaatttttacaatctgccaatgatatacttttctttgctaaggcatcttcttgcaatattgtgtttgaagactttttttaggtgttttgaacttgccgatgggntaaaagttaacttcttcaaaagcaagttgattggaatcgaggcagatgaatcttctctttttaggtatgctttgatccttaattgtaacatgacgagcattccttttgtttatttaaacatttcgataggtgcaaattcaaggagggaaatcacatggatctggttatgcgtaaattgaagggaaagttacctatgtgaaaacaaaaa

SEQ ID NO: 157878 - DNA, 385 bp, Glycine max
tcgttccagcctaataggaacaaatgaatttttttcgtaataaataacatttggctggaaggaaacaagggacaaatacctcccccatccaaaaaaaaaaaaaaaacaaaagatgttacctttccccatatgtctgcccatccttgccagtaaatatagccttaaaaagtagcaaaggtgttaactcttcaaaatgtatcaactgtacaagagcaaaaagcaaaaacgaaatggtgaatttacctttctaaaggaattgatcctggaaattgacattggtcattgatacaaatctgcccaaaaacttgcagtgtagtatctttttctattagaaaattatagtgttagtgtaaaaaaagataaatgcggaattaaaaaaagatta

SEQ ID NO: 157879 - DNA, 363 bp, Glycine max
agctttaattaataataattattgtatttataaaaatgtgttagagaataaatttgtagtattctttataagcatatgattattatttaatttgtttgtcttactctaatataacattaatagacatttaatacgtaagaggctgtgatttatacgcaagattgggtcaaaatctatgggacttgaagggtggtagaaagtggagaagctgtggaaaaagatgtgggcccaattataggaagaactcattttctttcatgctaagctttctcctatctgcacacttttcaaatccctaaaataaacagcatgtctgcgcgtgttcgtgaacctttcacgtgcccaattagaatattcaaatat

SEQ ID NO: 157880 - DNA, 388 bp, Glycine max
tgagagaatatattgatccaaatatgatgtgttctgtatccccatgattgtgtatttaaggttagtttctccatttttcacatattttttctcatccagattggtttgggtatcttgactctattaaccggggcaatttaagattgttcagctggaagcataatcaaaataaagtttttacatacctgagacaaggaatccatgcaactgtatattttctcatattatgatattattagtcagaagaataacttgttccatttatttttaaagggatgaaattttgcattatgctttactagtgtatctcattcttcttttgttgttttggtattatattagttggccatgttggcaaagcaatgtgtggatgatgaccccatcttac

SEQ ID NO: 157881 - DNA, 359 bp, Glycine max
agcttgcgggacttctatcttgggggcaacatccaacggcacctgacatccgcgtctatcatcaggtggggctgatccctctatcccatccttattcactatgctgtctaaggatgcattcattgtcaatgcatataataattaagttatacaaaaagaaagcagaaaataaatatacaaatttttatgattgggaatgaaattatatagaaggttaattattttgctagaggtgatgagtatgactaatatgaatagcaaagtagtgattacaacctcatatacgttaatttacacgctcaacactaaaaagcacaaaatactaatatacacatggtcaacaattattcattcaaaac

SEQ ID NO: 157882 - DNA, 381 bp, Glycine max
tattccagtagagatgccattagtttttttatcaccaacaatgcttcctttcccaccgcttttaacaccgatgttgttgctgatacagctcttggactggttatctttctggcatatctttaggcaacttttgctatctgaagcaacaacggatgtcgcactgctgaaggcagctatcttatgggcaactggagtggcaagagtggttccaggggacactgtggacgcggaagaaaacgacatgaggtagtcagcataacctgccctatttttcgacctattattagcagaagagcaattggtgacactgaggctccttgatggggtacttgatgtgtcaatatgtggaatggcgataaggtttggacttgaaatttcaaa

SEQ ID NO: 157883 - DNA, 361 bp, Glycine max
agctttcataagtgatattttgttgctccatctcccttagagtcctctcacgaggtggaggttgagccatgttctcagtataaaaattagtagtggaatgctcaaaatcagaatattcagaatcaccctcaacagaatgctcacaatgcacagaatgaccaagatgcacactatgcctaactaatctacgaaaggttctatctatttcaggatcaaagggttgtaaatcacctggattgcccctagtcatgcactatatgcagcaaataatgtgtttctcaacaagcatctaacaagggggtaaaactacaactatactcaaacgatatcaaaatgagctgaaatttttgtgaggaacacc

SEQ ID NO: 157884 - DNA, 387 bp, Glycine max
ttggctgcgcagcagctctgatttcttttgtatttataaaaaatgacgcattgtaatcgattacaggtattggtaatcgattacaggcccaataggccttctggtaatcgattacaggatgttgtaatcgattacacgctgcctgttcatgtgtaatcgattacactggatggtaatcgattaccatagcctatcctatgctagtttctaagagaatatctatatttatgctcaaatacatcctatatgactaattttcactactaatacactaaattcaatcattcaattactatatacacaagaaatcataaattctatcataaaagcaagaattctatcaagatcaaacaaaataatctacaatcaaaaggtaataagtaaatt

SEQ ID NO: 157885 - DNA, 353 bp, Glycine max
  unsure (1)..(353): unsure at all n locations
agcttgatcaacttttaatacttattctttacacattcatgaaaatgatgaaacatttntccccacctaaaccaaaactcttcattttattctttccatcacttcttgacatgttagatgtggtaaacctctattttttttttgttgtgggagagctcatgatgcaatcctccctaggaagggaccagtcactagagccatgagcaagaggcttcaagaggattgagctacagctgctaaagaaggccctagggttcttatgaacctcagggtagatttctgagcccatgggccaagtttgggtccaattctttttatacatattaaactaggatgccatcatatttgatcct

SEQ ID NO: 157886 - DNA, 338 bp, Glycine max
gccccattggtctgcaatgaccccaacaacgatgcatccctgcctcattagtttctccatcgctcctgatatgcttgaaactgcatttggattggaaggatcttgtggatccctgctccaaccaataatcgatccaattactactagtatttcatactcatatcgtaccatgtacttaaaataattatataacttctgattatttataaactggtccttcctggcatatttggtgcaaccgtgaaaactaactgacttgataatactttatagagaaaacacaaaaccgacgtgagaactatttttttccatgtgtggtctccaaccttctttcattt

SEQ ID NO: 157887 - DNA, 364 bp, Glycine max
agctttacttgacatgactaactttcttaaaatgttgttcacttaatttaataaaaaaatttcgtgcaatgaccttggtaatcaaaatagcaagtttacttcttagtcaagagttgcagagattcctttctcacttctcattattacagctagaacctgtgtctagttgttggttctatcggctttgatgtaaaaattcattagcatcctatatctaatataaaatttgacaaattcagaatttttattttaaaccgcgtaaagaataatatgcatatttgacaataaagaccaagagaaactcaaatagcacgatccagtggcaacactaaattggacgttcaaatttcataattagacatga

SEQ ID NO: 157888 - DNA, 390 bp, Glycine max
tatcaaggctatgcagcctgatgtccctttcatgatcaatgctcacagcttactcctaagaaagttggaggaaaaaaaaaatagaaaagtaaagatagtgttctcctttattgctcttgtaaatgacattcttgattcatacaaatccaaattccaatcattcaaatcacaccacaatgctaattctcctttaacttatatgaattaaaagtcttgattggaccgacagaaaaaatacataaaccaaagagaaaaaaaaaaagcaagagagggagagaaaaatacaagcacaccaatacaatccttcttggccaacaaaaaaaaaattccttcaaccttcaagtttttcttctatacgcagcagcactgtgaatagcaactatgtaaaaa

SEQ ID NO: 157889 - DNA, 357 bp, Glycine max
  unsure (1)..(357): unsure at all n locations
agcttgcttctacatgaatttcatncattaaaagctatatattgacacaataattttgaatgtaaatccaaattctacgatggatctgatcaatagttgcagagtttggaattcctaacataagtacagaacaattggctgactacattaataaaacattgagtagtggccaggtaatatcataactaatatgaatctatgatgctgaatgaagtttttgaagccttttattttttaccttagcttatttgtttgttttttctattttttagtaatgacatttgttatggaagagaaggggatgaaaattacacttatagggaaaaaatcataatttttaatttagtctcttagcta

SEQ ID NO: 157890 - DNA, 384 bp, Glycine max
tgaggaatcatagggaacctctatatactctgctatcatggccagactacacatgtgagcccacttagaggtaagggatgagtttatcgcaattgggattagaatgaacatgtgtagggatccttagaggattaaatttgggtttattttgggatgtttattgaattataatttttctcttacgattataattatgagattattatgtttgatgggtcaattgattccctgatacgaattggttgataaaattgagtgctcttggtgttttcgttcttttaacctatgattttgattactttgattttgatatgattatgtgaaattttttgaggggttttactcctcatgttgtgagaagtatttttgttggacaaatggcct

SEQ ID NO: 157891 - DNA, 283 bp, Glycine max
taatgcgtgggagtcacactcatgaaacggccagtacatattctggataccacatattggtagattgactatagaacaaaagtaaaacattgcttgatatgatagactccacggtgaaaactataattattatgctttcgctcaccgataacaacgtctatacgtatatatctatcaatcaaatactccatgctataaatgcacatcatccttacataaaacgccaacatcactgaaactcacaactatataatattcttaaataagactcacattattcatt

SEQ ID NO: 157892 - DNA, 363 bp, Glycine max
agcttcttatccaaggctcttcttggtggtgaagctccttcttccatggcttattccttaatggatggcgcctcctctcacctcctttcctttgtcttccgctgcatctccatggtggaaaatcaccattaaaggaccccattgaagctcaaagatccagcctccatagaagccccacaagcaagcttccatcaagtggtaatcagagcacaagagcttcaagtaggtgctccttaaacctccattaatttttttgctttaccttctcttccattgttgtttcttcattttttctccatgtatctcctcacatgtcttgtgctaaatgttgttaacatgattctttagagtttccaccaatta

SEQ ID NO: 157893 - DNA, 356 bp, Glycine max
gcttttccgggaacattttgtttttttcttccggaagttgtctgtgagtacttccggaagacacaaattattcttccggaagaaggttcttccggaaaagttccggaaataatttttccggaaagtttccggaagaatcttattccgaaagaataattgctgaagggcagtttcgccacttcactgtttgctgggtgccccaacaataatgctgggtgcacgtagcaactccctttctctcatacccatgatttgaagtccaagtttaaaccttaaatggccatccactatatcagtaaatggtccaagtcttcaatctttgatcatttttatttttttcaggtatataagcgacc

SEQ ID NO: 157894 - DNA, 359 bp, Glycine max
tggttggtgatacagaaagccattgcatttttatttggcgattgggatgagtcatatgtgaaactttcgtcgtggctaacacacatgtaaaatcattctcttgtatcatattttcaagtactacatgacgatttcatcgctgggaatacggttagtcccgaacacttccagtttcatacagttctttggacttttggccaatgtaaagaggctttcaagtactgtaagccaatcatacaagtcgacgacacacatttgtacggcaaataccgtgggaccctcctaatggccacatcacaatttggaaatggtggcgtccttcctctagcattctccgtggttgaaggtgataccttgac

SEQ ID NO: 157895 - DNA, 361 bp, Glycine max
agcttatacgaattacgaatctcttaataaccttacggattgtgggttcatacatatatttttttaaaaaaatttaaaaatatgttttacgaattaatttaaaattaatggtccatgcaagactcaaatctgtgacttttgtgttattagtacaacactctaaccaactgagttaataatcaattatgttataaaatgattaatgttgttatatataacactaaaatttctaatgtatatttaatatacatataagtttacataataaatttatgaacaattttgtgataattaattttgttctaatatatttaatgcaccaaaattaattgtcacaaaatttattttgtaaatttacatg

SEQ ID NO: 157896 - DNA, 386 bp, Glycine max
tattattctgtccaaaatctaccttcttatttaatctaatgcaatacatttgatgctttcaacataatcctgtgaaatactaagatcttagctagtacatataactttttctgcaatttcaagcaaacaaaaaattgcttgatgtcagttaattcgtttttcttggtatgacccaggtggattcagccatgcattcaggtgacagttaaccatacatatattatttaaatcgacatagctaatcttacgaaaagttggtgggcaagtaattggctccactcacatcttatcattgcattctatctaataaataagaaacagggccacaagtttaattgggaaataaaattaagttacacacactgacgaatcatgaatcaatattt

SEQ ID NO: 157897 - DNA, 377 bp, Glycine max
  unsure (1)..(377): unsure at all n locations
ctgcaagcatgcaagcttgcagcgaccatgttttttattttnatttcngaaaacctacttttaatcgatgcactctattctttaaagttctttagaactaattgtctcccacaatatttctatcttgctccattatttttcatctgagttatgggcttaactaaaaaatattgtgagttctattgctcctaatctgaagtacattgttaaatttagattctcgtttatcgataaatattaatttttgttatgaatgtcagttaaaaaaaaatgaaccactaatctcttccttctccttcctcccttaactttttctcaacaactcacctattcttatacctccaaattcttagaaattaaacttaagcaccatggac

SEQ ID NO: 157898 - DNA, 389 bp, Glycine max
  unsure (1)..(389): unsure at all n locations
actacatangagagcgcgaaacggatcttctgaaaaaccacatgcgacgtacattccaataattgacggtccccatatatgaactaaaatcctctcacatcttgacaaaaggatgaagaaatacttggccttgaagcaccaggtcctgcggttatcgaagcactaaactatctcactatacatacacgacttgatatatcatttccgactaattcactcggaaaatataattcttcaccaatatgaagacatttaagcatgtactttgatatcttagaggttacataccacacgctcacaatgatataacataagttcatatgaagtgacacaacaattccatgagaatatgtgacataaaccaaataggcacataagctaatcatgca

SEQ ID NO: 157899 - DNA, 364 bp, Glycine max
agcttgaaagtaaatttattttatttagaaaaaatcaaaatattaaaggaactaaaattgaaaaactgcacgtttacaatgactaaaaatgaaaaaaaaaacttattgaacaaaaaaaacacaaacttaagtgaactaaaattgaacaaaaagttttcaaaaatcaaaattaaaaaaaatgcaaacttacatacgaaaaaaataattaagccattttttaatatgctgtttttcatatcttttttatattttcttatgaaaaagtttaggcaatttggttaatatcttctatctccaactttttttttctctttttgaggaaaaaaatctctttttttaattggtaatattttaaataagagag

SEQ ID NO: 157900 - DNA, 390 bp, Glycine max
tctatttatagactaggtagcttccttgttaagctttcttaaaaacttccttgagaagcttctttgagaaaacttccttgagaagctagagcttagctacacacacccatctaaaaactaagatcacctccttgagaagctagagcttagcaacacacgcccatctaaaaactaagctcacctctgtgacaaaatacatgaaaataccaaaaaaaagtccctactacaaagactattaaaaatgccctgcaatacaaggctaaaaccctatactacttgaatggccaaaatacaaggcccaaaagaaggaaaaacctattctaatatttacaaagaagagtggatccaaccttgacccatgggctcaaaaatctaccctaaggttcatga

SEQ ID NO: 157901 - DNA, 360 bp, Glycine max
agcttcttctcaacatgattatattacctataaccaaatttattttcaccataaccaatgaagatacattgccttgacttttcatccaacttggatctctcatcctttagaacatgcacaaaagccttgcagccaaaaactcttaagtgatcatacttcacattcttgccaaacaaaattttgttcggcacctcactattcaaaacaacaataggactaagattggtaacatgcactaccgtgtacagtgccttgccctagaagtgcttgggtaactttgcttcagagagcatacatctcactctctcaatcaatgtcatgttcatcctctccgccaaaccattccattgaggagtttta

SEQ ID NO: 157902 - DNA, 390 bp, Glycine max
tgttcgcacattgttcgcatctatgatatccagtcaacaaggtttgaagtagaggaagccttcaatcctataacgcaacatgacggacaaaagtgggcaattaacttgaatggtcattattgtcaatgcggaaagtattttgtgcttcactatccatgttcacacattattgcagcttgtggttacgtgagcatgaactactaccaacatatagatgttgtttacacaaatgagcacatcttaaaagcttactccgcacaatggtggcctcttgggaatgaagcgacaattcctccttctgatgacgcatggacatttatccctgatccaactataattcgtgtgaaaggtcggccaaaatcaacaaggataaggaatgagatgaattgg

SEQ ID NO: 157903 - DNA, 358 bp, Glycine max
agcttggaatcaaatatatacttagaatggctctagagtagagtaaaaaaactgaaaaaaagactcaacaaaactctagctttggaacttgtcttcacactaattttcaattgaaatttccaattatagaataaattttgagccaaaacaacaagcacacttccctttcaccttttttttttttggatactgattttcctgccaacttgtgtgatttttcgtattttttccttttatccaaatcacttgtttccttttttataacttttttccagatgtctagaaaattaagtaaaaatttcagctcaaaattcgaagtaaacaattctcagtaatatttacaagtttgtatgtccaa

SEQ ID NO: 157904 - DNA, 380 bp, Glycine max
tctccctcttttccctataaatagggggttggagggaagaacaaaaatgttcaaccctcctggtatctgaggatcacttaaaattagtgagaaaaattgttttcgtgaagaaaatccaagccgatgcgcttccgtaacgcgtccgagacgttttcctgggtgatttcgtgaagattttcctccattcttcatcgttctttggtcttatacctgtaagtttccgaaatcgaacttttcaattcattctatgtacccttggtggtccccacttgtttcacgtacttttattttcatttcatttactttccgtacccccttttgacgtgctttagtcatttattcaagttattttctcgcctaatcaaaaaataaaataaatc

SEQ ID NO: 157905 - DNA, 357 bp, Glycine max
agcttgaagtgagaaattttggtatagtcaattttcccacttttatctgttgaccacagagtggtacctggagatatgtcgcgggggtcaggagaccttggggacgtcaggtggggtgctattgcccaaaaccaagcttgatcaatcccgacccaacccgggcatagttagtcagtgagaacctgtgacgtacctaaacaggcgagctcctggcagtgaaccaataaaagaacaaagaccacaaagcaaggaggcttgtgtggtggctggccacctatggatcttgagtgatatctggaatatggcctctggtaatcgattaccaagggtgcataatcgattacaaggcttaaaaat

SEQ ID NO: 157906 - DNA, 389 bp, Glycine max
tgtaagcccaaagtattcttatattatttaaaagattgcaaataagggcataaagaaagaggtgccataagtgctaaggttaaaaaaaaaactttgaaataagggcggaaaaagagaggtgtcgtaagtgccaagaagaaaagtgctgttagaggaataaaggctgaaaaataaataagcctaggcaagaaataagtgaaagtttttctaaggatgcatgctctcttataatcctaagttttttatatcccagaaaaaccatgatttgttgtttagccaggccccattacaagccaataaaagtccttagtgatccaccaagtgtaagtaagaataactttaactgagaagaagtgcaaaaatttgggaatcttaattgcaggtcgtaa

SEQ ID NO: 157907 - DNA, 357 bp, Glycine max
agcttgtctcatcgtttatgcgagacggagaccaacatgctagctatcatcgccaatgaccaagaagagttaggtctagccgcggcccacgagcataggattgcggacgaatatgcccaagtatacgcggaaaaagaggctagaggaagggtgatcgactctttacaccaagaggcaaccatgtggatggatcggtttgctcttaccttgaacgggagtcaagaacttccccgattgttagccaaggccaaggcgatggcagacacctactccgcccccgaagagattcatgggcttctcggctattgtcagcatatgatagacttaatggcccacataattagaaatcgttaggaa

SEQ ID NO: 157908 - DNA, 388 bp, Glycine max
tgtaagattatggggtacccatcacatgtggtactaggtggcgatcgggcgatggtgcacaacaattctccacatccacaaatcacgtataaaaccaccatcccctgttgcccacctccaactgagctcacgtactcccacgtagcccttatcctcgttcctcttaacgccgggtccccatcaatcctcccaagcttccacaacatccaggcaattcaacatccaaatcatcacaaactaacaaaccaagcaaaatagggcaaaggcagaaaactctgcccaaaactcaaaccaaaatcacagctttttctcacttaaagattccagtaacatttccttctttccaatacgttaaccgttggatcgactcgaaaatcttaatggaagt

SEQ ID NO: 157909 - DNA, 354 bp, Glycine max
  unsure (1)..(354): unsure at all n locations
agctctgcgctttctttttatatcttgnncaagatcccaacggccagatcatggacaggtgtcttgtgaatctgcataccaaattttgtgacgatccaacggttaacgaaggattggcagtgtttttaccgaggaagctcatttagcttcctcaagaagtttcattaagaggcttcctcaagaagcttcctctggcttctttgagaagttttctcaagaggcttctttgagaagctagatccttatctacccatacccttctattaactaaatcaacctccttgaaaataattacggataaaataacaccgcaaatataatcaaacatcaaacataattattaataatatatag

SEQ ID NO: 157910 - DNA, 386 bp, Glycine max
tcttatccaaggcaattcttggtggtgaatctccttcttccttggcttattccctagtggatggtgtctcccctctcctcttctcctttgccttccgctgcatctccatggtgaaaaatcaccattgaaggacctcattgaagctcaaagatccagcctccatagaagctccacaagcaagcttccatcaattccctacatagagaaaggccaaggcgccgccaagacgtttaaaggcacgagcagagcattgacattgtctatgaaagcctgacacttgttgcattttctcacatggatacaataatcattttccatggtgagccagtaataccctaccttcagaatcttccgggccatggcatatccattgccatgtgttccaa

SEQ ID NO: 157911 - DNA, 354 bp, Glycine max
agcttcatccttattatgatttaactagagatacatatatcgcaaataatcttctataaaggcgataaagtatttcggactacttgcatccacaacaagtatctgtatgtatgatttctaataggtttgagctcctctttgcaccctttttagacttgttagtttgcttacccttaatgcaatccacacaagtctcaaaattagcaaactccagagtactaagtactccttcatttaccaatctcttaattcccttgatagagatgtgtcctaatctatggtgccacaacatagaggattcctcattcacaacacatcgtttaaccccgcgacaacctgcatagaattataacc

SEQ ID NO: 157912 - DNA, 360 bp, Glycine max
tgtcaaacccagatgaaaacatattgttttaggtatatcaaattatatttatacgtgcttccaaacttgatggatgctggatttttccactttaagtttacttatccaaactttaattaataatttgaaggcaaaaaatagcgttgacttggacaactttgttgacataacgctgggagagcaagaaaagcatggtgctagacgaatgatgaaattggcattgctatgtgtggatgtgactagtagaagaccatcaatggcgcaaattgtgcaagagttggagcagattcaaagagaaattgctccagtgtattctcaattcaacgaggagattggtgccgtgactctagggagtgagct

SEQ ID NO: 157913 - DNA, 363 bp, Glycine max
agcttgattcttgattctttatttttaatttcctcttgatccttgaagtgttcttgattcaatcttgaacatcttgaactcattctttgattcttgagatcatcatctttgttatcatgaagtgttattgacctttgggctttttgtcatcacctttgttatcatcaaaacttctttaaatcaatcttgattcatcatgaagcttgcttctacagcaaccagtcaatcactggtcgaggccgtacccgaatcaaataaacatgaaaatgcagtaactaggaagtgatcctaggtcgtttcccaataaggaatgataaaccaaatgttcataatatacttgcagtaacagttatgattgggggg

SEQ ID NO: 157914 - DNA, 393 bp, Glycine max
cggaactataaaactcagctttctggccttagcaatctaattttttcttcagatcaaactgtctactcgtgattggtccctttcctctctccggagcttaagctcactgttactgccccacagagcccctcggaacttgttccagccatgttcttccctacgggcccttttggtctcttgttccaaagccttggtggcggctatatttacgtctctcagttcggcattctcctttcggatcctaagagcgattgatttgaacttttctttgactgtttgggctttatcaagttctgtcctgatggcctgcacctattcgtcctccttcttaacttcaactcccaccaccttagtggttcttaaattcgggagccaatccagaccttgagtgta

SEQ ID NO: 157915 - DNA, 359 bp, Glycine max
  unsure (1)..(359): unsure at all n locations
agctttgtgaggtgtgacttttttttttctggatacgacttgatggggtggtaacacaaatcnaattatattgttttatctctccgattatttcacttctaatatatgatccaaacgaccaaataataaagatttaagacaagcttgaaagatgatctgttctaggaaatttggaaggtgattattaagaaggaaaaatattttatccagattaattctattttcactgagaaagaaaaaagggttatgtgcgtaaaaagttctacaccgacaagatatcattattataatcataagtgagtcggtcaatttttaaaaaataattattttatgatcattcaaatgatgatttataattg

SEQ ID NO: 157916 - DNA, 382 bp, Glycine max
tcgaccaaacagacaaccagtgcactttcttaattcgccagtctccttgaggaacaatggatgcacgctaccttcatgttcaattctatcttcaagggtaccacaacaatcatcaaggtccaattgacacacatcacaacggtcaacaaaaccattgctcaatcttatgcatacgtcacacttgtaaatgccatcatatggagcctcggattgaatagttagagggtgcgtgcgaaacaggtgatgcttcgtcctctggtaattcggcacaactttggggcaaaaacaaacccaaatttctttcttacacgataagaaaagtggcatgatgggtcagaacacgcactcaagatttattacaacattcacatcatcatcaccc

SEQ ID NO: 157917 - DNA, 361 bp, Glycine max
agcttggaagacaactgattattggaatattttggaaagatctttataaaaggataaagcacatcaatttgttgttttattgctttgtctttttaactggcaaattaagtttcagttaaatcaaagcttaggaaagtataaagttgaagtggtctaggcaatgaaaatagatcttatttgaaaatgggttgaatattgagttgcccaaaattgttttgttataattctggacacatcatgcagctaacaaagataaacaagagtgaatgaaaagcaaaggtccacgagttctgtcatgtaagtggtcaaaattgaaactacatcaaaaagccaatgcctttttgagaaacaagataactca

SEQ ID NO: 157918 - DNA, 389 bp, Glycine max
  unsure (1)..(389): unsure at all n locations
ttaagtgtaattaagtcctagaccaatttttatttctgtagccggttcttttggaccgaagctaaaaaaattattttatttgtttgtgttaattaggggttgtttggattattgttgcgcanaatgagggtgatggaaaacgtgttaaagggaataggaacgagggtggtggtgatggtggtaataataaaggtgaaggtgaagtcagttcaggaaagcctgcggagcaaagcgctaatccagcttctgagcctccgaagcaagactacattcacgttcgagccagaatgggtcaagccactgatagtcacagtcttgcagaacgagtaattttttgtttttattgtacttgagagggttgtgtttggaaaaatgaagtgaaaatgtga

SEQ ID NO: 157919 - DNA, 361 bp, Glycine max
cctgcggcatgcaagctggtgatttcttaattctattcttattaattgttagatgcttacttcttaaatgtttgttatatacttgtgataagaaccttataattctaagtatatatagttgtagtatggggttatgccttaattgcataggtagtatggttgattgtgatttcttgttcttagtgatgctaatactgtatagttggatgactcatatcaagttatatttcataaagaatactctttggatcgtaccttctaattctagtgcaacctatttttttgtgttgcgtgcttaactcaaataaattgatttgacttgaaagcctgagtataattaattctttgtgttatgagacta

SEQ ID NO: 157920 - DNA, 382 bp, Glycine max
tataaaggccactctctgctgttttttctttataataagctggtaaaaggaatacttatgagttaagacagttcatattataaagtacaaataactcaataaaaaatgtaaacccaaaagatatatgtcatttgtataacactcatatcaccgaaggcttgaaccaactagtggaagattatttcaacttaacaagaggtcttgaattcgagtcctaagtatatatgcaattgtgttaatgcagcctacaatgtgtttatctgatctcaaatcaaacataattgtctactgtgaaaaatacatgtaatctaaaaaaaatacaataaattattgtgttataaattatatagtaaaccctcatttttaataacctatttgacat

SEQ ID NO: 157921 - DNA, 360 bp, Glycine max
agcttgtcctcaaatttcatagttgcaacaagagtgtgaataacaacagagatgtcatcacgatgaaagatttgattcaaaatatccatattaattccaagatttactttgttggatcacaatatcagctacgcacggtcaaactttcaaaactatacacttccttcttctaacaaatgcgagtattttcctgtagaaaaatgagtatatttctgtaagaaaaaaaagtgatatatgataattttattccacttttaagattttcactaaagtattagtagttttcgttaaaaaaattattaccaaaatatcatttacactattatcccttaagaaatgcatatattaagtcacttcctc

SEQ ID NO: 157922 - DNA, 388 bp, Glycine max
tcccagttggtagactagaacaattttttttgtactcaatcaatgattaactaaaaaatagtactagtaggtattcttataatagtaatgtttattttcctacaaatcttactactactttataaaaaaaaaagttttaaatgaaaaaataaatgaatttgatgtcttggaaatataatatgcattcaatacttaccatataaaaaattaggaagatgagtacaaggatattggataagcatttagaattattcttctcccaaacatcatccagtcatacaaattaacttgggggattaaaatgcatgtctgtactttccattcagtcagttatcatagacatcaatgtgtgcaaatgcatccgtacctggaggacattccaaagcat

SEQ ID NO: 157923 - DNA, 359 bp, Glycine max
agcttgctgtgttattttattttttatacgcgatggaaaacctgacatccaagtgaaaatctaggatggcgataccacggtgttcatccttgaggaaatcatcgccatgattctcactaagatgaaggaaactgtggaatcattccttggaaagaaaattaatgatgccgcggtcactgtcccagctaactggaagtctggaactattcacgacttatctcaactgtaatttgattgttttcctcctgcttttgcctttatttcaatatctcacattttcctttaaaatgcacagcttacttcaatgatgctcataggcacgccaccacggatgctggtgtcattgctggtctcaatgt

SEQ ID NO: 157924 - DNA, 358 bp, Glycine max
  unsure (1)..(358): unsure at all n locations
agcttgtacttatgtgtgttttcgggcttccttcaccttcttgtctccaacgcgaactntgaccattgttcttccttcccgcaatgcttcttttcatgtctgcctgagtgggcttatagcctaaaccatacttcccacgatttccttgagtatttatcaggctagttatgccgccgttgttttttcctaaacccatcccgggttcaaaaccgttccccaacataactcgggccatcattaccgctgcatcggacagacaaggttgcccaaagagggagtccacggaggaaatgctgaccacctcaaaagactggaaagcagtttctaacgattcttctgcggcttccacataaggcat

SEQ ID NO: 157925 - DNA, 370 bp, Glycine max
tctggcatccgatagaagagaaagaacttgtgtttagaattcgactgaacacgtgagtcagttcgtcagattgattgcgatggaatgcattgaccgtattccgctgagagtgtcattcttatagttggagagaaacgactatcatttattactgaatttttcatgaatcttcgaagtatggactgaatgcatgaaattaaggatgatgaaggccatgtttgattgtgatagccacttagccaacaaggtgaccatgtgcttgaatggtctatcccttgctcccagtttgagctgaatgaattattgattgattgattgaaccttaagcctatacaatgatatctcctgctaccttgtcttctgttgttgg

SEQ ID NO: 157926 - DNA, 244 bp, Glycine max
taaggactacactactggcacaaggggatcccccccccctaagaattgttaaaaaggtcaacctaactcagtcaaggcccataacacaaaactgatgggggaatctctcccacaataagattcccacccaagttaaggtataacaagtggcgaattgagccaacctccacatataatctccacttaaagaaaatccccagaccaactcgattgtccaatctgagccaaataccctaactccttc

SEQ ID NO: 157927 - DNA, 342 bp, Glycine max
cccgaacagagcgccaagcctcaaaatgaaccacaaagatgacgcaataacagagaaaccaaaactaaagaacaagaaaaaacggcaatcgggacatgcgatcaatgaggccacgagaccacgggacaggcaccaagaagcataaatgaaaaaactggaagaaaccgatgaagacaaagacacgaacaaatcacaacaaccgctcagaaacaaagaaaccaaaaccaaaccacgaaaatgaaaccatgacgctacaagtaaaaggtctcccacttggacgaaaacagaaaccggacaaagcgaatccccgaacggagggagaagaaggagacaaaacaccgc

SEQ ID NO: 157928 - DNA, 359 bp, Glycine max
agcttgtgatgtattaatacaccattaataacggtttgattcttatttcttgtatgtacgttatatgcttgtggtaggaaactataagtctatgtatgcttgttatataaatgtttttgattccttgttcttagcaatgctaataccctatagttcgatgacccatattgagatatatttcataaggaatactcatttgaccgtaccttccagttctagtacaacctattttcttatgctgcatgctgaagtcaagtaactcgattatacttgcaagcccaagcataattcattcggtgttgtgagcttacatcaaacagtttttgatttctgatgtttctatcacaatcaagcgattg

SEQ ID NO: 157929 - DNA, 384 bp, Glycine max
tttcaattcattctatgtacccgtggtggtccacatttggtttcatgtatttttattctcgttttcatttactttttataccccattttgacgtgcttaagccatttagttaagtcatttctcgcttaacctaaaaataaaataaatttccaccgatcgtttgaattgtaccatccgttaactttggttgaaatgaattccgaccgatcggtcgtgccgcaaccacgttggaaataaaaaaaaaagggtaaataataatataataatactaaaaaaataccttttagtaaaataaagagaaaaatcaatcggacgttttctctttgggatttctcattcttaattgaattgactaaataattaaagtgaaactaaggctaaaat

SEQ ID NO: 157930 - DNA, 357 bp, Glycine max
agcttggtttgaggtactttcccgttgaagactgaagaaaacgaagaacgaacgatgaatcttgaagaacggtcgagaatcttcgcgtaattactcacggaaacgttacggaagcgcttcggcttggattttcttcacggaaacaattttcctcagcaaatttaagagaatacgaaatgccaagaaggctgaaccccttctcccttcactcctccccctatttatagcaaaataggggaggagcttgccacccagctcgcccaggcgagcaaggttgcttcctccagaagcaacagccttctggatgaaggatctggaaggcccaagtgggccagattgctattcgtaccccctttt

SEQ ID NO: 157931 - DNA, 362 bp, Glycine max
ctgcagcttgctactgtgatggtttcgtatcttttactgtacgtcttgcccacaaactacagcaatggctcatattagctttgctgcgaaaaattccttacgagaaactccaatgtcgaagttcatggaaatatccttgtatatataatcgcgattctcagatgatctgatgccttcaaactgtgccactcgaagttcaacttgttcaaatctatataaaaaaaactccataatctaagcttgatattttgggattaatattgcagtgcttcaactttgcttcgtgtttcccaagattttgcacgaaatggtgaagtgaaaaccatcaaatacattatcatcgctcactccctcaactctat

SEQ ID NO: 157932 - DNA, 470 bp, Glycine max
  unsure (1)..(470): unsure at all n locations
cttcttaaagataccttcttgtattcatgcgtaagaatttggtgaagacacgggagcaattgattaccgattacaagctgaaaataaatggcttatttagtaccagctgaacaacgttgaaagaagtcaaatatacagtttatctgctacaacttcttcatcggcctcgtggatgaatcgctgaaggacataacactatatacatcagtatgcatactatggagcagagagggtatatactaatatcatattatggatctggattaagtgtagccaaatttgcatgcacacattcatatagtcactatatttgtataaaccattgaattaagattggagattggatcactcacattntacatgcatgctttaactctgattaccgaaataaatcatgaatagtcgggttttcatatggtttccaccatattaaatgtgtgaatgcatgagtccaaatcactctcactaac

SEQ ID NO: 157933 - DNA, 437 bp, Glycine max
  unsure (1)..(437): unsure at all n locations
agctatatcgtcgtctcacagtgccccttgtctttttgtttncncttctccgccatgttcttcagtgtctccccgttgacactgccacctcctttgtcttctccttcatactctcagtccccttcctactcttgttcgccaccgttcccaccacatacttggcactctgttttgtgttgaagcatagccttttgccctctctatccgattctctgccctatccttcatcaacccacagggcccttcatcttctcctttgcattgtatgcgaaacccacatatgattgatttgctcttgagttgactatcatagagcttgttcacctccatatgcaaaggtatcgaatttctataagctccttctccgtttcaattgctccattccataacatcctgaactaatcgactcgcttctctttttacggttcgataaagtt

SEQ ID NO: 157934 - DNA, 350 bp, Glycine max
atattctgattcttaccaataaacttaaaaatcactacagaatgctgacctttcgactctaatagatcttcttaatgttgcatcattatcttgttgaagaactttttgtcaaccgaatgttcaacattgacttgttggtccttgctaacaactagatatacatgattatcttccacgacttgtgaaacttccactatcggttcgctaacacccacttgaacttgagggggatgaatgactaccaatgtgttacttgattcagacggtaagcctcatactgattcttttcacaacaatgcttgaaatcatccacctactgataagtatttcaacaaatttcattcttgatc

SEQ ID NO: 157935 - DNA, 415 bp, Glycine max
atccttaagtcacctgaggcatgcaagcttacaagaagtatgctcatctttgttttttatcggcacttcattacgagcaaaaacactattacatcaaattagcacaccaaaagatacatatgactgtctcaaccgtacgcgattgcatggggtgttctacaattcatatcaaccacccatccttttttgttttcaattctaatttcacgcacagaatcttgaatttttatttttacttgacaagccaaaatgaaatttatcaacaaccagtagtcaggaatgaagcacatgtgccttactccaaaccacctactagcacaaaagaaagcacaaactcccagaatttgattaaaatccacacacaaacgtcttgcagagcacggtcattatcgaagaaaccacaacatctcacaat

SEQ ID NO: 157936 - DNA, 421 bp, Glycine max
atgcacgggaaatttttctaaattgttacatcggatgtactcattcacgttcctttctctttttctcctctattctcctcgctatattcggtagttggcgaagaatttgccaacattattttgcataccaatgtttatacaaggggaaaacacttgcaaacttaagtaagtcaatcaaaacgttacgtacaacagcaacattagtccatgtaattaatataactttataactagcaagcatttcgacaaatcttcaacagataccggatatatataattaattatgaacatacacatattacgacagaacccaaccagaattgaaagaggttatactaattcaaaaaattggaattaacacacgttaacagcgatatgtgtcatgttattttacgaaagagactacagtaacaccgcatat

SEQ ID NO: 157937 - DNA, 453 bp, Glycine max
  unsure (1)..(453): unsure at all n locations
agcttgcttgtggagctcctatggaggctggatctttgagcttcaatggtgatcttacaccatggagatgcactggaaggcacggagaagacgagaggggaagcaccatccactacggaatcacccaaggaagaaggagcttcacccccaagaattgccttggataacaagcttgaagaggatgctttaatggaggacaagaaagagggaaggggagagcaccacattgaaggaataaaagacggagagaagtggaactttgaagtgtatctcataagactttcattcatcaaagttaccacacgtgctacacatgcttctattcatagactacgtagctctcttgagaagctctcttaataaaacttccttgagaagcttctcgacaaacttctttcgaaacctgagcttatntacacacacccactcaaaaactcagctcacctccttgac

SEQ ID NO: 157938 - DNA, 350 bp, Glycine max
  unsure (1)..(350): unsure at all n locations
agctacctantntataaagagaagcatgtgtaatatttttgtcacttcgatgattgagagtcttgcgagacacaacccaaagttaaacttctctcccccttttcctccttcaatttcgtgctcccacctctctctttctctctctctttctttgtctccattgaagcatcctctccaagcttcttatgcaaggcacattcttgggggtgaagcttcttcttccatggcttattccctagtggatgacgcctcctttcacccgttctnctttgtcttccgctgcatctccatggtggaaaataancatcggagganctcattgaagctcanagatccagcctccatagaag

SEQ ID NO: 157939 - DNA, 419 bp, Glycine max
  unsure (1)..(419): unsure at all n locations
agctcgacacatcattgttagagctagattatgtcttacgtagaaatgaaaatggaaaatatcctcaagttcgttactatgtctaatcaagataagcttgcatccaacacaccaatgggcgatcaatttgaagaagccacagaaccaactgaacgcttgccgaggaaacattattcaaagtcccaaaacaatggtgaccctatggacaaagtccagagaaggaattctctcaagcatacaacactacagtcaaagaatgagccaaaacacatagataatgttatgtctcatcaatacagggccaaggctatgtaagaatagctggatcaccttcagaagaacgatgtctggaagcttgtagaactctccaaaggcaaatttgctgttggagcanaatgggtgttcacaaacacgctgga

SEQ ID NO: 157940 - DNA, 361 bp, Glycine max
  unsure (1)..(361): unsure at all n locations
tcaagaactatggcctgatcaaactacttgttttctgatggaaactctataaatagacctgccatctttaatggagtgggttaccactactggaaaacccgcatgcaaatctttatagaggcaatagatttaaatatttgggaagccatagaacaaggaccttatgttccctttataatagccggaagtgcaacaatacaaaaacctacagcacactggactgaggaagaaagaagattagtacactataatttacaggccaaaaatattattacatttgccctaggaatagatgaatactntacggtttcaaattgtcaaagtgctaaggatatgtgggatacactaccagtaacacatg

SEQ ID NO: 157941 - DNA, 447 bp, Glycine max
  unsure (1)..(447): unsure at all n locations
agctntaacctcatcgtgtctcacagtctttatatttgggagccaatccaatccttgtgttcggactctcagccacttatgatagccgctgatgatcccattactgcttcccctaagctctctgtcctttcttcatgccgcatcccatgccttgcgaactccttggagtaccctcgcgttgtggtcactgaaaccccgtgtaatgaaaggcgtgatgctttcgtctaatggcgctcctctcatggggtagccaagctatcttatggcgatgacaggattataattaatacaaccccttgntccatcaagggaacatttggacatccttcgcatgaagatagaatcctgattcttccttccttctancgagggaacaaattaacagacgcccctccatgctagccaagagttggtcccaattcgcctttcctttttcgacgcacgagc

SEQ ID NO: 157942 - DNA, 449 bp, Glycine max
aagaatagagtccatcagcattaactatcttcttgtaggaggatcttattggtctcctgagatttcacaagacatgaatgaggatgaaactcaaagaaaacagagttatctttggcaaactgactcacacttaacagatttttcgaaattgaaggaacatgtaacaatttatgaagtttaaaggttatgctagtatcattgggagaaagaaaagttgaggaaccagtgttggagaccattgcctatgaaaatctgctcaggtccatcaaattgagtaaactgtttaatgttttgaaaatcaccagtaagatgaaaactggcttcagaatctggtatccaagtggagccaggtgcaccattaccatgagatgatgagtctgcaagcatggcactgcgttgactgcgaccaggagaatacgggatatgttgtaccgtgtacgatcaaaaat

SEQ ID NO: 157943 - DNA, 379 bp, Glycine max
  unsure (1)..(379): unsure at all n locations
agcttgtagaatggctagacatgatacatgtcacggtttggtttggttcaaggataaaagggatgccccacattatttccatgacacaaaatgcaaaaatgatgatttggaaattttatgcaaaactggtcatgcatgcacctatgtggacgctcaactgttaaatttctatggtcatgtgatactagggctcaggattcatttcctctatttttagtcaacccaatgtttccaaaatatgtccttttatcaatttgtgcattcatccgagtccatttcgggcgtccggngaaattttcacagcattcaccnctcaggtgtatacacattttttttaacaaactaattatgaatcttttctaaagaaaagtggaaatca

SEQ ID NO: 157944 - DNA, 369 bp, Glycine max
  unsure (1)..(369): unsure at all n locations
tatcttgaagcgtctcttcaatatcatgtgcttgactaagtgacatctcttcagacaccacaatgtctactttcacaaagtaattggacccacaggtgtaggctctcactgtgtcgatgtgcttgatctccttgtgatggttccaacaaagatatgttagctntgctaggtattctgctggggctgttttgccaatcaatgaccacacattctccatcaccgtttttgcccacttgctgattgtatataaagctatctgcacatgtaattgctaatctctgttattactttgcatcattataggcttatataatatatatttttaggacaataaaatgtaacatttttatatatgagaaaactacctgc

SEQ ID NO: 157945 - DNA, 381 bp, Glycine max
  unsure (1)..(381): unsure at all n locations
agctntccgcgaagagatctaggatggactccttggctgaagggaccagtgccgctcccgagtttgatagccaccgtttcaggagcgccgagcaccagcagcgctttgaggccatcaaaggatggtcgttccactgagagagacgcgtccagctcagggacgatgagtacatggattttcaggaggagatagctcgctgacattggacgtcgctggtcactcccatggctaagtttgacccacatatagtcctggagttttatgctaatgcgtggcccacagaagagggagtatgggacatgcggtcatgggtgagggcgcaatggattctctttgacgcagatgcccctagccagttcctgtgtgacctcctcgtgttag

SEQ ID NO: 157946 - DNA, 456 bp, Glycine max
agcttgtgcgtgcgagtatgcattgttgtttatatgatatgatctattatgatgccatggtgcttcaaagtgaaaacaaaaggttagcaggggttaggatggccatagaagatcttgaggtggagttggagtgcatgttcagacgtttgatccacacaagagttttgcttcttaacattcttaccaaatagaaaaattaggtgggaaatgggagccccaacataccaatgacaaacaagtcgactagctaactagctcaaaacccttctcttaattaaatttacttagattgttaaccattcttttattctttgattgttttcaaataaactacattgtgaatgttgaatctaattgaacattgtctattccaccctgagttacatagatttacagtccatggacaataagttgcattataaataaaagcaattcaattgctcgtatatatatatg

SEQ ID NO: 157947 - DNA, 467 bp, Glycine max
tggggaagagcttagcaagcataattctaaatcctgtttaagtacccttctggttttcatgttcattcttttcactatcaaaagcacatccaattgaagctccttcaagatatgccttacaagcaagaagtatatgttggtagcgctttctgaagtgctcttccaccagttcttcaaaatgctgcattaggcatcatttgtcagtagcaattccatccatataattccatccatataattccattcaaagattcagatggaccccttttttgaaccataatctaggaactaggctacatacaggatccgaagcctggaagcctcggtgtaatctagtagaataaatttaacagtggaacataacaacctacagaaactttacgccatgccactaagcatgaaacaatggacatcatggacacaacagctagttctgatcctctccatatagtgaaatatatatcttt

SEQ ID NO: 157948 - DNA, 448 bp, Glycine max
  unsure (1)..(448): unsure at all n locations
agcttatttgatgatgccaaagactcttgtcaagaatcaagattcaagaatcaaagagtaattcaatcaagaatcaagattcacgtgaagattcaagaagaagactcaagatatgcaagaacttcaagaaaagcatcaagataagtataaaaagattttttcaaaagaaaagaggaataacacaatttgtccaaaagaatttttcaaagaaaaaccttttaccagagtttttactctctggtaatcgattaccaaaaggcagtaatcaattaccagaagcccaaacaattttataactgttttacaaagtagtaatcgattaccatgggcatgtaatcgattaccaatgtttgtgaatgttgaatttcaaatttcaagagtcacaaattgtgataaaacattntcaaacttgagtaatcaattacacaacatttgtaattgattacta

SEQ ID NO: 157949 - DNA, 467 bp, Glycine max
  unsure (1)..(467): unsure at all n locations
tncgacaagtaatcacttgtcacattctaaaattnctatctaactttcctcaaaatcttgaatttgtcatcaagtacatgtaattccagtttaactttaataagtacatacaaaatttattcataaattcattaatcaatacttaaattaaccacaatccaaaaatgctaaatcaagaatagatccaaattaactttaaaaagtttcataatttgaagacaaccctagtcaacattcgaaataccaaaaagtctaaaattaaaatattccacaaataactctncacggttttcacaactctatatcctaatacattggtttccttacatcaaccaagttgccttcttttgccaatctcaatcacaatttcatcaccttttggctggtcataatcataagcaaacttcttccattctttgtcaatttaataaacctgtgatactcatttctcaacacagaatatgtag

SEQ ID NO: 157950 - DNA, 276 bp, Glycine max
cgcctgcttgtgtgcttctggattcttattggccaaacattgtgaaacaagttcatgccagtgatttgaaaacgaggaggaatggttgagattcgagagtttcccatgcacttctgtgctggcgcttcaccattctgacaacccgttctagatcttcctttaatgcacgaggtggggattggacttcgaaaatctatccataaaagttgcggtgtaataccgcctaaggcctgttgtccctcgttggcatcatggggcatgcactttccacccatc

SEQ ID NO: 157951 - DNA, 297 bp, Glycine max
  unsure (1)..(297): unsure at all n locations
cttgtgtacnccatgaagagtttgcttacgagagagctgttcatatcactactacaagttctccttttgaaattgtatattgctttaacccactaactcctcttgatcttttgccaatgcctaaaggtctatttttaagcataaagaaggccaagccaaggcggactatgtgaataagcttcatgagaaagtataagatcacgttgagaggaaaaacataagttatgctaaacaagccaacgaagggagaaagaaagttgtcttccaacccggagattgggttcgggtgcacatgag

SEQ ID NO: 157952 - DNA, 448 bp, Glycine max
  unsure (1)..(448): unsure at all n locations
agcttatcttacctatctatctcccagatgtctttgtttagattcaatagataaaaaacatgaagttctaattcaagatgttttctttgttgcatgggcataatgcaatcactctatgtctagcaatgattctattaagatgtccctacctttgagttctactaaaaattatcctctctcgagcgactaatccctaaaactgatgcatataaaaccttcaatgtatttctactaaggattaccctctttcaagcgccaaactcctaaagatgatgcacggatgaagcatataatacatttgttggcattttaggcctgccaagccctaactaaaggggtttagcctttcattgtcatgagagacttttacactntacgggggtgatatgaatggaagaagatggatggatagaggaagaaaagaggatcatggacatatatagaaaga

SEQ ID NO: 157953 - DNA, 455 bp, Glycine max
  unsure (1)..(455): unsure at all n locations
acatgcatgttcacaccatatttactatacttcgatcaactgatgcaatctatttgattgaaaagataatttatattactcttctaatgtagtcgacaacaaaaaaaaaatataacaaaaaatattgttgttcttttaaagggaattcaaatggcagatgcacaaaaaataataaatttaaatgtcttttatttaataattatttattttatagaaaaattatttcaaatcaaatatataatgtatggaattntaatacttagttggccttcagccaacagtgcctaattctaagagtcatttcaagcacaggttacaggtctttgctttcaaagtaacatggtgatcaatgctctcaacaaaaacattattgcanaataataacacatganaaaggatatagtaagcatggacattaactaaactcggttattcattaatcaaaacacaattga

SEQ ID NO: 157954 - DNA, 457 bp, Glycine max
  unsure (1)..(457): unsure at all n locations
agctntacgacttatgttatggctcatggttagtgctatgggcacggcctttgagttagggtgagggttatggttaagttatcataacgactatttttatgtcgcgcatcacactagaattagttgttagggtttacgtttaggggtcgagggtcaaaattagtggtttacgtttagggtttatgtttatggttttaactaacgaattcattgaatcccacgaataagttatgtacaaaaggcaaaatgtttttgactactgaattcattgaaccccaaaaattcaatacattgaatagaacggaaacaaatacaagtcactcgactaacatacataaatcaaggatttgaacaactcccacgctcagatcgcattggacagcgacgcctgttatgcccttcggctccacatctactgcattttgttcggtgctcagatggctccacccactccatc

SEQ ID NO: 157955 - DNA, 357 bp, Glycine max
  unsure (1)..(357): unsure at all n locations
gccttccctctcctcttctttctccttcttttcactaattntatgtgaaatatgcttgctaagggtgctaaatnccttcccctcagcctcacatgcctttttatagccaaaataagggaggagcttgccgcccagctcgcccaggcgagctggttgcttcatgttgaagtttcctaatgggcctagatggtcccagtgctgaagaactgatgtagctccattggagcttgtacgccttggatcttcttcattaatgcagtcctttgcttcttgaatctgaatggcagcggaatggacaagaagataagttgatangagatgccactgctgttggatcaagtggcctcgaaataatta

SEQ ID NO: 157956 - DNA, 444 bp, Glycine max
agcttgcgagagatatacagatattgtggtgcctaataaactactatcggagaggaatgtagtagtttacttcactgagtttgacgagttcaaggaggaactcgagagaagacactaggatgagaagttaactgattttgtacacaaaaatatagacattgctattgtgaaggaattttacgcgaacctctatgaccctgtggataaatcaccgaagcaggtgaaggggagaggtcatctagtgaaatttgatgaggatactctgaacacattcctgaagacccctgtagttctcgaacagggggaaaatttgtgttcttattcgaggtttgcactcctgaggcctgatcctcaggagttggctgctaagctctgcatcccatggaggggattcgagctaaatgctgataggaagccgttgaagatactgatgaagaacatgac

SEQ ID NO: 157957 - DNA, 470 bp, Glycine max
  unsure (1)..(470): unsure at all n locations
tatactatatattgcaggcattggtgcaattctcagatgcagatactgctacttctgcaaaggatgctttggatggaagaagcatacctaggtgacagttgtattatttgtctgacatgatatttagttcaactgtgatggacatatggctgtagatgtggtgcatatcctcagattggtcaactatagactgttgtaacttgtatattcacactctcactttggtttatttattatgtagtttatatgctgtttttgaacttgtaactgtatgcatcattgaatgtgtaaaatacggttagttatataacattccaactggaccaatcataagaataaatgtgttaagttcaagttctttctactaatgagtagttattagcacattcattggctctgctgatatagntatatacattatgcattattattgcgtaactggtggttggtaantataattgatctttgac

SEQ ID NO: 157958 - DNA, 444 bp, Glycine max
  unsure (1)..(444): unsure at all n locations
agcttatgcgcatatttccttacgaacgttctcttgctcaagacatcctatcaactaagaaaaatgcacccatatacaatcaaggtagcttcattacctagattatttacatgtacttccaaggtgtatttattatttacatcacacacgcctccttggctgaatttacatacatgcatactcaaagcattntggggtaccaaaaactgcacatgcgctcatcttggtatttctaatacccatacatatacaaacttcacgatgaatcttgactacctacacaataaggtgctacatttcatgctttttttcaagtttttgctacctaaagccacatgcaaattcaagcatantttcctttgctgactaaaattgtattcaaattagaacgatatatttttttgaatatgtttcttcactaacatgaacatattatgtatatat

SEQ ID NO: 157959 - DNA, 349 bp, Glycine max
  unsure (1)..(349): unsure at all n locations
tctgttgttcaaattcgagcgtgtcgacatattatgcgcccgaatcggacatccgtgtgaaaagtgataaccaattgaatttctcgagagcttccgatgtttaatttcgagccgcttgatatattataatcttgaatcggacctcagtgctaagagttatgaccatttgaatttctcgagagcttccgttgtttattttcgagcgcctttatatgtgatgcgcctgaatcggagatccgagttaaaagttatgaccatttgaatttctcaagagctttcgttgcttaattctgagcgtctcgatatgtgatttgccctacatcgacatccgtgcgaaaagntatgacca

SEQ ID NO: 157960 - DNA, 457 bp, Glycine max
  unsure (1)..(457): unsure at all n locations
agctntataagtgcgggtctgggagacgaatgtcaagtggtcgcgatatgtgaagatgatgttccaagtactttggatttggtccgaccatgccctcctgatttccagctgggaaattggcgggtggaggaacgccccggcatttgcgcaacaagcataatgtaaacctttacggttttaaaagctctatagttgggcctaggctttagagttttcattttgttaaggctttgtgtcttttgtctttgaatttataatacaaggatctttcttcatctgttcctggtctctacccattctcattcatttgcatgtttacttctttttctgaaacggcagattcgatgatgagtcccccgaaggtactaatacctgggacccgtctatcaacttcgagcaagaaatgaaccacacggaagatgaaggagatgacgatgtgggattttcttctgaacta

SEQ ID NO: 157961 - DNA, 450 bp, Glycine max
  unsure (1)..(450): unsure at all n locations
nttctgaaaactcttcgctagtaatcgattacaggactctagtaattgattacacagttcaaaattcaaataagtttaaaatttaaaacaagccatattcatgatctctcaggtaatcgattaccagcttcggtaatcgattaccaattcaaaaatatcttacttttgaactgattaagcttgataaagaaattttgataaaagactttgaggccaaactattgcaataaaaaatgagattcttttaacaatttaatgaagttcttatctatgattttcttgatcttggttgttgacttgaaacaatgtgtgctttcatcaagtaaattcttttggcatcatcaaaacctgcatgattcacaaaaagaaccaagatcaaaataaaaaaaagtcagaaagtaaatntgtacaagtatctacgctatctactacattatcaatgatatctac

SEQ ID NO: 157962 - DNA, 442 bp, Glycine max
agcttagctacacacacccatctaaaaactaacctcacctccttgagaagcttccttgagaagctagagcttagctacacacacccctctaataactaagctcacctccttaggaagagaagctagagcttagctacacacccctataatagctaagctcacccccatgacaaaatacatgaaaatacaaaaaaatcctactacaaagactactcaaaatgccctgaaatacaaggctaaaaccctatactgttagaatggccaaaatacaaggcccaaaagaagaaaaaaaaacctattctaatatttacaaagaagagtggacccaaccttgacccatgggctcaaaaatctaccctaaggttcattagaaccctaaggccttctttatcagctctagcccaatcctcttggagcctcttgctcatggctctggtaactg

SEQ ID NO: 157963 - DNA, 468 bp, Glycine max
ctacgcttatgaatatatataagaggcaatgacaattgaatttttattcatgtttcctttgatgaatctaatgctatttctccaaaaaaggatattttagatgatattacataatatttagaacaaatgcatattcgtggagaagattctaaaggaaaaggagaagaaagcaatgaagatcctccagtagaagtcaaagcaaataatgatcttccaagagagtggaaagcttcaagagatcatcccctcgacaacattattggtgatatctcacaaggggtaacaactagacactctctcaaagatttatgtaataacattgcttttgtatctatgattgaacctaacaatttaaatgaagccataatagatgaaaattggataatagctatgcacgaagaactaaaccaatttgaaagaaataatgtttgggagttagttgagaaacctgaaaactacctaatcatt

SEQ ID NO: 157964 - DNA, 414 bp, Glycine max
agcttaaggaaaatttaccagagtgtttttgttgtaaagcatcttgcacgcggaccacatggtccttcatccgtttgctgaagacgagcacactatccaagaagacgacgatgaacttacccacaaagggttgaaaaagctcgattcatagttgcttggaacgcagagggcgcgttgcaaagcccgaagggcattaccctatattcaaagtgtccctgatgcgttcgaaatgcagtcttgtgaatgtcctcttccttcatcaagatctggtgataaccttgcatcaaatccaacttcgagaaccactgtgcgccgtcgagctcatcccacaactcatctgtggttggtatgggaaacctatctcctatggttatggcgctaagggccctataatccacactaaatctccacgac

SEQ ID NO: 157965 - DNA, 371 bp, Glycine max
tttcttactacagaaaatggatcattttcaaggtccaaacgccttacaatgatcaccttttaagtaaaaaaatcacttgctaagaaagaactacgtaggtctgatttcctcatcgcaattgaggaatacgtacgagcaaagggaaatacccttgtcgaccacaaaaagaagaaaaatataaaaagggtgtaaagaatataaagacataaaaagggaacgtaaaaatcaaagtcatgtttgcacattcgattaaaggctgtcgtcccttgcgacgaacgtgtggggtgctaatacctctcccgtgcgtaaatacaacttccgagcctttcacttaaaagttcgtagatcgcgtcttttcccggttttccgac

SEQ ID NO: 157966 - DNA, 433 bp, Glycine max
  unsure (1)..(433): unsure at all n locations
agcttaatgcccaatgggatttgattattaattagagacagactcagtgatcatagcagtgccacaggaagttataaatctgaagggaatggatttagactggtggatgagaaaactagtcccattgatcatgaacatgaagaaacagatactattttgacattacgagaatcttttttgaaggcttgtaagattatggacaaagaactgaaacttcatcctgatattgactgcttttgtagtgggactacagcagttaccttggtcaagcaagtaagatataaattacaatgtaatgttctcttgatgatttcttttttttttttttttgcatgtggcttacttatgttcttttaggggctggaccttgttattggaaatcttgnggactcgagagctgtactgggtacccgagatcatgatgattctctta

SEQ ID NO: 157967 - DNA, 418 bp, Glycine max
agctttgtggatttggtcttcgccagtgaaaggattgaagtggatctgaaaagaggcaaatttaatcatcctgcttggacgaatgagaaaactggggcaaataaagagggtgacgatgagggagaaacctatgctgtgactgccattcctgtacggccaagtttcccaccaacccaacaatgtcattactcaacccttctccttacctaccgcccatttatccacaaaggccatccctaaatcaaccacaaagtctgtctaccacacttccaatgacgaacaccacctttagcacaaaccaaaaacaccaaccaagaaatgaattttgcagcaaaaagcctgtagggttcaccccacattcccgtgtcatatgctaaacttgatcccatatccactcaataattcaatggtagccata

SEQ ID NO: 157968 - DNA, 397 bp, Glycine max
  unsure (1)..(397): unsure at all n locations
tgaagagagttcttncatgccagcacgcgcccaacgtgtatgtagctcgctaagcgagatgggtgtctcttctgcgctaagcgcgagattgccgctaagccaaatctcacttactcgcacttagcgcgagaatggcattaaacgcgccttcatggacaggaagccctttcttaagcctgacttacagaaaatgaaggggagggctggaagagagcgctgaatacccgccagagtttgaagagtgaaatacacaaaggccaataacagagcaaaggagccaagttttgatcttttaggaagatttgtgagtttttgagtgattgtgagattcctagaggtggaggagacatcctcactcctttgtagcaagcaatttctcttaatatctcttcttcat

SEQ ID NO: 157969 - DNA, 436 bp, Glycine max
  unsure (1)..(436): unsure at all n locations
agcttgtaacgttgtctagttntctttattttgcttattaagacaccagatctagtttggtcatcacgttgtctaattttctttacattgcaaatttcactgcttgcacaatttggactatttcttgggtggtttgtcaagttgacctcttataatattgtgtcccacaggccaatcaatctgcatctaggcatgatggtggtagtgatgtatgctttgggagatttcctaacacgttatagaaaaaaaagaaaaagtttataacatttattgttgcacctaattaaattattttgcttacttgtactgactagtgactcctctccatttcttattcttttattcttttggtcaattcaacttgtccttttcttaatagtgattattcgtgataacactcgaaggtcaccaaattgattattcgtgataacacaag

SEQ ID NO: 157970 - DNA, 441 bp, Glycine max
agcttgcatcaatgatttatgaaattgtttcttcgcaagataaatacgataaactacacgaaacgagatttggagaaagagagcgatgcagtgaaatagaaaacgaacctgaaattgaattggccgcaccagttcagtcttcgatcgccgatgggatgtacagtgttttcctccgaggactaactgcaaagtgtgaagaacgaaattcttcaaacgcaccgtttgatcgaagatgccagcgtattagaattattatacaggttaaggttatgcaccaaaaatatacaaaacatacctataaaaaattctggtttaggaattacgagatgaaaaaaaaatcaacatagtctctattattaattaaaatttattaaatacagaacaaagattttaagtttaacttcttaattaatactacttcatttcaattatacaagtatt

SEQ ID NO: 157971 - DNA, 348 bp, Glycine max
actatcatcaggtaagtgaggacgcagcattatcccaaccaccgatatatattgaaagagtcgttgaaacagagtcgcatcacttaatcgacgacaaaaagctagaacaaaacttttgatatatcagtgactcgaaacaacgatgaaatttatcaagacttaaaacaaaaacacacctcaagtgtatcttagagatgtcaaacatatctaagcctctcttttttatcgggcatcacttctcataatccttcactctttttcatcttcttatttttcaaacactgcccttggtttcccttagacgtcgccatccttttgtaattcctccgtccacggctattataaaca

SEQ ID NO: 157972 - DNA, 452 bp, Glycine max
agcttgtaggataatggggtacccatcacatgtggttctagatggcggtcgggctatggtgcatatatcaatcgtgtatcaatcgtgtctaaaccaaagtcaagcttcaaaccacagcaacacaaaatctaggtgtccaaaacccctcaatttaatggattttctaggcttgagaagtgaaatcgagaatgggacaaatttgaagcagactctcacctcacacaagtctataacatcaatttaaacttgtttaaactggatttacgcttaaaatctcaccgaatcaaaatttgactcttcaacacccaaatttaccctacaaaaggctctttgctcactttggtcatttgctgttctctctagcacagcctaacctttctcataagtcctaaatggcatttcaagctaagattaactcactctaacctctaaatactaccaattcaagattt

SEQ ID NO: 157973 - DNA, 440 bp, Glycine max
ctgcgggaagctaagtgtgaagtatgcaatcctgcttatgatttgcactgcaaactgggtacccaccaatcatacttccactgttgccacatgtttgggtgctgtgtccaatgatgatttagatgctgaactcaaagacacatgctatgtgctagaggcaaccatcaaagccaacacagagaagaaaatggatctggaacgcttgatcaaaagactctcacacaatggcgttcattatagataagcagctgacgtataagaacatgcaccacacgatacagaatcagatgatgatgttgatgccaccccatgaccatcagacctttatttgtttgctctttactcttactagctattgaggcatgtacctttgaacaattgatcgttattggtctgtaatattcgcacatcatgcattctactattgccagatctgtcta

SEQ ID NO: 157974 - DNA, 458 bp, Glycine max
  unsure (1)..(458): unsure at all n locations
agcttntatacaagctaccaaacaaaatatatctatgaactgaaatttaaaaactaaactaaaatgtaaaaactgaaacataaacataaaatgtactgaagacataataatataagttattcaaattgcaagaaaataaagatcctgatcttgtcaatcatcctgtgcagcgtcattcaggtccaatgctggtgcagatggtggatcctgagaaagagaaaagtccaacactggtgcagatgctcaagctgaggagatatagctggatcagcctaaaaaataaagggctatggtgaagagggctctgatgtgtcaacaaaagcatcgtcctgtgcaggttgaggctgctgggctgcggaggcctcaccccctcccaaaggagaaggctggactacttgccaggccaccttctgaagaaattcttcaatgctcataactgactgctggtggaccacatc

SEQ ID NO: 157975 - DNA, 426 bp, Glycine max
atttcttggctggtgttttggtttatgctaaaggtggtgtttgtcattggaagtgcggcacgtaggctttgtggttgattttacggatggcctttgtggatgactgggcagtgggtaaggagaacgtttgttatttgctgagtaatgacattgttgggttggtgggaaacttggctgtataggaatggcagtcacagcacgggcttctccttcatcctcaccctctttatttgccccagccttttttttttttttttgcatttatcaaagcaagatgatcagatttgccttttttcaaacccacatcgatcctttcactggaaaagaccaaatccgcaaagctttgaacgtgcgtagcccactattttccatagtagaatacctggaactgtgtctactcatcattgccatccgttttcgtcattg

SEQ ID NO: 157976 - DNA, 320 bp, Glycine max
gcttgccacccagcacgagcgagcgatttattgttttctcctccacacaggcacctcgatggagaacgccgatatgaggctcagatagcgatagtggtgcattgcaacccacaaccaatctgcaaaagactcgtgtggaccaccttagtcttatattgtcgccgggatgtcccgagaattcctgcatcgagtaactgcacagcgtgaagaacgatattgttcaaacacaccgctggatcgaacacgccccttccttcgaattatctgcatgttacggctctgcaccaacagtgcaccaaacatccctatagcctattccg

SEQ ID NO: 157977 - DNA, 375 bp, Glycine max
atactgcatctggatgttattagggggctcttacggaagagagaggaacattcatcatattgatgcattaaatgttggcatgttatcttttccttttctcgggccaaccaatacaacactttctcctgtcaaaccgcctcatttatttgtacctttcttatttattctaaaaagaggagtttcttattctttagaatcattatgaagtctcctaaaatattatgattaatgtaaatattacaaacacaacatacaattcaacaatatgtatctttaaaagattcataacggcgactcatggtgatataaagaatttataaggatcatttaatcattgcaatatattacaaatgatcttctattcaactgctattc

SEQ ID NO: 157978 - DNA, 373 bp, Glycine max
  unsure (1)..(373): unsure at all n locations
agcttaaaggaagtgacagaattagcatgggtttaaatgtctccgcattgattggtaaatgtgttccccaaatttctgaaaaatgtaaagatccacgtacattcaccataccttgtattatacggaatagtaagttcgagaatgccatgctagatttacgagcttctgttagtgctatgcctctgtctatttttaattctctatctctacgtcccttacagcccactgatgtggtaattcatttagctaatanaagcgctgcctatcctgttggttctataaaacatgtcatacctagagttggtgaactgattctccctgttgatttttctatcttgaatatggaagatggattttctccaggatcacgctc

SEQ ID NO: 157979 - DNA, 331 bp, Glycine max
tcctaatgagtcattagagatctcttgtaacaaccttcaaattgccccatgtgtggcatctcttgtcaatgtccggattcacaagcgattctcctcaaatttcagccagcccccatcaattagaccttgcaccttatgcttcagggtcctacaatgctcaatggaatgccccagggcccctctatgataagcacatgttgcgttcgagtcgtattctcggaaaaatggacgttgaggaaccttggctggggttatggcaaccattgaattatccagtatatatgggagcaattcagcatacgacactggaactggggtgaattctacagac

SEQ ID NO: 157980 - DNA, 402 bp, Glycine max
  unsure (1)..(402): unsure at all n locations
agcttcatcaaattaacagcagccttgctttttgtcctagcggcctnacagaggttgttgatggaccacacaatggggaagagcacatcgcaacaacatacgacatcaacaaggaggaagatctgcttccaggtaacccagtcatggccaaagggcccactctcgtcaataacgacctgagccatgctggcaatgacttgaagggggatgacaatgatgagaaccttcttttccttatcctgaaggaagggtttgaggaaagaccatccagtgccaatcaagacaattatagtgaagagcgaaatgcccttgaggaagctgaaaatgtttcagaccatatcccaaccgtgggcgcttccggcgcccttgatgtacgattcgtcctccgcctctccaatagat

SEQ ID NO: 157981 - DNA, 359 bp, Glycine max
  unsure (1)..(359): unsure at all n locations
gagctaattcgaacgacaataaggttctgctcggatgtctgactgagnncccgcatacatcgagacgctggaaattgaatgttgaagctctcagcatattccaacgacaataactttttactcggatgtctggatgagtcccgtaatacattcagacgctcgaaattgaattctgaatctctgagctaattcaaacgacaataactttttactccgatgtctgattgagtgcccttatatatcgagaccctcgaaattgaatgttgaagctctgagcaaattcaaacgacaataacttctttacttagatgctcaatcgagtcctgtattataccaagacgatcaaaatcgaattttga

SEQ ID NO: 157982 - DNA, 328 bp, Glycine max
  unsure (1)..(328): unsure at all n locations
caagctggtttgaggtacttacccgttgtagatctgaagaaaacgaagaacgaatgatgaatctntgaagaaccgcccataatcttactgtaattactcacggaaacgttaccgaagcgcctcggcttggattttcttcacggaaataatctccctcatccaattccaaagagagagaagtgcctgacgggctgaaccctttccttttccacttctccccctatttatatccaaataagggtgaagcttggcgcctagnctccccacgcgagcaaggatgcttccttcaaagcaacagcctctctgacgaattttctggatggcccat

SEQ ID NO: 157983 - DNA, 413 bp, Glycine max
ggacaagccggcttgtttaactaataataataataatttttataataataataataatcactttagtcactctattctataaaaacccagattatacagaatctatactatatagaattcatattatacagaatccacatcaatccaacctagcccatattgtacagaatttattttatggcgttaaagggcatagacataagatagatttgtaggctatgaggttgatgacctatacaacggcaccaaggatgtagtttatggagttttatgtcagagaggataagaattctaagattctagaattataagtgttattagctgccgtgcacactgaacacgaataataaaatgcatttcatgcacaacacatacaatccatacaattatgaacattatgctctctttagata

SEQ ID NO: 157984 - DNA, 402 bp, Glycine max
  unsure (1)..(402): unsure at all n locations
agctttaagttgctattgactccagattgttgtttagaaggacagacatctgtatggtgatctgcagaagaacatataccacatactctcgcaacaggtgtagatttctgaatcatggcaagctgagttactacgttgaccaacgcatcaagtnctccttcaagctgtttattttcagcagatgaagataaatccgtcgccccctcatggactcctctaacaaaaatagcattctttcttgcactaaattgttgggagttggaagccctgttcttaatcaaatttctagcctcagcagaggtgctattaccaagagcttcaccactggcaggatcaatcatactctcctccatgctgctaagttcctcactccactattgaacacggagtccctcacaaatc

SEQ ID NO: 157985 - DNA, 399 bp, Glycine max
agcctgttgacgagactctgaggcggttatttctatttgaggctggcttgtcatgagcagcgatgaaccatatatgttataaaaagggataacaacattcttacattgaagaggtgacccgattttgggcatactacggagtcacgcatactaaacattaaatcgacctggtgaatattacttcaagctaactcttgtggagaaagaaaacccttctcttggagttgatctccacattcctctttcaagcggccaattattactactagtctattactaccccagcttcaagattcgataccacgattctgcgatcatgcctcacctacattgaaaatcactaactatctgacatatctatatcccacaccatagcgacatattctgctccaatcggct

SEQ ID NO: 157986 - DNA, 405 bp, Glycine max
agcttgtagagttaagtctcatatctgtttaatcgattacggtagtactttaatcgattacactgttatttgagacaatgactgatttttttcagcagtctctgctttaatcgtatactagatggataaattgattacttctatcttgtttaagctgtttagaggtgaacaagaacactttaattgattacttaggtcatctaatctattacattgttcttgagtggttttccagatgttggatgaacactttaatcgattacttaaataatctaatcaattacttcattgaaataatcgattaccttatacatctaatcgattacagacggttatgtcgcaacctacccttcggccggagggcgaggccagactaagatgtgcgtattctcatgaagagaatgc

SEQ ID NO: 157987 - DNA, 162 bp, Glycine max
actcccccaagaggatggaatgacaatgattaagaatgacctgaatgagctgattcccataatgaccatgactggttcgagaatgtgtattgattattgcctcttcaacaaggcgacaaggaaagaccacttttctctcttcttaatggaataaacgcttga

SEQ ID NO: 157988 - DNA, 266 bp, Glycine max
aaacatttatgagctgttagaatcactaacatggtggccattgacgtattgtcgccatcattttactggcgaagatattgcgtgcaacaatcgatatatggcgagcatcgccacaattacggcataatagtacgcggaaatatgcaataatatgtacctaatgcgattagacaatgtccatatcactgtcctaatcatctatctcatgaaaaggggctgtgactactactcatgctatcactatagagtactcatggcactttcat

SEQ ID NO: 157989 - DNA, 446 bp, Glycine max
  unsure (1)..(446): unsure at all n locations
agcttctcaggtgaactatatataagtcttttttttnttttttttgtactttcttctttctcgccaaaacgcacgcaaaagtaacattaacgttgtcgtttggcgtcggtttctccgccattaccaaacgaaaccgcgttcatttagtttggactatgagacggtcacggtgggccccgcgcggtccacgggccatgtgggccccggcactgacgcgttagttatgacttttttttgttttgtttttggcagcgagaaagccgacctgggtggtgtcgccgccgcaaagataaaacagctgacggcggagctggataccgccaccgcaaacgggtcgacgccgtttaacccggacgagaggatccgaaccgggttcgcccactctaagaacgagaaataccagtgagtaatatgggcttctattattatttcgttttgaaattccg

SEQ ID NO: 157990 - DNA, 434 bp, Glycine max
  unsure (1)..(434): unsure at all n locations
atacgatctagcataactaagaaaagaaaaaaaaatgacacactaattaaaaaaaataattaatcacatttaattatattaattctaattaaaaaataatattgttttctaacttatctttcattcaatcttgatatcaagaataaaaataatcattgaaactaacacattaaataaataaaacatatattaaagatagtagaattaaataagataaaattaattttaaaaaaattatatttaagaccaaaaaaaaagaaaanaatgttttttttattcttcttatatttgagagaggggaagtattatgtatcatacatattagaaacaattaaacaaattatgctacccagtaacgaagtggtgagggacatagangcccttacgtagaattacttgccttctcgagctgtacattgctagagaatctaatg

SEQ ID NO: 157991 - DNA, 258 bp, Glycine max
agcttcttggagggttgatggatcctcctttaatgtataagccatataatcgggcccataatctttagcaattcttgctctcttaccttttcgagggtctatatctggctctgggtgtgccagattttcactattaatagcacgaagataattggatgaagccccccactattccttatttaaaagaatttatttataaaaaaaacctcatttgccctatagccctttgcgttaagcataaacctatcgcttgcttta

SEQ ID NO: 157992 - DNA, 387 bp, Glycine max
agcttgtgaaagaactcacccacagattcatgatcagatgaactatccattgcggcttcaacaaacatcttaaagaagaacttcctaaggaccttccatcttttggtttctctttcaacatgtgttgcatcatgaagagcttcaacaaatgcctccctggttcttagtagtgttttctcaaggaaacatatatactctcgggatggaggagggccattaaaggcttctgtagaagcaagcttcatgatgaatcaagattgattcaaggagttttgatgataacaaagatgatgacaaaaagctcaaaagtcaagatcacttcatgataacaaagatgatgacattccagactgagtctaagatccgagtaagaacaccttcaagatc

SEQ ID NO: 157993 - DNA, 361 bp, Glycine max
actaagctcttattttaacagatgaagatgaatccgtggccaccttatggacttctctaaggacaatagcatcatttcttgcactgaattgttgggagttggaagccattttctcaatcaaattcctagcctcagcaggagtcatatcaccaagggctccaccactagcaacatcaatcatactcctctccatgttgctaagtccttcatagaaatattacagaaggagttgctcagaaatctagtggtgaggacaacttgcacacaatttcttgaatctttcccagtactcatacaagctctctccactaagttgcctgatgcctgaaatgttttttctgatggtcgtggtcctagatgt

SEQ ID NO: 157994 - DNA, 422 bp, Glycine max
  unsure (1)..(422): unsure at all n locations
tcgcggcttctttgagaagctttgtcaacaggtttctttgagaacctagatccttatctatccacacccctctattaactaaattaacttccttaaacataatcacggatgaacgtaactcaacaacatgtcatgcacttacgagaaatattctcttaaatgtgaatcttatagcaccaactatatgtatactaattcaactagttaaactaagtatattttgatgtgcattcggcagagtggtattccagaagtactgcgaaaccatgaagcagttggggataaagctattggagctttcggcaattagcttgggagtggataagttgcattataactacttgtttgaagaacgttgttccgtcatgagatgtaactattacncatcatgtcagcagccaagtcttgcactanggactgga

SEQ ID NO: 157995 - DNA, 484 bp, Glycine max
  unsure (1)..(484): unsure at all n locations
tgtgacactcttaaagaaaaagagttgaacttgtgcattgagataaagacgaatgccacaacttctaggagctggaaaacatcaaaaagaagaaagatatgatctttggagagaatgtgcacaagcacacaaatattatgatgaatttaaagtgagtaaacacaatctttgggtggaatgtgaaaaacacaagaaatttgtaagtttttctaaaagatgagcttctgaagcatcaagaacttaaacgtcaatcttaagatgttgtaaaacttcatgaggaaataaaaaccttaaatactacattatccaagtttgtcaatggaacagacaatcgtaaaaagttgtcaggatgatgtagaagttatactaacaaatcctgaaatgggtatgacgggaagatacatgttcatgataaagatacaattatatgctacttctctaaaagaactggacacatgatgntcagatgtanggatcgtcctaa

SEQ ID NO: 157996 - DNA, 288 bp, Glycine max
agctctatgtgcacctatggaaacttttttcttgaatgacataagggtaattaaacattcaatggacacctagccaggaattgtacaaagaagcccctttctcattggaatccgaccaataactgcctactgagggcaaccacctcactgagagcaataatacaaaaatgcctcaattgcaaaggataaaacgaaaatcaatcaatatgtgaacaccataattattatcgatagaggtacgtggtaaaggacgccttgcccacgaaaagaaccacgacaactacatca

SEQ ID NO: 157997 - DNA, 451 bp, Glycine max
  unsure (1)..(451): unsure at all n locations
agcttncttgcgtatgctccaattgtaatcccttagtagctgaaaggagtggacattggtgcggaattcaatactctcgcaacctcttgaagaacattctcttgcacatttatacccccaagctactttttgaagaagttcaatttgagactgaaagccaattcaaaacaagggagaatgaccttcaaggtaatagattcttgcatggaatccttgaagaagaaaatggtattatctgcaaattgtaagagtgagaccttcaatgaacctctcccaatatccaccttggacaattttttcctctgtcatttctaatcatgccatttagccctcttgtatttttttgctttagcaaccttcaacaaaaggaaaggtgtcaatggattgccttgctagagccctctttgtgctatgaatttcctttgtgggaccaccattcataagaacaaaa

SEQ ID NO: 157998 - DNA, 431 bp, Glycine max
  unsure (1)..(431): unsure at all n locations
tactagatcactgcactncattcctagacatacatatttctagcttgctctatcaagttctaaggttttaaagcattttccaatattaaaaagcctaactacacatactgtaacatcccaatttttcgtaaataaatttaaaaagctttttagtaaataaataaataaataaatatagagcaaataataagctgagtaccctaggtataaataactatgttaagtcaggtgcctcctcttccccttattttcgnttttctcttttctccactcaaaaccctttctttctccgcaacccaccaaacctgtctcagaaaaatgacgatctacgaatcattcaccgttggatcgtcgtgaaatttgcgtaccacgttcgcaaacacacttcaaatattctcaccggttgggaatntaaaatcatatctgagctt

SEQ ID NO: 157999 - DNA, 412 bp, Glycine max
agctcttaggggatttctatcatgttattatcttttattcccacaacatatatcaatattcaaaaataaaaattatgatcaatcaaataaattttagttattcttaaaagtgcgtttattttacaaataaattgtttagtactgaaaatacgggatgggggaaatttactctatctatctatatgtgtaagtcctaattccatatttgagtcatatttaatcccgacggaggggtataaaatatttattttcatgggacaaaaattattcttggtgaataaaaatacacgcctactctgcttagtactcgcaatcttattaccctcttaatgctaaatttatgcacatcttttggcaacatataatattgcgtaaaacactgatgtagccgcaacgggttgaccgatatttt

SEQ ID NO: 158000 - DNA, 336 bp, Glycine max
  unsure (1)..(336): unsure at all n locations
taacgaaagatcaattntacgtatacggacctttttattaaatttgcaatgcacagagactaaattgaatttttgtaatacttatacagattaaattatatgtttaaatttttttaatccttttcttccataagtactactattaaataagttgttgggcgttgaacaatcaattttaaaaattaatttatgcactttcctttattacaagtgttatttgttcaacacgatattggaaattagtgtaaatctgccgatatgattggatttgccgtttgccgtggagagtagcgagtgtatgtgtgcagagtacacacagcacttgtatttttattt

SEQ ID NO: 158001 - DNA, 385 bp, Glycine max
  unsure (1)..(385): unsure at all n locations
agcttgctcaatgttgattgttcgggtttatttcatgtatgcttggagggtgcagtttgtgtcttatatggatgttacttcaaggtggcgaattgttgggttgtgactaaaatccctatgaaagtttattctgctatttttttatgttctgccctctgcttatataaggcaaggatgtcctgtatttttggaagaagcttccacttgtatactgcgtcagtaataaacagctttctattttccctcccgtggatgtagccttactcaacgtgaaccatgtaaatctgtttctgtgttctttctctcttcaacttctctctcattttgcaccaacattggtatatgacattnttgttccgctcatctaccgctgctgttcttgctt

SEQ ID NO: 158002 - DNA, 277 bp, Glycine max
tactaacattgtcaacgcttcttttctcattgaggcgccacttgaccgccaggttctccacctttgggcgtattatttgaaagatctgtgcccccttttttgcacatattttgtacgagcatcctatccgaagccaatttatccagactgtctaacgaacgcaaacattaagtcccccaggaattgactccggaacgctgcaagttattgtatcaggtaataactaacccaccaagactcttctggaaggaacgtataaacaactcctcactttttg

SEQ ID NO: 158003 - DNA, 427 bp, Glycine max
  unsure (1)..(427): unsure at all n locations
tgtaatcgattacacacatactgtaatcgattaccagtggagtttttcagaaaacattctcaacagtcacatctttttatctaattcttaggtggccatcaaaggcttatatatatgtgactagagacacgaatttaagtagagtctttttcagaacaaaaaggtcttatcctcttaaaaagcaaaatcgttttatcctcttacaaattccttggccaaaacacttgtgattcaataaggaattatttgagtgctcaaattgttcaatctatctcattcaagagagatttcttcttctcttcttctatattctgaaaagggattaagagaccgacggtctcttgttgtgaaagaattttaaacacaaaggaaggattgtccttgtgtgtttagaacttgtaaaggaatntacaagatagtggaactc

SEQ ID NO: 158004 - DNA, 436 bp, Glycine max
  unsure (1)..(436): unsure at all n locations
agcttgtcaaagttggcaattccaacaatgtgtctacatcaatcttcccacctagactcatattgtgtagtctcaagccataaaatgtttggtcagtgtggttgcataacaaacctctccaactacataaactagactcattcacccagttgtttaaggcattgttattggacaaggaacctttgaacctcatcaaaatttgagcatctgtgtctcccaacaatggctcaaaacatagggcgaacaccaaaagcgtaagaaggcaatagtatgctcttctaagagccataattagttgatcacaggtctaaccaaaattggttgatgagaaaggaaatagagggaatagtgaaaataaagaacaaaagaactatcgagagttcggaagagagtgtgcataggaaattatgattncatcggttaaggggtgacattg

SEQ ID NO: 158005 - DNA, 418 bp, Glycine max
  unsure (1)..(418): unsure at all n locations
ttcataccactttattttgatcgaagagtttgagaaactattgacaccataaaaggaaaatatggcgggatgcaagaaatatttgctattangtttctggtagataatggcttcttacctatattctttcatctgcatatatttctttctgccttctaatgttaccaaaatagtaaactgattgggccattgcaactatttgtttcagaagctagcaaaatgcaatagttaatcaattttctacaattaagaaggcatcaataacataagtaaaaagaaacgacaatttgctatcacatttcctttcttttgttgagtattttgttggacaccgcagtacggatgcagaggacaatntcctagcttgtcttcccactgatattcttggtctctctcttcattggtaaagccacattat

SEQ ID NO: 158006 - DNA, 415 bp, Glycine max
agcttgagatgaggaagtgttgaatggttaaacttcctgcttttattgttgaccacagagtggtacctggagatatgtcgcgagggtcaggagaccttggggacgtcaggtggggtgctattgcccaaaaccaagcttgaccaatcccgacccaacccgggcatagtcggtcagtgagaacctgtgatgtacctaagcaggcgagctcctggcagtcaacagataaaaggaacaaagaccacaaagcaaggaggcttgtggtggctagccagctgcgaaacttgattgatatgtgagatatggtctctggtaatcgattaccaaggatgggtaatcgattacaaggcttaaaattgaagacaggaggctaagatggtctctggtaatcgattaccacggcgtgtaattgattacc

SEQ ID NO: 158007 - DNA, 133 bp, Glycine max
gtagaatatgtggagttcactaaaatgctattggctgaaattaatcatgccattgattttttttagataaattatacgattgatattttaccggtattacgtattacaacataattaattcttatcacatgat

SEQ ID NO: 158008 - DNA, 431 bp, Glycine max
agctttaaactgaatttgtgacgttccaattgatttttaaatggtgtaatcgattacaatatattggtaatcgattaccacagtatctgaacgttgaaattcaaattcaattgtgaagagtcacatcttttcataaaatgctttgtgtaatcgattacatggttatggtaatcgattaccagtgacgtgttctgaataaaaagttaagagatgtaactcttccaatggttttctcaaagattttctcaaggttataactcttcaaatggttttcctgaccagacatgaagagtctataaaagcaagaccttgacttgtcatttaagatgacttacaacacttacaacttttacaatctcttgaactactcttgagaaatcttgaaaccttcgcttctcatctttcttcttcttcctttgccaaaaagctct

SEQ ID NO: 158009 - DNA, 431 bp, Glycine max
  unsure (1)..(431): unsure at all n locations
ataacttaacaggggggtgaattatgtttcacaaatttcctctaacaaattctaattatctctttaaaagaaatatgccgacttaatatgcagaaaaagaagcaatgaacaatttatttaatgctcttttaaatgtgcaaaataaaattaaactgcaataatgtaaatgagtttacggaagagagaattgcaaacttagtttatactgattcggccacttcttgtacctgcgtccaatcctcaagcaatccacttgagatttccactgtccttgtaaattcctttacaaattctgaaccacccagggatacctnttccttgtgtttagaanaacttacaaatcaagagacccactacctcttgatacatcaacaatttgcttttgaagtacataagatagttttctctctctaagagaagaataatacaac

SEQ ID NO: 158010 - DNA, 265 bp, Glycine max
ggaggaccatggtccgacaaacaaacatacaattctgaccttccaggtccacagtagcgaagaactcccaccattcagaacacgcgaacaactcaccccacaacaaccacgaatagaatcggccacctctgatgggctctatctcaaatgcgccaccacaaacttctccctcgaccaaatactcagagactaaacgaacaaaaataccatgctccatcaacgtccttcatacctgtaaaatgaaaaagcaccttcttgacaaacc

SEQ ID NO: 158011 - DNA, 314 bp, Glycine max
gggatcttaagtcaccagacgctgcagcttgcatccaggtatgtggcatgatttctgttttaacttcctgctattatgggtgaccacagagcggatctgtatatatgaggagagggctggggaacatagcggacctatagcgatgcgctgcttcctgtgaacggaatcggcacctgtcaaatctgaccggcgtagatgaacaatcagaacatgtgctgttcctacatcgccctatctcctgctatcaacagactacaggaacatcaaccgctatcctcggaggatcgtcgaggttaactacagatacgactggg

SEQ ID NO: 158012 - DNA, 343 bp, Glycine max
  unsure (1)..(343): unsure at all n locations
aatcacctgacaactcatttaaggtttaacgttctgtaatggacctctctgttttntatcgattaaacgtggactttcaaaagactaacgtcaacacctaactttgtcacctctttcataaaaccaagaggtcattaatggtccaacgccttaatctttctctctcctttcaaaagaatcgaaagatcatctaatggtccaacaccttaaatgaccttttactcagctcaaatatatttctgaaaaaaaataaaaacaacttaaccaacgcttatttctcgaacaactacgtaggtctgattcccttatcacaattgatgaatacgtatgagcaatggaaaca

SEQ ID NO: 158013 - DNA, 372 bp, Glycine max
agcttatacaaaataagggagaattagactccttaagcctatactcatgcacattctattactcgggttgtaattgtaatgcaaagtctcaaaagatttaaaaattatatcaagagtaacaaaataatcaaggtgtaattgtaacacaaaaatgtgagttgctaataagaaagttgatgacaaggatatattactaattgcacatcttattaaattctcacaatggtaaagaaatctaatttctttcaattttttgttacattaatcttgtacaccaaaagcatatattgcactcaaaagctgcttgagcagaaaaaacaagtatcgatctcggccctctgccatttatggcgaagggtgcaaaaaatcttc

SEQ ID NO: 158014 - DNA, 338 bp, Glycine max
gatcctccttcttcgttctatcctccctcaccccgcggcgggtgatctgctccgccttaaatcaccacattttaagctagatgtttcctttattaatgcacatttgcgttttcccttactttaaaacccccattcctccgtcctgtattttctgcatactaacttttgcttctctgtctaactctgttaagttactttacaattatttgatgatctatgtataacaagggaggtggaatctgtgtgtttcatgactacccggctggttacaaagatcaccaagtaactgttcagttacttaaccaaattatactaagggacgaacagttggatattta

SEQ ID NO: 158015 - DNA, 411 bp, Glycine max
  unsure (1)..(411): unsure at all n locations
actgcgctgcagcttgacttggtcatgcgagattattttctgtgaccatggcatgagttctgaaaataataatcattatctgtttcaatcaatctttcaatatctttgatctctctcaacaaaactttctgggttcatttctcttcatctttctaaaagttttttatcaacactttctcttccaagaaaagctctttattcaaaaacttgcgctattcatctgtgtcattctcttctctgttttccaacaagaattcaagaaggactaatcgcttacattctttttgggtctctcttctccctttcncacaagaacaatggactaaccgccagaattctcttgtgcctcccttttcctttctaagaaaatcaacaggacctaatttgaaattctttgttcttcctttcctt

SEQ ID NO: 158016 - DNA, 222 bp, Glycine max
agcttcctcgggccatgtctgtttgtgatatcaaaagcacaaaacggaatcaaaaatgcgaaataggatggccctagggctagaaactcgctaatcccgtgggtatggcttctgaaaggggggaaaagaaattctcgaatgttaaaacgccaccccttttcgcattcttaaaaattcgtgtaagggtggccttacccacgcagctccccctccctaagaata

SEQ ID NO: 158017 - DNA, 342 bp, Glycine max
  unsure (1)..(342): unsure at all n locations
ctaagcctcatgatgatgaatcaagtagtgctcatgatgaccaattgtccnaccgaatgatttcaagattgagtcaacaagttcaagagaagatgatttcaagattccacacacgacattaagaagaatcaagattcacgagaagatgaattccagattcaacagaagaaatcaagaagccacaagtccagacttcacaaatggtgtaatcgattaccagtttcctgtaattgactaccagtgataaaatttgatttcaaaagtttcaactgaatttgcacgctccaaatgattttaaatggtgaatcgatacaatatattggaatcgactactagtgatct

SEQ ID NO: 158018 - DNA, 245 bp, Glycine max
agctagatgatcgctgcaacgcggtatctttttggctggaacgattccatcgtgactcctctaaccacaaaggcactgccctctgtcgccaaacgatttgacagcctccagcacatgccttgacgccactgccctcaacgccttccccccccctccaacgtgagtttgtcacacacccctcctcgcacatagacgaatgatgcctcttaccaccaccaaccccaaagcccgagacacaaatcaac

SEQ ID NO: 158019 - DNA, 345 bp, Glycine max
  unsure (1)..(345): unsure at all n locations
agcttgttcctagtattgtacagcatctttatcatcacgcttatctaaatgagcttcattgtccatcctacacttgattcctcttcattccccttgttcacatcctagccttcctctaaataacctcgaacactatcactttctgtntcggctcatcgacacgcgaaacctctttataaaacctgcatatttctccatttttcttacgattctgtaatttcatcctgacgtgaggagggcctctcatatgcttgttgttgaacttctctgaacatgttgctttgaaatttttgagcttgctgccatgtcccaaaattgtgtagagatgatttcctcgagattctg

SEQ ID NO: 158020 - DNA, 316 bp, Glycine max
agatgaggaagtgttgaacggtgaaactttctgcttttattgttgaccacagagtgttacctggagatatgtcgcgggggtcaggagaccttggggacgtcacgtggggtgctattgcccaaaaccaagcttgacctatcccgacccaacctgtgcatagtcggtcagtgagaacctgtgatgtacctaagcaggcaagctcctggcagtcaacagataaaaggaaaacaagaacactaagcaaggaggcttgtggtggctggccagctgtgaattttgtgtgatatgtggagtatggcctctggtaatcgattac

SEQ ID NO: 158021 - DNA, 431 bp, Glycine max
agctagcagctcacatacatataattgtctaatgatgagtcgcatttaatggtaaatccccattgggccagttatcaagggaaattaatattctcaagaaaatttctaccaacaaagcataacagatcaaactcctttcaaagaagcgttggcaaaaacaataactaaagctttcaaagaacattattggttgctttaaactatcagtgttttttttccatttaattatttgttaagtgagaaattttgtgcattcagcactggaactttcctatgcctgatccggtatctcttcttcagatgattgtaagatgtcaggtgatgcacaaaatcctcaagctacactatcactgcattactggctgagcaccacaatcattttgagatacgggtgaatctgcctgtggtaaaacttctcacaaaactacccc

SEQ ID NO: 158022 - DNA, 324 bp, Glycine max
acgtctaaaacaagttccattgtttactaccctcttacagtattccgcaggaggtgatggaggaaattgacattcccattcagatatgcccccacacttgcaatgtggtctttcaagctatggacataaatcccgcctacagcctactttcggggagaccctggattcacgccctaggagtggtcatttccacgcttcaccacaaatttaaaatatgccgctggtggactcttggtgatagtgtcacgcacagaacatattttgtgagcttcccctcctcctccccatatgtggaggcagcggacgaatcactataaacaactc

SEQ ID NO: 158023 - DNA, 305 bp, Glycine max
ggagaacgcgtatgtttgtatacatgattttgatgatgccaaaagaacaatcaaacaacgctcattttgcttctagattaatacaagattgtttcaacatacaaagccttgattcaagatttcctcaagatcaagccttgcctcacaatgatagggttcaagtcatctaacgcacatgtaatcgattaccaatacatgtaatcgattaccaatcggttgaaagttgtcaccgattaccaccatatgtaactgaataccacagactctgtacgtcgggcattcaaaatttaaatgaacggtcacac

SEQ ID NO: 158024 - DNA, 450 bp, Glycine max
  unsure (1)..(450): unsure at all n locations
agctttaggatcaaactctnttctctctttttctctcaattgttcttcattcttcttcctctttttactttcattcttccattttcttacacaaatttcattgctcttccactggtgatgataatggaaggctaagcactcaatcaatccaaggatctactccaaccaaggctaaatttcagttatggtttagtatttctattatttgtgattgtttatctttttcttgaatcctattttttattttcatgattatgaatatgcttaggattgaaaatgaattangttatggattcatttccttatttcaaaatttaatcacaaattgtttggatgatactctaacctaatttgtgatctcaatgaatttagggaataattcatttgaactatctctaatgacatntattgaactttcacaatcttaacatcattcgtagaaactatgat

SEQ ID NO: 158025 - DNA, 470 bp, Glycine max
  unsure (1)..(470): unsure at all n locations
ctatgaaggttggatcttagagcttgaatgaggtcctttaatggtgattttccaccatggagatgcaacggaagacaaaggagaagaggtgagaggaggcgccatccactatggaataagccatggaagaatgagcttcaccaccaacatgagcctaggataagaagcttggagaggatgcttcaatggaggaaaagaaagagggggagcatgaaattgaaggaagaaaaagggagagaagttgaactttgagttgtgtctcacaagactctcattcatcaaagttacaacaagtgttacacatgcttctatntatagactaggtagcttccttgagaagctttctggagagaacttccttgagaagcttctttgagaaaacttccttgagaagctagagcttagctacacacacccatctaanaactaagctcacctccttgagatgctttctttgagaagtagagctt

SEQ ID NO: 158026 - DNA, 450 bp, Glycine max
  unsure (1)..(450): unsure at all n locations
agcttgaatacaatgagataactctactattcttataataaactttctcaattctgattttgagtgtccaataattttgacagaatttcagaacttgtaaattttgaatgaagtctcttgttttgtgttgatccttgagttagcttaaataggcttcagaaaaatattcgttgtgagatctaagtcttcctcaaataattctattgtcaacaacttgtcttttctgctatgtggcagcctattgaggaaagagagagaagacaacagtacattgcatttgtggctctatgctccactacttgtacaaatgattttatcaatgataaccttcaattctatctttgactctgtacactctaagttcaaatgttagaggaatnttcacaacatatatgaagagggaaaatttaaataataaaatgttctagtgagcgaatcaccctcgagatg

SEQ ID NO: 158027 - DNA, 482 bp, Glycine max
tgaagattcgtttgaatagcacacagtggtcaatatctcagtatctctgttataaaattatggattatgtaagtcactttgcattattgtttattacctaacttattattttaaattcatacataatttactttattttaacaacaatgggcatatgactgagacaattatgcaaatggggaatgccgatgtgtatggattcctcgagccacagtccatacagagatctgggcaatcacattttgaatcagaaagttatattaagaactggatgcagaattcaaagaaggatgtgtaccaaggagcctacttgaatgtgtaagttaaactaaacaaatcgaattaaataatgtataatagtataataacttatatcgttctccagtgcaatgcacattgacaaatggtcgtcattttgcctaagacaaatgttgcatctggttctgttcgtgcatacaggccacacaactacctgaaggaat

SEQ ID NO: 158028 - DNA, 450 bp, Glycine max
agcttgctttggtgaacgaccctcagagctatatagattagcataaaattccttcaccaaagcaagatcaatagtcccatcagccaagttggtgaggcgtttgtgaagattacgcctctccaactttgtcttgaagttgtcaaactccgtgtggtatacctcaacctttctttctggcaaaatattcttccccaagacattatctgtataacggttccaagcatcaagcgaatggaaccgtctagtatcatattgagcagttggccttgccccaatgctcttacatttcctggaggccatctgtaacacaaaggaacccaaaaagttagttagacacaagttattcaaattgaaaaacagaataatacgactgagaaaaacaatggcagcttagcgagacatggtccactcaagttgccttcacaaaatacacactactcgttagcgaca

SEQ ID NO: 158029 - DNA, 240 bp, Glycine max
tcaaccaccctctaacatggtggtcttcccttttcgcctcattctctacctaatcatccactccataaccaccagcctgaacgatgatgctatatccccttttcttactccatcaaggtcttttgcaattactgtcttccttggagggtcttccttccccacacttgggtgagggttagccacaatagtcttcatctttgtggtggcttgcacacaatggaggggacgacgaggagttca

SEQ ID NO: 158030 - DNA, 436 bp, Glycine max
agcttggtatgctgttgtatgagagaagaatgaattcgcctcccaaagtccagggctcctattgcaccacacgccgagagggtcaccaccagagtggcgtcattgggctgcaatccattctgcaccattctgcaaaacagatggtgagcttgtttatagtttccacaatgcatatgacagtctatgatagagttccaagccactaaatcttcatttggaattttctcaaacaggtggtgtgcagtttctatgtccttcaccattccatacatatgcatgagtttcgagtccaagtttaaggatggtgcaatgcagttgctttcccagtgtaactgattcttcccatcaaccaataattttaagcaggaaagagaacgtgaaagtgtcagctgcatccggttgctctcccactatgcattcttttgtacaaatcaat

SEQ ID NO: 158031 - DNA, 310 bp, Glycine max
  unsure (1)..(310): unsure at all n locations
tctcgagacgccttncagctatcttatcagaggctctggtcatttctataatatcactagatacatccgatattgaataatcaatgaaccctgacgtcaaaactgcatatgaaacatcataatccaacaattgacggctttttaacataatattgtccactaacagtagctaattcatttgaattcttgattaaacccatatataatctgcaagctgtcactcgcgactcgagcatgattattatatctcggcacccaacaatatgcaataatgtataccaatacttcgtcttccactggcagaccaccc

SEQ ID NO: 158032 - DNA, 381 bp, Glycine max
agcttatttttagacctcgggatttgttatctttcctggccgacgtcgaatgttatatttattgatcaatatcggtgaataatatttttctgccgtggtgggctaatgttttattggacgaataaatgggaacatgccagtttcggtcgaaacataacgacgattgatctcgcacgacaaaacctacccggcctacattgctaatattttatgccacaccgaaacaagataatatccattgccgtaaaaaagaaccatcaccggccagcgagcgttttaaaaaaaaaaatcagtcggggctatttcacgaccgatgtcggctattgaggtttctattcaaatcctgaatgagatctgaatgatgtcgattaagaaatgttc

SEQ ID NO: 158033 - DNA, 416 bp, Glycine max
agcttgccgccacggagttttccttctattctcttgtgtggtggaacaagctacaaaaggagagagctcgaaatgaagagcctatggttgatacatggaccgagatgaaaaagatcatgatgaagcggtatgttccggctagttactcaagggacttgaaattcaagctccaaaaactaacccaatgcaacaaggggggtgaggagtatatcaaggaaatggatgtgctcatgattcaagcaaatattgaagaagatgacgaggttactatggctcgatttcttaatggtctgactaatgatatccgtgatattgttgagctgccggacgttgctgaaatggatgatttgcttcacaaagcaatcccagtggagcaccaattaaaaggaagaagcggctaaatgattttacaactt

SEQ ID NO: 158034 - DNA, 427 bp, Glycine max
aagctcgaaataaacaatggaagcactcgagaaattcaaatgtgtcataacttatcacacggaggtctgattcaggcgcataatatatcgagacgctcgaaattgaacaacgaatgctctcgagaaattcaattggtcataacttgtcacacggaagtccaattctggcgcatcacatatcgagacgctgtaaatcgaacaccggaagctctcgagaaattcatatggtcataacttatcacacagaggtttgatttaggcgcataatatatcgagacgctcgaaattgaacaacgaatgctctcgagaaattcaaatggtcataacttatcacacggaggtctgattcaggcgcataatatatcgagacgctcgaaattgaaaacgaatgctctcgagaaattcaatggtcataactgtacaccga

SEQ ID NO: 158035 - DNA, 444 bp, Glycine max
  unsure (1)..(444): unsure at all n locations
agcttatgaataggaaccaaacatttatgagggatgttctttactacttcatcaacaccagaatcctcgatgaaactacaataaagctgtggcatttcaatctttataaactgacggtcattacttaccactggaaaaataagattggagtccaagatttcaaatttatatgtaattttcatttcattttttacatctgtatcactttgctcgtcagagaaacactggtcaccagaagcaccaccccaatcagataatgagaagtaaccaatgataatggagagatattcggaaggtaacatgcagtagacatgctgaatgccaatgcttatttcaaatcaatagttgaagatatattntgtccttctctgactcgtacatttcaaataggagacaaatctggcgaagacggaccccatacattatcttgaaattttgccgccc

SEQ ID NO: 158036 - DNA, 365 bp, Glycine max
tggatcatcacggcaccctattgattgtcttgtttatgattcattcatgccttgggctctggaagttgcaacgagttttgggattgtcggggttgtttttctcactcaaaatatggctgtgaatagtatatactatcatgtccacttgggaaagttgcaagctcccctcaaagaggaagagatttctctttctgctctgccccaacttcaacttggggacatgccttctttcttttttactatggtgagcctcctgttttcttgattcttactatgcagacttctacattgacaagctgttggatatctgcattcttttacagctggaaaagacgaagagctccagttttgcactacacaccaca

SEQ ID NO: 158037 - DNA, 405 bp, Glycine max
agcctagcaagatgattggccactgatgtttgtttcaaacttttgacgctttgacagttagaaatgcacacttcttgaacgctgagaatctcatcaggattaggattccagatatgctccacattccgctactgatttacaatcactttcttcaaaggaagagaaatctgacatgctggcttcatatctgcctctgcaccttctatatcaaatattgccttaacacagcgacagctgctcacctccatccctctcaagttacatacaaatccaagtcaataacaacgaatcacatcgggtcaacattcaaattccaccacagcttaagatcttcaactgctgcaacacattttactcgggattggaactgcccataccatattttttctatgtgatggcgatcct

SEQ ID NO: 158038 - DNA, 207 bp, Glycine max
  unsure (1)..(207): unsure at all n locations
cacaacaatctccacccgccagnatatatcaatatacacatatgttcatttatgtacatgtcgatatcgttatcaacgactcagctcaggcagcacaagataataatttcgtatcgggctcttcgcattgtcaacggcatatatgccagatcatacttcgatacataaatagcttcaggcagcctaagacaatcatctcgtctcaat

SEQ ID NO: 158039 - DNA, 408 bp, Glycine max
  unsure (1)..(408): unsure at all n locations
agcttggctaatgcagaatcatcttctttatgagcgaaactactgtccaatagaatatctcccggcttgatgtcataatggattattctttgtttgcaatcttcgcacaagtatgcgatgcctctggctgtcccaactgcaatctcataaagcttttcatatccaagtgtaccgttctcatgaaacagatgcctgtcaagagagccattcgccatatactcataaaccagtgctcttacgttttttaaagcaaaatccatacaactgaacttattgaaangannaacttttcaattgtaccatttgtgccataactgctctcactctcttacttagttccacgtaaaccttacagcacaggttccacgaaataaattcctgataactttccaacctctgatcatcttg

SEQ ID NO: 158040 - DNA, 452 bp, Glycine max
  unsure (1)..(452): unsure at all n locations
atcttaagcaccgcggctgcagcttgatgattggcttaccgattttggatcaaagcgggtctaaaaagaggcaaatctgatcatcatgctttgataaatgccaaaaaaaaactacggcaaatgaagagggtgagaatgagggagaagcccatgctgtgactgccattcctatacagccaagtttcccaccaacccaacaatgtcattactcagccaataaaaaaccttctccttacccaccgcccagttatcaacaaaggatatccctaaatcaaccacaaagtctgtctaccgcacttccaatgacgaacaccacctttagcacaaaccaaaaacaccaaccaagaaatgaattttgcagcgagaaagcctgtagaattcaccccaattccagtgtcctatgctgacttgctcccatatctactngataattcaatggtagccataacctt

SEQ ID NO: 158041 - DNA, 333 bp, Glycine max
tgcttgtggagcttctatggaggctggatctctgagctttaatgaggtccttttatggtgattctccaccatggagatgcaccggaagacaaacgagaagatgtgagaggaggcgccatccactatggaataagccatggaagaatgagcttcaccaccaagatgagccttcgattagaagcttggagaggatgcttcaatggaggaacagaaagagggagagaacgagagaggggggagcacacaattgaatgaagatacagggagagacgttgaactttgagttgtgctcacaagactctcattcatcaaagttacaacaagggttacata

SEQ ID NO: 158042 - DNA, 438 bp, Glycine max
  unsure (1)..(438): unsure at all n locations
ggatctctaagtcacctgangcatgcaagcttgctctnacttacatcgatgtctgtatttattggaggggggttgcatgccatttgtgttttaagggtagcatttctcgctaaaaactaactttccaaacgcttgccttcccaggaatggcccccacgaagcttgcctcaaagaggtccacgaacgacaccgcggcccaaggaactagttccgctccggagtaccacactcaccgctttatgaccgctgtacaccagcaccgcttcgagaccatcatcggatggtcgtctctcccggagcgactcgtctagctcagggatgacgacctatactgattcccacgacgaacataccccgccgctcgtcgcatctctgcctgctcctatggccacgtcactctcaacctactccctcagtctacacaatgcttgccaacct

SEQ ID NO: 158043 - DNA, 472 bp, Glycine max
  unsure (1)..(472): unsure at all n locations
ctatagaacggtcgtccctaatttctctacaattgcatcacctctcaatgagctagtgaagaataacgtggcatttacctgnggtgaaaaacaagagcaagccttttctttgctcaaagaacagcttactaacgcacctgttctagctctctctaacttttctaaaactcttgagctagaatgtgatgcctctggagtgggagttggagctgtattgttaccacgtgggcaccctattgcttatcttagtgaacaactctatagtgccacccttcactaccccacctatgataaagagctttatgccttaataagagcnctccaaacttgggaacattacctttgttccaaggaatttgtcatttatagtgatcatcaatcacttaagtacattagagggcacagcaacgtaaacaagagacatgccaaatggggagagtacctacaacaantttcatatgttatcacatac

SEQ ID NO: 158044 - DNA, 299 bp, Glycine max
  unsure (1)..(299): unsure at all n locations
agcttgatgctatgctaagcgcgcgcatctcattcttagcgcatattgcacacagatttgtggtgttgcagaaagcgctaagcgcagacttccacgctaagccccaaatgcttacaggattctacaacttaaagttgggcttaccgcaaggctaggctaagcgctaccgttttaaacacaacacttacgttggcacgctaagcgcgccatacacatttcagtttcttaaaagaatatgccgangnanttgggctgctaccttcgcacccacacctcttgcacttcccatctttgagcat

SEQ ID NO: 158045 - DNA, 352 bp, Glycine max
  unsure (1)..(352): unsure at all n locations
cacactcgacatcncttatgccgtagtattatatgataagcctcaataaggtcttccaaatggagccttaatatcagtaattacgactcttacttttacgaaaaatattgtagttattaagtattaactattacattatgttaattacatactgtattagacctaaatttaaaatgatacttattctttttatcaaatctaatctatgatgagaattcatttatttattatgtttagattaaaaataattcttattaagagaagagagagaaaatgtcttcatcaataattgagagatagataagtattaattacaagaatgcttttaacaacaactataaatttagaaaaa

SEQ ID NO: 158046 - DNA, 449 bp, Glycine max
  unsure (1)..(449): unsure at all n locations
tgtggtgagtcttacgacaattatctcttcatctaactcgctcagcgtgacatncactctaagcgagacatagcctatgcgctgagcgagtaatactctcgctaagcgcaccaacccctcatccagtggcagatggtgcctcgctaagcgagtgcaggcactaagcccaaaaccttctctggttgtgcatttaaggaaattgggctgagtgagacactttcgctaagcgcataaatctgcctcgctaagcgcgctggtgcactaagcgcagaaccttctctgtcagagctttaatgttaatggggctaagcgagaccatctcgccaagtccacaagtctctctgtaatggatattgcactaagcgagaccaacttgctaagtgcctccccactattgcatctacacttacttaatccgctaagcatgccatggccngcttacgggaagc

SEQ ID NO: 158047 - DNA, 454 bp, Glycine max
  unsure (1)..(454): unsure at all n locations
agctcgcttctacaggtagtacaaccaatcttttgccactcccttcagagaatgaggaaaagcctttagaaagatatgatcttcctggacatcagggggtttcatggtggaacagacaatatggaactccttaaaatgcttatgaggatcttcaactgcaaaaccatgaaacttgggcagcaaatgtattacgccagtcttgagaacatatggaacatcctcatcacgatattgaatgcacaacctttcataactgtactcaggcgcagccatctccctaacagtcctctcatgagatggagattgagccatgttctcagtntgacaattatcagccgaatgctcaaaatccgacatgttcaaatcaacaccaacagaatgcacaacaacgctcacaangctcnaaatgcccataatgatcaggatgcacactatgcctaactaatatatgaca

SEQ ID NO: 158048 - DNA, 460 bp, Glycine max
  unsure (1)..(460): unsure at all n locations
agcttctagccaaatggacttaccttgaattaattcctttgatagctcttttgagccttgtttccctttccttgttttgaagctcactacaagccttaaatgaaaaaccatgatatcaccatatccttaaggaattttggagctttggaattgttttgggaataagtgtggggtttttgtttcattggataacatgttttgtcggctatgcttcatgatgtattttgggccatacttgatgtacattgtatatgggttaaatgttggacatgctgaatgagatgttgtttctcaaaggctacgtacataaaaaaatcgacaaagaaaaagaanagcaatacagttgactgaataagatcttacatgacaaaagaatgatgacactctcggctctactctttatgactaaactctacccttacttcttttcattttcctatcttcttctaatatgcactta

SEQ ID NO: 158049 - DNA, 226 bp, Glycine max
  unsure (1)..(226): unsure at all n locations
ttcattcctcgcgcgncgcttcactcgagcatgttcatcctcttttgcctggcccctatcatagcacgatcatccagcctccgacgcacgatattctctccattcattgggttcccttccttagcgactcccacgacaggcattctcaagcatggtgaacgcttgtcccagcatgcgacttccatgataggcaacattggtgttgtcaccattcacaaccattgat

SEQ ID NO: 158050 - DNA, 270 bp, Glycine max
  unsure (1)..(270): unsure at all n locations
agcttanagaggaagcttcgatggttgtattgaatgacagagaattacagagagagactgaaagtgccctggacaatctaaggaagacacggagataacctgaactttcctcggagtcttacagggctctcattgcgtctagctactacccgtgttacactcgcagctatttacagagtatctcgctttctcttgaagccctcgtgacattcctgcaatccctaagcttactccatgcaacacatacatgattgaagaaagtcttcttga

SEQ ID NO: 158051 - DNA, 247 bp, Glycine max
gctcacgagcctctgcattcaatcttgagcgtcctgatatattataggcctcaatcacatatccgtgctaaaagttattgctcgctgaatttgatatagcattccgctctactcttatcaccgtccctgatatattacaggagtcaatcgcacatatcgagaaaaagctattgccatctgaatcttctacgacattctattttcaatatgttgagtctcgatcgattacaggacttacatcgacatc

SEQ ID NO: 158052 - DNA, 411 bp, Glycine max
  unsure (1)..(411): unsure at all n locations
agcttcacatggagctacatcaatcttctcatagtagaacacaggtagngtgtctactatcattattatcatctctctctccatcattgggggcactacttgagctattagatccctccacctttgggtgtattctttgaaagatctatgctccctcttacacatgatttgtagttgcattctatccggagccatatcaaaactgtactgatactgtctaatgaaggcaaccattaggtcctttcaagaatagactccggaaggttccagattagcataccaagtgacggttggcccagtaagactttcctggaagaaatgcatcaacaatcttccatctttcacatatgcccccattgtcctgcagtccatcctcaggtgattcttgcggcaaggagcccaccttgtact

SEQ ID NO: 158053 - DNA, 472 bp, Glycine max
tctcagccttccgtctttcttttctccaatgctctcatatcctcatgcatgggttgagccagctcccattctttaaggctttgtgtaataatgtggaaatcctaatagaatcaatagctgataggaaactctggcactacaaagaaatgtgtttagtggaactcaagttaatgggtaagtaatcagaactatcaaggcaatcatctgaattctgaaggagaattactgaagactcaaggctaccaatatttttctccaatgaatactctatttcagacgattgggattgttggactatggtcggtttctgtcatttagatacacattgcagcaattacaattgcctctagagtaggattggtactagcagataccaatgtctctccggtagtagataccagtggtaagtataccctcatgtatcacatacttagtaagggagcgtacacacacccatgcctgactccatact

SEQ ID NO: 158054 - DNA, 374 bp, Glycine max
  unsure (1)..(374): unsure at all n locations
agctnttatgtgaaaggatgtgactcttcttgtttgaatttgaatttcaatgtgtaaaggcactggtaatcgattaccaaaacattgtaatcgattacagctttttgaaattaattggaacgttgtaaattcaatttgaaaacttttttaaaacaattttgctactggtaatcgattataccaatctggtaatcgattactacagagtaaaaactctctggtaaacatgttttgagaaaaatcatgtgctactcaatttttgagaaaaactttgtatacttatcttgattaagccttctctcgattcttgaatcttgagtcttgaatcctgaatctcgatcttgactcttgagaccttgaccactgaatcttga

SEQ ID NO: 158055 - DNA, 363 bp, Glycine max
  unsure (1)..(363): unsure at all n locations
tcaagaataatggcctcaacaaacgttcttattctcaattgtgaaattcaatcaacacgcctcctatctttaatggagagggctaccactactgtgaaactcgaatgcaaatctttattgaggcaatagagttaaaaatttgggaagccatataaagtggaccttatgtacccaccatggtggctggaaatacaaccatagagaaacctatagaagagcggtctccagatgaaagaacattagtgtagtacaactggctaaaaacatcattacttctgcnctaagaatggatgaatattctagggcttcaaattcgtagaatgctcaagatatgtgggacactcttcaagttacacatgaggg

SEQ ID NO: 158056 - DNA, 351 bp, Glycine max
caagctttgcgagctcggatcatttattctatctccgacagccaatgggtgagtcccgtccacgtactcccaaagaaaaccggtctcaccgtgataaaaaatgagaaggaggagctgattcctactccgctgtacaacaatgcgagagtatgcatccactataggaggctgaatcaggttaccaaaagggaccattttccactgccattcattgaccagatgcttgaacgcctggcaggtaaacctcactactcgttccttgatgcgttttctggctatatgtaaaccactattgctcctgaggatcaggacaagaccacattcacctgcctcttcggcactcctgcctat

SEQ ID NO: 158057 - DNA, 350 bp, Glycine max
  unsure (1)..(350): unsure at all n locations
agctctcggtatatataggcattcatctttaagtatctattgtcttccaacacgacgtcttttcacttaactctgcggntgatgctcatggtccttggagcattcaatacttgcattaaatgcatgcctttcttcatacagcacaaccatcctaatcggcttggcgtcgtacactcaaccataaaaccacttcttttgagtcaaagcaagtctgccacatcagaatacgtctgtcaatgtcatttgacactcccagaattcgcacttcactcattcttcatcggatccacacattctacgataacgtctctacacagcgaatctcacatacaaacaactaaaacacgctt

SEQ ID NO: 158058 - DNA, 428 bp, Glycine max
agctcgctaacccatggatgctcctaatatctcccattactttggggtgggccattcttggactggcctgattttctcagggtccacttggaccccatttctaccaactacaaaccctaagaaaactatattatctacacaaaacgcacatttctctatattttcataacgggcgttcttcctaacgactgaaacaacttgcctgagatgtcctaagtgatcatctatgctcctactatacactaaaatatcatcaaaataaacaactacaaatctacctatgaaatcccttaagacatgatgcataagcctcataaatgtgctcggtgcattattgagccccaaacgcatcactagccattcatacacaccaaactcgcgcttaaagcggcttgcactcatcaccttttcatcctgattgtgatacc

SEQ ID NO: 158059 - DNA, 359 bp, Glycine max
  unsure (1)..(359): unsure at all n locations
accaagagatcattaatggtccaatgccttaatgttgcctctcctttcaaaaaatcgaaagatcngttaatggtccaacgccttaaatgacccnttcgttcaataaaaatatatcttgccaaaaaggataaaaataatttaagcaacgtttagttctcgaagaactacgtaggtctgatttctttaccacaattgaggaatacgtangagcaagggaaacacccttgtcgaccacaaaaagacataaagacgtataagggaaccataaacaaattgaagtcatgtttgcacactggattaaacgctgccgtcctttgtgacggatgtgtggggtgctaatactttcctcgtgcgtaaat

SEQ ID NO: 158060 - DNA, 436 bp, Glycine max
  unsure (1)..(436): unsure at all n locations
agcttgatactcttagcgtgctgtaggtgtgatgacaagacncacagcagtactcactttgggagaaatgaaattgtggctcgcaccactatcaatcaacaccaataaatccacattctgtatcttaccttcaaccttcatggtgtgagactcacccatgcttcccaatacccccatcaatttacattccacctccacttcttcttcactttccactgccacatcctccatacttagaatttccacttcctctgtcatggcttcatcttctcctatgaatagaaccctaagagctcgttctgacatttatgcaacgtacggtggtattctccccacatttgaacaacaacccttcgctccctcttttcaattcacattgtggatacttctattcccttcacctgtccgttcgcccgaacgagaccccatcattttg

SEQ ID NO: 158061 - DNA, 380 bp, Glycine max
  unsure (1)..(380): unsure at all n locations
tgtcatcgtgagacatcagaggctagtattttaataaatgttggtaggaaaaattcatcaaattgatagagaaaaatctaaaatcatacatcttaggcaaataaggcatgctagcccccaacattattgcattttgattncatctttggacattgagattttgaaaattagaaaacccaaagtttattagggcatttcatcaaacatacaactcccaactgatctggcaaaagaaatagtgagtagaaaatggaacttgcagacaaaaaacaaataaaagaaagatgattttctctttatcattcgcagacnagaaaaattgaggaaacacactgcaaacaaatgtttagatnttcttatgtgacattatactaactagt

SEQ ID NO: 158062 - DNA, 255 bp, Glycine max
aagtcacctataatcataatcacaatgcgctccttcttactgatccaaacgatggtatccataccacactacttaaccactaaaattatccatacctggctcatgatctaatcctgaaaaccatttctacttaaacatgaatgactgcacattgaatataactagcataacaagcttgacttacactctataccaacctcaaaaatatgctggatatctcgaataaaatctcatggaaatacaccacaaagaaaa

SEQ ID NO: 158063 - DNA, 365 bp, Glycine max
agcttctatggaggctggatcttcgagctttactaaggtccttcaatggtgatttttaaccatggagttgtagcacaagataaaggagaagaggggagaggaggcgtcatccactagagaataagccttggaagaagaaacttcaccaccaagagagtgtcttggataacaagcttagagaggaatcttcaattgacgaagagaatgagagagagagggagaaagtggcctggaaaattgaacgaagaaacggagagaagtcgaactttgcagtgtgttccacaagactctcattcatcaaagctgtgacaagcgtcacacatgtttctatctatagcctacgtccagtaattcatgtgaatcta

SEQ ID NO: 158064 - DNA, 277 bp, Glycine max
  unsure (1)..(277): unsure at all n locations
ttntaaatctgtagcattacatctcgttcgttcttatttgtcaattcttctttaaaaaaaaattgttcctatctatgtgttctaaaaagtntaagacaatattgagtactatcattngaattattacaaagctaaaaataattttaatgagactattaattgcatttctcaatctgtgcgatatcatcttaaatgaatagaaaaaaggaatannnggataactccaactatatattagtatgcataatgtaaaatgcaacgttgtgccaagttcata

SEQ ID NO: 158065 - DNA, 378 bp, Glycine max
ttcctttgagaagctagatccttatctatccacacccctctattaactaaattaacttccttaaaaataattacggatgaaaataacgcaacaaataatcaaacatcaaacataattactaataatatatagatatataaatcagggcgtcacaattatgtggctcataaatagaatttaagtagttgttaccaagtctttcattttggattatcttcttctgacgaacgagccccataatcaagcaccactcatattctgggttctaagaaggggtcccttgccttgcctatataaagctcgtgattctctattgattccatacatgtcaaataggacaaagctagaagaactctctttatctatacacactgatat

SEQ ID NO: 158066 - DNA, 461 bp, Glycine max
  unsure (1)..(461): unsure at all n locations
cgatgtgagaaagcgtggaagagctcaatcctnctacttttgtttgttgaccacagagtggtacctggagatatgtcgcacgggtcacgagaccttgcggacgtcacgtggggtgctattgcccaaaaccaagcttgactaatcccgacccaacccgggcatagtcagtcaatgagaacctgtgacgtacctaagtaggcgagccctggcagtcaaccaataaaagaacaaagtccacaaagcaaggaggcttgtgtggcggctggccagctatgtatcttgngtggtatctggaaattagcctcttgtaatcgattaccattcgcgggtaatcgattacagggcttanaaatggagacaggttgntaaatggcatcgattaccaacggtgtgtaatcgattacatagagtgatagggcactggtaatcgattaccagctgggtgtaatcgattacacagg

SEQ ID NO: 158067 - DNA, 442 bp, Glycine max
  unsure (1)..(442): unsure at all n locations
cagctttcaattcattctatgtactcgtggtggtccacattttgtttcatgtatttttattctcgttttcatttactttttatacccccttttgacgtgcttaagccatttatttaagtcatttctcgcttaatctaaaaataaaataaatttccaccgatcgtttgaattgtatcatncgttaattttggctaaaatgaattccgaccgtttggtcgtgccgtaaccacgttggaaatcaaaaaaagaggtaaaataataatataataatcaaaaaataccttttagtaaaataaaagcgaaagatcaatcggacgttttctctctgggatttctcattcttaattgaattgactgaataactaaagtgaaactaacgctaaaatcaaactcgcctagtcaagctcgtccacaaaaatatagggctttgaacgtttatcat

SEQ ID NO: 158068 - DNA, 442 bp, Glycine max
  unsure (1)..(442): unsure at all n locations
tggtagagctatcatcacatgacgctgtattggcacataataagttgctttctaagcaacttgagattntaacagaaacactcggtaagctgccaactaagttgtctattggtcaacctacgcacttttctgttttgcaagttataagttgtaccatctgtggtgaggctcatgaaacaagccaatgtattcccactgaaaaaaacactcaagaaattcattatatgggaaatcaacagcgacaaggctatactcaaggaggattctcaggcttccagtagggtccctataatcaacaaggacagtggaggacacaccctcgcaaccaattcaacaaagaccagagtgggccttcatacaggacaatccaacaagggcctaacatactccagaggactactaagctggacgagaccttgactccagttatgcacggtacaat

SEQ ID NO: 158069 - DNA, 433 bp, Glycine max
agcttcttccttggtcactgtaacccaagatggtaattacttagcattatcaggaatgttataaaatgttcttttatttattcttgagtctaaattgggtatcaatgttatgcacgccattttttatgtctgcagatgtcacacattctttaataatacacatatttaaactcaggcctctaatactcccccagaataccaaaattgtttgtttttttttaaggcaaaagtatagtattattaatatataaacataacagtaccagaagtactgagtataacaaatacaaggcactgaaaatgccaccttccaaaacaatacccaacaaaaaaaacccaccacgaaaggaaatattacaagttaaccaaaggcctccagaagatcggtagaccaatggttaaatggaatattaaaacctttctctgtagcttt

SEQ ID NO: 158070 - DNA, 368 bp, Glycine max
  unsure (1)..(368): unsure at all n locations
cgccttctctcacctcttcttctttgtcttccgctgaatctccatggtggaaaatcaccattaaaggacctcattgaagctcaaagatccagcctccatagaatccccacaagcaagcttccatcaagtggtaatcagagcacaagagcttcaagtaggtgctccttaaacctccattaattntttgctttaccttctcttccattgttgtttcttcattntttctccatgtatctcctcacatgtcttgtgataaatgtttttaacatgattctttagagtttccaccgattaaacttgctatagaagctagatttgattntctatggttcacatttcttggtggtgttcttgaaccatgaattatg

SEQ ID NO: 158071 - DNA, 450 bp, Glycine max
  unsure (1)..(450): unsure at all n locations
agctnttctccctctttccacgttgcttttctccttccttcttctccaccattgttgtccattgaagctccaaaatccctcctcatttctactccaaattgcaaggagaagccattttcggagtcttggagcacacatctacattgtgggacttcgaatttcaagtatgggtggacttattctcacatgaaatttgtgggtgttgggtttttgggagctatgatgggcacttctactangctaatgccttacgatagttattcgtgaaggaatctgttgaaatcatgctaaacttgacatgtttgatgtgagcaaagctacccattctgattttgggttctataatgacgctttgtgatttatgtatgcttaaaatgttgacggataactagtacagatgatggggagagctaacctacggctaaatgtgacaatgcgagcgttgcgagt

SEQ ID NO: 158072 - DNA, 418 bp, Glycine max
  unsure (1)..(418): unsure at all n locations
tctgctnttataatggaagagggccacaaaaaattcataccaagcaacccgccaatggtaatagcgatttctacgcaatccctgtgcaaggcaaaccgtcaatggtaatagcggttttgcctgcactgacccaactacactgccatggcaggacgtagcctgcagctacacgtccatggaactcgccagtttgactgacggttcccaaagcgctcagtatatcgccatttggattgacggcttcctctctgcatgcacctatcgccattggtgctggcgatttgctcaaggacaccaaactcgccactggttctggcggtttgagtcctgcatgcatgcgtttcacgtaaagaactgccncatcttggaaataatctggaaacgaccccatctgagaaaatagtttctaaaactaccc

SEQ ID NO: 158073 - DNA, 401 bp, Glycine max
  unsure (1)..(401): unsure at all n locations
actctcctctccctgaaacgccggtcacagaaacgcacagaatcaatcgaagcatttgtaagtgataacaaatnccaagcgacattgcaatttgcaagcacgcgatgagagagagagagattaccgagaagagtgagaaggttgagccggtgagagacgaagaccagaggagcgacgacggagagaaagaagagagagaggatgagaatcctctggcagcgacggatgttgctcattggcggtgagtgtggctcttcttcttcttcttcttctggatccttctcgagaagaagtagtagtgcattaaatttctcagattcagatcccggagaggataagatagtttacccgcaggaacacgcgcggacgggttcgcttactctttacncctgtactggtag

SEQ ID NO: 158074 - DNA, 350 bp, Glycine max
tcttaatttcaacactgacccactgtacgactcggaaaatatgaacctcattcttaagggagacttcacaccccattgcacagaggttctctcctatgtgaaggtatgggggagggatattcatcataaacatccccaccatcttaaaacctctaggaatgctggacatttatcactacacctacggtgcagttccggaaaatacggattaaattaaactcctctaaagcgcacggcacacacattccttggaatgcatcactttccaatttacgtcacaaacaacctcactctatcaatctatctattctatgaacactcgaacataaccgccctttattctcctcatc

SEQ ID NO: 158075 - DNA, 415 bp, Glycine max
agcttggaactaggaagagattcacttatataatgtggaacctttctgtaaaagaaaaaataaaaggatcatggattgaatttaagacatattgttggttttgcggcgaaaattatacacaacagatgagataagagagacaatatgtatgcagaggaaatacaattattctattctaattcaaatcgttctcagcagagatacactacatagcacaagataaactaattacataacaagatattagcaaaacagaatattaaaactaacttgctccttagagataggaaccacttattaactacgctaatccattacaactgacttactcctaacatataggaaaccaacttatttactatatcctatcttacaaactgacacataaaatattatgcagttacaagagtatatc

SEQ ID NO: 158076 - DNA, 102 bp, Glycine max
tgccacaatccaacagtatgactttggctattccctaccctaggctaaatcggacactctaattttttacacttgttcttacaccccttctttatgcattct

SEQ ID NO: 158077 - DNA, 475 bp, Glycine max
  unsure (1)..(475): unsure at all n locations
acattcagaaattgctggtaatctattaccatatatgtgtaatcgattacacagggcaaattttgaattcaaattttaatagctgttgtaaatcagttttggccactggtaatcgattacatcctctggtaatcgattaccagagagtaaatttcttgtaaaagactttctaacttaattttcttggccaaaccttttgctacttcaattggaattcccttcctatttaatataccctctgtaagactctatagactatcttgatcatctatcttgaatatctttaattgctttgtcttgaataaagctntgagacgcatgtgatcttttggcatcatcaaaacatcggcttgatcctttgtctacaaagattagtcttgagctatttgatgaagaaaggacattgttggaccagaatgtttgtctagaggtgaaaaagagcaaagagaaggttctgaatgagagaaccaagatt

SEQ ID NO: 158078 - DNA, 380 bp, Glycine max
atcaagtgagtctaatatttggtggctgtgttcattgtgcctctacatcatacaaagctattgtcctgtctattatatgccaaattgtctaattcactcacctttccccttttgctatggacctcttcaatctgctcttactggtgagtccctttctgagaccaacggccctgtcgatggagcgaatcctggttctacctgccagcaacgagagattgaagccgtggtatttgtaccggcgtcatacttctttggaaagctgctcacctcgtgatacactaatcaattgggcactctccaaggtactatctgacagaggacctctctttgaccctaatgcgttctggcttagattcattgtctaacttgctgcgttatta

SEQ ID NO: 158079 - DNA, 446 bp, Glycine max
  unsure (1)..(446): unsure at all n locations
tactaagcttgtcaagccccgagctnggacaagtgttgtccgggcttgctttatcatgttgttccgcctggacaggcatgttggttttcagacaacgttanctgatggaagtatgtgtatttgacaactctaccattttttgccccgtggagtgcattgaagactaacgttacgttttgtcttttactgcaagcatgtgcggcgcacgtgcggtactctggcatacatgtcactcatggagtgagcatgtcctaaagacataatgcatgggtgagtggggctacatcgtggtgcgaaaaattagggaatcacttcagctcctgccagttatcaaagagcttgtctcctctttgaatggagtggacgttctgattctgatcactgccactttgaatatctgtacttcatttcttaatcttctttgttcttgtacgtgcgacttatga

SEQ ID NO: 158080 - DNA, 364 bp, Glycine max
  unsure (1)..(364): unsure at all n locations
agctttgagggtgcgtaccccaccatctttttatttttgagtatcgataatgtgtctaccatcacgatcatcgtctccctttccatcattgggggtaccacctgggcccccaaatccctccaccttttgggcgtgttctttgaaagatcccgccccctttttgcaaatgttctgtagttgcatcctatcccgaaccatatcaaaattgtactgatactgcctaacaaaggcaaccattacgtccttccaagaatggactccggaagattccaagttagtgtaccaggtaacagctaccccagtaagactttcttggaaggaatgtattancaactcctcatcttttgcggattcccccatcttc

SEQ ID NO: 158081 - DNA, 484 bp, Glycine max
  unsure (1)..(484): unsure at all n locations
tataacatcaactttcacatntagcaggtcatcatcatttaaccaagcctccaatgatgaatcttctatttctttcagctgttgtcatgttgactcttgcagagcgacactttctttctcctcatcttctagaacttggtcaattttctcacatgcacccatcatttggttggagtatatttgttcgaatcagctaaagtgactaattttttgttgtgattgatggatgcttgcaaaaagcatgatctagcgcaagagctacttaactcaatgaattttctccttgcctcctcgctctcaaatttgcaatcacagccaagctttgcttcattttattcatagccttactcctttgcaacctcttcttatgagtacgagttaatccccaaaattgcgtatctgctttgtcttgaaccgccttttgattcaagcaccgttgtcctaccttattattggcagaacggttaataatccttgatttact

SEQ ID NO: 158082 - DNA, 293 bp, Glycine max
  unsure (1)..(293): unsure at all n locations
agcttatgcgctatttncttaccatcgttctcttgcacaacacaaaaaaaaatgcacccctatacaatcaaagccgcttccttacctaaactatttacacctacttccaaggtgtatttgttacttacattacacacatttccttggctaaattcacatacatgcctacttcaagcattttggggtaccaaaaattgcacctgcgcacatcttggtatttctaatacctattcctacaccaacttcatgatgaatctttgctatctacacaataacgtgctacatctcatgcc

SEQ ID NO: 158083 - DNA, 484 bp, Glycine max
  unsure (1)..(484): unsure at all n locations
tcagaccaaagcaactcanaatctaggtatctaacacctttcattttagtggatcttcaaggtttgagaagtgaaaatgagaatggggtaaatttggagcaaactctcacctcacacaagtctataacattaatctaaacttgctcaaactggttctacgcctaaaattccactgaatcaaaatttgactcatcaacacccaattttaccctagaaatggctcttgttttcactttggtcactcatattcctcatttgcacagtctaagctttctcttaagtcctaaaagacatttcaaactaggattaactcactntaacccccaattaccactgaatccagatttagccttncaactctcaaagccttactcttttttgcactcataacaccacattctcactctctaaccctaggttaactctacccttcatctctagcagttatccataagcaagtttagcacacaaacatcacaagcat

SEQ ID NO: 158084 - DNA, 238 bp, Glycine max
tcttgatttttcctcagttctttttttgctttgaacaatatacctggccctcatttaactgtctttgggcttggcggccacgctcaacaaaatactatctacacctactgtacgttgatttcaccaatgctgttatgggaatgctgccacaatcctttaaaaccttattgatacattctgaaacgttcgctgcatgtggccatatcgacgtcctttctatcgtagccatcgtccattt

SEQ ID NO: 158085 - DNA, 367 bp, Glycine max
atgaagcaccaaaatcgatcatcacttactaagagcgctcaaattattatttcatctttgtatagttccaaaactattcagagttactttacaacttacaggccaagcatatacaattttcacttgacaggatgcttaatactaaaggggacacgagtaacacacctcgaactaaacgggcccctactctaaaggtatcttcactctcgacaagtgaataactatatactaatttattattatttctataactgtcaattttcaagatataatcgcctaagttggatcatatacaaggcgtacgtgaactaaactaacatgttgaatatttatgattcacaggagtgaaacatgaacaacaagctat

SEQ ID NO: 158086 - DNA, 393 bp, Glycine max
  unsure (1)..(393): unsure at all n locations
cagctcctagcattccaaactttatagatattttatctttgtagaatctctagaaatgaacaaagtgcctaatttgatggacaaggtaaagaataactaaatgatgaaaatactctttaactttttaacagacacactgtgagtgggttgcaatatattcataattgtctccacaccaacttgcataaagataaaccatatttgtgtttgagctagaaactntgaattactatcaaactttatattctaagttagaggaaacttatcctagtactaaccctttgttttattatgtttgttcacgaaacaaatcatttggacctaaccatcacaatatgtacaactctggcaatcttacgtaagtttattaagtctatgtttgttaatatgatg

SEQ ID NO: 158087 - DNA, 473 bp, Glycine max
tgacaaccgaagaaaaccgtgttgaccaacacaacaatgttgtaaggttatgtggctggaattcaattaatattattgttgttgtgctcattgggttttgcaagaagctctgattgttatcatatgattgaaaacttttatgcataaaattggttacaatgctttatattttgagggtaatcatatatgctagtgaatggtggctgcctttatgaaacaatatgatatctatgagaaaccaaaccgataagttaaagctattttacttattcttacaacttgatttatttgttctgtacttctcactctcatatttttggtgtctgctcaagcatatattgacattgtgacaccctctaccccgacatatatatatatatatatatatatatatatattgcgccacaaaatcacatgggtaaaaggttcacattcacttcactatcaaataaacttataaaaacacattgact

SEQ ID NO: 158088 - DNA, 363 bp, Glycine max
agcttatctgtaaaatcttctagtcctttttatatgtgtgctttctctcctcatatgtattgcttaaattaagggatttattttatgcattatgctctatattaaaccttcttcaagattcatttgcatttatcaatattcattatgcttactacctctggactgatataaacaaccaaaaaaatgactgacgtaaatataaacaaatttaactacttttgccctattataatgatatcataccaaaaatacccttcaattaaaagatatcatattttcaatgactcctttttattcttgattcaagttccaatgaaggagactttatgaaaaacatttttttaaatgtgattagtaggatta

SEQ ID NO: 158089 - DNA, 468 bp, Glycine max
  unsure (1)..(468): unsure at all n locations
tcctccagcttcttcttcgtattctcagccaggagcttctactccaaataatcataacccccacgagacaaaacatggggggcagtattctgcttctggatggcttgtgccttcttgcgcacattctgaaaaaattaaacaataatgtttgaaattggtagaatgaagtataacaacatcatgttttttcaaaaacaacttanatggcaaggaacatacctcccaagaagggtctctgcgagtctggcaaaactggacccacttttccttgctgatgccatatntctcacagacagtgtcctcgacaccgtcttgattagctgcaacggcccatttcctcgcgaggtcttatntaaactgcctccatctctccncacggtctgagtaacttcttttcgcctactgtagaagcctagggatatcaaatttccctgacacatcaataaagctacttgtacataatgattt

SEQ ID NO: 158090 - DNA, 359 bp, Glycine max
ccgcagcatgcacttggaaagagaaggcctttcacttttattgattgagaccgactctacctccgcagcggattatattctaaataaacgcgcgcagaaaggcgaaccttccgctccccttgttgagcccatacttgagctgacgataagaaaacggaccccccgagtctcccattgctatcgcgaaacaaacaccggcgctgactggtagtctaaatatgcccctaccaccgcttctggccctcatgtgcctccaggacctcctcctgggtgcataaaaaacttaaccgacgaatctactgcagcttatacactccctacctggaccgctattgacccatgagggacatgctcctccc

SEQ ID NO: 158091 - DNA, 476 bp, Glycine max
  unsure (1)..(476): unsure at all n locations
gctttacaactaaacttcgtgatcttagggagagcagaataatcacttcaaattccagatggataaagataaaagaataatttaaaggccaaaatcaaaattacctcatttaacaaaaactcaaaccatatttaattatattatctaatattaaaacactagtcaaactttcacttgcatcaatctcaatgagcatggttggatttcttgtatcatgaattatgctttctctcattcaataaccatcagtacgtctaaacaaatacataaatcaattatttttttggttaggggaagggacatttattagccctcaatacataactccatagaanaagaaagcttaatccgacaaacatcgggaaggcttagcatttcttctttttgagacctcaaaactggtccagcaacccgcaggcaattggaaagatctcttataccttgacgcgtggccatggctntgtcaaacacagaag

SEQ ID NO: 158092 - DNA, 323 bp, Glycine max
cagcttgagatgaggaagtgttgaagggttttacttcctgcttctattgctgaccacagagtggtacctggagatatgtcgcgggggtcacgagaccttggggacctcaggtggggtgctattgcccaaaaccaagcttgaccaatcccgacccaacccgggcatagtcggtcagtgagaacctgtgatgtacctaaacaggcgagcttctggcagtcaacagataaaaggaaaaccagaccaccaagcaaggaggcttgtggtggctggccacctgtgaattttgtgtaatatgtggatggtggcctctggtaatcgattac

SEQ ID NO: 158093 - DNA, 491 bp, Glycine max
  unsure (1)..(491): unsure at all n locations
cgcttttctacaaccttntctccccctgtggcaacatcaattagccaaagacctcggaaatcaacacagatatgacaaaggagtagaaaaatatataaatatcagagtataaaacacaagaagccaaactcacaaagaagaaataatcaaaccagaatccaaataactgaaaatgtcaacaatcacaaaacatccaagactgaaatttaaaaaccacaagataaataagcaaagtacttagcataataatgtaaattctaagaaactaaaagccaaaatacacggcttataaaagataaataatcagaaactaaaatctaagaagacggaggtggtggtggaagatcgaaactctgacgaatgtatccgacaccctcttcaagctgtgtaagacgaatgtncataccggcaaagcgtgaatctaatgagtcgaagcggtcaccaacataagaacgaagacnccgtaattcggagaggacttcattcatgag

SEQ ID NO: 158094 - DNA, 170 bp, Glycine max
ccgcttcttatacaaggcacatttttggtggtcaagcctcaccctccatggctgactcccttgcggatggcgcctcccctctcctcaactactttgccttccgaagcatctccatggtggaaaatcaccatcgaagctcaaagatccacccttcatagaagctctacaag

SEQ ID NO: 158095 - DNA, 429 bp, Glycine max
atcttattttatggttaacactgtctctagaacatttctattggatttaatgatgaaatttgtgcattttcaagtgaaaaaaggctaagttttgaattgcaaaatgtagcagtttggctaagctcagtagttgggctaagcgcatatccaccactaagcgcagcttatcgcaaaggagaatctggcacagcatcaacatcaaagttgtgcgttaagcgcgagatcaatgcgctaagcgcaacaggtgccttcagccagactaagcgtgaaattggcgctaagcccaatctcacttactcgcgctaagcgcgagggtggcgctaagcgcaacatcacaatatcagagcctatttaaagcctgtcttgtgtagaagtacggtacaactcttacaatagctcttataacagctcctacagaacgaccatggc

SEQ ID NO: 158096 - DNA, 346 bp, Glycine max
  unsure (1)..(346): unsure at all n locations
tgcagcttncgagctgatgctctctgaaaaatatttttatattcgnccccattcttatgcgaccaaagcacagcttcaaatttgggcactttagatgtgtcacacaatcaaataaaggggcaactgccagattgttggaaatcagtaaagcaattactgttccttgatttaagcaccaatatattgtcagggaagattcctatgtccatgggcgctcttgttaatatggaagccttggttctaccaaacaatggtttaatgggtgagttgccttcttctttgaagaattgcagcagtttatttatgctggacctgagtgaaaatatgttgtccggtccaataccat

SEQ ID NO: 158097 - DNA, 472 bp, Glycine max
  unsure (1)..(472): unsure at all n locations
aacgcttatgaatagctgaatgagtaaattaatctgtatatcttttattatatcccnctagntctttatcttttataaatcaagtttagttatctatgtttttaaagtgagtaaattaatctttctgaaacaatgattgcttttttatctttgaatacattctggaattttttatttattaatttgaatgtcaaacttgtggtactaaattcatgcaaatgagaactatanaaactaattataactgtcatctgaaccataaagggtctaaatatgataaaaataacgtaaaaagtgaaccaaacaagcaattcaaaaattaaaaaatctaatcaaatcattttttctctctcatgagactcattntcatatgatttacccatgtttatgatctatntntggtttgaatatcaattgcattccatatttttcacctaagtaaattgttaaaataaattcacgtcttgaatca

SEQ ID NO: 158098 - DNA, 452 bp, Glycine max
  unsure (1)..(452): unsure at all n locations
tgactcacatgaggtgcagtagaactaatgaaatattttggttgtacntaaactaactcgaatcagtgaaggtgcactacaattaccttgactttgtggaggtgcaacatatgcacatgcggttgaccttgtagttctcaaattaacacatgcaattgaattagcagtagatactaattgcgatgaaccatatggagttggtacatgtgcaatcgatcgagcaataattgcctggtgcgttgatgtacatgtctcactatgtccagacttaaagactggctccattcttgattcatgcaaacatcccacaacaaaccaatagttaaatgaaacaaacataaatgaagacatgtatctttcaaatgtgtaagtatcttacacaatgtacgtataacaggtactcacatatgcctcaagatataactgttgtgccacgtggcggatggctaaat

SEQ ID NO: 158099 - DNA, 331 bp, Glycine max
acaacttatctccaccccggaaaaactcaacattttatttattgctacagccataagcgaagcatatgctagtccccaaccctcattgaaaaatattcaatgaaaatgcgatcttctgccaacgaaaaaaatgtcacactactacaacaacaatgatggataatcaaaatttaccattgaagtgattccctacgttcatacaaaacattcagaaaattaaaaactgaacaagccataaacagcaaccaggccacctaccccccacatggtggatagcaattaacaaacgcctgatccttgcctaacaaacggaaagtcatcgtgaactata

SEQ ID NO: 158100 - DNA, 479 bp, Glycine max
  unsure (1)..(479): unsure at all n locations
tgcatgatttacattctcccactatctcaagcgaattcttaattcttcttgacatcatcaaaattcttatgatttacattctcccnctctttgatgatgacaaccacctgtatgttacgagcaacaacaaagaaaaaatatctatttgcatatagtttactccgccttggttctgtaatgattgcttatatgagacagntgaagatgtcatatttttcatatgtaaacaaactgtctcataaacaatagataatttttcttactattttatcctttatctttctctccccctttgtcaacatcaaaaacaaatcatgaatagagaggagaaagatgttaccacttgttgcaatgtattagaatcaagtgataccaaaaggcattaaaacaatcattcaatgttaatcaagcaaaaacaagtacaataacacatcaatcaaacacaatcaaatacaatccatcatcaaatatgtcaaatc

SEQ ID NO: 158101 - DNA, 473 bp, Glycine max
  unsure (1)..(473): unsure at all n locations
nttcctttcaactcgtgctgagagcttcacatcaatattctaatgacatcattaaggtctctaagcttctagtactcatgaacatcgagatgattcgccaccaaaagtagagcattcggaagctgttatgatacgagtggaaggagtttcttggagacgatgccactaccgaggacaaccacttgggaatctatcaccacaattcgtatcatttgcaactcaaaccagcacccaaaagagtttagtggtttagtggtggaggtaccaacgtagattggatgttcagcgctattcttgcttcaggccttcagccagcctttgttttaaaaaaatagatccaatcaaaccagcatatattgagctaatttgataaatcataaatcattgcattcttctaactctntattcactttaaatttctttctgttagtaagaattatgtctagtatatcaatctcttattatagtctatg

SEQ ID NO: 158102 - DNA, 466 bp, Glycine max
  unsure (1)..(466): unsure at all n locations
tataaatattattatcattatactgtgatgctgcattttccttattaataaaatnacaaacttacttttcaattcttttttacaatttatactgatacgaaatatttagactcaaaatcaattgtgaaaccaaacatgccttaaatgtatcacgtcatataccaatcttggggtctcaatgaacttttctgtacgtacttgatacgctacacaattctgaatttatgaattgctatacaactatacaagtttaaagaaaaaacctatccatcctcaagtcatatcctccaagtaatattggattaaataggaacttgtttcgtgctactgtcgcacactaattaatggaaggtaatattggattcatccaagtccatatcctncaaaactacctggttctgcatgctctaccctaccacagtgtctaatatgacgcacaagccttgctaagacgtattgcgcatat

SEQ ID NO: 158103 - DNA, 276 bp, Glycine max
tgccagctgctgattacacgaccgctataatttctccgccccccatataggcgaacttcatgattacattgtccccttcttgtgatgaccacccctgttgctacgagcacaccaaagaaacatctatttgcatatacttactccccttggttataaatgattgctttatgagaaattgagatttcatatttcattataaacgcggctataacaaaaaaatttttgttatatataacttaccttttctcccctttgcacatcaaagccctctgatag

SEQ ID NO: 158104 - DNA, 474 bp, Glycine max
  unsure (1)..(474): unsure at all n locations
tgacctgcgaccgacaagctcagctcggacgagcngactatttttgacacgacancccactncacccacggacaacaccatcgccacacttcacctatcttactcacaaccctcganacatatctagcggtatcttaaactttcaacaatttaacactctcgcacgacaaaccttatgcagcatactaactacgctctgcagaatgataatacaatcaacatcaaccagtgctcggctaactcttaccactccacacataatggctgcatgcttatcatataacagtcgttactccaatgagaatacatgactacaaatcgactatggaccacgatggacgttcctaacaatatgctngcgacacaatcaatgacgctcgactacagcgcaaggccaatgaactcgatttaccacatctgccacttcacacgcgtcatatcaaaccacctacaactctcggttatgctcatcta

SEQ ID NO: 158105 - DNA, 336 bp, Glycine max
taagaaactcagctctgtaacaaaaaaagctctgcgctcgaggcctttgattatcaatataagagccgcaccaccgtagaacttcctagaagtcctctcgtctcgtcaatagcgaaatacgaggtgcctatacattgttggcttcttctgcttctgttagccttaagctctaagaaccatgactcgtcccactccaaaatattcgcgcgattcaaacgtttacataaccacttttatattctttcgcaaatattaagttaattatgagtggatacatttctgcattagtatagtgaggatatggcttaatttacatgacttgtgcacagtaagact

SEQ ID NO: 158106 - DNA, 341 bp, Glycine max
  unsure (1)..(341): unsure at all n locations
agctcttcctctgagtgctctgatagagttttctacgtcacagagaaggagcaaggattgaaaacctccttttatactgtcctcgcgtgatgcaaatttctccctccacagacatttttttttgccaatcccaaccgtgaagatgtgcggaattgaatctccacaacatattcaaatttaacgaaaatccaacggttaacgagttcaggatcatagttttacccgaacatttttgggtttctgccaaanaaaaaaagactacgatgcgaagtgcatttctcttagaacggacatgaatttaaaatttcacaatgatccaaccgtgagaatgtttggaaatg

SEQ ID NO: 158107 - DNA, 420 bp, Glycine max
  unsure (1)..(420): unsure at all n locations
tctcatccaaggctcatctcggtggcgaacgctcctcttccttggcttattccctagtggatggcgcctcctctcaccttttctcctttgtcttacgctgcatctccatggtggaaaatcactattaaaggacctcactgaagctcacagatccagccttcataaaagctccacaactaaactgccatgctagacaccatgcatgagcttcaagcaaacctaggggtagacaagaagtcctcatcggataggttgaaaacctaaaaaggtggcctangcaaaagttacggaaatagaaaaggaaaaataatcaagggcgtgttatcaaaggttttgtcccacaatcaaaactgtaaaagtctctagtcaagatctgaaatgacacatggtcgtgtctcttcattcccaaacactatatta

SEQ ID NO: 158108 - DNA, 365 bp, Glycine max
ttctataagaccaccttaaatggactaaaaaattgaaaaacgtttgagatcctcaagagattcaaatctgaaaaaatataattttttagggattaaaaatgaataaaacgacatgcttatacccaaattaaaaaataaaaatttatacagactaaaaataaacaaaatttttacagaaattagagttcaaaaaatacacatttttcgaatcttaattcatagttatgccctgtataaatttaaatatatatacctttaattttactagattaaattatttcagtcacaaattaatttaacattcccaataccccaacctcatacaaaacattctttattaacagataacatccgtgtctatcaca

SEQ ID NO: 158109 - DNA, 405 bp, Glycine max
  unsure (1)..(405): unsure at all n locations
ctcagcttgcaaatatgagaaagaagacacggatttttnctatttagatgcattaaagatgaacaagggaaagttttggttacatataacgatatcaaagagagatgggagaattacttttacatgcttttcaatgatggtcaagattcaagtactaatatggaggggttagaaatccaagaggaggaatgaaattggtattgctatggcataatttgcattggtgaggttaaaaaaaagtcttaaaagaatggaaacggtaaagttgtcggtccaaatggtatccatattgaagtttgcaagtgtctgggagaacaacgttttattccgatcactacacttttcaatgagactttaagatctaacaagatgtcacatgagtgaaggaagagtactttggtccta

SEQ ID NO: 158110 - DNA, 354 bp, Glycine max
agcttttaaactttgtacaagaatgaagctctataccacttgttacacagcggcctcagatatcttaagaagggggggttgaattaagatattccaaacttttctcctaattaaaaatctatcttactttttacttaagatatgaattcccttaatgacaatcttcttaaatattaattcacatgaagccacttgaattattaatataaagcaatcattaataaaggagattaacggaagagaaaatgcccactcagttttatactggttcggccacacccttgtgcctacgtccagtccccaagcaacccgcttgagagatccactaacttgtaaattcctttacaagttcta

SEQ ID NO: 158111 - DNA, 469 bp, Glycine max
tataagaacaaaattgccttaatcatttccaaatatgcatgtgaatcacgacgcatcaacaagaatcaagccaaggctattgtgcaagcaatcaatggggcaaaacacaccaaatgattataatgatggatggctcacattctcacaaaggtaaaatcatcactttcaaattgagctttcaaaactatcatgacatgtagagaacaatcaacgatctcaagtcacaaaatgtcaagaacttttattttcaaaagaattacccatttcttgaacatatcctataattcaaagaaaaacatgccaagtcgtacgtgcacacaaaattgacccaaaatattaaactgaaaatcccacgaaactaacaacattaacaaattaacacaactaacaaattaacagaaccaacacaactagcaaaaccaaagaacactcctccctccatacttaaacaacacattgtcctcaatgt

SEQ ID NO: 158112 - DNA, 403 bp, Glycine max
  unsure (1)..(403): unsure at all n locations
cagctttgaagttattaattaaatcacggctctcatctggtcacaatagtcaaaatcatcggcaaataatgtcgntatcctttttgtcatttgtgtatgttgctggataaaataaactaaaaataatataaaatacaaatatgttaaattaaaattttaaaattgaatagagaaatattatcataaaaaaatataatataacataagaaaaaacatgcttaaagggagaaaatggtttatttataagtagatatgaatactgtcaaaggaagagtgtaattaagaaaatatttaaaacatatagtaaaaaatatttaaaatataaatattttatttgaaaaataaaatatttactatattttaaaatatattcaaaatttatctttttcattaactaaatata

SEQ ID NO: 158113 - DNA, 484 bp, Glycine max
  unsure (1)..(484): unsure at all n locations
cggcattcgtaatcaatatttgtctgccctttctttagtttcagttttctccaatgattggtgtcaagatatacttaagaaactctaaataaaaagaccaaaaaagtttttaagaaacatatatttgaataaacaaatttttgtttctctttttcctgttcttgcttttcctcataaataattagcatgggcatgaatagtttcttaatggaattagtgagatatatntgtaagtgatcacctccatcgttgtctaaaaaatgtactactaaatttatcctcggaatgagtggtacatcatgaacgtgttgtgatgttctctaattgtgattgatttcattggagggtgggcggtgattttatgttagtgatgtctattgttctgatcatgctcaataacatatcaaggtagtgaggatctctgattgctatatgagtcccttcgcagtcgtgggtggctttgctgaatatatactggtgtagt

SEQ ID NO: 158114 - DNA, 414 bp, Glycine max
acttaaacactgagctgcagcttgcacttgaaaaggagacacagaattatctcttcgcaatgacactcatggggctcccgaacaatggtggagtatggacgactgccctcacggtccccacttatgccatcaagaaactcagctccacactccaaaatggaggacacatgaaccaccctcagcaatagcactcatgtggcttccgcaaatgataacaatggaggattgcccttacggtcctctcttatgcaatcatgaaactcaactccaaactcgaaagtggagaacacatgaacagccctaagcaataacattcatgtggctcccgaacaagaccaaaatggaggattgcctctgaggtcctctcttaggcatcatgaaactcaacttccacactccaagtggagaacacat

SEQ ID NO: 158115 - DNA, 477 bp, Glycine max
  unsure (1)..(477): unsure at all n locations
tcggctatctccttcttcactaatcaagaggtaccgggttgagtcttctntgtggcttgcttactggtttagctccatcctctaaatgtattccatgcatgcatgtggatgggataataccaggaatgttcgtcagggtccagcctatanccttcttatgctccttgagaacagacagcaacttctcctcttgctcatcaccacgggaggcagatataattattggaaaacttctgctatcatccaagtaagcgtattttaaatttgatggcacacgcttcaactctggtgtggccagctggatagtggtagaaggagatggtttctcancctgtacctcatacagaaagtcagaggtatgtgtacctcctgtaacatggttagtcctatctgactctatacaatcaatctcgacaggtaagacaccaccaccaccaaacatgtcatcatcataacttaacattactctcacactca

SEQ ID NO: 158116 - DNA, 246 bp, Glycine max
ccacagaacgcacccgccacaacaagggcccaacacactcccaggcaccagagccaacgcacccaaaaacaccaacgggcgcggcacaaatgacacaacgactgccccatcacactcgggaaaaacccacaacacccaccacgaccaatccccgacaaccccgcaagcccaccacataaaaccacaccccggacgcccctcggacccaccacaaacacaatccgaaaaccttacgcaccccccaca

SEQ ID NO: 158117 - DNA, 479 bp, Glycine max
ggaccttaaaactaagcttaggctgcttaatcgctccaggttgctgcatggattttatcgtctgtatcggggtcaccagaggagcacaaaccacaaacccttgcaacaggtacagatttctgattcaaggccagctgggttaccaagttaaccaatgcattcagttttccttcaagcttcttagtttcagatgatgcagatgggtttgtagctacctcatgcactcctctaatgactatggcatcatttctggtgctaaactgtcgggagttggaagccatcttctcaattaaatttctggcttcagcaggagtcatgtctccaacggctccaccactggtagcatctatcatacttctctccatattactgagtccttcataaaaatattggagaagaagctgttctcaaatctgatggtggtggcaactggcacatagttattaaatctctctagtactcaaccggctctctcactg

SEQ ID NO: 158118 - DNA, 291 bp, Glycine max
gcttggatttcttttagagggaatcttttttttctagatggagcccaaccccgtcaccgtcattaagaactagcttttttcttcctctattgcctttagctgaatacacctttggttggttctctatttgggtcttaaccctctcatgcaacttttttacaaactctgacctagatttcctttctttatatataaaaaaagtgtccactgggaggggaatgaagtttaacggtgttacgggattgaacccatacaccaccttcaaaggggattgcttggtggttttatgaa

SEQ ID NO: 158119 - DNA, 439 bp, Glycine max
  unsure (1)..(439): unsure at all n locations
ntatgcctgttctcctattcacacgtaagagaaagaccttagctaccaaagccaaaatctcctacaggtccaacctcataaagacctattgatctgtgatgattatgcgcattaccccttgatttgacgggaaataacttgcaaaatcaatttatgacgtatctgtgatttggaatcgagaggagacacttgcctgtgtgagattttatacacctttgagtggtcttcctccattttattgaatccagtgtttcttctaatgtttctgtacaaacaaaatgcaaaatgtcttaatcttattcttggttatgagaaattctatctttgtgctttcattcctcattcgtcgcattatttttgaacaaaatgtgtgttgttctatcataccctaatttcatcccgggactaccatccattgatgtttttgattctcactaac

SEQ ID NO: 158120 - DNA, 403 bp, Glycine max
agcttagtgaaatagatttttttcgaaattttttattttttttacatgcagaaattgaatctattatatttttttatcccttctctttttactacctaatcaatcttacacctaatcaatcttataattcatccgcccaacaaaatagtattgacaataggcagatgcagagttttatttttttgaaatagacgcacgtacgtataaacaaataaataaatatgcaatggaaacaaccaatccagtagctaaattatgcttagtacacattggcttgtggataaatagggatagcgaaaaagcccacacattctgaatagtctacaatacataaacttttttttcttctaaatatcaatttggctctcaattacttaagataaatcaacttagttctcaaatt

SEQ ID NO: 158121 - DNA, 461 bp, Glycine max
tagtcatgagtcctcctaaggttaactccttgcatctttaagtattatattcttgcgtcgcgggtagtaattctttagtttgaatagttaaaagagcattgaacacccgcttggttagagtgccaacctagaattaaaatatcagtagcaccctcgtactaaagagtaaaagagtgtacatggttaatcggaaggaattatactcaattgaagcattgcctttcaagaacagtaactttgtatttgtcaacgacaactatgcatttagtctacgtctagagtgacatgtgccactcctgttagagctttgatatcccatgcctatggcatgttaaaccaaaatacacctagaaccttcataatatgcctcgtgaaataagaaggcaaacataatacaattagcagtgttatattctaaacagaattatgtgttcacaataacgaaatgggtttggataaaa

SEQ ID NO: 158122 - DNA, 406 bp, Glycine max
atcctcgcggaaccttcacccgacggagacactgacaaaaactcatcttttccttttcggacaaagtatgacaagctgggggcaagtaaatcttcttcccatcagaccttggatgcaactgtgatcatatccctatctcagctagatcttgacgggtatttaagccatcattcgtcttgccttgaatgtaaggagcgcccaatcacactgtccatacatttctctcccatgcataacatcaatcaatgttaacgctagatagaccagtcagacatcaagaaacggcctcttctccatatgaatttactttatcttctttgggatttccactaagtactcacggcgaacctgcgtatacctgctaccaccacggaccgggcatatccgctctgattcattaaacttt

SEQ ID NO: 158123 - DNA, 403 bp, Glycine max
  unsure (1)..(403): unsure at all n locations
catgcaagcttggtccccaagggtttatgaagactcttccttttctagaggtcacatcgggatctctatcagagactatgctagaaggaacaccgtgtactctaactatctcactgacgtacaagctagccaacctctctaaagaatatctgatgtttattgcgatgaaatgagcagatttggtcaaccctgcctacaataacccaaatggaatctacagctctgggggttctaagtaactccaccaccaaatccatggaaatgttattccacttccactcaagtctctctaaaggttgcaactctcctgaaggcttttggcgttctatcttaactctntgacacactacgcatgccacgacaaactcataaacttatttctcatactcggccacaaaacatt

SEQ ID NO: 158124 - DNA, 459 bp, Glycine max
tgccacccagctcgcccaggcgagcaaggttgcttcctccagaagcaatagccttctggaggaatcttctggagggcccaagtgggcctggttgctatttgcacccccatttttactaaatacaccccctaccttttttttggtgattcttttttcgtaaagttacagaaacttacgaatttcgtaacgatacttgttttctttccgtaatgttacggaatcttgcggattacataatcatcacttttttgacttacggaatgttacggaacctcactaattgtgcaacgatgcttccttttgatttccggtgtgtaacggaaccttacggattgtgcatcaatattttcttttgatttccggcacgtcacggaatttcacaaattgcctaatgatgggtgccaagcacctcacaatgaccaaacacaagtcgcatgacaccaagcatatgtccccgga

SEQ ID NO: 158125 - DNA, 336 bp, Glycine max
atgcaagcttgtaacattggtcgaagcgcggtttatttgtgaactcataaaaactcggaaactcagaagaaagccagtggtttacttgacacatggaaaaaacgtgttgaatctgaaatgattattaatgatgctcggtcttgttcaccttagactgttccctggccagccacaaaacgactttttcaagctgctaaggtgggaataacaattccagtgggtcacctgatgttgcatgaagagctacctacacagctttttgattcaaaactggtcttcgaagattgcccaaaagaaatactacagatctacattgcatctcagcgtatacaaaca

SEQ ID NO: 158126 - DNA, 451 bp, Glycine max
tccgcgttaacacagcatatgcatgctggtgcctaatgttgttgccagttcacaaagttcactggtcagccactgtcataaaggacaaatcatgaatggatcatacagataatgcatttgatttttcaattttacaagaatgaaatttataaaatcaacaaattaaatgaacatatttaacggttaaagaatatatgaaaatacaaagaaaaaagtatgataaaacttatgatgatcaaagaagaaacagacaaagaaaagtgagactgatcaaagaatttataacaaattggtatatttagcacggagttaacaacatggaaaaagttagagcaaacacactcaacacaggagaaaaaagaatttgaaagtcatcgagtgaaagtgtgtcttctcacatattttaacagtaacgaagaaatgggggacgaaaacaaagtatgtcactctt

SEQ ID NO: 158127 - DNA, 484 bp, Glycine max
  unsure (1)..(484): unsure at all n locations
taagctccttcaattgcacaaggctcttaatattngatgagtatccttgtggaaccttcacccgacgaagacactgacaaaaacttatcttctcctttttggacaaagtatgacaagatgggggcaagtaaattttcttcccatcagaccttggatgcaactgtgatcgtatccccatctcagctagatcttgacgggtattcaagccatcctttgtcttgccctaaatgttaatgagcatcccaatcacactgtcacatacattattctcgacatgcataacatcaatacaatgtctaacatctagatcagaccagtacggaagatcaaagaaaatggacctcttccttcatatgcaagtcttacttttatccttctgttacgtctttccaaatacagtattcaggtgttgaacncgctggtatacctactcaccagtcaacggtatcggcgcaatatcatgctcttgacttccatctaaagc

SEQ ID NO: 158128 - DNA, 388 bp, Glycine max
agcttcttttggaccttgaacaagcctttttctcctctcttacaaccatgctatgtgctcgcgactggtccctctcttcccttcgcagctggagatcactattgctaccccatagagctccgcgaaatttattccggccatactctttcttgcgagccctcttggtctcttgttcaagggctcttgcggtaattgtcttctcttccccgaacccggcacactcctttcgaatgtgtgttgccgctaacttgaacttctccttggcaaaattcgccctttctaactcgcttttgagagcttggacttctttgtcctctttccgcgccttcaaactctctttgctgacgacttttaacttggcgagccaatctaaacctcgtatatgaac

SEQ ID NO: 158129 - DNA, 477 bp, Glycine max
  unsure (1)..(477): unsure at all n locations
tgtctaccgcacttccaatgatgaacaccacctttagctcaaacccaaaacatcaaccaagaaatgaattttgcatcgaaaaagcttgtagaattcaccccaaatttcggtgtcatatgctaacttgctcccatatctacttgataatgcaatggtagtcataacccctgccagggttcctcaacctccatttttctgaggatacgactcgaacgcaacatgtgcatatcatggaggagttctgggacattccattgaacactgtatgacctcgaagcgtaaggtgcaaagtctgattgatacgggctggctgaaatttgagaatcacttgtgaatcctagcattgacaagcgacaccatacatggngcaattntgaaagctgtcgttagatgtctctaatgactcatcacgattctcaagtttatgtcattattgtanaccacagttacaatgctaaatgaaataaatctgacatc

SEQ ID NO: 158130 - DNA, 304 bp, Glycine max
agctttcttgaaagaaatgcatcttgatcttttcttctctggagtacgcctccatttttccgatagcacattttcaagtggctcttggggcacgtaatccccttgtacttgttgaaatctagcacattgaacttcagggggatgacgatgtcaggcaccaaacatcattctgccatgtcggcgaacgagtaagaaccaaacccttcattgggccttaatctctccttgaggagatccaatttctctcttttctggacagcccgaggcagcctccccactgaaaaatgcacacgttgtagtggac

SEQ ID NO: 158131 - DNA, 417 bp, Glycine max
tgtacgattatggggtacacatcacatgtggttctatgtggcggccgggcgatggtgcacaacaatactccacatccacaaatcataaactaacaaaagcaagcataatatgcaaaggcagaatactctgcccacaacacaaaccaatatcacagcttttcacatacaaataccccagtaacatcctcttcgttccaattcgttaaccgctggatcgactcgaaaattttactggaagtctctagcacataaatatacattatgaccgttgggatctgttagaaaacgtacagagcccaatctgtagtactctttccacaaccagcaaatacataacattctctgcacacagccaaaattctgctgaacctatctgacagcacaattctgcataagtgcagatcttcgaaatcacac

SEQ ID NO: 158132 - DNA, 365 bp, Glycine max
tctgcaagcttatgctgccaatatctacaatagactctttctacctcagcagcaaaaataaccacagcagagtattatgacctttccgccacagatacatccctggacggaggaatcaccctaacctcagatggtccagccctcagcaacaacaacaggaggccgcttctttcttccaaaatgctgctggcccaagcagaccatacattccttcaccaatccaacaacagcaacaaccccagaaacagccaacagttgaggcccctccacaaccttctctcgaagaacttgtgaggcaaatgactatgcccaacatgcagtcttaccaagagaacacaacctccattcagagcttaaccaattag

SEQ ID NO: 158133 - DNA, 447 bp, Glycine max
  unsure (1)..(447): unsure at all n locations
tctanactntatacaagaatgaagctctgatattacttgttaaacaagnggcctcacatatctcaacacaggggggctgaattaagacattccaaactactctcccaattcaaaatctatttcactttctattcaagttataagtatcatacggagtttgtttcattcacaaaagcgttcattcaataagtagacatttgtgtaacatcatgaaatggaaataaaaacaggatatacttgcaatcctagagataactacacaattaactaagtcaatgcgaaagataaacagatgattaaaacgctgggcctttctactgagtgacttgatgcaattaaggattcttntctatctaatgttgtttctgcgttctatgctgaggacaattatcccaagtaccgatgcctcccggcatggctaattctaataaatttcattcttgatcc

SEQ ID NO: 158134 - DNA, 365 bp, Glycine max
agctttaagccacaaaatcatgagtgagtatattatcggtctcctaacaattgaaaaagcacatgttttctcttcctttttgtttttttatgaatggaatcattttttttatagtcttcgctcgttttatgactcttcttattttcaacaatcttgacatgaatgtcccaatttttgaattttttttacttttgaaattggatggcgtaacttgaggtttttttctctgtaaatacacattcttttttcttttttttaattatattattttgtaatttaattttcaatatatattatttgggatttctctctctccctttattttttaatttaaaatattacaaatataaatatttattattcac

SEQ ID NO: 158135 - DNA, 469 bp, Glycine max
  unsure (1)..(469): unsure at all n locations
ctaagcttctaaccgctttctaatcccaatgctatncttatataatggaagacaaggataataaagcttaaatctcaagcagtattgtcattaaggagaaagcttaaatttcaagcagttattgtcagcaacgaaaaggtttaaatagtgacagaacatactagagcttcatccgttgctagttgcactcgcgtacctcgattcctcccaggtattcttactccccaattagttttttttttttttttttaataatcttaaaaaagaatcgattttttggtttctttttgttgtttcatgtgaattgctaacatgggtcgtggtgattttgctcttttgatgtaaactacggtggtgctcgttcgtgttctttctattggcgcgtaaatgccacaagatatcgcttaccaacaccctttgttcggtggcaagatatctagcacatttccccacagattccacgtcattg

SEQ ID NO: 158136 - DNA, 267 bp, Glycine max
ccattggcctcctttcccaatattatgactacccggtgaagtgcttcacctttggggacttccagttatcacccaccgcggaagagtctgaaaaaatccttggatgccttctggaacgaaagaaaccatacctcttctaggattctatccctcctttgctagaatttctaagatagtccaaatctcggcgtaggaattagaccatacaaagcaagtcgaaaatggggtggttggagtaccaaagaaatgtttggaaacacaaacaat

SEQ ID NO: 158137 - DNA, 418 bp, Glycine max
gcgatgtacctaagcaggcgagctcttggcagtcagcagataaaaagaactaacaccacaaagcaaggaggcttgtgtggtggctggccacctgtcaatcttgcgtgatatatgggttatggcctccggtcatccactaccaagggtggttgatctattacaacgcttaaaaatgaacacacgacgctaatacgagttttggcaatccattaccaacgggtgtaatcgatctaccaggcttgaaaaccacgtctggaagctacgacagcttctggtaatcgattaccaggccttaaaacggaactggaagattgtggaggcctctggtaatcgattaccagactgtgtcattcgatcacacacacgaatgggtcactggtaatcgagtaccaggtatgtgtcatcgatacacactgcc

SEQ ID NO: 158138 - DNA, 364 bp, Glycine max
  unsure (1)..(364): unsure at all n locations
agcttcttcactaagtcgctgaagcctgaaatgtcttttctgatggccgcggtcctagagcacggaagaatttctcccagaacacccttttaacgtcatcccaactaaaaacggacttgggagtaaagcaacatagccaatcttttgccactcccttcagagaatgaggaacagcctttaaaaagatatgatcctcctggacatcacggggctttatggtggaacaaacaatatggaactccttaagatgcttaaaaggatctttacctgccacaccatgaaaactgggcagcaaatgtattactcccgttttgacaacatatggaacacncctcatacgatattgaatgcacacccctcataa

SEQ ID NO: 158139 - DNA, 481 bp, Glycine max
cgcaagtgtattcgaattacttgagtggagcacgcattatatagagaatgggttgcactactacaaagcacgatcaaaatagtattcttcatgaaatatatatcgatatgagtcatagaactatatagcatcaatatcgctcagaacaagaaatcacaaacaaccataccatctatgcaattaaggcagaacaccatactacaagaatacatagaattataaggttcctataacaagtatataacattcatataagaagtaagaattaaacattcactaaggatgtatttaacgaatcacaagttttaacaatcacgtttatgatcacacacaaagaacagaagggattagccaacacatgttagcacatcgattaaacacgcccattcacagcacacctggcaattcaaggttcttgacgacattaatgcacacatcaagttctcaagacaacttgtatcacttaatggcttgccataac

SEQ ID NO: 158140 - DNA, 359 bp, Glycine max
agcttgccacccaacttgcccgggcgagcaatgtttttttcttcaaaagccacaaccttctggaggaagaatctggaacgcccaaatgggccaaatttctatttgcaccccatttttactaaatgcacccccttctatttatttggtaattctttttccgcaacgctacgaaactttacgaatttcgcaacgatacttattttccttccgcaaggttaccaatccttacggattatgtatttactcttttttagctttcgaagaagttacaaaaactcacggattgtgcaaaaacacccttttttgatttccgccacattaccgaattttacggatcgcgcagcctgtttcttttgatt

SEQ ID NO: 158141 - DNA, 485 bp, Glycine max
  unsure (1)..(485): unsure at all n locations
ngaatctgaagagttgttcaacaatctgtatgcacatcttggacctcaggtcgatgatgttgaacctctacacgttgaaatcacttcacaaccccaacccattgttgaagatgcattancaactgtcaatacttccaacatacacctctagataacttccttgaccacttgtgctccaacgggtgtgtttcaagagaggattcaagaattgttgtgccttcaataggccaacctagaagagaccatggaaaaaaaggttccttgctgaatgcatggagaccaatatgcttattaaaaacactttggagtcttcactcaaatccttcaacaattttgtgctcttcaacatgaatctattgatgcaacaaaggctacctccatccattcaaccacatccatcaccatcaactattggtgtacaacctcatcgtgaggttcttacacctgcaataattgtcgatctggtggttatgccttcaccttcc

SEQ ID NO: 158142 - DNA, 213 bp, Glycine max
agcttaacctaatatgcacccactcttgggttctctttctccccaaaaacaagctttggttcctacgcctaacgtatcattctagaccctcatgaacactgcctacatgctaaaaaatggcaaacattccgataccaaattatttcataggtgagtccccacaaagtcatgcccaaatgcccctgaggcatatcatccaccccttggtgggcg

SEQ ID NO: 158143 - DNA, 445 bp, Glycine max
  unsure (1)..(445): unsure at all n locations
ctcaccagatcatataagataaatgcatgcaggcaatctgtagatatatcctcccaaacgtcaaattctncgcctatatattcaacctttccatcactggcacgtggagtgaatcttcctccatggtgcaatactaaagttatattgtcattcattctacacaatcagaaaccacaaacatggtcagatattaggaaataaaaaaacctacctcaaaaagcgcgaagacattgacattgtcaaaaagcgcgaagacacaatcagaaaccaaaaacattgtcatctataaaaacagagcatcatacacgaaaataataaaggatcataaacctccctacgaagcgcgaagacaatgcagatgacacccntcgaacatataaaactccaaatcacaccaccaaaacaatgcagacgagtngaatgaaancaccaacctgacaaaaag

SEQ ID NO: 158144 - DNA, 445 bp, Glycine max
  unsure (1)..(445): unsure at all n locations
cgaactacccgagcactcgtgcattcatccaatgtttctttgttcccttctaaagccctttattggaccactagacacggtgcagattgagaaactgccaccaagggcggttgataatcagccagttcccatacccttggctattctgggccacaagactctcccgactaaccacgggccaaagcagctggtcttagtgcagtggcacggacttcaccctgacgaaacgtcgtgggaagactggtcacgctttangagctttatcaccttgaggacaaggtgttgtttgaagcacgcgggaatgttacaagtagcagctatgaaccgcaagcaaccacgcccaacagtgataacagcaaggagttagtagcaggaaggcccaaaagaggaagcaacactcctacttatctgaaagattacctgctagaagctctaagtgtcacca

SEQ ID NO: 158145 - DNA, 374 bp, Glycine max
agcttgggcattttcattggtaatgtcttatttatcaacgagagactaactacaaaaaaaaagaagtcaagaacagatgttattaaacgcatgtgttgacgaaaaaaaaggcacataaaacattggtttcttgactcaggttgtactaattgtatgtgtggaaaaaggaagtatttttcagattttgatgagacgtccatagattcagtaaagttcgacaataactccaatatatggtggtcagtgggaaaggcaacatcatgttggagatgaatcgatttagcagcataaccacgagtcttttatgtgtcagaattgaagaacaatctactgagtcttggacaattgcaagagaacgtactgattgttatatt

SEQ ID NO: 158146 - DNA, 447 bp, Glycine max
  unsure (1)..(447): unsure at all n locations
tctaatgttgtctntgcagagatccaacagaagttgtttatcccaaacatcttttcatcaattagtcttgctacaaacaattttcaataagcaaaaaagttcaaaatctcataaatgaaattactatagatttggaataagactttccaaaatgacctgaaaatcaaaacaacttatgagcacaagcacacactatagagtttatgagcacctgaaaatcaaaattacttttagtctacaaaagattaacacacagtgactatagattaatttcttggctgaaatatagataattcgttgtaaagtagtccaaaatcttggttgcctacgattgaagggtataagttatttaattctgttttctttgaacaagtttatattgtgatgaatttatgtggcttagtaatggaatctgtgccgttacatctgcatatcatgggtagaact

SEQ ID NO: 158147 - DNA, 366 bp, Glycine max
agcttctaatgtctctccaccaatgagaatattttcttctgtctctattatattgaaattctgaccacccaccatatttagaggttaaaactctaacccatagctgatgctgatcagatgcaaaagcccataaccatctacccaacaaagctaagttgaatttggagatattctttatccccagtcccccatcagacttaggcaaacaaatattatcccatttcacccaagggatttttttatgatcaatgtctccaccccacagaaaattcctttgaagggatatcagctttttgacaaccttgtgaggtattttaaagaaagaaaggagataaaatgcgagggcattgaagacagaaattatca

SEQ ID NO: 158148 - DNA, 481 bp, Glycine max
  unsure (1)..(481): unsure at all n locations
ntccatacttccaccactccctgcatgtgaaagaacaatgattcacggtctcttcacacctattacataaaacacacttgctatcctcttcatctacaatgacatttcttgcccgaagattgtctttagttggtaatttgttaagtagcaacctccatactaaaaaaattagcttttggttgtacctttaaatttcataccttttccatcaactgtatatcttgagaacccacaatatccatatgaagagcaatataagccgacttaaccgaaaagcttctcaaagcctcccccatccaccaccagtcatcaccaacatatntccatacatttatgtttgccaatgtgagatgtaattcttcacattaacttttntcccactcaaacatttccatcgtccattcaaactttgcacaccaacctccttccttcaatgtcccatgcttgttgacactcattctgttgttagacaactatatac

SEQ ID NO: 158149 - DNA, 184 bp, Glycine max
acaacaaaaccggaatccccaaaccaaaacccacgaccaaaccccaaaacagcaccgcccaacacaccccagccaaaccgcccccctcccctcccacccctcccccccccccttccccctcccctcctcctcccctccccctcccccacccccccccctccacacaccctccccccaaaaaaag

SEQ ID NO: 158150 - DNA, 240 bp, Glycine max
  unsure (1)..(240): unsure at all n locations
acgcaaaatcgccaagacgcaccccgcttaccaacgaggacgaccgctgacgacaacagaccngtcctcggcctcatgagtcccttccgcaacacataattgaaccgctgctctatctccctcctctgcgaacgggaacacccgcaggggcgcacattcaccggactggtgcggggaacgagacggacacggaggcccgcgtcatcgctacggggcagccctgaccggcaccggaacacg

SEQ ID NO: 158151 - DNA, 82 bp, Glycine max
ccccccgaaacggcgcagaagctcacccacggagacgaaaagaaaacaaagacgaacacggaggcgagaaaccccaagcaaa

SEQ ID NO: 158152 - DNA, 351 bp, Glycine max
  unsure (1)..(351): unsure at all n locations
ancttcttttcggtggcggggcaattgttttttgttacatccaaagtgcgtaaggcgtaagcaataacatgtgatagtctatcaactttctgtgacaaaaccaccccgagtgcataatttgaagcatcacacatgagctcaaatggaagctcccaatttggtggctgcatgatgggagaggtggtaagcctcctccttaactcctcaaatgtctttctgcaaggctggtccagcacaaaatctacatccttttgaacaagcttggacagaatgatgcatgcaacaattacccatcatccatccatggatccaatcaagactgcccagaatgatgcatgcccctgactcaac

SEQ ID NO: 158153 - DNA, 474 bp, Glycine max
  unsure (1)..(474): unsure at all n locations
tcttttggaccttgaacaggcaactaactcctctttctattcatgccatgtgctcgcgactggtccctttcttcccttcgcaacttgagttcactattgctaccccatagagctncgcgaaatttgttccggccatactcttccttgcgagccctcttggtctcttgttcaagggctcttgcagtaattgcattctcttcccgtaacccggcacactccttccgaacgtgtgtagcggccaacttgaacttctccttggcaagtttcgcctttcctaactcgcttttgagagtttggacttcttcgtcctcttccggtgcttcaaaattctcttcgctgacgactcttaacttggcgagccaatctaaacctcgtatgcgaactttcagccattcgtggtacccaccaatgatgccattacgaatgcctctaagctcttgatctttccttaacggcgtttcccatgccttatgg

SEQ ID NO: 158154 - DNA, 357 bp, Glycine max
  unsure (1)..(357): unsure at all n locations
aacaccctctggcagagacgctttttcttttctcatacaaacccaaacctatccagcaaaactacaatcctcgttccttaaccgctggattatagagaacctgccctatgcgggtcaagaataacctcttcacattttcaccgctgggatatgtaacaaaatgcctatggagggagatatgcctcacacgtacacagcggaatggacgcttcaatctcttaaccgtctctgtaacgccgacaaaccctatcacacccaacagaggaaaagtctgacgaatccaagaaaccactagagatgccgctatcancggcacaaacaacacccgagcccgctacaggaaaggacgagctaacg

SEQ ID NO: 158155 - DNA, 383 bp, Glycine max
  unsure (1)..(383): unsure at all n locations
atacaaactcaccttcttgataaatcctaagaagctagagctcagttttcatanctnttaatagctcagctcacccccattccaaaaatacatgataatacaacaatgtccctactacaaagactactcaaaatgccctgaaatacaaggctacaaccctatactaatagaatggccaaaatacaacgcccacaagaagaagaaaaaacacatattctaatatttacaaagataagtgggctcatacttaccccatgggcccgaaatataccctaaggttcatgacaaccctagggccttctttaacatctctagcccaatcctcttggaatcttctatccaatacccttgtggggtacgattacatcangaggcgggggggg

SEQ ID NO: 158156 - DNA, 353 bp, Glycine max
ccttttttttttatttacccgccattttcatattttttaagaaatcaactgacctatcgaaagggtactacccgataaaggtatatttcactcctgtagccggtcatttcattggacccccagtgaactatgttacatattcctttaacctacaagcccctcttaattgatgagttatcacattgaactgcaaatatctcaatttgataaggtccaatcaatatgccctgccatgcaactcaattgactgatataaatgtccactaactggcggattaaattgactgatgaaatgtagtttgatgatctctttcaacatacaccgcagcacatacactaatccatagctcatc

SEQ ID NO: 158157 - DNA, 437 bp, Glycine max
tcttgttagacgctacattcgactgccaagagcatttttttgctgccctcctaatcatgacgactccttgtgcgtcgaatatcacggtgttgcttctccatgtcattgcatcttccgactgaatacacattctttttctatcccttgcgagcccgtaaatgccggtctagagtgtggacttgggccataacactttgatgattgcgaacacggtgacattcttgaagccttcaacacatttcacaagaagaggacccttgaagaggcctcagcctcaatggcatctgccgtggacggagtacgagttgcattgcacaatgaaccatgatgtgttccactatgagattgattcctatctcgtgcttgaacacagtgcacatgcatcccaagttctagctgaaaaaaacatagcatttctctccagtcggactattaca

SEQ ID NO: 158158 - DNA, 334 bp, Glycine max
cagatcaccagtgcgtgcaatcacatcattccaattcacacactggagataacacacacagacctttgcaattctggcaccgcaagccgcggagagaatcgaagcaccggccgaaatgttgaccgcgctggcacccgccactccggttcccacgatagccaccacatcgtccaaacccttcaccttcgacgcgtgtttaaacatcgtcctcgccaaccccacaacctagtaattcacgaaaacagaagaacacattcgaatcaatttgagaaaactgaaactttgctcgcatcacaacaaacgctactactactttacctcctcataggcctct

SEQ ID NO: 158159 - DNA, 480 bp, Glycine max
  unsure (1)..(480): unsure at all n locations
nttaactgaatctgcagcgttccaattgatcttaaatttgtaatcgattacaacatattggtaatcggttaccagtgtatctaaacgttgaaattcaaattcaattgtgaagagtcatatcttttcagaaatgttttgtgtaatcgattacatggttatggtaatcgattaccagcgacaagttttgaatgaaaagtcaagagatgtaactcttccaatggttctcaggtttttctcaacgttataactcttccaatggttttcttgactggacatgaagagtctataaaagcaagaccttgacttgcatttcaataactttttataacaacttcttagaatttcttgaacaactcttgagaaatcttgaacactttactacttatctgtcttcctcttcctttgccaaaagctctctaaggtttctggtttccaaagcttgttctttcacagaacacagaagtgtgctatatcttttta

SEQ ID NO: 158160 - DNA, 455 bp, Glycine max
  unsure (1)..(455): unsure at all n locations
tcggctgcanagatcccaggctcataatgaaactctttttatttctccgagctaaattttttccgaaatctactgtagaagtcagcatactgcggaaatagttttgggatatagctcttgactccaataacaccttgcatattggagatagtggatgcattcaaggaatgaacaaggcttgtaaaggaaccagtagtaatccatacattacccttccccataatattcattctttttgcagtttcaaagaggtttagcgcccaaggaaaggataaatggacaataatgactctacattgtccttctcttagtttctcaagttgttgggacaatgaagaagacactagaagtgggattgctatagcattgcttaattctgtcccaaattctgttagagcttcagagagttgagatcaaatttagtggacgatgagtctccatcttcatatattata

SEQ ID NO: 158161 - DNA, 293 bp, Glycine max
agcttttgagcaattcaaatggtctgttatttttactcggagctctgatttacgcacatcacatatatagacgctccaaaatgaacaacggaagctctcgacatattcaaatggtcataattttaacctggacggttcgattctgcacctaatatatcgagacgcccgaaattccacaacagaagcccttgaaaaaattcaacggttattacttttaacccggagggccgatttcagccccctacatatagagacgctcgaaattgaacaaccggagctcttcagaaaattaa

SEQ ID NO: 158162 - DNA, 441 bp, Glycine max
  unsure (1)..(441): unsure at all n locations
ntgaccatttgaattgctcaagcacttccattgttcaatttctagcgtctcgatatattatgcgctcgaatcggacctccgagtgaaaagttaagaccatttgaattgctcaagagcttccattaatcaatttcgagggtctcgatattttatgttcctaaatcagatcttcgagttaaaagttatgtccatttgaatatctcgagagcttccgttgtttaatttcgagcgtctgtatatgtgatgctcctgaatcggacctccgagtgaaaagttatgaccatttgaatatctcgagagcatccgttgttcaatttcgagcgtctctatatgtgatgcgccttaatcggacctccgaatgaaaagtaatgaccatttgaatttctcaagagctttcgctgttcaatttcgagcgcctctatatgtgatgcccctgaatcg

SEQ ID NO: 158163 - DNA, 272 bp, Glycine max
gttttgtttaaagaagcatgaaaacgcgtattccgtccctatttgaacactcaactttgatcttggtgcacaatttctcatacattcgctcactacataaagttctggaccatttaacttatcaacctctctttattcccctgtcattacaagtgatcttgagcttaacaaaatcttccaagctctggcaactggatttcgatgaacaattgtttgaagagacctaaacttctttaatcttttcaattcttcacccactccatggactacca

SEQ ID NO: 158164 - DNA, 447 bp, Glycine max
  unsure (1)..(447): unsure at all n locations
cttccttcgattatcaactcatgatcaagaatgaatgtttgaatcctgattaactcgaatatcttgaaaaatccaaactaattcccttagatgactctatgaatgttttttctaaaagataagattgaatcaagagtcactaattagaaagaagaagtgagggtatttataattttaatagctaaaactaatttaattgattattgtcagaccctaatttcatctggggggctatcattcgttgacattttgattcttactagccgaattgagatactcgacactaattgttgcgcaagacgaaagcttattcaatatttcagtaaagaatacgaaaatacctcaaaaggagggcaaaaggatcattntaagcttttttctaacccctggctcgcctacgatagcctctggctcgcctgcgcccccaaatagcttacgggtgaagtg

SEQ ID NO: 158165 - DNA, 331 bp, Glycine max
ttttattccacacaaagatattccagatgggtgatcaagacagtttctaatagtcttacaaagagtatattaaaacacgaagggaattcctattgaagcaccaaaacgtttggccccaaaaatctaagtttaaaagtctttctcaagagatttactctctggtaatcaattaccagtggccaaaactgatctacaacagctactaaaatttgaatccaaaatttgcactgtgtaatcgactacacatatatggtaatcgattaccaacagttattgaacgttctaattcaaattttaaagcttgtcatcgaatacacaaatactggaatcg

SEQ ID NO: 158166 - DNA, 405 bp, Glycine max
  unsure (1)..(405): unsure at all n locations
nttcgattcattctatgcacccatggtggtccacattgttgttttgtgtatttctattcttgcttcattcgcttttttataccccctcttgacgtgcttaagccattttacttaagtcatttctcgcttaacttaaaaataaaataaatttccaccgaacgtttgaattgtattatccgttaacttcggttaaaatgaatttcgaccgttcggtcgtgccgtaaccacgttggaaatcaaaaagaggtaaaaaataatataataatcaaaaaacatcttttagtaaaataaagcggaaaatcaatcggacgttctctctctgggatttctcattcttaatcgaattgattaataactaaagtgaaactaaaggctaaaatcaattcgcctagtcaagctcgtcca

SEQ ID NO: 158167 - DNA, 376 bp, Glycine max
  unsure (1)..(376): unsure at all n locations
cagctctanctaattatgggtgggatatttatattttatcacaggaagggatctcaagtgagaaatttactatcacaatctattccaatcaccccttatattcttcactctcagcattcctcgccagctaacggatacacccttattggttttaatctgcatcaacgccacatcaatcatttctgcagtcaatgtcttattataatgcctacctcccaatatttatcccacgattgttgataatctgtgtcggctctgctacctaagctatggatgatggattctgtccactctctctatggcgaggtcaaaggtatgttgtgacaattcatactgtcacacaagcggcctcacaaatcttaagaaggaggggggg

SEQ ID NO: 158168 - DNA, 477 bp, Glycine max
  unsure (1)..(477): unsure at all n locations
aaaactcagcttaaccttagggtagacgattattgcttttagtttgtatttctgtttagctntagtgttttcaattgtagggtttacaatgcacggtttacttaggttttagagcccaataggggcaatgcctgtaagaggggtgaagacccctcatttctgcctgtgaatgaggtgtattggtccacatgcaatgttctatgttgttgctgcagtgtctgactattatgttcctgngaaggaaatggtataaatacaaaatatgcttccttagttcttcatttcatgaaagttttaatgtcgtattgactttaaaattggtttactcggttctgtaattggctaacgcgaaagggtttatgaataatcttccactgctgttagcatcaaatatatttagagaatttgcctgtagcttcatgtgtgaacaactaaacataagaaatgtcacatacttggttgtgacaaaaatggtgt

SEQ ID NO: 158169 - DNA, 356 bp, Glycine max
agcttgtgactcctggccatttcttttataaactaatcacttaaaaagttgagacttttgaaaaaatcttcagaaacaagtcacttaaagaattatgacttttggaaatgtatttctcgaaatccctcactggtcatcgattaccattaaggtgtaatccattccacactcaacatatgtgacttttcattttgaactttgaaaattaaaacgtttagaagctcacgtaatcgattacaagtgttgtgtcatccatcacactagtttaaaatgatttaatacttgctaacaccagttgtgaatcttgcaattgaaatcttaccgttttacaccactgggcactccatactaccttt

SEQ ID NO: 158170 - DNA, 467 bp, Glycine max
cttaaaaacaaatagtataacatggtacaatatcctatatcctttgagacgatgacaaagcttggctgggaaattcatccaatgaaattattgggttttgattatacatccttcgagaatttttaggaatatataacctctctgaagttggtggtatattctggtactataggaggcataaagaccctctcagaagtaggagccaaagtatcatcatcaagctgacaagctggactaatgcttttatttatatgagatgctgcagggatataaattctctctgtagttggaatatcagtcctttgagatgttgagccaatttggtcattcatgtgcgatgacgttgaaggcatgtatattctctcagaagttggaaacatacggtctgttctttcaaatgtttgaccaacactcttattcaaatgagatgctgccagtatgtatgccttgtcagagtctgaatgcac

SEQ ID NO: 158171 - DNA, 366 bp, Glycine max
agcttccttggggccatgtgctaaaaagattatattttgggaagttagtttcacgagataagcttatcttaacacaaaaatgacatgctaatccctccgatttagaacaaactcatgcacacctttaatgtaaaatatttatgcccatgcccatgtgtaaaatatcctactatttatgtcaatgtacaaggacatccaacacattctaattgccctacatatatatgcatttgaaaagaacacacattcttctgctcaacgcattgcgttcaaatttacacctaaacatatttgaaacatatatcataccaacttttattggtccactcacatttatttatatgcctgttggaaagctaattacgt

SEQ ID NO: 158172 - DNA, 477 bp, Glycine max
  unsure (1)..(477): unsure at all n locations
ctgttgcaagggtccaaatcttagtctttttattttgttctcctattntgaggtggttgtccatagaactggtgcacgatttattttttttggattctttgacttttaaaactatggaaaaaatgtgtcacggatattagtaatgtgttggacataattttaaaaaaatgcagaacatagacacttaagctttgctgcaacagttaaaatcataattaattggaattttgtttgttgcgtgtagccgttcattgtttaatagcatgcactgataatgtgcggagacctgcattaataaaaaaacacctttaatcaatcgcatacgcgttattggttatgtgcagttgttcattatgcaatcacatgcaatgatacttggcatgcaagggtgtcttggacatagcctttgtctgaatgttacgcctagagattccaacgccattagaanaaccatcttattgtcatgcctcgtgattc

SEQ ID NO: 158173 - DNA, 325 bp, Glycine max
gcatgcaagcttaatggatgaacacatgggttgtgagctttatccgacgccggcttaaatgggcaaccttggttgtatacctcactctacccacctctagttgacatgttaagtgccgcgacaacctattacgagcacatgattgtagccgtacatgaacaaaaataactgaaacattgaagaaataataaataactcttccttttcttatgtagatacctaaatgttctttctttgtcccgttgcactaatcttatagtctatccactaagaaaatacaaccaccataactcctaaaaacaagttgcgtgaacaccccataatt

SEQ ID NO: 158174 - DNA, 500 bp, Glycine max
ggacctataaaactcagcttaatagaaccctaattccatccatgtatgtgaatatttattatttatttgtagttgtgactttcacattttgtgtttgttatttgcaatattctggaccatttctttaaaaacttaatacaatcaacacatgcaccttaggcatatcatttactttagaccgcttagtactttctacatcatgactaataagtcatcaattttactacttcccacatctctaatttcaattttaaatttacccacatttacaatatcatggttaagattcattcttaggaagtagaaaattttactttgttgtggcttactttggaattacgaaactggagtatataattaattttgacctgaaatttactttgttggttactagaattggtgctaaggcgacaatgatttatcaagctacggttatgattcgcactatgatcatccctactatacaaaatgttgaacatacgacaccatgactaataagt

SEQ ID NO: 158175 - DNA, 263 bp, Glycine max
tttttattcacaagtaagatacccttttctatagaagactaccctggatgaagtttatgtgatataatccctatggaagcacgaaacattttgttggataggccatggaaaattgacaagaaagcaatccacaatggtctcaccaatgaaataaacttcacccatggaaacaaaaagttcaaacttgttcccttgacaccttcacaagtggctggggtgatcaagtacaaataaaactcatatgggatcagggaaagaataaa

SEQ ID NO: 158176 - DNA, 422 bp, Glycine max
tacttgaatggacaatcaagcttcacggcgcgtgtcatatttatacacttgatctacctcattagtccagtgttactactccaaagacaattcaacagaagcgtacagatcagtcacatcaatattcaataagtcaccggaagaaggtctagaactaagtccttgggagaagcgcatataactctcccttcacgtgtgtggaatgtttcttgaagattctagccctctcgctcggagcctatgacaaggggagaggccatcattcgtcactgaaccccaataactcaacaccaaaacatttctcaagcgataaacactatcattctttcacatattctctcctcatccacttgtctcacatactctttataacattctcttctcaacaaaagaatcgaacaactgagtgacggagagggaca

SEQ ID NO: 158177 - DNA, 189 bp, Glycine max
cccctcctcttttttcctaatccccttttaagatccccttctggctttcaaaaaaaaatcatctctaaagaaatttttgtgggcgggaaggtaaacgaaaaattgcccgcgtgatgcgcaaaatgtgtgttactaacgctgcggcggtcgccattaaagttcacggtgtcaatgacgcattgctccgga

SEQ ID NO: 158178 - DNA, 438 bp, Glycine max
  unsure (1)..(438): unsure at all n locations
ntataagtgcgggttcgggagacaaaggtcaagcgttctctatatgccaagatgatattccgagtactttggatttggtacgaccatgctctcctgatttccagctgggaaattggcgagtggaggaacgccccggcatttacgcaacaagcataatgtaaacctttacggttttaaaagctctatagttgggcctacgctttagagttttcattttgctaaggctttgtgtcttttgtgtttgaatttataatacaaggatctttcttcatctgttcctggtctctacccattctcattcatttgcatgtttacttctttttctaaaacggcagattcgatgacgagtccctcgaaggtactaatacctgcgacccgtctatcaactttgagccagaaatgaatcaaaccgaagatgaacgagatgacgatgtggga

SEQ ID NO: 158179 - DNA, 415 bp, Glycine max
gaactataaaactacgctcttcaatgcgacttcaattgtgaccgtcacgcgactctgactccatacaccgatctgcaatctgcgctcaattctatgttcagatctatgtggaggtggtaggagtgtttatccgaatggatcacttgccagccaaactgatctaaaccgatccgaatagttcggatcgagtcattcatatatctatgtccaaaccgaatctaaccgatcaaaattattcatgtaccaatcgactcacgggtttatatttatatatccattgacccgttgaaccaatttgtgaacccataattaaaatataaattctatcttatatatatcacacactaacaaaacaatttgacaatcaaggaaggtgtgataatacataatttccctcacagatcttaataacata

SEQ ID NO: 158180 - DNA, 394 bp, Glycine max
  unsure (1)..(394): unsure at all n locations
tctatagaaggttcgctcctaatttctctacaattgctttatctctcaatgagctggtgaagaagaatgtggcatttacctgcggtgaaaaacaagagcaagcctttgctttgctcaaagaaaagcttactaaggcacctgttctagctcttcctgacttttctaaaacttttgagctacaatgtgatgcctctggagtgggagttggagctgtattgttacaaggtgggcaccctattgcttattttagtgaaaaacttcatagtgccaccctcaactaccccacctatgataaagagctttatgccttaataagagccctccaaacttgngaacattacctctgttccaggaatttgtcattcatagtgaccatcaatcacctaagcacatt

SEQ ID NO: 158181 - DNA, 477 bp, Glycine max
tattcacacattatgccccaatcgatgacagtgccgattttgaaagattccattcaagtaaatcgagtcataaactctgtctggacaaacttctccataagctaaagaagaaaataagaagataaaatgtattgagcttctgcaccgcagtttttggggatattaaataaaaagagcttctatacaagttgatcttaactcatgtgagaaactaaattcatttcacctctttcttccttctcttatagaagcctacggagaagtttattcaaatggggctatagtgtggaaatttatgaactgtggaatatttgcagctagtgctttgaaatgcctctttgttcataataacattacattccagctgcacaacagtattctttctctaccatgattcttctgtacgctatgtcgcgtacgccgttcttatatgaaccataatatgtattcatgctcgcctgaactgaagtgcttctg

SEQ ID NO: 158182 - DNA, 418 bp, Glycine max
  unsure (1)..(418): unsure at all n locations
cggtgtgtgcactcaatgagcttatgcgtggcttcatatcntttatggcctncngacgaactcgctaagcttgagagttgctgcgcgaacctccatcacagcttgtaggcctacgatcttccttatcaatggatccctttgcttcttggaacatgaatgccagcccaatggacaacgacgacagagaggagacaccacttccatgagaagatgagtctacaacaagcttaccaccatatgacgccatggataacagctcggacgaagaacgagacgaatgaatggacacggacggaacagcactaaatttngtgctctaacacagctcctaactctgacctcaatactcaaatgatcaaagccttttaaccaacacacacactcgacctctatttataccctaagtgctccacacaat

SEQ ID NO: 158183 - DNA, 335 bp, Glycine max
tgcacgctgcaagcttgcactgcgctacgagaatctcccttacctcattctccagccttatgcatgtcgcgagcttactaatgttcaaacggaagcccttccgaacaattgcacacgcattgttaaacgtcttctgctaatcctgcacattccgtccagcctttctctacaccctgtatttaattgacgatcaactataaaagtcctactcttgaaattctaaaaaagacgtgccctcccttccctctctccccccgtctcccccttcacccccctgccactcactcattcttcgctctctctcccctcatcctctcccttctacctccttctct

SEQ ID NO: 158184 - DNA, 464 bp, Glycine max
  unsure (1)..(464): unsure at all n locations
tatccaatgagggtctatatccatataagcacaactactctatcccattaaaaccacagaattgttaagctctatcaccaccatctctctgaatccccctagctttcttatacatagctcctaaacaagcgtttggatttaacatccatgccgataaagaataagaaaactctcttttttcttcatccaaaatgtctcgagtctgaatttctttttgtctaaatatcatattattccttcgtaaccaaatagctcccatcatcgcggatccaaaaaaatttgttaggagggacgataaattaggtttaactactattttgatcttttaatttatttcttaggtttaatttaatttatttttaacaatttcaatttgattacttaatttatctattaaatttaatttggtatctctaattctaaaatttctttaggttcattattnttcaaaattacattaattt

SEQ ID NO: 158185 - DNA, 439 bp, Glycine max
  unsure (1)..(439): unsure at all n locations
ntataagaaaactattataatctaaagataagtgctaattattttaatcncaaaaataattaaattatggcacttatcatgtacccattaatgtcccaaccactactagaaaaaacattntctatgacaacaaaacgacgacggttcctcaagaaccgtcttagtatgtaaggtagtgacaattttgtaaatatggggtcttagaaactacccttccatgacggtttcgcaaaaattgtcttaaaagactgtcattctaagacactcttgtaaaaatcgtcttagaagagagcatgtttttaatttttatatctccctctcgtgcgcttaaatgtttgctcttcctctcacactctctctcactcttcgtaagtgagagccacagagacctctcactctttccctctttcctttcagaccctttcatagtatgggtgtg

SEQ ID NO: 158186 - DNA, 180 bp, Glycine max
agctctgtgtaatcgactacagctctattttgtctatttattaccagcgtttgtttctgaaaaatctaaagatgtacctctctcaaaaggatttgactttttcaaatgggttctaagtttttctaaaagtcataactcttcttaatggtcttcttgaccacagacggagagtctataaaa

SEQ ID NO: 158187 - DNA, 479 bp, Glycine max
  unsure (1)..(479): unsure at all n locations
tctatggataatattcaagttatcaaggctattcttagtagctttgaaatagcttctggcctgagaatcaattttgctaagagccaattcagagcaattggacaatctgaacagtggatcaaatttgctgttgatttcttgaactgtggccccctgcatcttcccttctgttatttagggctgcctataggtgtcaatccgagaaggaaggtggtgtgggagcctataatcagcaaattcgaggctagattgaacaaatggaagcagagaagtatatcaatggctggcataatcactctaattaatgctgtcttaacagctctgctcttgttttacatgtctntttttacggctcctttagcagtgattaacaagctcactaccattcaaagaaattttctttggggtggaatcaagaaaggaagaagatagcttgggtggcttggagtccagtgtgtgctgctagtgaaaggggagga

SEQ ID NO: 158188 - DNA, 343 bp, Glycine max
agctttgcctagcccatcgctcccctactatttgcacccctattattgctgattcacctattgggcctttactttctgcaccctctgtttgctatttgcaccttgtgggctctttttttgtacagaaagatgactacatttgtacaagatacattgggttgcctcccaaccagcacttagtttattgtctttagctaaacactatgctttcttgaaggatcatttcactagatgatggtcgccatctctctaattgctctcattataaatctttacgcgctgtccattgacgatcccattcttctcaaaactcttttcttctaggtccccccattctactact

SEQ ID NO: 158189 - DNA, 487 bp, Glycine max
  unsure (1)..(487): unsure at all n locations
ggaactataaaactaagcttaggttgctcattgactctagattgttgcattattgttaaagatctgtatggcgatctggaaaagaacatagaccacagactcttgcaacaggtgcaaatttctgattcatggcaagctgagttactaggttgaccaaggcatcaagttttccctcaagctttttattttccatacatgaagatgaatccgtggccacctcatggactcctctaaggacaatagcaccatttcttgcattgaattgttgggagttggaagccatcttctcaatcaaattcctagcctcaacaggagtcatatcaccaagggctccaccactggcagcatcaatcatactcctctncatgttgctaagtccctcatagaaatattgaagaaagagttgctcagaaatctggtggtgaggacagcttgcacacaatttcttgaatctttcccagtactcatacaagctctcttcactaag

SEQ ID NO: 158190 - DNA, 333 bp, Glycine max
cagcttcaaccccaggagtcgaaagtttcttatatcaaagaacgaccccttactcccctttacattcatgaactttctttgctgttccaacaacagctgttaacactaaaaaacaaaacaaagccttacctaatacacgcgatggctggagatgatcaccgcataccctaaacgcaccatcgctattccaaaacactgagagaaatggcagaaagaagaaccatataatactttccccaagaaattagggaaacccagtacccttccccatatgatattgtgagtcctgccaggacaagatactatccgaaaagaggacaccttaaattaccc

SEQ ID NO: 158191 - DNA, 464 bp, Glycine max
  unsure (1)..(464): unsure at all n locations
tgttatctaatacacagaagacgaaggaggattatatttctttctggaacgagaagaacgaaaccaaggaagatgaagcttgcggggaggttgctgggtgcaccggagaagaacgaaagcgcggaagaaaacattctttacaaccgaagaacaagaaaatgttccttttttaaatatgttaacttttatttcttaaatgaagggtattttacgaagttcattcaattgctgggtgcacctagcaacagtcctacaatcgaggtgttatcacattctcttagtaatcttttcctgagagctactattgtcttctatttacactgtccacgtgtgttttacatctttcttttcttanaaaatctccttttcatgacaacatgattatgacgatcaaatacacaatgaaatccagtttctgttgcctaaatggggctgtacacaaatctaacaatcacaacatgatc

SEQ ID NO: 158192 - DNA, 241 bp, Glycine max
cttcttccttcctggatcacatgcgtcaaaaactcgcacggcaatctttctactattttccggaaggacacttacgctataattcacattgctgcagacccctaacaccagaaacaacagctttcacacggcccttccgtggttttgcctatcgcccatgccattcgggtaatgcatcggtactgctatgctccacaaatgtctgaaggctatctctgctgacctggtacaaaaatgcatc

SEQ ID NO: 158193 - DNA, 377 bp, Glycine max
  unsure (1)..(377): unsure at all n locations
cgactcagacctaatcgccacacgcgtacgaggcacgtattttatgttcatattacgttaccctgtcagcgccattgtcatttaaatcctgttattctatcgacaggcacgatcagacaagatccatcactcaaagctccatcgattccagagaggactaacactgcatttgcgtacaacgcgtcttacaaaaaagcttcgctggcgaaacaaaaagtcactgcaatagaatatggcgattgcgaagagtcatatgccaaactgccgtcgcggctaacacacatgcaaaatcattctcctgcatcatattctcaaatactacatgacgattttattattgggaataccgttagcngcgaacactgtcaatctcatac

SEQ ID NO: 158194 - DNA, 228 bp, Glycine max
tatctgtgcttcatatgttcataccactcgctgatattctgacgttgggggattgacactcattgcgttggagcatattaggaagacatcacgctgtaaaacattgagatagaacgatgacggaaagcgcctaacacagaagcaatacataaacaggtgagatacacaatatattcaaaactagcatttgagacatggagctatagctaccttactcatattattcta

SEQ ID NO: 158195 - DNA, 296 bp, Glycine max
catgccacctggcattgctccaaagaccctgccagatattatagaccattctgaaacataacaacaaaaatgaagggcccatttcttcatgacctacctaatgcgaattctgtccccttaacataccatggtcggaaggtgtccaataagatatctcttgcctgattcctgtggcaaatacagcaagttccatactaattaaaacaaaatccaaccccttttatcacaaatcttgatttttacaagattccgacacctggcttatatattatctttaacaactcaaatttattttt

SEQ ID NO: 158196 - DNA, 467 bp, Glycine max
tcctgccgactatttctgcaagagctaaatttctattgtttatacacccactaagaagggcacctaacatggaagctgttggttctgtgggcatttgacaaataaattggtatgcagtggttaactgacctgcacgtgccaacgcatctaccatgcaagcatagtgctcacttgtaggtgtcatgcactcatgccacatttactaagactctcaaagaataccatgcttcttctataactatccctccatggccataggcagccaacaagcacaagtatgtgacctcatcaggacagataccaactatttgcatttccttaaacaatttaagggattcttcaaccaatccatgtgttgcaagacctccaatcactggcattcaaatcaacacatcagtttgactcttagagacacagtggaatataagcaaagcctcctctattgcccacatttggatacatatcac

SEQ ID NO: 158197 - DNA, 279 bp, Glycine max
ctatagatactaagcttgtatggtaaactaagttataaggcgaggctagtactttcatatagcttctggcctgaggatcaactttgctaagagccaattcaaattaactccaaaatctgagactggacacattcgctcgttatttcttgaactgtgggcacctgcattcttccttctgcacggaccgcagcctaacgcgtttcccaacccagaacgacgcgagcgggcattaataaaacatatcacgctgactgatgaacagcgtataaaacatatcca

SEQ ID NO: 158198 - DNA, 475 bp, Glycine max
  unsure (1)..(475): unsure at all n locations
tggatgaatgaagcacaggcagacgagcgtgctgcgnctantgttacttgccaagccataattcatgatactattgcggctggagttgaagaacaacataggaagaggacatgggttgctgatgcggacgaatgtaagaaaagaggttctattgagactgccagagctatatatgctcatgccttgactgcctccttaactaagaagagcatatggatcaaagcagcacagctggaacagagtcatcgtaccacagaatctcttgatgcattacttcgtaaagcacttacctacagaccacaggctgaagttctttggcttatgggtgccaaacagaagcgccttgctggacatgtgctcccagctcgagctatcctccaagaagcttatgctgccacttccaacttccgacgcaatatggcttgctgctctcaagctcacaatcgagaaccatgaacctgagagagctccgatg

SEQ ID NO: 158199 - DNA, 326 bp, Glycine max
agctttccctctttgaacaaatagccttcatttaatagaaatcatcttgggccttttttccaccacttttgtaaatgggagaaaaatgttcatctaaagcatacaagtccctaatattatcaaatcctaaaatttgacctcccaggaagcaaaacaatgtgtgtctcctagagagggtattagctaccacatttgcttttccctttttgtatttgataacatatggaaattgctctaggtactctacccattttgcatgccttttgtttaacttgctttgccctttaatgtacttaagtgattgatgatcactatgaatgacaaat

SEQ ID NO: 158200 - DNA, 474 bp, Glycine max
  unsure (1)..(474): unsure at all n locations
taaaggtggtggtccagaatacacagcagaggttctttagtgtgttcttggtggagagagaaagcatattacatatgctttggtgaatatcttttctatttcttttcttttttcttttaaatatttatagtgactgtgaggatatgatatcttactgtaagtcattggaaggtgttggccttggaatgaaaaatataaatgatgcttttaatgcaacttcatataggattcaatgaaattttgcttcgcatggaaactattttatttttcatcttaatattttgttatggccttatagatctaatgctaaccataacatcatttaaaaatctatcttgaaagctttttttattcttttaatatctttttcataatagaatgttttgcatcttagctagataaaagttgctctgatgactaaatacaaaaagtatttgtntgtgtttatactnttccaaaatatactcttctgat

SEQ ID NO: 158201 - DNA, 408 bp, Glycine max
ggaactataaaactcagctgaagccaggccagactctcgtgcatgcagaggcttttcattatacaatgccaaactgccccaaaaaatttgatttcgagcttatataggtgggttggtccatgctctcgtgcttagcgcacatctgaatcgcttagcgcgcataagcggattttgacttatcgcgcttgtctcgcttagcggatgagttgaagcggtgtgcttgatgacctgtagcaatgcactcagtgaacctgacagctcatcttcttctggcttcttcctcgtgcttagccactgagtgtctgtcttagcgaatgctcgctaagccagcagattggcttagcgagaaggtgaaaacaacacttttggcgttgcggtacttaaactgatgttgtgagaaattgatta

SEQ ID NO: 158202 - DNA, 428 bp, Glycine max
tctcgctctcaatcaatatgtctactgactagacattttatttgcaagcttacattcttgttctttctttgtttagcatacacacttgctcaaactcatgataaaacacaagcttcattccaatcatgcactcaatccataatcaccatttcaaaactataccaaaactacaatttcaaggagtcaagttaaactggtctatacgcatcaggacttgcatactactatccataatcaaaagtataaacccatatcacaacaaacagtgtactaaaggcataattataataatcataattgtcatcaaaacaaaagcaggaatttaaaattcctgtgacaggtcttgtgactgagtatcctcatcttgagtgtcctcctcatctgtaagatgtagcacatgagtgcgcgaaagagtggtagtcaatccc

SEQ ID NO: 158203 - DNA, 350 bp, Glycine max
cagcctgccaaggtagacgcggaccttaacgccctactgaaggagttacactccacgatggaggatttctagttattggcatccaaagagagggaggctaactacgaatttgaataggagctgcctctatacacgaacgacgttgtctagtaaccttaaaaagggttgcacaatgcttgtatgcaagcctggtttttcgacaaagaccttgtgttggctctttttaaccctttctagcacgtgaatgatggcgttctacttatcaacgaagatataactgctgaggaggagaccacccacgagtacgatgttcgggccaatgtctacgccgaagattacattcttttttt

SEQ ID NO: 158204 - DNA, 478 bp, Glycine max
  unsure (1)..(478): unsure at all n locations
tgactntgcgagtcgatcttagtcttagttccactttatttattagtcacatacgattaagaaagagaaatcccaaagagaaacgtccgatcgattcttttgctttattttactaaaagatatcttttttgattattatattattattctacctctttttggtttccaacgtggttacggcatgaccgaacggtcagatttcattttaacagaaattaacggatattaaaattcaaatgatcggtggaaatttattttatttattgattaggcgagaaaataacttaagtaaatgactaaagcacgtcaaaaagggtacggaaagtaaatgacaatggaaataaaagtacgcgaaacaaatggggaccaccaatggtacatagaatgaatcgaaaagttcagcttcgggaacttaccggttgaagaccgaagaacacgaagaacgaacgaccaacgacgaagaacggtcgaacatctt

SEQ ID NO: 158205 - DNA, 471 bp, Glycine max
  unsure (1)..(471): unsure at all n locations
tgagatcgtacaagtgaacagcgtaagtcgatttccattttatatgttctcgcttcttacaccaactatgcattntctttaaatctgaaaaattctgactattctatttttttattaattcaattatccacttcctggaccttgtctatataattcaataatacatttagtaaacttcctctgtgcttcaattatctatttcgtaaacttgctctgttaattntaattntcttattaagtacaatgatggcaaatactttgtgctacaactaatcatttcataaatttggattctagcaaattcttattattgaaaatatgcagacctatccaatacagcgatgacagatactcttggtaatatagaaatacaagaaatcgagtccattaatgtcatgctcatggatacaccaattccatatggggagggtatgccaagagatacttcacatgatgctgaagaattgaata

SEQ ID NO: 158206 - DNA, 372 bp, Glycine max
  unsure (1)..(372): unsure at all n locations
ctaagcttaggactgagaacctatatcacatcagcaacgccntatttttatgagctctctacacnccgcgagagagaataattctacgttctgcacttccacatcttactattcacgtagcactaaaattcattttctgcttcaatctgcaattttgttttctactgattaatggaacgctaagtctccagcgttgttttctcttgaggatcaagcacagctctctctgacgttttattattactatcgaattctgatcagttcttcctctttaccaattactctgcacttcatgctattaatctatgcatgcttaccgcttgatcaattctttctgcacctaatgtactctcatgcttaacgatcagctcc

SEQ ID NO: 158207 - DNA, 417 bp, Glycine max
tattaataataataataactatcatgatcatgctcaattctatttactataataatactaatcctaaatgatagtcttcttccctctatggctaccatttatcattaaccatgagatatagaagattattattgaatgaaaaaattgaggttttttagattcttaacctccaatattcttatgaatcaaccacccattaaacccttatctcactttgtctatattcttatcggtcaacgagttgttatcctccctcgccgagtcccatcacccaagctacatcaaggtggcaaaacaagtcagtttatcttaccaccaaccaacacaaaatgaccaacgctggtgaacctgcctcttctagatcaattgaatgttctagttcatcctatttaaggatggcctgacacgttcggcacc

SEQ ID NO: 158208 - DNA, 484 bp, Glycine max
  unsure (1)..(484): unsure at all n locations
tgatgccagatgaccaagttcctacggaagaaatcgcttattatctgcattatggtaatacagcaagcaagttgaacttatattctttttcagcataagatgaaaaaaaattgaaaaacttacttcaatggggtcaattactccatgaggaaaccctggagcagatccaacaatctgatttatcaccacagtcaatttcattttgacaagaagaattcaagttattagcagtttgcatacatataaaatcctatggcaagatatttgaatcttttaaaagaataaaaataaataaaacttcataccaagatggtatttttgttaatatgacgtcggatcgctttcacatcagcttggaaattcttgttaactggtacacgccatagtntgatattaaaatactgtgcagccttgtcatatgccgagtgcccagactcgggaataatcctataatctaatgcgttgaanatatattacaaaatat

SEQ ID NO: 158209 - DNA, 326 bp, Glycine max
cagctctaagaataatgggcttatttatctttttatttccacaaggaaattttatccatagacctctaatctttaatggagagggttcacactactcgaaaacccgaatgcacatttttattgcggcaataaacttatattttggaaggcatacaaatagggccttatatacccccccagtgcaaataatccccatagatgggagcaccacaagtggaagcaccacaatacaaaaacctacagatagatggtctgaagaggatagcaaatcactcctattttatttaaaagccaacaacataattaccccctgctctgcgaatgga

SEQ ID NO: 158210 - DNA, 437 bp, Glycine max
  unsure (1)..(437): unsure at all n locations
tgaagaggatgctttaatggaggaacataaatttagattgtgggagcacgaaattgaaggaataaaagagggagagaagtacaactctgaagtgtatctcataagactttcattcatcaaagttacaacaagtgttacacatgcttctatttatagactaggtagcttccttgagaagctttcttaagaaaacttccttgagaagcttctttgagacagcttccttgagaagctagagtttagctacacacacgcatctaanaaactaatcttacctccttgagaagctagagcttagctacacatacccctctaataactaagctcacctccttgagaagagaagctagagcttagctacacacccctataatagctaagctcacccccatgacaaanaacatgaaaattcanaaagatctactcaaagactactc

SEQ ID NO: 158211 - DNA, 55 bp, Glycine max
cacccaccgccccatcaccacaccaaacacaaaaaacgacacccaacccctacca

SEQ ID NO: 158212 - DNA, 354 bp, Glycine max
cagcttcaaccaagggagatggaccatttatgtttttgaaagaatcaatgacaatgcttacaaagttgagctacctggtgagtataatgttagttccaccttcaatgtctctgacttatctctttttgatgcacatggagaatctgatttgatgacaaatccttctcgagagggagagaatgatgaggacatgaccaaaagcaagggcaaggatccacttgaaggacttggagaacctatgacaagggctagagcaaggaaagccaacgaagctcttcaacaagtgctgtccatactatttgaataccagccccagtttcaaagagaaaagtccaaggttgtgagttgtatcat

SEQ ID NO: 158213 - DNA, 455 bp, Glycine max
  unsure (1)..(455): unsure at all n locations
ctgtgtaatcgattacactaatttggtaatcgattactattgtctgtgtctgaataaatcaaaagatgtagctcttcaaaaggtttttgactttttcaaattagttttaagtctttctaaaagttataactcttctaaatgaccttcttgaccagacatgaggagtctataaaagcaaggctctgttttgcatttcgatatcaattcattctttcttcacattcattcaatcaatcctttacaagccttgaatctctntgttcttcttcttcttctttggaccaaaagctttctgaagttttctggtttttcaaaccttgaaaactcgtgctattcatcttttcattctcttctcccttttccaaaaagaattcgccaaggactaaccgcctgaattcttttcgtgtctctcttctcccttttccaaaagaacaaaggactaaccgcctgaattc

SEQ ID NO: 158214 - DNA, 276 bp, Glycine max
gctggacaaatcaccgaacggcaacaactccaaccgcatgcgatatccaacgagcacatgaactatagaaccctgtcactaacgaagcgatcttagggataaccacacacacgaatataccaggcacaaaagcacgaattcgttatgacgatcctcaatatacgacacatacatgtgagactgatctcggaatgtatcacactatgggcttaccctccagggcagtttcaaccaggtggaattttaaacaaacaaactctacaacagagaacaacg

SEQ ID NO: 158215 - DNA, 359 bp, Glycine max
cagcctgcaagctttacgagaaaccatcagcactaatgtattttcctaaaccaaaatcacttgacgaaacctccccctcaatccccattgaaaaaccttttatcaaacctttccaaggttgcgagaaggctcaaacaaaaatttgcgacttacaacaactaaatccttaattgaaggcgtatgtcgaccccatatcgaattacaaacaagattggtagtttacctaaagtcattccagataccccccaagtctccgaaaatacttccaacatggtaaccagacgcccctcaaataatccatgtttctaatgaagatagtgaccacaactcacataacacaactgacatacgattagtgt

SEQ ID NO: 158216 - DNA, 450 bp, Glycine max
tgtagactctgtacaagaatgaagctctgataccactctttttattagtggcctcagatatcttaagaagggggggggttgaattaatatattccaaactgtttcccctaattaaaaaaatctatttcactttttactcaagttatgaattccctttatgacaatcttcttaaatattaattcaaatgaagcaacttgaatatgaatataaagcaatactaaataaaggagattaagggaagagaaaatgcaaactcagttttatactggttcggccacacccttgtgcctacgtccagtccccaagcaacccgcttgagaattccactatcttgcaaattccttctacaagttctaaacacacaaggacaatgcttcctttgtgtttagaaattctctacaacaagagactcacagtctcttaatcccttagagaatgagaagaagaaa

SEQ ID NO: 158217 - DNA, 481 bp, Glycine max
cgggttgcaaaggatacaaccaagaagagggaatcgtctatgatgaaacctacgctccagttgcaaggttagaagctataagattgctgcttacatttggatgtatcatgaactgcaagaagcaagcttgtgttgcactttcaactactgaagctaaatatatagctacaggaagttgctatgctcaaagtctctagctgaagcaacaactagaagactttggagtaaaccttgatcacattcctctagaatgtgacaataaaagtgctatcaatctaacctaaaaccctgtcatgcattctaggactaagcacatagaaacaaggcatcattttcttagagatcatgtgttaaaaggtgactgctacattgagttcattgatagtgagcattaacttgcaaacattttcactaaactgcttgcttgagatacgttctttttcaatagaaatgaactacgcatattagatgcatcaagcat

SEQ ID NO: 158218 - DNA, 351 bp, Glycine max
agcttggaacatataaactgaattctttattttcttacagacttaatcaaaatatcagctggctgatcattataattaatgaactcagtggcaatctctttggacagtagcttcttccgaataaagtgacagacaatctctatgtgcttggtcctctcatggaagactgggtttgaagcaatgtgaagagtaccctgattatcacaatataacttcatttgcaccattttgcagaatttcaactcttcaagaatttgtctaacccacataagttcacatgtaaccattgccatagatctgtattcagcctctgcactagatccagcaacaacatcttgcttcttacttttc

SEQ ID NO: 158219 - DNA, 481 bp, Glycine max
  unsure (1)..(481): unsure at all n locations
tgtctaccttaagaaatcaggttcttcctaattatattatgccttagtacatagtgcatcttactgttaaaaatatttgcacttacaattttatatatgttatggaacgcttggaaatcctcctccgtcgcctttgcctgctaatcaggatgcttgcttaataataacaaagtgcagaccagaagctctgcatacacttcctgcgttgccaagaaaatagcttggcttcttctactacactacttttttcagattccttgtaattttattccaagagtatgcccaacaagttattattaataggctcccctgctttgattgcttttaatcctcagttgattgttagtgcttagctctactgagctttacaagattggctaagattntgttaaaacataagcacttatacaatgtangaaagctggagttgctgcacatgatgtccaacgttatgtcaaggaataagatccggctgcacaat

SEQ ID NO: 158220 - DNA, 239 bp, Glycine max
  unsure (1)..(239): unsure at all n locations
ctgcacgcctgcaagcttcatcagtgggcctagtttttagtttccctcgcaacgcgtcngtctttcgtcctgcacctataatacaaaacactcttcttccatccggtgctcggaacctccaccccactctaaatccatcgcatgttaacctctttatgtttaaaacgccacactccaccaccagtccctcacagcactaataactgggacccccccctcaacttcacccccaaaccacc

SEQ ID NO: 158221 - DNA, 412 bp, Glycine max
ctatgaaactcagcttgaggattatggggtacccatcacatgtggttctatgtggtggtcgggcgatggtgcacaacaagtgtttccacatccacaatgcgcgcataaacccaccatcccctgtagcccacctccaactgagctcacgtactcccacgtagcccatatcctcgtttctctcaacaccgggtccccatcaatcctcccaagctctcccaacatcaaagtaatacaacattcaaacagcacagactatcacagccaagaaaacagagcaaaggcagaaaactctgccaaaacaccaaccaaaatcacagcttttctcacttaaagaccccagtgacaattccttcgttccaattcgttaaccgttggatcgactccaaaattttactggaagtctctagtacat

SEQ ID NO: 158222 - DNA, 320 bp, Glycine max
  unsure (1)..(320): unsure at all n locations
ccgaggggggaaagccgncttatactggttctcatcagatagctgggcatcctggacaagtataaataaataaatacatgtgtgtgaatggtttgaggttatatggctctctacatatttttccattattttctgtgggtgttaacggaagaatgtgggaagcaatgcaagaattagatgttctggattgaacttgcatcaaaatataacaaaaaggaatgccttctttttttatgacaattttgtggatgctagaaaagacattatgacgacaatttgcctgagaaaagatcctgacatagatagtgtacttatgaaca

SEQ ID NO: 158223 - DNA, 296 bp, Glycine max
ctttttcaccctctaatgacaattgcatatttctggcctgaatcgcgggagttgaacccatctctcaataaatttttggcttcagcagggtcatttctacaagggcttcccactggagcatctattatactttctccatgtactgagtccttcataaaatattggaggagaacctgcccaaaatttggtggtaaggacaactggaccatagttcattgcactctctagtattcatataactcttccactggcatgctatgctcaaaaatcttttaatgtcgtggtcttgaaccagg

SEQ ID NO: 158224 - DNA, 450 bp, Glycine max
  unsure (1)..(450): unsure at all n locations
tgatcttgaataatctcgaagcaatgctggtgtgttgttttctccttgnattaatcttgaagcaatgcttaacctttgaatgtttgttgaagtaatcttgaaagcaactttgtttgattattctttggcatcatcaaaatcatgtattcatacattcacagttttcaacatgttatcttttcaaaactctttaatgtgtcaaaaatcaattctaactcacaaaatcatggtgataccatggagaatggaaggaaatatttgttgctttaccttcaccatgaaaaaattngattatttctcgctatgaatctaatccaagcacactattaatcatttaagagtcggtatcatgttgattaaagtcatgtttggattcttgttatattagataaaatcatgtggaggttccatactaatttattttcttaggtaaattggtcatgtttttgg

SEQ ID NO: 158225 - DNA, 387 bp, Glycine max
  unsure (1)..(387): unsure at all n locations
taccacagcctcagctgntgattacatcccccctgtttattcttttcnctgattcacaaaacttatgattacatttccccctttctcaagaaaattcaaattctcttgaatcatcaaaatcttcatgattacattctccccctttctcaagaaaattcttattcttctggtatcatcaaaatcttcatgattcacattctccccttttgatgatgacaacccctgtggttaggagcaacacaaagaaaattctatttgctatagtcactcccccttggtttacaatgattgctatatgagacaatggaaattctttttttcaatataaaagggctcataaaaatcgaaatctgctactattatattttatcttcctcccttggcaca

SEQ ID NO: 158226 - DNA, 432 bp, Glycine max
ttagaatctcagctcaagtctgcttaatataacactctttagtatagtattttctttattgcttcctgctattagtgcaaaccattttgctatgtttcgtgttttttgttcgtgttgtggttttgagtttgaaaattgaacggttgtgcttagctttctgaactttatagtatgttgttgatgttggatggcactatatcacatgaatgcattttggtttgcatcttgttgcgtttgcaaggggttgtgaagcgaattaataataaataaaaacaaatgctttctctctagctccctttgtatatttattgaaaaagtatacaactattatagagtatcttcaataatacttgaaaaattaagtattatatataacaaatatttacaataagtgacttaaatatatctgtagttcaaaaattttactgtact

SEQ ID NO: 158227 - DNA, 227 bp, Glycine max
  unsure (1)..(227): unsure at all n locations
caggttagtctctttcaaaatcttattttaanntcaactcgggggattggatggctgctactactaatctcagcggggagaatgttctcttcgcgacgaggaccgggactacgtataaggctgatcttccggatgggtccacactcgcggtcatccggttgatagcgtgttagaatcgggatacgcattttgggatggaaataattccgctggggcaatgttacgca

SEQ ID NO: 158228 - DNA, 464 bp, Glycine max
  unsure (1)..(464): unsure at all n locations
actaagcttgacacaatntattggngagttgattattatagggtctgtataattatattagatactattccaaacaacattaaaattgagagagcaaaaacctagtcagaaatgagacaaaattgtcaaaagtccatgacaaaattagtagacatgttcatgggtgagttaaaggctggcaaaaagaattggacttgttgggacaatttattttttcctgttcttttagtgggctaggttaaagttttcaacccatcaacttactttgacccatcttgtttcgacttaacaaacaaggattgggataaagatgggacgggcaacctatcaatctattttttattaaaaaaaataaatttaatatttaatttattttttgtttaaataaattattactcaaaatacaaggtgatacattcaattnttaataagtggccaaccagaccaaatcaaagtatgattct

SEQ ID NO: 158229 - DNA, 305 bp, Glycine max
  unsure (1)..(305): unsure at all n locations
aaagaagtttttgaatgtaaaaacgccccccctttcgtcattcttataattnggtgcaggggtggctcgcccaggcgagctaacctgcacatattttatattatnnnnttttttttttgaggggaacattaaccatgttccctcccttctcatggattaacancttgcctaacttgaacttacttaggttagaattaggcgttgattacttattcttacnaatagtaaaagaaagctgcaaaatacaaaggatgcggggctgccttgcagcgacattcttttcttgtctcgcgcagagaatgggc

SEQ ID NO: 158230 - DNA, 302 bp, Glycine max
ggcatgcaagcttctaatttcaatatctattccaaattccaattattaacatctgggtcattaatgagttgaccattatttgaccagagaatttcctctgaaaatccttattctttctagactttagcttaaaaacttaacagtttaaccatgcctaggtatcctatggaaacatctaatttttaccatttcatatgtcaaaaacactacccaatcgcacaaaaaatatatcattgtttgaacgccctaactttcaataataaaatgatgttggcgtattcttgtgtattcgatacttgata

SEQ ID NO: 158231 - DNA, 450 bp, Glycine max
  unsure (1)..(450): unsure at all n locations
gtgcgccaaaatcccaactcaccatagaccttgacctgttatgagaattnccatcctcgccctcggaagaaaacaaaatataaagaataagaaagttcccaatcaaagatcggtagaaaacaaaatagaaaaaagttcccgatcaaagatcggaagaaaacaaaagagaaagaaagttcccggtcaaagatcgaaagaaaacaaagggaaaaagaaaatccctgatcaaagatcggaagaaaatgaaagaattatacataagggtctntggaccagacaaatatccaaacaatatagaatagccacaaccaaataaggatagaaaggaaaccatgacttgaagtggtcctctccctttggttgtcgaccaaaatcctgtgcactagcaactttctcaccccgcactaaacaataacagataagggaaagaccaaaacactccgagccaaa

SEQ ID NO: 158232 - DNA, 450 bp, Glycine max
  unsure (1)..(450): unsure at all n locations
ttctaaaggattgaggcaacagaatcctttggtaccattcttgttcaatgtggnggcaaatgggctgtggactaatgagagaagcaataaaaaaggatcttttcactagcttcttggttggaaacaatagtactccaattaacctccttcaatttgcggatgatactattttcattacagaagcctattggagcaatgtgttgacaaataaaagtatcttaaggtgttttaagatggctctatagctaaaaagttaatttctttaagagtagatttggttctctttgggtggacccacacattgttatgaggtacgcaaaatttctaaattttaagttactccaatttccttttatttatcttggtcttcctgttggagttaatcttaagagagtgaccaatctgaatccaattgttgaaaatatgagagaagatatctacatggaatga

SEQ ID NO: 158233 - DNA, 291 bp, Glycine max
  unsure (1)..(291): unsure at all n locations
ccccccccccccccccgggggctgtgactgtatccncgggaaacccccgcgaacaagcgggggcaaacatgtcacagccctaccagggcggacaccaagggggcccgacacacacgccgagaagcactgaagacgcaggaacaaacgtgtggagaggaaatccccaacggcccacaaacatgcggaagggaggacaaaatgaaacgcactaagaaggactcagacagagcaacctcgagagcaaaagacgagcgggaacagctcgcaanaccaggaacgacacacgcacac

SEQ ID NO: 158234 - DNA, 348 bp, Glycine max
tgcaatattgacaggccctaccaaagactgtattcatgctttatctaacatgctgagttggatagaagtgtggtgctcacttcgaggggcctaaattagtaaaaggacgtgcttccactctgaatgatacttcctcataaaaaacaaaccattcattttgagggaataaaaggagaacaaaattagacaaagaaatggacagagaaagacactcaggctaacgatggtactaactaagcctcgggttaaacagcttgtgtccatgtgaatgactaaacaacagtagaagatgtcccatctatctaattgatcttagaatagaaatggcattacctgaccttctagaca

SEQ ID NO: 158235 - DNA, 324 bp, Glycine max
  unsure (1)..(324): unsure at all n locations
gccaatgctgatggtatccgttgaaaatattgataaagaacatgaccaccctagcgcagacatggagtgttctatccttctctaacctaattcctacctcctatacttctgatgtcaccctagatagagccaaaactcattatggcatcatcatgaagatggatatgaattggggggacctcannncccaccagaacnccctcatagcacaacatgacaatccatacttgganatcgngcctagacacagctttatataaggctagggagttaatcatattcgaggccctagagagctgagttgacattaattggcattataag

SEQ ID NO: 158236 - DNA, 457 bp, Glycine max
tgtagggttaaagtctcatgattgtcacgtgcttatgcaacaatttgttagccgggctatacgagacatcttaccaaacaaagtcaggttcacgataactcgcctgtgctttttcttccatgctatatgtagcaaagtgattgatccagtaatgtttgatgagttggaaaatgaggccgcaattatactgtgccagttggagatgtattttccccctgctttctttgacatcatgattcacttgattgtgcatctggtcagagaaatcaaatattgtggtcctgtttatctacggtggatgtacccgattgagcgatacatgaagatcttaaaagggtatacaaagaatctatatcgtccggaagcatctattgttgagaggtacattgcagaagaagccattgatatttgttcagaatacttatagaaagctaaagctgttgggctttctgagtgt

SEQ ID NO: 158237 - DNA, 364 bp, Glycine max
  unsure (1)..(364): unsure at all n locations
gcgcatattgggcgacgaacgttctctntcacaagtttttctatgaactaagaaaaatgcacccatatacttataaggcagcttcgttacctagattatatacacgtacttccaaggtgaatttgttacttacatgacacacatttccttggctaaattccatacatgcatactcaaagcattttgtggtaccaaaaattgcacatgtgcacatcttggtatttctaatacctatacatacacaaacttcatgatgaatattgtctatttacacaataaggggctacaatccatgccattatcaagtgttatcctacctaaagcacgatgcaaattcaagtgattttcccttgctgactaaatt

SEQ ID NO: 158238 - DNA, 459 bp, Glycine max
  unsure (1)..(459): unsure at all n locations
agaatacttaagctntntatcattaatgactatcaagaggtacaatctttcgacttcatctcatgtcataaagtcaaaaatgcacaaattgaatcataaggacttctattggcttgtaatgaggctgggcaacaaaaatattggtctttccaggattcaaaggcttaaatgctaagagagcacaaatcctagacttaaccaattagtctttgtaatattcttagctttctcattagcctttcacttgacttgttctagcaacacacacacttatttgaactcttttctattttttttatttatttttcgagtgtgttgttgcttcttacctttaaatattaaccatctaatagacttccccaaatttggggtgaaattgtcctacgccaatgtgccctctggaaacctaatcaacgtaaataggaattacacttcaaggttcacggctcaatacaatta

SEQ ID NO: 158239 - DNA, 409 bp, Glycine max
agcttaccctgtagttaaaacatgaacactcatttcaatccctgatgcaagttttgacctcgcagctccagtgcaattaccttgttatcttatatgaaatgcacatgtgtattttcagtacccctggttctctgcatataatataattatctatttttgctgagcaaaaaaaaaaaaacattttttcatacttactgacatgattttcattctgtttaatagcctgcacatttgcatcctcattttataaattgcaagaatggtgttcatattaataattcgttttctaatattgttcaattctggcagatcaagccactttcagttcgatatggcctaggtatatcagatcatgatagtgagggtagacttgtaacggctgagtttgatacattttattcgatatgtg

SEQ ID NO: 158240 - DNA, 453 bp, Glycine max
  unsure (1)..(453): unsure at all n locations
tggagttnggacanaatcttgaagatgttttgtctattacatgctcaactcccttgagtggcatttgtattgattattatactgaattntgcatcttagtccatatcatatcttntgtgcatcatgcattatcatgagtaagttagaagaaaaatttctaagttagaaaagtctcttcagaagaaagaactctntgtttagatcaattacagccttatcctaatcaattacacaaattgtgtttacatcgattacagccttattgtaatcgattacacaagttgtctgaagcttgtagagttatgtctcatatcgatttaattgattacagccttatcattatcgattacatagtttgtnttgagacaacaactannattattagtctctgctttaattgattaccatatgatataatcgatcacttctctttctataagtgtntcaaaagtg

SEQ ID NO: 158241 - DNA, 319 bp, Glycine max
  unsure (1)..(319): unsure at all n locations
aggcatgcaagcttttngagaaaaacagttggactcgataggatgcttctgacaccgagttagcaagatagaatggcaattgaaaatgtgtataataataagcatgcggggttttgatggcttggaagcttagttgatctacaaaagatgggaccactcaaattttgctttcaaacaaaataaatattgtcttaaattctcaacttttaaggttaaaaggaatgggtaagggtgtttctttccaaagcctacacatctctacgggttacaacattgagaaatcttcaaaaacaattgaactctattttttttaaagatg

SEQ ID NO: 158242 - DNA, 447 bp, Glycine max
  unsure (1)..(447): unsure at all n locations
agaagaagagagcgcaagcaaaataaggctatcgtctgttattntaaaangnaagtccaacattggttttaaataaaaaaaccaatcttaacaaaatgatgttaacgttaacatcggttttctggaagaaaccgatgttaacttatcatacattaacatcagttttctgaaaacccgatgttaacgagctgacgttaatatcagttcttcaaaaactgatgttaactaattaatgttaacatcggttttcccagaaccgatgttaatgttagttcattaacatcgagttttcaaaaaaccgatgttaacggatacgcattatttacaattatgccaccatgtttatcttaacatcggttttgtcaaaaaccaatgttaatctggcgatgttaaatatgctttttgtagtagtgtaaactgtttagcaattaatggtcaatatcttgt

SEQ ID NO: 158243 - DNA, 464 bp, Glycine max
  unsure (1)..(464): unsure at all n locations
cctgaggcatgcaagcttatcctgctcttcagtgttaacttccgggtttgtaccttctggtataacaatatctacttcatctntttctttacttgctgactcacgaagaggtctctcagcatagttaattagtaccagactcattattctgcaaaccaatgaaatatttcagatatatctaaaagatttactgaaacatcatgtcaacacaaatgatgaaacgtgataatgactaatgggcatataaataatgccattttatgtttagacaaaacttagccacaattcctcaagcaattgtatgttctgcaatcaaaactagagtttacctttaaataacaataacaaaagttggcattgaagttcagcatatattaccaaagtaaaactcctattctaattgagagaacaacaccaatattactttaaaaagtgtatactagcttaaatacaaaatccctaat

SEQ ID NO: 158244 - DNA, 445 bp, Glycine max
  unsure (1)..(445): unsure at all n locations
ggggcatgagctcngataatcgaatcatntccttaattattttattccgagcaaaaacgagcaaaatgttctttaaaatttgatatagaagaaggctatgcaaaccaaataactctaagggtatgtgtggttaccttaaacttcaaatcttcttgttccatttccagagttgttatcctattctttaggtcctgtagggcttcctcagccatagaaggatttacatctgatattggtcttactattccagccacctgaaaataaagcataaatgacgttttgtttaaccaaactcagactctgtttattgcattggagaggttggaaggcaagaaccataaataatattgtcctaactaacctttagaacattagtggacaatctcagtaattgctgggctaattgactttctcttcctcatctcctgggcatattacacatgat

SEQ ID NO: 158245 - DNA, 423 bp, Glycine max
agcttctcccccaattgtctataaatagggggagaatataagtgaaaaagggttcagccccttaggcacttctctctctttcgaatctgcttggaaaaattgtttccgtgaagaaaatccaagccgaggcgcttccgaaacgtttccgtgaggaatttcgcgaaggtttcgaccgttcttcgacgttcttcatcgttcttcgatcttcaacgggtaagtacctcaaaccaagcttttcgattcattctatgtacccgtggtggtccacattgtgtttcgtgtattttattctcgtttcaattacttttatacccccttttgacgtgcttaaccatttatataagcatttctcgcttaacctaaaaaaaataatttcaccgatcgtgaattgattatcgtacctcggtaaatgaattcaccgtc

SEQ ID NO: 158246 - DNA, 440 bp, Glycine max
  unsure (1)..(440): unsure at all n locations
tccataatgctatntatatttatatactatgacaacagttatataactatncataaatgcgtgtgggttaatttggtaagaaagaaaattttaaaaaataatagttgaagcaggaattttaaaatctacgtgtacaactgcgaaaaaccagaattccaacaaaatattttatattaattttaattataaacatatcttgttattttcactttatattttgttgtcactttgaaaataataaaatgttttaaaatcagaaaataaaaaataaaaatatttctttaatcattaataaaataatagaatatgttttcaaactagactgaccgtattctttggatttccgggtatgccttctaaaatagctatataattaaataattaactctctatgacttanagaatggaccacttgtgggtgcagacagttctctgcgtct

SEQ ID NO: 158247 - DNA, 336 bp, Glycine max
  unsure (1)..(336): unsure at all n locations
agcttttcgattcattctatgttcccgtgttggnccacatngngnntcgcgtatattgattctcgttttatttactttttatacccccttttgacgtgcttaagccattttatgtaactgatttctcgcttaacctaaaaataaaataaattgccaccgatcatttgaattgtattatccgttaactcgggttgaaacgaattccgaccgttcggtcgtgccgtaaccacgttggaaataaaaaaacagggtaaaataataatataataataaaaaaaaacgtcttttagttaaataaggcggaaaatcaatcggacgttttctctgtgggatttc

SEQ ID NO: 158248 - DNA, 445 bp, Glycine max
  unsure (1)..(445): unsure at all n locations
tctcaagggaagtttctcaagagagcttctcaaggatgttttctgaagaaagcttctcaaggaagctacctagtctataaatagaagcatgtgtaacacttgttgtaactttgatgaatgagagtcttgtgagacacaactcagagttcaacttctctccctttttcttccttcaatttcatgctgccccctctctctttctctccctctttcttttcctccaattaagcatcctctccaagcttcttatccaaggctcatcttggtggtgaagctcattcttccatggcttattccttagtggatggcgcctcctctcacctcttctcctttgtcttccgctgcatctccatggtggaaaatcaccattaaaggacctcattgaagctcanagatcctgcctccatagaagccccacaagccaaacttcatcaagtggtaatca

SEQ ID NO: 158249 - DNA, 433 bp, Glycine max
  unsure (1)..(433): unsure at all n locations
tatgttggagcggcacgacaaatgacagaacttaagagttgccaacgngacggagttggatgctagctagggcacagagaacacgtacgttgtccgggatgagtagtgaattcaatcacctagctacctggtcgcaaaagaatgaaagaacaatcacatgcctcacgtgcaagcactaaccatagaaagatggttttcgggactagaccgtctttgtattgtaataaaataattacaactttgccatcacatgcaattcaatgatgagtttgcggaaatgtcgctgttgtcttcatgttaattacaattatgccaccaccgcactttctaagacggttctttacaaccttcttagaatcaccgacgtaattaacacattntatagtagtgctaaataaatagcaagacaaaactcaacgaaacctaaactcaa

SEQ ID NO: 158250 - DNA, 345 bp, Glycine max
  unsure (1)..(345): unsure at all n locations
ccgaggcatgcaagctttcacactgcaacattcaaataagttttngctagtttcccatactgaagtcctatctactttctatatcatccacggggatggtgttcatgtcattctttgtttgatcattctttggagtcataaaaggtgtgcctctgattgctttcactgccacaacagaagattatttatgatatcccctatctaaatcgattggatgactcctcctcttctttctctggcatgaacagttgttcttcttccaaactcaggtttatttaaccttcccaccactattggatttgattccagctagacatggatataatatcctacttttattcatat

SEQ ID NO: 158251 - DNA, 452 bp, Glycine max
  unsure (1)..(452): unsure at all n locations
tttataaattaaattgggcataaattaatatttattattataacaaatttntatgtgcttctcctattaaacatatatttaacaccacaactgaattctacttcaagtcttcaaaccagccaatgttggtttatcatgttacattgtcacttatattatttgatatatattttttattctttttcggaattataaactcataatgacgatgttttttttggtagaataatgatgatgatttgtttggggcccttaatattttgatatttttatttttatatatataaaaatattcaacaatactattctgcggctctacttttgtttcctatcacaaggacacgtggcacgtagttttgcaagctntcgtatacttggtcgcaaaagataaaaaaataaaaaaagaaaaagcgcgtttcagggtccacatcctatatatgcagccttttcca

SEQ ID NO: 158252 - DNA, 363 bp, Glycine max
  unsure (1)..(363): unsure at all n locations
agactttgagtgaaaggatgtnactctttatatttaaatnngaatttcaacgntcaagggcactggtaatcaattaccaaaacattgtaatcgattacagcctttggaaattaatcggaacgttgtaaattcagtttgaaaacttcttcaaactcatgttgctactggaaatcgattacaacattatgtgatatgatttccaaagagttaaaactctttggtaaaaggttttgacaaaatctcatgtgctattcaaagttatgaacagctttttaatacttatcttgattgagtcttttttttattctggaatcttgacatcgattgttgagatcttgaaccttgaatctgattcttgaatca

SEQ ID NO: 158253 - DNA, 387 bp, Glycine max
  unsure (1)..(387): unsure at all n locations
tgtgcttntacgaaaaggttcatggagtcaagttgaagtatggaagtaaccatcttgcaaatattgtggcaaaagatggatcgtgttacatcgttgcttcgtctactgccaaacacatttagggccgtcgatgtccctgttacttccagtttcaccttgacgaagatgtcatggaccatgttgaaaatctaaattgattcaaccccatatcctgcgtaaaaattcgcaatacttcagctgtgcatcattcgcatacatccatgttgttcattggttgcattgctcattgcattctntccttaaaaaaaaaaagaacttaatcattgttataaaaaaanaacatgatttacggtgccctcatcgaacctgtgctagagctagagtaag

SEQ ID NO: 158254 - DNA, 322 bp, Glycine max
  unsure (1)..(322): unsure at all n locations
caagttntagngactgtttgaccacaaattttatattgaatgtgggggtggatatgtgctatgattgggtttgcataaatttctaattggcataacatatgattcatggaaatgatccgggcattttttctttctatgacattggccaaacaactgtcccaatatacattatttttcgcatgtgcaagccctttgaggcagacacttgatttttatcacaacactaacctaggatgaaagtttcctaccttaccttaggataagagaggaggagtgctttcaagggagacttcttatcattttatgggtagtcctggatttt

SEQ ID NO: 158255 - DNA, 440 bp, Glycine max
  unsure (1)..(440): unsure at all n locations
tgggcanancagancactccgacatgtaagtatctttcatgcatgaaccttctttacccactcctcacgtgtggttgtttagggaaaaacaccataactaaacgcgccgcaagggatccctatcgcaccagatccaaatctagaacgatgggtgatcaagaggagacgcaagaacagatgaaagccgacatgtcggctctgaaagaacaaatggcctccatgatggaggccatgttaagtatgaagcagctcatagagaagaacgcggccaccgccgccgctgtcagttcggctaccgaagcagacccgactctcttggcaactacgcaccatcctccctcaaacatagtatgacggggaagggacacactaaggcacgatggcagccctcacctgggatacaaccgagcggcttacccttatggattgccgcccaacta

SEQ ID NO: 158256 - DNA, 400 bp, Glycine max
  unsure (1)..(400): unsure at all n locations
cccaccnatgctgcagctccaaaatatggcctcatcaaactatttgttcccgagtgaaattctaaaacagacctcccatctttaatggagtgggttaccactactggaaaacccgcatgcaaatcttcatagaggcaatagatttaaatatttgggaagccatagaacaaggaccttattttccctctataatagccggaagtgcaacaatagaaaaacctatagcagattggactgagaaagaaagaagattattcaatttaatttaaaggccaaaaatattattacatatagcttaggaatagatgaatactttagggtttcaaattgtaaaagtgctaaggatatgtgggattcactacatgtaacacatgaaggcacaacaagatgttaaaagatc

SEQ ID NO: 158257 - DNA, 443 bp, Glycine max
cgaaggtgtgtagcccaccatcttttcatagtagaatactgtttatgcgtctactattattgtcatcattgttttttctccgtccttgaggtgccacttgagctgccaggtctctccacctttgggcgtattcttttgaaggattcgtgccccctttttgcacatgttttgtagttgcatcctatctgaagccattatactgacattgcctaacgaaggcaaccattaggtccttccaagaatggactcgggaaggttccaagttagtgtaccaagtaacagctaccccagtaagactttcttggaaggaatgtatcagcaattcctcatcttttgcatatgcccccatcttccgataacacatctttagatggttctcggggcaagtattccccttgtacttgtcaaagtccagcaccttgaacttgggaggggtgatgata

SEQ ID NO: 158258 - DNA, 435 bp, Glycine max
  unsure (1)..(435): unsure at all n locations
agcttgtactcgtttcaacaagttatgcttatggatatagaaccatgctcattgaggttctaattngctacacgacaaatgggtttccaaagggtactactgttgcagcttatttttatgcaaaggctgtcacgcaaatccatcaatcatgaaatcaatccacagtttggaaaccatcatcgtagtggatatccgtaaaataagatgaattgtccaaccgtggaacgtaacaaaacacatgcaagtccttttatgctgtgaagaaaaaaattcaagtttgccgcagtttggatccaatatctaaatcttgatgtatgatacttttttgcattatagtagttaatttaaaacttcaatttaatttcaatgcggaaatgaactgttttttataactaaaggagagatccttgtgtttcctgatttataaaattttac

SEQ ID NO: 158259 - DNA, 396 bp, Glycine max
  unsure (1)..(396): unsure at all n locations
tatttagcatgtataataaatatttatttatgcattctcatggtgtgttttcgtgtgttatcatgcatattttattcttatagtgcgagattttctccaacaattatttattccttgatctatcaatatttttttttaaaaaaatactcattatatttgaacaatgagtataagcaaaaatattttccataaatgagtctaactcaattgattaggagcgcaagagttattataaattctttaatactatctttgtttttctcaccgataaaaaaacaattatttttctattatatttcattatacactacaatgtataagcaatatataatgaagataacgacctttcaatttcactataccctacanatacatgnttaggctaatcccaaataa

SEQ ID NO: 158260 - DNA, 440 bp, Glycine max
  unsure (1)..(440): unsure at all n locations
gcangcaagcnncnaaactnnatacattaatgnagtctcttataccactngttggacaagtggcctcagatatcttaagaaggggggttgaattaaaatattacaaattatttccccaattaaaaattctatttaactttctattcaagttacaaattcccttaataatgaatttcttaaataatgattcaaaagaacaatttcaatatcaatataaaacaataataaataaaggattttaagggaagagaaagtgcaaactcagttttatactggttcggccacacccttgtgcctacgtccagtccccaagcaacccgcttgagagttccactatcttgtaaattccttttacaagttctaaacacacaaggacaatccttcctttgtgtttagaatcctttcacaacaagagaccctcggtctcttaatcccttttc

SEQ ID NO: 158261 - DNA, 445 bp, Glycine max
tgatcaatttcaaaagaaagatgttcggaagttattcgttctatccaaaggaaagaaaagtgttggagcaaaatgggtctttcacaacaaactatatgaaaatggtaaagttatgagaaacaaagcatggttagttgctaaagaatactcacaagaagaaagtatagactacaaagaaacttatccacctgtagcatgtttagaggcaatacatatcttactttcatttgcagcttataaaaatatgaagctatatcaaaaggacgtaaaaaatgcatttctaaatggcttaattcaagagtaagtttatgttgaacaatctccatgctttggaagtgaaacctttcctcaacatgttttcacactcaacaaagccctatatggacttaagcaagctcctagagcttggtacgaaaaactaagttcatttctcttgaaaaatggc

SEQ ID NO: 158262 - DNA, 424 bp, Glycine max
  unsure (1)..(424): unsure at all n locations
agcttcatttatagtcctcgatcggtcatgtttcctggccgacatcgacagtcattgttttcgatcaatatcggtgaataatatttntttgccgagatgggctaatgttttcctggccgaataaatgggaacatgccagtttcgacccaaacaaaatgtcagttgagctcgcaaaaaaaaacctagccaacttacattgtaaattttttatgcaacaccaaaccaagaaaacttcctctgccgtaaaaaaaaaaaaacaatatcagccagcgagcgttttttaaaaaaaattgcgcaatgtctgctgaaaaatatcagtcggggctatttcacgaccgatgtcggtcaatgagttttttattcaatccctgaatgaaattacatcatgtcagctaggaaatgttcgatcggcgttctccgatga

SEQ ID NO: 158263 - DNA, 450 bp, Glycine max
  unsure (1)..(450): unsure at all n locations
tgtagaatggctagacatgatacatgtcagggctgggttttgttcaagggtaaaagggatgccccacattatttccatgacacaaatgcaaaaatgatgatttggaaattttatgcaaaactggtcatgcatgcacctatgcggacactcaagtgtcaaatttttatggtcatgtgatgctagggcttaagatttatttcctctattttaaatcaacccaatgtttccaaaatatgttcttttatcaatttgtgcattcattcgagtccatttcgggcgtccggggaaatttcacagcattcacccttcaggtgtagacacgttntttttctcttcaaaaatcggtcatgatcaatgannatttttttcgaagaagagttggaaatcatctcttttcaaaagcatgtncggttttagctagacaacttaatttctctttttccacctttt

SEQ ID NO: 158264 - DNA, 455 bp, Glycine max
  unsure (1)..(455): unsure at all n locations
tcccttctgttgtggagtgaccactcccgctgttagctcttgttcaagtaagcttcaacatcttctcaatggttcttggtttagcttatgtctgaaatatttgttgttgaaacatgttttgaagttgtagatcatggaaaataatgaatcctaaatagtactacactagttgtttaaggtgagaaaaatggattttgcttgttagggtcatagtgagaagggtgtgtactaaatatttagccgttaaatctggcctttaattaaatattggtgatgctaaaaggaatagatctgaatcttttatatactgtagcttactaataatgccttctatcctgctaccagtatgattaccttagctgtatattacattctggcggttgtatgttccttaagtatagagatgattcanagccaataatattatccttgcaccatgaccatgctctgtctgt

SEQ ID NO: 158265 - DNA, 441 bp, Glycine max
  unsure (1)..(441): unsure at all n locations
agcttccatcaagtggtaattagagcacattagcttcaagtaggtgctccttaaacctccattaattttttgctttaccttctcttccattgatgtttcttcattttttctccatgtatctcctcacatgtcttgtgctaaatgttgttaacatgagtctttatagtttccaccgattaaacttgctatagaagctagatttgattttctatggttcaaatttcttgttcttgttcttgaaccatgaattgtgttgagtctaggttcctttgagatttgtcttgttattttttgtggctgaaacctaaaccataaaattcttacaaaaatattaaagtataagaaaacctcaaaaatctagagtgacttgttcacctattgtagntntgtcatagaagtcatgtctagtcatgaaacttgtcacataagaatttcttatgt

SEQ ID NO: 158266 - DNA, 456 bp, Glycine max
  unsure (1)..(456): unsure at all n locations
tcttttggaccctgaacaagcaatcaactcctctgtcttaaccatgctatgtgctcgcgactggtccctttcttcccttcgcaacttgagttcattattgctaccccatagagctccgcgaaatttgttccggccatactcttccttgcgagccctcttggtctcttgttcaagggctcttgcggtaattgcattctcttcccgtaacccggcacactccttccgaacgtgtgtagcagccaacttgaacttctccttggcgagttttgcctttcctaactcgcttttgagagcttggacttcttcgtcctcttccggtgcttcaaaattctcttcgctgacgactnttaacttggcgagccaatctaaacctcgtatgcgaactttcagccattcgtggtacccaccaatgatgccattacgaatgcctctcagctcttgatctttcctaacggg

SEQ ID NO: 158267 - DNA, 452 bp, Glycine max
  unsure (1)..(452): unsure at all n locations
tagaaattttatcttaagattttcataggcatcatatgtttgagtggactcatctagagaaacatctactttgtcttgaaagactttttcaagttccttttgatctttggatagctttttaaaatctttttgcaagtttttgtaagctttttgaaagaatggacaagtttgataatatttcatgataggcttgtttaagagattcagtatcatcaaagtttacatcatcctcttagtttaatttagattctttagaggttgtatccaccatcagacacgggttggcttcctcttcatcctcgtcagataaggtgttgctcatgtcttcccacgtgctcatgaggccattcttttctttgaacttgtagtacttcttcttgtcctcagacttttctagttctagacatttagacttgaagtgtccangcttcatgcattcctagtatattatg

SEQ ID NO: 158268 - DNA, 288 bp, Glycine max
ttctctatatatatgcaacctcccgaattcaaactaaaataagacggaaaggaggtgtctttcactccttcacttctaagttggtaccagagcaggttcgttcgtcgaccgccatcgcgccggccgccggtcgccagccgccgccatctccggccaaattatttcggcgagaccagggttaggattgcctccaaaagcgcgacctacccctggaagtctcgcctccaaaggagccgccacgcgccttctttctcactcgcgttttccagatcgtgaatcccacgcgct

SEQ ID NO: 158269 - DNA, 408 bp, Glycine max
  unsure (1)..(408): unsure at all n locations
tcttaaatgggatcaatatattcattagtatagattgttggatgaagangttgcatgcgatatattttggagtgatcctgatgcagtcaaattatccaatgcctgtaatttggtatttctcatagatagtacctacaaagcaaacaggtattggttgtcgttacttgacattgttggtgtgacactgatgtgtcattattttctcctatatcttaacccttcttgtcactattttattacttattagccttaattgtcaaattaactatgcagttttatcattagggcctacttgactaattttgtgttgttaatataatttcaggagaattataagcaattgcgctcggatccggaattgtgctgaactggcttggacttgaagagagcagacaatcttcatttatc

SEQ ID NO: 158270 - DNA, 431 bp, Glycine max
  unsure (1)..(431): unsure at all n locations
agctngttggtgtgttgatttagtcttttttcacttggctatntccaaactcattaaaagtggacttgcaaagtaaatgaccggtttaaactttatttttcaatgattaaccaaggttacaacacaaacgatctgttgaatctttattttgcattgattaagtgagattacggcacaattaattcattgaaacttcctttacacaaagaaataaaattaccgatggttgaagaatgaagatgaatatgcgaagagcaagaagggaccccttcgggtgcatagaatgaattcacaacttcaaaactaaaaactaaccattcgatgaacaaagaacgatgaagaacggacggtgaacattgaataacgatcactaaattcgtctaaggaaactttctgaagccgcctttcctttattatttttttgtacatcc

SEQ ID NO: 158271 - DNA, 401 bp, Glycine max
  unsure (1)..(401): unsure at all n locations
cgggaggattganggngacccggagaagagagaaacgattatatgggctacgcgggagtacgtgagctcaactggaggtgggcaacaagggatggagggtttatgcacgcattgtggatgtggaaaaacttgctgtgcaccatcgtccgaccgacacctagtaccacatgtgatgggtaccccataatcctacaagcttgagatgaggaagtgttgaagggtgaaacttcctgcttttattgacgaccacagagtggtacctggagatatgtcgcgggggtgaagagaccttggggacgtcaggtggggtgctatagcccaaaaccaagcttgaccaatctcgacccaacccgagcatagtcggtcaaagagaacctgcgatgtacctaagcaggcgagct

SEQ ID NO: 158272 - DNA, 336 bp, Glycine max
acctgcaggcatcaagctaccgagctagtttcttggtcattcatcaaaatgacatatcatttctaaatcattcctagttcacaaaacaaacaataaaggttgaaacgttacatccaacaaaaaggtcattttgtaggaattgtagaaaattcatttctcactcaactcgaacgtattttatatggattcatataccccaaatgtttattttattctataattcttctttaagcttgtgaattctcatccagttctacattcaatttcgtgagacatgtcacatcatagaatttcacaaacactttgtgttcctaatctctattttcaaaaagaaag

SEQ ID NO: 158273 - DNA, 449 bp, Glycine max
  unsure (1)..(449): unsure at all n locations
ttgactntagtcatcaaaagattataaatatgtgtctatggcatgaatnntaaaagaagagatcaatcatctatatttcaatcttctctcaacatcattcaatatctttcaactctttctatagaattttctgattcttttactcttcatctttctaaaagtgtttgttcaaaactttctcttcctagaaaactcctttgttcaaaaacttgtgctattcatctttttcattctcttctccctttgccaaaagaatgaaggactaaccgcctgagatatcttntgtttcccccttacaaagattcaaaggactaaccacctgaaaattctttgtcccaacacattggagggtacatcctttgtggtacaagtagagggtacatctacttgtggattgttatactgagaacaagaaagggtacatctcttgtggatcagttcaagtggag

SEQ ID NO: 158274 - DNA, 453 bp, Glycine max
  unsure (1)..(453): unsure at all n locations
tatggaatgaattcaacgatccaaccaaaactttatatgaaatcataaaaaatgtgccgataggcatagataaagatcaatgggctcgttttgttcattatcgtcataaaccatccacattggtacaattagattattttaattattgaattgtttttatagctaattatatgattactattacaagttgtaaacttgaaattgctttgcatataggaactttgtaggggaaataaagaaattcgaagcaagcaagttattccacacactggtggatccaaagctaatcctagaagaagaaatgagttggtaatgacactaaatgttaacttttactaattaaaaaagttcaatgtttacttactntttatctatcttaagtgctagaaactgggaagctaccaagtcgtggacaattatatattgaaactcataaaaggaaagatggatcat

SEQ ID NO: 158275 - DNA, 264 bp, Glycine max
attttaaattgttgaccaaatattataagagcctctcaactagaaagtaagggataatgtcggctaggtcatcaacatatcttaactaaaaggggcagggtaaacatatgcaagagctttattcagtggttttataaactggcttcgctttaattcgcttcttcctcttgaatctcaaatatactatgagccttctcataaatccacttcgggaggtagcgtttccaattatgaagaataatatctctgaacatcttttttttt

SEQ ID NO: 158276 - DNA, 462 bp, Glycine max
accaccgcagcatgcaagcttaggcagcaaccttcaagcttgttcttgtctagtcttccttctgtggttgcgctagaagaatctggtggtggagaggatctcgagggtgttgtcatggttgcatacaaaaagaaaatttaatcaagcctagttaattatcccaacatacaagtctgaaattctaatgaaagaccgataattagaaattgataatgattatggacagcgcaaacaaaatttgggttatataccacattcaagtagcaatatcttcccataaaccttcatcatgatcgataccatttgcatatacatcatccttctcattttcagcatttatggaaggcatttctgtggaaaacaccgacatgtcattaacatcaacgtgttgaagcttcaatatcggcaggagataccagtgtttccccctgacaaccactgactatctccagtactgggatc

SEQ ID NO: 158277 - DNA, 452 bp, Glycine max
  unsure (1)..(452): unsure at all n locations
ntaaggtaacaacaacagntatagagacttaagaaaattattttaataccaacacaattcaattccaagtagaatctcaaaagaatgaatgaatagtatatacccattggcatggcggtaaacgtactgatcgtgagctggcttcatgaaatctgcaattcaaattaattaattaattaattattctcatcagaattaagtattaaccgaactagaatctgcaattcaaaatattataataataataataatatttacattgtatttacctggcataagagtttggttagttgactcagcattagcttgttcctcagcattctcattntagtcagtttggttagttgacttctggatcatgccagcctcctcatccaaatcaaggagatccaagaaaaaataagaaagctgcanaacatcccagtggaagcaaatagccatataagtatata

SEQ ID NO: 158278 - DNA, 416 bp, Glycine max
  unsure (1)..(416): unsure at all n locations
agcttnngcggattggtcttcgctggcgttatgatttatgtgggtctaaaaagaggcagatctgatcatcgtgttttgataaatgcaaaacaactgtggcaaatgaagagggtgagaatgtcggagaaacccatactgcgactgccattcctatacatccaagttttccaccaaccctaacatgttattacttaggcaataacaaaccttcttcttacccacctccttgttatccacacaggccatccctaaatcaaccacaaagcctgtctaccgcacttccaatgatgaacaccacctttagcacaaaccataacaccatccaggaaatgaattttgctgcttaagagcctgttaaatcaccccaatcttggtgtcctatgctgactggctttcatatcttctttgaaattcaa

SEQ ID NO: 158279 - DNA, 439 bp, Glycine max
  unsure (1)..(439): unsure at all n locations
tggcttcacatacaaaagtatgtaaaagtgcgtgactcaatggntccagcatgtcatcgagcccgtcgcctctagatgacaaaagacgtagaagacgacgttagtttctgcgtgctatcatgctttgagtcttatagataggaaaatggtttgggcccaaatggatcccgcatgtcatcgggccagccgcctctggatgaaaaaaggtgcagaagacgacgttaatctctacgttctatcatgctttgagtcttatagattgcaatagaaagtgtgggaccaaatggttcccgcatgtcatcgagcccgccgcctctggatgacaaaaggcggagaagacgacgttaatctctgcgtgctatcatgctttgagtcttatagatagcaaaaaggtatgggaccaaattggtcccacatgtcatcgggccctgagtcttat

SEQ ID NO: 158280 - DNA, 466 bp, Glycine max
  unsure (1)..(466): unsure at all n locations
ttagagccacctgttgcatgcaagctcgtcgggtccctacattggttctcatcacaatacgcgtcgcgcattaactcgtcgcccttaaagggtcttattattaactcattgtccttaaagggtcttatagttgtgtgattgcacaattcatagctcataactcaatgcacacaacgtctcaatgcacacaacatctcaatggacatatatattacaagtcaatacatactcaatttatcacatacactcggtctcaatcacaatggtataatcccaatttaacatgttatatcacacctcatgaatcatatacaccttacctatgaactatacaatacacacgactctttaattattttcaaaataattttatctcatcgcgcttgtgattaaactcgttgggtccgcacagtggatcccatcacaatacttgtcgcacaaaaaccccncgctcttaaaagatctt

SEQ ID NO: 158281 - DNA, 439 bp, Glycine max
  unsure (1)..(439): unsure at all n locations
ntcctttctgggttgatgacccattctgggtaggagacctctttgtatgatgtagcgcttttctggctattggctctggtagagccaatagaacctcttttccttctgtactggatttccctcctctgccggaggaactagacaccttaggaggcatcgggaattttctgtaaaaattcacgggtgaggtagtcaggtagagagttggaagagcccttgatatattctatattaaaatcaaagacacttaaaattgcttgccatcttgcaaaaatctgttctgaggcaaggttttttacatccttctgtaaaatgtctttggctgatttgcagtcaacccttaccaaattttatttatttaatagatcagattgaaattcggaaatgcacacaacaattgctaacacttctttttaacagtgaatgctttaattgtgca

SEQ ID NO: 158282 - DNA, 439 bp, Glycine max
  unsure (1)..(439): unsure at all n locations
agcttgccaaaattatggagtttgtcacctatgtaaacttcattaattattatattttttgtgacaatataatctcttaagtttttaaatttttatttttatctcttaaataatatcaattttcattaatgattactattccataccacatgtcatatttcacaatttatcacgtgtgacgaaagaactagtctaatgtaacacataaaatttaagtactaaattaaaacaaaaatataaataaagaactaaaattttgttttagcttatgagttatttttctttatcccactctttattttctattacattatttattatatctattacttcatctcttagttttttcttcctctctatctctccttcttgcacttaaatatcccaaatattggtatgtttaagattnttccaagtcagttaaattctttattcattg

SEQ ID NO: 158283 - DNA, 417 bp, Glycine max
  unsure (1)..(417): unsure at all n locations
ctcagctcaaattatagcctctggctaagccggatcatcattatcctacaacacacctgcccatctgtcattcttcacatttaatgtcgtatgttactcagagtctaatatttcgcactaattttgaacttggaagacaggcgaaaaattcccatgagtggctccaattttggaagaacatgacaccaaaaaaaaatagtcaaactagctactgtaaagacaagtttatatatagagagagggggggngcggacggtccaaagcgagatgatattgttggacttggactcaaattagctattttctcagccgattatcaaccaactgcttagtttctccctatataaacttcacattccacacaaaatgataaacatataaaccataagtgtgatcgcataggggtgggacaggcat

SEQ ID NO: 158284 - DNA, 442 bp, Glycine max
agcttctatgggcttttggagtgactgaatcctaacacaattgacaacaaaccaactctcttccctctctttctaattatgtcttaacctcacattctcctaaacccgaattgacactatcacagtctccttcatccttctctctctgaatctatcaattattttctctctttctctttcatgcatattcgcaaacacatagtaatcaccacctagctcaacctcaaaccaccaaagaaaaagccacgacctatttcaccatattcagtatcctccaaccccatcaaaccaaaatccaagtaaattccaaaacgtataaatgtaatccatataggcaaaacatacagggccgcaataaattcaaaattgaaatagaaaaagtgggcatggacagagagaaagagacatccttccaacaagagagagagagagagagagaatg

SEQ ID NO: 158285 - DNA, 453 bp, Glycine max
tgctagggttggcagcctgcccacccatgcctacttgagccactgctggcctgttagcggtatatcaagattaacttcggatgtcgaattgtgacgaatatcactgactttggctggagctctcctctgttctgctctttggttattccgagtaaccatctctgcatacgaccctctttggactcccaccttcgtttctgcattcctgctcaggtacatgtatcttttcccctcttgtggttgtctggcctctgctcttcccccttctgctgtttgtggctcttccttctttgctctctcatatttaggcacattaacatacatcttcattcctccaaacaccatgctgtccagtttcttttgaatctgctgtatgtctcgcacccctttaaacctcacgaacccatatctccttccttgtctgtttcttttccgaggtatgataacctctcg

SEQ ID NO: 158286 - DNA, 444 bp, Glycine max
  unsure (1)..(444): unsure at all n locations
agcttgcatgggatccgctgtaataattatttaaagncaatgcatgaatatttgaagggtacgtaaatatgaagcaaaaacgtggagggaaagaagtaagttaaaaaggttgtatatatacctgcacaaaattgtcaacaatgtgggttgaacttctaagagtgttctcaacaagggtgaaaagagagtccacatcaaattttgtgtcactgccgacatggtttgagtaaattacctccaaaatctgatcatcagtcatggttagtgggttttgctcattctcagcatcttggaggagacactcggtagacgacattattatgctcatttctcgaattaaggttctggatgaaaaagaaaagatattcttggtgcttactgctgtgccaagatttcccaagttctgttctattataacgcgaaaaagctggtgaagattgtaag

SEQ ID NO: 158287 - DNA, 430 bp, Glycine max
  unsure (1)..(430): unsure at all n locations
agctnatagagataatgaacgcttacggcttgtatttccagaaaaagaagagggatcaagctattgaaaaatatttattttgctacgctcagcactcagcaaagtacactactcactatatccccgaacattggaaatgctgagctgcatccttaactgagcactgattacaagttacagtccttcactacattcatctacttgttgaattctgcccactcttattttgtacccataaaaattgacattgatgttgaaagaatggaagacaattcgaaatggtaaaaggtggttgttagtattccccgtgaagtcccaatctataatcttgtattggttatgagatggaaatatacactgatatctagttggttcgcttgcgtgtcattatgcatggtcaaaccatgcatgggtgtaccaataacgctat

SEQ ID NO: 158288 - DNA, 196 bp, Glycine max
acttggtatatactctatcaaagtggactaggcatgagatcgacttggatgggcaacaaacgtatgggaagacaagaaaactctctatactctagcgaaatgacatacgggggagaaaacgtataaaaccatgggagatagacgcgggtgcagacacaaggacccctaggaggacaacacccctaaaggaaggaca

SEQ ID NO: 158289 - DNA, 436 bp, Glycine max
  unsure (1)..(436): unsure at all n locations
agctntataagcgcgggtttgggagacaattgtcaagcgttcgcgatatgcgaagatgatattccgagtactttggatttggtacgaccatgccctcctgatttccagctgggaaattggcgagtggaggaacgccccggcatttacgcaacaagcataatgtaaacctttacggttttaaaagctctatagttgggcctaggctttagagtttttccttttgtaaggctttgtgtcttttgtttttgaatttataatacaaggatctttcttcatctgttcctggtctctacccattctcattcatttgcatgtttacttctttttctgaaacggcagatccgatgacgagtcccccgaagtactaatacctgggacccgtctattgacttcgagcaagaaatgaatcanacggtagatgaacgaaatgaggatg

SEQ ID NO: 158290 - DNA, 193 bp, Glycine max
acgccaacaactactaccaccagagaaacggaaccgcaccatgttacaaaaacaaccaagagaagggcacccactaaatcaccataggctgcctagagaatctcccacccaagatcgaactacgcaaaccatttcaagaggcagaggagtaaacaaccactattgcggcgctacaccctcttgaattcgatac

SEQ ID NO: 158291 - DNA, 440 bp, Glycine max
agcttcttatgcaaggcactctcttagtgttgaagcttctccttccatgacttattccctagtggatggtgcctcctatcacctcttctcctttatcttccgctacaactccagggttgaaaatcaccattgaaggacctcattgaagctctaagatccaacctccatagaatcttgtcaagcaagcttcgatcacattgttagaaagaccataagaagatgttgagtaaggccaaattgatgagccatgatttgtgggttgtaaggctcgacataaaatttgatatacctggatccagggtgtaacacgctaaaggtattatcataattacacttttgattctaaaatatgaaaaataaaaatatttatacaacaatctcatgcgaaagctaacatataaacattacaacttgattccattgataatatcaatacaact

SEQ ID NO: 158292 - DNA, 429 bp, Glycine max
  unsure (1)..(429): unsure at all n locations
tcttcataaacgtgacatttgtgcacaatacacaatgttttgtttccacaaccaaatggtgtatcagaaaggcacaatanaactttaatggatatgattaggagtatgttaatcaattaaactttatccgtatctttgtggatgtatgccttgaaaactgtcatgtatttgttgaatagggttcctagtaaggcagttccaaagacatcttttgaactgtggacaaataggacacctagtataaggcacttgcatgtttggggttgtcaggcagaaataaagatttataatccgcaagaaagaaaattggatgcaagaacaatcagtggatatttcattggttatcaagaanagtcaaaggagtatatgttttattgtcctaaccatagtatgagaactgtcaaactggaaatgcaggttcattgaaat

SEQ ID NO: 158293 - DNA, 376 bp, Glycine max
agcttgcttgtggagcttctatggaggctggatctttgagcttcaatggggtcctttaatggtgattttccaccatggagatgcagcggaagacaaaggaaaataggtgagaggaggcgccatccattaaggaataagccatggaagaaggagcttcaccaccaagatgagccttggataagaagcttggagaagatgcttcaatggaggaaaagaaagagggagagaaagagagaggggggagcacgaaattgaaggaataaaagaggtatagaagtggaactttgaagtatgtcttacaagactctcattcatcaaagttacaacaagtgttacacattgcttctatttatagactaggtagctttcttgagaa

SEQ ID NO: 158294 - DNA, 451 bp, Glycine max
ctatatggacgaaagtgcaaaactcctatgtgttggtatgattatggagaagcggtacttcttggacctgaaatgctacaacagattaacgaacaagtgaagttgattcgagagaagataaaagcatctcaggataggcagaagagctattatgatagaaggaggaaaccattagattttcaggaaggagaacatgtgtttttgaaggtttctcccataaccggagtcggaagagctctcaaggctaggaagttgacacccaagtatctaggtccatatcagattttgaagaagattgggcctgtagcttatcatatcgccttacctccgagtttatcgaatatgcaccctgtgttccatgtctctcagctgagacgatacaacccggatccatcacatattcttgcagtggacgaggtacaggtgaaggataacctcacctattaagcac

SEQ ID NO: 158295 - DNA, 309 bp, Glycine max
agcttggctcctgataaagaaaggttgcttatacataagcactgaactcatttaaatgagctaattaaaagctcggcctgtttaaatatgaaagtataaaatgagctacattaaaagcttaagcttgacctttgtaaaatatgaaagcttctccttgagttagttataatgtttatcaaagatgaatgaagatgatagtttttttttaacaaaaataagttgaatggccttttatttaaaatatcaacaataacaacattatctttatcgacctacgagaggttggctcagagaatcatttagatgcca

SEQ ID NO: 158296 - DNA, 450 bp, Glycine max
  unsure (1)..(450): unsure at all n locations
tatctatgananaatcagaagggaaccatcagaatgcctttctttctgaancaaaatggtgtcaagttcctcccttagtgtcctaatcagctgagagaatttgtggaagccgagtggaccgtactatcagatctctcattgagaggcaaatgagctgtcttgcaaacttaagagtgtttgtatgtatgtcttaaaattggttgaacgccaatccagcgttcagttgtattggaaagtgagacaatagaaatacacactattatcatcatggtgtgttaagttgatgttgaatgtgggattagttagacaaaactggtgtccatacgttgtgtttgtgttaccgtccaaccaaacataaccaacgtttttttaagaaagcttcaagatgttgctttggtgttggaggcctaagaatgtgttggatgccaaagaatgtgtgaaatgtctctt

SEQ ID NO: 158297 - DNA, 377 bp, Glycine max
acctgcagcatgcaagcttgaagatgtttagaagaagtttttcttttagatgttattagcagcttcaactaccccattcatcttgggcctgtatggcgtggaattatggtgttggatcctgaaatcctcacacatttcctttataattttgttgttcagaatggtggcattatttgtgataatcttcttgggcaacccataccggcagaatatcttttttttaatgaacttgaccccacactccttgtacactggcatttgaagcagcttcaaaccatttggtgaagttgtcgatcgcaaccaaaatgaagcgacgtctatttgaagcctttggcttaatagccccaatcacatttatccccacatatagaatgcct

SEQ ID NO: 158298 - DNA, 450 bp, Glycine max
  unsure (1)..(450): unsure at all n locations
tggagaggatgcttcaatggaggaaaagaaagagggagatatagagagaggggggagcacgaaattgaagaaggagaaagagaagagaagttgaactttgaattgtgtctcataagaatttcattcatcaaagttacaataagtgttacacatgcttctatttatagactaggtagcttccttgagaagctttcttgagaaaacttccttcagaagctagagcttagctacacatacccctctcataactaagctcacctccttgagaagcttccttaagaagattcctaaagaagctaaagcttagctacacacacctctctaatagctaagttcacctccttgagatgagaagctagagcttagctacacacccnctataatagctaggctcacccatatgccaaaanacatgaaaatgcaaaanaagtccctactacaaagactact

SEQ ID NO: 158299 - DNA, 438 bp, Glycine max
  unsure (1)..(438): unsure at all n locations
agcttctcaaggaggtgagcctagttattataggggtgtgtgttnctaagctctagcttctcaaggaagttttctcaaagaagcttttcaggatagtttctcaaaaaagcttcttaaggaagctacctagtctataaaaagaagcatgtgtaacacttgctgcaactctgatgaatgagagtcttgtgagacacaactcaaagatcaactttcctcccttttttcttccttaaatttcgtgcttccccctctctcattctctccctctatctttcctccattaaagcattctcttcatgcttcttatacaaggcaaattcttggtggtgaaatctcttcttccttggcttattccctaggggatggagccttccttctcctcttctccttgccttcgctcgatctccatggtgtcaaatcaccattgaacgaccttat

SEQ ID NO: 158300 - DNA, 407 bp, Glycine max
  unsure (1)..(407): unsure at all n locations
ctatcaatagacctccaatctttaatggagagggttaccactactggaaaacccgaatgcaaatttttattgaagcaatatatctaaatatctgggaagccatagaaatatggccttatataccaaccacagtagaaagagtttcaatagatggtagttcatcaagtgaaagcataaccatagaaaaacctagagatagatggtctgaagaggatagaaaacgagtacaatacaacttaaaagccaaaaacataataacatctgccctgngaatggatgaatatttcanggtttcaaattgtaagagtgctaaagaaatgtgcgacactcttctattaacacatgaangaactacaaatgttaaaagatctangataaatgcactaactcatgagcatgaattattt

SEQ ID NO: 158301 - DNA, 414 bp, Glycine max
tcagagtcacctgaggcatgcaagcttcttatccaaggctcattgtggtggtgaagcttcttctcccatggcttattccttaatggatggcgcctcctctcaccttttttcctttgtcttccgctgcgactccatggtggaaaatcatcattaaaggaccccattgtagctcaaagatccagcctccacagaagccccacaagcaagctttcatcaagtggtattagagcacgagagcttcaagtaggtgctccttaaacctccattaattttgtgctataccttctcttccatcggtgttgcttaattttttctccatgtatatcctaacatgtattgtgctaaatgtttttaacatgattctttaaagttgcaccgataaacttgtataaaagctagatttaatctctatgg

SEQ ID NO: 158302 - DNA, 447 bp, Glycine max
  unsure (1)..(447): unsure at all n locations
tgtaatcgatacacaaatactgtaatcgagtaccagagcattatttcagaaaatattctcaacagtcacatctttttatttggntcttgaatggctatcaaaggcctatatatatgtgacttgagacacgaatttgctaaaagtttttcagaacaaaaaggtcttatcctcttaaaaagcaaaatcgttttatcctcttacagattccttggccaaaacacttgtgatgcaataaggaattatttgagtgctcaaattgttcaatctatctctttcaagagagatttcttcttctcttcttctttattctgaaaagggattaagagaccgacggtctcttgttgtgaaagaattctaaacacaaaggaaggattgtccttgtgtgtatagaactcgtagaaggaatctacaagatagtggaactctcaagcgggttgcttggggact

SEQ ID NO: 158303 - DNA, 413 bp, Glycine max
  unsure (1)..(413): unsure at all n locations
agctntagcctgattatatattagcagagtatagaatcaaagccaagttgtagaaggaccatgccaagatagtaaaaaagaaaaggttgatgcatggtggactaagattctatggaacatacaagttacaagcacacaaaattattagagttagtgcgtgtctggtaacccctttgagtcaaccgtaaacttactctttgtagctgaattggaaatagcattccaaacacactatttttctagctagttcgtattatatccctcttccatcatgcttacaattagagcaacagcagtagaaagccaacaaataatttcgtgttaataagcatcgttttcattcctctggtattgtgcaaccaaaatactaatcttagttggaagctaagccaggaaatttacaacaaaatacc

SEQ ID NO: 158304 - DNA, 348 bp, Glycine max
agttcttgccgtacagccagaaaaggaaaatccgcgtcactgacaatacaaaccaaaaacaacgctcatagtacagatacattgacctcaaatggtgacaggaaatgcatgacacagagagagaagagtgacataaagccaaatcaactctcaaggagccagaaaccaagtacacaaaaagctatgcagcatagaccttgctcaagccggaatagcaatgtgcttgggcagaacaatcaaaagcaaaatagcatggctgccaagggtaaatcaacttcaacaatagatgccaatgagccaacaacacgagcttcatctgcagaaacttgctggatcaggaagacaatg

SEQ ID NO: 158305 - DNA, 442 bp, Glycine max
  unsure (1)..(442): unsure at all n locations
agcttaggggctggtacgaacaggtgctatgcccatgatcgatcaccaccccgcgcctggctaaagacgttaaagaagtgctcctgggagttagcctagtacctttaactttgctctttaattttcttgtttcatatttgtttgttttcttgaactatatcctgaattcacctaagtttatatgcaattataggatttttagagagaaaatataacaatgaacaacacaactttgcagaggattttttgcaaacataaaaaggggaggggtgaagccattttcaccccatttcttccccaaagctcaaaaccttcaacaagtttatgggagccaccattggcagcaacccctgtcataccctaatttcgtccggggaccttngcttgatgacatgcgacctttgtttggcccttgtaggtgcttgcacccatcataggcaat

SEQ ID NO: 158306 - DNA, 442 bp, Glycine max
  unsure (1)..(442): unsure at all n locations
aagtttctcaaggaagctaccaagtctatatatatattcatgtgtaacactngtggtaactttgatgaatgtgagtcttgtgagacaaacttcaaagttcaacttctccccctcttttcttccttcaatttcatgccccccctctctctctttatctgtctctctttattttcctccattgaagcatcctcttcaagcttcttatccaaggcacattgttggtggcgaagctccttcttccatggcttattccctagtggatggcgcctcctctcacctcttttcctttttcttctgctgcatctccatggtagaaaatcaccattgaaggaccttattgaagctcanagatctagcctccatagaagccccacaagcaagcttccatcacctatacccgggttcatggtgacatangtagtggaggttgatctgtggtcat

SEQ ID NO: 158307 - DNA, 441 bp, Glycine max
cctgcaagcttctaccccttgaaccttttccactcttgtcacacttggatttgccatcatcagattctaaatcttcttttgattcttctactatggtgaacaagaatcttggagggcctaacagtaacaggtcctgttgcctcatgtattctgcatcggtgccatcttctccaaagggtttgaaaacaaattcctttccactttgagactgaacttgttctgggtcatgaacaagggtgtcaccaattctcattgaagaacaaaactcaggaggagtgaaacttgtttgcctcaaagaagatgatgatggccttttccaacaaaacatgtagaataattccttcacagggttgccataatcattctcaatctctctgttggttatcctcttcttccaccatagcaaatagtaaacctcagctactagagccaacaagagac

SEQ ID NO: 158308 - DNA, 449 bp, Glycine max
  unsure (1)..(449): unsure at all n locations
cgaaataagatggaatgtgaaagtgggtatattattaacattgggtaagggtatgttgggcgagagctgaattgttcctgaatgagtggcatgaacatattggccgttcggaagttntactgtgattgggttgattcctctatgggagtgaaggttatgcaaggagctagtcacatgatctgtagcccctgaatctagtatccaggaggtggaaagcgcactggtagaaggtgacatacctaggtttattggagtattgacggtgcatgaagaaattgatgcaacctgtttgggttgattgggtgtcgtgttctcggcggatggctcctggattaaggcgagtagtgccttgtactgctcatgggagaagcgaacgaactcatgggactcatgatgctgagcttgatcatcagtggctttgctttctactgtcactacgatgttcatgg

SEQ ID NO: 158309 - DNA, 443 bp, Glycine max
agcttcagaagcctattgttatggacgatcttgactaggcgaattgattttagcctttagtttcactttagttattaatcaattcgattaagaatgagaaatcccaaagagaaaacgtccgattgattttccgctttattctactaaaagatgtcttttttattattatattattttttacctctctttgatttccaacgtggttacgacacgaccgaacggtcggaatttattttaaccgaagttaatggataatacaattcaaacgttcggtggaaatttattttatttttaagttaagcgagaaatgacttaagtaaaatggcttaagcacgtcaacagggggtataaaaagttaacaaaacgagaataaaaatgcacgaaacacaatgtggaccactacgggtacatagaatgaatcgaaaagcttgggtcgaggtact

SEQ ID NO: 158310 - DNA, 441 bp, Glycine max
  unsure (1)..(441): unsure at all n locations
tgcctgtccgatgcagcagtaatgatgttcgagttatgttggggaacggntacgaacccgggatgggtttaggcaaagacaacggtgacataactagcctgataaatgccaaaggaaatcgtgggaagtatgggttaggctataagcccactcaggcagatataaagagaagcatcgtgggaaggaagagcggtagtcaaaactcgcggttgagacaagaaggtgaaggaagcccaccctgccacataagtaggagctttataagcgcgggtctgggggacgaaggtcaagtggtcgcgatatacgaagatggtgttctgagtacattggatttggtacgaccatgccctcctgatttccagctgnggaaatggcgagtggaagaatgctncggcatttacgcgacaagcataatgtatacctttacggtttaaaagctta

SEQ ID NO: 158311 - DNA, 421 bp, Glycine max
  unsure (1)..(421): unsure at all n locations
agctntgcttctacaaataacctgtatatacctaccctcatgctcgagttccatgcaactccactaggggggcatctcggggtagccaaaaccacgcacagattagaatcaagcttttattggtcatccctccaaaaggatatcaagtgtttcgtccaagagtgcagcatttgccaacaaacaaagccaagcacccaccgccccgcaggacttcttcaacctctaccaacacccactggagtttgggaggatatctccatggattgcatcactcatctactgcaatctcacggttacatcgtcatcttggtcgtggtagataggtattccaagggtactcatctcggagcgttgcctaccacctactcagcttttaaagttgcatctctattcatggatatngngtgcaagcattatgggt

SEQ ID NO: 158312 - DNA, 338 bp, Glycine max
  unsure (1)..(338): unsure at all n locations
gttaaatctttgaccnanccatggtagaagtctccacatagtccattgtctccctcgcccattattacgatcagtcgttgaggtgcttcactattggggactctcagctatcacccttggtggaagatattcgaagaaatcctacgatgtcctctaaggggaaggaaaccatacctattctcagggttctatccctcattagctagcatttctaagatagtccaaatctcggcgcaggaattagaccgtcaaaagcaagttgaaaatggggtggctgggataccgagaaaatgtttggaggcaaagcaagaatcttgcgaggttgaatcaatggaccc

SEQ ID NO: 158313 - DNA, 342 bp, Glycine max
caacaagaagatctgggattatctaatttaaggtactctaaacctaagaaggctgtctataatgagcctagttctacaagagggatctgacgatcgaatcttgtattgattctgtctaactatggatcgaggtttagtaacttaatctacatcatataacacaaaagcttgattgatagtaaaatatctttgtatgcatcagctgtactgttagaaagacccaacatttatacctactgttgacaattctacttatttgtatctttactatttttagcttagacttagtttaatcctattctataacatcaattatcaatgctctttgtaacagtgccttat

SEQ ID NO: 158314 - DNA, 435 bp, Glycine max
acctgaggcatgaagcttatcagagggaagtaaagtttccttttcttgtaagagtagtcggcgatccattgcaacgggaaggaaactgtgtccaggtactgtaaaaacagacaagttgtaactcgttagatgttcaattttagaggttctcatatgctatcccatgagaaaatgatctcaactctaccatgcggaaggaattcctgccaactggttgacgttatttggggttaacattatgaatcgcggtggtataattaatattctctattagcataacagatccttttaataaagtatgagaatagttttattttattgtataacgtttaaaaaatactcaatcttctttgattacgagatggttccggaaaggtttcctgttcttatataaaaaaaaaaacctttttttatttcaaagtacttttgtgtttt

SEQ ID NO: 158315 - DNA, 438 bp, Glycine max
accgctcctgagctatgataagtctttaagcataaaacaattgttatgctgaaatatcatctcattctcaggatgcatccccttccttagacactatctcttcaatttaatcacaccaacttatcttaattgttctgagtagacccatacttttgggtgttgaagatgtgaacaaatatagcattgttgcaattttttacttccaaaaatgtcaaattcgagaagggcactgcgcatggttccaaattaagcaacactccgcttttatgaaaattcgtagcattattcttcgaataatacaccacaacctattcataaattctctcattctattacatccccttggttaaagatgatggaacacaagacttactcaaaataaaataaaacatgccagaatagttgagtaggatacctttaaactaaaagtctaaaaca

SEQ ID NO: 158316 - DNA, 388 bp, Glycine max
agcttataagaacaaaattgtctaaattatttccaaatatgcatgtgaattaggaagcatcaacaagaattaagccaaggctattgtgcaagcaatcaatggggcaaaacacaccaaaagattatgatgatggatggctcaaattctcacaaaggtaaacttatcactttcaaatggagctttcaaaactatcatgacatgttgaggaaacacaaggatttcaaatcacaaaatgtcaagagactattttttttagaacagatacccattactcgaacatatcctattattcaaagacaaacatgcaaagttaacacaactaacctaactaaattaagctgtgaccctacaaacctaacaaaatctaacttatttaccacaacataca

SEQ ID NO: 158317 - DNA, 434 bp, Glycine max
  unsure (1)..(434): unsure at all n locations
ttcaggtgatacatatgcagacatatgaaggggataatctaaggataaataggggatgcaatcctaccccgcctacaagctccaatggagcttacatcaataggaatagaggtactaaagttgaatgctttatttgttttgtggtctcttgattgttggtctaaatagagagtatgccctcttttccttgaatgtattttgagatctgaaatatataatttcaaatttcttaaccatcaaaatcattcactatatctcttcatcaaatatatgaacatacagatcttcttatgatgcagaaagtaacatcagtaattcaatatatgtgtgtgtgtgtgtgtgtaaaaatcataccaagtatgttaatctaccaagagaaaatcctntggcgtgttntaagtgatctaaaactcgtacaggagtcgcaacctgca

SEQ ID NO: 158318 - DNA, 396 bp, Glycine max
  unsure (1)..(396): unsure at all n locations
agctntggaggatggaaccgtttgaactatattgtatcctctacagagatgtaatctttgttgaaaccagaatagctatgaagcacgctagcaattaaggcaccaacttagacattaatgaagttgaggtggagctaccaactcaaagtggtcaagtcgaggaaacaaataatgatcaacaactttaaactgtagttaatgattacaacttggctaaagacaaagttagaagacacattgcgccttctaggagatatgaacaagctaatctaatctaccttgctttgacaattgctgaagagattcaagctactgaacctatgaacttcaaagaagccttgaacaacaaggaaagtgaagaatggatctcacccatggaagaacaaattatttctc

SEQ ID NO: 158319 - DNA, 446 bp, Glycine max
  unsure (1)..(446): unsure at all n locations
tgtacttgcagntgctcagcttatgcaggcacctgatttctgctgctctattgggttaattcacaaaatgccaggttggtgttcttttaataaactgacctgtgaagtctgcaatgaaggattgtcctgtcggatatcattcatatgctagataagtagttttctttaggggcagtgtagctagattacttgataaagagtagacagatgtgacatatatgatttgcatgccaagagtttatttgattatctgatgttgattattctagtctacactatttatgcagctgttgtagaatcattaatcaatactgggaaacaaatagcagctgtacattttattcatgccttccagctccaagaaagcttccccccagtgccccttctgaaggcatacctcaagaatcgaaggagaaattcacaagttaagactggaaatgtgcgtg

SEQ ID NO: 158320 - DNA, 277 bp, Glycine max
  unsure (1)..(277): unsure at all n locations
catgcaagcttattgntcgaaatagcaagcttttgttgcttctgatgcatttcacaaaaggctgtcttatacttcttcaaattcataatttacctcaatgtctcttatggttaaagttgtaaaaccctaaaatctcgctaacttaaaattgatgtttaatgaatttctagtgctattagaatacttcggtgatttggaatacatgaggtgttgtgtgaaaaagtcattcgtgatatcctgatctttataattcgttctgacgactacgttcatctat

SEQ ID NO: 158321 - DNA, 440 bp, Glycine max
  unsure (1)..(440): unsure at all n locations
tagctcgaaatgcccaactcctctccaatgtgagttatgcttatatangcggtctcgtcgatgctctcgcacttagcacgactctggctcacttagaacacataagtgaatttcggcttagtgcgcgtcttcttgcttagcggatggatgcaagcggtgcacttattgggatgagatctctcttatcgcgcatgtccagctcatccttcttccatattcttcctcgcgctaagttgtaggtgcgcttagcgggaagagtggtacgttcagcggatggctcgctaagccgggcagattggcttagcgagaagctaaaaatcaacacttcacaaacttgcctaattaacctataattgaaaggaaatgattattaaatacacagaaatgggagtactaagtacttattacctatatntaacacagagtaattacaacactac

SEQ ID NO: 158322 - DNA, 428 bp, Glycine max
agctatggaagttccaagagccaattagttttcttcttttgccagtcttcttctggcttcaattcatcagtgggctctccttctgtgtccagcatcttgggatgttcccagcctttgatgacagctatccaggttctgctatccagtgatgagaggaaggccaccatccttgcttgccaggattcatagttggttccatccagaattggaggactgttcactggtcctccttctgtctccatgttcatcagaatttatcttcctagatctcactcagtgatctcgagagcccgctctgataccaatcgaaatttttaaactgtggacagatgtcgtacaggaagtcactacattcggctttagaacatgcagattgtttatgaccctttgaacagataaacaagtaaaatcacaagtgaattgttaac

SEQ ID NO: 158323 - DNA, 329 bp, Glycine max
  unsure (1)..(329): unsure at all n locations
aagcctcttngagaagaggtgcttgagaattcagatcttaactactcacacccacctaaaaactaagctcacctccttgagaagcttccttgataagctagagcttaacaacacacacccatcttaaaactatgctcacctccttggcaaaatacatgaaaatacaaaaaaaatgtccctactacaaagacaactctaattgccctgaattacaaggctaaaaccctatactacttgaatggccaaaatataaggctctaaagaaggaaaaacctattctaatattacaaagaagaggggatccaaccctgagccattgggctataaat

SEQ ID NO: 158324 - DNA, 421 bp, Glycine max
agcttaaccaggaaaagagaggacatagttctcatatcgacaaccagcttaagctatcccatacatagatagtgcattgttagcaaacacttaatagaatgacaacactattcatatcttaccatatcaacggcgagaagagtctatctactttgaaaaagactcactaccacccaaggatctattccggcaactaatatacagaatagcatgccaaccatatttatacacccacaagacaaacttgaaacctgggttatgatcattcacatgagatacactcaaaccaacaactcgatgtgaaaatgatgagaatcatgcatagctcgatgacgccgaaaagaaatcactcgggatggtgctctcttaaaacaggagaatatcaatatctgaatacatgattttgatgatgcccaagtgt

SEQ ID NO: 158325 - DNA, 378 bp, Glycine max
ggttagacgaacatacgggactggctggagagttagctctgtttgacccttgctcctttgccaatctgtttatgagacgaactctgtctatattaactctgacagctaccagacaatatactagtcatcagggttcgagctatctagactctagagagttgaacatgagtggcgccacgcacaagttttcattgcgccataatgagatcccacggctcactatccttatgtgaattagtgtgcgactcgagcatcaatcattgctgataccgcactgggttcgacatagaattcctatgctgttggcactccgtatcatctttgaaagagatatcaaaaatgtcagagcggctgcattccatttagagaactgctacc

SEQ ID NO: 158326 - DNA, 375 bp, Glycine max
agcctggttggcttgattacctgttcaataacagatattttaatgtttgattatgaggacaatgatgttggaggcgtgcttagttcaatttttctttttgaaatctttattgatgaatcacatttttaaatctcaaaatgggttcaaggaagcagaaatttcaccttatcatttgttactatctttgtagtttcccctttacctgtgaagatttggaatggaaatgtcttagtttcaaacccaagtaaccaactttatctctcaaatggaagtattttctgtcataagaagtaggatatcgtatatttcatgtgatgatgattaaattactatgcctgagtatgaagtgttctaattatcttttaccataatgca

SEQ ID NO: 158327 - DNA, 442 bp, Glycine max
  unsure (1)..(442): unsure at all n locations
gtggagctcctatggaggctgagatctatgagcttattgatgcccttcaatggngaattttcaccatggagatgcagcggaacgccaacgagatgaggataggggaggcaccatccactatggaataagccaaggaagaaggagcttcaccaccaagaattgccttggataagaagcttgaacaggatgctttaatggaggaaaagaaagagagaatgggggagcacgaaattgaaggaataaaagagggaaagacgtagaactntgaagagtatctcataagactttcattcatcacagttaccacaagtgttacacatgcttctatttatagactaggaagcttgctcgagaagattgcttgagtaaactttcttgagaagcttctttgagaaaacttacttgagaagctagagcttagctgcacacacccctctcatac

SEQ ID NO: 158328 - DNA, 425 bp, Glycine max
  unsure (1)..(425): unsure at all n locations
agctnatgcgcatatttccttacgaatgttctcttgcacaagacattcttttaactaagaaaaaatgctcccatatacaatcaaggcagcttcattacctagaatatttacatgtacttccaaggtgtatttgttacttacatcacacacatctccttggctaaatttacatacatgcatactcaaagcattttggggtaccaaaaattgcacatgtgcacatcttggtatttctaatacctatacatacacaaacttcatgatgaatattgactatctacacaataaagtgctacatttcatacctctttcaagtttttgcttcctaaagccgcatgcaaattcaagtatattntcctttgctgactaaaattgtattaaaaggtatatattctttttgtaatgtattttctctacatatcatg

SEQ ID NO: 158329 - DNA, 389 bp, Glycine max
aagaagaagagaaatgaaaccaaaaagttttgttgaaatagatgaaagaagatattgaaagatagattgaaagaataaaatgattgttctcttcttgtttcatgccaaggtcacatatttataatttcttgacgactcaagtcaaaacttgtaactcttgacaatttctttaaaactaattacttaaaaagttatgacttttgaaagaatctttagaaacaagtcacttgaagaattgtgacttttggaaatgaatcttttgaaatcagtcactggtaatcgattacccgtaaggtgtaatcgattacacatcaacagatgtgactcttcattgtgaatttcgaagatcttaaccgtttaaaacactggtaatcgattacatgactatg

SEQ ID NO: 158330 - DNA, 426 bp, Glycine max
agcttcatacaattaatatagaacctatatcctaatatcacatcccatcagagcactgtgtcacgacgtccttcagcacaaggttccttaaatcacttcacctagccatctgctcccccgaacacaaggttcaagatcatcacaggatccaaacacaaacaacacacagggagtgagttatcacattcctaactaatagagaaaaataaaacaacatatatgtataaatatcgtataacaaaataccatttacttgagcataactcacgttatttcaccacacgtctcattcgttttcacaacattcgcatactcaatattcaaaacacaatatcatcaaatcaatcaatatagaacaatacacaagcgttatgcagcagatacactaagactcaatcctatatgcaatgtggtaccatgtcaatg

SEQ ID NO: 158331 - DNA, 451 bp, Glycine max
  unsure (1)..(451): unsure at all n locations
acttgcaacaaaggagtggagcaggtaaaaaagattcgtnttcaaactcttagaggtgactntgagcgtttgtttatagaggagtcccagccaatttatgattatttttctcgagtattggccgtagtcaatcaacttaaaagaaatggtgaagatgttgatgaggtgaaggtcatggaaaaaatacttcgaactttaaatccaagttttgatttcattgttaccaacattgaagaaaacaaggatttaaagaccatgactattgagcaactcatgggttccttacaagcatacgaagaaaaacaaaagagaaaaattaaacaaaaggaggctacggagcaactactacaactcaacgtaaaggaagcaaactatgcaaattacaagagccaaagaggacgatgtcgcggccaagatcgtggacgtggacgaggacatggaggagaaggaa

SEQ ID NO: 158332 - DNA, 426 bp, Glycine max
  unsure (1)..(426): unsure at all n locations
agctagagagcgctatggtatatgtagtgttacacccttctctggacatgaagggtcattcccagttagcaatctatactccttctactgaatccttattggcctaacctctgactttccaaaagagatatccttttctgtaattccttgatttgagctccgatttgaaacgccaagtcattctgcacttgcatgcttagtgcaagaccattgcccctttccgcactagttcgatgagatctaagtctattngaagtgcttcattgttctcggctacgacaaagttatgaagtctaattcactactagtcgaatttatctgggaccatggtgtttatcccatataaccattcgaaaggggtctctggagtaacaatatatggtgtgcaccgatatggccataagacttcaaggagttttccaccat

SEQ ID NO: 158333 - DNA, 451 bp, Glycine max
  unsure (1)..(451): unsure at all n locations
ttcactctctcntttcggattaacaatgcacccttattatgaattactcaaaagacaatgcaaaataaacttctttaaagcaaaagataaatagcaatccataaaagaagtttaagggaagagaggaatgcaaacttgatttatactggttccgccacttcccgtgcctacgtccagtccttaagcaacccacttgagatattccactctctttgtaaaaattcttctataaagtctgaaacgcacacggacaacccttcccttgtgttcaagaatcctctacaacaagagacccactgtctcttaatcccttctcagaaataagaagaagagaagaacaatattctcttaaaagagatagattgtacaatgaagatcaatcaaaattccttatcgaatatgcaagtggttgaccaatgaatcttcttgagacgataagacagttctgttc

SEQ ID NO: 158334 - DNA, 357 bp, Glycine max
  unsure (1)..(357): unsure at all n locations
cctgaggcatgcacgcngcgaggcccgggagatatttgatgtcacacatggtcactatgaatgacaaatttcttgcgataatggctgagctcgccatgtattcaaagccctaactaaggctttcaacttcttattacatcgtcaaaagttaacggttgtaccccattcactctccactaaaataagcaattggatggtccctttgttacatcacagccgcaatctcaccattagaagcatcacactctatttctaatgactgtttgaagtgtggtaactcatgtttgagggctttagctagcttttgtcttagaacactgaaagcttctacttgtttttttcccactataaaccaac

SEQ ID NO: 158335 - DNA, 189 bp, Glycine max
caaggttgatgagtcagaaaatgaggccgaattatactgtgccagttggagatgattttcccctgctttctttgacatcatgaacactagatttgcatttgggtgagaaaaaaatgatggatccttatatctacagtggatgacccggttgagcgatacataagatcttggtgggtttctagaatctat

SEQ ID NO: 158336 - DNA, 278 bp, Glycine max
gacctaaagcgcctgagctgcaactgctagagggctaatattgggctttatctttgagcttcaatggggtcctttaatggtgattctccaccatggagatgcagcggaagacaaaggaaatgaggtgagaggaggctccattcattatggaattagccatggaggaaggagcttcaccaccaagatgagccttggataaaaagcttggaaggatgctctcatggaggaaaagaaagagggtaggtaagaaagaagggggagctccatatttaacgaat

SEQ ID NO: 158337 - DNA, 449 bp, Glycine max
  unsure (1)..(449): unsure at all n locations
cgccatttgtccncaagcaaaaccgatatcacatattattttgaagatgggtgaagaacaacacaaagttgtcagagaagaagtggacaaactcctcaatgccaacttcatcagagaagttagatattccacctggctcgccgatgtcatcatagtaaaaaaggctaacgacaaatagcaaatatgcattgactatactgatatgagtagggcgtgccctaaagatgcataccctttgcccaacgttgacaggctagttgatggagcatttggattctaggtgctaagcttcctagatgcttactccgaatacaactagattaggatgcatgctctagatgaggagaaaatgacattcatcactgaagatgccaacttttgctaaaaggtcatggccctttgcctaaaaaatgcaagtgctacatactagagatngatggaccggattt

SEQ ID NO: 158338 - DNA, 364 bp, Glycine max
agcttcacgactgagttagaggaaaacatggtaagtatgattttcctctcttatctcctaataatgtaagacaagtggcctcatatatcttaagaaggggggtcgaattaagatatcccaaaatacttccccaattaaaaatctatttcactttcttttcaaggtatagaattccctcaacaatgaacttcttaaatattaatccaaataaaacattgtgaatatgaacatacagcactcattaacaccggacattaatggaagagaaagcgcaaactcaaatttatactggttcggccacaccctttggcctttggtcagcccccaagcaacccgctggagagtttcactttcctgtaaatcc

SEQ ID NO: 158339 - DNA, 255 bp, Glycine max
ggcttgtccaatttgtgagctaaacacattttttatccaacttaaacatgggaagaagacaatttatacacggcactcgttgttcttaaaacattaccacccctattgatgattgaagaaagatttaatggtagccaagagactaaagaaccctcagaaccgatagcttcccatgaagtgtatgatccggggaaacaaattctaactgtctctgtgtagacacacgataggatcatgctagcaagaacatctgga

SEQ ID NO: 158340 - DNA, 434 bp, Glycine max
acagcagaatttagtaatgacccactaacctataatttaaataacttaatgccattaacctagggaattaaaaaaaacttaatggctgagtgtaactgaaattgtggcaaccaaaagtcacccccaacagccaacaagtcagccaccatttggtctcccaaaaggctgatgcctatgttgccaattgggcccttattacaacttgaactaaacctaactaaagcccttttaattgattaacccaaaacatatttttggtcagccaactttacaaggattgggccattatttagacaaactaaacactctaaaaattgagacaaagtggtgtcatttagtcctcctccatttgggccatgatacaactcacaaccttggacttttctccttgaaacttgggcttgtattcaaatagtatggacagcacttgttga

SEQ ID NO: 158341 - DNA, 398 bp, Glycine max
  unsure (1)..(398): unsure at all n locations
catgcaagcctatgtagcattatccacttacagctggaaattgttgtgctcaaagtctctggatgaaacataaactngaagactttggagtaatccttgatcacattacctcaatgtgatagcacaagtgcgatcaatctaactaaaaatccaatcatgcattctagaaccaaacatatagagataaaacataattttcttagagatcnatgttcaaagggtgattgctgcattgagtttattgatagtgagcatcaactagcagacatcttcactaaaccacttgctagagataggttcttctttatgagaaatgaactaggcatcttagatggatctaacattgaatgatgttgtgttagtgcatgtaacctattatatatcgcctcttatgtctc

SEQ ID NO: 158342 - DNA, 353 bp, Glycine max
  unsure (1)..(353): unsure at all n locations
ttaagctgccacagtcaaagaatgaccaatagacttctatggtttggtaaatcgatgaaaaatatgaaaggtgcaaaaggacaaattaagagagaaacaagaggggaagcatccaaacaaaagttgttttatggaaaaggaacaactattattacaattgttgaagattcatatgatgatgatcaagtagttgaacttgttaaagaaatgaatccataaaaccaaaagaatggtgcatcaaagaaaagaaatatgtcaaaagtntggaggccaattcctaattctagcaacaaataggaagctaagtattctaaaggtgtttcgcaaaaaaaaaaaaaaaacccaaatatgtt

SEQ ID NO: 158343 - DNA, 452 bp, Glycine max
ggacctaagcaccgcagctgcagctctgcgtagccgctctggagctataaaatcccaaaaacaaatccctcttattactagctactttgaattctttagttcctgaatgtacaaccttcaaattgttgctcattcccctctatgttttctgcaaaaaagaaaatcaatatcaaagaaaacatggatgaagccctaaggatgccatgtacatgtgtatttctgaagattatagtattatattccatcaagcatacattgactgctgattacatgtaatagactctttataacatggttgccccaaatcacaattaataagcacaactaccaatctttcagagtcctttggttaatatgtcttgtctccttctgtggtggggttataaataataatattatacttttgccttccaacggaacacttatgactaatcccttcttcattaatccta

SEQ ID NO: 158344 - DNA, 346 bp, Glycine max
tgtgccatggacacacaacgtgcaacaacagaaagctcaagatcataaggcacaacaacataacgctcaatatcaagacgtacaaaaacaccaataacaaactgcacagaaccaccagacttggaatgcgcacagtgatcagaaagtatcaaaagatgcctaactaatctatgacatgatctaactgcctcaagatcaaacggtggtaacaactaacgagagcctataatgtacactacatacacactccacacgctagtaaacgagtatgctaataacgcggcgcatgaactacaactccttcaatgaaatcaaatagcagaaaactggagcaaccaattaaatg

SEQ ID NO: 158345 - DNA, 222 bp, Glycine max
gtgctgcaactcacatatgaggagaagatttttatgttgttcccgatacaaagaggagccaatagccctagaattgactcatatagatcactacaattaagagtaagaaactctgtttcaagatcaagaatcaagtgcaagactcatgctcaatactcagaataagagaagcttattcgagatatgtgtacaaaggtttcagaacatgagtgcacatgagtt

SEQ ID NO: 158346 - DNA, 280 bp, Glycine max
catacctcggattataaggtagaaccaagctcatgcctctacaaaaagggccataaagtcatagtggaaacatggaatgaaccgtcttgcacaattggggcacaagatgaatcgagttacatcactgcatcattttctgccaagacacatttaggactgttgatgaccttgttacttgcaggtacaccttgaccaaaatgtcatgaaccatgtggagaaatctaaatagattcaaccccatgacctgcgtaaaaatacgcaatacttcaactgtgcaaca

SEQ ID NO: 158347 - DNA, 444 bp, Glycine max
  unsure (1)..(444): unsure at all n locations
gcttgcaaacgcaatcaagcatggcattgttgacttccaccaagctcaaacccaccacgatgcatctcaccggcgagcctttgagcttcatcgagcttcccatcaacgcaccaccctttgatcaacatatcacacgtggcttcgtcggggaaaaacaccttcgccaaatccttaaccatttnttccgcgtaactagcgaaacccttcgaacacagcttcttcacgaccacttttaaggaagcacgatcgcgcttcagcccgtagtctttcttcattcgctcgaagaactgaaccgtctggctggggcggcccgcgcggacgaggcggtcgatcgcggaggctaggtgtttggggccggcggcgggggaagcggcggaaaggacttcatgcttgcgcttgaagtccttacggcnggccaagtattcgacgaattatgaaagagtg

SEQ ID NO: 158348 - DNA, 374 bp, Glycine max
aaagaagatagacttgaaagagattgaatgcggttggaaacacgaccgctgaggttcatgttggagaggtcaagactctctacaaagcctttcgagttgcaaccaactccagtccagttacaatgaggtgagcctggctgtgtcacattgcttggtgtttgccaatccttcagatgcttcatcgggtcaatgagaatggatttgattgagagaagagttgacaattcatcatctgctgaagctttagtaaaaataagtgagaggccaatgtgataatagaagaacagcaagtggctttgcattttggtggttgttttctatgacgtgggtcctcttaatcttgttgcacttttcatagcacggaacaaggaatg

SEQ ID NO: 158349 - DNA, 389 bp, Glycine max
  unsure (1)..(389): unsure at all n locations
anctngaaagaagagatgagttgttgatggattaaagcgtctaatcatatggcgtagaataattaaaataaattagaattgtaacaccctgaaaaattacaatccagactgacaaagaaaactgtatgttgtgtcatatgtgcatgtctgaatttaatctaaatatatatatgtttttaatcgtagaattttcgtgctatgtgtgtgtgtatatgtgtgtgtgcatgcgtgtgtgtgtgtgtgattggtttaataaagcatggcaaagaaatataaattgtttgagctatattttcatttgtgcaagaatcgcactgagcattgagtcacaattgaatttattttttgcgtgagtggactttatggaaggtttactctaattacacata

SEQ ID NO: 158350 - DNA, 433 bp, Glycine max
  unsure (1)..(433): unsure at all n locations
accttaatactcagctcagattaaaagtttacggaggagggttgattagaatacatataataattcattatggtgtataataattagtttaaaaattaaatctctaataaatgataatgaaataagaatgttgtatactttctatccattaaactcaaagctaaatacataaattaagagggtttgagtacgtcctagaaatctagaattcattgtggaacccaaaatcgtgatgtgaccatgattgtggagaggcaaatctgtgttgttatggcttcaccgtgggattggcatccattttttttgtcaccgtgctgccgcccacaaacacacgcactaactgtgatacatagaagcacaattgattttacttctttaatntcaatatgcaaaaccagtgtgcattaagagaaaaaaagaccactttgtcaga

SEQ ID NO: 158351 - DNA, 435 bp, Glycine max
  unsure (1)..(435): unsure at all n locations
cctgaggcatgcaagcttaagaaacatttagaggatttgtnttataanatatttgtgagacctagtgtgtctccatgaggagtaccagtgtcgttagtgaagaataaagatgagaccatgaggttgtgtgtagactatcgttaggtgacgattaaaaataagtactatgtgtctaggatagacgaccttatggaccagctaataggagctagtgtgtttagcaagatagatcttaggtcaggttaccatcagatctgagtgaagtctgaggatattctaaagactgcttttaagacccgttatggtcacaacgagtcgagtatctagtcatgcccttcgatgtgactaacgctcctggtgtgtttatcgattacatgaatagagtctttcacccttaccttgatagtttcgtgtgagtattcatagatgatatct

SEQ ID NO: 158352 - DNA, 450 bp, Glycine max
  unsure (1)..(450): unsure at all n locations
tgaaggagaactngangccatggtcaacctagtaactcatcttgccatgaatcagaaatctacacttgttgcaagagtctgtggtctatgttcttctgcgaatcaccatacagctctttgtccttctctgcagcaatctggagtcaatgaacaacgtcaagcttatgctgcaaacatttataatagacctccttagcagcaaaaccaactacagaagaataattatgacctttcaagcaatagctacaatccatgttggaggaatcatccaaatctgagatggacaagtcctccacaacaacaacagtctgtccctcattttcagaatgatgctgatccaagcaagccatatgttcctcttccaatacaacaacatcagtcacaactaagacaacaagcaactgaggcttcttctcaaccttccttagaagagttagtgaagcagatgac

SEQ ID NO: 158353 - DNA, 161 bp, Glycine max
catgaacacgaagaggagcataaaaaaccgagaaccgggcaaacgagaagaacagacgcaaccgaccacgggcaacacccaaagagagcccgaaaggcagccaggtaactagaacgacaacaaccggcaaagactaacagggcacgaaccacacaaccaaa

SEQ ID NO: 158354 - DNA, 392 bp, Glycine max
  unsure (1)..(392): unsure at all n locations
agcttgtatatgttatagagantttgntttcattgtatcatttggacttgtcggagtatgtgctagggccaccctatgccagtatggacttcgagcatacagtgactgtaacattccaacaaaatttctagttaaaatagttgacatttgaaaggtagttaatgttaaagcatcttaagtagtggaataattattttgcgcatgtgtgatatccttcaatggataagtgctctgaattttaatttaggcttaagaaatgtgtttaggcctaaaagcctggacaaaattgtaaccatgtgaccagtaaagtagaaatctcttataaggaattttttattatttgatttaagctaaaaaatttttcgtggtaaatttttaattagtaaaatatt

SEQ ID NO: 158355 - DNA, 469 bp, Glycine max
  unsure (1)..(469): unsure at all n locations
gacactatagaaactacgcttacccttntaaaatgtgaagaggataaaaaatttttctggacgaaagaatgccaagccttcttctagaaatttaaagaaatactatcatccctaccaaccctaacaaagccaagcccaaaagaaacactgtacttgtacctagcaataacaaaaggggcaatcagtggtgcaccggtcaaagatgacaataaaatccagaagccagtgtacttcataagtcgagctcttcaaaatgccaagttatgacatcaaaggttgaaaaagggaattttggctttagtattctcaactcgcaagttgcgtccatgctcttaggcacatcaagatgtagttaaaacatatcaaccgatcatgaaaatactgcaccaccttgacttataatgaaggatagtaatgtgggccattgaattgtcagaatatgggttggtatacccactgagacaaaccg

SEQ ID NO: 158356 - DNA, 415 bp, Glycine max
  unsure (1)..(415): unsure at all n locations
agcttccacaactttcattctaaacancttttaaacagcacaagctatcacagccaagcaaaacagagcaaaggcagaaaactctgctcaacacatcaaccaaagtcacagccttttctcacgttaagaccacagtaacaattccttcgatccaattcgtttaaccgtgtggatggactctcaaaatttactggaaagtctatagagcataaacgtacattgtgaccgttgcgatctactagcaaacattcagaactgattctgcactagactttgcacagccaaccacacacaagcattttgtgcaccaagctaaaatcctgctgcacctattttgacagcaaaattcttgataagtgcagattcggaaattacatttccttctattaatattgccaaatcaatgttacaagtc

SEQ ID NO: 158357 - DNA, 293 bp, Glycine max
  unsure (1)..(293): unsure at all n locations
tgcttaatcnggnnacgaggaagagtatagactggcttgtttanggagccgctactctacacaacgggatgtcatcagctatctggtatagccaggtgctactcttggtagtggagatttatatgtatacttggctgttcagaggatacataccgtattttctatgcatttatactggaatgtcaacagtgacctattcctatgatagaagattgaccggagaaggaaactatgactcccaaatatccaggcctaagacatggatctgattccgtgtgaatacactatgcatt

SEQ ID NO: 158358 - DNA, 355 bp, Glycine max
cagaaatatttcttgtgttgtggaaagcgctaagcacaacctgccgcgctaagccctatatgcttacgggacttttcaacttcaatgtgggcttatcgctagggtaggctaagcgcttgtgttttaaactcaaacgtcacgttggcacgctaagcgcaactgtgcgctaagcacgccatatgaatatcaatttttaaaaatcaaaggcataggaactttgggtgttacctctgcacctaaaccttctcaccttcttacccttgagcacttgtgaactttctactgcgtgtgtactgcgtgctcgcgtctctatttgcttcattcaacaactatccacgtatggaagcatatttct

SEQ ID NO: 158359 - DNA, 386 bp, Glycine max
  unsure (1)..(386): unsure at all n locations
gcatgaagctctgggctgagaacctattaacagttctttgtttnattttaagagtcttggtttggtgaggagaataattttatgttctgcacttccaatattaactgttcatgcgcactattcacgtagtaataaaattcgttttctgcttcaatatgcaatttcattttctgcttcaatctgcaatttcattttctactgattaatggaaggctaaggctctagcgtttgtttttcttgaggatcaagcacatctttctgtgaggtctagttattaatatcgaattctgaacagtattttctcttcaccaattattgggaatttgctgctattaatccatgcatgcctagggcttgataattatctttggctaatttgcattcat

SEQ ID NO: 158360 - DNA, 456 bp, Glycine max
  unsure (1)..(456): unsure at all n locations
tcaagaattatggcctcatcaaactacttgtttcccgatggatattctataaatagacctcccatctttaatggaatgggttaccactactggaaaacccgcatgcaaatctttatagaagcaatagatttaaatatttgggaagccatagaataaggaccttatgttccctctataatagctggaagtgcaacaatagaaaaacctagagcagattggactgaggaagaaagaagattagtacaatataatttaaaggccaaaaatattattacatctgccttaggaatagattaatactttagggtttcaaattgtaaaagtgctaaggatatgtgggatacactacaagtaacacatgaaggcacaacagatgttaaaagatctaggataaacactttaactcgtgaatatgaactntntangatgaatgtaaatgaaagtatacaagacatg

SEQ ID NO: 158361 - DNA, 417 bp, Glycine max
  unsure (1)..(417): unsure at all n locations
agcaccgcagctgcagctaacataagtgaaataacatattgttctttggcanaagctcaaatcattaatccatgaaactatcaaagcttaaccactaagtagaaattatatctcaaagtttatctacttggtagaagcaacaaggcttaaccattaagagttgaagcaaaacaacaattcaatgcttaaccatccatgacaaaagcttaatcaatgcttaatcaccatggacaaaagcttacatcaacaaaatagaaaaatcacaaaatttgtcttctatgaggacttttgacaaacactttgtgaacctacaataaccaagacttaacaactcatgccaaaagctaaaatcattaatacatgctaaaaggctgaaaacaataagccaaaacagatcaaatttcaatgtaacaatga

SEQ ID NO: 158362 - DNA, 416 bp, Glycine max
  unsure (1)..(416): unsure at all n locations
gagcccttggttcaaccccgaatccaaggaatggaaattcttttgtcaatacttcaacaacatctcatagggatgaatgacttcggcatactgtaagctatgcatggaaaatgtaattatgaaattgagatgcccgaagaaacaccatgtcctagttaaccatgcattatgtaccatgttcaattaatttgtattgttgctgcgtgcatctattcttagaaatgggtttatgatcccaacaaggttggctcatggtgcctaacacatgcaactaagaatgtatagtgaagttgtcacgcttacccgtttttganttgttctgaaaggaaaatgcaggatgagaaacatgaaaacagatgtatgctatttgcacatcaaaaagtagttaaccatatgctgatgagccatgactatgc

SEQ ID NO: 158363 - DNA, 330 bp, Glycine max
ccaacctccaacaagttcaaagttagcacaaaatagggtcacaaatacgcacaacaacgtcattctaatttcctctaaacttatatgctaactggagacaattttaagacacgctctcaattgggtcttccaaataaattccaacctccaacaagtcaaagcttgcacaatattgggtcacaaatacacacaaaaacttcatcaaagttcccatagacagatttactaactgtaacaatcttcaagacacactctaaatgggggtctttcatcaaattcattccaacctccaaaatgtcacactctgcaaaaatgaccaaaaggagaaag

SEQ ID NO: 158364 - DNA, 367 bp, Glycine max
  unsure (1)..(367): unsure at all n locations
cgnctcanagagatccangaaagacgaagcggatgcatgttctatatccgctcccaaatatgacactcatcattctatgatcactaagcaccagcagcgcttctaagccatcaaaagatggtcatttctcccggagagacgcattctacttagggaccacgaatgtactgacttccaggaagagatacttgccagaggtgggcatcgcttgttacccccatggtcacatacgacccagacatagtcctcgaaattataccaatgcttggccgtataaagagggtgtgcgagatatgcgatcttggatgaggggtcataggatcaatttcgatgcggatgcgctaaagcagctcctgcgataaccttt

SEQ ID NO: 158365 - DNA, 357 bp, Glycine max
  unsure (1)..(357): unsure at all n locations
agcttgtctcgagaaatatnggttctaatatggtactaattgcatatttatgggcttgtacagatccaaaaaatttgtttagtggagacaataatttttttatcaatggcaataaaaacaccacaacaactatcatttatatagatagatagataaatatatacccaaatattgttattgatccataataaaattttcttcatttttgctccctgatatttgacattggtgtttaaattgtagtcattagttaagtgatgacatgtcactactataaaatagggtttcaacattggttattaaggactttccacatcggtttttaaccgatgatgaaagtaccaactgttgaaagta

SEQ ID NO: 158366 - DNA, 433 bp, Glycine max
  unsure (1)..(433): unsure at all n locations
atagaaactcaagcttagagaggagcccaatggaggaaaagaatgattttgtatanagagagaggggagcacgaaattgaaggaagaagaagggagagaagttgaactntgagttgtgtctcataagactctcattcatcaaagttacaacaagtattacatatgcttctatgtatagactaggtagcttccttgagaagctttcttgagaaaacttccttgagaagcttctttgagataacttcagtgagaaactagagcttagctacacacacccctctcataactaagctcacctccttgagaagcttccttaagaagattcctaaagaagttagagtttcagtacatacacctttctaatagctaagctcatctccttgagatgagaagctagagcttagctacacaccttcgtatatagctaagctca

SEQ ID NO: 158367 - DNA, 441 bp, Glycine max
  unsure (1)..(441): unsure at all n locations
agctttgaagaggtagagagcatgggagctatatgacttcttggcactaagtgccacaaaccttagcactaagcaccaaatctggtgctaatcctaacatgttctagcgctaagcctaaaacaagaagaaaataacttgttctttgacctcttaggaataagcgtggggggcatatgtgctaagcgtgagatccatggaattttttcatgagagtgaagaatgaattggacttagctcttaagacattattgactagcctactgattgtttctttagatatataataatcaaattgccttatgttgtacttaaggttgtgagcaaggatatgttaaaacatcgccactgctctaattattggaacatnttgtatacttacttatccatagcctcctagaatattctaccaagcatgagaatacactcttactaaccctcaa

SEQ ID NO: 158368 - DNA, 452 bp, Glycine max
tcatagggagccatgctaatcgtagagtgaaaactattgttataagtgaactctatcaatggcaaaaaactcttccaactccctgtttgttccaagacacacgccctcaaaaggtcctccatcgactgaatggtccgttcagtttggccatcagtctgaggatggtaggctgaacttagtctaaccttggttcccaatgctctattcaagctctcccaaaatgtagaggtaaacctaggatctcgattagacactatgctagatggcacaccatgtaatctgaaaatctcactaatatataaggaggttaacttctccaaggaaaatctgatattaataggaataaagtgagtagacttggtcagtctgacaacaataacccagatagaatctaaacctctgggatcctaggtagtccaacaacaaaatccatgataatattgtttccactg

SEQ ID NO: 158369 - DNA, 252 bp, Glycine max
aaaaaagaagaggacgagacatcccgaccaaaggaaaaaagagaggaaaggaaatgcccaatcaaagagcgggagaaagcaacaagaaaagaaagaaaatgcctaggcaaaaaacaggggaaaggaaaaaagagagaacgagaagaatgaaagaaagcccccgaacaaggagcgaaagaaaacagaagaaatggccagagaggcctttggacgcaacaaaatccgaacaagacggaaaaggcaccaaatgaa

SEQ ID NO: 158370 - DNA, 357 bp, Glycine max
  unsure (1)..(357): unsure at all n locations
aagacacctgcggcatgcaagcttcctagtagctctanatacgaaatttgaaaacacaatgccaaaaatgttcgatcagatattaaacaagcgtgtgacaatactacaaaaaggatattctaccacacacattctacgacggttataactgatccgtcttagaatgtgacccggtgtctatttttgatataagacaatgaaaattgttttgacgacacacattttaagacggttatacgaaccatcttagaatgcgattgggtgacaatgttgtaatttggcggtatgaaaccatgatgattattaacacgaaatcgtgctggatcttgattcacaatctaaaatcctagtttaatt

SEQ ID NO: 158371 - DNA, 438 bp, Glycine max
  unsure (1)..(438): unsure at all n locations
gtgcctgtagggctaggacctcatcactttctttctaatctntaacctcatcgtctctcacagtgtttagatttgggagccaatccagtccttgtgttcggactctcagccacttatgatagccgccgatgatcccattactgcttcccctaagctctctgtcctttcttcacgctgcatcccatgccttgcgaactccttggagtaccctcgcgttgtggtcactgaaacctcgtgcgatgaaaggcgtgatgctttcgtctaatggcgctcctctcatggggtagccaagctgtcttatggtgagaacgggattataattaatacaaccccttgtcccatcaagggaacatgtggacatccctcgcatgaagatagaatcttgattcttccttccttctagcgagggaaccaattaacagacgcccccccatgcta

SEQ ID NO: 158372 - DNA, 401 bp, Glycine max
  unsure (1)..(401): unsure at all n locations
ctcagcgcattcgtttcaatttcagcgtctcgatgtattatgcgcctaaatcggacctccgtgtgacaatttatgaccatctgaatttctcgagagcattcgcggttcacattccaacttctcgatatattatgcgcctcaatcggacttccgttgaacaattattgtcntcgtaactctacttagctttacaagattggctgaaattttgcttaacatatacacttacacaatgaaggaaacccggagttgctgcacatgattgctaacattttgtaaggaatcagattgggctgcccatgcacacgtaagatatatgtcaatgaaaattgaactgccgatcccgatgtcgaaccatgccagacatctgccgaaagacgccacatacattgtttatctta

SEQ ID NO: 158373 - DNA, 380 bp, Glycine max
  unsure (1)..(380): unsure at all n locations
ctctccctaagatcgaaaatggtaaagaagttatatggttagtgggagagcactctcaaacaactgatatgtctcttgctgggacattaatgagtacactaaccaccatgaagtttgatgcctcacatattatgcatgagcatgtcattgagatgacaaacgttacaataatacttaagtaagaccttgngaatggttgtgaatgagaacttccttgttcagtttattctagactcattatcgtttgagcatggtctggttcaaatgagctataataccatgaaagataaatgaagtgtgcatgaatngcacattatgtcagttcaagaagaaacgagacttaagaatcaacgacgtcactcattccattatgtaagaca

SEQ ID NO: 158374 - DNA, 284 bp, Glycine max
  unsure (1)..(284): unsure at all n locations
aagttcctttctctgtatcacattgattaatatcaaagagtcttctttgtaagctaattgattntgcaaccacaaataattaactggtaagattttcaatgatacaatcattgcctatagtaacatcttaaaattaactnttgttgctttaaatattgttttgttagaaccttcttggagattttgcagagttataaagggaagcaaaatttgatacgattgagctacatggaccactcactctgcaaaaaaaataatgtcttcttctaatttgagataaaaaa

SEQ ID NO: 158375 - DNA, 309 bp, Glycine max
  unsure (1)..(309): unsure at all n locations
atacttccatgggaaggacaatgtagaggcttatttagattgggaaatgaanggtgagcaactctctgcttgccatcatacaagtaaggaaaggaaggttcctttggctacccttagcttccaagggtaggccctctattggtggactntccttgattcaatcatgaagcttgcttctacagagaaaaggaaagaaagccttaagaggctaacattaaactcccatacttncatgggaaggacaatgtaaaggcttatttatattgggaaatgaaaggtgagcaactctctgctttgcatcatacaagt

SEQ ID NO: 158376 - DNA, 393 bp, Glycine max
  unsure (1)..(393): unsure at all n locations
ggtagtaaacgtngtgtctatgtgagggtacaattgtttgagcanaagccaatttgatggcagccaaaatccaattaccaagcaaccaatggtaggagtgattagaccgatttgatggacactgatatcagcctttatgttttcgaagaaagcaaatatttttgtaaattttgtttcatattatttgttattatcattatttggtaattggctaatacacaaaaattgcatttctgttaatttctttctggtaatataattaaagttaaatattaaattaaaaaataaattctatacattttgaagatatctatctgatatttaaataaattcatacatttttctcatatattatttcatattaaaaatgtactaatcacttctatagtcata

SEQ ID NO: 158377 - DNA, 463 bp, Glycine max
  unsure (1)..(463): unsure at all n locations
ttgtttagtgcgatacagctggacaggagcgattcaggactataacaagcagttactatagaggagcacatggaattattgtaagttagcttcattctatcatcttctgcatacacatacttgcccagtgccaggaactaataaatttctccattgcaacagattgtctatgatgttactgagatggaaagctttaacaatgtcaaccactggttgaatgagattgatagatatgcaaatgacactgtatgcaagcttcttgtggggaataaatccgatctagttgataacaaggttgttgactcgctaacagccaacggtaaatactaaagccaactctaattcttttcactctcattctatcaccaaatcaagagccattacagaagatgtgcactatcttgatagaattntctattaacttgaagtcagtttctcttacataaatagaattaagatcttt

SEQ ID NO: 158378 - DNA, 475 bp, Glycine max
tctggtcaaagaaaccagaagacatgtgcagagaggtctttagaccgtacaatatctgaacaatacagaattgtcactaaatgaacaaaaagaaggaaaggaaaccgtgacctaaaatggtcttctccctttaattgccaaccaaaatcagtgcgctagcgactttttcgccccacactaaacaaaaacagaaaaggaaaagccaacaaaaaatcataagccaaaaacacacaaaagccgaaaaacccaccaaaagaacccattcccaagggaagtcctattgatccatgatcacacatgtaatttttgatttgataggaaataatttgcaaagtcaagtcatgacatatctatggctcggaattaggatgaaacacttacctgtgcaagattgatacaccttgagtgattttcttctatttttgtcgaacccgggtgtttctctaaatgggcatttagaaacgaaatgcttaca

SEQ ID NO: 158379 - DNA, 333 bp, Glycine max
  unsure (1)..(333): unsure at all n locations
gttcccaatagacttacattcctctttgctacttctttttgtttaagtttccttatcctaagactaaaaccaacaactgtgtgctatgagcttntgtgttcttttaatatggatggaaaagtagtgatttatgtaagtgtaactattttactatacaagaaatgaagttgtccaatggtttactttgattgaatgcaaagagcatggtgtaataggggacatgtgggatgcatggcctttgtcccatgtaagggaaaatgtatctttaatccacacttatcatggattcaagggtactgctatgtgcttctacacttccattcttaacattat

SEQ ID NO: 158380 - DNA, 376 bp, Glycine max
  unsure (1)..(376): unsure at all n locations
cacttaatatcatgtgttcagggttgtttgttaaatagctctcgccattgatcattgntgggttccatatgacgatattctcaccagccaatctgacacagatctaatcactgaggtgagattctatgcattcaattttcacttaagagtaaacataagctcactgctttgaaatatttaataactgctatcttttccttctccaatgtcctcgatgagtggctgcttcaatttgcatgtggcatcaacgtattatgtcttgcctttatatattatctactttgtactataaatatgatctcgattcaatttctaatttctggatatattacaacgcatttaccttgtgacttaatactgtgttaacgacttatca

SEQ ID NO: 158381 - DNA, 443 bp, Glycine max
  unsure (1)..(443): unsure at all n locations
ggagtggagtttcgccttttcttgaagttgcatgtctatggttntctagagagagaaaggtccaagttctatagagtttgagagaatttgcagtgtgaagacccgcagagaattgagcttgaagaggaagtcgcattaaagagcttgagataagtttgtgagtgattgtgaggtcctagaggtggaggagacatcctcaccacttgtatttcttcaatccttcatctttctcttcttttgttgaaaggaagcttcctagttatggagagctaaatcctctgttggttcttccttataggtacttgatgtaaatacctgtatatctatttaatgatgttttgtgtgtttactatgctatcagaacttcattctatcatgcttttgccttgatcatgtagatgcatgtngttttaggatcattcaatagtggaaactggtctgat

SEQ ID NO: 158382 - DNA, 471 bp, Glycine max
  unsure (1)..(471): unsure at all n locations
tactaagcttagttgttatgtatggggaaggtgttagcacctcacgtgctcgttatgattattacaacctttaatcgagtgtgctaaaaataaagtgactctctaattatttanttttccttgagaacatgagttatgttcgctatatcttttgtttatttaggaaaaaaagaaagtgaatttttattttctaggaaaaaaggaattttatgtnttttttttaattttttaggtcaacaaggggtttgccctcgctcgtacatatctttaggtgcaatgagaaaatcaaacttacatagttctttgggtagaaaacagtttgtgtgttgtgttgattnntttttgaaagatatagtttaattgcgtgacaaagagtcgttaaggcgttggaccttgaanacgacgttaattttaagaaaacagtagagagaatcgcttaaggcattggaccttgaagcgatctccagtaat

SEQ ID NO: 158383 - DNA, 470 bp, Glycine max
  unsure (1)..(470): unsure at all n locations
gcttacaganaatacatcccatactacagtgatctcatagagcattaccagaacaaaatcactgaaacagctaaacagaacaatggaccagtgatattggctaacaaacaggatgatcaaatcagaattctatcaaattcataaagaagaaagcagcatatgttaataacaaanataactatgttaaagagaaatggcaactgaccttgcatctggcagcaacatcctgagctgcaagcatagcagcataaggagatgattcatctctgtcagccttaaccttcattccacctgaagttagaaagcaaatacataaggaaaccacacaagtttcctatatatctactaaaaaggaaaagacaaccaaaattttatctaacggtaatgttagcttggtgataagcaaatggatcccaagttctgtgaatangaaaaatcanaccactaagataaagcacaacaaaatttta

SEQ ID NO: 158384 - DNA, 396 bp, Glycine max
  unsure (1)..(396): unsure at all n locations
atcctgactcaccataaaccttgacccaggtgagaatgtctatccttaccctcggattctaaaaaagaatagaggggaaatttccaatcaaagaanaagagaaggaaaatttccaatgaaagcaaaaaaagaaaagaaggaaaattccccaatcaaagagtgggagaaagcaaaaaaagaaaagaaggaaaattccccaatcaaagagtgggagaaagcaaaaagaaaagaaaggaaaattcccaatcaaagaatgagagaaagntaaaaaggaagaagaagaaggaaagaaagctcctgatcagggatcgaaggaaaaacagaagaaatgtgcagagaggtctttggaccggacaatatatgaacaatacagaattgtcaccaaatgaaccaaaa

SEQ ID NO: 158385 - DNA, 297 bp, Glycine max
  unsure (1)..(297): unsure at all n locations
ttttctaatgagacagaaaagtagcaactgggaaacatatatgtataaagcacaacgcaaaagaaatctaaactgaagtcactntaatctgtcaccccatggtgtgtctctcgttaaaaacaaacactcagacattactatatcttttcacaagctggaatcttaatcgctattgtgatattaacatttaaatgtgattatatatctaaaacaattgtagaaactcatcagctcgatatgttcatgaagagaaatattatactctggaaactctcttttcaggatactattttttta

SEQ ID NO: 158386 - DNA, 343 bp, Glycine max
  unsure (1)..(343): unsure at all n locations
ctccatgagaaaattttattacccgataatgtgagataatgatgaggacggtacttcaccgcctgcatatgaaagaataggagaattttctttggccccaaactcttcagcagaaattgtgatttgtacttgctttgatgtactctttagaaacccaaagaacaggaaagaaacaagcagcagtcaatacaaattctccattntatatctaagtatattnttgggtttaggtgcgtaaatttcttgctcagtggaaaatgacttcaaagcttaaactaaccatattctcaaaattagagggaacttgaatggagattcttgatcctcatttaaaaatctgact

SEQ ID NO: 158387 - DNA, 431 bp, Glycine max
  unsure (1)..(431): unsure at all n locations
tcctacatgtntaatcaaaatgtcaattggtatgattttattatataatgtcattgcaattaacatttatagggaaaataatatacctcattacatacagcttccacaagatgagtcagccacccaacgaatgtgccaatggcctgcctcacaaattaaatctctaatgtcagaaaagggacctgagcatcaccgtcgtaaactttcacaacactcaccctaaccacatcatctgcataagggacattgtgtatggtggacgcactgtcatacacttttcccaatgccactagttgagtacactggtcatgaactatgtataagcccatagtatccacgtgcacatcagaaggctctntagcttatggaattgtgtcaccttcatcaccgctccccttggtgctgacacgtgcagctaacacttgtatatc

SEQ ID NO: 158388 - DNA, 422 bp, Glycine max
  unsure (1)..(422): unsure at all n locations
ctacaacttnctttctttggcgaccacaagtacttccagatattcgtgtcttcactttagcatggagaaactttcattagaagcaattaaatgactagttactcggactgtgtcaccaatagagatttgttaattgagtgtatggactgttcaagtattgataaattaacaatttttacacttcttaccgctataattaaaaattcaagacgaatccttgatttcttgtaactcagcaatctactcagtcatccaaatatttggcgcacaggatcaagggtttcaatctttacagtatttcctattatgtttttatgataaacattacgtggcgggattggattcgattcagagtgagacacacagtgaaccaattcactgaatcatatcataagtacatcggcaacaaatgccaaacgtgc

SEQ ID NO: 158389 - DNA, 341 bp, Glycine max
  unsure (1)..(341): unsure at all n locations
tactaagcttcacattcaatntcgagcgtctcgatatatgatgggactctatcttatatccgagtaanaagttattgttgtttgaattggctcagagcttcaacattcaatttcgagcgtctcgatatatgatgggactcaatcagacatccgagtaaaaagttattggtcgttgaattagctcagagcttcaacattcaatttcgagcgtctcgatatgttaccggactcaatcanacatccgagtaaaaagttattgtccgttgaattggatcatagcttaaacattcaatttcgagcgtcttgatatggtaccggactcaatcagacattcgagtaaa

SEQ ID NO: 158390 - DNA, 416 bp, Glycine max
  unsure (1)..(416): unsure at all n locations
cttcagatcctgctttcaagattagaagctatgttngctatacgatggctggcatcttccccttccttgtcattaacatcatttctatcacaaaatgaatggctcaatttaacttcgttcccattgtccttgacagttcttgctccttcaacacttgctgatggaaaaacatcagatggaggactagacaaagccttgccatttccaacttcttcatcaccaagacatctaacttcattagaagaatcggataattcaataattgacaactttccctcttcatcaaaatctttttcttgttttgcattaatcttggaagtaaaaccaggtggtgggccataggatcctncactctctntcttcatagatgatgatgtggtaacanatgtctgggctacttacacacaatgatcatg

SEQ ID NO: 158391 - DNA, 410 bp, Glycine max
  unsure (1)..(410): unsure at all n locations
tcgggttcaatggccccaatgacatctatccctcacatggaanaatgctcaagggcggacatgacattcagaggatgtggcggaacattgacattgttcgcgtatngcttgacattatggcatttccttacatgggcgcaacaatcgctntccgtagtgagccaataataaccggctctaanggatcttctggccatagcatgcccattggcatgtgtcccaaatgaacccctgtggatatcctcaatcatgtagttcgtctctttggcatctacgcatcgtaggagggtcatgtcgtggtttcgtttgtaccggatggtaccactcacaaagaaactagtagccaatctccttaacgttcttttgtcattgtcggaaatccctggtggatattctttgctctcaacata

SEQ ID NO: 158392 - DNA, 463 bp, Glycine max
  unsure (1)..(463): unsure at all n locations
agaactatgactattgaagaatctattcatgtnttctttgatgagtctaatgctatttctccaagaaaggatatnttagattatgttgcagaatctttagaacaaatgcatattcatggacaagattctaaaggaaaagggaaaggaagcaatgaagatcctccagaagaagccatatcaaatgatgaacttccaaaagaatggaaagctttaaaagatcatccccttgacaacattattggtgatatctcanaaggggtaacaacttgacattctcttaaagaattatgcaataatatgggctttgtgtctatgggtgaacctaaanatataaatgaagccataatagatgatcattggatagttgctatgcaagaagaccaaatcagttngaaagaacaatgtgtgggaactgtagagaatacctgaaattcccattataggacaatatgggtttttggat

SEQ ID NO: 158393 - DNA, 399 bp, Glycine max
  unsure (1)..(399): unsure at all n locations
ttcgagcgtctcgacatattacgggactctatcagacatctctagtaaaagttattggtggttggaattgctcagagcatcggtattcaacttcgagcctctcgatatattacaggactccatcagacacacgagtaaaaaagttattgtcgtctgaatttgctcagagcttcaatattcaatttcaagcgttccgatatnttacaggactcaatctgatancccaccaaaaagttattgtcgcttgaatttgctcagagcttcggtattcaatttccagcgtctccatatattacgggacttaatccgacatcccagtaaaacgttattgtcgcttgaattgctcagagcttctgtcttaatatccagcgtctcgacatatttcgggactcattagac

SEQ ID NO: 158394 - DNA, 482 bp, Glycine max
  unsure (1)..(482): unsure at all n locations
aagctttatgattnntatatttttcaaataaaaagagatcgctagaaagattgtttatagaaaatgataggagctattagaaagattctgggtgagacaagagagcagcaagggctgagtgaaaatgtgaagagaaagagaaagagattaagggaagaagaaaatgggggacaaagtgtggagagaaagaagagaagtttgatttttgaaagctcttttatcttattttattaaaaagcatttttttcataaaaaatactctacttagttctaaaaatcctttagaatgtgattgattcatgttttctttttaaaaagaagaaaattcagaataaactaaggcaaattatctttgttgatgttatgttctcatgttaattaattcttctaatactttataataatattaaataaacacacttctactaacatcagttttgaagatgattctaaacaattaacaatatactttattacatata

SEQ ID NO: 158395 - DNA, 419 bp, Glycine max
accacaggtgaaagattatactttcaacagttgaatatttgtcattgaatcatgtcatagatatcgaaattatcgagaaacacgaactcttgaacacatattgaaatacgtatgtgcaatgatttttgaacacctcaattttttaaacacttctatatcatctgctaatttcttcctatcatgtcataccatttatcatacattcatacttataatttatctttttttatctctcttactaagtgtcaaatagtatttgaggtatctaaaaatcattttagaatgttatcttctcaacaataagttattatatagacttaataatggattctagacaagtttaagggggaaaattataccgagtgcatacgggacttcttgttaagggagtaatggttggtgagatgaataatgatcat

SEQ ID NO: 158396 - DNA, 393 bp, Glycine max
  unsure (1)..(393): unsure at all n locations
tactcagcttcatgaggttcgtcctaattctctcaattgcatacttcttatgagctggtgaagaagaatgtggcatctacctgcggtgaaaaacaagacaagcctttgctttgctcaaagaaaagcttactaaggcacctgttctagctcttcctgactcttctaaaacttttgagctagaatgtgatgcctctggagtgcgagttggagctgtattgttacaaggtgggcaccctattgcttattntagtgaaaaacttcatagtgccaccctcaactaccccacctatgataaagagctntatgccttaataagagccctccaaacttangaacattacctttgttcccaggagattttcattcatagtgatcatcaatcacttaagtaca

SEQ ID NO: 158397 - DNA, 259 bp, Glycine max
  unsure (1)..(259): unsure at all n locations
agcttcacaaacacanagctcatncactggatccgcgctgtttcctcattagaaacttgttagcagtattggtcgaatagataccgctcgaatgttgcttccaattcaagaatctgctccttgttgctgaactgatatcagccttgtttcctctatgaattctgcagccattgaagcttcactatcaaatacgtgtctccttcaattaaaattccatttccaccccttcctccttgtggcttcccatgtgtctgatagt

SEQ ID NO: 158398 - DNA, 459 bp, Glycine max
  unsure (1)..(459): unsure at all n locations
cattgccttaatcatntccaatatgcatgtgaattatgacgcatcaacaagaatcaagccaaggctattgggccagcaatcaatggggcacaacacaccaaatgattataatgatggatggctcaaattctcacaaaggtaaaatcattactttcaaattgagctttcaaaactattatgacatgtagagaagaatcaacgatttcaagtcacaaaatgtccagaacttttattttcaaaacaactacccatttcttgaacatatcctgtaattcaaagaaaaacatgcacagtcgtacctgcacatganattgaccccaaatattaaactgaaaatccgacgaaactaacaacattaacaaattaacacaactaacaaattaacaaaacccacaaaactagccaaacccaagaacacttccccccatactttaacaacacattgtcctcaatgtagca

SEQ ID NO: 158399 - DNA, 476 bp, Glycine max
  unsure (1)..(476): unsure at all n locations
tggcaaacttctggtacgtgtaacgctnntgtcaaactgactagtatttatatctaggtccatcanagatgtgctantttccttggcagtgaacacattacgaggagcaccatggctttctctggtagcactcgtattatccaccaacaatcacatacccaaaactgacattcattactgcaccccttgcagatcctgataatacaaaacttgtagtccatttnccagagattttctcctattcaagctcttccagtgtgagagggagcaaccttgtgagatccacccggtgctntcccaaatcaagtactgcggcaccaaggaaagaagcagcataaaatgcttagcttcatatttagcagaattatggggtccactgctacttccatggatagaacaattgcgagtcaaaatgtcttgaaactcagccccaccttgaataaccttagctggaggggtcaccaaaagtgcacccc

SEQ ID NO: 158400 - DNA, 204 bp, Glycine max
  unsure (1)..(204): unsure at all n locations
cgatcaacacacaatattctgtgtcctactcaagccttgctagctcttaacaatcnanaaagatatgatgtttgagtttgaccactgactaattatgtggtccgcctatagatggattcacaatcatcacttagtatttttctttcaatatgtccacagtgttctgagagctcttgaactctacataacatatcacagaatgtt

SEQ ID NO: 158401 - DNA, 190 bp, Glycine max
  unsure (1)..(190): unsure at all n locations
cgatatattatccggactcacatcacacatncccagtcaaaagttattctcgcttgaattcgctcacggcttcggtaatccatttcgagcatctcgatatattacgggactcaatcagacatccgcgtaaaaagtcatttgccgttgaatatgctcagagcatttacactcacattcgagcgttcccata

SEQ ID NO: 158402 - DNA, 473 bp, Glycine max
  unsure (1)..(473): unsure at all n locations
agacttatgtgtntntcttccctctcaatagcttccagatcatgcttaaagagccttccagggtagactttgatatatatggttggtgaagcttcttcatcttcttctatcaataacagtttcccttgtagcaattagcctttctgaacaaaacaagcttgtccactactatcttgaacttagtgttggatgtggccacacaaagacacctacccttagcccaatctagaaaaccctattctagcatgcctttagaaattcatgcatacactaacaacatgtaaaacacacaatgttaacaacttacttttaccatgaatgcttcaaaaaatgaaagttagaaggtgtgagtcgcacaaacttattcttagaactctttcttttctcttaaaagtgagaacataaggtcattatntatagagaaaatagttataccgctgtatcgttatatcaagaagtatcgattgatatca

SEQ ID NO: 158403 - DNA, 392 bp, Glycine max
  unsure (1)..(392): unsure at all n locations
actttgcatgtgtgctcagtgctcacatgcaaacttagcacacgatcattntcaaaaagcatgactacacaacattntgaagattataaaaaggttgcattatgcttttggagggagctggtcagcaagggcacgaaatagagaaaaacacccactttggagctcttcttcttccatttcctttgttccattttttttgttcttaagcttctcatgactatgagaggttaaattacccattattaggggtttggataccaaccactctttgatgtaatgatctttactatccatttaatggtctttcaatattattggntcctttctaagattattgtcttgtctataggtngatcatccattcacatgtatgttatatggtttcaatcatt

SEQ ID NO: 158404 - DNA, 338 bp, Glycine max
  unsure (1)..(338): unsure at all n locations
ntataagcgcgggtctgggagacanaggtcaagtgttcgcgatatgctgagatgatgttccgagtactttggatntggtacgaccatgccctcctgatttccagctgggaaattggcgagtggaagaacgccccggcatttacgcaacgagcataatatccgatgacgagtcccccgaaggtactaatacctgtgacccgcctatcgacttcgagcaagaaatgaatcaaatggaagatgaaggaaacgaggatgtgggacttcccccagaactagaaagaatggtcgcccatgaggaccaagaaacggggcctcatcaagaagaaacagagctagta

SEQ ID NO: 158405 - DNA, 325 bp, Glycine max
ataagtcaaacatatgttccaaaaactctaaaattaaaagaagcattttgttagcatcaaccttaaaacaaacatatttgaggccagctctggaatttaagagttctagttgggtaccttcaaggactctctgacatccaagtcaatgtcgttatttaagcttactaataggagtcatattatgtttattgtgtgataatgcatggcgtgccttaagctaatctcatgattagcagttattaatgaattgtgttcacgatctcatgctccacacccatgcatgtctttacggtatagtaggaatgttctcgagtcttcatgcgat

SEQ ID NO: 158406 - DNA, 400 bp, Glycine max
  unsure (1)..(400): unsure at all n locations
tgaagatgntttanaagaagtntnggctgttacatgcgcanatctttttcgtggcattngnattggttatcaacttgactgatgcatcttagtacatttcatatctatcttgcatgtggaagcaaagctaccatgatggtaatcgattacaccattatggtaatcgattaccaatgaatgtctttgaagacaatgttaagagttatagctcttaacatggtattctcaacacgtatcaacgctctataaatataagaccttggcacgcatctttaatatacaataacacagaagaacacatctgattacacagaactttccactgctgttctcttgcaaaaactttgccaaactcattcttagtttttttcaatctttcctctgagaaaggacaattctg

SEQ ID NO: 158407 - DNA, 364 bp, Glycine max
  unsure (1)..(364): unsure at all n locations
tactcacgcttctccttcctttntcctataataggggaaggagggaagaacatatatgttcaaccttcctggtatctgagattcactgaaaattactgagaaaaattgtttccatgaagaanatccaagccgaggcgcttncgtaacgctttcatgacatttccgtgggtgatttcgcgaagattctcaatccgtcttcgtcgttcatcggtcttcaaccggtcagtttccaaaattcaatctttcaattctttctatgtacccttagtggtcctccatggtttcgcgtgctcttattttcatttcatatacttttccgacccccttttgacgcgcgttcagtaattatttaagtccttttctc

SEQ ID NO: 158408 - DNA, 384 bp, Glycine max
  unsure (1)..(384): unsure at all n locations
tncatcaagtggtaatcagagcacaagagcttcaagtaggtgctccttatacctncattaattattttgctctaccttctcttccatcgtcgtttcttcatttttctccatgtatctcctcacatgtctagtgctaaatgttgttaacatgattctttacaatttccaccaattaaaatagctatagaagctacatttaattctctatgcgtcaaatttcttgttcatgttcttgaaccatgagttgtgttgacgttacgttcctttgaagtctgtcttgcttatcttttgtggctgaaacctacaacataaaattcttaccaaaatattatagtagaagaaaaccctcnaaatctagagtgacttcgtcacctgttgagcttt

SEQ ID NO: 158409 - DNA, 427 bp, Glycine max
  unsure (1)..(427): unsure at all n locations
gcttaaaggtgatagaacttaatatcgcatggttggaactcttaattacttgcattnttttatatacgtgtacgtcttacccagcttcaattatataaacatgcttctgcagtggttttatcttcaacacgtctttcaaaaccaaattattagtgtgattggtacagacacatttggtcattctttgaaattcaattggaaggtgacttttgtcttttaatttcttgcatatgtttctctcttttaattatgtttcagacatacagagattaatcttataaaatacgaatatttatttatgagaataaactcttgaccacgtatntaaaaaatataattatttgctcatcatatcacaccaatcaagatattagtgaaaattaattatcacatcaatggttttactccaacaagtcgaggatattta

SEQ ID NO: 158410 - DNA, 388 bp, Glycine max
  unsure (1)..(388): unsure at all n locations
acattctctggtcttgtcaatggtacccacatagatagcaagatcttgctgacattaagaaaagctgtgttcgagtccacaacatcttggatcagaaccgggtactcatcaatgagataaaccacaatcatgagtccaacgtccctgacaacctcaccagaaacgttggacttattanggagctcaacaacaacatcagaagagtggttgacctttatgcggatctttcagttctttcaccaaatccatggaagattcttccgaacgggattcaagtggtgctgtgaaatctgatggcgaagctggccacaagcgacacatgcctctttagggagctctgtttctttattctgtccttttttttgcttggtggggatgcacgacataa

SEQ ID NO: 158411 - DNA, 278 bp, Glycine max
  unsure (1)..(278): unsure at all n locations
atttcacattgtctgcttcaccatgaaacccccagatgtccaagaggatcacatatttctgaaggcttttcctcattcattanagggagtggcaaaggactgnctgtattaccttgctccaaggtccatcacgagctgggatgaccttaagagagtattcttagaaaaaattttccctgcttccaggaccacaaccatcaggaaggatatctcacgtattagacaactcagtggagagagcctgtatgagtactgcgagagatttaagaaactatgtg

SEQ ID NO: 158412 - DNA, 358 bp, Glycine max
  unsure (1)..(358): unsure at all n locations
ctaagctnccaagcaagcttcgaccagagatgctcgtaatacgatgagggagtctcgttccataactntngacacggatgtccggttcagacccataatatatcgagatgctcaaaattcaacaaggaatcctccggaatgttcgaacgggcgtaactnttgactaggatgtccaattgaggcccataatatactgagacgttcgaaattgaaaaaggaaacccatcacacatttgaacgaccataacttttaacacaaatgtccaactcacacccataatataccgagacgctcganattgaacaaggaagcatcaggcctaatgaaacggccataacttttatgatagatgtccga

SEQ ID NO: 158413 - DNA, 493 bp, Glycine max
  unsure (1)..(493): unsure at all n locations
gctctaattaataataattaattgaaaacttacgagtatgattgtgtcttctaaatgttaatatatcgagaaattattctctaacttttgactaanaatacttgagttcacctaanaaaatatcaagtgaatgattaggaaatgagaaaagtgatatgtgcataatctattgacaattttagaattttatttaaaacaatcttacaataacaacaacagtatcaagagaattgctaataatatgctctctaatatattcatttaaatatgtttttttttgttatggactaaaattaaccaaaaattaaaaaaattacgtgtcttactttntatttaatggagtttattaataattctataatttttaacaattctaattaattattaaaaaatgttagaaagagtattatagaaatgtggtattagcctctaataacaaccaccaataaataattataatgggcatgaaacgtcattnnttatctattaaaat

SEQ ID NO: 158414 - DNA, 443 bp, Glycine max
  unsure (1)..(443): unsure at all n locations
atttatacttcacaatttaataatagtaacttttatattgcaaatggagtntagaaatgatgaatgaaaatcaaaagaattgaaatgaaatgactaagacaatgatgaagattaacaaaaaatcagaataaatgttcaaaacaactaatattaaggatcaagttaaaaatttcaagactattatcaaataaacatgacataatataacacattaatattacttatattagtttactttaaatgtaggcttatggtgaattgggtaggacctttgctgtaagatgaaaggatcaactagaacatacttgacatctatcagactataaggacaacatgcactttgttacatacaatcaagatatggtgaaactaactatactagttcgatagacaaaacctatagatntctacagactcacagaaaatcattaagtgactatgat

SEQ ID NO: 158415 - DNA, 326 bp, Glycine max
tgaacattgagatggtagctttcattaatccttaacacctttggttgcctcgaaaggttagaatataaacttggcttttaatccatatcctctcatgtcacgtaaagctgctaattttaaagtgatgactacagaatacaattcaagttgttattttgaatatatatctaagttttagacaaaggtatttgactgggactaggccgattatcctacgttcatgtgctcacagactgtactaaagtcatgtaagtgctgtagtcaacttttgattggagcctgatttatattattaagcttgcgtttccgttgagtatgtgaatcta

SEQ ID NO: 158416 - DNA, 387 bp, Glycine max
  unsure (1)..(387): unsure at all n locations
atactcctcatgcttctcaccatgtctaagaggatctatnnttgctttctgtcacaccattcnganccggagaaccagacatagtgtattgcgcaacacttccatgttcttgaagaaatttcgcacatgacacctggtgcttgtccatcctctgtgtatctaccatagcactcctcacctctatctgatctcacgaccttaatttgatctccacattgnnntgtcacttcacccttaaaaactttanaggcgtgtaaagctccattctctcaacgaaacaactacacatacctatattcggaataattatttataaagggtatgaagtatctcggactatttcgatctcatgttctggaccacatatgttcgcatgtattgattcta

SEQ ID NO: 158417 - DNA, 185 bp, Glycine max
gctcatggctctagtgactggttacttcctacggaggattagatcatccccttccccttgaagaggatttgacctcaaatctgttggctccttttcctcagtatcagctccaccttgcaaacgaattaaatcacacatgttaaaagtggtgttaactccacactcttctaagaggttcaacctat

SEQ ID NO: 158418 - DNA, 332 bp, Glycine max
  unsure (1)..(332): unsure at all n locations
tcttcttatccaaggctcattgtcgcaacatgctcttatgcgggctgttctatgcgaggctcaccggtgcgtcttcaaaggaggaaaatgcgcggagtcgccaccaacgtttatttgtggaacacgtcgaanaataccgaatgaaaccggtccaatagaatatttcaagtccgggagttgttttacgtttgaggaagggattatcatctctcacgtttgtcacataggacaacagcccactttttagaattgtgtgaaattgtgttaccttaactatatgtcttttttatttntgaggtcgacaaaagcggcgctctcgctcctatgtactt

SEQ ID NO: 158419 - DNA, 407 bp, Glycine max
  unsure (1)..(407): unsure at all n locations
ggacatagtctgcctacctaagagtaaaggtgggttacggatcaaagatttgattaaattcaacgaggctttgcttgctaaatgggggtgggagttggcaaataatcagaatcagttgtgggccacaattctattgtgtaaatatcgtggttggagggatttgatttctcataggaactgcagtttaaactctccttggtggaaagacctcaacgttatcttcaagcaacagcaaagcaacacaatttgtaaaaatagctttattttgcccatacgtaaggacggtccatggaatacaaaccaagtacttattggcttgacaacnaaaaaaacactcattggaaatatatatgtttagcaattaccatagactcgctgaacatgaatggagaaatatgacataatta

SEQ ID NO: 158420 - DNA, 408 bp, Glycine max
  unsure (1)..(408): unsure at all n locations
attaattctagctgggtgtgaagacataagacaccttcgtatatgcctagttataaatttctcagctggtaccaggagaaaaggaaataganaaaccatctttcaaatattctgcttaactcttttttactttccttccatgtacctacttttcatgaaaatagtggatgccattaaatattctaactaatttgtgaattgaacattctgctgaccattttctcgatcagctttcgaagaacaacattcgttcttgagaatactttttaaccatcacataatagacatgatgctgagaggtgaaattacaatatgaaacaacatacattcaaattgcatactgtagaacaccttggcataatggataaatatcaaagcatattaaaccgatgaccaagagagacagag

SEQ ID NO: 158421 - DNA, 376 bp, Glycine max
tcttctttctgtctttcctttatcaatataatttatgacaaacaaactctatttctctatgtatctatcaatatagggtttattcacaagatgagatttttctaaacaaaacccacgtcatattgatgtccaaaagatataccttttcacgcacagtttaacttctcttgggtatgatataagtttgtactgtctacaatgattatcttatttctttctaactagatattatatttctcttagcatgtgttaagactttctatatttaaaaacttagattctaaagtattcacattaaatggactcattatgaagataaaattctttaatatatagatcttctttcctgtttaccctccaaccaagacattaatga

SEQ ID NO: 158422 - DNA, 296 bp, Glycine max
  unsure (1)..(296): unsure at all n locations
tcttcagaaacaagttacttgaagaattgtgactcttggaaatgtatctttcaaaatcagtcactggtaatcgattaccattaaggtgtaatcgattacacatcaacagatgtgacttttcattntgaattttgaaaaattaaaacgtttaaaaactctggtaatccattacaactattgtataatcgattacacaactttaaaatactctaaaactcgttaaacataagttataattctcgaaatctgaaatcttaaccttttaaaacactggtaatngattactaccttctggt

SEQ ID NO: 158423 - DNA, 474 bp, Glycine max
  unsure (1)..(474): unsure at all n locations
tactaagcttgcagattctcacggaaacgtacggagacgtttcggaagcgcctctgcttaaattatcttcacggaaacaatntgtccaagcaaattccaaagagagagaagtgcctaaagggctgggatccttttcttcttcattttctcccctatttatagcaaaataggggagatgcttgccgcccagctcgcccaggcgagctcagctcgcccaggcgagcagggttgcttcctccagaagcaaccgccttctggaggaatcttctggagggcccaaatgggcctgggtgctatntgcacccncatctttactaagtacacccnctctgtttttttttggtgattcttttttcgtacagntaccgaaacttacgaatntcgtaacggtacttgttntctttccgtaatgtcccggaaccttgcggnatacataatcatcncctttttgacttaccgaatgttaccgaatct

SEQ ID NO: 158424 - DNA, 429 bp, Glycine max
  unsure (1)..(429): unsure at all n locations
tttctacctactactatcactgttatctttcatnntataggntttagcatacaagttagtttaaattctgtttgaaattatcaatcatacatgttctctcaacaatgcttcattcctggacttaattcaagctaacattagttccctgtgttcgatactcagattcatctgttttaatttttaaatacttgacgatccggtgcgctttgcggcaaaccggatttcccttgaatatatttgaacgaagaaacaatggaacaaaaagcaactgtaggggaaatccaacaatcagaatntgttntgatttcatcaatgtgaaaatcttcattatttccatctcttttgcctntgtgatcttcttcatgaatatgcatttctttaatgagtctgaacactatctatntttctaactcaagaattctaccttta

SEQ ID NO: 158425 - DNA, 440 bp, Glycine max
  unsure (1)..(440): unsure at all n locations
ctgattaaatctctaagtttgtacaaaagctatcatcacaagcaaactccaaatgggggcttcccaagaaatccctcacatttgcatgattagccctaatttccctgccaacctcactctcgtcatccatcacaacttccacagttntacaaacactctaccttttaaacaacccatcttcttcacccctctccacctcaaccccgaccttcaagttcccacccatcaccctagcattcacaacatgatcccctcttggctgtggcagcaacaccatctgacacatgttcatcaatgcctcagtcagcgagccagcgccataatgagtaacanagcaaccaactgaacggtgtgcagaatagctgctgtgcaccacccgtgtgcacaactctcttcttaaccttttcctaaccctatggagagatctcaatgtgtacatc

SEQ ID NO: 158426 - DNA, 441 bp, Glycine max
  unsure (1)..(441): unsure at all n locations
ctcactccatntntgcatcctctatntatccataatggtgtgttaattgttagtgaaggaagcttgcttaaaacatctccctttcaagtctaaatttgcatcagtagtggtgtagttgagtcaccagcttttgtccttttacaagaagtgctattttttgaggatggtgagcccataattgatggagagtctggagatctaagggtcacgaacttagttctttcatgcttttttaacaactgttttgtatgcatggtaacgtgcacgttgcctacaatatatatggtattttgagccagttcgtattcgtacagcaccccatggcctcttcagaaaggaaggcaatgacttgcacaccactgtcactattacactggtaaacattagaataaattccaactttgtatggttatcaaataataattgcatgatccgtacttt

SEQ ID NO: 158427 - DNA, 331 bp, Glycine max
tcaagaataagcttgttacacatcgttcgcgtgtatgatatccactccacaagggttgaagttgaggagaccttcaatcctattacgcaacgtggcggacaaaagtgggcagttaacttgaatggtcatgattgtcaatgcggaaggtattctacacttcactatccatgttcacacattattgcagattgtggttacgtgagcatgaactactattaatatatagatgttggttacacaaatgaacacatcttaaaagcttactccgcacaatagtggcctcttgggaatgaagtggctattcctccttctaatgacacatggacactta

SEQ ID NO: 158428 - DNA, 403 bp, Glycine max
  unsure (1)..(403): unsure at all n locations
ntgtggccatgtaaatactatggcttatggtttgtttccccattcatattgaactagtgtttcaaggattgtgcttttatcaaatcatgcgaatatctgagtctattttggcattcgggaaattctttcattgcgcttaccctttagttgcgcattcattctttntcanaaacctttctattgttttgatccgtgaatttccaaagaaaactcatggtcattctttttcaaaagcgtgtggctntttagttttctttttcttagctctttctttcaatcaatttctttcaagcctaatntttttagaaaaggtttgtaacctgggaaaagtcggtatccgagaatacactttatcaaaaggaataaaacgtgtgtgaataaaatacacagacccctctatttt

SEQ ID NO: 158429 - DNA, 357 bp, Glycine max
  unsure (1)..(357): unsure at all n locations
aagaaactaagctccacaacattactagtccacacacactatacaaatagcattatattgcacagtgcaatcaatcatgctccgtatgatgcatgcacctgacctcaactctcatatgctatgtggtaccatccccaaggaaatagcctaagcgtggccacacgacactctcacttangaaaactaggaaataagtgtcgaggtcaccctgtcgtgcataggcaactctcctcccatggtgatcagcctgagtctcaatggagttccaaaccaactaacatgcccccaagtacaagtattcctacgcatgagaaactacacaaacttactgacaaaagttatactatttacatgtat

SEQ ID NO: 158430 - DNA, 297 bp, Glycine max
  unsure (1)..(297): unsure at all n locations
acataaaccgggagagggaaanaaacaaaaaaattctttcacatacttgagcgataaaaattcttgcaatcaataaattgaagaacttgattgatgctacacgaaatttacaaaaacatatcaagaattaaaattagaacttattaaaaactatattacatgaaattaaggcataaagcaccacctttaattacagcttctatgttggatcgacacaacccacgcctaaaaaatgaaaaacagactgttgctaatcaccacatcagaccaacactttttgataaaccaattcaaaga

SEQ ID NO: 158431 - DNA, 431 bp, Glycine max
  unsure (1)..(431): unsure at all n locations
caccatcagcctgaacatctatgtgttggaggaagtgttgtttccgggtgatggggacagcaccttctaaattcagccatgacgaagattcccaccaaataggctggattctgttgcaatgaacaaataagtgggctgaatcctcctcattagttctgcctaaagggcataagatttctatgagctgcacttgtcttcgctgtaaattctttcttgtggacaacctatcattaattaacctccacgcaaaaactgttattctacttggaacctttatactccacaattcgtcaataacaatcctcccggcttccacctgcagaatactncgtttgcatgtcgtacgcttgtgtgctgaatattggcctgttgggtctcccatccacttccacctatcagatccttgttgctgaatgatcttatgttggacc

SEQ ID NO: 158432 - DNA, 353 bp, Glycine max
  unsure (1)..(353): unsure at all n locations
ggatatgacccctctacaagacacggttacatgtacctagtatgccattctctanagctcaagtattggccagcgcttttttggctgagatgttaaagcctattgccacagggttgaactcatacatgggaagattatgtgttcctcacagactgtattcatggccctttattgttgatgttgggggagaaatctatgatcctgaaactaactcgtggatagaaatgcctgctggaatgggtgactgatggcctgcaccgcaggcangtaccaaattgagtggtcgagtggatggtgaattatatgcttttgacccttctaattctatggatcgtggaagaataacgtatatg

SEQ ID NO: 158433 - DNA, 255 bp, Glycine max
agcacacaaatatagcttataaggcaaatcctgccgtgccagatgtggctcggaccctattggatatatactaaatctatcatatatatactctatactctatactccaaatcttggaacgtacacatcctcaatatataatcccttttcgttttcgaatacaatatatataaatctgctcatatttattaactttcattcagactgagataaatcgataataataatttattactacccttatctaatatattt

SEQ ID NO: 158434 - DNA, 481 bp, Glycine max
  unsure (1)..(481): unsure at all n locations
ntgcttncacacacttcagttgcaaagcaattgaagagaatntgggacttgtcaaagggagtgcccttcatcaaatggtacataatcaacttgtgggcattggacagaaagtctttggagccctatctgtggatgatagatttattaactatctgctgaaaaatcttcaccttgctcagtagagtcccatacttccttggcatgtttgtccagtaaggtccccatacggagtgcccaatgtgttcttcaagttgattgccccaactattcatgaactacgttcctctatgctcacagccaatggcttgagcaatggtctctattgagtttaaaaacatgatgggggtagatagaacttttaaacccaagaggttgttccatatagacttcttccttaataataccattgacgaacgtactttttacatccatttgataccacatcagagcatgaccggaagcaaagggtagtaaaacatgt

SEQ ID NO: 158435 - DNA, 322 bp, Glycine max
  unsure (1)..(322): unsure at all n locations
tagagaggaagcttantggaggaagagaatgatatagagagttatatgtgtggggcatacgaagatattgtgtccgatggatatggagtattagaaattcatgcatgccctaatgattgcatattgtgcaaaaatgtgtttgaagaaatgaataaatgccccangggtgggggttcacgggtcaaagtgaaggatgatgaaacctatatcaatgatgatagcacacaaaaaggcgcccagccaacgtgttatgatatctttctatcattccaagggttaaaggtctatttgcttattgagatgatgcaaagacctaacctga

SEQ ID NO: 158436 - DNA, 448 bp, Glycine max
  unsure (1)..(448): unsure at all n locations
tcgagtgctaagtgtgtgactgttatcttgtgatcgtgttattgtgtntgatgagacttgtatttatattatttgagcatggctattggtccttgtttgtatggattgtcgcacccttgtacataatatttggcttgtagataatagccaggagcttatagataatgtcagagaaacatttatttataaataaaaggtagaacataatcctaccttgtagataatgtgtggcattatagataattaattacctgccaatggataacatattcaaatacgtttaaatattgataggttacggacaacctatttgttatggagcctgactgctaacggtcacgcgtctgctctcatatattacggctaacatagagagttgacaactgtctttgagtgtcaatacgatgtcacgtccgtttttggtcctacatagtcactaacctttact

SEQ ID NO: 158437 - DNA, 148 bp, Glycine max
gacgcaagtctgtatcttctatcataggaacgaataaggcctatccaaaacacgcatgtaatgtccaaccaaaacactgagtgacctattctgctgcatcttcttgacatgatgtgctttaataaaactattgtaccgcgctaatgta

SEQ ID NO: 158438 - DNA, 440 bp, Glycine max
  unsure (1)..(440): unsure at all n locations
ctggttccaacgctctgttaagctctnccaaacctagacgtaaatctngatctctatcagatactatgctagatggcacaccatgtaacctgacaacctcacttatatacaaggtggtcaacttttccaaggaaaatctgatattaatggcaatgaagtgagcagacttagtcaatctatcaacaataacccagatagaatctaaacctctacgggttctatgtagtcctaccacataatccatggaaatactgtcccactttcactggggtatctctaacggttgtaacttccctgaacgtctctgatgttctatcttaaccttctgacagactatgcatgcatacacaaactcactaacctctcttttatgtttggccccaaaacatctccttcaattatgatacatcttggatgcccacgaaagatgcacccttact

SEQ ID NO: 158439 - DNA, 355 bp, Glycine max
actagctctaatccgtctggaagacttgcaactgccttcattacgttgttctcatacaacatggatatggctcctgatccgaaccaacttcagagcatgaccaagcgggaacatgagtccattaaagaatatgctcacaggtggagagacctatcagcccaagtcgtcccacctatgactgagacggaaatgatcaccataatgcgagatacgtccgctacgctctactaccagaagccgatcggatatatgaccactaaccttgcagacctcgtcttcactcgacaaagaatccaccctggcctgacgaaatgcaaacttgaatatgcctccactactgccctccaccacaatc

SEQ ID NO: 158440 - DNA, 292 bp, Glycine max
  unsure (1)..(292): unsure at all n locations
atcgcttcctctaatggaagaacgatatgctcttctngcattgtatattttgctcgattggatgagcaactgttggcattgtgctccttcaacgttagcacgatgtttctcggtttaaccatctactttgtcatatcagcaataattgctaagtcgtttatgtttattttatttcaatgaatatcgnctatattattaataccttcttgtaataattttgttattgataatgaaaaaatattaattcacccaaaatgctgtgtgttcaaattgagattatcgtaaaactaag

SEQ ID NO: 158441 - DNA, 352 bp, Glycine max
  unsure (1)..(352): unsure at all n locations
agaatctaagcttcanccctgaatgatgaggtttttttttgcaactaattgtcccatggtctaaccaataccaatattattaaagaaatttttaaagagatttattgagagattttaaagagattatttatccaacacacattctcaaaaattatttaaaattacaataatatgatttacccatatctaatttaaattaaagttttttattttaactgaagtttaatttatggccctatgtagccctctcaagagctcaattgatggtgtgaaattaaataaataatccacacatagttattctttactcgtgctacctatatctatgtgatcaaaagtccactctatatac

SEQ ID NO: 158442 - DNA, 423 bp, Glycine max
  unsure (1)..(423): unsure at all n locations
ttgagccaattcnacaacaataaccgtttactcggatgtctgattgtgtcccgtaacatatcgagacgctcgagaatgaatgttgaagctctgagccaaattcaaacgacaatatactttttctccgatgtctgattgagtcccgtcatatatcgagacgctcgaaattatatgttgaacttctgagctaattcaaatgacaataactcttctctcggatgtctgattgagtcccgtaacatatcgagacgctcgaaattgaatgttgaacctcttagctaatttaaacgacaataacttcttactcggatgtctgattgaagtccgtaatatatcgagacgctcgaaattgaatgtgaacccctgagctgattcaaacacaataacttttccacggatgtctgattgagtcccggaacatat

SEQ ID NO: 158443 - DNA, 332 bp, Glycine max
  unsure (1)..(332): unsure at all n locations
tactaagcttgttatgtgnnttgatttaacttgggtttagttatgtgactttattctcattaaaagaagacttgtcaagcacatgatcagttcaaactttattttacattgataaatcgagattacggcacaaacgatcaattgaaatcttattttacagtgataaggtgagattacggcacacacaatcgggtgaaatcgctttacacaaagaaatgagatcactaatggtatacgaatgagatgaagatgtgaaaagcaaatagagggacccctaacggtgcgtacagtgaattcanagcttccaaatcaaaacttatccgtcgatgaac

SEQ ID NO: 158444 - DNA, 338 bp, Glycine max
  unsure (1)..(338): unsure at all n locations
tatttctctgacaaaagtgtccacatatacatcataattgattatgtgctctatcgcaatattctgacttattgtcattcgacccttatagaccttacctaanattganatccattaattagatttccttatacatagagaatcaatcaagctcggacaatctaaataaataagtggatgtcttcaattggttaggcaaggccaagaacccagaatttaatgttttaactctatgaacacttatccaattcatgtagctcttatttcatagtaatatgtatcctgattatgcctacgcatctatgaaatttacatttaactggcttattgtattttgg

SEQ ID NO: 158445 - DNA, 364 bp, Glycine max
cgcttaagaatgtatattaatttctttaatttgcacactatgtgttccattccttcaactgagaaccccattggttgggccatataaacattctcctctaaatctccattaagaaagggcagtttcacatccatcctttcgtcagacctttgaaaatgtctctttataatcaatgccatctttctaagtaaataccttagcaataagtctagccttgtaatgttcaaggttgccatgagagtcacgtttcatcttgaagacccacttacaaccaaactttttacaaccctttggtaattctacaacgttccaaacaccattatgttccatgaaattatctttctttcatgacattaaccacttc

SEQ ID NO: 158446 - DNA, 399 bp, Glycine max
  unsure (1)..(399): unsure at all n locations
tctctgagaaaacttccttgagaagctagagcttagctaacacacttcttctctnactgagctcacctccttgagaagcttccttaagaagattcgtcaagaagctagagcctatctacacataccctctctaatagctaagctcaccctcctgagatgagaagctagagcttagctacacaccccctataatagctaagctcacccccatgacaaaaaacctgaaaatgaaacacagtccttatttcaaagacaacttagaatgccccgagatacaagggctaaaccctatactactagaatgggcaaaatacaacggcctgatgacaggaaaacctattcttatatntacaaagataagcgggctcatacttagcccatgggctcgagatctaccct

SEQ ID NO: 158447 - DNA, 398 bp, Glycine max
acaacatccaagtaattcaacatcgaagcatcatgttctaacacagccaagacaacagggcagaggcagaaaactctgcccaaaacacaaaccaatatcacaactttccttacttaaagaccccagcaacatttccttcgttccaattccgtaaccgttggatcgactcgaaaagtttactggaaggccctagtacatacgtctacattttgaccgtggggatctgctagcaaaatgtcagaaccccatatgtactaccattttcacaaccaaccatacacaagcattttctgcacagtccaaaattctgatgcacatatttgacagcaaaattctgcataaagtgccagatttcgaaatccatcttgccctcgtccattttggccaaatcgaatcta

SEQ ID NO: 158448 - DNA, 433 bp, Glycine max
  unsure (1)..(433): unsure at all n locations
agcttgtncataaaaataggctnttgaagtttgtcatttcattttctcactaagtaaaatggatcatttttaacgtccaaacgccttaaaatgatcaccacttaagtaaaaaagaatcacttgataagaaagaactacgtaggtctgatttcctcatcacaaattgaggaatacgtacgagcaaagggaaacacccttgtcgaccacaaaaaagggaaaaatataaaaagggtataaaggatataaggacataaaagggaacgtaaaaatcaaagtcatgtttgcacattcgattaaaggctgccgtcccttgggacggacgtgtggggtgctaataccttccccgcgcgtaaatacaactcccgaacctttcacttaaaagttcgtagatcgcgtctttttccggttttccgacgttttcctcaaataaacg

SEQ ID NO: 158449 - DNA, 293 bp, Glycine max
gacacatgaaactcagcgtgactggcgagtcgattttagccttagtctcacacttttgttttattcaatccaacttacaatgagaaatcccaaagagaaaacgtccgattgatctttccccttcatttactaaaaggtattccttttatcatattatcctttacctccttgtttgatttacaacgtggtttgcggcaccaccgatcggtccgaattcatttcaaccacaattaaccgatgacaattcacacgatcggtggaaattcattttcattttagatcaacccagaaaa

SEQ ID NO: 158450 - DNA, 388 bp, Glycine max
tctcttgttctctacgataacttaaatatgagggatttttatcgttaatcacaactttaaagatgtggaaagttgtattgtttctctaagtatactctccctctatcttatggtgtactagtaatacagcgcagcgtgaataagttgattagcaataataagccataaatactcttaagaatattttcggacttctgttgaaaaaaattattacatatcaaccttcgtggttattaatagctaattttcgtcgattaatatttgaatataaaaacatgtacattaaagtacttatgttttcttccgaacttcattaaaacactcgattttttctgcaaattctataaactcacctctggctagcgggtcggcttcttatatattgctt

SEQ ID NO: 158451 - DNA, 382 bp, Glycine max
agcctatccttatggctcgactccggactttatcccctctgcctctcatcaagacttaagccaacgccctactttctaggggcacactccaccttatgacgactattccgcgctacaccatcaggaaggagatatccatcttggccccctgctccacccttaacgaccgccccccatgaactaccccaaccgaacatagtcccgcatatcccggcttaacccacacccgtaaaagaatcttcatccttcccggacgatcaggggaagatggaggcgcttgatacagcgtaacaacatccacggccttcgcaatccccccctctatattccggcgatcctctctcgtgcccacacctcctcttctcaagcccagtcctccctt

SEQ ID NO: 158452 - DNA, 365 bp, Glycine max
tctgattcttccaaccattttaacaagactccatctattacctttttatacaactcatctccaataataacataatttacaactatatactttatcttttgatccacagataaattaggattttgaaggtaatcgactaagggttctctctactcgtgagttgtcaacacatttatatttaaaatttctacttcttcctataatttttccttgatagttatcaaagttttgaaattttgcgatgcaatcctaccctctaagggcattggatataagattccaagaaaattgggccagagatgcaagagaagaccctaaagttctcatgagccttaggcgtaatctttcggccctgcgtctcaccc

SEQ ID NO: 158453 - DNA, 259 bp, Glycine max
aacaagttttcttattaacttaaagccttttttttcaaacattcgagcttatagcttctttttctttaatttacattcaatacttaataaaaaagtccatctactacttttttgatatatgaactattctaactaagtatctccttaaatgtcatcttatttatcacaataattatatttattttgaactcttcataaaatattgctaacaaaaaaaatgagttaaaaaaggtctaaaaaatataattatttaaaaata

SEQ ID NO: 158454 - DNA, 389 bp, Glycine max
  unsure (1)..(389): unsure at all n locations
agctctgtcgcccatggacatcatgatgtactgactgctaccattaggtgaccaaaacaccctggtcatgtgctattggagctagtgtcattataaaataatactttggaccgactccaaggacctcccatgcatcttcatncatggctcccanacacctggagtagctaatgcaaaaaatcacggaccagttggaggagtccatcatagaaaaagtgacttgacaactaaggttgccgctctccagagctacgcttagtttaatcacagatgcataacaaggactcacactggctcctgagcctaaattacgtcttctgctgctcgtgtcaccacacagagaattatgttgatcctcaggacgacccaccacggggagtaaaaaaatg

SEQ ID NO: 158455 - DNA, 432 bp, Glycine max
  unsure (1)..(432): unsure at all n locations
gcatctgggagaaaggtttcttatcgactatcaccacattcaaactgagatagattgggaggatacaattccgccagaattaaaatatgtgctacatgatttcccctccatctttgaacctccaaaatgatgtccttcgcaacagcgtcaaggccatgccattcacctcaaagaaggagcccaaataccaaatattagaccatacagaaataagtacaacattttggcggttctgtgtagattatagagctttgaacataatcaccattcctgacaaatttcccatcccagtaattaaagagttatcggatgaaatangaggggctagcgtattttcaaaggtggatctaatattccgataccaccaaatcaaaatgaacgaagatgacattgcaaaaaccgttttccgacacatgaaggccattatgaatt

SEQ ID NO: 158456 - DNA, 377 bp, Glycine max
tggttcgaggtacttacccgttgaagatcgattaacgatgaacaaccaatgaagaacgtcgaagaacggtcgaaaccttcccgaaattcttcaccgaaaacgttacggaaacgtttccgaagcgcctcggcttaaattttcttcacggaaacaattcttccaagcaaattccaaagagagagaagtgcctaaggggctgaaccccttccttcttcacttcctcccctatttatagcaaaataggggaggtggttgccgcccagctcgcccaagcgagctcagctcgcccaggcgagccaggttgcttcctccagaagcaacagccttctggaggaatattctggagggcccaagtgggcctgggtgctatttgcacc

SEQ ID NO: 158457 - DNA, 282 bp, Glycine max
  unsure (1)..(282): unsure at all n locations
tggtaatgcatncttacaactaatagagcgcatgtttgtttatgactcaaaatgtacaaagggagaaggacaaaatttatatatgttaaccaattaattattcgataaaaaaaagaggccaaccgatgactgactgttccattcagcagtgctctatctttaatgagtcaaaatgtcaaaagggagaaggaataagaggcacacacagctcgaactcatatatccatacaaggcgtctttaagcacaattctattgacatcaatcttagttccacagatgac

SEQ ID NO: 158458 - DNA, 331 bp, Glycine max
  unsure (1)..(331): unsure at all n locations
agcttatgcagattttttcttactaacgtttactcgcacaagacattctattaactaaagaaatgcgctcatatacaatcaacgcaggttccttacctagattatttacatgtacttccaaagtgtatctgttacctacatcacacacattacttttgacttaatnataagcatgcatactctaagcactttggctatcgaaaattgcatacgtgcacatctcggtatttctaatacctatccatacaccaacttcatgatgaatcttgactattgacacaataacgcgctaccttccatgctctcctcttttctctttcaagggttttac

SEQ ID NO: 158459 - DNA, 96 bp, Glycine max
tctcaagcttacttatgtggagggcgggcttcttcacctcttgttcaacccaaggggaacattgtcggcctctcccaatgctttcttcatgtcccc

SEQ ID NO: 158460 - DNA, 410 bp, Glycine max
gcttctggtgggacatcttgacttgcttttctatctgacattcaccacagaatctgccttcttctattttcagattgggaatgcctctaacagcacctttgtcaatgattttcttcatgcctcttgagtgcagatgtccaaatctttgatgccatattctgacttcatcttctttggaggatagacatgtggaggagtaactggtttcttgaggtgtccataggtaacagctgtcctttgatctgctgcccttcattagaacttcactcttctcatttgtcaccaagcattctgactctgtgaagtttacactgaatccttcatcacacaactgactgatgctgatcaagtttgcagtcagtccctctcacagcagtacttttgtccagactaggaagtccatcatgggc

SEQ ID NO: 158461 - DNA, 322 bp, Glycine max
  unsure (1)..(322): unsure at all n locations
actcagcttagctctntacgaatctccttaaggaagcttctcaatgatgtgagcttacttatgagacgggtatgtgtagctaagctctagcttctcaaggaagttttctcaaagaagcttctcaaggaagttttctcaagaaagcttctcaaggaagctacctagtctataaatagaagcatgtgtcacactcattgtaactttgatgaatgagagtcttgtgacacacaactcaaagttcaactactctcccattctctttcttcaatttcgtgctgccccctctctctgtctctcctctttcttttcttccattgaagca

SEQ ID NO: 158462 - DNA, 364 bp, Glycine max
  unsure (1)..(364): unsure at all n locations
cggctcncctncttnatcacactaatagacaagagagtntaatgcttcacacacacaccactagaatcacatagccatagccacgaatcttcctcctgcctctttaaagatatatgactccgcatctcactaagttcctccctcaagactcatctcacaaaaaacaattccttctccatataatgttccactcgcacttatcacccctccactttcctatctaatctaatgtatccattttctgtgaacacatgacacataatctacgagaaaaaaaagcacgattattcgccccaaccaattgtgttgccaaaaccttaccctctcaccactactaattctccacctcattaataagtcaaac

SEQ ID NO: 158463 - DNA, 186 bp, Glycine max
agcctatgatatgtccataacccgcttctttcttatctcaacacgcattctacgatcaacgatgaagacaaccttcttctcacgcgaaaataccttaacacctgatctctttaactatcaaactcgatgatctgatatctaaccgcttaccaataatacacagactcccgtctaaactcagaaaga

SEQ ID NO: 158464 - DNA, 433 bp, Glycine max
  unsure (1)..(433): unsure at all n locations
gaaactcaagcttctgggcatgaacgggctgngttgaaaatcctaaaacatgggatagacaatgaatgaatcactgactgagtatctttgacggagaagctttccttgtagacaataatgggcagcatctctctaagttctttgttcaagcccaaacccaatgtggagatggcattattgcggttggcgctgctgggaaggcgaaagtgtgaaatccaatggagcctaattcgcggtcggaggtacaagagatagaagagaaagaggacaatgacagtgaagaacatgggaacacagaagatgaatgctcggtacagctttagttcagttgaggccacagatctgctggtgctgctcgaccaacaaccacacgaagggtctgactcggaacagtcacactcagacatcactcactcactcactcctcaaccac

SEQ ID NO: 158465 - DNA, 372 bp, Glycine max
agcttgagaaatcttacagaaccgacagtttatgctgctattgctgccggactatgcacgtgaactcacttagagattagagatgagtttattacaattggggttacaatgaacacatgtacggatccttacaggatcaaatggggatttattatgacatgtttattgaattgtaattctttttatatgattatgtgaaatcgtctgaggggttttactccccatgttgcaagaaatattttcatataacctgtttgtattttgaacaaaattattacattaccctaataaaatgttatatcgggaccatcaaactgcgattgaaattgcgtgtcatggatcaattgagcatgcgctgatttttgacataca

SEQ ID NO: 158466 - DNA, 421 bp, Glycine max
  unsure (1)..(421): unsure at all n locations
nntagccttgattgctccatgttggggcttcccttatctccaacattatgcaaatgaaggatccaacgtgaagggaagtggggtgagcattatcttggaagagctcaacaatgctactttaaagcctctcaagctcaatttgaaagcatcaaacaatcaggctgagtacgaggcacttatagcaagcctaaagctagcaaagaaagtaggaaccaagaggctaagattctacactgactcatagcttgcccaaaggcaagttgccaacaagtatcaagccaaagaggtggtactacttaggtactatcatgctacaaaaaccctcattgatggctntgattgctttaagatgtaccatataccaacggaaacaacaccagagtaaacctactcttcaaactagccaacactaaaaagatca

SEQ ID NO: 158467 - DNA, 273 bp, Glycine max
cttgtgccacctacatagcatacgtttttcatgggtgatctacctacgctgcggttgtaaattcgagaatctctcccatacccagatatgaaccaagtagtcaaagggcctcccccctccttttcccctctccctctccccctccccgcttgtgccttcttccctctccctccctccttccctccccgctcccctccctccgcccctcccctaccctctccttccggtctcccccctgcgtgtccccctttccgtctcgctttctcccccccc

SEQ ID NO: 158468 - DNA, 437 bp, Glycine max
  unsure (1)..(437): unsure at all n locations
acactatcgcaaacccaagcttagctcaacaaggcagcgcgacgaggacaggcaatttgcatttttggngcctgaaaacaatgagggcaggagtccaccacacactatagctcttcacacaaccaccaataagaattcggacgggcataaagacactcaacttactttttgggtctcaaaagcaacatttgacaacctcctgaagcattaacaacactcaattaatttcatttcaacacacgctaagactactaaaactcactatatacaggccttaccttagaaaggcgttcacagtcggatttcccatctcaaactttacgggcgggagcatgtcagattccatccttaccacctatatataacccgtcaccatgtacacaaacaggacggggaacgatccccacgccaaaaccatacataattcggtccccatc

SEQ ID NO: 158469 - DNA, 335 bp, Glycine max
tctggtgactgtgaaacatgctattctggcgttttctatattcggtccttgcgcaatcatgcgtgtatgtgtattctgtgccgtgcccctttgtattgcttcgtttttggtttgtccccaccatctatctcggattggagacgagagtccttatcactgaaatggcgggatggacgatatcgatgtcctatctgtagcggcctccccttctgtgcgagggcgaaccatcaatccgcggatgcctgttccacaaaccgtatacactcggacctcgcaccaacttttatctgtggaaaatcgcgcaataacccgcaaagacctcatctatgagcttt

SEQ ID NO: 158470 - DNA, 200 bp, Glycine max
ctccatctcattgaatcccatgtctactcgcaactacacagtatcaaacctttcaccaccaatgtttgaaaaccatagaacatgtccaacatctttgaagaagaaggaatcctctcaccatggcaacgctctttctcatcaacggggcgagcaccctatttgatggaagcttgcttgcggagctcctatggaagctggat

SEQ ID NO: 158471 - DNA, 352 bp, Glycine max
  unsure (1)..(352): unsure at all n locations
taaagggagtgaacggattagcatgggaagaaatgtcttcgcattgattggtaaatctgttcctcaaattcctgaaaaatgcaaagatccaggtacattcagcataccttgtattatagggaatagtaagtttgacaatgccatgctagatttaggagcttctgttagtgttatgcctctgtctatttttcattctctatctctaggtcccttgcagtcaactgatgtggtaattcatttagctaatagaagggttgcctaccctgttggtttcataaaagatgtcttanttagagttggtgaactgattttccctgttgatttttatattttgaatatggaagatggattt

SEQ ID NO: 158472 - DNA, 421 bp, Glycine max
ctccctaaatgaccctgcttgtaccaccaatttcctaattcattcacttttactggccttctgatcgagtaccaagtgacttgtaacagcttgatgagtaattaaatactattctctggatgtcaaattttgatatcatataattatctaatatgaatttctcttgcatttcacgatatgtcgagtaccatgtactcatttatgaaagttggtgcaggattcatccatctgaacttggaagggatagagtgcaggatagcttataatcatcataagaagacaaaaattgaaaatggatgaaggactcttacccatgcacagaatttgattctccaaatatatttgagtttccatatgcaacctctaactttagtttattatgagtttggttgtgattaagggacattactactctaatata

SEQ ID NO: 158473 - DNA, 407 bp, Glycine max
  unsure (1)..(407): unsure at all n locations
agcttanaacatcttcaaattctgtctatatattattacaactcataaccaatccatattcaaaacgacaaaagcttccaaagagctcataacattttaaggtcgtcctcaatatcattctagctcggaacccatacatattcaaaacaacaaagtatttcaaatcatcaaaacagaaaaaagttccaaatgaaccaagtttaataaaaatcatcatcttcaaggcgggagattgcaacagaagtaacgtcagttatcaatggttctgtcggttcacctatattgaaaaataaaagttagaatatacatatttaacttgacaatttaatctaatctttaaaagaatccttcatcataaacttcatttcagtgagaaaatacattttcatttccacattaaaataaac

SEQ ID NO: 158474 - DNA, 404 bp, Glycine max
gcttgagtttctttcttgtcagaccaaatattgttacaattttgacacttgtcagaataataaattttaggagttcaaatatccaaaccaattgatttcttgttaggttttccaagtgaattgaagcaaacattgcctaatagttatgaaaaattcaagttggtagccactatcattttattgaagtaaatccctacttgacttttgatcgaaggaaagcatatggcatgcgcctcaatatagctgcaggaactgctgttcgctttgaggtgcaattctacattgctgccagttttttatttatttatttatgacatgttcaacagttgaacagtgaacactcgaacttattaatttaatagaatctaaatgattaaccacatacatatttactctctaaaagc

SEQ ID NO: 158475 - DNA, 342 bp, Glycine max
aatggctttcaaaccatggctgtacgagcaaatgaaaaaaatggcctctacgaaaactaatattaaataaaatcaacagttgatcaaaatcaaacaaaatatgactttggctataaaaactcggtggacttggttaattatactgacagaggagattgaaaaagaatggctttcacacaatggctgtacgagcaaatgaaagaaatggccttctctaccttttatctatctcttttcttcttcatcagcgtcctctacttgtgtaaccttacaggaaaaaccaattctaaaccaatttgatttggcccatcccaccaaaataccactaaggcatcttatagt

SEQ ID NO: 158476 - DNA, 424 bp, Glycine max
  unsure (1)..(424): unsure at all n locations
tcatataaaccgcaataagaaaataagagggcaaatactaaacagtttacttgatgaaatgccaaaagcttgcaatctttacataacaaagttccattaacaatgggttatgatggattatgatacctaagtggtgaaaagatacacaaagtaatgaagagttaattaaagatgaggcagaaagtaacctgtggcggtcgcaatggaatagctctgtccacaaaacttgcatctccgagtcttaccatcagcaactgtctcaaagaacttcaaatacactgatgtcattgatttccttcttggcttcactgaagtaacaggagctggctgatgtgagaagcccancccaatatttacaggattcatgtttgaaatgagtgctccctccatcatggattgttggtccgcctacttataacaaaaa

SEQ ID NO: 158477 - DNA, 407 bp, Glycine max
  unsure (1)..(407): unsure at all n locations
tcatatacaccgaataagaaaaaaggggccgatcttttcgttcactcgacgaaatgcccaaagcttgcaatctttacataacaaacttccattaacaacgggttatgatggattatgatacctacgtggngaaaagatccacaacgtcatcaagagttaacttaaagatgacgcagaaagtaacctgtggcggctgcaatggaatagctctcgtcacaaaacttgcatctccgagtcttaccatccgcagctgtctcaaagaacaccaaatacactgatgtcattgtttctttcttggcttacggaagaacacgactggcttattgaacagcccacccaatattacaggatcatgttgaaagagtgcccctcatcatgatnttgggccgcactctaacaaaaaaaaa

SEQ ID NO: 158478 - DNA, 377 bp, Glycine max
  unsure (1)..(377): unsure at all n locations
agccttgcacgcatgaggataattcaatttttaatntcaagaaaagaagaacatcaggcaacctacactaataggagacactcaagagactatgactcacaaaatcaactgtctaaaatcctctaagcataagtcacttattgacccaccaaacaatcaatatctgttagcatatgttccggcatacattttcttttaggtcgaagaggacttagacatttacagatttaagaacatgagacaacaccttcaaacgtccaaatgattacgtcctccttaaccccaaaaaaaaagtcatacctctacactataaaactatgaaccatgcctccaacagaatgaaataaaacgagtctcagcagacattgaagcaattg

SEQ ID NO: 158479 - DNA, 428 bp, Glycine max
  unsure (1)..(428): unsure at all n locations
ntacaacagattttagtaatgacccactaacctagaatttaaataacttaatgctcttaacctagggaattaaaaaaacttaatggctgagtgtaactgaaattgtggcaaccaaaagtcacctccaacggccaacaagtcagccaccatttggtctcccaaaaggctgatgcctaggttgccaattgcgcccttattacaacttgaactaaacctaactaaagcccttttagttgattaaccaaaaacatatttttggtcagccaactttacaaggattgggccattatttatacaaactaaacactctaaaattgagacaaagtggtgtcatttagtcctcctccatttgggccatgatacaactcacaaccttggacttttcttcttgaaacttgggcttgtattcaaatagtatggacagcact

SEQ ID NO: 158480 - DNA, 274 bp, Glycine max
  unsure (1)..(274): unsure at all n locations
ctctgcctagatatacgacacgctttacaacatttctcgcctctgcatacatgatagataacgacatggaaaccgctaactgactttatccccccctcctccccgctcatgtatgcatcccacatcttgccctctctccatggttcgaatcacgaagccaacggtctgcgcacatccattgctcaacaccttctactcacaaacaacataactataaaaactcatagaggcccccnaccaccgtccaggcatcgcaaaaacgacccgcatgtcc

SEQ ID NO: 158481 - DNA, 313 bp, Glycine max
gacccaaatcaatcccactcggaaaccaaaccaacacttccgcgtcgacaacatgatccatccgctcgaaaacaatcacccctatgatactaccggcagctaccagtatggagcacaattagcgagtaggagtcaataccccaactcatgagaaaaaataaacgtgggccactgctaacacctaacaggaatgacacagactaccaactgaaagagccacaaagacctcatcagtgaaagctcatatcgaacgctaatacattatcagccaagaacagagcgcactccgtcattttcagttacatcaactact

SEQ ID NO: 158482 - DNA, 432 bp, Glycine max
  unsure (1)..(432): unsure at all n locations
taaaaactcaacttgggtccctctctctctctagatagaagatagaattatatctttgtgcatatactatacngtaagcaaaccctagaagcatcttgaccccaccacaacgctctctctcacataatgcttaccaccctaaccctataccacacacatatatacacctctacctcaccctttgcaaaatcctcttcattcttcttttttgtatacgtccattgttatgtgggtattattttgcttccatctatcatgagcaacatcccaagatctctcaccgactcttccctaaccctcttcaacctcgccatataatcctctgatccctggcctttctcactcagtttcttattaccctaactaactaacgggttaaaaaatctcattcccacctttcttaaacctggcggttattttctttccctcacc

SEQ ID NO: 158483 - DNA, 409 bp, Glycine max
  unsure (1)..(409): unsure at all n locations
ntgaagatatggtcttcaccgacgaaaggatcatagtgtgtctaacaagaggcaaatctgatcatcatgctttgataaatgccaaaaaaaaaactacggcaaatgaagagggtgagaatgagggagaagcccatgctgtgacttccattcctatatatccaagtttcccaccaacccaacaatgtcattactcagccaataacaaaccttctccttacccaccgcccattatccacaaaggcaatccctaaatcaaccacaaagtttgtctaccgcacttccaatgacgaacacccactttagcacaaaccaaaaacaccaaccaagaaatgaattntgcaacgagaaaaccttataattcaccccaattccagtgtcctatgctgacttgctcccatatctacttgat

SEQ ID NO: 158484 - DNA, 369 bp, Glycine max
  unsure (1)..(369): unsure at all n locations
cttggcncaaagaagaagaagaagttggaagatattcattgcttgtcaaggattgcatgaaataagtgctccacatcgaatgaatgaattaatgaaaagccaatcacagccttgcttttatagactcttcatgtctggccaagaggaccatttataagagttacaacttttataaaaacttaaaaccaatttgaaaaagtccaaacctttttgaagagttacatcttttgatttattcacaaacacgcactgataatcgattaccacatcagtctaatcgattacacaccgctcttatgtgaaaggatgtgactcttcacattcgaattcgcactctcacgctcaaagggactggcaatcaattaccaa

SEQ ID NO: 158485 - DNA, 388 bp, Glycine max
tccctacgacactacaaatgccaaagcgaccgtttcgtgtttacaataaagtatccctcagaaaagagagatgctgattcctctgtggcatttggaatgccctaagacgacgacaccaggaaaatctctttcctttgggtcgcaaatccactgtgacctataccgacagcgggctccttctttatgctatcacctgtatataccatacgtttacagattactctgtgaactcgccggaagtgggaatggaggcttataccacatagatactcagctttgaatgggtttatactacccatccggcgtggctgtattgtcatagccattctgtacgggagcaattgatcctcttcttttctacacgagtgccctattcataactctcttc

SEQ ID NO: 158486 - DNA, 368 bp, Glycine max
gtcattcaacgcgaacacacttggtacatcaacttgctattcaacataactaaccaatgaccctgcagatttttcttataaaaaacgcgatcacattgtctatttctacataacagtaccaatgattaatattcctattattcgatcaatagttcaaaaattataacatccgaatccgaatgatttttatacagtcatcaatcttaaaattatatatattcctcgaaagacaaatattctcaaaacaataaaagaattttatcgaataactctattaacaaataaacgttaaaagtgagacatagaatttattttagattatgagtcctttttagttaaacaaacaagttcctaattttcaacttaat

SEQ ID NO: 158487 - DNA, 272 bp, Glycine max
  unsure (1)..(272): unsure at all n locations
agcgtgcgccaacacggattgttncactttatactcaccaaaacgtggacatccatgcgtgattgcaattatctatgctcacattgatgcatgtacctcacgctaactctcatatgcaatgtgggctcaccactcagacaaccgcctaagcgtgtgcacactaatcgtgtcactaccgaaaaccagcgagccagcgtccaggtctccccatcgtgcacaagcgactgtcctcctcactgtgacccggccagagcctttagggagtcccaaac

SEQ ID NO: 158488 - DNA, 304 bp, Glycine max
  unsure (1)..(304): unsure at all n locations
tgcacgaatntggtaagagagagagagagatttaaattttttaatctcttaccaaagctctgatgaaagaaacctcatgagctcttgtctgaagcttggaaaatgaagaagaatgtcttcctctccctctcggtgaactcgtgcaaatgaggaagaaaagggctccccatcgattcttaaagaatcatgaacatgaggtttaaggctttgttcaaaggaaacttggttcggcttatgttgacaagcttaattggccgcctgaatgactaatgaccaacttatggttcacgcgccaacctatgcc

SEQ ID NO: 158489 - DNA, 374 bp, Glycine max
agcttcatgatgatgaaacttcatgatgtatttatcacagctcgattcacagtagtctttcgatgtataacctcagcacgtatgatccacacaactccccatacaaatgattctcaagcatccgcgtcacccaacgtttcagatcaagatttaatctatagtttcatgacaaaaaatcacgaagacttcccaatccagagaagtttgatttctcgattcaagagaaaatgaattcaacattccacataagaaattctgaacacttcacaagggaagtattgaaaagatttttcaaaaaacaaacatagcacaatctcttgcctttcacaagagtttttctcacaaatttcctaattaccagcagtcttactctc

SEQ ID NO: 158490 - DNA, 250 bp, Glycine max
tcttttttaggtcatcctacataaatacaccttatcaattattatcatacactcatatcctgaatacttcaatatcactaaacaaaactcatctccacattaattattccccctcaccccataaccttctattagaaaattgagccaaacaaagaaaaaggattgcaaatacaaatctaaactcatacaattacaatgacatccttttcagcaacaatgctttcatcttttcgaggtcgaagtgccatat

SEQ ID NO: 158491 - DNA, 379 bp, Glycine max
accactgagatgcagctggcccaaagggatgccattttgttactatcaccttgacaaccaagagtaccgagtacaagagctggatggcaaagcaatcccatgaacatggaatgccacccacttgaagctctacttcatttaacctacactctaaacccaatgttgtactattttccctactcaagtcttttgtcccacaaatacaaaatccaaggttttagctcggagggtttttaacgaggcacatctagggtaatgaaaggaatttgtactcaattacatacattgaataaaattctacattcctttcacatctctcttatcaagacaagagcatccacagtcggacctccgaggctcttaaaacctatggcccgcc

SEQ ID NO: 158492 - DNA, 302 bp, Glycine max
tgttgtgcaccatcgcccgaccgccacctagtaccacatgtgattggtaccccataattctacaagcttgagatgaggaagtgttgaacggtgaaacttcctgcttttattgttgaccacagagtggtacctggagatatgtcgcgggggtcaggagaccttggggacgtcacgtggggtgctattgcccaaaaccaagcttgaccaatcccgacccaacccgggcatagtcggtcagtgagaacctgtgatgtacctaaacaggcgagctcctggcagtccacagataaaaggaaaacaag

SEQ ID NO: 158493 - DNA, 311 bp, Glycine max
  unsure (1)..(311): unsure at all n locations
ggacactataaaactacagcttaacaaaccggatctgcgcttgaatacaacaacaattttaatttctctcaaccgagtcaccggcctctgagccacctccattctaactgcctcctttccggccttccaaaggatatccaccctgaactcagcatactaaaaccatccttcctgagcacccaaatgatctagcttaatcgactgaaaccaaacacctatcctcaaaatacccaacctcacggtcaaacaaaacaccattccctctcaacaacccaccaacctntctgttaggaccgcctccgaccgttccc

SEQ ID NO: 158494 - DNA, 302 bp, Glycine max
  unsure (1)..(302): unsure at all n locations
tcttggcaatcctcattccagcgatcagcttggtttttgttccagagtntgaacaacggctcacaaatggcggcgagctgcgatatgaatctggcaatataattcaagcgtcccaggaagccccggacttgcctctcagtacgaggttctggcatctnaacgatggccttcaactttccggggtctacctctattcctttccggctcacgatgaaaccacagcatatccctgatttgaccccaaacgtacacttggcggcgctcaacctcaatcgatattccctaagcccttagaaccactc

SEQ ID NO: 158495 - DNA, 374 bp, Glycine max
gttgctgctatatgtcgagatgctcgaaagaggaattgttctgttttcctcacctaaccgcttgtgctcaaggcatgctctctattagttgctctcaacgaaggagtgcaaattcatgctcatgtttttaatgcatgtcttgaggttgatgtctttgtgcacaatggcttgatcagcatgtatggcaagtgtggggcaatacagcatgctggtgttgcgtttgagcaaatggatgaaaagagtgtggcttcgtggagttccatattggtgccatgctactgggagatgcggcatgagtgcttgaagttcttggggaattgaccaagaggggcgccatacggcttaaaacagacttctggttaagtgactttctg

SEQ ID NO: 158496 - DNA, 292 bp, Glycine max
  unsure (1)..(292): unsure at all n locations
atacaaaactcaagcttggtatatgggagagggacgatgatcaagaacaatcattctctgttgacaatattctctcgcctctgcaaaccacatcgtacatttattcncttcacggcacacccgcacaaacgtcaccttccaatccatatgcttcaaccaatggatcaccatgatggcggggaaatattgatgcaacatgtcgaattctccactgatcatgaccaacaccacacttcaaatccgattcccacaacaatcttccaattcgtatgtctctagccatcttcaaacc

SEQ ID NO: 158497 - DNA, 384 bp, Glycine max
  unsure (1)..(384): unsure at all n locations
agcttaggaaagtccttcttttctgtttacattcttcacnacatggcatgagatgaagcgcaaagattggacctcttgctagttgttattaatgaatacttaaacacttatgcgtgagggaaacaatggccatgagactgtgcgttaagcttcttctcttgatatctatcttatgcctaacctcatctaattgctcaggttacattttattctgctttttggataactacatgccttgtcaaagagaagtgatgagggcattaacttcattctcttatcatgcaatcagtaacttttgttgcatacacctttgtacatacgcactgcatgtattgtcatctgggaccagtgaactgtttctatttgcttgggacaacaaatcta

SEQ ID NO: 158498 - DNA, 369 bp, Glycine max
tctatagaaggtccattcctaattgctctacatttgcattacctctcaatgagctggtgaagaagaatgtggcctttacctgaggtgaaaaacacgagcaagccttaactttgctcagagaagagcttactaaggcacctgttctagctctgtctgacttttctaaaacttttgagctataatgtgatgcctctggagtgggagttggagctatattgttacaaggtgggcaccctattgcttattttagtgaaaaacttcatagtgccaccctcaactaccccacctatgataaagagctctatgccttaataaaagcactccaaacttgggaacattaccctcgtttccaaggaatttgtcattcat

SEQ ID NO: 158499 - DNA, 384 bp, Glycine max
  unsure (1)..(384): unsure at all n locations
agctttgatctagccaagattatacaaatgtgtttcaagagaacctaacggcccttaattatatgggccatcacatctatcatgtgtcgacagtaattgattagcccatgaatcttcctgggggccgtacacacttcgggcatggctcttgctttggctaatagacgccggaggccttgacttccattcaaggtcaaggcgaacctatccatccacatagtcgcttcttgatgcaatgcatcaatcaccctccctcttgcttctttttcggcatacactcgtgcaaaatctccactagcttttgttcatgggtcacagactggttcaactnttccttgtttcgcctatgatacctagcatccttgctccggggctctccactgt

SEQ ID NO: 158500 - DNA, 406 bp, Glycine max
  unsure (1)..(406): unsure at all n locations
ggacctataaaactcagcttntggagtaaaacagggaccactcatttatttttaaaggaagtcgtatctagtcaaggccttagagaccatacaagtttcctaacgatttctaattatgtgggccattaagtctatcatatgctgacaatagccgagaagcccatgaatctcttcgggggcggagtaggtgtctgccatcgccttggccttggctaaccatcggggaagttcttgactcccgttcaaggtaagagcaaaccgatccatccacatggttgcctcttggtgtaaagagtcgatcacccttcctctagcctcttcttccgcgtatacttgggcatattcgcccgcaatcctatgctcgtgggccgccgctagacctaactcttcttggtacttggcgatg

SEQ ID NO: 158501 - DNA, 412 bp, Glycine max
  unsure (1)..(412): unsure at all n locations
cgcttgaagaactacctnaatcgtcgacggcgtctgttctgtccatcctcctttctttattacttttcccttcaagttgaagtgcttaagaaaaattaaacaacgcgtctccctcaatttgacagccagttgccagatcaatccaaaggagtagaaccatttatacacggacgctgcacttatgatcactgagcaaacgacaatgatgcctatttcgatcaatttcccttggtcatatataaaatgtgagtagtcattaaaacaaacgctattctattacgaatatggtgccaaatggttattttattatacgcatatgatgcctatcagtatcatgcttatgcacaacttgcccctattttaattgtcattatttaattacttatataaaatggtgccctatttttttctc

SEQ ID NO: 158502 - DNA, 298 bp, Glycine max
  unsure (1)..(298): unsure at all n locations
agcttgtatattagctgaaccatgttatctatattcacacgtngagttttattcacaaaattacagtctatcttttttatcctagcgagagtgactctcctaagttcttgagtgattcaagaacaccctggctatatcaaaggacttttataacctttgtgtgttgccctcctccgaaagagagaatctttccttcccttcatcttcaaccctggtttcttaaccacaaatccctaaaatctatctctgccccaaattatctcctgggcataacgtccctttcacgcgctcaaagcaa

SEQ ID NO: 158503 - DNA, 361 bp, Glycine max
tcaaccctaagcaagctactcgcctgcgcaagctaatactcttcagtcctaagcaaccagctcgcctgggcgagcttcccctacaccaaatggctttttctataaatagtcatgcacggggaggggttaaggggtttggaaaactgaagaaaaagagaaaaaagaaaaactaaggcactgctgaattaaacaattgatcgtttcctacatcatttctcttgttagccttgtaccttgtgcaacagtcggttacgttttcttaagattttgatgtaatctatgtacccttataggtcattcgtgatattatgcgtacatttatctctttcacttatcggtgggaaatttcattttattcata

SEQ ID NO: 158504 - DNA, 112 bp, Glycine max
  unsure (1)..(112): unsure at all n locations
agcttgctaaccnatggaagctcctaatatgtcccacactntttggggtgggccattcttggatggccttgattttctcacggtccactaggaccccgtttttaccaactac

SEQ ID NO: 158505 - DNA, 408 bp, Glycine max
cgcttgtgtggagcttccatggagaatgagggaggaagaatttccaccttttggagagagaaagctgtctgaaataaatgacggctgagtgaacagagagaaaagctttttggtcttaaataaaaggctttcctccttttctatcattttattcaagcctctggcacatgtccctatttgattggagcaaaaagggcccactttctctttctgactgtgacccatactccattcccaaagtgagaaaaatctgaccttgaaaccttaaatcctgcctcgtttggtcgcgctccttatccagttctcgcgttctcttcgtccccggggccgttttctatgcctgcatttttttttcataaccccatcattaaaccccgcccgggttatagctggttccctacttttatt

SEQ ID NO: 158506 - DNA, 361 bp, Glycine max
acgcttatctcatttatgggcaacttttttttttcatgaacgcagcaatatcactcattatccagttggcaaccagctttgggtcagcaccttttgcaagagttgcatcaaaaaaatctgcaatctaatacatcgattcagaaaataaaaatcgcattagaccatttgtggtaatacactttatattgacatctactatttaactttctaatatgtactgttcttgattgaggggggtgatttgaaaagcatcaatggatcttatatgggctaatgaaaacaatctattacttctataagctcttttcaacttatttcaataaatattaaatttcatggccaaggttattgaataagtgct

SEQ ID NO: 158507 - DNA, 399 bp, Glycine max
tcagcgagagatgtggctcattcagcatcgccagcattctcacccgcggagctcaccaaagacgtcgccatgattgcccgaagaggaggggaattccaatagctggggttagggttatggttagggttagggctaaggttcgagttttgggacttaacggaaccggcgatctgagaacgggcaacgaggaacgaattggttttgggtttgtgagtgaaattgaaatgtcactctgtttttgtatatacgagcatcttcaattcttattcaacaccaaatggatcaattcgtcaatttttataaaaaaaaaaaccttaaatataattttgctctttttattttatttgatgcataatttccacttttatcttaaaaattacatatttaatctttatttta

SEQ ID NO: 158508 - DNA, 196 bp, Glycine max
gctctcgcgatcggcgctatcgtcttacggagctcaagctctctggtcctgtcccacaaagctcctcagagtctgtttgggccgtgtctttccctacgagccctattgggctcttgttccaacggatcgcgggctgctgaatttatcgctatcagattgggattctacttatcggatcttaacagctgctgatttg

SEQ ID NO: 158509 - DNA, 422 bp, Glycine max
taactattttgtaaatgtcatatctaaactaaatcatgtctgtgttaataagatttgccttagaccagtacaatcatattcatcaaagtttgaaagctttcataaaacatgaaaatgattttgtgcatgaaaagttggaaacaacgtgttgaacaaaaactttctaaacatagcatcctagacaatgtcattttgagtaacaacattctgagtactgtagtcaacacaacaactttctaagtgttgatttatcattacataataactaaaatatatatttattcatgtgatgatcttctaaacatgagcaaatgcacattgacattacgttttcataatcatatcccacattaataatgagtgttgtgactaagctaacccactaaaaagtcaaactccgtaagtgcttggacttctgtgtc

SEQ ID NO: 158510 - DNA, 336 bp, Glycine max
tgaggcatgcaagcctgataacacaaaagctatacatttttatccactcaatttatacaacttttgattcaaatcaatcacaacacttcatttcatacaaaatcaaaccactaaatatcatattcaatcagtttactgttcaatcatgcttttgcacaagctactactacaaacaaaataactgaaatttaaataactgaaacatgaagcataaactaaataaactaatgaaaataaactgcttaaaatgcaaaaagataaagatcgcgtcaatcatcctatgggcgatccttcgcatgctcattaagatccaacactggagcaactggtggatcc

SEQ ID NO: 158511 - DNA, 352 bp, Glycine max
gtaacctcatcgactctcacagactatagatttgggagccaatccaatccttgtgttccgactttcagccacttatgatagctgccgatgatcccattactggtatccctaagctctctgtcctttctttacaccgcatgacatgccttgtgaactccttagagtaccctcgcattggggttactgaaaccccgtgcgatgaaaggcgtgatgcttttgtctgatggcactcctctcatggggtagccaagctgtcttatggcgaggaccggattatacattaatacgaacccttgtttcagtcaaggaacatttggacatcctttgcatgaagataaaagcctgattcttc

SEQ ID NO: 158512 - DNA, 425 bp, Glycine max
ctcaagctctgccatagacgacgggagtgaagcccatggaacactttcatcttttactttcctactatccggagaaactctgacccagtttccagcgaatccattgttagaagcttctgacaatttctttccaacacgaactctttgcttacttggcttttcttgttcctccactgtccccctgacaataaactctctttatagatgtttgagccttgagctcttccttggaggactttgtctgcaggtgcattctgccctcttcttacacggaaacttttcacttgaagtacttctcctatgagtctcgcatgccataaagcgaaagtcagaacacacccttcttttttcggtgaactcacagcctacctgctcgaatgcaccacaagacacacgtatcgaatccaattcctcccagccccact

SEQ ID NO: 158513 - DNA, 259 bp, Glycine max
tactcaagcttatctacaggcacgaacaccgaaagagataagaaaatgggaattctgaccatcttttttactgaacacaagcatgttgaatcaacaaccaacatccccgtacaatgtcttgctagcccaacatggcccgtgttggtcttcaaactgcaacttattttacataaaacgcctcttacggaatgcctccgtcttactatatcaccattctacctcctttttttatttccaacgccgtcacggcacgacccaa

SEQ ID NO: 158514 - DNA, 223 bp, Glycine max
  unsure (1)..(223): unsure at all n locations
cgaagaaatcccgaagagagggcggcgtcacatgcttataccccnngagtggcatctatattgcgctctatattgaatgttgcatcttacttcatatcatatctgccgcgcgccatgcctcacaacaagtaagcgagaatccctcttcctgacagttagaaaatttcttcaaaaggcaaaactctctattctaattgaatcacagcatatcgcaaccgatcac

SEQ ID NO: 158515 - DNA, 372 bp, Glycine max
atttcacaacgaacattatacaaacttaggagagagagacacaaaaccaacgaacccgagtaagactaaccaaacaagactaatgctacgattcgttagcgacgcccttttccaattcctctttctctctctaacacacacacttggtaatataattccctatatcgcaatttatttgatatatcgaagttcgcgttatatctcacttaccattgaaacatctttttcgtacgactattcggctacgtcttcgcattgtgtaacgacatcgttgttggacactgtcgtacttatgatcattcgtacgacagtcttcataaacctttcgctactaatcttgcgcgactggtttgaccgcgtcgatgccatcac

SEQ ID NO: 158516 - DNA, 257 bp, Glycine max
ctttcgcgggaaatcccgtcgagtcgtgacgtctactattcttactatcctatcaatcgccggccgacgtgcccatcgcttctatctacaactcacattctagcatactcttcgtctgaccacccattcgcgtgcaaacgcaggatttctaacattggaaaatgctttgaattcttaaaactggatacagcatggctagataaccgcattatctggacacggagtgcacggaccctacctcttattatgctgcgacc

SEQ ID NO: 158517 - DNA, 409 bp, Glycine max
  unsure (1)..(409): unsure at all n locations
tcactatctngactngagcggcaagtcatcccttgcttattgcatcgccacnccccctctccttgagacaatgacttccttgactcacctcgacctctcttatactggattctatgggaacattcctccctacattggcgaacctctccatctgccctatctcggccctggacgtcattctacccctgaacctccgtttgttgaaaatgcacaatgggtatcaactatgtggaaccttgaatatattgacttgagtcatgcccacctattccaaacatttcattgccctcacactctccatcccttccctcttcacccacctacatctttctgaatgcacactcccttactataatgaaccactcccgctcaactctctatctccgcaatccctccttctttacaacac

SEQ ID NO: 158518 - DNA, 338 bp, Glycine max
  unsure (1)..(338): unsure at all n locations
agcttaacatcagaccacttctcgngttctggaactacttcacatggactcgatggggcctatgcccgttccaagcctctgatgaaagaggcatgcctatgatgttgtgtgatgatctctccagattcacctgcgtctacttttttctagagaaattagacacctttgcagctttcacggacctgagtcttagactttcaagataaaaataccgtgctctctagagaatcatgagtgagccttgttcacagtttgaaacacctcgctactgcattctgccatctgaaggatcctcctgagcgtttgggcccttctccccatcacactgggtctctgaa

SEQ ID NO: 158519 - DNA, 419 bp, Glycine max
tggttgtggagcttctatggaggctggatctttgagctttaatgaggtcctttaatggcgattttgcaccatggagatgctacgaaagacaaacgagaagaggttacagggccgccccatccactcagggataagcccatggaagaaggagccttacctcccaagatgaacccttggatacaaagcttggcgaggatgcttcaatggacgaaaaaacaatggggagaaacatagaggcgggagccccaaattgaaggaggaaaaacggagagaagttgaccttctagttgtgctcacaagactctcattcataacagttacaacaagtgtacacacgcctctatttatagactaggtagcttccttgagaagctaaagcctatcttcacaccacccctcttataactaagcttacctcc

SEQ ID NO: 158520 - DNA, 340 bp, Glycine max
  unsure (1)..(340): unsure at all n locations
ttcctcagagcttcttgagaactagagtttaactactcccacnccttgtaataactaaattcacctccttgaaataatatatgaataaaacaacacaataaataaaactaaacactaattataattactaataatatttcacggtgttacattctctggcttacaagataacaaaaaataagtaaaaaatcataaccaaaatcagtacatacatggggaagaagagtagtgcataatgctctctatattagctcatctcaatcttgcgctaagttcagtcctaacccttcaagatgagtcttcattaacccaaccaaccattgtcggagtagacaccatt

SEQ ID NO: 158521 - DNA, 392 bp, Glycine max
cagcttatttagatcagagtctatcattttaaattttttgaacgtgtcaccattctcttccttgttccatctcttcaccctcatttttagattcttaaaattttccttgagcacaaaacctccccatcctagttgccattgagagttccagcattggtggacaacttttttaaaggatacatccgagagccagcagtccaaaactttaaaaggttgagggccccaatcaacaacctttgatcgaagaagaatacgacaatgatcttgaaagctcctagcaagtgtcatttggacacttgtaggccatctattcagccattccagggaaaccaagcacctgtccagcctactcctagaagccttattagggctgatccatgtaaacttcctgc

SEQ ID NO: 158522 - DNA, 249 bp, Glycine max
  unsure (1)..(249): unsure at all n locations
tctgcggtaaccanttcataacatgatcgcagaggctgttcatgttcatgcacnttaaactccaatccccgcctctgcctcacagctcaaagtcctcccgcatgacgcgagtgtgtacacataaaacaccttcatgtctctgcattcttctcacgataaaacaatatcatcctcacccgagaacgctctatttgaccaaacacgctggatggtgagatacctaaccacggcgcccacactcacacgaca

SEQ ID NO: 158523 - DNA, 409 bp, Glycine max
gtactgtgcagagaatatccaaggaagataccttcatctgacttagcatcaaattttcctaagttatcttttccattatctaatacaaaacatttacaacccacgatatgaagtgtgagatgtttggttttctgccattgaacaattcatatggagttctctttaaaatgggtcttattacaagccctatttaaaatgtagcacgcaatgttaatggctatagcccaagagtactttggaagaggagcatcatttaataaagttctagcaatctcttccaaagatctatttcttcttttcacaacaccatttcgacgacgggttcttggcgcagaaaatcatgctcatcccgtgctctctaaagataatccaagtctttatttcaaactcaccctcacgatcactccta

SEQ ID NO: 158524 - DNA, 208 bp, Glycine max
accgttcgacgcccctctgtcccattactctaaaacaacatatacatttggcgcgaatggtctcatgccataatcgctataaaaaactaaccctcctcttaagcgattgatcgccacttgtccaacatatctctaaaacatacacatatctctatttggggcgaatgcgccatgctctaatagctttcaaacactcttgaaataatat

SEQ ID NO: 158525 - DNA, 176 bp, Glycine max
agcgcattttacccaacatatttattgcacaagcttatttttgtcatacgttacttccaataacttacaaaaataaacttagctcctacattttctttcttaatcttatccctactatatcatctcatcttttctgttcttctatttcataaacactaagaaccttttacttattt

SEQ ID NO: 158526 - DNA, 425 bp, Glycine max
agcttatgatgcaaacatttattatcgattcttttatgtagcaaaaccaacaacagcggaataattatgaccttctcagcaatagatacactccacgctggaggaatcatccaaatctgagatggacaagtccttcacaacaacacacagctatccctcctttcaaaatgctgctggtccaagcaagccatatgttccttcctcaatacagcagcaactaacaacaacagtcacaacaaagacaacaagcaactgaggctcctccctcaacttccttagaagagatagtgaggcaaacgaccatctacaatatgcaattttactaagagacaagaaccttcattcagagtctgcacaatcagatggggcacatggctactcacttgaaccaagctcacgctccaaattttgaacaactcgcttcc

SEQ ID NO: 158527 - DNA, 410 bp, Glycine max
  unsure (1)..(410): unsure at all n locations
ggaacttaaaactcaagctcaagctcctgcttcgtttccaatacgtttttgcaagataacctancaatgaacgataaaattcgccaattgaaatgcaatcgcacagcacaacacgttgaacttcttatgatcaagttgcaccatccaactatgaacaggaactgggaacaaatgcaaaggaaaatatatcatgcatctgacaaaccttacgactaaacagaatatagctgatttattatagctaactatgcctttgattaatggtggttgtatctttaaactatcaatatttgagcataaatcatgataatgtttccagtaatcttaaaatctgatcatctatctttgtgattagaaattattttcattgtatagcatttatggggtcatcagctccacacagctatcca

SEQ ID NO: 158528 - DNA, 423 bp, Glycine max
tctgtctacctaaatatgacatcaaggattgaagaacgatgaataacaaaaatcgaaaaggaagatcaaagaaaaacatttgttgagaaacacactgagttaagagagtccattcttcgtgatatacaaggtacttgtgagagattataacttcattgtaaatttactcgttgagtgttgtaaataatatttgattctatatcaaacttttgtttgtgaaagttaggagtggcctagtgaccaaacaatacttgagtattcttagattcagggggagtctacgtgttgtgctagtattggccttgagaatacttgtaagccacaagtggcaggaaaaaatactctttataattaagcttgattaatggaaccctctgttgattggtaaagagaactagacatagatcaagttgagtgaatctg

SEQ ID NO: 158529 - DNA, 389 bp, Glycine max
  unsure (1)..(389): unsure at all n locations
nttgtgaacataactagcttcagttatccaacagattaatgtgggaactccctggccatgaattctattccatcataattgtactactaatactcctactaataaaaatttcctaattacttaactaaggaagaaaaaaaaatgttactctgaaacttaaggaacaaccacaagcttcctctgttccttttcacaaacttctaaaagacctataaactctgtcattctctattattctctaaaacttcaacgttttatggacttggatcttctttagacactcatgtttctgtcatattgcttagacaagaataaagataactaaacttgttggtaactaaaaccacatgaaatttgcatgtgcctgtgtttccaatccacctaatggg

SEQ ID NO: 158530 - DNA, 388 bp, Glycine max
tttcttaagctctcgctacaacctttgtctccccctttggcaacatcaaatattcaaagaactcggaaatcaacacagttataacaatggagtagcaagatataagtatcagagtataaaatacaataagccaaactcataatcaagaaataattataccagaattcacataacataaaatggcaacaatcacaaaatatccaagactgaaattttaaaaaaaaaaaacacaagataaataagccaagtacttagcataataatgtaaattctaagaaactaaaagccaaaaatacacggcttataaaagataaatattcagaatctaaaatctaacaagacggaggaggtggtggaagatcgaaactctgaccaatgtatccgacat

SEQ ID NO: 158531 - DNA, 407 bp, Glycine max
  unsure (1)..(407): unsure at all n locations
ntctcacagtcctaaatgacattgcaaactaagatgaactcactctaacctccaattaccactaaatccagatttggcttttcaaatcctcaaagcatcacacttttccactcatatcactacattctcactttttaacccctacgtcaactctacccttcatctctatcagttttccatcagccatttcagcacacaaccatcatcataaaaaccctaaaacagaatgggtaagcttgactcatcctaaacatgacacatttagcatgctttcatcaaatttcttcacaaataactatcataaggcataacacctataaaactactcatcatatcntcccaaacccaaaacccaccaaaatttatgtgagaagaagtctacccacacctgaatttgaagcccccat

SEQ ID NO: 158532 - DNA, 309 bp, Glycine max
  unsure (1)..(309): unsure at all n locations
agctcgcgttccaacacgggacatgagtatgatttcattttttttcaaaagacaacgatacnctcagctggtttgccgctgccttcactcctacaattccaattcccaaatgctatgtacctacgaaacttattaactcgttacctatgctatctctacacaatgatgttctacgttactacgtctactacatcgcgcactcaaatcattaattctcttacctaacatgatgtaattttttgaacaacatccatttagctaaccttaatcctatgatgaattcattcaaatctcctcccctaattttta

SEQ ID NO: 158533 - DNA, 365 bp, Glycine max
tgggctgcttccatgacctaagacacgcacaggcaacatatcatttatacagagcactgataatctgacactactagttcaggcataacccaaatagcaaataattaatccaaaagatgagtgctttatcttttcaaaacaaataaataaattatcggccaaaatatatggaagacatcaatatacataggaaaccatctatgtagcatgactcaatatgatattggatgcacatggaccaagtaaaacattatgttagttccactatcataatttctgacataatgatataatctagaaaggttttcaattcttataacaagagcaagtttggaaaaaagctgataatatttgagctatgcccc

SEQ ID NO: 158534 - DNA, 328 bp, Glycine max
atattcgattacaaccttacctattgggttgctgcccatcttcttttcctcactcagtggtatatacctaagaaactgctacgaaattctgtaataggtgtctaaatttgaaatgccaagtgcaaacgaatatctgtcttagcattaaggaaatgctatggaatttatgtctttcactaatgcagaatctcactctgatcgccccccgcccccttccaaaatatgtaaagataatgatatattgtacttcacgaaacatgatgccttttcttcctttatgcttggagtgtcacacatatgaataatccccaaatcatacccgacttta

SEQ ID NO: 158535 - DNA, 394 bp, Glycine max
cgcacatacaaactcaagcttacgcactcgagcgaactaactgccgaacattacggttcaaacacaatatcacaaaaaaactacaaatgggaggagtaaataacaaccgccataaaagagaatacatgtgggcccgtcacacgtgggttcttaacaaaaaaaagctctcaccagtatcattttaagtcactaactcatcttacacaaacaacagcatccattatttgtccctcagatgaccctaccccaaatattcactcacccaaatctcaattttctaacaacccttcttgccacgcgcacacgtaagatgctcattaacccatgatctccccatcactatcttcccatcctacggctacatcccaagctctcattctcactctcaatcccc

SEQ ID NO: 158536 - DNA, 294 bp, Glycine max
tatcacataggagatacgttcacatgtgctttcaaattttacatgccgcacctactattataaattggcgcttcacatatccaggctactagaacacaaggcttatgcccctttgtggattcttatattttatttagacttttcaccatacgcttgattctacggacttcattgccttctggatgaaaagattcgacttgatgatctccatcgtggataacaccttatggagagaatggcaattactcatagtaaagatgacactgttaacaattatcgccgccctatgacgat

SEQ ID NO: 158537 - DNA, 393 bp, Glycine max
  unsure (1)..(393): unsure at all n locations
tgtcggcaggacaaactganaaggaccatatttagtgcacatgtatgcctcattaggaattgaatatatacattgataatttatccccagaagtttgaattatgattttcgttgttcttgttgtctttactgtcgcatatactttggacttaccggtgtaagatgttaaacaatgcataacctttaagtaattgagcttttactaagttgatcaaattggtttggttctgcactctttgaaatcctggtttctgtctctgatttgagaaatgcgggaagcagattggtatttcacagataatgccgcgtttttggatggattatattgcttggtagacaatccaattttgccatttntaattgatgaatgaaatttatgccggcctgatgaca

SEQ ID NO: 158538 - DNA, 275 bp, Glycine max
  unsure (1)..(275): unsure at all n locations
acttttggtttaaataaaagtttnctcctttnttatcatcctattcaagctctgccacatgtccctatttgattggagcaaaaagggcccactttctctttttgactgtgacctatactcagtcacaaaagtggggaaaatctgacctctgaaacgctaaaatactgcctccgtttgcgtgtcgcttctctggttccagtttctcgcgtttctctgcctccgccggggccagttttcgaaagcaagcaatatatatattaaaacactcagaataa

SEQ ID NO: 158539 - DNA, 416 bp, Glycine max
  unsure (1)..(416): unsure at all n locations
cntagagtgttggatgacaccacttctagagagggaagattacttaggtagacgccacaaggattaccttgataagtctgagattggttccacaacgaacccacagagaagctctcacaaaattttatcaaatgccccaagttcctctattgaaaatgaaaacccatacatatagtgtgtctgaacaaaaagatagaaataaacatgggccttctaaacagtttgggccaacattacaactaaaaaattataaataaaaaagaacatatttggcatgggccttcaaattagtttgggcattcagcaacaattaatagtcttggtaatgcctctggctctgggccttcatccttctccacttgagccttgttaagtatgcccggcaccatttgttgagggtatccactaactgtttg

SEQ ID NO: 158540 - DNA, 258 bp, Glycine max
tcaacgtcacagctcttgaccacagtgatggcggattttatcctaactgtactgtgcctaaatcgagtaattattccgatgaagctatcaataacgtgctcgcttctgtaaccaggggactcttaacttttgacctaaactcatatgataatcggagtgcccaattaaggcaaacactctccttagaccttgaccataaccttggttaacctccggaattccgcacttagtgcctcacgaacttcatgacaactaaca

SEQ ID NO: 158541 - DNA, 429 bp, Glycine max
  unsure (1)..(429): unsure at all n locations
tgcaccagatcatataagataaatgcattcaggcaatctgcacatatatcctcctaaacgtcaaattctncgcctatatattcaacctttccatcactggcacgtggagtgagtcttcctccatggtgcaatactaaagctatattgtcattcattctacacaatcagaaaccacacacattgtcatatattacgaaataaaaagcctaccgcaaactcaaacataggcacatcacacaacaacatgcaatgtcatctataaaaacaaagcatcataaacgaaaataatcaaggatcataaacctccctaacaaccgcgaaaacaatgcaaatgaaactccttgaacatataaaaccccaactctaaccacccaaacaatcgccacacaatgaacgtaaaaaacccccaaccgaccacaacgccaaccc

SEQ ID NO: 158542 - DNA, 218 bp, Glycine max
cttgtaaacccccgaggatgaagccgccgcctggcgcaacaccttgaaagcttcttttttttacgcaagccacctactaggtcacctagaatttcacggacgccaactcagcattgggcttatcgagatgatgccccagcgcatcttttcttgaaaaattcattgtcgagcgttaacacactggctgagctaagccccatcccattcggaatagaact

SEQ ID NO: 158543 - DNA, 344 bp, Glycine max
ctcgacacttgattcgagttcttgtagtagaggttgactccatcttaaaggggttcacactaaaatacttgcacaaaagttagtggaacaactcacatttgcatatctaaagcggacacgaaataagacccttacatttttcggttcatgctagaactaaaactcagtcgttgttgaaacacaatgagacacaccatagaccgaccacttagcagcaaatattcttgctatgagaagcatatgaacgaatttttaaagcatactgagaggttgaaaagctccttcctttgccataatatatactccatcgattttattataattgttttcctaagatcattttt

SEQ ID NO: 158544 - DNA, 314 bp, Glycine max
  unsure (1)..(314): unsure at all n locations
ntaatggagcttacatcatgtggtatcaagcacatcttcatctttgtgatgctcttttgcttcctctatctttntgctcggcgaattatctttaattccttgttcttcatcttattctccatgtacatcctccattgtcttgtggttcggcgctgtttacagtagattaaaaaaaataaaccgattaaatcttagatctacacttgttcttgcatttctatggttcaaatcntgtagatctactcctgaatcatatttttgtgctgattttagtttctatcatttttcattcataatattcttgtgctgaacct

SEQ ID NO: 158545 - DNA, 339 bp, Glycine max
  unsure (1)..(339): unsure at all n locations
cagctcggcccgagtgtgttganacttcnaattttattntacatcccgccgaaaacaaatagtgtttacaatccttaacatctactaacactatgtattacacaagaatgcatctaaaggaataattgccttttccctctttcacaaaagattgaacaccccgatttcggacccgattttcaaaacgttttcacacaatcttttcacaattttagccaacctattttatttctattttccgaccaaaactcctcactcaaacattcttaatattctctttcttagtctggtgcagtgggagcatgcctactatattccactatatttcgaaaaagattc

SEQ ID NO: 158546 - DNA, 371 bp, Glycine max
  unsure (1)..(371): unsure at all n locations
cgcgttcttctgatccgcagcgagatttcccaaaccggttttctccgaaccctcacttgacgacaccctcacgtcaaccctatgcagagaactcacggaaccgtcggaagatagagcggttgtgaagggaaaacgccacgagaacgaagaagtggaattggaatcggatccttggagaaacacttgaaccttgcgaactgaaacggaagtgctgttcactcatatctgagtgacgaagaggagagaactncaacgcccaaactgaacccagaaatcacctttcttccctgtgacataaagggcgttcgaaataggaagtcttttaacaagagtcacttgggaacaaagccacggctataagacaacctgcc

SEQ ID NO: 158547 - DNA, 287 bp, Glycine max
  unsure (1)..(287): unsure at all n locations
tatcttcatttaacnnctcatcctctaaccgtcacacgtttcttgcacctctatttaccacctccttccttccttattcgaatccagttggtagccattatacgatatccattcggaagctcatggtttcccacaagatataacatatgtcaacctatatctaaacatgccatccaacctcatataaatttttccataaacctagtacatactcaacaaaatatcatggcggattattcggacttccatcatgattccagctgcgcagtatcggcctatattatctt

SEQ ID NO: 158548 - DNA, 375 bp, Glycine max
agcttgccttaaagaggtccatgaacgtattcgttttctaacgaactcgttccgctccggagtatgacagtcaccgctttacgagcgctgtacaccagcagcgcttcgaggccatcaagggatggtcgtctctccgggagcgacgcgtccagctcagggacgaccagtatactgattcccagcaggaaatatggcgccggcggtgggcgtcactggttactcccatgggcaagtttgatccagatatagtccttgagttttatgccaatgcttggccaacagacgagggcgtgcgtgacatgagatcctgggtaaggggtcactggatctcgttcgatgccgacccttcggtccactcctaggatattcgttgtg

SEQ ID NO: 158549 - DNA, 373 bp, Glycine max
ttttccggacacattacggatgacgtgctctccgaatgagtttctgagtacttccggaaatcacaaattaatctttcggaaaaaggttcttccggaatgcttccaaataaagggtcttccggaatgtttcccgaaaaagcgtcttccggatttagatttactgaagggcacgtttcgccacttcactgtttgttgggtgccccaacaataatggtgggtgcacgtagccactccctaatatatcaagtcactcgaaattgaacaaccaaagctctccgattactcatattgcataacttttcactcagatgttccgattcaccgccattatattaccggaacgctaaaactaaacatggaagccacaagccaa

SEQ ID NO: 158550 - DNA, 353 bp, Glycine max
  unsure (1)..(353): unsure at all n locations
agcttatatgtgaaaggatgtgactcttctcattnnaactcgaacttcaacgtctaaaggcgctcgtaatcgattaccaaaacattgtaatcgattacagatttttgaaattcattggaacntcgcnctttcaacttgaaaactttttctataacaattctgctactagtaatcgattaccaaaatttggtaattcatttccaaacagtaaaaaatcttctggaaacatgttttgagaaaaactatgttctactccatttttgagaaaaacttttctaccttatcttgattaagccttctctcgattcttgaatctcgagccttgaatattgatcttgattcttgagatcctg

SEQ ID NO: 158551 - DNA, 426 bp, Glycine max
  unsure (1)..(426): unsure at all n locations
ntattgtagttaagtagaagtgatcgttgaaaggactatggagaccgaaccacctagtttggatcccaagaaagatcaagaaaaggatgttataacaactatggagtgtggacgtcactaatagaagtggaaactgaacttaaggcaagcaaaaacatttaccaaagacccaaagtgtaagcaatatggaaacaacttcgcatatacatgaatgtacatgcgtagtgatgataagataagatcctatatctattaatattagtattgtgagaatgaggaacttggagaggagtgaataatctcataagactttaatgacttgttgatgtgatagttgtattgtacgaagcacaaagacattaattactcaatatggttctttgaacaatgattatgaacttgaagtgacattgtgtatgacaaaac

SEQ ID NO: 158552 - DNA, 317 bp, Glycine max
ccgacccggatccttaatcaccgcagctgcagctttgacaacacgtattatatgtcatataaaatatatcttatcttatacccctgctggcaggtatacccctgcatcgcagttgcgtctacgttattaacagaacttaccacaattctaaaacttacactagaaggagattccttttaatttaaaaaaactaaccttaaccccctctattggtttgcagtcaatgtgaatatggccgaattaacaatgcaacccactactcattacgtttaaattttatattaggccgtggaccttaaaattattcacagcgattt

SEQ ID NO: 158553 - DNA, 123 bp, Glycine max
cggggcatatgatctatatgctctagctcgagggggagtgttgaatatcttctacggcttctaaattagatttgtatgcctcattactaaatattttttccttgttttagaagtccgcagaca

SEQ ID NO: 158554 - DNA, 257 bp, Glycine max
cccctaaaaacttgctcatacacgcctcctgcgataaacctaaaaaacctccacgccatctctatcaactctaaacggcaacgacataacattgctcacccatatccttaatgtccaaaactttacacacacaatcgctcacctcatgctaacaaccttgatacttggctgacagaaaacatcatccgcatatcaaaccagacaacatactttactcccatgcccctgtggtaaacgcactgatcacggggcttcat

SEQ ID NO: 158555 - DNA, 316 bp, Glycine max
  unsure (1)..(316): unsure at all n locations
agcttcaagaataatggccttaccaaacttattattcccaaaaggaaattcaataaataggcctcatatttttaatggagagggttaccactactggaaaacccgaatgcaaatcttcattgaggcaatagacttgaacttttgggaagccacagaaatgggaccttatgtgcccaccatggtggctggaaataaaacaacagaaaagcctnnncgtaattggactgtggaagaaagaagacgagtccaatataacttaacatctattcatggaagaatttattcatgtttctttcgatgagtctaatgcttttcc

SEQ ID NO: 158556 - DNA, 330 bp, Glycine max
atttatataactcgcctcatattttaaagaaaaaaatttattatatttaattaaatgggtttgttataataattataacattcacaaaccacataaagtaattaattttaatatttatttaattttgaaattaatttattttataataaaattaattgttgaatgaatatataaaaatatgataaaattttagaataaatgtttataaaataaaatatttactaataaaataaaaaaattttactttataagtgtatatttatttaatttaaaattaatattttttaaatattatgtttatataatttttttataaatatatttatataa

SEQ ID NO: 158557 - DNA, 149 bp, Glycine max
tatgcccaagatggagagatctcgcagcccaagtcgtaccagccattacggagagggagatgatcacaattatggtagatacgttacccacgttctactatgaaaagttgataggctacatgccaactaactttgcggatctcgtcttc

SEQ ID NO: 158558 - DNA, 408 bp, Glycine max
  unsure (1)..(408): unsure at all n locations
ctgcagctttatctagccagatatacanatgtgttaatcaaacctaacagtttctaattatatgggccattaaatctatcatgtgttgacaataattgattaacccatgagtttcctctggggctaaacacacttcgacaatggcttttgctttggctagtagtcgcgggaggtcttgacttccatttaaggtcaaggcaaacctattcatccacatggtcgcttcttgatgcaatgcatcactcaccctccctcttgcttcattctcagtgtacgcttgtgcgaaagcctctactagtttttgttcatgggtcaaagactggtctaactcttctttgtactgccctattataactagcatgctttgctccgtggcttctaagtgttggaccaaacttcgcttggatc

SEQ ID NO: 158559 - DNA, 459 bp, Glycine max
  unsure (1)..(459): unsure at all n locations
gcttctagccaaatggacttaccttgacttaatttctttgatagccctnttgagccttggttccctttccttggtttgaagctcactacaagctttaagtgaaaaaccatgatatcaccatatccttaaggaattttggagctttggaattgttttgggaataagtgtgggggtttttgtttcattggataacatgttttgttggtcatgcttcatgatatattttgagccatacttgatgtacattgcatattggttaaatgttggacatgctgaatatgatgttgtttctcaaagactacagagtaaaaaaaaattgaaaaagaaaaagaaaagcacgtaagttgagtgaataagatcttaaatggcaaaagaatgatgagactcttggttctactctnntatagttaaatttatctctacttctttnntatttcttatgttttcttaatatgcact

SEQ ID NO: 158560 - DNA, 384 bp, Glycine max
taaaagaagaaaacaattcaccgactcactaagaggtaaagaaacaattggccagtcccaaatttctatatgacggatccacgggtaagagtgtggggtaattgtttctgttaggaattttataattcctaattaattgatatgggctacatattatattataacatttatattagttatttatatttaaatgggttcaatataaagtgatctatttaagtgagcccattagattgccaacagattattgatatggacttaatgagcagaaaccatgttggcccattatgggataatgagaatcctaataggtttaaaacataagggcatggtatggtccccaatataccaaatcaacaaacaatttatcctctccccatctga

SEQ ID NO: 158561 - DNA, 337 bp, Glycine max
  unsure (1)..(337): unsure at all n locations
taagcaaagttcccaaagtcctattaacaactttcgtttgcccatcggtttgtgggtgacaagtggttgaaaataacaatntagtgcccaacttgctccacaaagtcctccaaaaatgacttatgaacttagagtccctatcactaacaatgctccttggcagaccatggagtctcacaatctccttgaanaacaaatagccacatgggaagcatcatcaacttttntacatggaataaaatgagccattttagaaaacctatcaacccaccacaaaatggaatctctaccattgcttgttttggccgccccaaacaaaatccatggataaatcaat

SEQ ID NO: 158562 - DNA, 445 bp, Glycine max
  unsure (1)..(445): unsure at all n locations
tgcagctgtgcatcaataccctgatgaggatgtcccatatgttcttaagactggactgattcatttgcttccaaagtttcatggccttgcaggtgaagacccgcacaaacatttgaaagaatttcacattgtctgctccaccatgaaacccccagatgttcaagaggatcacatatttctgaaggcttttcctcattcattagagggagtggcaaaggactggctgtattaccttgctccaaggtccatcacgagctgggatgaccttaagagagtattcttagaaaaaattntccctgcttccaggaccacagccatcaggaaggatatctcaggtatttgacaactcagtggagagagcctgtatgagtactgggagagattaagaaactatgtgccagttgcccccaccatcagatttcagaacagcttcttctccaatatt

SEQ ID NO: 158563 - DNA, 324 bp, Glycine max
caataaaatgagtttataacgaaaatctccaatcaaagaggaagcataaaaaggagagaagataatttccatcaaagaggaagcataaaaaggagaaaaggaaaatttcctatcaaagagaaagaaaagaagatgtaaggaaattcccaatcaaagagtgggagaaagaaaaaagataagaaagaatactcccaatcaaagaatgggagaatgaataaaagaagttataaagaagatagctcctggtcaaagaaactataagaaatgtgcagaaaggtcttttgaccggacgatatctgaacaatacaaaattgtcaccaaatg

SEQ ID NO: 158564 - DNA, 404 bp, Glycine max
agcttgcaatcatgtgagataaaattcattcagtcttgtggctctacacaagggtgtctgcaaccttctaaaatagtatctccttcatcctattaaaatcaaaatgacaatgttaaatgctattcgtaaaaagatccctccaaccaaaacaagggataaacagagaaggaaggtaaatgcgagaagaaaagaatgtagtaattgtgaaaacaacaaattaagtaccaatgaagtgatgtcaggccttgtgtagggagtaggacaactagaagccaaatcagcaaatctcaactatagattcctatccatgtacattctttaaaaaaaattcatggttagtggggttctactaaatgttgtcatgacaagagtatattcattatacatcaaaatggaagttatag

SEQ ID NO: 158565 - DNA, 440 bp, Glycine max
  unsure (1)..(440): unsure at all n locations
agctngaccttcttgcctgttgctcggtttgtgctcgtgtattgaggctcaaaggtggttctcatgagctaattgatccggtgaggctgtttgaggatggccttgtttgtgtgtcttctttcaaatggttgcctcctgagagcacagagactgctgttgcagtccgcacctcccataagtttctgattgcttcatcgtctcattccgataatgatccttccaccacgagggatctgttggactctgcgatatttcgcactttgcaggtgcttaagagtgtttctattttagaagttgcattctaattatagaattctttatatcctagtatgctagtaactcaaaagttcagattccaaggttaattgctgcaaagagctcttgttttttgtcagtgttgtgtgtcacgcatgatgtattcaagttctttgtttgttttt

SEQ ID NO: 158566 - DNA, 318 bp, Glycine max
acggatttagcaccgcgctgcactttttttaaaatgttttgtcctagcttgagacataagcttgagttgactattgtgtctttactattttgtgcattgtggtttgcttgcttatgacttgcagccctgtttgaaacatagacgtaaaatctataatctatgaagtattagggctccttttgaaaatatctagctttcgcttgtgcgtctcagttgactttaaatgagtgcaaatacatgatatgctcaaaacacatatatccttaaaagcttgcactttgaatagaaaactccctctgttgaggttatatgtgtatg

SEQ ID NO: 158567 - DNA, 439 bp, Glycine max
  unsure (1)..(439): unsure at all n locations
agtgtaccacactacctgctctccgccaagctatcctgaaagaagtgtatcaacagcttttcatctttagaatgagcgcccatcttacggcagtacatcttgagatggtttttgggacaagtcgtccctttatacttgtcgaagtccggcactttgaatttcgggggaataacaacatcgggtactaagcaaagatccgtcatgtctgcaaacggatagtccccaaatccttccacagccctcaatctttcctcaaggagatcgagcttcctcctttcttcaattgccgggggcggcccttccatagacaaaactattggcgatgctgcgatgttgggttggggcgacgtgcctggtgccggcccttcggggatcggnggataaaactcgacatccctccgagcataatcttgagggtctttatggacttcgtcgggct

SEQ ID NO: 158568 - DNA, 318 bp, Glycine max
  unsure (1)..(318): unsure at all n locations
gtgcttaagacatttatttaagtnatatatcgctttatcaaaaatgaattattgtacacgatcggttgatttgtattattcggtaatgatggattaaatggattacgaacagttggtcgtggcgttaccacggtggaaatcaaaaaagacgtaaattataatataatattaaaataaccgtttagttaataaagcgaaaaataatcgggagttttgttattgggagtttatttttattgatgtgatatactaagtgaactaggtgaaacaattgctagtaaatgtcaaaaaaaggtgtgaatttatatttagttttaa

SEQ ID NO: 158569 - DNA, 403 bp, Glycine max
  unsure (1)..(403): unsure at all n locations
agcttagngtaaacgaatacactaattttttaatctattacacgcgagggatactgaaataatcataactattcacactgcagtacggttctgactctttcaaagtggagaggagcttaactaaacgtcataactcttctaaatggtcatctgggccaaacatgaacagtgtattacaacacaggtttgattcgttttgcaatacactttacttttccaatcaatcctttacaaaccttgaatggttatgaacttattcttctatgttgtgccaaaggccatacgatatgttgtggtctccataccttgaagatcgcgccagaatttatcagtctttctccttcgcgaagaaaatcccgagactaacgctgacactttgtgaactcttaccttacaaaaaaaa

SEQ ID NO: 158570 - DNA, 331 bp, Glycine max
  unsure (1)..(331): unsure at all n locations
gaaactttctgcttttatntcgtgaccacagagtggtacctggagatatgtcgcgggggtcaagagaccttggggacgtcaggtggggtgctattgcccaaaaccaagcttgaccaatcctgacccaacccgggcatagtcagtcagtgagaacctgtgatgtacctaagcaggcgagctcctggcaatcaacagataaaaggaacaaagaccacaaagcaaggaggcttgtgtggtggttggccaactgtgaatcttgtgtgatatatgggttatggcctctggtaatcgattactaagggtgggtaatcgattacaaggcttaaaaatg

SEQ ID NO: 158571 - DNA, 348 bp, Glycine max
  unsure (1)..(348): unsure at all n locations
cacatgcattcttaattctctacacactttttggatgattcttactaggattgtgttgnntttcgaaaccgtacttactttgcatggattttgtaaagctacaaaaatgagtctcccaatgtttgatataagtttgtgttagaccatcattaatttgaacaagaggcttaaatgtgtgaatgcacaaacctttctagcgagcaactcaaaggtgtaacaccatcttagaatttcagatgagcatctatattgaaaatggaatacttgaacgataatgggttggttgatcctcattggtttgggaatagataatgatctatataatgagcacaatgtattaatgatgga

SEQ ID NO: 158572 - DNA, 449 bp, Glycine max
  unsure (1)..(449): unsure at all n locations
tacatgatacagatatagatttgtccagtaccttgaaagttttatcagttttatttaattgttcgattctntactctattgtcctattggacagagtatgtggggatcataaccttgggcccctgataaaggtcagggaactaaacatatacaacttttactgtgattntcgacatatccattaaaattaaactcgaatggggaagttaatgttgcctagtgacaattcatgagagatacaagttgatagatgcgtgtttggagggacttgatatgctttttttttaccaagtatttatgcaacacaattgcgatgggcaataatatttgaagcgacctttnntcttttgtagtattcagtttaagcgcttgctttcctgatttatcaattttgaaataagtattggagtcaactgatcacataaattcttgcaaccagagagtcgtta

SEQ ID NO: 158573 - DNA, 357 bp, Glycine max
  unsure (1)..(357): unsure at all n locations
gtgaattaatactagctgaaactggtaagaaggggagaaggttttnatctttcttaaagctttgctttaggaattggtccggattataatttgcaccaagcaacacacttattgttatagcagtgttttactattgaaatgtgtgtcatgtagatatacctcatttaaagaatttatttttgagaaaaaaaatacctcatgctattatatatgaaaaaggaatcagtattgattacaagatcaatatattactgattaatatgaaatagaatattctttaattaatacaatatgaagaataatatcaatacataatctcacaattgttatgttttttattatatgacattctacata

SEQ ID NO: 158574 - DNA, 400 bp, Glycine max
  unsure (1)..(400): unsure at all n locations
cactaaagagtcacgtgctacagttctgacagtgaaaatgtaaagaagattgagaatttaattacaccaattttctttgctaaaatggttgtctttacaaaagttttctgcaaaggcagttcatgaataaatgtgtgtacattgcaagcccacatatttggtttcttatatgtgaatcgtggccatcacaaagtatcggtttagaagaaagacatgtgtgtggagaatttcacaaatcttttgcataaaaataagtactttactcgggaaatgtatttggtatgtcacttatatatatatatatatatattaataaaattaattttaaatatttaataacacaataaattatatattntttaattgaagagatgttgtcttaaaaaatattaagctgaat

SEQ ID NO: 158575 - DNA, 449 bp, Glycine max
  unsure (1)..(449): unsure at all n locations
agcttctggatgttggagatattcttcaatctactcaatntgctcaacactntgtaccccaaaaaaatgctttaacccttgaaccacagcatgttttactcaaaattgctttaagcgtggcccaatgtgtttagagttatttactcttcagatttttactctagaggtacgttgttacaaattatatgacgttttagattttgactcaagtattagaggatataattaatttattgaatttcattagaaatattagataattttttaatatataatttatttatctaattaatgacttattcatttcttatatattactctcactaaatattgattaaagataatttatataatgtaacgaaggaaatactccaaattcattagttaaagctacaactaaataaattagtatttctttacttatatntatataatatacaatgaaagat

SEQ ID NO: 158576 - DNA, 347 bp, Glycine max
taagcttgtacagatgttgtatttgaagaatagccactggtgtgatgtaatatggagttcacatggtataagcttaacggatgtgttattattcatgaccgttttacgacacgcctatgctgcattggcctacatattatgtgttgtgtaaaaacctctatagttattgtccttaattattgaatgatactttatttgattggggaccaaagactgtcaaagagttagattgtttgttgcgggatcataagtcaaataatatgtcaagaaagaatgggggatttgaatggcaatgattagatgcttatgttctataaatgaatttgaagggtttgaaatagaaattg

SEQ ID NO: 158577 - DNA, 437 bp, Glycine max
agcttgtctcagcggttatgcgagacaaagaccatcatgttagccatcgtcagcaagtaccaagaagaattaaatctagccacggcccacgagcacaaagtggcggacgagtatgcccgagtgtacgcggaaaaggaggctagaggaagggtgatcgactcgttacttcaagaggcaacaatgtggatggaccgatttgctcttactttgaacgagagtcaagaacttccccgattgctagccaaggccaaagcaatggcggacacctactccacccccgaggagatccacggacttctcaactattgtcagcatatgatagacttaatgacccatataattagaaaccgctaggaagtttctattgtcgctcagatcttgactagttataactttctgaataaaaagagattatcccacgtttttactccaaaaat

SEQ ID NO: 158578 - DNA, 445 bp, Glycine max
tactaagtctatgcgcctatttccttacaacgttctcttgcacaagacatttaaccgtaaaaatgcacccatatacaatcaatgcatcttcgttacctatattatttacgcgccatccaatgcgtatttgtttattacattacacacatattcttggcttaactcacatacatgcatactcaaacattttggggcaccaaaaattgcacatgtgcacatcttggcttttcttatacctacatacgcaaacttcatgatgaatcttgactatctacacaataatgtgctacatttcatgctctttttttttaagtttttgctacctaaagacgcatgcaaattcaagcatattttactgtgctgactaaaattgcattcaaatttaaaaagaatattgtttgtaatattgtttcttcacataacatgcaacatatttatatttata

SEQ ID NO: 158579 - DNA, 405 bp, Glycine max
  unsure (1)..(405): unsure at all n locations
gcagctgattaattagattgctttaagtcttactgctangcttaaacatatttaagaattggtgctgtatngccccccttatttaagattatttgttattgccatgttaattattgcctttttaagaatttttggtgattatgtgttgagattatgacttttgattattaattataaaaatatctttaatgtgtataaaaccataatatgatttttctttcctgttttgcatcantctcgaggttgtgctctgttgggtatttatgatacaccaactctacatgaaaaggaaaagttatttctggaccaaggatggcaggtatatttgtaactttttctaaaaaatatatctttggtgtttcttntttgtggagttgtgaatgatatctgacatctgacatatga

SEQ ID NO: 158580 - DNA, 308 bp, Glycine max
agtttgatttttttatataatttatgtattgttatagagggatgtggttttaaggaaagggggggttgttttattgtttacttttataaattggttatatataaatattctgtggaaggtatttatggttatagtgaaatatgtgtgatgaatattataaatagttagaaatatcataaatgtaggtatagcggattgatttataagtatatagataaaaaatggatagtgtttataatgttatagttgtaatgttaaatgtataaaaagtgtatttgtttgaattttaaatttggtttaaataaaaa

SEQ ID NO: 158581 - DNA, 418 bp, Glycine max
  unsure (1)..(418): unsure at all n locations
tcagtgagaacctgtgatgtacctaaacaggcgagctcctggcagtcaacagataaaaggaacaaagaccacaaagcaaggaggcttgtggtggctggccagctgtgaaacttgattgatatgtgagatatggtctctggtaatcgattaccaagggtgggtaatcgattacaaggcttaaaaatgaagacaggaggctaagatggtctctggtaatcgattaccactgggtgtaatcgattaccaggcttgaaaatgaggtcaggaagccatgaggacttctggtaatcgattaccaagggggtgtaatcgattaccaggcttanaaaaggactggaacattgtggacgcctctagtaatcgattaccagcctgtgtaatcgtatacacaganggatgggtcactggtaatccatta

SEQ ID NO: 158582 - DNA, 396 bp, Glycine max
  unsure (1)..(396): unsure at all n locations
gtgacacttaaaactaagcttgttgattaaggtacccatcacatgtggtactatgtggcaaacnggcgattgtgaagaaattnttacatcacaaataaanttataccaccacccactgttgccacctcaactgagctaagtattaaagtatcccttatactcttactataacgactggtcaccataatactctcatgctccacaaatgcaataattaacatccatatgacaaagataaaaccatgctaacaggatatgagaaaacttgccaaacaaaccaaaatacagttttacatcaatactccatacatttgttgttcatttgtacagcgatcgatgaaatttatgaagcttataataattaatttgacgtggattataaaacatcaaatattt

SEQ ID NO: 158583 - DNA, 408 bp, Glycine max
  unsure (1)..(408): unsure at all n locations
agcttggtgggtgtgcatgtntgttaatgttgtangtgggtttaggcggcgcggcggttttaggtggtagtgatgcgctggtttggttgtggtcggagtaggtggcggcggcgcgggatggtgatggtgtttgggtggaaggtggcgactctggttagagatggtggtggtttggtcggaggtgcggtggttatggtgaatgttttagaggaaggtgaatagggagaagggttggggtggtggcgtggtctttgacatggacctctttctgcagttggtgtatttgatttgggaggattatgagttgccaatttcaaacattttttgggggttaataataagattagtattatgtcatcatttaatgataaagattaaaacttcaattggaaaaaaagttaataaaag

SEQ ID NO: 158584 - DNA, 379 bp, Glycine max
  unsure (1)..(379): unsure at all n locations
cattanactaataactttgtatatgcatggctagaaattattgtatgtttcaccacgcataaaatgtaatgaattatatttaaatatttgtattaaataatagtataaaaaatatctttctttacttttacactatcaatagatgttattaattttttagtgggtcttataaacgtgtattaatcattctgatatttaataaaatatgtaagatttctaacgagtattgtaacgaattattgaaataataataataataatttcactaaaatatatgagttggttaatgaaatttaatgaaattatattttcaattcaaaaaaactaagatattgatatgctgattgttaatgagtggtattaaaactggagttgaatt

SEQ ID NO: 158585 - DNA, 385 bp, Glycine max
  unsure (1)..(385): unsure at all n locations
agcctgctctatgattagctcttgttattatattcttgaaggagcaatccatcgatcgtcgatcattaagtgttaattaagacttaagactaacaaaccatatcaatctctctgtttgtttgtctgcatatctctatttatttgtttgtccatatgatttttgtcactctatttatttgtctaattaaataattaaattttttatcaatctaattatttactataaacataaaatattttttggtccttatattttttttatgaaaattggtgctaatgtttatattntaactttgatcaattctgtacagaaactttataaagcaaggatttttattcctcttcataagcgattgtcactatcagaagcgatgaaaatcaattc

SEQ ID NO: 158586 - DNA, 307 bp, Glycine max
tgttggttacatttatttgatatgtataaatatgatttattttaggggaaagaagagatggttgtttttttttaaggttatgaatattttggtatttaattatgggtgaaatgaagatttaattttattagataatggattaattatgtgttagatgtggataaatggtataaagtgataatattgtgaaatggttgattaaggtgtatttagtgtttataggattaatggatgaattagggtgaggtatggaatggaaaagggatggataaatgatgtgtgggtgatgtagatggggaatagggta

SEQ ID NO: 158587 - DNA, 384 bp, Glycine max
  unsure (1)..(384): unsure at all n locations
agcttgtgcaaatcanatcactcctacatctcatctctagcatgcattttctttctttacccactcctcacgtttggttttttagggaaaaacaccataactaaacgcgccgcaagggatccctatcgcaccagatccaaatctagaacgatgggtgatcaagaggagacgcaggaacagatgaaagccgacatgtcggctctgaaagaacaaatggcctccatgatggaggccatgttaggtatgaaacagctcatggagaagaacgcggccactgccgccgctgtcagttctgctgccgaagcagacccgactctcttggcaactacgcaccatcctccctcaaacatattaggacggngaagggacacactggggcacgat

SEQ ID NO: 158588 - DNA, 434 bp, Glycine max
  unsure (1)..(434): unsure at all n locations
agcttcgtcctcagatccctcttgttggactatgcccaatttagacagccctcttaggtttagactaacttaaactgagtttcattcgcagatccctcttgtaagactagactcagctcaagcagctagcttcatccgcagatccctcttgtaagacaaggcctagactaaacaacattattgtaacaacataattaaaaccaaaacttaatccgcagatccctcttgtaagactaagtttcgatcctacttcaatcaagttctaaggcaacagtacatttcccaatgctaaagtcacctaactatgcacacaaacgggtgatcagacaaaaagcatacaaacattaagcattgaaggaagcattgaacacagaanacataatcaattagatattaagtatttacatcggctgttcattagaaatccccaacta

SEQ ID NO: 158589 - DNA, 324 bp, Glycine max
taacattgtgtaatatatacattactgatgggtatattcaatatacatctagtgtccatttttacgccacaccggtctaagtgtgcaacaattatatttagctttaatgtttgttgtacacattaataagtgttcctagctggaatttaatacttatatatatactaaaagataaggctaattacttgatgatgaagtaccaagcctttcaaccttaatattcacttataccatatctaaggctcaaattcctactatgtttttagacattaaacctgttccaatctataattatgaaatatttatatggaccttatctcggag

SEQ ID NO: 158590 - DNA, 355 bp, Glycine max
agcttcagccagatcgctaagcgacagcttatccttggctaagcgtgacctattgtcgccaagcgcaattccttatggccataactgaggtcgatgaagctaagtgagattcattacgacaatatgcacgctaagtgagtacttatcagctaagcgcatgctcctctttacttaagatgcatcattttagctaagccagccagagtctggcttagcgagagttgcaactttttggatttgcaaacctcgctaagtggtctgatccttatgctaagccaagtttgtgtgttaaaacaaaaaaacaactgattttgaatttgaaatgtcggctaagcgcacgtatccgctaagcgag

SEQ ID NO: 158591 - DNA, 389 bp, Glycine max
atatgggccatttaatctatatcggccgaaaatacttgattaacccgttaatttcctctggggctgatacacacttcagacattggcctttgcttggctaatattacggggatgtcttgactttcatttaatgtcaaagcgaacctatccatccacatggtcgcttcttgatgcaatgcatcaatcacccttcctcttgcctacttctcggagtatacttgtgtgaagacttctactagcttttgctcatgagccatagattgtgttaactcctctttgtattgccctattatagctagcatgacttgctccgtggcttctaattgttgggccacactcttcttggatcttgagcaagcagctaactccttccttaagaccatgctatg

SEQ ID NO: 158592 - DNA, 455 bp, Glycine max
  unsure (1)..(455): unsure at all n locations
gcagcttngagataactaataggtattgtttttgtagatggcangcttcgcatgcatccttaanatatgctntaaaaaaatttgaggtgttttttttttccaatctatgctacctctctcctaataattcctaatttacactatttctcaatttaatttttgaactacactatcctttgaaaagtcttgtttttcatgacctgactttccaccttagtttctttatttttagttaagaaattgagttgtcccaacccgacttcccacttgagttttttttggtaaatgctattttattaaatttaatttttttaaatattttttttatattatgtaatttcactagaacaaactcaatcagatttgaaattctggatgcaacactaaaacactcaaagatgtcatcaagcaatttgcacctctatgagtttcctcttatggaattcacaaatcac

SEQ ID NO: 158593 - DNA, 339 bp, Glycine max
tcctctctgacaaatagagagcgtgagatattattcttgctttgtcttaatattttaaacatagaaagaactaaaattattcgtgcataatgatcgccaggcatcatagaataacatatgattgtgatcattatatacgaatcacggtctctgaaatacgaacacttcgatatagttaatgtctataatttatgacacatagacactgcatacacacacaaatagagagatcctaattaaatgaaatatgaataacatatatcaaaatagtctaatcgatggtatattaatgtttataaaccaaccttctatggtgtataagtttatgaattgtgtaaa

SEQ ID NO: 158594 - DNA, 444 bp, Glycine max
  unsure (1)..(444): unsure at all n locations
taagctattatggtatgttancgggcgcagtcgttagatgcggttaatgatatattgaatcatattttacttttatgtgagtatgtgtacgcaacatgtatagtaacagatttaactataaaattaaacatggacataaaggttacgggtcctagaagaccatagataatatagaaaaaattgatttagcctgacataaatataaattaatggaatatctgtttgcgagaattaatttatacagggttatgttcctctaaaaaaacagaggatttttcggttgaatttacatcttaataaaaagtatattgaatactactatgcgtatgactcgtgatatgtgcattgagtgatgaaattattatatggcatttttatatactaacatagatgttaatatatatatatatatgttatcaacattaataatcattataatgtatt

SEQ ID NO: 158595 - DNA, 462 bp, Glycine max
agcttatgctgtaaacatttataatagaccttctcagcaacaaaactaacaacagcagaataattatgacctttcaagcaatagatgcaatctaggttggaggaatcatccaaatctgagatggacaagtcctccgcaacaacaacagcctgtccctccttttcagaatactgctggtccatgcaagccatatgttccccctccaatacagcaatagcaataacaacagtcacaacaaagacaacaagcaactgaggctcctcctcaaccttccttagaagagttagtgaggcaaatgaccatctagaatatgcaatttcagcaagagataagagcctacattcagagtctaaaaaatcaaatggggcagatggctactcagttgaaccaaactcagttccaaaattctgacaaattaccttcacaaactgtgcagaatccgaataatatgagtgccatcac

SEQ ID NO: 158596 - DNA, 270 bp, Glycine max
taaataaagctgatatttaaattacataaatcataaaagtactgttttacacaaaaaagtcacgaattgaaatatttatatgttctgataatactgtagatgatattaatctatatacatggcggaactgcaaaggaatcaataataatctgctaaggactaatgactggtatggaataaataggaataggtgaaggggcaaaaaatggattaggaataatatatggataagtttctaactccagaaccataagtacaaatgcatcataa

SEQ ID NO: 158597 - DNA, 382 bp, Glycine max
  unsure (1)..(382): unsure at all n locations
agcttgtcatgtctatccgatattttgtattgatgttgaaagtcctgatagatcttttatgtaactnttctgttttaataccattgcaatggtaggttctaactctttgctgaacatgtttttaggacttgcttggtgtgtgaaatctgattgacaatgctttgctaaacattagaaattttttatttctgatgattaatgaatttcttatgttttatcactataaatccatttgaaataaagaaatgtgagtgccttaacattcctttaataattgtgatgataggtgaggaagctagaaacttcatttgtaagtttctggtctagaagagggttggatccacttatccagaagttattgtcagatccaaagccatgtgtc

SEQ ID NO: 158598 - DNA, 414 bp, Glycine max
  unsure (1)..(414): unsure at all n locations
cttgaagatacaaaanataaatgatcaacatgcgttgaatattcattccttctttcttataaaacttgctgtatagataccaagctcttttttaatccttgccacgtcgacagaaaagactaatgtgtgtagtgaaatattcgtacataagatgatcaaatcttatgcaatgtgcaaacttaaacaacaaatattgttgatgtgctgaaagactccgcggcttggtaggacaaataatactgggtttaagtgaaacatggggtagagcttgtctttttaatagccacaagtgatagtgaaaaatactataacttttgtgaaagtaatgaaaacttgatgggtggacaagagttggacgtagtctcggtggttgagacgaaccattatatatacttgtgtgttcttgtttactgc

SEQ ID NO: 158599 - DNA, 428 bp, Glycine max
  unsure (1)..(428): unsure at all n locations
catgcaagctngcttcttcaaagaacgtctgtcattattattgaagctgaatgggtagcagtaacatgatgaccatttggtaatctgaccataatgggagggttgatcttattataggagtgaaagtgagttagtgaagatgatacatgatcatttgctccacagtctaatatcaaagaagtgagtgtgtgtgtgtgtgtgtgatttacaaaaggcaagggtttacccgtgattgatgctggatcaataaagcatgaaaaaatagaggcaacttgttagacactagacgaagtagacgctgagttcccatgagatggttgttggattaaagcaagcaatgcctcgtattggtcgggtgaaaaacaaacttcttgagacttatgatgctgcgcttggtcatctgtgactttgctatctactgtcactat

SEQ ID NO: 158600 - DNA, 416 bp, Glycine max
  unsure (1)..(416): unsure at all n locations
aaccgatcgtttaagccgttttctcttctaatcaaaaaataaaataaatttccactgatcatttgaattgtaatatccgctaatttctgttaaaatgaaattcgaccgttcgatcatgccgtaaccacgttggaaatcaaaaaaagaggtaaaataataatataataatcaaaaaataccttttagtaaaataaagcggaaaaatcaatcggacgtttctctttgggatttctctttcttaattgaattgactaataactaaagtgaaactaaggctaaaatcaaccctcaaagtcaagctcgtccacaaaaaatcactaaaaaggaattgaaagttcaatatctcaattnttcttaccaagtaaatggatcatttntaanggccaacgccttataatgatcaccttccaagtaaa

SEQ ID NO: 158601 - DNA, 422 bp, Glycine max
  unsure (1)..(422): unsure at all n locations
agcttctaatccctgtntctctccctcnttggaaaaatcaaaaagccaaagtgcgtggttattaacataaggcagaaaataacacagccatgaccattcacaagccggaatcaaacataattcattcataattaactaagttccaaatattgaaatataaccaaagttcagagaataatgtcataaagcatagccaaatacacggcttaaaataaaatataataataatctaaatctatgaagatggtggtggaaggttgaagcattgacgaacataacttatatcctcctcaagctgagtgatacgggtatccatgcctgcaaagcgagcatcaatggcatcgatacgaccatccaaggaatcaaagcgctcaccaatataggtgcggaggcctcgcaactccgaaagaacttcatgcatg

SEQ ID NO: 158602 - DNA, 287 bp, Glycine max
ttaaagtgctctgacttatacaagtgactgtacatttcggagaataaacacttttgttgtaaatttaaatatttatttctaatatgatttatgttaatttagatgtgcgagtccatgtttaattatgaagctgcagattcccctttgacttggaaggactgcggagtgacgatagtatgatcatattgaatactacaaaattggaatggatgatgagtttgcacagcaccattgtaagttttttagtaaactaataatattgagaataaaaccatgggtccatcatt

SEQ ID NO: 158603 - DNA, 421 bp, Glycine max
  unsure (1)..(421): unsure at all n locations
tgataacagtgatgacggggaattatgatgacaaaggtgctgaccacacaagctcaaagatcaaagaacaactcaagtgaatcaagaacaagtcaagagttcaagaatcaagaaggattcaagatctcaagaatcaagatcaagattaaagactcaagattcaagaatgaagaaaagactcaatcaagataagtattaaaaagttntttcaaaactttgaatagcacatgagtttttgacaaaatctttaacaaagagtttttactctctggtaatcgattaccataatggtgtaatcggttaccagtagcaaaatgagtttgaaaaagttttcaaactgtaattacaacgttccaattattttcaaaaggctatagtcgattacaatgttttggttatcgattaccagtgtccttgaatg

SEQ ID NO: 158604 - DNA, 341 bp, Glycine max
tatctcatttcattttgctagaaacattctgtgtatatgataatttctgttctactgcatcattctgctactgttattgcttgatcttcatcacttccataacaaactagtatcataaagctaaagtgtgatcaaaggaattgaagattctagtctgaatacgaagaacaaattgtgaggagtcttgtttatagtaacttcgatgcttatttgtgatcaataacactcatgaaatcatgtcaaacataatcaagattaagaaattcaatggaaagaacagtttcaatgcgtggcacatcaagatgcgtgccttgttgaaggaacaacggtttgggctcttg

SEQ ID NO: 158605 - DNA, 399 bp, Glycine max
  unsure (1)..(399): unsure at all n locations
agcntttagttagtcaataagaattaatctcttcattgtgccatggcccagacgatcttgtttagctataattcagttaattgtatacctatgaagcatggccatggacatctctcctgtttgaagtgtcggacacatttctgacacctacacctccccaacacttgtctgacacatgtccaatacttatcattaagtgcccaattaaaaaagtatttttgtcaacttttggacacttatgctaacacttatatacaggtcaaacacttgagccaacacttctatatggatagacacaaatcaatattgttaaagaatattcattttttaatatgcagaanagtcagcttaaaatattatgaatattctatagcaatattattcctcttacattttttt

SEQ ID NO: 158606 - DNA, 392 bp, Glycine max
  unsure (1)..(392): unsure at all n locations
tgattcnaggactgacgcgttgaagatcgatgaacgatgtagaacgaatgaagaacgtcgaagaacgggcgaaacctttgcgaaattttcgccggaaaacgttacgtgaaacgtttggatgcgcctcggcttaaatattcttcacggaaacaatttttccaagcatattcgaaagagagagatattgcctaagggctgaactcttttccttctcaattcctcccctatttatagcaaaatatgggagatggttgccgcccagctcgtccatgcgagccaagttgcttcctccataaacaacagccttctggaggaatattctggaaggcccaagtgggcctggttgctatttgcattcccatttttactaaacacaccccccttgacttttt

SEQ ID NO: 158607 - DNA, 442 bp, Glycine max
  unsure (1)..(442): unsure at all n locations
agctntgagatntaagaggaacatganattctattaaggttatgggtttgcaaaggaaaaaagagaaaatgaagatgaagataaaaaaactcaccctttgtgatgattgttatctggcaatatttttattttattaatgatgttaactttagacggatgaaatgatcattttgaattaatttaaaaagataaaggattaaactgaaaaaaagaagataaaacactaaacaagtcatttggccttattattatttttaatatttattattattatgttaaagttgaaatataatattggttttcataatacaatgatttcaagtaaatttattttattgtattatttctaattnttaaaaagtatgtgtatttttaattcttgaaaaaatatgtattatttntattaaatataagactaaaaataatatctaaatttaaaata

SEQ ID NO: 158608 - DNA, 379 bp, Glycine max
tttatattatttgatagatatgatgtgtattttagcacaccaagacatatataatagttttgtattatattataaatgattgctttattaatagcaaatatttgattagaaatgatatatatggctgttatcgaaatcatatgtaattagataattatattgaagtcagatggttctactgaattttttatattctgagtgacacataagtttatgagtcttcttatatacaaagtgtatttataacgtgtggtagtgttaatatatgatttatgttatagttataatatagaatgcatatgtgtgtagggagggctcgtatgattattgttggataaactgggggaggttatgtatataatggtatggcataattatt

SEQ ID NO: 158609 - DNA, 486 bp, Glycine max
  unsure (1)..(486): unsure at all n locations
tcgtcccgggatctctgagtcacctgcggcatgcagcttacnngtaaatctaagacctagccatggttgtagtctccacagaggccattgcttccctcgcccagtattatgatcagccattgaggtgcttcacctttggggacttccagctatcacccatggtagaagaatttgaagagatcctangatgtcctctagggggaaggagaccatacctcttctcagggttctatccctcattagctagaatttctatgattgtccaaatctcgacgcaggaattagaccacagaaagcaagtcgaaaatggggtggttggaataccgagaaaatatttggaggcaaaagcaagaaacttggcaggtaaaggcaaatgggcctcattcatagacattctcgcgctgntgatcttcgcaggagtcctctntccaaatgtggatgggttggtggacctagcagcgatcgacgcttttctcgcctatcatg

SEQ ID NO: 158610 - DNA, 284 bp, Glycine max
gagtcaagcttaattgaataaatgtgaatatgtgagcacttggtttatcactatattctctccgcttttgggatatactaaaaagcctgaggggagaccaaatatgtgacatatttgaatgactaaccattcgtgataacagaggacaatgttatgaagataatatttaccgttttgtaaaattaaaggaataattcttgataggatggtcattgttgcacatagtcattctatatagccaaattaaaatgcatacctgtaggagatatgtcagtaaaacttat

SEQ ID NO: 158611 - DNA, 405 bp, Glycine max
  unsure (1)..(405): unsure at all n locations
ttggcttctgccttcattaggcagnaccagtacaatacggatatggctcccgatcggaaccagcttcagagtatgactaagcgagagcatgagtccattaaggaatatgcccaaagatggagagatctcgcagcccaagtcgtaccgcccatgacggagagggagatgatcacaattatggtagatacgttacccacgttctactatgaaaagttgataggctacatgccagctaactttgcggatctcgtcttcgccggagaaaggattgaatccggactacgaanaggcaagttcgaatatgcttccaatgtggcccccaacaacaacagaagagccccagtagtgggcgcgaggaaaaaggaaagagacgcccacgcggtcaccaccgccccgatgtggatg

SEQ ID NO: 158612 - DNA, 453 bp, Glycine max
gtgacacttacatctaagcttgatggtgcgcatcccaccacgttgcataggagagttcgcgatatgtgtctaccatcacgattatcgtctccctttccatgattgggggtaccacctgccgccagatccctccaccttttgggcgtgttctttgaatgatccgtccccctttttgcacatgttctgtagttgcatcctatccggaactatatcaaaattgtgctgatactgcctaacaaatgcaaccattatgtccttccaagaatggactcgggaaggttccaagttagtgtaccatgttacagctaccccagtaagactttcttggaaggaatgtatcagcaattcctcatcttttgcgtattcccccatcttctgacaatacatcttatatggttttgaacaagagtcccttgtcttgcatagtcaacacctgacttggaatgacatgtt

SEQ ID NO: 158613 - DNA, 268 bp, Glycine max
gtacttacatacattacatttgatatcaccccacctactcagatactaggataccatcgaatcttctcactgcctattaaaccttaacttgtaactcaacatagagaaatatgataataataactgctacacatgttgctatcttcatacctaactaaccgtgtgacctaagagtaaatactacccaaatgaagctccaaaaccaaatcatatcctgtacgcaaacctatctccaactctatcctaagaatctcacccttcttcaaca

SEQ ID NO: 158614 - DNA, 446 bp, Glycine max
  unsure (1)..(446): unsure at all n locations
gcttatgaagcatggaacctttctatgttaacttattactgtacaaaatngattaagaaattcaatatggaaaagtgaaaagaagcatcaacaccaatggaagcatccatttatcttgacttggacgaaaaaggtaaattgttagatgagccaaagtacagaggtatgattggttcactcctttatttgactacaagtccacccgatattatgcttagtgtttgcttttgtgcaaggtatcaagaaaatcccaaggaatcacatttaattgttgtcaaaaggattattaagtaccttaggggcacaaccaatgttggtttgtgatatcccaagggtatcttcttgagtctaattggcttttcaaattctgacttcgcaagatataagctagataggaaaagcacaagtgggaatgtcacttctntggaagttcacttgtatcttgg

SEQ ID NO: 158615 - DNA, 494 bp, Glycine max
aaaaaaaaactgataccttcattacgtacactatgatactcagcttcccaacatccaagcaattcacatcccatacatcatgttctatcattaccaagaaaaacagggcagaggcagaatactctgcccagcacaaaccaatatacagcttttctcacttaaataccccagtaacattctctttgttccaattcgttaaccgttggattgtcttgaaacttttactggaagtctctagcacataagtctacattgtgaccgttgggatctgttagaaaacgtccagaacccaatctgtactactctttccacaaccagcaaattcacaacattctctgcacaaagccaaaattgtgctgcacatatttgacagcaaaattctgcataaagtgcagattttcgaaatcacactttccctcatccaattgtgcccaaattgaatcctacaagtcctaaatcatgtatcaatcatgtctaaaccaaggacaagcttc

SEQ ID NO: 158616 - DNA, 204 bp, Glycine max
aataactcgaatgctctaatgaaagggaatgccagatcacgagtggaatttttggcaaatccatcttatcacggtctgaatatttctaatgagaacgcctccccacaaccatatctcattggacggagaagaacggcctctgggtacgaggatgagaagaaaaaacaatgaatttttcttacaacagacataaatgtgggtttt

SEQ ID NO: 158617 - DNA, 453 bp, Glycine max
  unsure (1)..(453): unsure at all n locations
agcttctcccncaattttctattttatgtggagaagtgaagtagaaaagggttcagccccttatgcacttctctttctttcgaatttgcttaagaaaattgtttccgtgaagaaaatccaagccgaggtgcttccgtaacgtttccgtgagtgatttcgcgaaggttttcgaccgttcttcgacgttcttcattcgttcttcatcgttcttcagtcttcaacgggtaagtaccttaaaccaagctttttaattcattctatctacccgtgatggtccacatttggnttcatgtatttttattctcgttttcatttactntttataccccctttttacgtgcttaaaccatntatttaagtcatttctcgcttaatctanaaataaaataaacttccaccgatcgtttgaatcgtatcatccgttaacttttggtgaaatgaattccgaccgat

SEQ ID NO: 158618 - DNA, 336 bp, Glycine max
actgctaatagtcagaagaaatgttcattgattttcgctcggatttacttaccgttttgacgctgttttccagcgcttcgagccatcaatggatggtcgtttctcctggatcgacgctttcatcttatggacgaccattatactgatttccatgaggaaatttggcgcctggagtgggcataactggttactcccatggccaattttgatccatatatattccttgagttttatgccaatgcttgtgcaacagaggatggcgtgcgtgacatgatatcctgtgttaagcgtcatgggatcccagttgatgccgactctatcggccaactcctatga

SEQ ID NO: 158619 - DNA, 415 bp, Glycine max
  unsure (1)..(415): unsure at all n locations
agcttagttgtaccatgtgtagttaacttgagatcagagggcagaggagtgaatattggtttggcatcaaccatcttagccttttcaagcaaatcataaatatatttagcttgagataacaatagagaaccattactcaaatgttttacttcaatacccagaaaataatccaagtttcctagctgtttaagagcaaaaacaacatgtagtttggtaattaagtttcaaataagaactggagatgaccctgtgatgataatatcatcaatacatatcaacagataaagacacttagaatcagtgttgaacactagaagggatggatcacactntctttgaacaaagccaaaagtcagtagtgttttggttaatctttcatactaggccctaggtgcttgttttaacccatagatag

SEQ ID NO: 158620 - DNA, 462 bp, Glycine max
acacttaaaactaagcttaaatattagaatgcgaatatgtataaacattatttaccacctttttcaaataacaaatatatgaatagtgactgaacttgtataattcaacacataacggatcaatgctcgtatcaatacacatattatcatacacaatcacaatataaacgctaaattgattttttttcctactttgtatacgtagtagtgctcaagaaacactagtagagcatttctttttctaaacatattggaaataacctaagttctaggtagaagctaaaacaggtataacttatatctcaaaaattaattatgattagccatttgcctaacatcaaggtaaaagcatatcggaacttaatgacttaattttcaatttgtacgagttatcaacatctagagtttccagaatcaataattaaaatgaatcgagacgaaaatttaaataaaataaatata

SEQ ID NO: 158621 - DNA, 448 bp, Glycine max
agcttacatcactgacggtgcagtccattatgttgccaacgaagaaggttgtgcatagggaggaaacttcccgttgtgtttgtttattctaaaaggaagcaagactttttttttttttttctgtccgccctctgttcatcatgttgtcttagaccaatttatttattgtgtgttttgttatagtaagcttaattgaataacaatttaaggtgtgaaaagtgttggatttgaaattaaaacttcagctatgaacaaaagcaaagacaaaattcctattttttatactttaattgattccgacagattttagttgccaaaaattataatttgatatttcaaatgaatattggcagcattataaacttccacaaatcgtatttttttttttaaattaattgatacatcttcacttagatgaaagattctaagaacaaggacctaaaataaa

SEQ ID NO: 158622 - DNA, 458 bp, Glycine max
tgacaagaacaaagacgtgatagacacgtattataatagtttcacaattatgttgatttaaaaattctctcctaatgatgattaaaaaaaacaaagagcaatctcatcattggttcaataatgaagtgcttccagatattgctccacatactaaacaatttccttcctttcttgttcaaggttgaaccaatgcaagtaccacaaacttatgcttcattttgaaatatatcaccatctaagtaattttgtgatctctcccttctttttaattattgatgttaaaaggaggagtgtgagtatgaaaaacccaccaccactagtggagtataccatcttaccaccacccaaccttaacccataccccaccacaccatgaacctatcaacatgcaacctagacttgatacctattcaatcctttgtcttctccttgtgtggatatctcattcgtacacatcc

SEQ ID NO: 158623 - DNA, 419 bp, Glycine max
  unsure (1)..(419): unsure at all n locations
tctctgacagnacccataaggagtttcatcgaacttgcggactcctcccatgtccagaccgactacttctttccacacagtagcatcaatgaccatatctacttcattgacagtaaagaagatgttaccttcaaggtcaacacgtgcacaagtgtagaaaaccttgactagctctggataaaaagttcatttcacctacaccagctttgacagtctttgtgcttccagcagaataggaaagttgaacccttgttgagagaaccattccaagtccaaatacttggggatcctcatgttttttacagcatatatcatcttgtagtcattcttcttgctntcatttgcgaaccatgtgtctaaatggttagtanctgcatgtgagcattcaccttgctctctctaggaagattttgctttct

SEQ ID NO: 158624 - DNA, 446 bp, Glycine max
tcataaaatgaagaactggactagactatggctcttatataacaacacttattgtaggtgaaatgcttgaaccaatgaaattgcaatgcccaacacctatcttcttaatctcagcactttgagtgaccattaatatgactatttggcatcttgtacatcccttgaggagatctccacaagctcagccatctcttaaatggcttcttgcacttttccaaaactaactataaaaggataaagtagagttttgccaaaaatggtaaaaattgttcttgctaaaattggtaaatattatactaatcttctagattagtgtgctaacctcccttgggatatgtgcacttagagtgaaccttgcacaaagtccactcacacagagacaaataacactgtgactcaatgcacagtacaatatcttgcacagatggaaatctagctcataatat

SEQ ID NO: 158625 - DNA, 390 bp, Glycine max
agcttgcttgtggagcttctatggaggctggatctttgagcttcaatgaggtcttttaatggtgattttccaccatgtagatgcatcgaaagacatatgagataaggtgagaggaggcgccatccactatggaataagccatggaagaaggagcttcaccaccaagatgagccttggataagaagcttagagaggatgcttcaatggaggaaaagaaagagggagagaaagagagaggggggagcacgaaattgaaggaagaaaaagggagagaagttgaactttgagttgtgtctcacaagactctcattcatcaaagttacaacaagtgttacacatacttctatttatagactaggtagcttccttgagaagctttcttgagaaaac

SEQ ID NO: 158626 - DNA, 359 bp, Glycine max
  unsure (1)..(359): unsure at all n locations
gtgttgaacacagaggaatcgcgagtatttgctattatggtcaaagnttctagaatagttggcaaagttacaattcatcccatcttctttcgcgcgcccgataacttcagacttggtttttaatatcgcttgtggcacatttatggttcattatgtttgttgatatctcgagaaatcacagactaatatgatcgattggtcccaatttcaattgagttgcgattgtggacagttaaataaccttgatgttgtagctaaatcatggtagcgaaccattttttaaaaccttggatgggatatgatgtatgcaccattggagactgtaggcctatgatcttctttataatggattcctttgc

SEQ ID NO: 158627 - DNA, 448 bp, Glycine max
  unsure (1)..(448): unsure at all n locations
agcttgcatgaatagagtaaggacttcctcttacttacnttgttttgcatccatgcttggcctagaaagtttctggaagtttccaattgctttgtgttaatgatctcattcaatttgtaagacagactgttgtctgatacaatttcatcgtgatgaatttggactctcgctatagcaagaactattgaggaaatctcactgtggtgactagagtatttctccagaacaaaaatcttttacagtataaggatgagtgcttctttgaccaaattaagaattataagcccattgtcctctttgagcatgataatactaaatatcttgattgtagagagtttcaagttgttgagttagaacctgatgttgaagcaaaaggttcttaagagaattgtacattatagtctctctttgatacattaactctctttcttattgaaactcataatca

SEQ ID NO: 158628 - DNA, 342 bp, Glycine max
  unsure (1)..(342): unsure at all n locations
gcttatcgcataaacactctttgagtgataataatacatcttctatcaaacatctattgtatgtgaaagccatgaatgantcgccgacaaacaatacatgggtcttaatctcatgggaagattaagggtagtactagaagtgacctaaagagtacttgtagccaaaagtaatatataaaatacttggttgtaatcaaagttttgattaatagaaccctataagtttaaagtagaactggacgtagtccaagagttggggtgaaccaatataaaacctttgtattttctttactgcttctatataactaactcctgtctatagtatacttctacactattgtg

SEQ ID NO: 158629 - DNA, 412 bp, Glycine max
agcttataatatatcgatacgctcgaattttaacatcgaaaactctcgggaaattcaaatagtcataactattcacacggatgtccgattcgggcgcataatatgtcgagaggatcgaaattgaacaacggaagctcttgagaaattcaactggtataacttttcacaccgatgttcgattcaggcaaatcacatatcgagacgctcaaaattgaacaacggaagctcttgagaaattcaaatggtcataacatttaactcgaatgtgcaatttaggcgcatcacatatagtgacactcgaaattgaacaacggaagctctcgtgaaaatcaaatggtcataacttttcacactgaggtccgattcatgtttataatgtatcgatacactcgaaattaaacatcggaaactc

SEQ ID NO: 158630 - DNA, 348 bp, Glycine max
tgagagctcgcgtagttatttactagcgctcgacatatgatgcgcccgtatcggacatccgtgtgatatgtttgaccatccgaatggcccgagagcttccggcgtttattgccgagcgcctccttatattattacgcccgattggacatccgtgtgaaaagctatgaccatatgattcttacagagagctctcgtggctcaatatcaagcgtcccgatatatgatgcgcctgaatcggtcatccgtgtgagaaggtatgaccatttgattatctacacgagctccgatggtgaatttggacggtcatgacatacatgtgcctggataggacatacgcgtgaatagcca

SEQ ID NO: 158631 - DNA, 345 bp, Glycine max
  unsure (1)..(345): unsure at all n locations
tttttagaaaaataggcatcaaaaagcataaaacagtccctcacactccacagcagaatggtttggcagaaagaatgaataggaccattttggaaagagtgaggtgtatgcttctaagtgcaggactgccaaagaccttttggggagaagctgcaaatacaacaacatatttgattaatagatgtccatcatcagccttagatttcaagacaccaatggaagcttggagtggtgaaccacctgattattcanaattaaagggtgttggatcgctggcctttgctcatgttaaacaaagaaagctggatgcaagggctgtanagtgtgttntcattggctatcctg

SEQ ID NO: 158632 - DNA, 299 bp, Glycine max
aatattttgggggatgaaaagttataaatttatattttaggagagggaagaggtcatttttttaaagtattttatatatattatgtgttgatataaatggatagaatggaagatatgttggaaggattggtaagataattagtgtaaaataataataagatgattggtatgataaaatgatatagtaatagtttatataataagagattatgataagttgatatgatagtaagaataagatatgtgattttgttaaaatatgatatatgtatattattaatgaatgaaaagtttagtgg

SEQ ID NO: 158633 - DNA, 351 bp, Glycine max
gctcccgaatatgacagccaccgttttatgagcactgagcaccagcagcgcttcgaggccatcaagggatggtcatttctccgggagcgacgagtccagctcagggacgacgagtataccgacttccaggaggagatagttcgtcggcagtgggcatcactggttacccccatggccaagttcgacccagacatagtcctcgagttttatgccaatgcttggcctacagtggagggtgtacgagatatgcgatcctgggtgaggggtcagtggatcccattcgatgcggatgctctcagccagttcctgggatatcctttagtgctggaggagggccaggagtgcgagtat

SEQ ID NO: 158634 - DNA, 379 bp, Glycine max
actttttcctagtttaccatggatatttaccatgtaaataatgtgttttttggcgcgcacactcttgtttatatatgggtttatgatcacaacatggttggctcatggtgcctaacacatgcaggtaaaaatgtagtgagaagtttcacgctgaacacttttttgttttcgttttgtagatgaaaacgcaaggatgatcaaacatgaaaacagatgtggtgcaattttgcatatcataaatgttgtgaacgcatatgcatgatgatgccatgactcatgcaaaatgtgaggctgttatatgtcatcagacaaatgcaagaatgataggtgtattatgatgcaagaatagatgtttatgcgatgcatgatatgaatgcat

SEQ ID NO: 158635 - DNA, 357 bp, Glycine max
  unsure (1)..(357): unsure at all n locations
agtatttattacctatacataacagaaaatacttattacactacaaaataaccataaattggaagaagttgatacaatttacaccaagtttatacacaaaagttagtcgtattaaccgactaacaactcccccaaatntacaantttgcttgtcctcaaggaaaaagagaacaactcacttgccctcaagtgacaataacatgcagtgactatgtacaaaggtgtatgcaacaaaagttactgattgcatgataagagaaagaagcattatgtactcatcacttgtctttcacaaaatatgcagctattcaagtgaagaataaaatgtaagctggtctattagatgaagttaatcat

SEQ ID NO: 158636 - DNA, 217 bp, Glycine max
ttttatatgatagttaactaacattaatcttatatagaagcaccagctcttagctatgaatatttgtgttgatttttgtgttgtagaaaacacactttttgataaaagatacattatagtacaattgtcacataattcgacttatgagtatgcagattagtgtgttagccctttaacaatataacatattaattggaggatagggtacaattattat

SEQ ID NO: 158637 - DNA, 404 bp, Glycine max
  unsure (1)..(404): unsure at all n locations
aaaatggttaatttattaaaaatgggtttattaatggttaagggtaagtttgaggattttaagctacaataaaatacagttgaatttggaaaattctatttggtttggttttgaggcttgttttaattggtttggttggaattgatacaatattccatgtggcgccttttctatgtttttttcttctccaaatattggttcatctttacttgaagttgcagggattaagtccctcattctatttgtagnggagtccttttcatctttaatataatgttatttccctaagctttgagtgaacccattgccttctattttactgcacatctttgatatttgagcattntcatatgttgtacattcttntcactgtggtacttcatttnccatgcatgaataacatg

SEQ ID NO: 158638 - DNA, 387 bp, Glycine max
  unsure (1)..(387): unsure at all n locations
agcttgaacatcatttggtgatttgattctcttgtctcttaacaccactcgacaccaatcataaacaaagggagctatgtttgcaccagaaacactattaaataatgctgggaactggactgctaataatatagtagaaaaatttgctatactgcaaattttgttaaattcttgaaatcgtctaagtatatcaaatagcatgtaaagtttgagacaagaagacacagaattggggaatataggggaggtacattattttgttctaattgaattgctttttggttacaacatacatgtaacttatgaatgacaactctggtgattntaagtttgaagtagtcatagtnttttgcagtaaaagttgtaaccatgcaacatgatgatgaa

SEQ ID NO: 158639 - DNA, 431 bp, Glycine max
  unsure (1)..(431): unsure at all n locations
actacttaacaaatncggagaggtacgagatgttcaaagatctgtangactngacccattgnatcttacatatgggattaccttgcatatttaacacctctgggtattaaatcttgttttattgaataccttctggtatattgagttggattatgtttcaattatctatttgttgcatagttgctgcttttattatattcaattctctttcttggaagttctgtctgtaataagtaaatttgcatgtatgttgagttattgcattaacaaatttatgttcttttgaagtgacattttcaatgatttctttccctttttttgagatgttgtagatacacatttgttgtttttgtcacatatacaaagaaagttgtatctcctcccattacaaatattcaagtgtttgttaacattctttttataaaattaat

SEQ ID NO: 158640 - DNA, 416 bp, Glycine max
  unsure (1)..(416): unsure at all n locations
tgggtgataagcgcttgagactcgtggcttatcacatgaacaaatatgcgcttagcgcgaggcttgcacttagcgaaaggactgtttttcagaaaacgttttctaagttgtttttcagtcctttttccaagaaattgaaacccttatgtctaacattcaaggctaagctgatatactccattgcacaaattataaagcaagttcccaatgatctaatgcatgaaaacaaaaattgctgaaattaaaaactgggttgcctcccangaagcgcttctttaacgtcattagcttcatgcttttacctcattgggtgaatcttatgtttggttcttactttcagaacctcttgacctccttccatttacctgtagcagacattgtgttctggacaggcttgtcttcaacaaaaaaataaa

SEQ ID NO: 158641 - DNA, 248 bp, Glycine max
  unsure (1)..(248): unsure at all n locations
atattatattgtnnnaaggggaggaaggatttagagtttatttattatttaatgagagtttatggtaaataagacgaatgctttttttcgacgacgcagcgagggggaaagaattggttttaattaaatgtatttgtttgtataggataatgttattatgtaaaaaaaattaaataatgtcctataattgtttatgggtgagagttttgaacatttatgaacataagaaaatataaataggattgatt

SEQ ID NO: 158642 - DNA, 452 bp, Glycine max
  unsure (1)..(452): unsure at all n locations
agcttatcccatgcttctctggccgtcgttgcgttggatatcttctcaaatgtatcttcatccaccgattgataaatgagaaagagagctttcttgtctctctttcttgactccttcaacgtctcctttacaccttggcttagggaggcttcatcttgctcctcgaagccattctctacgatatcccacacatcttgagctcctagtagcgccttcatcttgatactccaattatcatagttgttctttgtgagcatcggcatttggaaaggaaaacctccattcgccatcttttgaggatcttgaagctctgataccactntgttggaaataagggcttttatgtttaggaatattggagactttgaatagaaacttgataggaaggagaattctttatggaggagagaactntgtatctntgcttgatacaaatgtgtaagattacatct

SEQ ID NO: 158643 - DNA, 422 bp, Glycine max
  unsure (1)..(422): unsure at all n locations
ngtagagttatgctgctatcggttgaatcgattactttcttctcgtaatcgattacacaggtgtttctaagacaatgactgatttattctcagcctctactttaattggttaccatgtgatataatcgattatttctccttctttgagtagttcagaagtgaaaagaacactgtaattgattacttcgagtatctaatcgattacattgttcttgagttgttttcaggtgtttggaataacactttttcaattaaaaagatagtctaattgattacttcattgaattaatcgattaccttgtagatttaatcgattacaggcgagtggaactgatttctctataaataactaactggtgttctcttcaaaacaatctcaaatataacacaattagcctctaaatgagctaagatcaagtatt

SEQ ID NO: 158644 - DNA, 450 bp, Glycine max
  unsure (1)..(450): unsure at all n locations
agctngncgataaatagggtatatcgatctcttatgatctggctagcagngagggtttggattagtttgcataaagttctaagttcaaacttaattacagtctttagtgggaagctttgagcatgcttataaaaattaatagaaggcaaatatgtctaagaccaatggttggttctctatgctcaagatgctgaaatatggattttcccgcttttacatttatttgttctttattatctttaaaaaaatcctgtaaatattcatcatcatcagtttgttgtcttgtagtattgtgacagtattagttctgtggagagataattgcgtttgatttgagtgcagttccttttgactatttgcaacatgcattcaggtggtgcacaatataaactntcatattctgttttctcattgactcttaactataaagatttgattntagttatagga

SEQ ID NO: 158645 - DNA, 206 bp, Glycine max
gtaacattttaatatttgtattgtattgaatttaattgaaagtaatggttgaaaattggttaaatatgaaatttaatttgtggattttatttagaaaaatatgatgaaatatatctttataaatgcattaaatgtgtgttataagtgtacgatagttgataaaataagtggatttaatactggagaatgatgaattatggattaaa

SEQ ID NO: 158646 - DNA, 356 bp, Glycine max
agcttgagatgaggaagtgtcgaagggtgtttcttcctgcttttattgttgaccacagagtggtacctggagatatgtcgcgggggtcaagagaccttggggacgtcaggtggggtgctattgcccaaaaccaaacttgaccaatcccgacccaacccgggcatagtcggtcagtgagaacctgtgatgtacctaagcaggcgagctcctggcagtcaacagataaaaggaacaaagaccacaaagcaaggaggcttgtggtagttggccagctgtgaaacttgactgatatgtgagatatggtctctggtaatcgattaccaagggtgggtaatcgattacaaggcttaaaaatg

SEQ ID NO: 158647 - DNA, 449 bp, Glycine max
  unsure (1)..(449): unsure at all n locations
agcttgtttagtaccacagctctgtnaattttgctgncttccatggattccacagcgccaatggcactgctggaacatcaccacacaatggattcgaacacctcaccacggtgccccgacagaatcaccgttccccagagagctcgcgtcactccccaaacgatgccgcanagcttccacttacccaagatcgcgccattcccaaacgacgacattttgtccatagcacaaacactagaaaccccgccaacgcctctccccaaaccagaaaacaaaaatctaaaagttttccttcaaatccgacccctcctttcgtcgcccgttcaagctcctcgcaagagacctaagagtgcgtggcctcagaaccccgtcaaaaacaacgcgccgccaggtgctataaattccaagaacaagaaccccaccacgtgcttgacggttaacgactcaca

SEQ ID NO: 158648 - DNA, 263 bp, Glycine max
taaaataattatgaattattgggggttataaattataaaaattttatgtttaattggaatttgtgttagatataactaaaaagtgtgaagttagataagtataaaaatataatattatgtattttaatctatgtgataaattgatttgaagatattgaatatgtatgtatattgttggaaactattaagttatttttggaaaataggttgaagtatatactgtgggtatgaatttaatgagatagacttttgtttatatattg

SEQ ID NO: 158649 - DNA, 423 bp, Glycine max
  unsure (1)..(423): unsure at all n locations
agctntagcaatcaaaataataccattattcttattatatgagaaatggatatcctacctgtttttccttaaaagaaatggtttctagctgccctgagaagtagaatcttgaatcatgtgtgccatatgttccaagcacaaaatgaagaggtaaggggataggggatccctttgcctcaatcgtctagttggggaaataggattagtttttgaaccattccaattaatagcaaactccgaggtacttaagcaatagcgaatgacattgaccatccaagctaggaaacccgccaaaaatagagtatcgacaatgaagtcccactccaatctattgtaagctttctgaagatcaagatttaacaacatatgaccaaaattaggattggaattattcatagagtggattggttcttgcaaaatgat

SEQ ID NO: 158650 - DNA, 422 bp, Glycine max
  unsure (1)..(422): unsure at all n locations
tgctcatcttgagctantatgttgtcatcctgatttttatttggtggtgcaacatatttttttggcctaatatgtactccacactctctacagcttctgatgttatgattggtttggccacaccttccacatgttaatgtatacagtttcctctttgccctatgtcctatgacattgtcttcatctacatctatccttttattttttttaagcctttatctctgaacctttttatgtggtggaaaaggttgtgcatactgtgtatgggcacaatattgtgtgtcttggactggctgaattaaaggtgatatgtcttatataagcctctatggaaggcagcatacacaagtctcaagcttgctctttgtgattattgctaaatggattgtggatggcatcctcataaagtgtaaataacaaca

SEQ ID NO: 158651 - DNA, 385 bp, Glycine max
tgctccaaaggtgttggatgacttctcagctaactacttggccacttgacccacctggatttcaaggtttttcagggctgattcagtactcttatggttggacatggccacttgcataaactgggctattgtctcctccagtttggtggtcctctgaaaaatatttggcccttgttgaggtggcctgttggaaggtccaccctggtccttattgagttgattgccaaggtgtgatcttcattgcccttgctgattatagggaccttgatggaaccccgaaaatcctccttggtgtatccttgtctctgttgatttcccatgtaatgaacttcctgagtgtgctcttcaatgggaatgcaatgacatgattcatgagcctcaccct

SEQ ID NO: 158652 - DNA, 394 bp, Glycine max
atgacttattccctaatagatggcgcctcctctcacctatgttcctttgtctttcgttgcgcaccatggcggaaaatcaccattatatgaccccattgtatctcaaagatccatcctccatataaacctcacaagcaagtttctatcatctttcatcctctcacaaacacatatttgcttatttgtgcttcaccggaatgtgggttgcaaccattggtctgtttgctcaatatacctgcgctcctgaatttggactttcaacaccgttcaatcataaattactcgtcttgcacgttggtgggggtgccatataacaactagttaagttcaaaacaaatatgtttcaaaataaaataaaagagttcataatgaaaaagcacaataagcatttgat

SEQ ID NO: 158653 - DNA, 439 bp, Glycine max
  unsure (1)..(439): unsure at all n locations
ttatagtgcttggtgaattatatgtgcanaaaaataaaagtaagctcaaggaagaaaatngaagatctgcttagtgtgtctcaggcgcttaacacgatgcacaggctcagtggacaaagcacgcttagcgctaggaagtatggagaagtttggaacatgaaggcgagcttagcgcgagacacacactggacgcgagaataccgccatactcgctaagcaaggcaagcacgcttagcgcgaaggttgcgtgaaaactaggttgatctgcacctataaaagaaggagagagaagaaggaaaaaaacacagagaaaattcaagagaattcaattccttacagaaggcaaaggctataagttggagaagcaaccattaggagtcattccttccatccattccctttctcaaattccncttttataaatattatcctcttacaa

SEQ ID NO: 158654 - DNA, 402 bp, Glycine max
agaatacttgtttaaaatacaaattgacaacgtcttttaaaccgtcgagacattaaagatgtcttgcttgaatacatgcaaatgaaagaaagatttatttcttttgagttatgtgctatgcttggtcataacacttagtatgtatttgtaaggacttctcttatgatcgtgtttaacttgatatattattaacatctgacgtgaaaagattgttatttcattcatcgaaggaagtggactatatgggccaacaccaagaggatgctcatcattagatagtaatttctatgcaacttgacatatgttgcttaatttcttttgatatatactctttgtgtgtgaatatattggtgcatactttcaatggtttgacttactagatttacctactctaacacatta

SEQ ID NO: 158655 - DNA, 415 bp, Glycine max
  unsure (1)..(415): unsure at all n locations
ttatgttgtttcttctagcctgacggtttacatatatgnttttgtataataggtggataatgtgggggaataagattctctctcangagtagtattattttatcgtatcgatgtttgtggatttctcttttgttccatccctaactgcctttttataatggagaataattatttcatacagaaacaggaaagggggagggataaattttaattaataggtaacgtgatagaaaaaaaagagacagaaataaaacaaaatgaggagggtgtgaagaggatgcaaaaaatntatgtgagcaaaagccagaactcttctacaatgtgtcatgtccttaatggttggttaggaaaaaattagtctcgacagactacacatacctgacacctgtaagaaattcccattgatgttacagtt

SEQ ID NO: 158656 - DNA, 257 bp, Glycine max
tattggtttttaccagtttaaaatcaaattgacttccatgatctgtatatataaaaatatactgccataatattttagatgaaatatacgttgtaattgtggtttattataatgtattgttatgtttatattgtagctgacttgtgatatctaaatttaatatgtattgtatagaaagcaacatgatagtgtggtaatgtatttaaaatagacagtaattagccttttattggtaatagaaataataaactactgac

SEQ ID NO: 158657 - DNA, 421 bp, Glycine max
  unsure (1)..(421): unsure at all n locations
ctttcaaggcagttgaaatatgctttttttttgaattaacttagctaagacctcttagctttcttacccatggagatatgttgctttgagaaaccatttgcacaaactgtatctttcaagtgactttggatagggtaagcactaatctcatccaaaaaagccacaggtactccctcctcatgttcaaataggtgtctcctccatttcaaatcccatctccaaatattctggtagaagctacccatggttgaaataagatcgttctgctgcttactaatggtgaagagctaagggtatttgtgatccagactgcagccctctcccagccaattgtctttccaaaatcgaattttatccccacaacctgccttccacaccagattntgatgaataatcttgaagtcattgtgctgatatatct

SEQ ID NO: 158658 - DNA, 402 bp, Glycine max
tctttaatggatatggttaccacttctggaatttcgcaccgcaaatctttatcgaggcaatatatctaaatatctgggaagccattgatatatggccttatatacccaccacagtagaaagagtttcaatagatggtagttcatcaagtgaaagcataaccatttataaacctatatatagatggtctgaagaggatagaatacgatttctatacatcctgtatgccataaacataataacatctgccctatgaatggatgaatatttcagagtttcaaattgcaagagtgataatgaaatgtgggacactcttcgattaacacatgaatgaactacagatgttaagaaatctatgattaatgcactaactcatgagtatgaattatgtataatgaatacaa

SEQ ID NO: 158659 - DNA, 458 bp, Glycine max
  unsure (1)..(458): unsure at all n locations
cacctgcggcatgcaagcttcgccgagtgtccacattgagaaacctntattcatacctttcaaagttagtgataaggctaaacgaaaaattagggaacttagaaaaactaaatccttaattgaaggcgtaggtgacaatcatagcgaattactaaacaagattagtagtttgcttaaggtcattccagatactccccaagcttcggaaaatacttccaaaatggtaacaagaagtacctccaaattaattaatgttattaatgaagatagtgaccaaaacttagataacacaactgagataggatcagtgtcagaaaagaatataaatccattaaactccaaacactggaaaacccccttcaaattatattatcaacgtccaactgcccctgaccttctattataagaaagaggtgaaaacaattttataaagtttagtgcaaataacatctatgaat

SEQ ID NO: 158660 - DNA, 386 bp, Glycine max
  unsure (1)..(386): unsure at all n locations
agccancaaggatgacagcgtttattttatatcaaccnattaccacatcatggtaaatctggttgatcatgtcgattctcatgagaatggcgattggaactcactatggcagttggatgttcctcaaaaaatgaaactattactttggagagttgcacgaagttgtctcccaacaagaatgcgtctgtcatctaagggagttgtttgcccaatacttgttccttttgtgaaaacccttgtgaaatggatcgacacacatccattgcatttgtaattatttgcacttctggtgccttaatgaaactcattgctgattaaatacagccttaatgattttgatttccctcctagtatcatgcactccgttattaccattgaaacgagac

SEQ ID NO: 158661 - DNA, 456 bp, Glycine max
  unsure (1)..(456): unsure at all n locations
agcttggagaggatgcttcaatggaggataagaaagagggagagaaagagagaggggggagcatgaaattgaaggaagaaaaaggaagagaagttgaactttgagttatgcctcacaagactctcattcatcaaagttacaacaagtgttacacatgcttttatttataaactaggtagcttccttgagaagctttcttgagaaaacttccttgagaaacttctttgagaaaacttccttgagaagctagatcttagctacacatacccctctcataactaagctcacctccttgagaatcttccttaagaagattcctaaagaagctagagcttagctacacatacctctctaatagctaaggtcacctccttgagatgagaagttagagcttagctacacacaccctataatagctaagctcacccccattccanaaatacatgaaaatacaaa

SEQ ID NO: 158662 - DNA, 457 bp, Glycine max
  unsure (1)..(457): unsure at all n locations
taagctccttcactgcacaatgctcttaatattngaattctatccttgnggaaccttcactcgacgaagacactgacaaaaacttatctttccttcttggacaaagtatggcaagctgggggcaagtaaattttcttcccatcaaaccttggatgcaactgtgatcgtatacccatatcagctagatcttgacgggtattcaagccatcctttgtcttgccttgaatgttaaggagcgtcccaatcacactgtcacaaacatttttctccacatgcataacatcaatacaatgtctaacgtcaagatcacaccagtacggaagatcaaagaaaatggacctcttcttccatatgcaactctgacttttatccttcttttgggtcttcccaaatacagtattcatgtgttgaacccgctgatatacctgctcaccagtcaatggtatcagtgcaatat

SEQ ID NO: 158663 - DNA, 428 bp, Glycine max
  unsure (1)..(428): unsure at all n locations
agctntgcaactatctctgcactctcctgttcatggatttggtcatgaggatcagtccaaagcttgctgataaactgcatcttcctctgcttcccatcaagagggacatcccatttcatatacaacgcctccctctcctccagcgacaaacgtgatgtcagtctcttggctagaaattccctttctcgtttcaaagctctaatgctgcatattataaaatgtatattcaatgaaaaattctcattcataatgatgcataataactctactacacatctatctatattactacacagtgcaagatatattatactcgatgaaattttcggatcctttaagggacttttatatgagagagtgaaccttgaagacaatgagatagtaggttcttctccaacatgaggagctgggcttgcattcccaagtct

SEQ ID NO: 158664 - DNA, 450 bp, Glycine max
  unsure (1)..(450): unsure at all n locations
ntattactacagtatgttatttaagatatataaactttttttacttgcttgtctcataatattggtcgttctatgtctttntaaacaattcgaaaactaataaataaatgaaagaagagaatgcaaattttataatattaatattatttttattaattcatttttataattgttttatccatcattaattttatgagatttaattggaaaaaaaataatgttacaattgaaaaattaaaataataattattttaagacttaatttttcttcttcagtaattattttgacatcaagaagagagtattatattttttattttatgtatacatttagtttcttgaaattaataacctactccatctcgctcaaaaaaaattaaccatttatatgacattgaaacgcagtgtgttagttttttacattctcagtcataggttaaatttgactgg

SEQ ID NO: 158665 - DNA, 449 bp, Glycine max
  unsure (1)..(449): unsure at all n locations
gcttcttgttaattggtactattactattattatntttcaattntaataagtatatctggtattattaattattgatattattattattggtattaccaatgttcatagactatggtttttcattgagaatgtcaaatctgtttccttggggaatttgtgatttatttcttttgtaatattgtacactgngctgggcattaatttttgactaatgtactacacgcctgtggttaagtgatagttaagacttgaggaaacattatgagaatccagaaatcattagtatttttttaaatgatttgttgttgtaggtcatttgcttaattgatgtaagtacctgacttctacctagtagaataagttttttttttttttttaattattggctgtgctaattattataattaattatttattaattacttataagngcttctgctgactggcg

SEQ ID NO: 158666 - DNA, 226 bp, Glycine max
aatggttttaagccacacgttactattggtttataaaaaattatattatgacggattgattgtaatacattcaaaggtaaaaaagaaggcatgtgaataaatatatttttatggggcatgcctgacaaaatagatacggtgaaataaatgctctacatatatactcatcttgtacttactgactcggagaaataagcgctttagagacatactgaacttttgactt

SEQ ID NO: 158667 - DNA, 387 bp, Glycine max
agcttgtcatcacaagccactagcgattcttctgctagaaacaacatgcatgcgttcgttcattcaggatagcctctcatattatataatacgttgcatgacttgcataacacgatgctatttccagcacattgaatgtacacgtctgatcttgtacaacgcgtctggctgtggaaacaccgtctgagcacctttatgatatcttccgttaccctacacgaccctacatttggctgatatgaactgcatgcgcacatctgaatccctaggataacattgcatatggagatgccccttgctctcgtgttacacgaatgccaatagctaatcctggaacccataagacgccttatcaccaacatgcatcgcagtgtccacgtcttgata

SEQ ID NO: 158668 - DNA, 344 bp, Glycine max
agcttgcatacgttgcatacaggtgtcataactttcttgttgcagcgacatgcgtgggcggtcccatgttatcgatcacaagaaagacatacttgtttctatgcattgcgacacacatatcttacttgtttcaaatgcctacgggtgcatcgcttgcctatacatataaacgtcgttctttcttggagtaccgattataaaaaaactgctatgattctatttacttagaatgactcgttaacaagctctattatataatatttgtatcacacaccacatgatctcatgtcttcgtgaatcgtaccgtagaggagtgcttacgaatctagatctattctactctc

SEQ ID NO: 158669 - DNA, 330 bp, Glycine max
  unsure (1)..(330): unsure at all n locations
agaggttaacactactggaaacccgaatgcaatttttattgaggcaatagacttaaatatttgggaagccatagaaatacggccttatatacccaccacagtagaaagaaccacaatagatggaagcacaacaagtggaagcacaacaatagaaaaacctagagatagatggtgatgcaagctccattggagcttgtaggcctangatcttcttcatcaatggattcctttgcttcttggaaaatgaatggcagcggaatggagaaggaagagagagagaggagatgccacttcaaggagaagatgagtctagaagaagctcaccaccat

SEQ ID NO: 158670 - DNA, 351 bp, Glycine max
  unsure (1)..(351): unsure at all n locations
ccgttggatctttttttttcgggcgctgcagcttcacaagacacttgtacacgatctgaccgttgggatcttntataagatgtctggagtgtgcacaaagcttccgttcccgagagcatttatcactggagcgtgtcaagctttgctttatgttacttatgaaaaacgtcattcttcttctttcttcttacaaagccatttttaagtgcaaggactttttcattacattaacaccattagcaccaataccgcattgtcttctttgatcccacaccgagagaaccttcaccaaagcatatttccacttccttgattttattataacgaaactatttgactatccctcatatc

SEQ ID NO: 158671 - DNA, 412 bp, Glycine max
  unsure (1)..(412): unsure at all n locations
tagagaacaaaccaagtttgttgcacgattatcaaaagagagagtggagaagctttcaattactgacatggagtctggtaatggcaggcctccactccccgaggagagagatntccaaatggagccattgttgtctaaagatcattgaagtctactttgtatcataaggtaaaaagtgtatttagccattctttcagaaaaaataaaatgaataggttaaagttaaatcgggtgtaatcaagccaacgttaaaaaatagcttgtgtaatatttgattggccagttgttgtaaaattaaatgaatttttaagaatggttttattatgtaaatctcctgtcagctgtgtatccctaatacgaaaatcttgttaagttttaagttcatttcagagcttgttacgggatttgattg

SEQ ID NO: 158672 - DNA, 233 bp, Glycine max
aattaacttttcgcccaagcaagctagacatgaatacttcttcacatttatactataataaggcaaaggggggtgttcaaatgggtactgattccactggttatatgtgtcaattgttttgggtgaaaaaaattgtttccgggaagataatccatgccgaggtgctttctttacgctgtcgagaggtttacgtatcaaatacgtgaagtgttaatacattattcgaagttctt

SEQ ID NO: 158673 - DNA, 462 bp, Glycine max
  unsure (1)..(462): unsure at all n locations
gcacctgagctgcagcttacaaagttgttggcgtgaacagctctcttgtgtggtacaagaagtttaatgagtttatgagcaactcatgattcaaaagatgtgacatggaccattgatgctatgttaaaaaatatactaatagttatgttatccttggtgtgtatgttgatgacatgttgattgcaggatccagtatggcagaaattaacaggttgaagcagcagttggcagaaaactttgaaatgaaggatcttggtccagctaaacaaatccttggtatgagaattcttagaaacagatcataaggaattttgaagctgtttcaggagaaatatatacacaagttgcttgacaggttttaccttggagactctaagaccaggaatacccctgtgggatctcatttgaagttttcanagaagcaatctttgcagacagatgaagaataatgttacatgtcaa

SEQ ID NO: 158674 - DNA, 414 bp, Glycine max
  unsure (1)..(414): unsure at all n locations
tgattatggcggtcttatcataagaggggtctttatgctttcttccaatatcgagaatccattttggtaggacaatgtttttcctaatgatatgatcgaggcttcacaccagtaatgtggacttatcatttactaaaagtattaggattccagacaaggagaaattaccaccatatacatcttgtgtaacacccaattnttgcgtaatataaattaaaaaagattctatttaaaaataaatagagttttaggaaaataatgagattttcgtaattaaataaataagaaaaaataattttattaattaaaataatgactttaagggtagtaaaataattatatgttcttataatataaaatgaatatttaatttattcatttgattgcgagtaaaatatagtttattcttataaa

SEQ ID NO: 158675 - DNA, 429 bp, Glycine max
  unsure (1)..(429): unsure at all n locations
gtcacctgcagctgcagcttgtngggtaaagtctcacgattgtcacgtgtttatgcaacaattggtagccggggctatacgagacatcttgcccaacaaagtcaggttagccataactcgcttgtgttttttcttccatgtcatatgtagcaaagtcgttgatcctgtcaagctttagtcaaacagaaaaatccaaaaatgtcaaagaattgggtggtgaaaaagcataacaagactttctgtgattggtttaaagatacaatctttgcagatgaaaatgcttcagaaacattaagaaatctagtagatgggcctaaaagaaatgttattacttggcaaggatacgacataaaccaatattccttttacacaaaagcccaagacgatataagtccatgcagaatagtggggcaccctaaggctgatctc

SEQ ID NO: 158676 - DNA, 353 bp, Glycine max
  unsure (1)..(353): unsure at all n locations
tgactgaaattgttagtcagcatgtcatattgattgtgaatgaatgcattaatcatattccgcggagagtgtgatccttttattttgataaaaacaactatcatttataactganttttgcttgaatctctgaaggatggactgaatgcatgaaaatgaagatgatgaaagccatgtttgattgtgatatccacttatccaaaaagctgaccatgtgcttgaatgaattattgattgattgaaccttgagcctatattgttatctcttgctaccttgacttatgttgtaggagagcatcatccatatgaaacgtggttcaaagcaaatttgtgcctatttgggggagtaatta

SEQ ID NO: 158677 - DNA, 347 bp, Glycine max
  unsure (1)..(347): unsure at all n locations
cgcgacgatggttactttgggagtgtagctaagtgcacccagcattattgctggtgcacccaacaaagcttctaaatggcaaaattgtccctacttgtttttcttcttacggatcaaggtgatccgcacgttgatccgtaagacatttaccgatcaagtttgatccgtagaagaaacataattattaattaatttgtatatatagaaatctattttttagatgagactcttgtattgaaaacgatatgcaatcatgaattcaacagtacatttcttaacatancaaacgatataaatttcataaatactacactactaactatgctatttgcacaggacactttctt

SEQ ID NO: 158678 - DNA, 422 bp, Glycine max
  unsure (1)..(422): unsure at all n locations
tcctttctccttactcatagattaagaacataattctgttgtgcaagcaaaatccatagagtttcacaacgtgtcgatgctttatttctgcaatactttgacctcatttctgaaactctgatcaaaagctggcacctctgcttcaaagccattaagttttttcaaggcaacaaccctgccacttggtaattgtgccttataaacactcccataagcacctgttccaatacaatatttcatgtcaaagtcttgtgttgctctaatgacgtcttcataggctatgcttccatcatagttccatagagagaaaaagtctccattcttagtcgntgtcgntgtctttgaatggttggtcttaattgcaacacgaataaacctcatatacacaaatagtaagaaggccatgattagaaaaataagaa

SEQ ID NO: 158679 - DNA, 403 bp, Glycine max
  unsure (1)..(403): unsure at all n locations
gtcattanngttaaacctcttagaacatgnggttcacactaagaaattttcattcctctcctannacaagctnnnaagtacctcagatngactttaattttaattaacttnntttttcctttcctttttcacctaacaacttttcaccatatnnnttggttgttggtggttgagaatgganngtctgaaatcggtcgtacacttaatttgatctagacttgcgtcaatagttaaagaccccaccttcaccattaacatcacgcaaagccggatcgtgcggctttgggtggatcagtgttcttttgtcgtccttcttttttccaagtgttccaagatctggttgactgaatggttactatcgcgtgagaaanaggttcanagtataacttctgattgttcacac

SEQ ID NO: 158680 - DNA, 386 bp, Glycine max
  unsure (1)..(386): unsure at all n locations
ntatcaactctgctgtgtggtagtcaagacttcttttgtctttaatctctcctcgtctaaatcaactaactcatctgacatcatttttcacacacggccgatcggaatgtccatttgtttttgtactctatctgattgcaaatgtatttcgaccggaagtataacatcgtgcccataagtcagtcgaaatggggtagtattagctgattccttatgagaatttctacatgcccatagaacttgatctaacgttttattccaattccttggcttttgggcaatgtgtttcttaatcaagttaattacaatcttattggctgcttcgacctgaccatttgcttgcgcgtaatatggtgttgatgttaataatcgaaagccagtatttt

SEQ ID NO: 158681 - DNA, 461 bp, Glycine max
  unsure (1)..(461): unsure at all n locations
tcgacccggatccttaagtcacctgangcatgcagctggagtgaagatcccatattttataagctagaccccaaaatcctaaatattggtcagttggaacactaaagaaggaaggggtttgaagaaacataaatagaacaccaatctcattcttaaaataaaacacccaacaataaatcatcatttgccttatctactttctttggcccaaggacaaatctgctatcaactagttgcaacacagaatacctttgaaccctaatctctcttttcattaggcttaataactaccaaggaaaaagaaaaccatagatcatctagttctttggcaattcaacaacctaatacacaatcttaaatcacacaccaattatcactagtaaagcaagtatgacagaaaaaaaatccaagcagatatcactacatagtagtatgaaacgagatggatcttacgggattga

SEQ ID NO: 158682 - DNA, 343 bp, Glycine max
tacggacacttaaaactaagcttacctataaaacaacttactgtgaatcaattgctatattttttttacgcgagaatcgaaaagattcagtgattatacacacgcatcactcttattaatgaaggaatacaccttttgacaatacaattcatatgagtgtatgcacatgcttaacgttactccttgcagtcggagatttgccaagacgtccttcatgaattggagggaatatggattcgatacaatcgatgcatgcaatactttttgaatatagtgaaaatttcattgagctataacaaatatgtaattaataatctgtaggcggtgtgttaatgacctctgg

SEQ ID NO: 158683 - DNA, 435 bp, Glycine max
  unsure (1)..(435): unsure at all n locations
agctttgaaatataaattcaaatttcttaatgctgttacaaacaatttaaacttctggtaatcgattacatactgtgcataacgattacagccttttgaaatcaaattcgaaacttgtaaaacagttttggaaatcaattttgccactggtaatcgattaccagagagaaaatatcatatttttgaaatctcaaaaagcttttgtaaaatatcctttagccaaacctgtgcagcatcgattaaggaattctttctaagatcctaggaactaagtacattgttcttcttgaatttttggattcttgacttgaattgcactcatctttggcatcatcaaaacttcacatcatatatgcttctacaatctcccattttttgatgatgacaataatnctgagatcaagataaacaatatacaatttgataatgcgtgct

SEQ ID NO: 158684 - DNA, 420 bp, Glycine max
  unsure (1)..(420): unsure at all n locations
acactataaaatactaagactgtggaagattatttctatacaaaagtgagtcgtatatttcgactaacattcctcaacaatttcttcaagtgcatnttaaccgagcaactggttccagtgccaatttattatccagctattgtttaaatacctccaccttctaatcagtgttactttcctccgcttggataacacatttgcttctattcatcacaactttgcactcttctttaagatttttatctgtgttagttgtaaagtagttggatgatcattcagataactgctttgcaagctgaaccaactaaacttctagattcttaattgctgactcggtgctcttttggtaagacatcgacacttgcatgaattgagctagaagctcttcaactttgtggttcatcataaagactggatctg

SEQ ID NO: 158685 - DNA, 399 bp, Glycine max
  unsure (1)..(399): unsure at all n locations
gcttgtctctttggtcagttccaaactattaacaaagtttctagtagtcggcatatagagaggattattacttacttctgagtttaatatcaatatctttttgccttcttaatttggtgtgtcttgttctttttctttccagtctaagcttttgtagactgtagtccacctttttttttcatttttcttccctttctatttttggtaaggtttgtcctttaaatcccaaaaaccttcccagcatttgaaaaaaccaagatctatggcctataccacaatcttaggtttctaaaacttgcatatatatatatatatatggagatgaaggtgtttatgttccaccaccaacagcagcaacaagtagtagtggaagaaaacatgtcanatttgacttctgca

SEQ ID NO: 158686 - DNA, 439 bp, Glycine max
  unsure (1)..(439): unsure at all n locations
agcttgtgcagaagagaaaggtacacttctccaaaagagtagatggtatctctatgattgattcaataagattaacaaagaagctaaagtgactatgactgtacttagtaaagagaaaactagtttagaacttgcatttggaagccaggggtaggcatctggaggaggcataacacagttatccccattgaaataaatccttctagggaaggcccatcccttatcaaatgtgaaggttgatttgtcttttctaagtaagatttctgactgaacattaccaagagatccagctgaagaaagaaaatcattgtagaacttgactccccacagcatacttgtatcatctgtaaaaccatttcgcanatcaataacataagaagtggtgtattttcttcacaagatcatctaggaatgtgactatgaaagatagaacttactc

SEQ ID NO: 158687 - DNA, 323 bp, Glycine max
agcaaggcatgaatatacaatcggttcttttcatataattgttaaacatagcacccataattattaaatatatcttcttttttattattattaaatttactgaaatatttccatcccttacctcgcatccttttacttctcctatgcttcattttcctttagattcaatcaacacaaatataaatttaaaaaatgtgagaaaggagcataacaggttcatacttactagtgtagtatccctgcgttgtttaaatttatgcgaatatgagaatatagtttaatacgttacaatatattataacatgagtgtttatggatttaat

SEQ ID NO: 158688 - DNA, 424 bp, Glycine max
  unsure (1)..(424): unsure at all n locations
agctagaagaagaaagcttccttggaaagctagagggggctactcacaccctctaatagctaagctcaccccatgccaaaatacatgaaaatacaaaaaagttcctactacaaagactactcaaaatgccttgaaatacaaggctaaaaccctatactactagggtacccttaacttgtacccttaatttgtagggtaccctacaaacctaaaatggccaaaatacaaggcccaaaagaaggaaaacctattctaatatttacaaagaanagtagacccaatcttagcccatgagctcaaaaatctaccctgagattcatgagaaccctagggccttcttcaacagctntagcccaatcctcttggagtctcttactcatgactctagtgattggtcccttcttaaggaggattgcatcatccc

SEQ ID NO: 158689 - DNA, 434 bp, Glycine max
  unsure (1)..(434): unsure at all n locations
agctctcgagaaactcttatgatcataacttatcacacagaggttcgattcaggcgcttaatatttcgagacgctcgaaattgaacaacgaatgctctcgaggaattcaaatgttcataacttgtcacacggaggtccgattcaggcgcataatatatcgagacgctcgaaattgaacaacgaatgctctcgagaaattcaaatggtcataacttgtnananngatgtccgattcaggcgcatcacatatcgagacgctccaaattgaacaccggaagcgctcaagaatttcaaatggtcataacttgtcacaccgaagtctggttcatgcgcataatatatcgagacgctcgaaattgaacaacgaatgctctcgagaaattcatatggtcataacttgtcacacngatagtctgatcatgcgcattatatat

SEQ ID NO: 158690 - DNA, 386 bp, Glycine max
ttgttatggttttacccattattttttagcgacacaagtagcctaatgtgtatgtttttaaacatatataatgtattgctaaagcggactatgtgaagaacctttcatgatgagagtcaatagatcaaatttgtgaggaaaagttaaagctatgctatacaagccatcttaggagaaagatgggtgtcttctaacacggagattgggtttgggtgcacatgagaaaagaaaggattgcggaacaaatgatatcaaagcgtcaaccaatgggagatggaccatttcaagtgctattaagaatcaatgacaatgcgtacaaagttgagctgtccgatgagaataatgttagatccaacttcaatgtatatgatgtatctattcttgat

SEQ ID NO: 158691 - DNA, 398 bp, Glycine max
  unsure (1)..(398): unsure at all n locations
aaaaaatataataatccttttctctcatgagtcgcagtctttccttcttattattcccatctatctattaattacttgtctcttccacaattccacatgttgtccctctggcctggggttttccttcttaacttatggtcttttgttttccgctttcctacatcttcttttcagaatagttgaaaataatgcaagttgtatatagactaataatacaattatattagactttataattgttataattaagaaacaatttttatttcttaactaatttttgagattgaattagacccaagtcacattcaaagaaatatatatatatatatatatatatatatatatatatatatatatttaaatgtgaaaaatcacattaactaanatgtatctaattg

SEQ ID NO: 158692 - DNA, 200 bp, Glycine max
tacaacacattcatgttattatatcacttataattatgaacattattacctgagaagtaatgaatgcagtccaacaatataaaatgtggttattcaaaacaacattcgttttaattttattaatacataataatgttgtcagacattataatgtgatacattcattgatctttgtccatcttatcaaacaatcattaatt

SEQ ID NO: 158693 - DNA, 300 bp, Glycine max
catgatcacagttgataatgaaaatgtgtggaatgaatattgtactgtaagtattctttaatatgatgctatttgtatttaaagtatattggaattgactatttatttgtttttacgacgataattcgggtaaaccgttccattcaaagtgcgtacaactgggataaattaaggatttgtggctataaaaaaaccactgtcatggtgtgaaactgtatgttgctggtagagaaacaatgaaagaattatgggtgagtgtactgctccattacttataaaacaagctttatcataaaaaaa

SEQ ID NO: 158694 - DNA, 444 bp, Glycine max
  unsure (1)..(444): unsure at all n locations
atcttaagtaccgngctgcagcttatataagacgatttattctctatctggtcgacgggcttatntgcccctggttgacgaaaggtgcgaataaccatacggtacccccgcatgtcacttgacttcaagggtccatgggtcacgatgacaaaaagtgcagaagatgatgttagtctttgtgcgtcaacgggctcatttgtccctggttgacgaaagttgcggataaccatatagtacccccgcatgtcacctgacttcatgggtcaggatgatagaaggtgcacaagacgatgttagtctctacgcgtcaacgggctcattcgcccctggttgacgaaaggtgcgtgataccatacgatacccctgcacagcacctgacttcatgggacaagatgacataaaccgtttgacagataaccacttgtgatctcatacgtacctgac

SEQ ID NO: 158695 - DNA, 283 bp, Glycine max
  unsure (1)..(283): unsure at all n locations
tttttattatatnaaattatttgaaattttatttctgatcttaagaacaaaagagaaaattatgtattaattattttatattgaatggtggaatttaattaacaatgatatatgaattaattttatttattaactgtgtagaattgtgtataatatattataactaaaaaaatgatagagatggaaaggaacttaattatgagatgaattattatttgtcatatgattataataatattgattgagattgatcgaattgtattgaaattatatatatatgtta

SEQ ID NO: 158696 - DNA, 428 bp, Glycine max
  unsure (1)..(428): unsure at all n locations
gcttatgggttgcctctagtatgcangattgctggaaagctctccttattctgagctgttgtccccaattcattgggagatgacaaccgaagagctcgcacgacagttctgcactctcttgggtcagtcctatgagaacccactgagtgtagcagttgcagcaggagttgaggggttgcctatactgttaaagctggcaaatgtaatggcagcaaagaagcaggagtggcaggaaatgaagcagttgcctgtgccagttgaattgggtaaggaatttcagttccattcgatttttgtttgccctgtgagtagggatcaaggaagtgaagaaaatcctccaatgctgctaccatgcttgcatgtccttngcaagcaatcaattatgaagctatcaaaaaacagcacccgaacattcaagtgtccatatt

SEQ ID NO: 158697 - DNA, 428 bp, Glycine max
  unsure (1)..(428): unsure at all n locations
gtgagaactttcggtggttctctatattccccccttgttgttgtgaaggatgatgatgaagtggaacctcggaaggcttgcgaaaagttccgcacccgctcttcactgaccgctctgtggatagtgttctcacggtttaccaggaagaatatgctgacttggcttgatggatgtcatgatgatgatgaaccgcccttgcagaggaaacctggctggatggatgatgaagaagaaaatgccactgtgaacatagccaaggtttacagattaatgaagttgaggaacgttgaggatgacgatttgatctcnggtttggagtatgtgtcgagatttgcggctcagcatgttaaacttaacccaggtactgaatgggcacgggttgattctacaatagatagatcctctgatgatgagtcgacggatgatga

SEQ ID NO: 158698 - DNA, 432 bp, Glycine max
agcttgtatttggatcataattgtgaaacctgatctgatcatcgatccaggcgaaatagtgagttagaagattaatggttcaatcagggagtcaataattgattcggtttgatccgatatatattaaaaaaataaaattatatataagtatataattagtattatttgtgtaagagaaattcttttatacaccaaaatctaaaataactattaataataacaagatatcaaaatggcgttgtagagatagtttttttttaaaccaaccgggtcggactagtctaactgagattgggtgacctaaccgatcaggttttgttgggtcattccaacataattgtgtgattgatccaataatgaaactgactcaattaaaccatcaaatcccacttgaaccaatttaatcagtcaaattaaatcgaagtttacaac

SEQ ID NO: 158699 - DNA, 441 bp, Glycine max
  unsure (1)..(441): unsure at all n locations
agctnntgaactccatacttatcacttatttatnttccgataatctataagataatggtaccggtagtagatgaaagaaacataatgatcttatcaaatgaaatctattaccagcaattcattattaattgtagctgttcatcactaacattataagggatataaataaaaaaaaatccttcatattatattaaaaaattcagatcacactattttgaaattgattatttttctttctccacaacgattattacatgagaaagtagtatcacatcacatgttattttagcgtaaacaaatatatgtgcctctcacgttgcttttctcgcttgatgggcaactctcttgaggaaaatcttctaatgccaatggactaaatgagtcgctatgtaataatcccttaggcgatctttcggctttgtctacatctgcaacatgtca

SEQ ID NO: 158700 - DNA, 401 bp, Glycine max
  unsure (1)..(401): unsure at all n locations
agctntatatagacttatagtttttatttcttgagagatctcaaccagncggtgtctaataactggggcgctttacacaaggtcgtgactatgcagagagagagtgtcagaaccacaaacactttctgcagcatatattcagagaagtacaacttgccaatgtcgtcttttgctcataggtgactttcattgtaccaatcgaatataacgttaacgacataagacaaagaaaaaaattaagaatgtcaagacaagacaatttgaatcttcccttttgtgggctatggcatgaactgtttactaaacctatggatggtactttctgatgaatacttttagtacttgaggatcgagtaactagtccatttcctttgtactatgagcccagtgttgaaccacta

SEQ ID NO: 158701 - DNA, 424 bp, Glycine max
agcttcgtcctcagatccctcttgttggtctaagcccaatttaaacagccctcttaggtttagactaacttaaactgagtttcattcgcagatccctcttgtaagactagactcagctcaagcagctagcttcatccgcagatccctcttgtaagacaaggcctagactaaacaacattattgtaacaacataattaaaaccaaaacttaatccgcagatccctcttgtaagactaagtttcgatcctacttcaatcaagttctaaggcaacagtacatttcccaatgctaaagtcacctaactatgcacacaaacgggtgatcagacaaaaagcatacaaacattaagcattgaaggaagcattgaacacagaaaacataatcaattagatattaagtatttacatcggctggtcattagaaa

SEQ ID NO: 158702 - DNA, 427 bp, Glycine max
  unsure (1)..(427): unsure at all n locations
agcttgataagacggtggttgtctacattagacttaagggtaaggcctaatttgaataaacatgttntcctatagggtaacctgctaattaatttcccataattggacagcatattgtctcttagcaacaaagaatatttctcgctcattcaaaaagtaggtacaaggaattgaaaccatcaaatttacacactaatcatgatacacgagaaaaaaaaatgaaatgaatgataaataaacttattcgtagaaattagaaaatatattggtatacgtcgacaaagacgcgtcttgtagcgaatagctagctctaatggagtcaatatgatgaatcatttcatggtccaaatgaggtatcacgcaccaaatagtacccacagcggccaatattgaaattggagatataagatatatctaaatagacacg

SEQ ID NO: 158703 - DNA, 464 bp, Glycine max
  unsure (1)..(464): unsure at all n locations
ctgcaagctaatgctactcttcatgttctccctctatctctaacagctnggatgcaagatctggaatgagtggttcaacttcatctacattggacgcttcaccagtctcatccatgacactagtgtttgtaaggtcaatgatgaccccacacacattggtgttgtccgcagctatagtagatgctccagcttgaactttctcagcagtagtagcagcttcttgctcatcaattacaacagtagcatcaacaacaacatctntagctctcttcttttgttgagccttatagagctaagtcacatgggttattatttgagctttcgtcatcttcttcaagttgtaagttccctcatattgaatggtgggaagcttgagaagacgttggatgaagaagtagttctcatcatctctattaaagtagacacaagtgtcatcacagtgatctttctagcatgtataacac

SEQ ID NO: 158704 - DNA, 338 bp, Glycine max
cgttattatggtgttttacagatctgtttattgttcaagtatgtgtatatgtgtgtatatctgtcttatattcgctgttctgggtgcagtgtgtatgttgtttcgtgcagaagaaaaaaccaagggaagaagtttatatgagagtcctcatcgcgaaaacggcaagacggacgaaatcactgtcctatgtttgctttcctcttatctccgaagagaggtgagtacagaggggctactgccataccctaatttcgtccggggattattacttgatgacatgcaataaatgaagttccgagacgtctcacaaattaaaaggaagcaggcttatgcgatcc

SEQ ID NO: 158705 - DNA, 477 bp, Glycine max
  unsure (1)..(477): unsure at all n locations
gcttatgggtnntgtaagtgtgaatagcatgtttataaagttgatatattgcgaaaagaacccataacagaataaaaaataagacattntgcacatcttcaaagagcatggcccatgttgtacctttaggccattntatttcagcatggtcatgctaattttttcaaaaatttcttaatcaacgtcttgcatctaagtacgaccatgctactaataacacaacccgtgttgctccagagccagaattgggaatcagcgtcaaatccgagcacaaccatgctactaacaacacaacccattccgctcgagaggcacaattgagaattagtgtcaatttcttgaagaaggccatgttgccctcaacacgatctattgtgacttagtactactcgagttgacctccaccgtgcagctaatttttattagtataaataaaaactcggaaccatttttagagaacttgtattattttttata

SEQ ID NO: 158706 - DNA, 486 bp, Glycine max
  unsure (1)..(486): unsure at all n locations
tattcgatcaccanatgcatgtattaagatataatagcttttgacccctaacaagaaatgctgcatggtttctagagccaaaaattatattcctctgttcaaattatatttcttatagttattaaatgataattcagttatgaacaagaacaacattctacactctataagttgaaagtggtgtaaagaaatgatactctatcacttctaatgacattaagatttattgacttatccctagttaagaccggcttaaactttgatgagataaagggttggtatctgaatcaccaaagattgattgtatactttctttctcttaaccttctaatctttatttctccattaagtatcttgaactgtttagttcagacagattttgaatgtttatgattgtacttcttaatatgcaggctttcctcgggcattgaagagttagtccagacgttgaaggctaatggcatgattgtttatcttatctatagc

SEQ ID NO: 158707 - DNA, 370 bp, Glycine max
  unsure (1)..(370): unsure at all n locations
ccgaagaaacaccatttcctagttaaccatgcattaggtaccatgttcaattattttggttttaagtgaaacgggtttatgatcccaacatggntggctcgtggtgcctaacacatgaaactaagaatgtagtgtgaagtttcacgcttcccccttttttgtttttgttttgtagaggaaaacgcaaggatgagcaaacatganaacaaatggtatgcaattttgcagatcaaaaagcttgttgaatgcatatgcatcatgatgccatgactcatgcaaaatgtgaggccggaatatgataacggacaaatgcaggatatgtccattatgatgttatgaagagatgcttatgcgatgcatgatatgaatg

SEQ ID NO: 158708 - DNA, 472 bp, Glycine max
  unsure (1)..(472): unsure at all n locations
tgtttctacaatttcgattgaggaagaaccatgaagtcacttgttacctacagattcaaattccgttgcgtttgttgatcaatcattatggatccaggtattcctaaaactcttcctgataatgtaacgtaatttgttgttggtggttattggtattttataaggatcccctaaaattccaacatttaaaaccctgccgaaagattttacataccctcccaaaatgaattacacacatgctgcaaacaccatatcaaacctcaagtttagttaattactccattttcaaggacaccatggtcccaaaccaaagcactacatttgtatatccaacctcaatcggagtcttatntacctcaaaacactctaattgattatgtccatgaagttatatctggagaaggtagggccacaacgtattcgatgcttcctctggaanggtagaacgaaagctctcatcaccaattatact

SEQ ID NO: 158709 - DNA, 393 bp, Glycine max
agcttcttatccaaggctcatcgtgggggtgaatctccttcttccatggcttattccctagtggatggcgccttctctcatcgcttctcctttgtcttccgctgcatctccatggtggaaaatcaccattaaaggacctcattgaagctcaaagatccaacctccatagaatccccacaagcaagcttccgtcacttataaacttcaatggctcaatgatagttaaccaaaagtgaaggtacctttctccattgggacatataaggatgaagtttattgtgatatagttcccatggaggcagggcatattctcttaggaaggccatgacaatttgataggaagatcatttacaatggcctaactaatgagattaccctaacccatcttggcac

SEQ ID NO: 158710 - DNA, 416 bp, Glycine max
  unsure (1)..(416): unsure at all n locations
cttgcggatntggtctttgccagtgaaaggatcgatgtgggtctgaaaagaggcaaatttagtcatcctgcttggacgaatgagaaaactggggcaaatgaagagggtgaggatgaaggagaagctcgtgctgtgactgccattcctatacaaccaagtttcccaccaacccaacaatgtcattactcagccaataacaaaccttctccttacccaccgcccagttatccacaaaggcaatccctaaatcaaccacaaagtttgtctaccgcacttccaatgacgaacaccacctttagcacaaaccaaaacacccgccaagaaatgagntttgcagtgaaaaaaaacctgtagaattcacccaaattccggtgtcctatgctaacttgctcccatatccactcgataatgcagtg

SEQ ID NO: 158711 - DNA, 390 bp, Glycine max
  unsure (1)..(390): unsure at all n locations
tccaacatctggtgtgttgtgagaagctctattattctttgatgcttttgaacttgattgatgatcatttacatttatttggtcattttcaaacttaaaattttgatgtatntataaaaatcccaaaaggcaataggctcttctattgtgagcatctcaattatcatttaccatttgaatctactgaggcaatctctactggcatgacatttattttaaattattgagctagattttgaggcgggtattgttcgccttttaatcctttatttgtcacaaatcagatcaagaaacacatatcaacaaacccagacccagccaaatccaaaatcaaatataagagcgaccacaatggagcatccttcgcttgcttttcaatgtaaaactttc

SEQ ID NO: 158712 - DNA, 387 bp, Glycine max
  unsure (1)..(387): unsure at all n locations
tgctaccctaccgcttccccagtgggaatcaggtgctattntttaagcactgaaaaatggaatacacacaggaaactattctggacttnaggataccatattatatgtaaaggcatggaatagatggatacataatgaatttaatcgcatttttcttcatttatgatttacgtacaagctgtcttattatcggcttggggagctgacaacaaaatatggcggaccacctgcgtaagtttcatagcacctattgttgctacagcttaacaataaaattccaaaacatttaagggcccttgcattaatgttatttacaaacggattatgaaaaattatgccactaactagctatatggaaatcatgctctctgttgatatccgatatat

SEQ ID NO: 158713 - DNA, 421 bp, Glycine max
  unsure (1)..(421): unsure at all n locations
gcaccagcaagtgttccagatcccacacagaatatgtaggatntgtaatttcttctggagatcttgtcaaggaagattcattgctagtttatgtgatttgatattgtttcttttactttggcctttttattatgttatatactattttgcaaggtttttggctcttttagtggtattcttcctttctgtaaggttttattatagcaatgctgaaggctttatgggatcaggatgctggaaatgtacataagtgctataattaaataagtgtagtgagaagcattttgctttgcaaagggcagaaatttaattcctgcgttgtagatgtcaattttgattntaatcaagaaaatgtaagacttcaaatttgttgatttatgatttttgatctaattatctcttccttcttttcataaaaatg

SEQ ID NO: 158714 - DNA, 275 bp, Glycine max
  unsure (1)..(275): unsure at all n locations
agcntttgggctggaaaactatataacaacaccatatgttctagtttagcccctctctcttctctctactntnntgtntnccctattgtcgttttctaagtagaggcccttgctttgagacactttttcgttatgtaattcgccgtcgcacaaacaatactctcctcgagtgataaattccttatctactgctttttggaatgctaagttcccaacgttgctttctgttgaggatccagcgcaactctcattgaggttccattcataccatcaaa

SEQ ID NO: 158715 - DNA, 411 bp, Glycine max
tcatgatgaatcaacaatgattacaggtgttttgatgacatcgaaagattatgacaaaggtgatgaacaaaaagctcaaaagatcaaagaacaactcaagtgaatcaaagaacatctcaagtgaatcaagaacaagtcaagagttcaagaatcaagaaaaattctagactcaagaggaaagcctacaatcaagaatcatgattcaagattcacgatctccagaatcaagatcaagattcaagactcaagattcaagaataaagaaaggactcaatcaagataaggattaaaaagttttttcacaactctgaatagcacatgagtttttgacaaagcctttaccaaagagtttttactctctggtaatcgagtaccatattggtgtaatcgattgccgcagcccaatgagtt

SEQ ID NO: 158716 - DNA, 230 bp, Glycine max
tgctggctaaaagtctctctgatgcagcctcagaatatttcttaccctgttattaggacacatatgacgtgtgatctgatattacactctttatagacctggccctaagattttcatgtcccacagccattgttcatttccaaccgtgcatataccctttacggcacttactcctgatagcaccacattgacactgcttccagtggctggtacctttatcctacacatgt

SEQ ID NO: 158717 - DNA, 442 bp, Glycine max
agcttactaaaataggagcagacgctgttttatattctactctctatagatcagaaggtggagctcttcaacactccactataaccagacctgaactaagttgtgctgtaaacaaagtcagtcaattgatgggcaaccctcttgaatctcactggacagcagtgaaaagaattctcagatatctcaaaggctctttacaccatggcctacttctcaaagctgctactcttggaatacccattcccattaaggccctttgtgatgcagactagagctttgaccctgatgatcgcaaatctacttcaggagcttctatttattttggccctaatcttatattttggtagcctaagaaacaacatattgttgcaagatcaagtagtgacgctgagtatcgaagcctagcacaagccacaactgaagtagggtggattcatactct

SEQ ID NO: 158718 - DNA, 379 bp, Glycine max
  unsure (1)..(379): unsure at all n locations
tgcctaattaacctganattgagagagaatgattattaaattcacaaaatgaaaatactaagtatttattacctatacttaacagaaaatacttataacactccaaaataaccataaattgggagagtctgatataatttatacaagttttatacacaaaagttagtcattttcatcgactaacactgacacaaaaaatcagggaccagctggtggagtcaatcacaaaaaaagtgactcgacaactaatgtccttcagctagatgcagtccaagtttcaatcgcagatgcaatcacagggactcacactgcctcctaagtctgagggtgggccttcaattactcatgtcagcacaaacgagagttgtgttgattccta

SEQ ID NO: 158719 - DNA, 384 bp, Glycine max
gacatcttttggcttcgatggaattgccatgacacgtgtgtcgtactgcctttgatatctggtagttgatatcgtgatgcgggaggaaattcccactggattcactcaccatacttcacttgccaatatgttatgacattagttgctggattacctatgatgtcttgtttacaaaggtagtctatatcctttctgatggcattagcttgaaacctatccaagaaaaggacatttattatgactctttcgacaaattcagagaacttgacttggatatggtgtctgttcgcctcctggaatgttggacaaaccatcatctttgacgttcattctccggagaatagaaatttatgctagaggttaccttatcaatactaaagttgt

SEQ ID NO: 158720 - DNA, 288 bp, Glycine max
  unsure (1)..(288): unsure at all n locations
agcttagctacacacacctctctcataactattctcacctccttgagaagcttccttaagaagagtcctaaagaagctagagcttagctacacatacctctctaatagctaagctcacctccttgagatgagaagctagaacttagctacacaccccctataatagctaagctcacccccatgacaaaaaacatganaataccaaaaagagtccttactacaaagactactcaaaatggccccgaatacaaggctaaaaccctatactactagaatggccaaaataca

SEQ ID NO: 158721 - DNA, 462 bp, Glycine max
  unsure (1)..(462): unsure at all n locations
tcgatggctaagtgaacagatagagagagagttttcttgttcaacaagttntgattaattgtcccacagggaagtatgtagatgaagtaatatgcggtgtagttcccatgacaacttgtcacattcatcttgggagaccatggcaatttgataggagtattatttatgatggtcattccaataagttcttctttgtacacagtgattgtaaattcacacctgtatatttaactcaaagggagttatgtgaggatcaacagccattgagaatgatacagagagcgcgagagaaaaaaatacaagaaaatgagaattaaggaaacacttaaagagttggcatgaaagagcgaaaagaccgtgaccatggtgggaagaataatgacacagagagatgactagaaagtttgctcgtaaaagatactgatgcaaagagaatgcttcttctagctacgcaatctatga

SEQ ID NO: 158722 - DNA, 253 bp, Glycine max
ttacaatccttttcacttacatgagatggcatttaggtgacaaaactcgttcttgtatcaacatcatccccatgtccaagtcaatcgctgctttgagcactaagcagatttgtcgggacacccaacaacaaatgtgaaagggctaaaacgccctgtacctcttgcttattaaaaggaataatgactcatccgtacgagtcttagcgcgccgaagtccttattcgtactgtgcgccattatgcttcttcttgct

SEQ ID NO: 158723 - DNA, 315 bp, Glycine max
gtccatttatgaagctccaaaccatagttggccaacacatcagctacttgatttccctcatgcaagatatgaatacatttaactgtgattcatgcaactgattgcacttagtgggataaggctgtgtcattgttgatgttgttgccattgaagatgtttcttattgtatttaacttgatggatttcatgaagttgacatttctacctatggtgaacatgttgaacacttgcatatattaagcacgataataccaaaaagaagcatggtttgactcagttagcattatacgactcgattcacatgatgaattccgc

SEQ ID NO: 158724 - DNA, 350 bp, Glycine max
ctgcagctttccttttgtataatggggttatttgaaaaaaaggtcacccttagcctttctttttaaatttgtgagaacttgttccgtgaaaaaatcagccaggcgcttcgtacgtttcgtacgtttcgtgagtattacgcaaatttcgaccgtttaagattatcgtcgttttcgtttcttcagtcttaacgggtagtcctaaaccagctttaattattctatgtcccgggggcccatttgttatgtttttatttcgtttattactttatcccctttgacggctagcattattaagtgtttccctattaaaaaaataattccccgatcgtgatcgcatctcgtatttggta

SEQ ID NO: 158725 - DNA, 403 bp, Glycine max
taagctccttcaactgcacaaggctcttaatatttaaagagtatccttgtggaaccttcacccagcgaagacactgaaaaaaaaacttatcttctcctttttggaaaaagtatgacaagctgggggcaagtaaattttcttcccattagaccttggatgcagctgtgatcgtgtccccatctcagctagatcttgacgggtattcaagccatccttcgtcttgccttgaatgttaaggagtgtcccaatgacattgtcgcatacatttttctccaaatgcataacatcaagacaatgtctaatgtctagatcagaccagtacggaagatcaaagaaaatggacctcttcttccatatgtgtcgcaaccttcccttcgatgggagggcgacacgtgactcgcgg

SEQ ID NO: 158726 - DNA, 413 bp, Glycine max
  unsure (1)..(413): unsure at all n locations
gagatatcataaagcttatactattgcaggaatatcnttctttttggtttttttaccatattaaaggagttcttgaaaaggaatttttaacgcaacatttaacgtattgtgatctacttatcatttttgtttttactagattcaccaaggggcacagttaagccaaccaaacactggtattcttgaaagtaaaatcttagatataattgtttaggtgtttttggaattgtaattctcttattagaatttaagttttgttttgataatttgtattaaatcttaatgtaaatctttattgcatgaattattgaagtaaaatctcaattcaattaaaaataattcttaaaaaaaatatanagaatcggacctaagttcttctgttatagtcgacccgtaaaaatgtgggaataaat

SEQ ID NO: 158727 - DNA, 412 bp, Glycine max
  unsure (1)..(412): unsure at all n locations
cggaacgagaagaagccatcagcaatatctctaagggctaccgtgtctacaactaagtctataagaacctagaactatcatgatactaatctatcatgaaaactctagaaaaacctaaagtaatgtagaaacattcaccatcattgagaggttggtgacttgaacctataaataggcaattagtatgttgtaattgataatccaaaaaatcaatgacatagccttctttctaaaacaattctctaaaactatcaactatcaattatcaactatcaactatcatctgaccaactaccaacgtgcgcggaatatggagattttcaatgataagaaatgacaaccttggttacttaattataaatcaagcaaaaataacatatgatattgctttctctccttcccncaattcaat

SEQ ID NO: 158728 - DNA, 470 bp, Glycine max
  unsure (1)..(470): unsure at all n locations
agctntctaagacatgtttccatattctgaccattgcgattntttaaataaaaactnttgatctcttgctaagcatgaatggcacgctaagcgcaattccaacagagagggaatgacattgagcgcccaaaggtgcgctaagcccaattctaatagagaggaagttgcgctgggtgcctagaggtgcactaagcctaattccaacagagaggaagttgcgctgagcacccaaaggtgcgctaaacccaattccaacagagaagaagtacgctgagcgcccagaggtgcgctaagcccaattccaaccagagaggaagttgcgccgagcgcccaagggtgcgctaagcccggcctagtgcaaaggggggtgtgctaagcctaaattcttgcactaagtgcaagaagtggacttcggcttattgcgacagtctcgctaagcacaatttacagggtataaatacgtcctcagc

SEQ ID NO: 158729 - DNA, 415 bp, Glycine max
  unsure (1)..(415): unsure at all n locations
tcagaaagtagaatgatcaaatntaaaagatgcattgaatatagtggttacattgaagcatcaagtgggttgtgtctggatgttcctacaagatggaactcaacttatttgatgcttcaaagtgctcttaaatatgaaattgttttctcaatcttgcatttggatgatgaaaattataaatacttccctttagaggaagaatggattagagctagaaaaatgtgcaaattattgttgccatttgatcatattaccacattgatgtctggcacaagttatcctacttccaatttatattttttacaagtttggaaaattcaaggtcttttgatgagttgtgagagatgaggatgaagttattaagagaatggttgaagacatgatgttgaaatttgataaatatcgcgatgagtat

SEQ ID NO: 158730 - DNA, 355 bp, Glycine max
tcaatttctcactaagtaaaatggatcattttcaaggtccaacgccttaaaatgatcacctcttaaagtaaaaaagaaatcacttgataagaaagaactacgtaggtctgatttcctcatcgcaattgaggaatacgtatgagcaaagggaaacacccttgtcgaccacataaagagaataatataaaaagggtataaaggatataaggacttaaaagggaacataaaaaatcaaggtcatgtgtgcacattcgattaaaggctgccgtcccttgggacggacgtgtggggtgctaataccttccccgtgcgtaaatacaacttccgaacctttcacttaaaagttcgtagatcg

SEQ ID NO: 158731 - DNA, 467 bp, Glycine max
  unsure (1)..(467): unsure at all n locations
tccattgagtgcggcacgtataanaccgagctctatggtgttgcgagcctttgatgggactcggcgggaagagatgggggaaatccacattcccattcagataggccccgacacttgcaatgtggtgtttcaagtcatggatataaatcccgcctaaagctgcctcttgggaagaccttggattcatgccctgngagtggtcccttcaacgcttcaccagaaattgaagttcgcagtgggtggacttttagtgatagtgtcgggtgaagaggatatgttagtgagctgcccctcctccgcaccgtacctagaagcggcggaagaatcatttgaaacggctttccaattctttgaggtggtgagctgcgcctctgtggaaccaagttcgtcgctaacttctctctcaaagcggacataatggtggcgcgtgttatgctcangaacggatttgtgccccgaatgggtct

SEQ ID NO: 158732 - DNA, 431 bp, Glycine max
  unsure (1)..(431): unsure at all n locations
tgcaagcttcagacaacttgtgtaattgattattattatgtgtattcgaataaaacagggagtttttccttctgaagaaaattttctgagttagaaaattttcttcttacttactcatgatgatgcataatgcacaaaagatatgatatggactaagatgcaacattcaatataacaactaatacaaattccactcgagggagttgggcatgtaaaagaaaaaacatcttcaagcttttctccaagtttcaagctntagtcttcatgttcttcatgttgctctccctatctctaacacaccactccctcgccatcgaacaatcaccacacacactctcattgttcgtcattacattgaagtaaaaagcctttcgtagtcattgtgtcacttcaaaaccaagtagaactcacccaaagagaagtagaacaca

SEQ ID NO: 158733 - DNA, 467 bp, Glycine max
  unsure (1)..(467): unsure at all n locations
ngatcaaaacaattatctaatcattccaatccatctcaattatacaattgctcattcaaatcattctcaaacactcatttcatacaaaataatccactgtatatcattttcaaccaattcactgttgaaacatgctttttgtacaagcaaacaactcaaagtagtgaaatttaaagaactgaaacatagaactgaaatttaaatgactaaacataaatcataaaataactgaaataaactaaaatgttcaaaatgcacaaatttaaatgtcctactcctgtggttgctcctgtgcatgctcattaagatccaacacctgagcagctagtgaatcgtgagagatacgctgctctaactcacatgctagtgcagatggtatggcatcattaagtatgggtgctggggatggctttgggatctggtctgtggaagtctccctctcttgagccatgtatacacctacatca

SEQ ID NO: 158734 - DNA, 369 bp, Glycine max
agcttgaaggggtgctctggacagaaacctttctgcgaagtgaaagcttcctcattaaaattacttgcccacattatgcaattcctacaaaggttagtcagattctttgtgatatggaaatactatcataatttgcaattgttgttaacattggtttggaaagaataccgtggttttcaatctgtcggttgtcttttctttggaattattttacatacacggcagctttgcttctaatgtttgatctaaccacagcttagccatgtcataacttctgttttcaaatattattcctcattgtggatttgcataattatatagtgactatggaaagtcttcaattatatagtaactattctctgaatctat

SEQ ID NO: 158735 - DNA, 458 bp, Glycine max
  unsure (1)..(458): unsure at all n locations
taatntaattggggtatgtgttaaaacattattttcaacatgtttacaattaattntttacaagattgttattagccatgttcctatttcagcctttgccccttgtgaaaccagttaatcattatatagatctctgattctctcctagtctccttatattaaatattataggaatgcaatgtttacgcaaatccagaaagaattgaagtagttattcgtgtaacttatgctgtcacaccaagtggaacatgagatgatcttgtctgtacaagaggcaatgaaattaatcagatgaaatttaagcccctaactagaacccccgagacaagaccatnggttaggtgacaccaccctgcatgttgccaatattcaggtgctgcaatcccaactacggacacaagaaaagacatcacatgtgctcctaagtaattgttatctaacttacaggctacagcgca

SEQ ID NO: 158736 - DNA, 367 bp, Glycine max
  unsure (1)..(367): unsure at all n locations
agctntctagctnttcattggtgtattntgatctccttttggtgctctaaattgtgggaatgtgctcaaatatgtggggcaattttggtttgttttcttgcttgattgggttgaattgggggtttgtatgagatggccctaggcctataatgcattttgaagcaatgggacatgccacattgtccccgttttcttgctattgatgcctaaacacgcgcccaccaagtgttcggtgaaatgcctcaatggcattagcatgtgattttcgtagggacccatgggcgcatttggtttgcacatattntctantttttgggacatgcattcagtttcgaaagggctagagtaattgccccacatatgtcct

SEQ ID NO: 158737 - DNA, 406 bp, Glycine max
  unsure (1)..(406): unsure at all n locations
ctcaagctggctctanatntacattgatgtttgtatttattggaggatgttgtctgacattcttgctctaagaggagtgtcccactggcaaaactaactttccaaatgtttgccttcgcacgaacaggccccgaggaagcttgcctcaaagaggtccacgaaggacaaggcagccgaatgaactagttccgctccggagtatgatagtcaccgctttaggagtgctgtacaccagcagcgcttcgaggccatcaagggatggtcgattctccgggagcgacgcgtncagntcaaggacgacgagtatactgatttccaagaggaaataaggcgccggcggtgggcatcaatggttactcccatggccaaccttgaaacagacatactccttgagttttatgccaat

SEQ ID NO: 158738 - DNA, 377 bp, Glycine max
  unsure (1)..(377): unsure at all n locations
agcttactaanataagagcagacctcttcttatatcctactctttatagatcagtagtgtggagctcgttaacactccactataaccagacctgaactaagttttgctgtaaacaaagtcagtcaattcatgggcaaccctcttgaatctcactggacagcagtgaaaagaattctcacatatctcacaggctctttacaccatggcctacttctcaaagctgctactctaggaatacccattcccattaaggccctttgtgatgcagactaggcttttgaccctgatgatcgcaaatctacttgaggagcttctatntattctggccctaatcttatattttggtaggctaagaaacaacagagtgttgcaagatc

SEQ ID NO: 158739 - DNA, 398 bp, Glycine max
tgcctaattaacctgaaattgagagaaaatgattattaatctcacaaaatgaaaatactaagtatttattacctatacttaacagaaaatacttataacactccaaaataaccataaattgggagagtttgatataatttatacaagttttatacacaaaagttagtcattttcatcgactaacactgacacacaaaatcagggaccagctggtggagtcaatcacaaaaaaagtgactcgacaactaatgtccttcagctagatgcagtccaagtttcaatcgcagatgcaatcacagggactcacactgcctcctaagtctgaggttggtccttcaattactcatgtcagcacaaacgagagttgtgttgattccttatggaacgaaccagacaca

SEQ ID NO: 158740 - DNA, 440 bp, Glycine max
  unsure (1)..(440): unsure at all n locations
agcttgtcaaaaagggaagtctgttataaacttcttttcaaagcagaaacattgtttctacttcaaaacctcttgaactacttcacaatgatttatttggtccttcaagatctgagtttaggtggaaattactatggcttactaatagtagatgattactcaaggttcacttaaactttgtttttgaaaaccaaaaatgaagcttttgatgtttttcgcaaacttgccaaggtgatttaaaatgagaaaggtctcaacattgtttaaattagaagtgactgttgcaacctacccttcgacgggagggcgaggcgaaaggccaaatgtgcatcttctcatgaagaanacgcgtgggagtcgccaccaacgtttatttgagaaaaaatttagaaaaaaccaaataacgtctgccaatgttgaaaatattggttcgggagttg

SEQ ID NO: 158741 - DNA, 321 bp, Glycine max
  unsure (1)..(321): unsure at all n locations
tctcgatatattacgtcctttattctgacatccgagcgatatgttatgaccattcnaagctctctagagcttccattgttcaatttcgagagtctagatgaattatgtacccgaatccgccatccgtgtgaaaagccatgaccattcaaatatctcgagtgcttgcgttgtgcaatcatcagcgtagtcgatatagttatgaatcctccactatagacatgccgtgtgaaacgtaatgaccatacaaatttcttatgagcttgcgctgttgaaggcgtagcgtctgtacatactatgtaccaaatatcgacttccgcgtga

SEQ ID NO: 158742 - DNA, 338 bp, Glycine max
  unsure (1)..(338): unsure at all n locations
agcttgcttgggagcttcttggatgctggatctttgagcttcaatgaggtccttcaatggtgatcttacaccatggagatgcagcggaaggtaaaggagaagtggagaggggagacaccatccactacggaataagccaaggaagaaggagctttaccaccaagaatttccttggataagaagcttgaagaggatgctttaatggaggaaaagaaagagagaaggggggagcacgaaattgaatgaatataagagggacagaagtggaactttgaagtgtatctcataagactttcattcatcanaggtacaacaagtgttacacatgcttctattta

SEQ ID NO: 158743 - DNA, 471 bp, Glycine max
  unsure (1)..(471): unsure at all n locations
ctgacgtttgaaaaattagttattgtctcatacaacagtgtaatcgattaaactgatatgagacttaactctaagcttcagacagctagttgtaatcgattacaacaactctgtaatcgattaaaacagagagtttttgcttttgagaaatttttctaacttagaaatgtggaagcaaagcttcatgatgaatcaaaagtgattcaaaggtgttttgatgataacaatgatgatgacaaaggtgatgaacaaaaagctcaaaagatcaaagaacaactcaagtgaatcaaagaacatctcaattgaatcaagaacaagtcaagagttctagaatcaagaagaattcaagactcacgaagaaagtctacaatcaagaatcaagattcaagattcaagatctcaagaatcaagatcaagaatcaagactncagattcaagaatgaagaanagagccaatcaagataagtatta

SEQ ID NO: 158744 - DNA, 431 bp, Glycine max
  unsure (1)..(431): unsure at all n locations
agcttgcattggaagtagataattggatcatctatgaatgaaatttaagacaaatattcagtcttttgacaacatgtattgttaacaaaccatcttatctcatgttttattccttaaaattgagtgtttccaaaatgaggagaaataacatttttttaaactacaagatagactcaagaatcaccaaaaaagataaggtatttcgaaagatacaatttaatattaattgagataaaaattgagaatttgagacttagatttaaaagaaatcaatttagttttgtaccaagtgtgaaagaattattccctcttggttcttgtgttgaattttaaattcttttcaaaaaaaatatattctttgtggtgatttctcttgaagttatcgatccttaaaaaatatggccttattcattttcattntttacctcaat

SEQ ID NO: 158745 - DNA, 455 bp, Glycine max
tagagtgttacattcattattgtagcataaaatttctttgtattttacttttgtagcacaatggtggcgatcatatggattgtcaactccaaatttgcaacagttggcaataaagatttttagattgacatgtagtgcgttgggatgtgaatgcaattggagtgtatttgagcaagtaatttattatttagtaattatattaatagttattatttaatattttctattctttgttgctcataatttttttttactaatatttgttacaaattcattctaagaaaaggaatagtcttgaacacaaaagactacacaagttggtgtatgccaagtataatcaagccttggttaaaaaatacaattatagagatgaaattgatccaatttcactcaatgacattgatgaatgccacgagtggctcgtgggacaaatggatggtgatgatgacaatgat

SEQ ID NO: 158746 - DNA, 363 bp, Glycine max
  unsure (1)..(363): unsure at all n locations
tgaatttcataacaatctttntcaacatctctttcaataatcaagaatctatctttcaatcttctctctcaacatcattcaactttttctacagaagtttgtgagtcttcttctcttcatctttctaaaagttttcgttcaaaactttttctttcaagaaaagttctttgatcaaaaacttggggtattcatctttttttattcttttctccttttgccaaaagaacgaaggactaaccgcctgaattctnttgtgtctctcttctccctttccaagagaatacaaaggaccccgcctgagaattcttttgattcttccctttcccttaaacaaaagatctcgaggactaaccgcgtgagata

SEQ ID NO: 158747 - DNA, 428 bp, Glycine max
  unsure (1)..(428): unsure at all n locations
ntgattacagtgagaaaatttaatggagaaaataaacatattatcaaagtataatacctattctgataaacgcttcacaagatgtgttggccaagcaaggaaggtgttaagtgtctgccccactaaggtaacctcgtcagtgggtacaagaacgagagcctctgcatctttaacctactcaacaccaaccttgacttggccatgcaacaaagggatgttgtgaactgttgtggatccctcataaagtcttgctagggcaaccaggcgggaaggaagaattgtgggacgttcgtgaagtcgatccaaagtattgctatatggtgacaccggctccaacagcacaaacacagctagggtgctctggtcgcccaatggcagcactcacgatatcctgacgccccaattggtgttttaactataacttttat

SEQ ID NO: 158748 - DNA, 276 bp, Glycine max
ctttgtcacgggaagccgtgaggtccatatcaccttcttaatagtacacatggggcactgcgcccccaaatgcgcaagtaagaagagaataatttccgggctctcgtgtccgtaaaatgcattcatatcatgcatcgcataagcatctcttcataacatcataatggacatatcctgcatttgtccgttatcatattccagcctcacattttgcatgagtcatggcatcatcatgcatatgcgttcaacaaactttttgatctgcaaaatgcatac

SEQ ID NO: 158749 - DNA, 401 bp, Glycine max
actcagcttttatccaggctcatcttggtggtgaagctccttcttccatggttattccctagaggatggcgcctcctctcccctctactactatgtcttccgctgcatctccatggtggaaaaccaccattaaaggacctcattgaagctcaaagatccagcctccatagaagctccacaagcaagcatccatcaagtggtaatcagagcacaagagcttcatgtaggtgctccttaaacctccattaattatttttctttaccttctcttccattggtgtctcttcatttatctccatgtatctgctcagatgtctcgttctaaattctgctaacatgattctttagagcttccaccaattaaacctgctatagaaactagattcgatcttctatggatc

SEQ ID NO: 158750 - DNA, 352 bp, Glycine max
ttcatcttcctatgatttcaagcactgcttccactaagtacaccctagagttatcgccctctgttttgagcattttgtcattcattcttttatactcccaaaaatgtctttttccagttctgataaggatggatctctggtagtccgtctgaaatctatgctagagagggaaatcttatagacaggggaagagtcataattgttttctaactcaaccgcctcccttctcctttctgacgaggaagagctttaaaacttgatgagaggtccacaaacttctcttggtgctgatgttgtttgtgacgacatacaccacatcaacaacaacaccgctctggttgaccattacatg

SEQ ID NO: 158751 - DNA, 473 bp, Glycine max
agctagtgatacactctattcagagttcgaatatgtattattaggagtgtgatttgagagaggctggggtgatatagctgagcgggtatcgtaaatgatgcatatgcttctagtccctaaatattcttcaggctcctgatcataatacactagagactgttcttgggagagagccaatggcattcaatgttgatatattatctcctcatggctacgttggacaagccaatgtcttgggtttgcctgacattggtgggcaagttgtttatatactacgtcaagcgcgagcccttgaaaatgagatgctccttcatatcaagaaacaaggacttgatttcactcctagaattctaattgttaccacgttaatacctgatgcaaaggggacaacatgtaaccatccgttagatagagacaatggtactgaccatacttatactttgcaagtctcattctcatcagagttatgaact

SEQ ID NO: 158752 - DNA, 360 bp, Glycine max
atcaaacgacaacaacttttttctcggatgtcggaatgaatactgtgttatatcgagacgctcgaaattgacaatatatcgagacgctcgtaattgaaaccaaatgctcgaagcaaattcaaacgacaataactttttactcggatgttcgaatgaatcccataatatatcaagacgctcgtatttgaaaacataagctctaagcatattctaatgataataactctttactcggatgtcggattgagtcccgtaatatatcgagacgcccgtaattgaaaacggatgctcgtagcaaattcaaatgacaatatcgagatgctcgaaattgagcaatggaagctcttgagcaattcaaat

SEQ ID NO: 158753 - DNA, 363 bp, Glycine max
  unsure (1)..(363): unsure at all n locations
cgggcgatggtgcaaatcaactcttcacatccacaaatcacacatgaacccaccatcctcagttgcccaccttcaactaagctcacgtactcccatgtagcccttatcctcgttcctctcagcaccgggtccccattaatccctccgagcttcaacaacatccaagcaattcaatatccaaacatcatgaaccatccaaaaccaaacaaacagggcagaggcagaaaactctgcccaaaacacattccaataccacagctnttcttacccaaataccccagtaacattctctntattccgattcgttcaaccgtggatcgactcgaacattccactagagggccctagtacataaatctacat

SEQ ID NO: 158754 - DNA, 388 bp, Glycine max
  unsure (1)..(388): unsure at all n locations
cgtgcanatcanatcactccctacattcatctctatcatgtattgnacgtcggtctcgtcctttgtcacgggaagccggaaggtccatatcaccttcttaattgtacacatggggcactgcgcccccaaatgcgcaagtaagaagagataattttccgggctctcgtgtccgtaaaatgcattcatatcatgcatcgcataagcatctcttcataacatcataatggacatattctgcatttgtccgttatcatattccagcctcacattttgcatgagtcatggcatcatcatgcatatgcgttcaacaaactttttgatctgcaaacatgcataccatntgttctcatgtttgctcatccttgcgtattcctctacaaaacaaaaa

SEQ ID NO: 158755 - DNA, 329 bp, Glycine max
gattttagcaaaatctgaaaccaaagtttaatattaagtgaggcctgtctaaatatattgttttctgatgtttaatttcttcaataattaatagtttaatttacttctccattgagtttggatttatctcactttgtgttaacaaaattctataataaaaaattttcaagacagagcttttcactgaaaaactatttttttcataaaaaataagcataacgaatcatgtcagaacaatggcatataattataattataaatatgcgtggtgatactcagctgcccaagctctttttaaaacaactttatttgattatcatgatttattt

SEQ ID NO: 158756 - DNA, 470 bp, Glycine max
tagccttaagaagatgtgacttggagattactatgagaagatgtcattcacaagtttctaaatttaaatatctgagatcaatagtacaaaataatgaggatgtcacataaagtatacaagtgaaacaaagaagggattcaagagttattttttatcataaagtacttacctacctcaaagacgagttttattggattattatatgtgtggttatactctattagtgactggtgattgatgaatgttagactttcaagagaataagagagagaaaaaatgagactgctaagatgaatgtatgacttcacaagagaggacaagatattaaatggttgtacacgaggagatattttgtagcacggattgaagaaaaaatgacaaaatcagttaagatgggttggacattgcaacaatcttgaacacttctgccgaattcttgaagtatacaaataaaaataaaaatttgcagc

SEQ ID NO: 158757 - DNA, 278 bp, Glycine max
  unsure (1)..(278): unsure at all n locations
agtacgacagtcaccgctttatgagcgttgtacaccaccagcgctttgaagccatcaaaggatggtcgtttcttcgggagcgacgcgtccagctcatggacgacgagtatactgattttcangaggaaatagggcgccggcggtgggcaccactggttactcctatggccaagtttgatccagaaatagtccttgaattntatgccaatgcttggccaacagaggagggcgtgcgtgacatgaaatcctgcgttaagggtcagtggatcccgttcgat

SEQ ID NO: 158758 - DNA, 456 bp, Glycine max
  unsure (1)..(456): unsure at all n locations
ctgaggctgtgctgagaacttatatacagttcacagttttattttaagctcccctctcgctggagagaggagaataattttagttttcttcgttttctattacaatttcgttttctactaattaatggaaggctaagtcttcagcgttgttttctcttgaggatcaaacacaactctctttgaggttttattatcactattgaatgttgatcagnttttcctcttcaccaattactctatatttgttgctattaatccatgcatgcttagagcttgattaattgactttgcgcttaatttacgttcatgcttaatgaccaggttcgttcataattaattggtgtatgtgttgcttaatcacataatgacagccttatattaaatatcgcttagtaatttaatttacggttggatacaggcgtgaactgatgaaggataaatccttctaacctatga

SEQ ID NO: 158759 - DNA, 420 bp, Glycine max
  unsure (1)..(420): unsure at all n locations
gacgacacattatttatttggatatattatgctcacanacagacttccattgcacaagatgagaataaaaacatgcttccacttgcagttgcagctgttaaaggtgagacaaaggaaactcggatgtggtttttccatatttcgggaacatatgtcacaccttaacaaaatttatgcatcatatcagacataagatccaatcttttattagcattacgatcacaagaaattacatggaaagcatcacgtttaaaattagagtcctacatctgacatattactctagatattaacaaaaggtttcataatgttgacttgcaaagacaagacactaatatggataattcttgttcgtgttactcgctatcattctatacgacttacttctgataaaaacatttttccaacttgatagaaaca

SEQ ID NO: 158760 - DNA, 247 bp, Glycine max
agctggccttccttggctgataacatctttgcgtttgttaaagttattcggcactcatggctgctcaccacacagtacataacccctatttgaacagcaatataaaccatctcatagcctaagatgatagtggtaccgaaaaaagccttcgtagaaacacattaatttatcatgcatctcatataaaaattaacataattagtttgcaacacccggatattaagcgcgcggagatgctttgacatat

SEQ ID NO: 158761 - DNA, 346 bp, Glycine max
agcttacatatatccttctcttagtatatcttcatctgtctcaatagtcggatattgtctgcgattgaggcctcgaatatctaccaacaaatcctacgaaaaaaaacatcagtaaactacaatgagataataacattgacgcctcaaatatgcgactgatactacctgtgattgcaattaggttatttttagggttacaaaaatccaatcaaaatgaagagagagagactcaatactcacttttttttttaaatggtggattttagagacccaagaagaaggggctccccaagagaagggttgtttgcaatgaaaagagagagagtgtgtgtgtggcgtttggatt

SEQ ID NO: 158762 - DNA, 423 bp, Glycine max
  unsure (1)..(423): unsure at all n locations
ntganaatgaaacttatgccatttcatatntttgtattcattggatctcatcaattgttttctggagaaagagagctcaccaaagcaagtaagtgacaactacacttttttttttattgtattcagtgtatacatctttctttgtgtgtgtgtgtgtattttttattattttagataaaaataaaataaaatactgcatgcaaacaaaattaactcttctataagttgtttcaataatatgagttcacatgtaacgagtcatagtttggtattcagctttagtacttcctcctacatattttgttccttgcttttccatgaaatgaggttcccnccagagagaacacaatatgctgaggtgtacctcctattctaaggagatctagtncagtctgcattaaaataagaaacaatatctttatg

SEQ ID NO: 158763 - DNA, 431 bp, Glycine max
  unsure (1)..(431): unsure at all n locations
agcttccatcaagtggtatcttatcacaagttcttccagtangngctccttaaacctctattaatttttagctttaccttctcctccattgttgtttcttcattatcctccatgtatatcctcacatgtcttgtgctaaatgttgttaacatgattctttataatttccaccgattaaacttgctatagaaacctagattgatgttctatggttcaaatttcttgttcttgaaccatgaattgtgttgagtttaagttcctttcagttttgatttgctatttttaatggctgaaccctaaaccataaaattattacaaaaacattaaagtagaagaanacctganaaatctagagtgactntntcgcctattgtagttttgtcatagaagtcatttctagtcatgaaacttgtcacatacgattccttatg

SEQ ID NO: 158764 - DNA, 433 bp, Glycine max
  unsure (1)..(433): unsure at all n locations
cggacacataaggagatgcatttangatatacaacaactatctagtatgaaaattgtacattgttgttcttggtacggtttacgattgaatggattggttgaacatgttgttaaagttgcctatacaagaaactacttggcatggtatcaaggtatgctttacaccacataattgttgagtctgagcatgtaagttatgctggtattgacagatctcgttgtggatgtgtaataagagatactcactgcctatcttgtgcatgcgagttagctagatatgttcattggtagcatacctctcagcataatccatatattttggtggaggcttacgatctcacatcaatcggtatctgagcctgaagtcaccataaccgaagagatggataccatattcaagctgtttgaagagcttgacgttatggcaaagtac

SEQ ID NO: 158765 - DNA, 313 bp, Glycine max
agcttgcatagaggaaactaatttagtgggtgtttatggctgggagcaaatgttatgtcagaatattcattagaagagttccttccatgttaggtgttatggatgtttcttctttttcttgttagatctttccttacattagcttcatgtgaatttttggtgcaggctattgatcttctacagaagaaccatgataatgctaaagccagtttacaagttcttgccgctgatatacatttcttgagggaccaggttacattaacccaggtctgattgccaattttcacttgctctatatctgtgtgtgcatttg

SEQ ID NO: 158766 - DNA, 314 bp, Glycine max
  unsure (1)..(314): unsure at all n locations
tggccaagaatgtctagtatttcatatattgttgacatggttaaatgatcacgtaccatgatgaaactcanagcatggtaatccacacacattcaccaacaaccatcattcttcttcaccatgagcactaaggaggaaaaagggttgtggctaatacagatcatgtcggaccgaagtaattcgaaacctgcttctcgatttcaaatttttggaagtaagggtgtccgtacgagcggacatttatggggctggtggaaggctgaagagatatatgatgaacaacgtcactatgtgggggaagggatgtttgagtg

SEQ ID NO: 158767 - DNA, 331 bp, Glycine max
  unsure (1)..(331): unsure at all n locations
caaaaaacaacanaaattatgataaataaagaaaatttttcatcgaggtactcaaaataaaacaacaaaaaaacgtgtttataagttcactcaaagagagaagacgagttagaatgaggagagtagactaaaaataacaaccgttgctcaagatataagaaagtagactaaaaataattattaaaaaaaattacaattaaaatggggagagtaaaaataaatattaaaaatcatgattagataactctcaaaattccaatctcaaatgagatatatntgagatttgagatttcctttatattttctagaacaagttctagaaataaaagaa

SEQ ID NO: 158768 - DNA, 472 bp, Glycine max
  unsure (1)..(472): unsure at all n locations
ggttctntntattntccttcaccttcgttgtcgtgagagttgtttcggttagaattgctcgttcgttgttgtgtcttctttggtggaggtgcattgtttacgatggttcgtgggcaagtgatgattgttgcggtggttggtatggccattaacagcggaggtaaagtgtttgatttggtttttttcgcgttaaaattatggattgataatccgtaagttgtatacaatttacgaattgataatccgtacgttgtatataacttacaaattgatcatccgtaagaaccttacggattttcaatctataagttccttttaatttgtttttaatatttttttattgacaatccatatgacttatatagattggtgatccatataaagcatacaaattggcaatctgtatggcttatacgaattggtgatccgtaaagggatacacatgacatcttatgccttataagatggtgat

SEQ ID NO: 158769 - DNA, 328 bp, Glycine max
aaagtggtacctagagatatgtcgcggggggtcaggagaccttggggacgtcaggtggggtgctattgcccaaaaccaagcttgaccaatcccgacccaacccgggcatagtcagtcaatgagaacctgtgatgtacctaaacaggcgagctcctgacagtcaacagataaaaggaacacagaccactaagcacggaggcttgtgtggtggctggccagctatgaaaattgattgatatatgggatatgggctctggtaatcgattaccaagggtgggtaatcgattacaaggcttataaatgaagacaggaggctaagatagtctct

SEQ ID NO: 158770 - DNA, 417 bp, Glycine max
  unsure (1)..(417): unsure at all n locations
cttggagtntccaagtgccaattcgtcttcttctttagtcctgtcttcttctggcttcaattcatcagcgggctttccttctgtgtccagcatcttgggatgttcccagcctttgatgacagctttccaggctctgctatccagtgatttgagaaaggccaccatccttgctttccagtattcatagttggtcccatccagaattggtggtctgttcactggtcctccttctttctccatgttcatcagaatttatctccctagatctcactcactgatttcgagtgcctgctctgataccaattgaaattctgatactggggacagatgtcgtacacgatgtcacgacatcacccttcataacatgcagattatgtttgacagtgtgttcagtttaaacaagtgaataacacaaga

SEQ ID NO: 158771 - DNA, 349 bp, Glycine max
cattttgagaacgtgctaacatatgaggggcaatattgagcgtgctctcttgctagattcactcagaattgacagtgctgtatagaaatgttccacacgtctattatgcattatagacttacgtggggcatgccacaagcgtctccgtactctaggtaccgaagcctaaactcgcgcccaccaggtgtgacctgaaatgcctctatagaacttgcgcgtgatatttgtgaggcaactccccatggagccacccgaatcgcacatatttgtgggacatgcataccttttcgatatagctagagctatcgccccacatgtgtcctcggtctaggaaccaatgcgcctatgc

SEQ ID NO: 158772 - DNA, 330 bp, Glycine max
gaaaaaaagcccctgacatattcaatgactcagatgctccctgcaagagaccagaaacacaatatgtctatgaatgaacttatgacgcagtgtttatggacaagaacaagaataggaatattagaagctttagttgtacaataatagaaattaatgatcaagaaattctgaaaatgatatagctatacctgtatggcgtctacaaggtatccagacaatatagatacccatgctgtcaagatagcaagccagattattgcctcccattgagttaattcaagatctttctccacatcagaattttcaccaatctctcctccctacattatg

SEQ ID NO: 158773 - DNA, 484 bp, Glycine max
  unsure (1)..(484): unsure at all n locations
actcaagctaggtaaccacaattcctagattattattgaattcttcacatattgaggtttatgtatcgtgtgtggcttgagggagtgtggaggtgggatttctcatgaacgagggagtggtttgtgtgagaagaggaaatggtagataggcttgtggtgttagcgagaggtgtatctttagaaaaggataggtcagattcatggaattgggttttggaccaaactgggatttttttcgattagagccaatacttggctttagttgaacaaaagtttggatcttccagtgatgactatttggtccaaacttggaagctcaaagtcccaccaaagatcaatattcttcttggaggcttacgacgaatatacttcttaatggggataatcttatgagaaagaatgtgggagctacacttggagatctttattgtccatcttacagtgatcataatgagcctattatgctcactttgntctaccatct

SEQ ID NO: 158774 - DNA, 387 bp, Glycine max
  unsure (1)..(387): unsure at all n locations
tgattctacgacctcatggtatcagacaatgtagtatgataccaagggagccaacccttccaactctacatgtgtacttgcttcccagcaaagagattccattaagatattatggccaaccaaagtttaccacattgatgatgctaatgcatgctntatgaataaccctgaggataacttcttgaaacgtatgttgccgctacccactatattctgccatcacctctttgacattcaaaagacaataatggaaattctaaaattctacatccaacgccttcatagactacaaaaagctgacaaagctaactataaggagactcggaaattaggctggaaaaggaaaccaagagttgatgtagtagccaaacacacagctatcgtcaa

SEQ ID NO: 158775 - DNA, 468 bp, Glycine max
  unsure (1)..(468): unsure at all n locations
ctcagcttacaaagttatatggcttgaaacaagcatcgaggtagtggtacaagaagtttaatgagtttatgagcaactcaggattcaaaagatgtgacatggaccattgctactatgttgagaaatatactaatagttatgttatccttgtcgtgtatgttgatgacatgttgattacaggatctagtatgatagaaattaatagtttgaagcaatagttggcagaaaactttgaaatgaaggatcttggtccagctatacaaatccttggtatgagaattcttagaaacagatcagaaggaattttgaagttgtctcaggagaaatatatacacaagttgcttgacaggttttaccttgaagattctaagaccaggaatacccctttgggatctcatntgaagttttcanagaagcaatcttcgcagacagatgaagaaaaatgctacatgttaagagtaccatatg

SEQ ID NO: 158776 - DNA, 349 bp, Glycine max
  unsure (1)..(349): unsure at all n locations
aaatatacgccgcgttttgttcgaacagatgttcttggttcgacttgccagctatgtttntgatgaacactgtgctttcaaggaattatctttaccttctacttttaaagtatgctgattccttgaaaatctttttattcagaatcaaatgaatgaggatattgctacgtaaatttaaattttcatgggtgcttagcatgacaggacaggaaatttctttctggtgtgagttgtgcgacattcaatgtagtcaatgatttcattccattttgggttctacacttctgtttttgagtactcttgctntatggcacacatcagttattcaatatgtatacattagttgtca

SEQ ID NO: 158777 - DNA, 451 bp, Glycine max
  unsure (1)..(451): unsure at all n locations
tgtcattctatttctctgttntctatgatgacttatatattatattctaccaagcagagcttcttgattctgtgatagcactgttatttggtgtgctattgacaactatgatcattattaagaagagtgagcacgtgagcgcacagtgaaatgattccagaagacaatagtattatccaatgatgacagtcctcacaaatatcaaccaaaatgtatgataaaataaggccgatatttacatgtattttacttgaaacaactgcatattttaaaacatcgaatttgaatatgggtccgcatcacctgatgggccatcacaacctcattatccncaactgagaactgcattattatgccaaatcatgtccaccatgagaacactttaaaagcttgccattgttcaaacacttctaagtaacaaaattaggatagcacgcacaacatgcatact

SEQ ID NO: 158778 - DNA, 392 bp, Glycine max
  unsure (1)..(392): unsure at all n locations
ctatgtggcggncgggcgatggtgcaagtcgactattcacatccacaaatcacacataaanttaccatccgcagttgcccaccttcgactgagctcacgtactcccacatagcccttatcctcattcttctcaacaccgggtccccatcaatccctccaagattccacaacatccaagcaattccatccaaacatcatgcactatcaaaaacaagaaaacagggcagaggcagaaaactctgcccaaaacacaaaccaataccacagctttccttactcacataccccagtaaaagtctcctcattccaattcgntcaccgttggatcgactcgaanattntactagaggtccctagtacataagtctacatnttgaccgctgggatctact

SEQ ID NO: 158779 - DNA, 470 bp, Glycine max
  unsure (1)..(470): unsure at all n locations
ntataaacataaactntagtgccacgttgaatagtctacgttacactaaaattgccaacaatgcacctcattaacagcgttgctctcaaatttaacggcaatgactattttacaatatttatgcaaagataaggactattttttacatttcaataggatagggactaatttgcaaaatgactacaaagacagggaccaaaattcctattcactcaaaataaatttaacacgtaatatgaggtagtatgggttgaagctcacaaaaacaagaggtttaaaatataaaatgtttacataaataacatgtgcttttattgaaataaagctgtgtattgcttatccttgcataaaaatatatcaaggagttcaaacatataaaattagtggatgcacaatataaaaatttaagataaatacatgtcacttatgttaatgagggggagcatttgtncaccctcatagatgaatgg

SEQ ID NO: 158780 - DNA, 360 bp, Glycine max
gcttatacagaagaaaaagacaaagagtgagttggctagttaaaagagaaaggaggcaagtccgagcaaaagggaggaggtgccatatccattggtaccaacaaagaaagacaaggaatgacatctggctcgtttccttcatatcttcaagaaattggagattactatgccctttggagaagctcttcaacaaatgtcgctgtactctaagtttttaaaagatatgctcacacggaagaataagtacattcacaatgaaaacatcattgtggaaggaaactgccatgttgtaattcaaaggattcttccacctatgcacaaagatcctgggagtgtgactattccatgtgtaatttgtga

SEQ ID NO: 158781 - DNA, 295 bp, Glycine max
tttttatgaaaacaagatgacttagatggttcaccttgcggttgtggaatcttaaccatagaagaatgaatctcaacatattcatctttagacacatgaggtggaaatatttttccaattgtaatcttaacattcgtttaatcagataatgcaattaagaactgcttgaactcacccttggcctttgctagcattactacttctttgggctattcttctttcttcctattgaggtcaatgatgggaaaccttggtcaaattctatcacggtagaatttgaactccattgactcct

SEQ ID NO: 158782 - DNA, 408 bp, Glycine max
  unsure (1)..(408): unsure at all n locations
actcaagcttactggacacttacatgtaaataatataaaactattgtgtttttaaatnattatttcaaagacaaacagcactgaagctagtgggcatccatacatatttaattagaattgcaactaaacgagtgtctcacatgatatgtcaagatcccttcaaaaattctcaagctgaggtttgagttccccttcacttgagatgagcctctctacagcttacacagaatttcaactagaggaaaattaacataaaatgatcttaatatttgaatgatggaaagaaaatagaataatgccacaaaggaagagtttcaaaacattgaagaaaaaagctagtttagatgcatacaatacaactaccagcagtaacaatgttgtaacagtaaacaacataccttagttatc

SEQ ID NO: 158783 - DNA, 511 bp, Glycine max
  unsure (1)..(511): unsure at all n locations
ggatctctaagcacctgagctgcagcttggttttctacagatggacatgcttgatgccttttcacactgnatccacttaaatttccatatgctggagaatcgntaatagtacaaaacaccatggcgcgtaacctgaacatctgttgcacatttgcatcccacgcatctaccctttgcttccacaattttttcaaatcttcaattaacggactaagatacacatcaatatcattctcgggttgccttggacccgcgatcatcatacacaggataatgtatttttgcaaaatacacaaccaggggggaggttgtaaatcatcagtaaaacaggccacaaactgtggttgttgcttaagctgccataaggattcattccatcataagcaagagcaagccttacgttccttggctcgtccccaaactctggatacaaatgatcaattgtcttccactgtggagaatcgacacgatgtcgcagtaatccatcacatttttggtcaactgaatgcca

SEQ ID NO: 158784 - DNA, 429 bp, Glycine max
  unsure (1)..(429): unsure at all n locations
ggaagatacttattgaaataaatggagaacaatataaataatggttgaataatgtgttaaaataaacaaaaactttttctcacatgataaacctttttcaaaaacaaagttgagcactgtttataaaaaagatatacaaaattatcgtcctaacatagaaaatgaattttcacaatatagatttttgaagagcttgtgtgtccgaggatgtatttaagagaaaacaagttaaatacataagaacaaaggtgtgaacacttttttaataccaattcgctctatctgtgagtgataatgttcatttctacatatctttgtagtagttttgagacacttatgtgatatcccttattcttttgagctttgtttgtgggcatttttcatcaagtttgaataaaatcttagttatataggattnttagttatatt

SEQ ID NO: 158785 - DNA, 432 bp, Glycine max
  unsure (1)..(432): unsure at all n locations
agctctgacttcctttgtgaatggaaccactctnttctaaaatgcacctataccgagttacttggttcaaatgatacattttcctttcctttgtttgcatactttgtatacccttatatattcttctcaatttgggccttgactttcccatgcaacttcttgatatattctactttaacttgcccagacttatctttaaattgagaaatgttaggtaaaggcaacaaatccaaaggagtcaaaggattaaaaccgtaaacaatntcaaagggtgacatctgagtagtactatgtacaaccctattataagcaaattcaacatgtggtaaacactcttcccaagtcttaagatttttgttaataatgactctaagaagagtagaaagagttctattaatcacctcagttttcccattggttgtgggatgacat

SEQ ID NO: 158786 - DNA, 236 bp, Glycine max
  unsure (1)..(236): unsure at all n locations
cgtgactcttggccatttctttatcacttgtcacttaacatgttgacttttgaaacaatctttcaaaacaagtcacttggagaactgtgacttttggaaatgtactttttgaaatcagatactggctatctattacccattaaggtgaaatggactcacatcaacagatgcgactcttaattgtaaatnttgaacatctaaacatttacgagcttctagtatccattacaagtatt

SEQ ID NO: 158787 - DNA, 461 bp, Glycine max
  unsure (1)..(461): unsure at all n locations
agctngcatgatttacatctncctctttctcaagctaattcttcttgatatcatcaaaattttcatgatttacattctccccctttttgatgatgacgacaaccacctgtaggttaggagcaacaacaaagaaaatatctatttgcatatagtttactcccccttggttttacaatgattacttatatgagacaattgaagatttcatatttttcatatataaaaagttgtctcataaaacaatagataattgttcttactattttatcttttatctttctctccccctttgtcaacattaaaaacaaatcatgaatagagaagagaaagatgttaccacttgttgcaatgtatgagaatcaagtgataccanaaggcattaaaacaatcattcaatattaatcaagcanaaacaagtacaataacacatcaatcaaacacaatcaatcatcaaatatttc

SEQ ID NO: 158788 - DNA, 396 bp, Glycine max
gatatccctttaaaaatcaataatttaattgaaatacgtatatcctcagaagtaaagtcactgtgtatgtaaattcaagacaaaaatcaaggaaccttgatctttcgagcatattgattgaacctggcaagtgcaccggatcgcgcaagtagtataaaacggtaagaaccgagtatcgaactctcagggaacttgtgttacttagtaaagctatatttagtgaataggtgtctagtatgaaaagatacgtgtggactatgaacaggtatgtaaactaattattaaaaaggaaaatcacgtgagaaatgatgtgtaaagacaagtagacaacgcgtcggtcttcctattaggtgtctgatgttataaagatattctctacttaataaagctcatatg

SEQ ID NO: 158789 - DNA, 421 bp, Glycine max
ggcctgtccgatgcagcagtaatgatggcccgagttatgttgtggaactgttaccaacccggaatgggttcaggcaaagacaatggtggcataactagcctgatgaatgccacaggaaatcgtgggaaatatggtttaggctatagatccactcaagccgatataaagagaagcatcgcgggaagaaagagcggtggtcaaagctcgcggttgagacaagaaagtgaaggaagcccgccctgtcacataagtaaaagctttataagcgcgggtttgggagacgaatgtcaagtggtcgcgatatacgaagatgatgatcccagtacattggatctggtacgaccatgccctactgatatccagctgggaaattggcgagtggatgaacgacccggcatttacgcaacgagcataatgtaaa

SEQ ID NO: 158790 - DNA, 365 bp, Glycine max
ctggtaatcgattaccaaaacattctaatcgattacaacttttttgaaattaattggaacgttgtaaattcaatttgaaaactgtttcaaatccattttgctactggtaatcaattacagcaatctggtaatcaattaccagagagtaaaaactctttggtaaacatgttttgagaaaaatccatgtgctacttagtttttgaaaaaaccttttcatacttatcttgattcttgaatcttgaatcttgattaagtcttctcttgattcttgaatcttcagtcttgaatcttgatcttgattcttggaagcttgatcctcgaatcttgaagtgttcttgactctatcttgaacatcttaaactcat

SEQ ID NO: 158791 - DNA, 277 bp, Glycine max
  unsure (1)..(277): unsure at all n locations
tattaaatagtgatgaaaggaactaaaccaagtctgtntattaaatattgatgaaaggaaccacaggccacagctcaagtccatgccaaacacccacacacacacatacacacacacacacacctactataataaagcataagcacccccgaaccccacaattccaaattagttacataaacaactttcgatgtcgatatttgtctgtaattgaaatttacattttgtatgttgttgtataaaggatcatgggttctccacctgcctcgcctcctcc

SEQ ID NO: 158792 - DNA, 384 bp, Glycine max
  unsure (1)..(384): unsure at all n locations
tccctctaanccgcaagggactaccttcggaggaaatggtcatctcattccaccaaggttgaatacatttaccttatactcattatttcctctaaatgatcctttagtaatatgccactgctgggcaccaatgttagggtaccaggaccatctctgacattgaacaattaattcttgttatattcctttatctaagttagcgtgccatggaatatgaattccagtcttgcctgtgcaaaacagtttagtgggtaggattattttatcaggagaagtgcactctcactgtaatattggatgagttgcaattgcactcatccttaactacgaatagtagcaattaactattcagacactgagacaataggcattaagcctttatct

SEQ ID NO: 158793 - DNA, 326 bp, Glycine max
ctttgtaacactctcctgttcctatctgggctccgttctttttcaaagagcgacgagcgaattctattattcatctcctatgatttgacgtgtccgtagcgaagtctaatgcgttcaatacatatactccaataaaaatgtatccatattccataccttaagatttttatgcttcttatgactgttttagattcaatttgaacagttgtaattgtttcgactatgaatggaaatcttatacaacaacccgcctatcttaaaatcctaaaacaagtaactattaaactacttatagttaacagcttttgacatcatatattcattta

SEQ ID NO: 158794 - DNA, 493 bp, Glycine max
  unsure (1)..(493): unsure at all n locations
agcttctactttgtgagttatgcagaaaggatgtttgtaaaatcatttattcagaagtaagtagtacattcactcttcaacaatcaacatatttagtctcaaatgatcgaatgagtactaatggacaaatgatttggagggactgatcatatggatttgttaaatcaaatttacatgaggtcaattaagcagtgaacttttgttctcttatcatcaaagtatttatgtttcaaatgcgacaaattaagaaagagacttactattatgaaacaagatagtatgttaccaaaacatatatataattaagttcagaatacaagttgttgcttataattaatcagtcaaccaacccacatagcctctttaatatgctggtgcacataggaagctctggtgatccctgcaagtgtagttctgtcactgggagacacatcatgcanttacaacattgttttggctcaagaagatacaatgcataactctgaccatcatg

SEQ ID NO: 158795 - DNA, 410 bp, Glycine max
taccagaagcgccaatcagtggactatgttgttggagattttgtctgatctatcatgaataaagatcgtttacccactcattaatacaactagcttattgctagcaaaatcgagtcatattcatagtcctgatgctttcaatgctaatttccttattgtggtaatgcttcttctgatgatgagatggctcttgatctgaggatgaatcttcttcaccctgaaaaggatcctgcagtgcaagattgaccaaagttgaccaaaaaaagtcatccgtgtccatttttttacaaaggagtacactctttcgaatggaaacgaccttctaaggagactgcattccctactagcaatgtgttgattgatatattagccaaattctattgctaaagggtaacatttgcaattttatc

SEQ ID NO: 158796 - DNA, 460 bp, Glycine max
  unsure (1)..(460): unsure at all n locations
agctttatattattctttaaaggcccgaatgttatgattgattaccaaatatgttttcttatagcaactaattaattaaaactcttattataagaaataatcttaaacccaaaaaactaatgttgaagtaaaatattcgatcatagaaaatataactaaatatatctatggggatagcgaaattaacacatgtatatgcatgaacctatatgagctaagggcataatctctggtacaggcaagtgcttgtctattaagtaattaagcataaagatatttnttggagttcactcgaactagtgggtcattaattaaattacatgatccaatctttaatcattacagagattgaattttgatagagatgacatccatgtgtcaactagctaggggttggtnttatatttagaaatagatagtaatagatactcaaatataaaatattatattgggtcactgg

SEQ ID NO: 158797 - DNA, 409 bp, Glycine max
  unsure (1)..(409): unsure at all n locations
atactaaggtggaacataattttttgggagactaatcgtgtaatctgaataaagaaggagccataaaaataaataatagaggaacctctaatttatcagagaagaataattgatattcttttgcatagagagaattaagaagaaagttgaaacatgtccatatatccattaactattgttggtacgacaagtatttccttaatacattcaaagttaagaagtgtttgggccgagagaatcattgatgtcatctttcataatggcttttctgggcttgtgggatcaagcattcacaaagaatcctcacaaaggggcaatacatcataaaaagaaaaataaacctctattaagatcataataaagaatttgatcactcagatatctccacattntttcaaacatatagtag

SEQ ID NO: 158798 - DNA, 427 bp, Glycine max
aatcgaaaacagcattgattgaataatgttgctacttttcatgaatattacaaaacatgcaatcactcaaaccgtgtcataactaagaggatcaatattaaaatttaatttgatctcttaattattaaaaggttcattttagtcctttaattatttaaaatgaaacaattatattttttttcatcatatccgttaattatctgacgaaaattgatactttttgtataagttgttaacactaggggtgttcgcagcttgatttggttctacttttcattgaaaaatcacccaaatcaaacttaaaaaatatatgcgattagatttggttcaatctttatttaaaataaaatctgaaccataccaatattttatgattcgacttttgccggtttactaacatattatctcattaaaacttatatacttt

SEQ ID NO: 158799 - DNA, 398 bp, Glycine max
  unsure (1)..(398): unsure at all n locations
agtacttaaattgctagaaacacgcctcatttatcccatttcagatagtgcttgggttagtctcgcgcacgtggttcccaagaaaggaggcatgacggtaatcaggaatgagaaaaatgatttaatttccacaagaaccgtcactagctagaggatgtgtattgattatagaaaattgaatgatgccaccataaaagatcactacccacttcccttcatggatcaaatggttgaaaggctggcagaacaatcattctattgctttntagatggatactctggctacaatcagattgttgtggattcaaatgaccaacaatagacnacattcacttgtcctttggtgttttgcctaacgcgatgccttccgctttgcatgctctgcacttttcatgatg

SEQ ID NO: 158800 - DNA, 419 bp, Glycine max
  unsure (1)..(419): unsure at all n locations
tgccgctggagctgccccattaactgccctatttatntatactggtgatccctacgctcttgaccttgacttgatagaacctctttttaagccgaagcatttaacttgatcccatgttatactaaagtgaaacaaaatcggtgcgaatcaaaactccgacatctatcatgggtggaatggataaatgcatgaagaaatgcatatgacatacatgcaatttatgaatatgagagcccggaaaattgtctccttcttagatacaacgtcttggggtagcacagtgcccgacgtatgtatttaagaaagtgacacggacccttcgttggtttgcttaagagaacggatccagacagaatccatgcatgatgtatatgcgaaaggcataacacggggatgtacatcatattcacaaacaaata

SEQ ID NO: 158801 - DNA, 370 bp, Glycine max
agcttaagctatgagttggtcacctttatctctatttatttgaagctcattaaagacatcatggcaaaatccagagatcatagcacccattgctttttcataatctattcccatttgctgaaaataaaataattgatcttcaccaattttggactgtcgcaacctacccttcggcgggagggcgacgcgagggctcacgggtgcgtcttccatgggaggaaaatgcgcggagtcgccaccagcgtttattcgagggaaacgtctgaaaaaccggaaaggtgtggtctacgaactctaagtgtgaaaggttcgggagttgtattttcgcacggggaatgtattagcaccccacacgtccgtcacaacggga

SEQ ID NO: 158802 - DNA, 381 bp, Glycine max
  unsure (1)..(381): unsure at all n locations
gtggacttcggcattacatttaatctcgatctattgtcgataagtacctttgcgacaacgcggtccatacatctcaccgacacatgtagagccttgttgtgtcccctcccctcaacgggaatctcttcttccgcaaacgtgatgtagttgttggctggtatatgattaacgattccttcgaaaccctccactgagatatcatgtgctacatgcacatcgttaagtacctttatcaacagcgcacgatgaggctcggagtttatgagtagttcaagcaaagagatccttgctggaggcttgtncagttgctctactaccttaaactcgctttgttggatgaggcggaggaactcatgggcctcttccaaagtcactgctttt

SEQ ID NO: 158803 - DNA, 478 bp, Glycine max
  unsure (1)..(478): unsure at all n locations
agctngcatttggaattgcgaaagccccatttatcattatgattagtacctgacatctcaaacaaacaaatcaaacgcaacaagacaattatagttgttgtttgaatacctcacccactcaagtgtatcacacaattatggcttttctctaatgaaacactcttaccttttaccactctaatatcccttgagttcttaggcaattcaagagattatggccacaacaaagaacaattcaccaatatgtgtaaggtaaggctagagagacaaggaaaaggttaaccaagaaaaaggctaacaatgtttntaggcacaaatgaaggaaataaaattcataatttaggaattcaagtaacaatccttcatgcaaccaatatattaccttaaagagattattttatagtcttcaacatgaaccattcacccgattttttttttttaatttgctatacaaatttgctctttttttttcttttat

SEQ ID NO: 158804 - DNA, 391 bp, Glycine max
  unsure (1)..(391): unsure at all n locations
tganagagggatnttcagatctgaaagctgtggctctgtttaaagctgtagaagttaattgctccccttttggccgttcagtgtgaaaaatgcctctactttcatcttctgaaaaattgaacatgacatgattaatttataaaaaattggcctccgaaagctaattggatccacagaataatcttatcatgacatatacataccatctaattcatgcttgacaaattttgccttttgagatttaatgcttctaatttggacatgccgatgcaagttcaccacattgggcctttntttaacatttgtagttagtccagccttcattttcttggtaggttgaggagaagacactgtggatttctctctaatcttttggcatgagaatttctca

SEQ ID NO: 158805 - DNA, 348 bp, Glycine max
tttggatcactttgttttaggcatatcctagatcagctaagaaggaagctcgatgataaaggtgaacaaatgatcttactcggatatcactcaactggaggctataagctgtttgatccgaagagttagcagataataatcagcagggatgtggtatttgatgaatctagaagctggaactgggagcagaatactgaaatgaagggaccttcaataatgataaggtcagaagaggaagaaacaagtgaagggaatggttataccactcaaagagaagtgagacctcagagaaatgcacccaaaccagctagatttcaacggtttgagatgttgtctgatgctgatgta

SEQ ID NO: 158806 - DNA, 413 bp, Glycine max
  unsure (1)..(413): unsure at all n locations
tgtgcaaatcaagtcactcttacatcttatctctagcatgtatagtttgttggnctcatactttgtcacgggaagccggaaagtccatatcaccttcttaattgttcacatggggcactacgccccacatgcgcaagtaagaagagatgattttccgggctctcgtgtcccgtaaatgcattcatatcatgcaccacatcagcatctcttcataacatcataatggacatatcctgcatttgtccgttatgatattctagcctcacattttgcatgagtcatggtatcatcatgcatatgcgtccaacaaactttttgatctgcgaacttgcataccatttgttatcatgtatgctcattcttgcatctttctctacacaaacaaataaggggaagcgtgagactttacacta

SEQ ID NO: 158807 - DNA, 310 bp, Glycine max
  unsure (1)..(310): unsure at all n locations
cttgcgttgcaaaatagttaagagatgtgtccaacaatttcttatttgagactgaatagtattctatgccagatgggggaactggaatatctccttgcaacatgttgaagctaagggtcatgtattgcatggtctcccattataacgagggataccccaccgatgttataatgttatgagaaaggtccaaaaaagacaaagtatctttccatgtgctattaaaccattttggagtcctgtcatgaatttggntccttgatatatctcaaaattcaagatattttagcccactaaggagttttgggacact

SEQ ID NO: 158808 - DNA, 204 bp, Glycine max
cttactcactgattccattatttctatttctttgacgagttattcatgccttttcagatttacaatgtcgcaaggacaagctggtccgcttgcttggaaatggtgccgttatacagtcttgaatgaccgagacaaggtggttccataaccacatggtgacgccgaacaaactcaaacctgggaatcacaggtgaagatcccttt

SEQ ID NO: 158809 - DNA, 392 bp, Glycine max
cgacaataactttttactcggatgtctcgattgagcccgtaatatatcggaacgctcgaaattgaatgtcaaagctctgagcaaatttaaatgacaataactttctactcggatgtctgattgagtcccttaatatatcgagacgctcgaaatggaatatcgaagctctgagcaaattcaaacgacaataactttttactccgatgtctgaatgagccccgtaatatatcgagacgctcgaaattgaataccgaagctctgataaaattcccacgacaataacttcttactaggacgtctcgatgaggcctgagaatatcgagacgctccaactagaataccgtagctctgagcataatcacacgacaataactctttactctgacggctga

SEQ ID NO: 158810 - DNA, 391 bp, Glycine max
  unsure (1)..(391): unsure at all n locations
ctggcctagggttttcgttcgagcacaaccgaagttgtgtttctgccgacaccagcatgtttntaattgcttggaagggaaaacgtttgcgaacctcgggaaaaaaatttgaatcaccgatacttatcgaaaaaaatgttagccgacgtcggtcaggaaagatgaccgatcgaggtttaaaaaagaagcatcaccgaatgacgccgatcgaacatttctaatagacatcatccaaataatattcatagatataatagaaattacaattgccgacatcggtcattgtaaagccgcgactgatatttctcagaagacattgcgcaattntntttntacaaacgctgaccgataatattnntttttacggtagaggtagcgttttagttcggtg

SEQ ID NO: 158811 - DNA, 362 bp, Glycine max
  unsure (1)..(362): unsure at all n locations
gaatcagaaatctgcacatgttgcaagagtttgtggtctatgttcttctgcagatcaccatacagatctctgtccttctttgcagcaatctggagtcaatgagcaacctgaagcttatgctgcaaacatttataatagacctcctcagcagcaaaaccaacaacagcagaataattatgacctttcaagcaacagatacaatccaggttggaggaatcatccaaatctgagatggacaagtcctccacaacaacaacagcctatccctcctttccagaatgttgctggtccaagcaagccatatgttcctnctccaatgcagcaacagcagcagcagtcacaacaaagacaacaagcaactg

SEQ ID NO: 158812 - DNA, 453 bp, Glycine max
  unsure (1)..(453): unsure at all n locations
ntcttaagaggcttctntgagaagctaacgctntaactactaacacccttttaataactaaattcacctccttgaaaataattacggataaagtaacacaacaaataatcaaacatcaaacataattactaataataaataaatatatatatcagggtgttacaacaactacatgcagtgcaacctcgatcaatacataatgcaggatgcaacaattgtggaggcactcataagttagatgcatgcatgcttcaaaatgacacaaccaatgaggttaactacatgggaagtcagaatcgtcagggattccagcaaagcggaccactaggcttctatcagaaaggcaacctttcacagggccaaggatggagatcttatcaagggaataatatcaaccaagggggaccatcctatcangataaagaacgttacttcaggcggttccttgacata

SEQ ID NO: 158813 - DNA, 387 bp, Glycine max
  unsure (1)..(387): unsure at all n locations
attccattatagaacactatttatatgtctactatcattggtattatttctttctttggcattaagggaaacacttgggctaccagatccctncacctttgggcgtattctttaaaagattcgtgccccttttttgcacatgttctatagtggcatcttatctgaagacattatactgacactgcctaacgaagacaaccattatgtccttccaagaatggactcaggaaggttccaagttagtgtaccaggtaacagctaccccagtaagactttcttggaaggaatgtatcatcaattcctcatcttttgcatatgccaccatcttncgacaatacatctttagatggttcttggggcaagtagtccctttgtactttgcaaagt

SEQ ID NO: 158814 - DNA, 476 bp, Glycine max
  unsure (1)..(476): unsure at all n locations
ggttgaggacanattctcattatacaaagcttgcaggatctagttcagtagaggccaattatgagtgtagagtagttcattgagaaggtggcctggcttggagccgaaccttcttttgtgggggataatgaaagttttacagcccaggcacctcaacagcatgagccagaaccagaaaacgatcactcatctgaagccaccatccctggagcagttgattttgcaaaaagaagattagagacgagatccaatgaggctgctcatcctggacaagtgccagcatcagctgatgcaccatttccaggagtggatccatcttcacctcaacatgcagcagactcttccactcctgtcttagagatacatgagggccagacagtatttattattataatcttgggtttcgtacagtattttctttatgtctacatatacaactagttntatttacgggtcanntagttactcatcctaaa

SEQ ID NO: 158815 - DNA, 401 bp, Glycine max
ttttggtataatactctgggcttacaagcttctgagggtgccctattgtgtgctgctttttttttttaggcaaattcccttcccaaattaaagacttatgataacttgaaacccttatgctctcttagaaccctaaaacaaggtcaaggatatcaaatttaagcttaggggtttattcaaacgaatcattattactcttggctcaacaggggtgcaagggataaattcatcacaggttggctctttggctgagtggctaaaataaaaagaaacatggccgcgatcatatccaccttatgtaaataatctaacagtctaagaatgatgagaaattaagaatttaaaaacagacgttctctcataattaagttcacatagctcatcacgacaagataaagtta

SEQ ID NO: 158816 - DNA, 474 bp, Glycine max
  unsure (1)..(474): unsure at all n locations
taaggtgcaaggtctaattgatgcgggctggctgaaattttatgagaatcacgtgtatatcttgacattgacaagagatgccacacatggggaaattttgaaagctgttgttagatgtctctaatgactcatcaggattttcaagtttataccattattgtaaaccacagttacaatgctaaataaaatggataaatttgatatctttgtccctcatcctctcacaaacacatctttgcttattcaactttcaccggaatgtgggtgcaagccattggtctgtttgctcaagcgacctgcgctcttgagtttggacttccaagatcgttcaatcagaaattactcgtgctacacatttggtgagggtgtcgtaaaacgacaagtaaagcaaaaataatgttcaaaataataaaaaataaaagcattcgattgactgtgtnttcaagtaaaaatatatacattcatgtgacctca

SEQ ID NO: 158817 - DNA, 444 bp, Glycine max
  unsure (1)..(444): unsure at all n locations
agcttatactctcctaaagaagctgaagttgttatatataagtcaaagaatgtagttcaaacaaaaaagcacgaaacacagaaagattccgcaagagataactcaccgttggctcccaaggcatcattgaagaagtcttcccgantttttccagcatcattcttctcttttactgcagatgagactgattacacaccagcatcagtttttcatggtcttgtggagtctgcacagaagcaactacccaagctgattgttgggttattgttaattggagcacggtgtgtatgaactttctttatttgatccttttcttgctgttatttttatttcaacctttctacaaacaattacatcatatggctggcacacatatttattatggctaggagtaaaacatatggaatactagaatgataaattttagactttgtgtgacatgat

SEQ ID NO: 158818 - DNA, 399 bp, Glycine max
  unsure (1)..(399): unsure at all n locations
ttgaanagagaagtactcttctcattcatctctccacagatcaaggtaatctaatcttaccatgatagatgaaggtcaaggaatgggcattatgaaaaaacgaagatatttttataacctttttgagcctctactcacttctttcctgctttatctttctctgtttctaacgtttgtcattcttaactaaaaactaacattataagcattgaaatttctgaatttttttgcttatcccttatccatttttagcaatacaaagggatgaatcatgtttggggttaaactttctttcttgattaatatgtcgcgtttactatccatatccatgttcatttacactttgacttgtatcaacattctactatatgtttgatctcatcactttatgaacgggag

SEQ ID NO: 158819 - DNA, 288 bp, Glycine max
  unsure (1)..(288): unsure at all n locations
ttcaatttgggcaaaattggacaagggcaagtgtgatttcgaaaatttgcactattatgcagagttttgcttgtgaaatgtgcagcanaattttggctttggcatgcagaaaatgatgtgtatttgctggttgtggaaagagtagtacagattgggttctggacgctttctatgagatcccaacggtcaaaatttagaattatgtactanggacctccagtaaaatttttgagtcgatccaacggtgaatgaattggaacaaaaagaatgtgattggggtatttgaat

SEQ ID NO: 158820 - DNA, 366 bp, Glycine max
  unsure (1)..(366): unsure at all n locations
tgacaaacttagacatcaagtgatcatgaatttctgactatatggggagtaaacggatgcacattntatctatatacaattgttcgttgctcgcttgaatcttgatttcacgtattgtattgtcatcatcaaaaagggggagatcgtggatgcaatcggttttgatgctttgatgacgatcatgatgatgtgttgcaattgatgcaaatgggcttttccagattaaaattcaagacaatacttcaagattacaacgtccaacatcgtagatgatcactagaatattacgaagggaattcctaattgaattagcaaaggtttggccaacgaatttaaaatataaagtgtttctcaaaggttgtactc

SEQ ID NO: 158821 - DNA, 444 bp, Glycine max
  unsure (1)..(444): unsure at all n locations
agctnggtacatatagtctgaatcttgggttctcttaangacttagtcaaaatatccgctggctgatcattagaaccaatgaactcagtaacaatctccttggacagaagcttctctcgaatgaaatgacaatcaatctctatatgcttggtcctctcatggaagactgggtttgaggcaatatgaagagcagcctaattatcacaatacaacttcatttgcaactcttcacaaaacctcaattcttgaagaaattgtttgatccacatgagctcacatgtaatgatagccatagatcgatactcggcttctgcactggaccgagcgacaatagtttgtttcttgcttttccaagagattagatttccaccaatgaagacacaataacctgatgtagatctcctattcatgggacattcagcccaatcagcatcacaatatcat

SEQ ID NO: 158822 - DNA, 383 bp, Glycine max
tccttaagaagattcctaaagaagctagagcttatctacatatacctctctaatagctaagttcacctccttgagatgagaagctagagcttagctacacaccccctataatagctaagctcacccccatgacaaaatacatgaaaatacaaaaaaaatccctactacaaagactactcaaaatgcctcgaaatacaaggctaaaaccctatactgctagaatggccaaaatacaaggcccaaacgaaggaaaaacctattctaatatttataaagataagcgggctcatacttagcccatgggctcaaaatctaccctaaggctcatgagaaccctatggccttcccttggatctctggcccaatctacttagagtcttcta

SEQ ID NO: 158823 - DNA, 66 bp, Glycine max
aaaatctattagacacaccatgcaaacatatatatatctatatatataaatacatacatatatgtc

SEQ ID NO: 158824 - DNA, 339 bp, Glycine max
agctttcttcttttataaaatgagaagttctgaactcatcacgttatctaaaaaaccttgcggtggcatactgaccgttgtttatttctttaggaatttcatcataactaagaaagcacaaaggcacccctataacactcgatccacaaaaatggataatgaagagggcgtgcaggaacagatgaaggccgatctatcggccttaaaagatcaaatggattccatctcggaggtcatgttaaaactccagaaaactatagaggataaagccacggcaactgcctccagtacagttagggaagcggagccggtgcttgcacccgccttaaatctgggctg

SEQ ID NO: 158825 - DNA, 400 bp, Glycine max
  unsure (1)..(400): unsure at all n locations
tgataaaagagcatcaccaggcattnttataggctatagctctgttagcaaagcctataaaatttttcagccacaaactggaagcattgttgttagcagagatgttcacttcatataagatgaagagtggaactgggatgaggtaaagaagaaggatcaaactgtggaagacctacaacttaactctcttgcttcaagaaccgaagaagaagaggattggcagagtgaattggtagacgatgcccctgcaagaggaactagaccactctctgatatttatgagaggtgcaatattgccgtttgtgaacctgtagattttggagcagcanagaaagatcaaaattggatggctgccatgaacgaggaatngtctatgattgagaaaaacacaacatgggaa

SEQ ID NO: 158826 - DNA, 446 bp, Glycine max
  unsure (1)..(446): unsure at all n locations
agcttttcagttactgaagagccctcattcttctctttaaggcgcgtaaactttctcctagcgacctccagatcctcttccactcttttcttggcaaacctagatataaaaagacaaaaaggttcacaacttctgtgtaccaaatcattcgaagaaaaantttgtacacattattacagactaaatacctttctttctcaagttctacttgtaactccatgcacgtcactcgattactaccaattttagattgcatttccaccactgtatccctaacctgttgagattgtcttctaacatcggacagccttctttgtgtattttccaaagtgacggaactttgaagcttatcctctgcaagtntttgaagctgatccaaacaaaacttcaactgcataccaagtatggataagtaaaattccaaagtcatatctgaactgcaactg

SEQ ID NO: 158827 - DNA, 384 bp, Glycine max
  unsure (1)..(384): unsure at all n locations
tgccgccacggagttntccgactatgctcttgtgtggtggtacaagctacaaaaggagagagcaagaaatgaagagccaatggttgatacatggacggagatgaaaaagatcatgaggaagcggtatgtgccggctagttactcaagggacttgaaattcaagctccaaaaactaacccaaggcaacaagggggttgaggagtatttcaaggaaatggatgtgctcatgattcaagcaaatattgaagaagatgaggaggtaactatggctcgatttcttaatgggttgactaatgatatccgtgatattgttgagctgcacgaagttggttgaaatggatgaattgcttcacanagcaatccaagtggagcaaacaataaaaa

SEQ ID NO: 158828 - DNA, 283 bp, Glycine max
  unsure (1)..(283): unsure at all n locations
taagcgagtctattctntgtgatacacatatgactcgcgatagtatagaactntatctgtgattcactccgtgagtgttactaagaatctctggctctatatcaacctttgtcttaaaaccataagcggattagcgacacatcaatactcgggcgtgctcagattataggaagtctaatgattttgccatttacggccttgagaaaacttgtcagtcatattaaagcattctcattgctcttcattaacatattaacagatatcacagtccattgttgtacat

SEQ ID NO: 158829 - DNA, 428 bp, Glycine max
tgcagcttttactctttaccctgctatgtattggcccctctatgccttggattgggtcttgggcttccttctgggcttaagtctggtctttgatatcctcatcacttattcacaaaggaccctaaggttgggtaccttaatttctttttctggggtaggaactgagactgtttgtgaatccttgtaagaattctatatgcataataaaaatctaattcagggtggattacataattggattaccttctcaacagaaaaattggtgtacatcttctcttgatcttatcttttgtttaatattctggtcttgatcaatttactgaacgttaaagaaaatatctttttgaagaaaaaaaatttacaaaggattttgtgcaaaggttgattgataaatatgtgtttatcaaacgtttgtgatatgatccttg

SEQ ID NO: 158830 - DNA, 406 bp, Glycine max
tatgcacgttcgaaagtcttggaggaaagaggcttgcctctgctgttgtggatgatttctccagatttacctgcgtaacatttatcatagagaaatcacaaacctttgaagtattcaaagagttgagtctaacactcccaagagagaaagactgtgtcatcaagagaatcaggagtgaccatggcagagaatttcaaaacagtcggctcactgaattctgcacatctgaaggcatcactcatgagttctctgcagccattacaccccaacagaatgggatacgtgagaggaagaacaggactatgctagacgctgcttcggtcatgcttcatgccaaagaactttcctatgatctctgggctgaagccatgaccacatcatgctacatccacaacatagtcacact

SEQ ID NO: 158831 - DNA, 308 bp, Glycine max
  unsure (1)..(308): unsure at all n locations
attgcttttgaataaatcaaaagatgtcactcttcaaatggtttttttttttttttactttttgaaattggttttaagtttttctaaaaggtataactcttctaaatggtcctcttgaccagacattaagagtctataaaaaccaggctttgttttgcatttaaacaacccaataaatttaatacaatcctttacaagccttgaatctctttgagcttcttcttcttctttgtgccaaaagctttccaaagttttctgggtttctaaaccttgaaactngtgctattcattcttttcatctcttctct

SEQ ID NO: 158832 - DNA, 470 bp, Glycine max
  unsure (1)..(470): unsure at all n locations
tgatgttattaaagggcttgcacctacctctggcagtaacagtgacaattatgatcataagtacgtttacaacttgacatgaaattttacttgagattntatagcttctgatacttggtttacttggacataacagtggggatcaattgatggaagatgaatctcaaattgctctaaggagaaggaagaaacttgttcttgatggtgatttggaaagacaaatcaaagatctccatgagaagtaggtttgagcagatcaaacttttgtctgaactttggagcatgatttaaattagagccttgtcgaaaagaaattcagtcttttttattttattttttttacatcattggtacaaacattcttaaaaggagtgagccagatagatcaattcatagcttttcaatatttcgttgaacttcattatttggactgtatttcaatacatagcttttcttgtactaattaacct

SEQ ID NO: 158833 - DNA, 392 bp, Glycine max
  unsure (1)..(392): unsure at all n locations
tgactggcaacannatttgttagtcagagggaatgattatttatgcccgtaaagaattgtgtagtttgtatgcattgaacttgattttcttttatcccctttaggcatttgtataccattctcattcttttaaaagcttctattgcatgtcttttctctttttaaaaatgaatgtagaatttccactgctagttggactgatgaaaagaactttgatcaatttcttaatggactgctcttttgggatttcatttttcacatacgtcaatgtcttagatgtgatgaagggttcngaaaatattgtttcacatgtttccagctgaagttgctgagtcatgagtgggccagctgggcctgtaatggtagcatacgaaaatgatgataatagtgat

SEQ ID NO: 158834 - DNA, 425 bp, Glycine max
tccattattgttggttttgttaataacaacatatataaagtgttaaagattgaaagagaacgtagaggaaattgagactgcaaagacctacttttattcagatatgaagcaatatatttataaacataataacaaaagaaaaataactactaacagatagataaaatcactaactgatcatgcctaaagattaggactaaaacaactttatcctatcagtcaacatgacttttattttttgtaaaaaatagcgtaaaaatttgatctactatagtttgttagacagttccaacagtcacatcttcaacactcctccttgactttggaattgcaaactccaagcttttgtctcaagtattcaaatccggcttttggaattgccttggttagaatgtcaactctttgattctctattttgtagtaca

SEQ ID NO: 158835 - DNA, 418 bp, Glycine max
  unsure (1)..(418): unsure at all n locations
gcttcacagcggagaggaaataacacctgctctttttaatgcaattcaagattccacgggtgctattattgtgctttctgaaaactatgctttttcctcattttgtttagatgaacttgtaaccatctttcactgcaagagggaagggctgttggttataccggtcttttacaaagtaaatccttcttatgtcagacaccataaaggtagttatggagaagcaatgactaagcatcaggaaaggttcaaagataagatggagaagctgcacgaatggaggatggctttgaaacaagtaactgacttgtctggctctcatttcaaagatgggtatacaatcatactaatatattttactctatgggttttattggattacgttttacttgtctattgatttaactacgtanatttaaat

SEQ ID NO: 158836 - DNA, 410 bp, Glycine max
  unsure (1)..(410): unsure at all n locations
tctnttcgagccagaatatgctggtaatctgagggaaaagataccctctaaatcttcccttcaaattccttggtcttggttgccaggtgctctttgccttcttcaagaggtacacttgacgtgtgtttagtccttctttgatattttttctaatggttcacttgtttacatttttctatcttttgctgaaatattntgactgttgcttttctattccttttgttcaggttggagaatcaaagcttgtgctggagattggacagacaagtattcggcatcaaaatgccaagccatatactgatgacctgattctttccatggcattagctgaggtaagacctgtggacagatatgttggaaaattactcccttgattagcagtcttgttatttacccttntcttaccattg

SEQ ID NO: 158837 - DNA, 357 bp, Glycine max
tcgaacgagaacaacactgcactcggtagtccgattgttttcgtgaatatatcgagatgctcgaaatgtaaaaccgaggctcgtacgaaattccaacagacattaacatttcactcggaagcccgattgagtcccgttatatatcgagacgatggatatttaaaaccgaagctcgcagccaattctaacgacaataacctttcactcggaagtccgattgagtcccgtagtatatcgagacgctcgaaatatgaaaccgaagctcgtatgaaattataacgagagtaacaattcactcagaagaacgagtgagtcccggactatatcgagacgctccaaatttaagcgcgagctcgg

SEQ ID NO: 158838 - DNA, 371 bp, Glycine max
  unsure (1)..(371): unsure at all n locations
atcttaagtcacctgcagcatgcagctttacttatgggagggcgggctttctttatcttcttgtctccaacgcgaactttgaccattgttcttccttcccgtaatgcttcttttcatgtctgcctgagtgggcttatagcctaaaccatacttcccacgatttccttgagtatttatcaggctagttatgcccgcgttggtttttcctaaacccatcccgggttcaaaaccgttccccaacataactcgggccatcattaccgctgcatcggacagacaaggttgcccaaagagggagtccacggaggaaatgctgaccacctcaaaagactggaaagcagtntctaacgattcttctgccggcttcacat

SEQ ID NO: 158839 - DNA, 471 bp, Glycine max
  unsure (1)..(471): unsure at all n locations
ngactctggcgggttgatttagccttagtttcactttagttattagtaaattcaatttagaatgagaaatcccaaagagaaaacgtccgattgatttttttcgcttcatttttactaaaaggtattttttgactattatattattattttacctctcttttgatttccaacgtggttacggcacgaccgaacggntgtaattcattttaacagaaattaatagatattacaaatcaaatgatcggtggaaatttattttattttttgattaggcgagaaatgacttaaataaatgactgaagcacgtcaaaagggggtaccgaaagtaaatgataacgagaataaaagtacatgaaacaaatgaggaccaccacgggtacatagaatgaattgaaaagctcggtttgnggtacttaccagttgaagaccgaagaaaacgaagaacgaacgatgaatgtcgaagaacggctg

SEQ ID NO: 158840 - DNA, 415 bp, Glycine max
  unsure (1)..(415): unsure at all n locations
agcttntagccaaatggacttaccttgaatttattccttcgataagccctttgagccttggttccctttccttggtttgaagctcactacaagccttaagtgaaaaaccatgatatcaccatatccttaaggaattttggagctctggaattgtcttgggaatatgtgtggggggtttttgtttcattggataacatgttttgttggctatgcttcatgatgtattttgggccatacttgatgtacattgtatattggntaaatgttggacatgctgaatgagatgttgtttctcaaaggcttcagagcacaattaaaaaatcgaacagaaaaagaaaagcattacagtggagtgaataagatcttatatggcaaaagaatgatgagactctcggntctactctttatggttaaa

SEQ ID NO: 158841 - DNA, 332 bp, Glycine max
  unsure (1)..(332): unsure at all n locations
cttatcctatctttgcaaatctttccgggaactcnctcagtgtatatgttccgtttgatntagtcacttgagccatttggagtgacgctaatggagccgtttgacgcttaatcaatccattgaaattctagggtttgtcccccccttttttttgtttaaacacatcgacgggtaagaacttttgatctgcccctatgttcacttgaggctcatgcacgatgcccctcattgccccagtgtaaggctttgaggtaccaatcgttgtctttcgtcatgaccttgtagatgggaacatattgggtgggaacttctaatctgaccctatgttcact

SEQ ID NO: 158842 - DNA, 346 bp, Glycine max
  unsure (1)..(346): unsure at all n locations
agcttgcctcaatgacaccgacactcatnttttgttagccaagactgnggntaatcttgaacgacccttgttgagttggtggcttatacagagctcccgtgtgagaagcaacagaatttcttcgtttgtcaaatacagcaaaaactgtttacgcttaaattgttcctctatttaccttcgtcgttgtgtttctctatgaactccacaatcttcttgaatatctgctggcgcctgtccttctctgcacttgcagcgtatacacggtcgtgcatggccatccactcttcatgctgtgtggcaatggaagactcaaagagagtgcgtgaccaggcacgacatatgcatg

SEQ ID NO: 158843 - DNA, 430 bp, Glycine max
agcttggattccttgttcacttcatctctttttttctcgaggaaatatcacccattgctacaagaaagctaaacacagattctatggtgagttcaatattcaaacttcaaatattgatgtagaaaccaaagcaaaacaataatggtgaaagcaaacaaaacacacctactcgtatctcttatattcaacaagttggcgattagctcttgtagagttatgttcttatccttataagactaatattgtggcaattagcttttgtatagagttatgttcttatcctctccccaggcaatgctggaaagctagtaatccactacattggataatgttgcaggtaaatagcacatgtcacatggcaattcttcccaaaattcaaaagaaaaaggtagagaagaataagaaaaggtgtgaagaagaacatgacata

SEQ ID NO: 158844 - DNA, 423 bp, Glycine max
cgacatcggttttggaaagaactgatgttaatataacatattacatcgacttctattattcaagtcgatgttattctttaggattctgtctaatatgctgtgtattcttttaataaccacaaaattaacctacaaattttaatagcagaaccacacaacatataattttcattctgttttaaaacaatttttttgccataacattcatcataaatttattatttactatgaattaaaagaatatttaatgttgaggagacatggattgtaaaaaatgtaaagtaactaaactacaattacgagattgcctatacatcctacgtttgatttttaactttcaaataatatatgttccactcgatgcagagcgccttccatctttgtggctctaatggtctaacatcattgcaatattgcatgata

SEQ ID NO: 158845 - DNA, 411 bp, Glycine max
  unsure (1)..(411): unsure at all n locations
agcttnctgggggacatcttgacttgctntcttatctgacattcaccacagattctgccttcttctattttcagattgggaatgcctctaacagcacttttgtcaaggattatcttcatgcctcttaagtgcagatgtccaaacctttgatgccatattctgacttcatcttctttggaggatagacatgtggaggagtagctggtttcttggggtgtccataggtaacaattgtcctttgatctgctgcccttcattagaacttcactcttctcatttgtcaccaagcattctgactttgtgaagtttacattgaatccttcatcacacagttgactgatgctgatcaagtttgcagtcagtcccttcaccagcagtactttggtcagactangaagtccatcatgagct

SEQ ID NO: 158846 - DNA, 317 bp, Glycine max
tcagaccaaagcaactcacaatctacgtatctaaacccctcaatctaatggactctcaaggtttgagaagtgaaaatgagaatggggtaaatttggagcaaactctcacctcacacaagtctatatcatcaatctaaactcgctcaaactggttttatgacgaaaactctaccaaatcaaaatttgactcctcaacacccaattttaccctataaatggctcttgttttcactttggtcactcatattcctcatttgcacagtctacactttctcataagttctaaatgacatttccaactaggattaacttccttt

SEQ ID NO: 158847 - DNA, 300 bp, Glycine max
  unsure (1)..(300): unsure at all n locations
gtgaagnagaaaaggggtcagccccttatgcacttctctctctctcgaaattgctgaggaaaattagttccgtgaagaaaatccaagccgaggcgcttccgtaacgtttccgtaacgtttccgtgagtaattacgcgaagattctcgaccgttcttcaagaatcatcggtcgttcttcggtntcttcagtcttcaatgggtgagtacctcaaaccgagcttttcaattcattctatgtacccgtggggggccacattttggttcatgtatttntattctcggntccatatacattttata

SEQ ID NO: 158848 - DNA, 405 bp, Glycine max
  unsure (1)..(405): unsure at all n locations
gtcagcaaatgtcgnacgaataatcatctcacagcagagtattagcaagactatccatcatatctcccaggaccgcatacgcacgacaatcaagagagaaagaagtcctcccaaaaatgaagtttcaaagtcccactcgtagccacgcacttcacgaccgcgaaaagggcctcctttcgcgatttggggcacatatgatggccacaggatgaagctctgctgcggagcttctatggagaatgaggaagagaaatatggcgacgtgagggagagtcgcgttatctgagtcgtggggcccagtcttcagagctgcgatatatatatgaaacgctggaataaaccccgagcgtggtcagaggtggttttgtaaatctaagtcgacgccaacaagattttggacaatat

SEQ ID NO: 158849 - DNA, 386 bp, Glycine max
  unsure (1)..(386): unsure at all n locations
agcttgtccaataaacttgtgagatgttctgtatgtanggatgaaggcctgaaccacattaaacaaatttgaggtcgtggatgtacgcatgagagtctgaaccacgttaacaatataaattgtgtggatgtagggatgaggacacgaaccacattaaataaatttgtgatctttttctatttaatcttatggtgttgccttttgttttgtggtgtgttttctcatcaatatgaataaagagatgtctgtgttttcccacaacagacgagagagaggggaaaataaaaggacaagtggcatgagaggagtgaataaaacggattctgctactgattgagaagagcacacataaaggacgaggaatggaatggcaatggatatttcac

SEQ ID NO: 158850 - DNA, 395 bp, Glycine max
cgtcaatgttgcgcaacggatatgcgtccttggggcatgctcttgtgaggtcggcgtagtcagattcagtgcacatatgccattctctattggccttctttaccatgataatattggccaaccacgtcgagtatctgacctttgtgataaattgagctttgagtaacttgtcaatctcttctctaactgcctttcgtcattcttctcccatctttctcttattctatgagactggtttggcctgacggcatatggccaatctgaggcatatgatgctacgatggatacctcgcatattagatggttgccatgcaataaatacgcattcctttgtaagacttcaactatatgtctttattcatgattagtgacggccctactgagttgagtgcatt

SEQ ID NO: 158851 - DNA, 389 bp, Glycine max
  unsure (1)..(389): unsure at all n locations
tggcttattccctagaggatggcgtcgcctcttaccttttctcctttgtcttccactgcatatacatggtggaaaatcaccattaaaggacctcattgaagctcaaagatccagtctccatagaagccccacaagcaagcttccatcacattccctgcttaaacatctcataactttcctaataacatcttcattactatatgtgtgaatctctctttcatatantatgatagttcatgtttattcattctaaacaattcatattcatgagttagggtatctattctagatcttgttatatcagntgttccttcatgggttacttgtaatgtatcccacactttcttttgcatacttgnnggttgatactctaaaatattcatccatgc

SEQ ID NO: 158852 - DNA, 362 bp, Glycine max
ctttatgcaacaatcttcatcatcacctgcacaagagactgatattgttcttctcttcaaagggaagacacgtagccaagacaacgaggaggtagaattgaagagaaatagtgtcaaatatttcagatttggcagatcaggtcatatcaaaagaaattgcagaactagactctttaaagtgaatgcaacatacgaagaaaatgaagatgactcatttgagtcacttatatgggaccaatgcttcaccatcgaggataggaggattggacagaaggagatactagtaaattacctagattaccagagagaatggatcctagactctagttgctcacatcatgtaatacgaaggggtgggaagc

SEQ ID NO: 158853 - DNA, 321 bp, Glycine max
atttaaatctatcatgctaaatatttacttttcacaatcgatatgaaaccatttgaatatgagtgtttatattgatattttaaaatcgtcttagattcttttatgtattatataaaaaatactacaaacatgataattctaatctggatgtatgcgaaaaaaaaagaaaaaccattttagaatgtataggatttaggaaaatctagttgtgggaaccatgaacatgataatcttaacttttactacaaatgttaagtttgaccgttatatatgtgggataccaagtcaataaaaaacaatccacagccctaattcaacgtc

SEQ ID NO: 158854 - DNA, 477 bp, Glycine max
tactaagctattctcaattaataaattagtccaggactaacattgttattctattatcagtttctgcttcatcatctttaaattatcatatatattatattattccttctgtcattgataattagtttatcaagtgtgccatgaataaattatctattcttatggaggctacataattcatgaagaactctttcggcgctcttcatttttgctatatattctgggcatttccaggttggttggttgtctagtgtcctcatttaagaattgaacatgcacaagttgactgaagcatgttaaccctcttggtcttttgcagatgcaatgcataaacaggcatttcctggctttgacttctgaacaaatctcatctttaaaaaatataaagaaagacaagttatactttgtgaccacataaataaataaatagtggagactcgagacaataccctgttctgtgttgactaatactaattg

SEQ ID NO: 158855 - DNA, 170 bp, Glycine max
actatattgtaaagcccctacttgggggcccaaatgtttcactgtcaggcttcgtggagactcagtgtggaaaattccgtctgaactggacttccccaggctgtcaatcaacatgccaagcacagctggcttactagtaagcgcctgcaatacctagtgctctttcgtat

SEQ ID NO: 158856 - DNA, 471 bp, Glycine max
  unsure (1)..(471): unsure at all n locations
ctatgatactcagcttccattgtggtttcagaagaagaaccttgtatgcttgtctgaattttctctcactgatgatcattccagctatatgacaaagatattctttttctagcaactttctctgacttctccaacattagtgaagttgattttcaaactattgtttttggtggagctcaatttttgttttttatttatttatttgatgggaataaattttcgtgtaaccagcttagaccataataagctttatctagagggggaatgttgaaaaatagtaacattatattaataatagcaatttatagaaacattatcttcgatttagagaaaacaagacatcatctattcatgtataattaatataattaacctacataagaaacatgcatcccctgttggactctaacatgnttntcactcattattnatcctccattttctcctattttaacacattacataaatcta

SEQ ID NO: 158857 - DNA, 390 bp, Glycine max
gcttcaatggatcttacatcatgcggtatcatatttcttattaaataaaacttaattgaatgtctagaagcccaatccaattaaattttagagggggaggtgagcatttggttactacacctcattgccacattatatggtcacacgttgtgcatgtccttcatgctttacatgcctcatcccacctaagcacacttagtggagaatcttggaattgatcttggattagtgggctgaaccataactaaaattcactaatcataattggtgaaattctggctgcaaagtttggctccacaaattcaatttcaaattcaagtgaaatttgaatagaaattcacatctccctctcaatttgtgtgacacttacgctataaatagagggcatgt

SEQ ID NO: 158858 - DNA, 267 bp, Glycine max
  unsure (1)..(267): unsure at all n locations
gctggttcgacgtacttacacattgaagatcgacaaacgatgtttaacatttttagaacgtncaacaaccggccaaacctttgcgatatttctcacagaagacgtatctgaaacgttctggaagcgcctcggcttaaatgatctctccggatacagatttttcaagccaattcgtaacggagagatatgcctagcgagctgatccctttaccttctcacttcctcccctacttatatccaactatcggagatgcttgtcgcccagtt

SEQ ID NO: 158859 - DNA, 400 bp, Glycine max
  unsure (1)..(400): unsure at all n locations
cttaagtgacgccgctgcagcttaacccatcatttatcatctttatatntgtgagccaatccaatccttgtgtccggactctcacccacttatgatagccaccgatgatcccattactgctgtccctaagctctttgtcctttcttcacaccgcataacatgccttgcgaatttcttggagaacctttgaataggggtcactgaaaccccgtgtaatgaaaggcgtgatgctctcgtctaatggcgctcctctcaaggagaaaccgagctgtcttatggcgaggacaggagttatattttacaaccccttgctccattaagggaacatctggaaatcgctcgcatgaagatagaatactgatacttcgcatgaaagaccttaagggctggtcattatact

SEQ ID NO: 158860 - DNA, 250 bp, Glycine max
tagtgcttgatcactacgcgtggctccagactcattggtgtacgatgcctgaaccacgatccatccatggggctccgaatccaactggagaatggtgaattgtactatgcaatcactaggcctggctgcagactcattggttgaggttgcaattaccagaatcaattcattgggctcctaatataagtgggcaatggataattgcactctgcgaatccattgcgtggcttccgactcattggaggaagat

SEQ ID NO: 158861 - DNA, 329 bp, Glycine max
atcttaagtcaccgccgctgcaagctggactcttggcagttccttaatattttatctataaagcgcgactttgaaaaaatctttaaaacacagtccctgaagaattgtgagtattggagatggttttttttaaatcgtacattggtaatcgattaccattaaggtgtaatgaactacacattaacagatgtgacctttcatcttgaattatgaaaattaaaaccgttagaagctctcgtaatcgattacaagtattgtgtaatcgattacacaagcttaatatactctaaaaccgttctcacataaattataactcttgtaatctgaaa

SEQ ID NO: 158862 - DNA, 460 bp, Glycine max
  unsure (1)..(460): unsure at all n locations
tgtgcgaatcatatcactcctacattacatctctatcatgctttctctttctttacccactcctcacgtttggttctttagggaaaaacaccataactaaacgcgccgctatgtatacctatcgcaccccatccaaatctagaacgatgggtgatcaagacgagatgcaggaacagatgaaagccgacatgtctgctctgaaagaacaaatggcctacatgatggaatccatgttaactatgaagcatctcatagagaaaaacgcggcctccgacgccgctgtctggtcaactgcagaatcagacccgactctcttggcaactacgcaccatcctccctcaaacatagtaagaccgcgaagggacacactggggcacgatggcaagccctacctgngatacaaacgagcggcttacccttatggattggcggcccactattcaccacccctcttgcaaaa

SEQ ID NO: 158863 - DNA, 361 bp, Glycine max
ctgcagcttagcttaaagggccgagagagactattctagaatctaatgcatgatattggaagacaagttgaaggcttgtctaaggtcaaagagaagtttgtccgaccaattgagcaagacggaagaaaccatgtgggccatcattgaccaatacaaggagaagctaagtcttgcagcaacccatgcataaaggctagaggatgagtatgcaaaggtgtcggtcatgtaagcagaaagagaagtgagagaaagagtaatcgattcattacacagagaagcaatgatgtggatgggtaggttcactttcaccttgaatgggagtccagagctttcgagactgctagctgtcgcaatgtgccct

SEQ ID NO: 158864 - DNA, 379 bp, Glycine max
  unsure (1)..(379): unsure at all n locations
ntgactagagctattnttcaccttctcgctatgtcaatcctctggcttagcgagcgtccgctaagcgcaacactcattggctaagcccaaggaagaatctggaagaagatgacttgtgcaggtttgctaagcgcaccgcttcatctcactaagcgcaccgcttcatttcatccgctaagcgagaaaggcactngctaagccaaaattcactaatatgcgctaagcggtccagaattgcgctaagcgcaagagcacggacaaggccacctatttaagcctaaaatcagattctgctgtgtgaagatctgcagagaccagagcttgaagaggaagctgttctgagaactcgagatgagtttgtgagcggttgtgagatcct

SEQ ID NO: 158865 - DNA, 399 bp, Glycine max
  unsure (1)..(399): unsure at all n locations
agcttgttcgcaagtctcgtcccataggaatgtttatttttcttgagctatttgtaaaatggcttctcctttttggggagcttcangaagaacctggacagggatgctggcctaccatttaacttctggacttcttggacattggttgggctgcgcatctccatttggtgagtgatcatgaagccgaggaacttgcttccacctaccccaaaagtacatttttcaaggttgaggcacatgtcatatttgcggagttccccaaacacttcttttaggtttgccacatattgggctatgctttgagacttgacgaccatgtcgtccacatatacatcgatgtttcatccgatctgttgtttaagactcagccatcagcattggatgttgtcatgtgttttg

SEQ ID NO: 158866 - DNA, 447 bp, Glycine max
  unsure (1)..(447): unsure at all n locations
ggcgtggattaatagcaacaaatacagacgttttgttgattatgatcaattgatcgtaataatcaaacgtgacagagagttgtgcttgatcctcaagagaaaacaacgttggatacttagccttccattaatcagtagaagacgaaattgcagattgaagcatataacgagatggtattgctgggtgaatagtaaagactggaattgcaaaacctaaaattattctttctccgcagaacgaagagagagctctaaaactaagaccctggtgctggtatataggttctgagccccaaagcttacagatctattntaagtccaagcccataaatcaaataaaatctgggcgagataagatacagatttgataaataagagctatatgaaatatgatctagatcagacatgataagattaaatctcgatgaaataatatctacatgagat

SEQ ID NO: 158867 - DNA, 467 bp, Glycine max
  unsure (1)..(467): unsure at all n locations
agcttctntgaganaacttccttgagaagctttatcttatctacacacacccctctcataactaagctcacctccttgagaagcttccttaagaagattcctaaagaagctagagcttagctacacctacctctcttatagctaagctcacctgcttgagatgagaagctagaacttagctacacaccccctataatagctaagctcacccgcatgacgaagaatatgaaaatacaaagaaaaaagtctttcctacaaagactactcacaatgccgcagaatacagggctaaaaccctatactactagaatggccacaatacaaggcccaatacaaggaaanacctattctaatatttacaaagataagcgggcttatacctaggccatgtgctcaaaatctaccctaatgcttatgagaacccctaggcgcttcccttgatctctacgccaatctacttggagtct

SEQ ID NO: 158868 - DNA, 392 bp, Glycine max
tcacgaattatgatcaagattcaagattcatgattcaagatttcagagaagacttaatcaagataagtgtgaacaggattcttgaaaaactgagtagcacatggatttttcacaaaacatgtttaccaaagagtttttactctctggtaatcgattaccagattgttgtaatcgattaccactagcacaatgttcttgaaaaagtcttcaatttgaatttacaacgttccaattaatttcaaaaatctataatcgattacaatgttttgctaatcggtcacatcctttcacataaaagccttgtgtaatccattacactgatctcggaatcgattaccagcgattgcttctaaataaatcaaaagaataactcttaacaagttttgactttt

SEQ ID NO: 158869 - DNA, 337 bp, Glycine max
taaagcataatgccctagaagtctctatatataaccaacatactcacacgtgtgaacacaccccacaatttctatgctattggcaagtattaacatatagtttaagatggtaatttcgatacaatctgtgtgttacgttctaaaatcctaccgtctatcataacgagtagaatatattctactttccttccttggctctaaatatatacaagatttaattactatgagtatgtgagcgatttctaaattaacacctttaaagagaaatcctactgcaacacgttcccactctgagaggtctattgcggcgtaatgtttacaactttacacctaacaa

SEQ ID NO: 158870 - DNA, 340 bp, Glycine max
  unsure (1)..(340): unsure at all n locations
agcttctacttatgtggcagggcgggcttccttcttcttcttgtctccaacgcgaactttgaccattgttcttccttcccgcgatgcttcttttcatgtccgcctgagtgggcttatagcctaaaccatacttcccacggtttccttgggtatttatcaggctagttatgtcgcccgtgttttttcctaaacccatccccggttcattaaccgtccccaacataactcgggccatcattaccgctgcatcggacagacaaggctgcccatagagggagtccacggaggaaatgctgaccacctcaaaagactggaaagcagtntctaacgattcttcaac

SEQ ID NO: 158871 - DNA, 164 bp, Glycine max
aagctctagttcactagatgtattagatggtgcatgtcaatatgtgcatccctactaagtcataaccaagtatcagaacacctacttactaatcaactctattcacacgaatgaggcgtgtcgaaatgaaacatgtagatatcgcttgacctttagactatgtg

SEQ ID NO: 158872 - DNA, 336 bp, Glycine max
  unsure (1)..(336): unsure at all n locations
gcttgttgtaacagacaaatttaaatcaattttctgatcttcaaaacccatctgcagctgttttctacccatatcaactatgcagcttgtagttaacatgaatagccttcccaatattacaggaatgtcagtatcttcacaaatatccattaccacaaagtctgccgggaagataaaatgtttcactctgaccagtacatcttcaattactccatatggactggtgatggagcggccagcaagttgtaaagacatcttagtgggcatgatctccaactctcccaaccttttgcacatggagagngacaattaattaatactggctcccaggtcaat

SEQ ID NO: 158873 - DNA, 356 bp, Glycine max
agggacctgagatatgtccgggggcatgacaccttgtggacatcaggaggggagctattgctcaaaaccaagcttgaccaatcccgacccaacccgggcatagtcagtcacggagaacctgagatgtacctaagcaggtgagctactggcagcaacagaaaaaggaacaaagaccacaaagcaaggaggcttgtgtggaggcaggccacctgagaacattgaacttacatgggatgtggcctctggtaatcgattaccaagagtgggcaatcgattacaaagctcacaaatgaagaaaggacgctaagatggtctctggtaatcgataaccaaggcggtgtaaatgactaccaggc

SEQ ID NO: 158874 - DNA, 402 bp, Glycine max
atcttcatgacctacattctccccttttttgatgatgacaaccacctatacgtgaggagcacctacagagaaaatatctattcgcatatagtttactcccccctgggtttacatagattgctcatatgagacaattgaagatttcatatttttcatatataaaaagatgtctcataaaacaatagatattttgcaataaactctcttcaagagaagaatattacaataaagatcatgtaggaatccttatagattttgcaagtgtttggccaaagatttcttttgagagagcatttgacaatgaagatcttttggaatctctctcattggctttggagaggataagacactcttgttcagcacaactctctctctaaaactcgtgcgcaagtcacctatgta

SEQ ID NO: 158875 - DNA, 460 bp, Glycine max
  unsure (1)..(460): unsure at all n locations
ctgtanatacacataaaactgtacctctatctaacagttttgtattacgtactttccctcaccaagtgtctaactaagcaacactaaataagtggaaaacatatataacaaaattatcacccgaaaaagaataaaacatattgaaaactatattttccctctcatattttaaaattaatttgcttatcaactaactctagtatctcagcagtgtctccatctaaatgcacatttttttgcacatcaacttcaatggccatgttcaaatccaaagagaggcatggagttttctcctctgatttgntaatattattcttttccatgtcttcatcggaaaatggagaagtggttcttgcaggagaacaagctcttggcactgaactgaagctntcactactgaaaatgacaattgcatccttgagaggcacagattcaccaccaggaagggttatagttccac

SEQ ID NO: 158876 - DNA, 469 bp, Glycine max
  unsure (1)..(469): unsure at all n locations
tgcacctgtgaatacacacaaacatgccgtacaatattctcaatatattgcatgctaaatttaccatgcaagaaaataacaggaaagttnttgtaatattaaacaaccggaaggaacacatactctcattccaatagaagtagcaccaggaatcacttcactcccaaagtcatttgcaccaggaaacttctcacggagcaggtctaacatcacatttttgctaacaacatatatacccatgctagcaatataaggcatttcttttgctctctcgtcatcaagacccaaaattgtagtatcaacctagaaaagaaaagtggcatttttaagcaattgttcaggtaataatttccagataaataacaacatataatacatcttatatgggcttgccttcatagctttcaactgttctccttttggctnttcagcaaattcaattatacgcccctcttcatcaatcttcatc

SEQ ID NO: 158877 - DNA, 461 bp, Glycine max
  unsure (1)..(461): unsure at all n locations
ttgaaagctaatctcagaaagacaagagtagcttatgttaagctgaaggtggcagtcactaaagttaggaaagaatatgacgagctgaaagatatcaacatgaccgtggctgaagcactacagtggggaacgaaaaaagctagaaaggaagaatggagcaggaacatgttctgaggggctttgttaggcaacagtaataagctcaaacttagaaaggccaagagagacaaatcaaggatggaaagcataatgttagaggataagtttaaaagttgtcagaggtcaaagagaagtttgaaaaaatagttgagcaagacggaagagaatatgttgataatcattgatcaacataaagagaaggtgaacgtagctgctaatcacgggcagatgctggaagatgaatangcgaagatgtcatccttgcgggttaaaaggaagcgagagaatgggtgatagagtta

SEQ ID NO: 158878 - DNA, 458 bp, Glycine max
  unsure (1)..(458): unsure at all n locations
tgcccaagtgagctggntgcttaatgttgaaggtatcttctcacccatgcaagctagttgcttagggctgaagaaatttcatggcccacgcgaacgagatgctagcctgngcgagtttaggtctagaaaattctaggatatgaccattttacccctttccttatggctttttgtttttggatctgacaatcaactaccaaaccctgagtgaccctttggacttgtgctgcaactggtgccaaacacctaaattcaattagcaatgatcaaaacatcatatctgaatgataaaagtattatacccagatgaaattagggtctgacaatgccaaatcaaacaacatttatacatctcttgtcttttcttctctttccttaagggtgttcagggtacaagtcaccacaaacccgaattgaccaaaaccaatccgaacangttatgttgagttatttatgta

SEQ ID NO: 158879 - DNA, 453 bp, Glycine max
  unsure (1)..(453): unsure at all n locations
ntaatatcacattggaaattaagaacattagttcttatttaattttncaacgccaaagcatcagtcatttaaaataaagatagtatcttcaaaattaaattaaatgaatctattgtagaatatatctattgtagaatgaaactattctattgtctagccgagtgcatgatttgttcagtgtggagttattttaactcactttcttaagttttaagacattagaataacactttctcactaacactccttacatagatgacacaagtaatgattaaaaatataagagatacttatataattacacaaaaccacatggggtgtgttgtaatttactcgggtttcttatataatttttagttccaatattatcatctgctatatcttcttgtttatggtttggacgaagaatcttatagtgagcataatcgtgagattaactattgaaaaatagat

SEQ ID NO: 158880 - DNA, 455 bp, Glycine max
tactgagctacattatatctgagcataatatattgttttctgatatgctctatgccactagttgtacacttgtacctttcttgtctagatacacaaactgatttcatcaatccgttagtcaaaataatcagaatatgttcactgcctagaattagtctatttctcaatcttttctgctttaatgtccttcttttccgcttcttatcgtcatcacataaaatacaattatactagaaaatagagagataaaaaagaaaattaaattatactagaaaagactattataaaaactccctatccttgtaagttgttaaggcatgtatcattactcaatcggaatctccatatattatacttttgaaatctgtgaaccaagcttaagcccttctagtttgttaatgagctcaacaataaaaagaagagcacgctgcacgacaggagaattatttgatttc

SEQ ID NO: 158881 - DNA, 461 bp, Glycine max
tcttagtttcagatgatgcagatgggtttgtttctactctcatgcactcctctaatgactatggcatcatttctggcgctaaactgcagggagttggaggccatcttctaatttaaatttctggcttcagcaggagtcatgtctctaagggctccaccattggcagcatctatcatacttctctccatattactgagtccttcataaaaatattggagaagaagctgttctgaaatctgatggtgggggcaactggcacatagtttcttaaatctctcccagtactcatacaggctctctccactgagttgtctaatacctgagatatccttcctgatggctgtggtcctggaagcagggaaaaatttctctaagaatactctcttaaggtcatcccagctcgtgatggaccttggagcaaggtaatacagccagtcctttgccactccctctaatgaatg

SEQ ID NO: 158882 - DNA, 447 bp, Glycine max
  unsure (1)..(447): unsure at all n locations
tatatgtngtggaggaatgtggtgaatcatgcattatattccaacattctctagcnttctcgtgagtggaaaatgacaaattattccagaatgtggtatcctgctatatatctaagaaacatataaggcatcatccgtcacatggagtgatttcatgactaatgaaaactcaaatagttgctaaggagctaccaagacactcttagtgcatccaaaggcacgccaaaatctgctacatatttaaacataggcactgcagataagctacaactatcaggttatcaaaggtattctaacaaataatgtaaaatcaatttccacaccaaactaaacggcagtttctctttttattcttctatctatcaaggaaaggtgctgtgacaaaagagaaattctatctacacgaagccctacttttctatttttttacagaaatacttcaaacca

SEQ ID NO: 158883 - DNA, 445 bp, Glycine max
  unsure (1)..(445): unsure at all n locations
tcgatggctaagtgattatattatagagagnttttcttggaccaacaagttttgattaattntcccacagggaagtatgtagatgaagtaatatgtggtgtagttcccatgaaaacttgtcacattcatcttgggagaccatggcaatttgataggagtattatttatgatggtcattccaataagttcttctttgtacacagtgattgtaaattcacacctgtatatttaactcaaagggagttatgtgaggatcaaagcaaaatgagaatgaaaagagagcaagagagaaaaaaataaaagaaaatgagaattaaggaaacaattaaagagttggcatgaaagaaggacaagaaagtgaccatggggggaagaaaaatgagaaagagagaagaaaagaaagtttgtttgttaaagatactgacgcaaagagaatgcttcttct

SEQ ID NO: 158884 - DNA, 446 bp, Glycine max
acaaacattgccatgatggtacaagttgatgatttatggctatggcatcgaagatttggccacttcaacacacatgccttgaagttgttacatgagaagaacatgatgagagatcttccaagcataaaggagaacaatgaagtgtgtgaaggatgtctccttggtaagcaacaccgatttcctttctcaacaagcgaagcatggagagcgaaagatctattggagctgatacatacggacgtttgtggaccaatgaggacgccatcacatgggaccaacaggtacttcatactcttcattgatgacttctctagaatgacatgggtatattttctaaaagaaaaatcagaagtctttggagtattcaaaaagttcaaggcccttgctgaaaatcaaagtggaaaacgaataaaagtactaagaagtgatcatggcaaagagtacac

SEQ ID NO: 158885 - DNA, 457 bp, Glycine max
  unsure (1)..(457): unsure at all n locations
ntgatgcaacatttagagaggttaatgaaacaatgagatgatgctctccatgagaggttggatcaaatggagaatagagatcgtaatgaagaagaaaggaggagaagagggaatgatggtgttcctagacaaaactgaattgatggtattaaactcaacattcctccctttaaaggaaagaatgatccggaggcctacttggagtgggagatgaaaatagagcatgttttctcatgcaacaactatgaggaggaccaaaaggtgaagcttgccgccacggagttttccgactatgctcttgtgtggtggaacaagctacaaaaggagagagcaagaaatgaagagccaatggttgatacatgggcagagatgaaaaggatcatgaggaagcagtatgtgccggctagttactcaagggaattgaaattgaagctccaaaaactaacccaaggcaaca

SEQ ID NO: 158886 - DNA, 463 bp, Glycine max
  unsure (1)..(463): unsure at all n locations
taanatgtcaaacanaananattcaagttaattaacacataanatttatattaaaatcaagcaaacaataagaataataggatgaatagtgtctctatcaactagtaatacttgaattaccaaaaattaaagagattgcatttaaatactaccaattaattcaaaccaaaagtcaacacatataattactgataaaatataaaacactatgtaaatacaattaagaggtcacttactcggcacatttatcaattttcccaagtttcatattttccattattgctacaatcagcttcttgttctcatcaagatactgcaatgtgtcataacaggccattcaaattaaaatcttcattcttgaagtctatgtaggtttataacatcttgattcttaacgtcacaatcattacaaggataagaaaagacatcgaanaaattcaatgtaataattcaaaataggcct

SEQ ID NO: 158887 - DNA, 473 bp, Glycine max
actaagcttcactaggaagacgcctactgctggtgccaggtcttgtctcaatagtattatctcgctcaactacttggctttgaattctctttttttcccatggctgaaaaccaaacataagaaaagggttacgaataaggtattagtgtataacaattcaaatagcaagagtcttttcacaaacaacgaaatatgaataagaatttaatgtttgcttcaaactgatgtatgaagctgtctgtcattgtactacaaaatactcacctgctgtcttttagtatcctcctccttttctcgccttaggatgttatattcttccaatatggccattagaggtacctacatagatatcatttttgcttgctgttattaacttaacaaaccacactaccatactattaaagatgaataaagaaatgagtcgtgagaaaagaaattgacactgtaagatttctgaagccatttaaataatg

SEQ ID NO: 158888 - DNA, 462 bp, Glycine max
  unsure (1)..(462): unsure at all n locations
ttacttcactgcttgaagtagtgcacaatctgtttccataggttttcacgttgcctaaaagctactatcaggaaaaaaagatattgtgtccgatgggtatggagtattagaagattcatgcttgccctaatgattgcatattgtacaggcataaatttgaagaaatgtccaaatgcccaggtgtggggcgtcacggtacaaggtgaaggatgatgaggagtgtagttctgatgaaaactcaaagaagggccctccagcgatggtgttgtggtatcttcccattattccaaggtttaagcgtctttttgctaatgaagatgatgcaaaagacctttcctggcatgcaaatgggagaaactctgatggaatggtccatcatccggttgattgctcctagtggaagaagattgatggtttgtatctggantttggcaaagaggcaagaaatcttatgcttggact

SEQ ID NO: 158889 - DNA, 461 bp, Glycine max
  unsure (1)..(461): unsure at all n locations
cttgattatttcatattgagtggttgtgctgttatgtctttcttcagngctgtcattgtagtctgttatttttgtatatcttcgtagtttaattacgtttttatcttcatactattgcatttatataattttaatcttttataattttggtatgtaaaaaaaacttacaatttggattgttctattttgatttttatatacttttaaattaagcatgtgattttagtttatttattttttcttaccgaaaaaagggtttatttttttaattaaagtaaataggtcaaatcacatttaggggtgaaaacagattaaatcgattaaaaagaacatggaaacgaacctattttaggcttaagtccaactcaggtccttttaaagataagttagatttgaagttttataaaagcttatttaattaaaaagattagacttagattatctacaaaaaccttttagat

SEQ ID NO: 158890 - DNA, 457 bp, Glycine max
  unsure (1)..(457): unsure at all n locations
ttcatctagccaagaatttacaaagggagtactagagatcncttcggntnctaatnatgtgggccatcaaatctatcacgtgttgacagtaattgattagcccatgaatctcctcgggggtcgtacacacttcggccatggcttttgctttggctaatagacgcgggaggtcttgacttccattcaaggtcaaggcgaacctatccatccacatagtcgcttcttgatgcaatgcatcaatcaccctccctcttacttctttttcggcgtacacttgtgcaaaatcctccactagcttttgttcatgggccatagactggttcaattcttccttgtattgccctatgatagctagcatgctctgctccgtggcttccaagtggtgagccaaactccttttggacctcgcgcaggcaaccaactcttcttttaagatcatgccatgcacccgtgaccg

SEQ ID NO: 158891 - DNA, 455 bp, Glycine max
  unsure (1)..(455): unsure at all n locations
ntacaacttaagaaaattaaatataaagaggatagagtttgcttagatagttcgttcaaaaattcataacttcaacacttttggtttggtatttataggcttcaacaacaagtgactgttgtgagtaaatgacattttttttttgcatctagaacatcgtctaaagtaggtgtttatttgagtattaaatgctgaatttaatgctagtacactccaagctaataaagaactctgcttatcttccttaagataaactttacaattgatttcaatggtcaaatcaccttttgcataacaatgacacatctttttttatgtgaagcgagactttaaaacttaactttgctctcactttcttcacttcgacaaattgtaggaagaataatcaaatatttcccaaaaaaaaaaggatcaaccaatatagagcattaaattggtcttaagagtttcacaaa

SEQ ID NO: 158892 - DNA, 460 bp, Glycine max
  unsure (1)..(460): unsure at all n locations
tcttgcccccctctntccaaataatgtactatttgattttcaaatataactgtttcctataaatttaacatatatggtcaactaagttacattggttccacataatatttcaagtttaatccttattcttgtggttttacttaaaaaaagaagacttagattcgaatgttatatgaggtatttaagctattgttttgactttttctttataagagaaattatataaaatatatatattttttaaattatggagattgttttttatatataaaaaggaaaaatagcaagagcttcaaaagactaacttttataagattgttgtagttgtaaataaataatcaagtctggtgtctaaataagttcatccctctaccttgtttagttatggtccacgtaggatgtcaaaatggattaaattcaataggcccgactcaatcaactcacctaaatgaattaagtt

SEQ ID NO: 158893 - DNA, 446 bp, Glycine max
ggcttggggggcttctatggaggctagatctttgagcttcaatggggtcctttattggtgattttccaccatggagatgcagcggaagacaaaggagaagaggtgagaggaggcgccatccattaaggaataagccatggaaggagcttcaccaccaagatgagccttggataagaagcttggagaggatgcttcaatggaggaaaagaaagtgagaaggggggagcacgaaattgaaggaataaaagagggagagaagtggaactttgaagtgtgtctcataagactttcattcatcaaagttacaacaagtgttacacatgcttctatttatagactaggtagcttccttgagaagctttcttgagaacacttccttgagaagcttctttgagaaaacttccttgagaagctagagcttagctacacatacccctctaataact

SEQ ID NO: 158894 - DNA, 436 bp, Glycine max
  unsure (1)..(436): unsure at all n locations
tcttatctctgcgttttttttatatctcacgcagcgntttctcggtcacactccactggtgccattttcttttatttgtctgacgtgggactttgtagttctctaacaaataatgcgttgcttctttgtggcagatgtggcctggtctcgttcaaacagccaaggaaggaggggtggatgtgattgaaacctatgttttttggaatggccatgagctttctccaggcaacgggagtaatttagaagcaatatccatgcttggataaacttctcgctatgcactcatgggagaagaaataaaaatgttaccttttatagaagctctttaatttactggcttctccaaaagctgaaatacataagttgattttaacttatgcgtaaagttcaatcctttttgcctctctattttcttttccgcttatggggaagttta

SEQ ID NO: 158895 - DNA, 455 bp, Glycine max
  unsure (1)..(455): unsure at all n locations
gaggatgctntaatggaggaaaagaaagagggattgtgagagcacgaaattgaatgaataaaagagggagagaagtggaactttgaagtgtatctcataagactttcattcatcaaagttacaacaagtgttacacatgcttctatttatagactaggtagctnccttgagaagctttcttaataaaacttccttgagaagcttctttgagaaaacttctttgagaagctagagcttagctacacacacccatctaaaaactaagctcacctccttgagaagctagagctttgctacatacacccctctaataactaagctcacctccttaagaagagaagctagagcttagctacacacccctataatagctaagctcacccccatgacaaaatacatgaaaatacaaaaaaaaaatcctactacaaagactactcanaatgccttgaaataca

SEQ ID NO: 158896 - DNA, 332 bp, Glycine max
cgccgtggcgatcttgcaagagagtctttttgggttaagtgccaactttgaagagggagagaaggaaaataacatgtaatacatgccaagatctaaatcgttattatgatcaaatggttgaaatattttctattacacactctctagttttgtcttatgggagaaaattcgtttcccactatataataattaacttattaaataaatttaatattcattttattttatcattacattaattataatgattaatttttttagtcaattaatttaatcaatcaccattgatttataaatctactgtttgtgccaaattattgataaaatggatt

SEQ ID NO: 158897 - DNA, 380 bp, Glycine max
aacttcatttttgggaataatgtcaacgcgagctgaaccactctcatatcaaccaaaatgggtatatacttgttataaaacattttcaataaatttaaacgctttccccttcaaaacaatttgttgtaaagcggatgtaatgcacttggagagaatcttgttcttgaattatagaaataatcaatttaatctagtataaagatatagacacgtacaatttaattcaattgttaagttatctttattttcgataacgctgagttcatatataatatgtgaaggttgagcacggcagcgaacagatattttgtgaagggctcatggcgaaaatactaaaggggcctcttaaactttaatttaatacactttggtaattcttt

SEQ ID NO: 158898 - DNA, 378 bp, Glycine max
gaactccaagaggggatgctgtgatgtaagagacttcaaattcgtatgaaacgaatggattcgccgcagaagagagtgtgaggagcaaggagacgttgatgagaaagaagatgaagagagctcttaaagaagacattgtgtggaacttttctgtttttcctcaaaacaaaaaaagaaaggctaattggagccaagttttgagtagcttttttcgcttttctgtgactttacattatcaagggaactagaaagaaagaacttggtttgcggttgggtgtgggtagagaagaataagggagaagaagggctctattgcagcaattctagctgtggtgtgaaaaaagctctgtccgtagcgtataccgacagtggaagaag

SEQ ID NO: 158899 - DNA, 468 bp, Glycine max
tcttcttccaggcttattccctaatggatggtgcattctctcttctcttctcctttatctttcattgcaactccatggttgaaaattaccattgaaggacctcattgaagctcaaagatccagcctctatagaagcttctcaagcaagcttcgatcaattcctatgatggtaatgagtcacgaatagaggaggaacaatcaacatttatgaaggagcttgaaaacttctttagggagaggagcatggaattcaaacctcccaaattctacaaagaaggactaaattgccttaagtgagttatgcatgatcatttaaactttcttttatcattaaatatgacataaatacacaattttaaaatgttatcattttggtctaatgcttaattattgatgagtataaggttgtggagtgttgtaacgagattatgtggctatgacaaggtattcaagtaatcttacacttga

SEQ ID NO: 158900 - DNA, 437 bp, Glycine max
  unsure (1)..(437): unsure at all n locations
tgtagcgatacaatntaatagtgaactnttatctatgattntgattgacgttatcctcactcataaatcaatttcgaaccaactcaacgatcatttaaatagtataaatggagcgattcaaattagtaagttgttctggtcttgatcctgctagactcgtcaattgtcaatttgcaaggtggaatcgttccacggtttcccacatgtatagtgtataattgttatgccatttgcattgtaggatatctgaagggaatcatatgggaatataatacgtaatccgttaatagtaaagttgttaatccactgggtaagctatatgctattaataaatagttgggttacaattaatcagtaaaaaaaaaaaagagaagagtgtatcccaaatgatgtaatattntcgtctataaaacttatatttctaactcattaatatc

SEQ ID NO: 158901 - DNA, 472 bp, Glycine max
cttaaacctcagcttacttctcatcgcgtctaagatcgactgggccacatttactctcacctgtgtcaagatggcatagaccaactggcacttctgcaaggggaggtcggaattatgattgttggggaggatgttgctgagcaacaatgtcatccaaatcaatgtcagggtggtcatgctagtgcacatgatccacgcccgtattcccgccacgcttcgggcaaagtcctgccctggaacacaaagtcactgactgatggcctcctcgtcgaaccctgaggcctagctccttctttgactgaattcgtagcgttggccctcttccaagaccaatggatgccccaggaacttattaatggcatccttatcaaaggggatccattggcctcgcacccaggagtgcttgtccctgactccctcctccgtgggccatgcattggcatagaactccatgactagttctggatcatac

SEQ ID NO: 158902 - DNA, 461 bp, Glycine max
  unsure (1)..(461): unsure at all n locations
tcaatcaagatgtggagcatgagagattgttgttgttttatataaaaatacttacaaattagccagaaatgaaaatgcgtgaatgttaaatcagtttttagtgtctctaacacctctactagtattgtaagccgataaacaaaatttgtgtgaatgaagatttgtgtgaattcaaatagccaagagaaggggttgcgacttttgcagtagacgaagttttgtgaattctaaaactcaacatcatcatctacatcatctcaatagaatatcaattatcatcaacaaataaagccttgtaacatttgaaccaatgacgaatgaggactagactcatggacgattcagttngcaggcatcaatggagccgtattatcggtgacatgtttttccaagcaaggagcatagatgagcgatggcatccatgagctcatggctccgccaaagaaaaaataacacattat

SEQ ID NO: 158903 - DNA, 446 bp, Glycine max
  unsure (1)..(446): unsure at all n locations
tatgttagccgcttctactatcatgacctaatctcaattgctatagttntgttatatcaatcaatgtattactagctacagatgcatgtcccacaatagagtaaccttctataataaacacaccattacttttattcttgataccattagctatgattaaagatccatttgctatcttcacaacaccatatgaaattctagttgaatatcctagatcatcaaacatgtgtatagaaataagatttctttagagttctggaatgcaccttacatttttcaatcgatactctgtattatcaaacatattcaatctcatagttactatgccttgtaccttgtacgggtaagagtctactatcaaaacaccttctgctgtgttcagctgcaacgcttcaagataaacctttctcaggctgctgtgatataagcatccataatccatcctt

SEQ ID NO: 158904 - DNA, 417 bp, Glycine max
aacacaaataaaatcatttcagcgagcagttatccttgttataaaagcaaaaagatgttaataagttttcagtcctagtgaagtgatgatgaagcttaaacatctctaagtgctaattgcacattttggcacagttcatggatacctattggtcaaaagcctacagaataatgcacggcttttgtgtcataacattggcattggtgtctatattaaatgaggatctagattccctaaactcatctctctatttattgtattaccctctatctccctttctgatattctacattatttcctttcccagtccccactctcacctgccacattagcaatctgtttggctcaactctattagcacaactattctcatgttttccattctgtccttgttcagtggatatagccactgcattc

SEQ ID NO: 158905 - DNA, 391 bp, Glycine max
aatggtgatattccaccatggagatgcaatggaagacagaggagaagaggttagaggaggcgccatccactaggtaataagccatggaagaagggagcttaccaccaagatgagccttggagaagatgcttcaatggatgaatagaaagagggagtgaaagagatagggggagcacgaaattgaatgaagaaaaatggagagaagttgaactttgagtcgtgtctcacaagactctcattcatcaaagttacaacaagtgttacacatgcttatatttataaactaggtagcttcctttagaagctctcttgagaaaacttccttgagtagcttctctgagaacacttccttgagaagctagaacttaactacacacacccctcttataac

SEQ ID NO: 158906 - DNA, 428 bp, Glycine max
  unsure (1)..(428): unsure at all n locations
ntgatgatgtcgagaagaaatcacatatttgttatcatttaaaagggggagaatgtgaatgcatgtatacataattttgatgataaagactcaaaataaggctcatttgcttcaagattaatacaagattgtttcaacaaacaaagccttgattcaagatttcttcaagatcaagccttgtcttaaaacaaaaggtttcaagtcatccaaggcacatgtaatcgattaccaatacatgtaatcgattaccaatggtttgaaagtgtgtaatcgattaccagagactctaaacgttgggaattcaaattttaaatgaagagtcacaactgttcaagaaaaataactgtgtaatcgattacactaatgctgtaatcgattaccagagaggatnttcaacgaatatcgccaacaatcacatcttatcattt

SEQ ID NO: 158907 - DNA, 398 bp, Glycine max
tctcagagtgactgagaaggaatgcattaactgtatcccgatgagagtgtgatccttaaattttgagagaaacgacaatcatttagtactaatttttgcgagaatctctaaagcatggactaaatgcatgaaattgatgatgatgaaggccatgttagattgtgatagccacttacccaaaaaactgaccgtgtgcttgaatgaattatcccttgtacccaatttgagctgaatgaattattaattgattgaaccctgagcctatacagtgctatctcctgctaccttgacttaggttgtaggagagcatcatctacaggaagcgtggttcaaagcagatatgtcccacattcgggggagtaattatcaaggtacacttgttccaatttgggggaggc

SEQ ID NO: 158908 - DNA, 478 bp, Glycine max
  unsure (1)..(478): unsure at all n locations
tagaatactaagccttctaagcataataagagtanagtgctactagactaatcattaatatatcgaagaaagnttctatatcaaattaaatattaccaaatttcattaaatgttgacccgaacgtagacttctctcattgtttttaattctataaatgctaattgctgtacaaaaagtggatttcttgaatatcatgtatgtgattagcatttattaatcaaagaaatccattttaatttctttacagcaatcaaagaaacctattaatgcaaacttgtttgttcggtaatatatattatataagccggaattcttaaaaagttacatacattaaatctttgttatttatgtatgattatctgcttagatttatctctttcattcttatataaaaattattctctcactacatatgttcctatataatgatttgtaaattaacataaattaatattgccaggacactaacaagaatta

SEQ ID NO: 158909 - DNA, 410 bp, Glycine max
tatacaatctcccctttgtgatgatgaatactttgtaatctagagacataccctcacattttttcctagtcaatcactcacataaatctccattctccccctttgtttttgaatttatgcttcccttgaatttaagttaattacttatgtgagttcttgatttaatccctaattctccccccccccccccctcctttggtatcaacaaaaagccgaagtgcgtaacaagtatgaaacatacaaataccacttatcattcatcaacatccatggaaaaatataaaccaatcatgaagcaagaaacatgaatagatcaaacatatacgtaaaccacttcgtcatataaaataattcataattgttcacacacatcatgccacataagaaatgctagaatgttcaaatggcat

SEQ ID NO: 158910 - DNA, 468 bp, Glycine max
  unsure (1)..(468): unsure at all n locations
tgtcaattgtactgatttagatccattaagaatgaaacttaagcatgagattgaggaataaagaatgataaggagaattggtgtgcaaaatatgaacaaaatgtgctcaatttataagttgaaaatatttattttttttaaaaaacagtctactgtaaatagactgaaaggcaatgacaatttttttgaatgccaatgttcagtgctccaatgttcatttcaacgttcaattttaattttttattttttattcttcaccctcacccttacctttttctcccaatcagaccgttggcttcccctctgcccttccttttttttttctctttctcatttttctcttctcttctcttggagacccttcttcttcctttntccctttcttcttttttctcttaatctctccgtagatcgttcctcttcccctttccccttcctttatttcctcttactctctccacggaccat

SEQ ID NO: 158911 - DNA, 458 bp, Glycine max
  unsure (1)..(458): unsure at all n locations
gccgatcccacatggctggagcattctcgcgaatattgtgaccctgactgggcttactatgattttacttagngacgagaacctgacatactcattttttatgtgtcttgttatgtactcctaagcgtcacagggtggttatttactgacatggtaccacattgcatataggcttgagtcttagcataactgttgcataccgcttgctaattgtttactatgaaatcgatgtgttattatgtcttgatcgaagtgtgtgattcttgtgtaatgtgattgatgattgaaaagcgaagttcaaatgacaaagtggcataattacgtgagttatgtttaagtaagtagcatctcacttatatgatatgtatatctagttgtcttgtttctctattaaataagaatgtgataactcactctccgtgtgttgtttgtgtttggatcctgtgatgatcttgaac

SEQ ID NO: 158912 - DNA, 439 bp, Glycine max
ctgagctttgggacaaggctgatgtctatgtatctccctcgagacaacagtccagagacagatggtttaaggacggggtccgccactccacttattttcatatattatttaatcacaacaggtgaagaaataactcgacagggttaacaattgacaactgatgggtggaagaccctaacctcatttaagctgaaatactgcttcatttccagagatgatgtcatgtatgccaactgcatagggcttactttgattgagtctcattccctgttctaacctatttacagagggattctttgattgaacctttttaataacaaaacgtgcgatatgctgtgtggaactgcggatataataaaaattcagtgcccaactgtttaactttagattcttaatctctttgagacgacttaaacctgcattcttacgttataatgag

SEQ ID NO: 158913 - DNA, 453 bp, Glycine max
  unsure (1)..(453): unsure at all n locations
tgacaagttcaggtgtaggtgctgctactggtggaggtctcttaatttgcttgctagaccttaaggtgatggcgctcacatttttcggattctgcacagtttgtgagggtaatttgtcagaattttggaactgagttttggttcaactgagtagccatctgccccatctaatttgtcagactctgaatggaggctcttgtctcttgctaaaattgcatattctggatggtcatttgcctcactaactcctctaaggaaggttgagaaggggcctcagttgcttgttgtctttattgttgttgctgttgcattggaggaggaacatatggcctgcttggaccagcagcattttggaagggagggacaggctgttgttgctgttgttgttgttgtggaggattttcccatctcagatttggatgattcctnctacctggattgtatcttttcttc

SEQ ID NO: 158914 - DNA, 461 bp, Glycine max
  unsure (1)..(461): unsure at all n locations
ntgatagagaagttcacgttgccttgtgaagtctaagtgcttccgcgcaagaggaagaacctacagaattgaggaattaggcatatagaaaaaattaaaattggataagtgaatcattttttcagtcaatcattcactaaatgataaatcactacaagttatatattaaaaaggtagcttgataaagcaactattttgtcaaactcttgttatatatatatatatatatatatatatataactttgaactaagtagagaacttcccttcctatgtcaaacttttctatcaaataataataataataattaggtaatacaagaaatgctcatatttctcaagctttaataagctgtgaaatgatctacacataggacacaaaaatcaccccaaccaatttattaatcatcctattggaattgtaacatttaacaatgcatgtgctaacacattcacatctta

SEQ ID NO: 158915 - DNA, 423 bp, Glycine max
  unsure (1)..(423): unsure at all n locations
ntacagcagaatttagtaatgacccactaacctataatttattatacttaatgccattaacctagggaattaaaacaaactatatggctgagtgtaactgaaattgttggcaaccaaaagtcacccccaacagccaacaagtcagccaccatttggtctcccaaaaggctgatgcctangttgccaattgggcccttattacaacttgaactaaagcccttttagttgattaacccaaaacatatttttggtcagccaactttacaaggattgggccattatttagacaaactaaacactctaaaattgaaataaagtggtgtcatttagtcctccatttgggccatgatacaactaacaaccttggactattctccttgaaacttgcgcttgtattcaaatagtatggacaacacttgttga

SEQ ID NO: 158916 - DNA, 452 bp, Glycine max
  unsure (1)..(452): unsure at all n locations
nggagagaatgatggngaccaggtgttgagaggaacgtttataagggctacgtgggagtacgtgagctcagtgaaggtgggcaactggggatggtgggtttatgtgtgatctgtggatgtggagagttgaattgcaccatcgcccgaccgccacctagtaccacatgtgatgggtaccccataatcctacaagcttgaaatgaggaagtgtggaagggtgagacttcctacttttattcattgaccacagagtggtacctggagatatgtcgcgggggtcaggagaccttggggacgtcaggtggggtgctattgcccaaaaccaagcttgaccaatcccgacccaacccgggcgtagtcagtcagtgagaacctgtgatgtacctaaacaggcaagctcctggcagtcaaccgataatagaacaaagaccacanagcatggaggcttgtgt

SEQ ID NO: 158917 - DNA, 433 bp, Glycine max
  unsure (1)..(433): unsure at all n locations
tgtagaatggctagacatgatacatgtcagggtttggtttggttcaaggataaaagggatgccccacattatttccatgacacaaatgcaaaaatgatgatttggaaactntatgcaaaactggtcatgcatgcacctatgcgaacactcaagtgtcaaatttttatggtcatgtgatgctagggctcaggattcgtttcctctattttaatcaacccaatgtttccaaaatatgttcttttatcaatttgtgcattcatccgagtccatttcgggcgtccggggaaatttcacagcattcacccttcaggtgtagacacattttccaaaaattggttatgatcaatgaactttttcaaagaaaagttggaaatcgtttcttttcaaaagcatgctgttttttagctagacaacctattntttccttttttct

SEQ ID NO: 158918 - DNA, 425 bp, Glycine max
  unsure (1)..(425): unsure at all n locations
tgtacaccagcgcgttatagtgtgatttctgtcggcgcacagaggattgggctaccttngatctgtgaagtatactaatgttgaagatagcatacttggggtaattatagtatagtctccatgatgcatgtgataaattatgattagataagtatataaattttctatgttattagtttataatacttttttctctttatgctaatcttttcacttattacatatatatttttttttttaaaatttaggggagaatagatatttttatctttgacttttgactcattntataaattaatttttatttttttgaaatataaaaaatagtctctatttttttataagctttgtaaaataatcattatcattaaatttaaaaataatgcggttaatgaggtgcatggctgtcgttaataaagtgcatg

SEQ ID NO: 158919 - DNA, 459 bp, Glycine max
  unsure (1)..(459): unsure at all n locations
acaagttagggaaatgaggagatgtctgctatgcttatccttttagcacccaattagttttaggtaggaaaccttagagtgaaaccgatagaatcccttgaaactaagtgagagttatgagtcaagtataccgaaatgaggaagataatgttgagggaagagacctatgtccgaatataagtaaatcatttattcttgagagtcacgtgtggactangattggtagagcgttgaagtcttgaaacttatacctcttatcttgaatcgtcccatgttcgaaaaagagtcagccatgtggccaatcatgttaccttgtatctatttgttcgtttcagattctcattagtgtctcttataatattacccaacttcaaaatagtatgccattcacattctattatcattcagatgtcattctcgtgagaaaatntgacttatgatatactattatcgaggaag

SEQ ID NO: 158920 - DNA, 459 bp, Glycine max
tgtagaatggctagacatgatacatgtcagggcgtggtttggtttaaggataaaagggatgccccacattatttccatgacacaaatgcaaaaatgacgatttggaaattttatgcaaaactggttatgcatgcacctatgcggacactcaagtgtcaaatttttatggtcatgtgatgctagggctcacgattcatttcctctattttagtcaacccaacgtttccaaaatatgttcttttatcaatttgtgcattcatccgagtccattttgggcgtctgggaaaatcttcacagcattcacccttcaggtgtatacacattttttcaaaaactagttatgatcagtgaatttttccaaagaaaagttggaagtcatctcttttcaaaagcatgttggttattcagctcgacaacttattttttcttttctctccttattcttcttcttatcattat

SEQ ID NO: 158921 - DNA, 402 bp, Glycine max
  unsure (1)..(402): unsure at all n locations
tgaatagcgcccctggggatcatcgctaaatgtcagagcgaattttgactccgaagctnggagtagcgcaggccacgaggagatgaacccattgcgagtcatccattggtaccaggatagcgctggacctgccatgtagaatgaagccacggtgatacgctcctggtcaagtaagccttggtagtcgaagaattggcagattttaaaaatctagccaactggatcttggccgttgaatctaggtacatcgagcttcatgtgtgggttgtaagtgtgtggagaagggatggggttgtggtgtggggagagttgccgggaagatggttggatggtgagtgcaacgaggtgttcaagcatggcgtccatatttgtattcatggaggcttgggttcgggcaaaggt

SEQ ID NO: 158922 - DNA, 468 bp, Glycine max
  unsure (1)..(468): unsure at all n locations
nttctcgncaattctagcattccactcacactgacctactaaattatctgaagtagcaactgaactcattattcaacaacaacaagaggcaaggaaaaggtagactactctcctgcacaagtaaaaatgtgagcatctcttatatgcatagcaaaaacagacccttttatagcacgaattagcctcactatatttttaaaatgtcataagaggattttgagcactcactcttattctttcaaccaacaagaccaccaaatattagagaatgctatgaacaaaaaaagatctccttttgaagctacatgaagtttgcgtgcacgacgaaggtcagactaaatgtcatacaaattgattagtttcatacgacaagataaattcatacaacaacttttagaaatattcatgaatgatgcacagagttgaaattacctcaaaaatgcaacaaatatgttgaatattaaagca

SEQ ID NO: 158923 - DNA, 459 bp, Glycine max
  unsure (1)..(459): unsure at all n locations
tttagtaattaatgcgaatgaattgccaattgtttatttaaaatagagttatatagatattgtccctctactcaaccctgtattaaatttcaaggaatagcaacatcatcgacaggaagacagctatatactcaggatgcgagaacgaaatacgaactaatgatgtaaaatagacaaactgaaagacaagaaatagtcactagcatagattctaatgtcacactgccaataaaaaatgacaaaaacttaaggatgtgtctttacattcgtaacatttattagcatacatctgaaattaatagctacagaagggaaccattatttttacaggtaaataataaggaaaaatgatatctgtactctgaaagattattgaaaagatgggaagaccaagaccattcctctcttatattcgttnttaaaactttatttacaccacatatctagtgtgagcagacg

SEQ ID NO: 158924 - DNA, 467 bp, Glycine max
  unsure (1)..(467): unsure at all n locations
cgctgngttcctangcctagaattgcattcgggcactcattttatatccttcatgctgttcctatacatataaaacggtcccacaacccaaagctcacaaaaccatgctcatatctcgttgaggcatttcaccgagcacttggtgggcgcatgcttaggcacgaatatcaagagaatggggacaatgtggcatgcgccatcacttcagaatacaccctaggccaaggccatcccttacaacccctcaatccaacaaaaacaagcaacaatctgaggataaacccctcacgtttcttagcaaacacatgcaatttagagcaccaaaatacatcaacggaaagctagaaagcccaagaatgaggtacttacttgttggagacgaataatatagcaaaacggaatcaaaaacgcaaaaaatggtgacctaacggctgcaaaatccgtgagtcccgtgagccttctttttg

SEQ ID NO: 158925 - DNA, 337 bp, Glycine max
  unsure (1)..(337): unsure at all n locations
tgtaactgaagcggncgaagaagaacgacattgctctcttacctaaagtgaaacacattcgacagcattaaacatcacagtcaattctgacttaccttcatgaactaccaacttaaatgttcttgtaatgaaaacatatctaataagtctaatccacacagtcctcgatcgataatctatctacatctagtntcgttggtaaatcgtggtaacttaacctataactttttacacaataaaaaggagagaaatcaaagactaagaaaaataacgagaaaagtctatgtttcaaaagagaaaaatatagagagaagtctatagtctgatcttttctttt

SEQ ID NO: 158926 - DNA, 464 bp, Glycine max
  unsure (1)..(464): unsure at all n locations
ttctcccttattttgctataaataggggaagaagtgattatgataagggttcatccccttaggcacttctctctctttcgaatttgctgaggaaaattagttccgtgaagaaaatccaagccgaggcgcttccgtaacgtttccgtgagaaattacgcaaagattctcgaccgttcttcaatgttagtgtntagctctactgagctttaaaagattggctaagattttgttaaaacataagcacttagacaatgaaggaaagctggagttgctgcacatgatgtccaacgatatgtcaaggaataagatcgggctgcacaatgtacaaggcaagataaaatgtcaaatgaagaattgaagttgcaggatccacgatgtcggatacaatgtcctgacatcctgcccgagaatactggagttgctgtacaatgcaagataaaagtcaagtgcagaagtgaagctgc

SEQ ID NO: 158927 - DNA, 440 bp, Glycine max
  unsure (1)..(440): unsure at all n locations
tgcttgtggggcttctatggaggctggatctttgagcttcaatgaggtcctttaatggtgactntccaccatggagatgcagcggaagacaaaggagaagaggtgagaggaggcgtcatccactagggaataagccatatgagaaggagcttcaccaccaagatgagccttggataagaagcttggagaggatgcttcaatggagaaaaagaaagagggagagaaagagagaggggggagcacgaaattgaaggaagaaaaagggagagaagttgaactttgagttgtgtctcacaagactctcattcatcaaagtgacaacaagtgttacacatgcttctatttatagactaggtagcttccttgagaagctttcttgagaaagcttccttgagaagctttcttgagaaaacttccttgagaagcttctttgagaaaac

SEQ ID NO: 158928 - DNA, 415 bp, Glycine max
  unsure (1)..(415): unsure at all n locations
tgaaggtaactagatgccttggttaacctggtaacctaactggccatgaatcanaaatatgcacgtgtcgctagactctgtggtttaggctcctctgccgaccaccacacagacctttgcccttctgtgcaacaatctgaagcaattgaacagcctgaagcttatgttgcaaacatctacaacagacctcctcaacctcaacagcaaaatcagccacaacaaaataattatgacctctccagcaacaggtacaatcccggatggaggaatcatcccattcttagatggtcgaatccttcacaacaacaacaacaacaacaacagacttattttcaaaattctactggcccaagcagaccatacgttcctccaccaatccagcaacaacaacaatagcaacagccccagaaacagc

SEQ ID NO: 158929 - DNA, 461 bp, Glycine max
  unsure (1)..(461): unsure at all n locations
gcttttgacttgtgcacaattccttatatgattaaggctactgattatgtcccttcttttgctaatgcagggtacacaatctgtggtattagcaggattgcttgcatccctaaaattatttggggggaccttatctgaccatacgtttttattcctgcgtgctaaagagataccagtctgagggagattggtttgcatttgtgttggaaattcccctgcggttactttntgctccattttttcttcgttcaaatatattcaagggaaatccggtttaccggaaagtgcaccggatcgtcaagtatttaaaaattaaaatggatgaattcgagtatcgaacacaggaaactaatgttaacctgaattaagttcagaatcgaagcattgttgagagaacatgtaagagtgataatttcaaacagaatttagactaaactattatgcttaatattataaaatgc

SEQ ID NO: 158930 - DNA, 465 bp, Glycine max
  unsure (1)..(465): unsure at all n locations
cttatatgggctaaagcanactcctcgagcttgggagaataacttatttcaatcttattagaaaatggctctgaaagaggaaaagtagacacaaccttatttcccaaaaactgtggctcccaattcattctagttcaactatatgtngatgatattatatttggtgctactaatgaacctctatgtaaggattcttgtaagttgatgtggactaagttcaaaatgagtatgatgggagaattgaaattcattcttggactaaatatcaagtaaacaaaggcatatacattcatcagaccaagtatgtgaaggaacttttgaagaaattcaataagaatgatgcagaagagatgaaaactcaaatgcatccaaccacatatcttgaattagatgaagaatctaagaaggcggacagaacccaatatagagcaatgatagggtctctctaatatcttactatgccta

SEQ ID NO: 158931 - DNA, 450 bp, Glycine max
  unsure (1)..(450): unsure at all n locations
gggcattcaccataagnagcccttagacaataatgtatttttgtttttaacnccataaatgaaactcgcagagaatatgcatcacattagcatgttgattcaatcattgccaacaatggcttccacctatattttttatatcattaccaatatatatatatatatatataatattattcatctgatgacacattcttgtgtgagaacatgaaaacaattaataataaccattagatatgatcatgattaaaaataataggcagttaaaattaaaatacttaaaaattaaaattaaaatctaatatagtcattaaatcgctaaaagattcactaaataaaccaatcaaaaaatatctcaattattatctatccaccacttctgtcgttatgacaatctgcgtcgttagtgtcataactgtcaccactatcaacgactgtgattgtgacagt

SEQ ID NO: 158932 - DNA, 460 bp, Glycine max
cttatttgtaggaccttaagagattgatcgcgagagatgtatatcttatttttaaatctttcattctaagacgggtctctaaaaaatcgtcttagaatgtttacattctaagatgactttttgcgaaaatcatcttagaatcctcaaaatattttacttttttaaaaaaaaatacattctaagacatgtctctaaaaaaccgtcttagaatgtcaaaaaaatgtcttagaatccacaatattttttatatatatatatttttaaaaaaatacattctaaaacggatatctgaaaaaccatcttagaaagtctacccttctaagacagtttttgactaagaaccgtcttagaaagatatcattctaagatggttctgagctaagaaccgtcttataaagatacatttttcaaaggcaattttttatgtaaccgtcgtagaaagtgaagactctctatgacg

SEQ ID NO: 158933 - DNA, 461 bp, Glycine max
  unsure (1)..(461): unsure at all n locations
tgtattgtcgctcagatcttgactagttataactgtctatttattatgagtntatcccttatttttactccaaagtcagtgcgaatcaaatcactcccgcattttatctctagcatgcattcatttntttacctactcctcatgtttggtttttttagcaaaaaaaccataactaaacgcgccccaaggcatccctattgcaccaaatccaaatctagaacgatgggtgatctacaggagacacacgaacagatgaaagccgacatgtcggctttgaaagaacaaatggcttccatgatggaggccatgttaggaataagacaacttatggagaaaaatgtggccaccgctgccgctgttagttcggctgccgaagctgacccaactctcctagctatcgcgcaccatcctccttcaaacgcagtatgatgagaaaggagctcactggggcacaacagtaa

SEQ ID NO: 158934 - DNA, 446 bp, Glycine max
  unsure (1)..(446): unsure at all n locations
gaccttagaaactaagcttttaaaacaacactattttaattctttaaatatantttcaagttgnggntagttttaggtttctccaatttttaattttaatataaactcattttgaaagtttcatatcctatgaaattagtttaagattgtttttgtgtggtggtgacaccaatgttgtaggtgattacaacatggtgatggtggtgccgatgtccactgtggcagtggtggtgtcaatattgatgacaattgtggttttggggaggatggtagtcgttgcataggtggtgattgtggtagtagtgtcagtgcatatggttatggtggtggcggtaacggtgccgatggtggtggtggcaatagcgatagccgtgccgatgataatgttggtggtggttgaggtgccggtggtggcggtgattgctataaaaatgaaaatgtcaaat

SEQ ID NO: 158935 - DNA, 462 bp, Glycine max
  unsure (1)..(462): unsure at all n locations
tatacgaatttcttcggaaaaacaattatcgttcattttctattgatcttgtccgngagaatggcagacaactattggaatgtatagcatgtgtgtagtatttacttgaactagcttctttttgagctatttcttccatacatttcactttgttttatccttaactgataatggcgatacgtgctgtagatctaatatactgtcagactgtgttgtttttgtcagtgggttaggtttctaactgtatctttttatgaatttgcagtcatgcatgacttgcgcatgattcatactgacctgaagcctgaaaacatactactagtttcaccagagtatgtcaaagttcctgactacaaggtacttttctttttgcctacctgcgattatntgttgttttggaattgcactatacataatacgaagagcagttcctggttgataggggagttattacgaagtatt

SEQ ID NO: 158936 - DNA, 451 bp, Glycine max
tcttatctaagacactctcttggtggtgaagcttcttcttccttggcttattctctagtggatgacgcctcctcccacctcttctcctttatctttcgctgcaactccatggctggaaatcaccattgaaggaacttattgaagttcaaagatatagcatccatagaagcttctcaagcaagcttccatcattaattatgatcgcgcttagcgccttcaggcagtaattgtttatcatgcttagcaagagcttttcctagttagcacgtaatgatggtgacctttggtattcctgcccaactaactcactgattattattattattatttaacaaaactcacgctaaatgtgagcatgtgtgctaagcccaattcgataattgcaaacccgagagattttacgcttgacacggttgacccccttagcgtgagtgtaagttatatggcttac

SEQ ID NO: 158937 - DNA, 463 bp, Glycine max
  unsure (1)..(463): unsure at all n locations
tcatgaaacatcggtcttcaactgtgtaacaaccagtcataaaaaacaaattgtttcaaaaacgtgacaaagacataaaaagaagctcttattgtaatacataccaggagtctaagtcttaagagggaatcaaacgttccttattttcaaagctctccttccttcaaagctgttcctgtggctntgctcttccacttgtctatcactctctgcttgctgtctcctggcttcttcttgctcccattctactccttctggacttttccccttctctcttcttcctcttctctcccaccgagttggttcttcttcatcttcttcttcttgccgcctcctttctctcctttcttgctctcttttagcttgttcttgttccctctgtgctgctgcttctgcttctcttttagcttgttcttgctccctatctgcctactcttctctatccctttctttctctctccta

SEQ ID NO: 158938 - DNA, 439 bp, Glycine max
  unsure (1)..(439): unsure at all n locations
tgccgccacggagttntccgactatgctcttgtgtggtggaacaagctacaaaaggagagagcaagaaatgaagagccaatggttgatacatggacggagatgaaaaagatcatgaggaagcggtatgtgccggctagttactcaagggacttgaaattcaagctccaaaaactaacccaaggcaacaagggggttgaggagtatttcaaggaaatggatgtgctcatgattcaagcaaatattgaagaagatgaggaggtaactatggctcgatttcttaatggtttgactaatgatatccgtgatattgttgagctgcacgagtttgttgaaatggatgatttgcttcacaaagcaatccaagtggagcaacaattaaaaaggaagggagtggctaagaggagttttaccaactttggttcttctagttggaaagac

SEQ ID NO: 158939 - DNA, 429 bp, Glycine max
taagcgagtctattctttgtaatacacaaagtacttgttagagattagaactttattgtaaattcactcgttgagtgttataaagaatctctggttctatatcaaacttttgttttgaaaaccagaagtggattagtgacaaaacaatacttgggtgttcttagattaagggaagtctaaggattttgccagtagtggccttgagaaaacttgtaagccatattaaagtatttttattgctcttctttagcatattaaagtatttcaaagtccattgttgtcacatttcgcacacaaggttttcatcggaaataatttttatacatcattggatgacaatccacttttagtcactaaacgagggttcttaccaacttgtttattataacatcttccattctcaaaaggttttattatttgactaacaca

SEQ ID NO: 158940 - DNA, 468 bp, Glycine max
  unsure (1)..(468): unsure at all n locations
gcttcagccttaggttgttcaccatattgctcatgctgctccccctaatgctatcaaacttccccttttaggctctgatgatgccataaatgaatacaacattgagtgcatttagagagtcttgatattggattagagacttgatccttagtcttatagtcttatcctgtcaatgctatgcaatgcagtcatatatgcagtagtgtatattcttctccctcttttggtattaacaaggccaaaaagtgtgattatacacaaacaaaacatacaaataaatagagaattaaaaccatatttcattaagcataaagcattacataatatntaaacaaagacaaacaaacttaatcatcatcttaaaactaagacaaagaaaacatgacataatagacagatcatcaaacaacaaagatagacacacgaacataactacgcttcatcctcatccgggttcaagaggttaca

SEQ ID NO: 158941 - DNA, 460 bp, Glycine max
  unsure (1)..(460): unsure at all n locations
aaaactagctgcccatttaataagtactttgaccgagttatgttgatatctgcnaannnntatccagctatttcaaacttggatagacataaaagtaaatggaagatgcattgccccttcccacataatttcatttcgtgttcaaacccgtggcacaatattgctgctatatatataattaacccaagcagcgataggttgatctttgataaaaccctaaggctacctagtatagttttaattttctgctaatataatttcacgtcccttccaattttctcgttaggctagaaacatgtgaaaattaaaggaaaaatttaaccattctatccatctcataatgttatatatataagtggagcaatttttgcgttgaggtcatgtgcagttcaatgacaagtataaatctatcccattcttattgatctgcgcctaaccaaacttctatggagaaacaact

SEQ ID NO: 158942 - DNA, 453 bp, Glycine max
  unsure (1)..(453): unsure at all n locations
tgatacctctngaaatggtcttccaatcacgaggagggttgacattttctactntnngacctttgcaaggcatttattggttgaagtagagcttgaaccctttcttcttacccaaatcacaaacttctagtcttggcaggttttgtcaaggatcatcttgatattagttgctctactaatgtgtaagcttggaggatatgcaatggcttggttaggaatgtatatctgagaaagaagcttgcctagctcaatcaactgatcatcaaatagccctatgtttgcaagggtggcaaggagaaatcttgtaatgggtatccacagatggatatccttcacccattgaaccttgtaattctaacatcctttataaggatccatgttgcttctcaatgaagaagtgtctaaactgataaacgtcatagcatcattgtgtttttttnccttggctctatt

SEQ ID NO: 158943 - DNA, 465 bp, Glycine max
  unsure (1)..(465): unsure at all n locations
tgtttctagctactcagggttctagcgccaaatggatatcacttttattaatcttatggattgtgtcctgagtcggttgaattctcatggatacttatgttgctgcaggattcaaaaaagtttcgaattttataatgaaaaggaggtatttgatttactgggcttccttcggcttgaacaatatgaaagaaatctctatatatgcgaatggtttgtaagttgaggtggaacaccccctcatgctgttggaaaatggccctcatttttatgctctctgcatttcaccttgtacaatatgatgtatttagcaaacggctttttgtttaattagctgggcgctgctttgcaaatatacttgtggtacacaattcagctgtttgacttcaacatattttgtgtacaaaatatangatgagaacagatctgctgtagggatttgtttataatgtaagcatcatgactaca

SEQ ID NO: 158944 - DNA, 454 bp, Glycine max
  unsure (1)..(454): unsure at all n locations
ttganatgaaatcctatcttttcaagaataatttcattgtctttatatnccaaacaaaagattccatctttaccaatatatacagcaataaaatcactcttccgacctaattctcaaagctatctaaattagtaattatcacgaacaaaaaaaggtaccaacaaaatcctaatatcccaactcagaaactcatcaagtaaagcacaaacacctggaacaaagaaccatatcaagcaataataataataataataataataataaaccccgaaactaaatgattgagcaaaagaaaactgcgtgaagagcaaaaggcaagaataaaaacagaaaggggtatgaggacctgagaagacatggttatgtgtatggaagaaagtgaagaaacaaagaaggaataaaaatatattcccaactggntctctgtaatggaatatacaagggtgtggtgaat

SEQ ID NO: 158945 - DNA, 448 bp, Glycine max
  unsure (1)..(448): unsure at all n locations
ntgactatccttgtgacacactattgccaggtatgtttttgtgtgggacttgagaactgggcttaaccggcgtcttacttcttggaaaagctgggatgatccatcttcaggggactttacttggggggtggaaataggaagcaatcctgacattgtgatgtggaagggtaacgctgagtactttaggacggtgccttatactgggaacatgttcagtggagtatatgggcccaggaataacccactttatgattacaagttcgtcaataacaaagacgaagtgtattaccaatacaccctcaagaatagttcggtgattactatgattgttatgaaccaaacactttatcttcgtcaccgccttacatggattcccgaggccaaaatctggactgtntaccaatcattgccacgagatagttgcgacgtttacaacacttgtggtccc

SEQ ID NO: 158946 - DNA, 462 bp, Glycine max
  unsure (1)..(462): unsure at all n locations
tcaagaattatgatcaagattcaagattcaagattcattattcaagagaagacttaatcaagataagtatgaaaaggattnttgaaaaactgagtagcacatggatttttcacaaaacatgtttaccaaagagtttttactctctggtaatcgattaccagattgttgtaatcgattaccagtagcaaaatgtttttgaaaaagttttcaatttgaatttacaacgttccaattaatttcaaaaatctataatcgattacaatgttttgctaatcggtcacatcctttcacataaaagccttgtgtaatcgattacactgatttggtaatcgattaccagtgattgtttctaaataaatcaaaagatttaactcttcaaaaagtttttgactntntcaaattggttttaagtttttctaanagttataactcttctaaatggtcctcttggccagacataaa

SEQ ID NO: 158947 - DNA, 377 bp, Glycine max
tctgtatggtggtcagcagaggagcacaaaccacagacccttgcaacaggtacagatttctggttcaaggtcagctgggttaccaagttaaccaatgcatccaatttgccttcaagctttctagtttcagatgatgcagctgagtttgtagctacctcatgcactcctctaatgactatagcatcatttctggcgctaaactgctgggagttggaagccatcttctcaattaaatatctggcttcagtaggagtcatgtctccaagggcttcaccactggcagcatctatcatacttctctccatattactaagtgcttcataataatattggagaagcagctgctctgaaatctgaggtgaaggcaactggcacat

SEQ ID NO: 158948 - DNA, 451 bp, Glycine max
tcagaccaaagcaacttattattatgtatctaaaactcctcaatttaatggactttcaaggtttgagaagtgaaaatgagaatggggtaaatttggagcaaactctcacctcaaacaagtctatatcatcaatctaaactcgctcaaactggttttatgacgaaaactctaccaaatcaaaatttgactcctcaacacccaattttaccctagaaatggctcttgttttcactttggtcactcatattcctcatttgcacagtctacactttctcataagtcctaaatgacatttcaaactaggattaactccctttaacctccaaataccactaaatccagatttggccttccaacactcaaagcctcactctttttccactcataacactacattttcactttctaaccctaggttaactctacccttcatctctagcagttttccata

SEQ ID NO: 158949 - DNA, 446 bp, Glycine max
  unsure (1)..(446): unsure at all n locations
tgaaaaggaagagaatgaaaacaaatattttcttccaattntgaatgggaccaaagtaatggattgccttctacgtttcttcctaaactattgggattttgattgggtatttctctcacttttagtcaaagttcataaaaaataatttgactttgaaaaaaaaggaaaatatgaataaatatttaatgtgtcaaagatttaaaatatatactggttcaagttntaaccattaaatatttatttactacacatatttgatattattaaaaagtcaatgaagtgaataattcataattacaaataattttcatgaaattaatataactagtattttgacctatggattaaattatactctatatttataaaacaaaataaattgcaatataatattacttttaattattgttgttctttttacaaatattaacaattaattatataga

SEQ ID NO: 158950 - DNA, 429 bp, Glycine max
  unsure (1)..(429): unsure at all n locations
tgtcaatgttgggcattgatatgcgtcgcttgggcatgccttgtcgaggtcggcgtanacaaattcagtgcacatatgccatttcctattggccttctttaccatgataatattggccaaccagggcgagtatctgacctttgtgataaattgagctttgagtaacttgtcaatctcttctctaactgccttgcgtcattcttctcccatctttctcttattctatgagactgtgttggcctgagggcaaatggccaatttgtggcatatgatgctacgatggatacctggcatattagatggttgccatgcaataaatccgcattcctttgtaagactctaactatatgtctttattcatgattagcgaggtccctactgagttgagtgcattgtctacgatcgggttcaagtttcaacttgacgagt

SEQ ID NO: 158951 - DNA, 462 bp, Glycine max
  unsure (1)..(462): unsure at all n locations
agctcgaagaggatgctntaatggacgataagaaagagggaatgtgagatctctttattgaaggaataaaagagggagagaagtggaactctgaagtgtatctcataagactttcattcatcaaagttacaacaagtgttacacatgcttctatttatagactacgtagcttccttgagaagctttcttaataaaacttccttgagaagcttctttgagaaaacttctttgagaagctagagcttagctacacacacccatctaaaaactaagctcacctccttgagaagctagagctttgctacatacacccctctaataactaagctcacctccttaagaagagaagctagagcttagctacacacccctataatagctaagctcacccccatgacaaaatacatgaaaatacacaaaaaaaatcctactacaaagactactcagaatgccttgaaatac

SEQ ID NO: 158952 - DNA, 401 bp, Glycine max
  unsure (1)..(401): unsure at all n locations
tgctgntatgatattttgctataaactgaaaactgaacttatgacaccattagttggcaggcaaaagactcgtatataaacaaaggatggtgtggtgatctttaccttcaagcaacgaacctggaatttggaaaaatacaaaagaatacgtgcgaacccgagagagaacaatcaatgaataacttatattacaagtgtaagcactagtatttcctctcatagatttactaccatgattgttaagtataagctgagaggtaaaattaggagcttcaaattggttagggttttctcccaatatgtatactgtgtaagttgtaaatctttgaacttgtaaatcctaatgattttggaatgatattcaattgngcttgttggctgtcgcgctcatgccctttaat

SEQ ID NO: 158953 - DNA, 470 bp, Glycine max
  unsure (1)..(470): unsure at all n locations
tgtgcattcaatatcctgatgagggtgttccatatgttttctatactagactaatacatttgctgcccaagtttcatggtcttgcaggtgaagatccttataagcatcttaaggagttccatattatttgtttcaccatgaagccccctgatgtccaagaagatcatatctttctaaagggctttcctcattctctggagggagtggaaaaagattggctatactaccttgctctcaggtctattttcagctgggatgaccttaagagggtgttcttggagaaattcttccctgcatctaggaccactgccatcagaaaagacatttcaggcatcangaaacttggtggagaaagcttgtatgagtactatgaaagattcaagaaattgtgtgcaagctgccctcaccaccagatttctgagcaacttcttcttcaatatttctatgagggacttagcaacatggagagg

SEQ ID NO: 158954 - DNA, 451 bp, Glycine max
tagccagttgcccatacgtgcttagtctacacatgtgttcttatcctgcacttgtgcgcttactccaaatacgaaatattttaaaacatggaattctttgggcttatcgcagcgtgcaagcttagcgcaacaaaacaacatgtgcttgctaagcgaacacatgcacattgagcgcatagcataatcagacaacaaacaacaacaaacatttgcacttaaatcaactaacacaaatattcatagagtcatgagcataaccaaaatcaacctaacatcaacacacaaaccaactaacacaattattaaacaagttacagaaaagaggagaaagacacaaaccaactaacacaattattaaacaagttacaaaaaagaggagaaaaagggtagaaatcctgggttgtctcccactaagcgtttctttaatgtcattagcttaacgggtcaaatg

SEQ ID NO: 158955 - DNA, 456 bp, Glycine max
  unsure (1)..(456): unsure at all n locations
actcagcttaaccatntaaacgacaaaagngntactcaaggttctaatgaancccgnaatatatcgagacgctcataactgaaaacggaagctctgagcaaattctaacgacaatatacttttactcggatgtccgattgagtcccgtaatatatcgaaacgctcgtaatagaaaacgaaagcacgtagcaaattcaaaccacaataacttttaactcggatgttcgattgagttctataatatatcgagacacttgaaattgaaaacagaagctctgagcaaattcaaacgacaataactttntactcggaggtccgaatgaatcccgtaatatatctagaatctcgtaattgaaaaaggaagctatgagcaaattcaaacgacaataactnnttgattagatgttcgattgagtctcctaatatatcgagacgctcaannatgaaaacaaaagc

SEQ ID NO: 158956 - DNA, 460 bp, Glycine max
tatgctgcagacatctacaatagacccgctctttctattctcaaaatcagccacaaaagaacaactatgacctctctagaaataggtacaatcccgggtggaggaatcatcccaaccttagatggtcaaatcattcacaacagcaacagcaacaacaacaacagcaacaaccccagaaacaacaaatagttgaggcttctccgcaaccttcccttgaagaacttgtgaggcaaatgactatgcaaaacatgcagtttcaacaagagaccagagcctccattcaaagcttaactaatcaaatgggacaattggctacacagttaaatcaacagcagccccagaattctgacagattaccttctcaatctgtctagaatcccaaaaatgggagttccattacattgagatcgggaaagcaatgtcaaggacctcaaccagcaacatcttcctcatctgcaaa

SEQ ID NO: 158957 - DNA, 465 bp, Glycine max
ggcatggattaatagcaacagatacagagtattttgtgtttaggataaatcgatcgcaataataaaacctcatagagagttgtgcttgatcctcaagagagaacaacgttggatacttagccttccattaatcagtagaaaacgaaattgcagattgaagcataaaacgaaattttattgctaggtgaatagtaaaaactggaattgcaaaacctaaaattattctttctccccaaaacgaaaagagagctctaaaactaaaaccttggtgctgttatataggttctcagccccaaagcttacaaatctattttaagtccaagcccataaataaaatataatctgggcaagataagataagatttgataaaataaaatctagatgaaataaaatctagataagataagataagatcaaatctagatgaaataatatctagatgagataaaatctggataagataa

SEQ ID NO: 158958 - DNA, 469 bp, Glycine max
  unsure (1)..(469): unsure at all n locations
actcagcttagagcttggnntgccccatgttaaatccttactagatgtctgttactgcctaaaatattggctagtcgatggcacaaattttggcaaaaaatagacttcttggtttttcctgtttcatgccttggctttttcctccatgccaagatatcaccatgtgccatgtgtcggagcttggtttgctccatgctaagttcttgagtgggtgtccttctgtggcgttcttggcaagttagttcaaattattgcaaaaaaattgacatcttggttttgcttgtttctttccatggctaggtcctccatgctgagatatcatcaacccatgccaagcttagaagcttggttctccctgtgccaaggttttgacttgtccccattttccgctaagttcttcgctggtcgttggcacacantttggccagaaaatgaattcttgtttttcatcatttcttgccttggctac

SEQ ID NO: 158959 - DNA, 357 bp, Glycine max
  unsure (1)..(357): unsure at all n locations
tggagccttaggctctacacctctcttgtagagccatcatactcactcgcgtgagcacacgcgaccatntctgtgctatcggagcgtgctcacatatgctatgctatgggcctgttggttccacccgagcgtcccgctctggaactctaccggctcttcccttgagcggaagatagcacatttgccttgctcggctggcaatatatacaagccttcattgctatgagtacgtgaccggtctatgaattagtacctataaagagaaaaactctgcaacaggtgccactaggacacgaatatcgagggtaaatgcatcaacgtcctcctagccgtggcaggagcacgtcctagatgtgc

SEQ ID NO: 158960 - DNA, 430 bp, Glycine max
  unsure (1)..(430): unsure at all n locations
cgatgtgagaaagcgtttaatagtcagtcttcctacttttattngntgaccacagagtggtacctagagatatgttgcgggggtcatgagaccttggggacgtcaggtggggtgctattgcccaaaatcaagcttggccaatcccgacccaacccgggcatagtcagtcagtgagaacctgtgacgtacctaagcaggcgagctcttggcagtcaaccaataaaagaacaaagtccacgaagcaaggaggcttgtgtggcggctggccacctatttatcttgngtgttatctgagaaataccctctagtaatcgattaccattcgtgggtaatcgattacagggtttaaaaattgagacaggatgttaagtagcttctggtaatcgactaccaattgtgtgtaatcgattacacagcgtgatatggcact

SEQ ID NO: 158961 - DNA, 450 bp, Glycine max
  unsure (1)..(450): unsure at all n locations
ntatgaagagatctggttttccttttctcgaaaacttgtgctattcatcttttcattctcttctccctttgccaaaaagaattcgccaaggactaaccgcctgaattctttttgtggctctcttctcccttttccaaaagaacaaaggactaaccgcctgaattcttttgtgtctaccttctcccttgtcaaagaattcacaacgacgtagtctgagaattcttttgattcttccctttccctaatacaaaagtgttcacaggactaaccacctgagaattcttttgtatccccattcacaaagtatcaaaggtttaacagcctgagatctttgtcttaacacattggagggtgcatcctttgtggtaagagtacagggtaacttgtgtttgactgacaacaagagagggtacatctcttatggatcagttctagcggagggtacataca

SEQ ID NO: 158962 - DNA, 432 bp, Glycine max
  unsure (1)..(432): unsure at all n locations
ctgcagctcatggtaatagccttaacactttatttttctcaacttatatggactactgaactaatattaatgaatgttacatcacttccaagataatcaaacaagattgcttcaagaaacattcaaggttaagcaaatagagattgcttcaagattcattcagggtcaagcaaacaagattaaaagaatctcattggttgatcaacttttacctcaaacacactatttccaacaaatcaaggcattggtaatcgattaccaggcagtgtaatcgattaccagacagtgtaatcgattaccagaagacaagtttgcaaatcagcttttcaaaagggttctcaaacttgaatattgaaagttgtaatcgattaccatnggtgtgtaatccattaccagtaacggaactcctgaaattcaatttgaaaagtcatg

SEQ ID NO: 158963 - DNA, 297 bp, Glycine max
tatgatagcttacaccgtttcatgtctatggatggccccaagctttcttaatcaagttgaaagttagattcacaatattttatggttagggaacattgaaaccaaaaaattagtcacaatttcttgggctaaagtttgctctccttgggaggaaggggttgggcctgcattcattcaaagatcttaatgagacttcaatgctcaagcttagatggatgattttatcttccagtgacgattgggttgttgtgctgaggactttcttctactaaataatcatttgccctatgggaaata

SEQ ID NO: 158964 - DNA, 450 bp, Glycine max
  unsure (1)..(450): unsure at all n locations
cctgaggcatcaagctaatccctgaaaattggggtaggagatttgctctgtattcatctaacgactactttccttagcacacttatgttcaatatgtcggatttgccctggagattcgccctgaattttctcctttgaaaactattttatttggaaatccttcccaagacaccattgaaccactgatggaggctttggaggaatattattatgatggaaataagataaacgaatcaaggcagtttattgaaggagtattggatcttgaaaagagaatcaatagactagatacattgacttataaattaaatataacaaattctgtcattgttgaacaaattattagcttataaaccaaatctttaccatttgttaatatgttttacttatgtctgatacgagcataataaaatgacatgaatgttcataanatcaaactacaacatgatc

SEQ ID NO: 158965 - DNA, 412 bp, Glycine max
actcaagctagggatatttttactatatatgtgtgtgtcttcgtttatctctacctgttttataatgtgataattcactcctcatgtgttgtttatgtttggatcatgtgatgatcttaaaccttgtgtttgtgaaagcaaatggctaggtgaattactttaagaaaccttgcgatggaagactccgagacacaatattttgataggatgtaacattggaacaagagtttttattttatttgcatgacgtatcaaacatgtcattttactttatttgagtaacttgaacagtcttgttttaagtcgtaaatatttctaagaaattttatttggtaacagtgaagcgaatgtgagcattacccacgtcgactgatttacgactttattgaataaaattgatttaattagattc

SEQ ID NO: 158966 - DNA, 382 bp, Glycine max
  unsure (1)..(382): unsure at all n locations
aaaatatttattccaattcacaagagacacttacgttttttgttgttctcncanccncctggcgaaaattcaataatatttgaggatgatgatggcattgatgctttgctatccaagccaactattaaacagtctatgtttacttcttggctacaagctaacaacatgggtgcctccaagtatagatgttggaggccatgtaaagatggaaatacaattggcaagcttaactgggtgcctccaagtactggagaattgtattaccttaagatgatgttggttgtggctaaaggactgaccacttatgaacaaattcacacagttaatggtcaattgtattcttcatttatagaaacttgctttgctatgggattattgcttg

SEQ ID NO: 158967 - DNA, 352 bp, Glycine max
actctaaggggaaaaaataaacttattggctcctaacctcatgatttcattttcctctcgccatgtggttcttattttctcagggtccctacagtttggctaatgtggaacatgatttttagaatttccaccgataatcttgctatagaagctagatttgattttctatgggtcaaatttcttgttcattgtcttgaaccatgaggtgtgctgagtttacgctcctttgagtttgacttgtactttttgggctgaacctaaccataaattcttaaaaaatataagtaaagaaacctcaaatctaagtgctatttgaaagcaagcttatataataaagtgatcaaatgtttga

SEQ ID NO: 158968 - DNA, 410 bp, Glycine max
  unsure (1)..(410): unsure at all n locations
actcaagctggtcatacctacaagcaattnntttttnggggaaaaagattctttatttttgaaactnacaactccctcttaggacaatacaggttcaaccttcaatgattaaagttgagcaagacccaagtgtgcatatgcaaagcataaattcattggaggtagttgtcgcaacatgccantttgcgggcgagcgagggcgaggctcacgggtgcgctttccaaaggaggaaagatgtgcaaagtcgccaccaacgtttatttgtggaaaacgtcgggaaaaccgaaggaaaccggtcaaaatgaaaattctaagttcgggagttgtatttacgcttgaggaaagtattagcacctctcacgtttggctcaaaggacaacagcctattttttaaaattgtggaaattgg

SEQ ID NO: 158969 - DNA, 373 bp, Glycine max
  unsure (1)..(373): unsure at all n locations
agcntagttctacgtgagatgcagaattgtatgatagtgcacaccaactctacagcgacaataatgtatggttaaacccaataagaataagcttactctgtctcatcacgagaactattgattcttctatttttttaaatgctcacattagctactacaaccagtagtctgtgagcactgggaaaccataactaatgacgggaatgttgagcaaggtcatgacaacaaggtgaggaaaaaggctatattataataatatactatgctataggataagatattcgtctaacacaaggatgtggatgtattgagatgcaatattatttctttaacctttctccatgcggaatagcattgatgattacgttaaaac

SEQ ID NO: 158970 - DNA, 417 bp, Glycine max
  unsure (1)..(417): unsure at all n locations
caatactcaagcttctaaactacaataactatgccgaggtatgaaacatangttatattattattacaatccggnngnagaaagctaatgacctaatgtataattgatctttcaggttagcatggcaaccaaaatggcaactgttgataaagcagaagaacttcttgaaaagcttcgcaaggcttcctgggatcctgcagtgcaaggtattgtgtatataacatgtgtttcttatgtgtatttgcattacgctttaaattgtatatatagtttctatttttttattagttatgtatggggaaaatgcattgtatatgaattttgttttagtcccccaaattaaaaaaaataaaaaagaaagtccttttattactccctcaaattctaaaaaaaacaacacatttttattccctgatc

SEQ ID NO: 158971 - DNA, 368 bp, Glycine max
agcttcatatatgccacagtagtttatattatacacactaaatttgtgactacttgaactaattattataggaattaagacaacactaacaaatatagtagatcataatcttatttttttgcagacgttatcttttagcaggggagggaggaagttaagataataaattaagatggaagtacactattttaattatatgtaagatttatctctatatgttattcgactttaaggagagacatacctttctgaataaaacaacctcaaattttttaaacaagttctaatttttggatatcgtttcttggtagatttttatggtcttattagagcgtcgtcctcacatttgagattacaaagaatgtatt

SEQ ID NO: 158972 - DNA, 404 bp, Glycine max
acaagactcaagcttgacacacatcttcatggatcattcatggaacttttttgtatttgggcatgcaccaaaagtagagagaccttcagtgctctctgcttgttaaatcttctaatatgaaggagcaaaaatattgcccttgacctgtttatatgccattatgcctattcattgatccttgagtaaaggacaagttgcttgatttggacaaagcactaggcacatgaagttacctaaagcattacgctcacatgttccctaccggtgaggcctataatggtctctataaaattaaagatcatggatggttcatgatcagagccatatactttgcatcaattaatgaaattaattttggaccattgtataagccaccattctgtacctattgaaagtggtgtgat

SEQ ID NO: 158973 - DNA, 325 bp, Glycine max
  unsure (1)..(325): unsure at all n locations
agcggcattgcagcttaacaccgcccattatgatagctatttttactttaatgtcaanggtcgcagtggcaataccaatgctantagtggtggctagccatggtgatggttgtgtcagaggtaatgacgacattggtgttaatggtgagagtagtaatgacaatgataatgtcaatgatagcaatgctagtaacaatatttttttaacaacatgataataacaatgtcggtggtatggacgatagcgttagtattggtggtagtgagattatgttgtggtggtgataatgatagtggtagtagtagcactagtggtgattgtggc

SEQ ID NO: 158974 - DNA, 384 bp, Glycine max
tttcctatatttcctataagtaactacctctgtccttttataaaaaaaaaaccttaagaattttaagctaaaatttggttcttatgaaaaggatgaggaaatattctacaatagcagttattaccattattgatgacttaaaaaaaaaaaaactgctcaagagcacttgcagtattaataaggaagtactggtagatgtggctaacaaaacttatatacactgccaaaacttctctgcatattcgacctaagaagaagttggatgagtgtggttgccttcgtaggttgttattacataccttgggtcatccttgtctctctccactctcttttttacagtgcatccatccactgaacacctgtagttattcctgtaatcaaata

SEQ ID NO: 158975 - DNA, 399 bp, Glycine max
agcttccgcttgacaacatattatattctctagtcttgcttgtgctccgaagattttccctttcgctttggttctattttcataaataaataaaaaaatgttaagaggaatgataatagaatataataactaataattaatggcgcatgaatcttgcattcaaaatgaggagcgcgattgactgaccgagaaacgatgactgttggtgttagtatgtattagtttggagagagaatttgtgggatttgattaaactggcaaaagaatgcagttgtgagttgtgtagccaaattatagaactagaatcccatgagatgcaatgataagagaatggtgttattatttgttgtgcacctaaatttaaagtgacactggtcatgttattttagcataaaaatc

SEQ ID NO: 158976 - DNA, 392 bp, Glycine max
  unsure (1)..(392): unsure at all n locations
tggtattggttactctaaattatcattttattaccgtttattttgtaaacatatnnaataaaaacgggttaaataagatcttcatatattggaagcgtttgagacaacgagtagttgcaatatttaaaaggatattgaatcttatttgatattagtgaaataaataagcttcacaatgagcttattaagttaacattcatcatacataaattttattaaaatacttaaaaattataaaagtgttattaatcaattttataagattaatcaaacatgtgccattttcaacgcgagtgctaaaatatatgatggaaaatggatcctcttcaagtctccatgttctacctctgcaacaggagagaaaaaatatgagagagaatagagaaatgtga

SEQ ID NO: 158977 - DNA, 418 bp, Glycine max
agcttctcgtgatcttgtgtcatgatcatattgacacttgtgcggcccaccccattgtgtgacttatcatgaatcagtttttaaaatgccctcatatacaaaaggcaaggacactctgtacttctattcaagcaacaaacgacatactcgatcaatttgcttacatcgacttttaaactttgatgcaccttcataacatatactttgactgcattttagaccgcatctttactatcaaaatccatgtcaacatataattcttggccaacattaaaactcgatggcatcttcaaaccactaatgtcttcctcatcacgatgactcccttgatatcgtcgaatgcaaagtatcattactaaatggattttgaattccctgtccacctaatagtacacaatacaattctgttcatactttt

SEQ ID NO: 158978 - DNA, 388 bp, Glycine max
tccatccattggcatcaggccaagcaggattaaaatcttatatttatgttgaaccctaccgagtgtcctgtacacttggaaaatagaaacgtatgggtgggtagctacttgctcagctggatttccatgtagatcttgcttgggtaattgactttttctaacgtgtaaacggatgtgattgttgatttctctactgcatatctgtgtaggaaaccaaatgaatttgtataattagcagtagtttatacctatactcggattaaatgtagtacagtacttatttgtcagcgtgattaaataatttaggcatgcttatctgtgtaatttattgacacatttctatctttgcattgccttcatgttcttaggtatttattctcatattact

SEQ ID NO: 158979 - DNA, 324 bp, Glycine max
agcttgtggcaaaggaagatgtatattttcttatagatgctcaaagagattcaccggttgtaaatgactatatcaatagttatcgagatgcaggtcaaggtctctgcttttatagactcttcatgtctggttaagaaaaaccattggatgagttattaccgtgagaaacacctcaataccatcgaacgacgtgtatctcttgatttctattcatgacttggctatggtaaacgactaccacaactctgttctcgaacacaccactcattttatgaaaagacgtgactcttcacaattgactctgaatctcacggtcagataccc

SEQ ID NO: 158980 - DNA, 414 bp, Glycine max
  unsure (1)..(414): unsure at all n locations
gacctataaaactcagcttccttttccttaggagacagcttatcttaatcgtcgacgatnnggccgggataatcattgacgacaaccacgacagtactggtgtgcttcacgacggcaaccaacttagagagacaagcttaagggtacaaaatgagtgaggtaatgcgggctagggtacagtgcgagtatgcaagagaaaaagataaaaatctacttcagattcaaagacggtgttcataaaacccgtctttggataatgtagttcaacaacggtgcagtaaacccgtttttgtaacgcgcagataacgtcatttttaataaaaacgtcattgaaataaatctcttatttactaaaatgccaccgcctctaaaacaacatcatatttggaaccaccgatgttggcaacgcgtctt

SEQ ID NO: 158981 - DNA, 433 bp, Glycine max
  unsure (1)..(433): unsure at all n locations
agcttganattgaaccaaggaatctctcttgatattcaaatggtcataacttatcacacggaggtccgattcaggcgcataatatatcgagacgctcgaaattgaaaaacggaagctctcgagaaattcaaatggtcaaaacttttcaaatgaaagtctgattaacgcgcataatatatggacacgcttgaaattgaacaacggaagctctcgagaaattcaaatggtcataacttgttacacggatctccgattcacgcacatagtatatcgagactatcgaaattgaacaacagaagctctcgagatattcaaatggtcataacttgtcacacgaaagtccgattcacgcgcataatatatcgagaagcttgaaattgaacaacggaagctctcgagaaattcaaatggtcataactagtcacacggaagt

SEQ ID NO: 158982 - DNA, 390 bp, Glycine max
tctcgatatattatgcgattgaatcggattttcttgtgtatagacatgaccattcggatgtcttgagagcttctgttgttcaatttcaagcttctcgatatattatgcgcccgaatcggacttccatttgaaaaagtatgaccatttgaatttctcgagagcttccgtgggtcaattatcaagcgtctcgatatattatgcgccagaatcagactttcgtgtgataagttatgaccacatgaatttctcgagagcttctgttggtcaatttctagcttctagatatattatgcgcctgaaacggacttacattggaaaaagtatgaccatttgaatttctcgagagcttccagttgtcaatggcgagcgtctcgatatattacgcgcctg

SEQ ID NO: 158983 - DNA, 368 bp, Glycine max
  unsure (1)..(368): unsure at all n locations
agcttagctacacacacctntctcataactaagctcacctncttgagaagcttccttaagaagattcctaaagaagctagagcttagctacacatacctctctaatagctaagctcacctccttgagatgagaagctagaacttagctacacaccccctataatagctaagctcacccccatgacaaaaaacatgaaaatacaaaaaaaagtccttactacaaagactactcaaaatgccccgaaatacaaggctaaaaccctatactactagaatggccaaaatacaaggctcaaacgaaggaaaaacctattctaatatttacaaagataagcgggctcatacttagcccatgggctcgaaatcta

SEQ ID NO: 158984 - DNA, 383 bp, Glycine max
  unsure (1)..(383): unsure at all n locations
tcgatggctaagtgaagagatagagagtgtttttttcttggaccaacaagttntgattaattttcccacagggaagtatgtacatgaagtaatatgtggtgtagttcccatgaaaacttgtcacattcatcttgggagaccatggcaatttgataggagtattatttatgatggtcattccaataagttcttctttgtacacagtgattgtaaattcacacctgtatatttaactcaaagggagttatgtgaggatcaaagcacaatgagaatgaaaagagagctcgagagaaaaaaataaaagaaaatgagaattaaggaaacaattaaagagttggcatgaaagaacgaaaagaaagtgaccatggtgggaagaaaaatga

SEQ ID NO: 158985 - DNA, 439 bp, Glycine max
  unsure (1)..(439): unsure at all n locations
cacctgangcatgcaagcttgaccaagtaacgctatagtgcagggtgttgaatcacctgtgtcatcaactcttgtaagctccgatggtctgtcatgatgatgaagttgtgccctaacaggtactgacgccattttacacagcagaggtgatggcatgtaactctcacacgtaagtcgaagcctgtagcatccttgggcacaggtgctttgcataaaaacgcatcatgtcgtgacttctggaacaggactgtcccgatagcggtgctgaaagctattggttccacaatgaatggctccgtgaagttaggtgaaacaagaataacggcctgagtcattaaagttctccgatgtgggaatgcagtgagagcctcangcgttcacatagaggtgtgtttacacagtaaagtctctaacggagcgcgaggctgacataaatgtg

SEQ ID NO: 158986 - DNA, 388 bp, Glycine max
  unsure (1)..(388): unsure at all n locations
ctggctagagcacaaaattacatgaaaatgctagcagattatattatactagactttcacntggaggcgggagatttggctttggtgaaattacaaccatataggcaacactctattgctcttataaagaatcagaaggtgagaatgtgttcttttggaccctttgaagtggtggaacatgtgagacaagctgcttataagttgaaatcacttgaagctgcacgcatacatctaatttatcacatttcattacttaagaagtttcaaggaagtcaatcacagcagaacttaccaatgccacttacaacaatataatttggcccaatcattcaacctgaacatgttttggatacaacaattattaaaatgaatgcggttgaaattcaac

SEQ ID NO: 158987 - DNA, 410 bp, Glycine max
  unsure (1)..(410): unsure at all n locations
atacactatanaacaacttcataaacaaacctatattttgaagatgtctacaagcatatgtaaactagtataatagaagacaggttataatactaaaataattattctctctgtttattgaaacgtcacaattatgttcgccatgatttttattttcttatattctctaacaatttcacattaaaatcttttttctttgagtgttttagtaagtattacaagagaactgggtagtaaaatttacattaatataatttctttataagaattaaatttataatgagggttatctctcaataacgaagagactcaatatattaaaaataatttaaagagaatggtatatttatgataataatagtttataaaatattaacaattaagataacatattaatatcaatttatctt

SEQ ID NO: 158988 - DNA, 393 bp, Glycine max
  unsure (1)..(393): unsure at all n locations
tattgatattgcaatattagattttctttcctatattagaaccaaggagnaaaagtagcagaacccaaacaactagcaccaaagtttgagtgttcaataaagtagcacaactttagtcaactaaacaagatccttctgcaatacgaaactgtgaggaagttcagagcactctgtcctctttaacatgcttcttcttcttcagaaatgcaacatggcaagaaagtatgatatagaatgcatataaaaggtagcctgcaaattaaaaaattactttatagagaaatgagaacattaaagtaacatataaaagttgaaactggatcggtgtaaatgtgtaattatatcctgtactctaacttccaacacaagagacttaacattccccttcaataa

SEQ ID NO: 158989 - DNA, 404 bp, Glycine max
  unsure (1)..(404): unsure at all n locations
actcaagcnattaaaagtggggtaacttataatggaactcattgatttgccgagattttctttggaaaaacgaggcgtaatgattatttatttttgcctagcatgaacatcctctagtaaaatgaaaatttctctctatatgattaactttggattttgagtcataccttatccacaactagacatacatgacattttatactggttaagtttataaaagtgtgttatatgataagtataagttatgcgatagttgtataaatactctatagaacgaaaaaaaatgttaacttgagtattaatataaatttttaatcagataaatatatttatgtataaatttggtttcggttggattagactgaattctataatgaaatcccaaatctgatattattcaaaac

SEQ ID NO: 158990 - DNA, 422 bp, Glycine max
  unsure (1)..(422): unsure at all n locations
agctcgttgagaaagcttctcanagaagctactatgaattctttggaggaagcctcttaatgaagcttctagagaaagctacatggagctgcctcggtaaaaacaatgcccaacgtttgttaaccgttggatcttctcaaaatttggtctgcaactccacaagacactnttccattatcggaccgttgggatgtttgagaagatgtctggagtgtgctacaagcctcttaatgaagcttgtggaggaagcctcttaatgaaacttctatagaaaactacatggagctgcctcggtagagacgctgcccagccttcattaacgcgtggatcttctccgaatttcgtctgcaacttcacaagtgaatataaaatgacgctgctgttgttgttgatacgtctttagatgagatgaattatgtagt

SEQ ID NO: 158991 - DNA, 378 bp, Glycine max
  unsure (1)..(378): unsure at all n locations
ccagctgaagacccgggtgcaaagaagtcagccttcctcatttcttttatagnatgangaactaagggacgtcaatatggccaccgatgaagccttggaatgagaaaccaatatggcccgaaaggaagaacacgacccattcaagttttgaggggctttatagggcactattattgagctccacctccaagaagggaaagggatattacgggttttatcatgatctggaagacgaactttcgctcggctttgtctaaaaaaattttcatacattttttgaacatatttggaccacgtttacttcatatacgagctcatccactgatactttttcggactccgacaaaggtaacgatgagtacgccagatctcatttaa

SEQ ID NO: 158992 - DNA, 446 bp, Glycine max
  unsure (1)..(446): unsure at all n locations
agcttctacttatatggcagggcgggctttcttcactttcttgtttccaacgcgagctctgaccactgttcttcctttccacgatgcttcttttcatgtccgcctgagtgggtttatagcctaaaccatacttcccacgatttccttgggtttttatcaggctagttatgccgccattgtctntgcctaaacccatcccgggttcataaccgttccccaacataactcgggccatcattaccgccgcatcggacagacaaggttgcccaaagagggagtccacggaggaaatgctgaccacctcaaaagactggaaagcggtttctaacgattcttctgcggctctcacgtaaggcatggaggatgggcagcttaccaagatatcttcctcgcctgacacgatgaccaagtgcccctccactacaaatttcatcttttggtggagt

SEQ ID NO: 158993 - DNA, 417 bp, Glycine max
  unsure (1)..(417): unsure at all n locations
acctatnaatactcaagctttggaaatataatatcttgatttctaaaattcccattttttcttcctctttggccacatcaaaaagtgcaatgtgcgttgtaacataaaatcatacaccaatgaataaatatacaagaaatgtattcgtacaagaaaaaggagaaacttataaaaaatcaaaccagataataaattatccacaaatcataataaaagcatatgtatcaaataagtcataaaacaaatcatttgtctaagtcactaacatcttgaattctaatggtgtagcaagaaactttgagtagtggttttgtgaagatgtttgcgagttgctttttggtatctacaaattctagaacacagtcaccttttaggacacgatctctaagaaaatgatgtctaatttctatgtgcttg

SEQ ID NO: 158994 - DNA, 428 bp, Glycine max
  unsure (1)..(428): unsure at all n locations
agcttcaacattcaatgttgagcgtctcgtaatattacgggactcaatcagacatccgagtaaaaatntattgtcgtttggattggctcagagattgaacattcaatttcgagcgtctccatatattacgggactcattcagacatccgagtaaaaagttattgtcgtttgaattagctcagagcttcaacaatcaatttcgagcgtctcgatatatcacgggactcaatcagacatccgagtaaaaagttattgtcgtttgaattggctcagagcttccacattcaatttcgagcgtctcaatatattacgggcctcaatcagacatccgagtaaaaagttattgtcgtttgaaatggctcagagcttcaacattcaatttcgagcgtctcgatatgtgaccagactcaatcagacatccgagtaaa

SEQ ID NO: 158995 - DNA, 396 bp, Glycine max
  unsure (1)..(396): unsure at all n locations
ntgagccaattcaaacgacaataactntttattcggattgntgatataancccgnganataacgagacgctcgaaattgaatgttgaagctctgagctaattcaaacgacaataactttttactcggatgtctgattgagtcctgtcatatatcgagacgctcgaaattgaatgttgaagctctgagccaattcaaacgacaataactttttacacggatgtctgattgagtcccgtcatatatcgagacgctcgaaattgaatgttgaatatctgagccaattcaaacgacaataactttttactcggatgtctgattgagtcccgtaatatatcgagacgctcgaaattgaatgttgaacctctgagcaaattcaaacgacaataactttttac

SEQ ID NO: 158996 - DNA, 412 bp, Glycine max
  unsure (1)..(412): unsure at all n locations
agctatacaaaataggctaactnnngtatcttcttgagctgagtctagtcctacaagagggatctgcggacgaaactcagtttaagttagtctaaacctaagagggctgtctcaattgggcctagtccaacaagagggatctgaggacgaagcttggatagatttggtctgacgagggattgaggtttantaatttaggctacaacatagaacacaagagcatgattgattagagaaatatatttatatgcatcagcttgtttgttagaaagacccaacatttccaccgactgctgtcacttttacttactttgcattntatagtttttagcatagaagttagtttaaattctatttgaaattatcaatcatacatgttctctcaacaatgcttcatttctgaacttaactc

SEQ ID NO: 158997 - DNA, 391 bp, Glycine max
  unsure (1)..(391): unsure at all n locations
tatctcgccatggggagatcanctttgttttcctcattctttttcgatccatatatgctcttataacatcccaatatacacaaatttgtcaaaaactatctttttttagtttctaaaagcagtttatacaatttattgataaaaacaacaattaagaacaaaaatcctaaagaaaagctaagataactactcataaaataaggtgtgaaaaacaattatcatcgacatgtaggattttggtgtgacacttttctcgctcaatagtgaattatcaattttagttgtatcactagttccacctctcatatatataggagagtgatctaatccaaattttattcgactagatattcaagtaattatcttatttaattagatatatagataattt

SEQ ID NO: 158998 - DNA, 450 bp, Glycine max
  unsure (1)..(450): unsure at all n locations
agctntcagatgtgtgcgttgttccatctaagtatgtattctgggattcaattcacccaacagaaaagacataccacaacatcttcttggctagcctgtccaccattgatttcattgtcaataactagaataattagttcctaatgatacattccttcgttttcttcttatcgattatggggtcccacattcaatgtatttcttcttccccctagtagtatatgccaaagtggcatatatacaaaataaaatctgatcaataatgtgatcaacgtacgccaatcaaataggttctaaacacatcttatgactgcacaataccatccatttctttcccctctccctcataaatgtgttatacatataaacacaaataacatgctaaatntcatcttaaatgaattgacattaattaagtgaagtttatacaaacaactagcactctataat

SEQ ID NO: 158999 - DNA, 380 bp, Glycine max
tgctgaagaagaaactgccacaaaagcaaccattgcattttatctttcttcacaaattgatctcattctgcactttcttcccctaaacatccgcaaaacatcaatttatgcttttattatagttaaccaaaacatatgcattccttataatttgttgtaaatgatttcttatgtaggaagtccacgttcatgttccaagtcctttattattttattttattattttagaaaattttgttattttcgaatctggtatattttttattcacattcaacatacatgtctttgcaacatatttgtaaccactttttctaaaataacaaaaacatctcactgataacttttatctcacgttatgataataacgacaaagagaatg

SEQ ID NO: 159000 - DNA, 439 bp, Glycine max
  unsure (1)..(439): unsure at all n locations
agctnttctatgagcaaagcataggcttgctctntgttttcaccccaggtaaatgccacattcttcttcaccagctcattgagaggtgatgcaattgtagagaaattaggaacgaaccttctatagaagcttgctaacccatggaagctcctaatatctcccacactttttggggtgggccattcttggatgaccttgattttctcggggtccacttggaccccatttctaccaactacaaaacctaagaaaactatattatctacacaaaagttacacttctctatatttgcatagagggtgtttatcctaaggactgaaagaacttgtctgagatgtcctaagtgatcatctatgctcctactatacactaaaatatcatcaaaataaacaactacaaatctatctatgaaatcccttaagacatgatgcataagcc

SEQ ID NO: 159001 - DNA, 389 bp, Glycine max
  unsure (1)..(389): unsure at all n locations
tgaactattctgaactctattctaaagttttattttcatagncaggtgcttcatcagancgatgtacactctggtgtagctttattctgatgctggatgctctcttaatttgtagcctttgatttgtcctataagtaaggcctttgttgtcacacaattttccaagttcaagtactttgagggaagcactcttcatcacgcatatggggttcaagaattcttctaaggcttttatccttgacagtagttttgagataacctttccaagcttgttatgagcacctcaaaatgtatacacacatatgattcttaaagatgttataactgaaacaattaagaagaatgttagtcatcgcataaaacccatcatccttataattcgcattgct

SEQ ID NO: 159002 - DNA, 407 bp, Glycine max
agcttcttgtacccgctccctgttgtatatacacccgatgcatcttccttccaaatccacttgtcttctcgatccggatggatgctgataccttctagatcttctaagaactttacagccatctccatctcaccatcaaaaagttgccttcttcatttaaagtcccattcccaacctgtagctgtgaagttgcccatcatctttatgacatgttgttgctgtttggaaatggagaaaagtgtaggatatttcaacttaagtggtactccatcctccttccatccatcctcccaaaatgtggccttttatccacacgccacatttcaatttatccctttatcgaaacccgcttcatctgcacttaagggactattatattatatccttcaacatgttgaactctattg

SEQ ID NO: 159003 - DNA, 382 bp, Glycine max
  unsure (1)..(382): unsure at all n locations
tgctaacccatggaagcttttaatanctctcattctttctggggngggccacccttggatggccttgattttctcaaggtccacttggaccctatttctaccaactaccaaacctaagaagactatattatctacacaaaaggtacacttctctatatttgcatagagggtgtttttcctaatgactgaaagaacttgcctgaaatgtcctatgtgatcatctaagctcctactgtacactaaaatatcatcaaaataaacaactacaaatctacctatgaaatcccttaagacatgatgcataagcctcataaaggtgcttggtgcattagtgagccccaaaagcatcactagccattcatacaaaccaaacttggtcttg

SEQ ID NO: 159004 - DNA, 459 bp, Glycine max
  unsure (1)..(459): unsure at all n locations
agcttctgttatggtcgttgagccttgttccttctgtatcaactataaatgtacgaaagatgctntgtgaatagaagaagaaaaagaagaaattcctcaaattccctaaactctctatctctctctctttctcaggaggttacttgggccttgaaagccaagctctaaaatggagctttctcttttatatgatgagaagattggggttcaacaatacatgcatcaaatggattgatggatgtcttgtttctagctcagtatcggtacttgtgaatggtagtccctcaaaagaatttatgttgcaaaagggattaagacaagaagatccacttgttcctttccttttcactattgtggcggaggaattaagtggcttaatggggaagtgatctctacacatctatatagaggctttaaagtggggactaacgaagtggaggtcacattgctacaatatgc

SEQ ID NO: 159005 - DNA, 227 bp, Glycine max
ccaacccgcagcggagtcagggcggccaaaccagctttttagtattaatttcgccaccccacctccaaagtattcctctccccttgcctgcgcatctctaatactcatcctggttgtggagcagatcacacgctgggatttctagatcgttctccttcaaattcgcttcccttcatttaaaactggctattgagcttgtgctaacttcctattattactactcgctg

SEQ ID NO: 159006 - DNA, 422 bp, Glycine max
atcttatgcgcacactatgttgagaacgtttacttgctttttacattcttatcactaagaacaatgctcccatatacaatcaatgcaccttcgcttcctagataattcacatgaacttccaatgtgaatatgctacctacatcacacacattttctttgctaaattcacatacatgcatactctaagcactttggctatcaaaaattgcatacgttcacattttggtatttcttatacctatacatacacaaacttcatgaagaatcttgtctatctacacaataaggtgctacatatcatgctattatcaagtgatattactacctaaagccgtaagccaaatgaaatatattatcttttgcttacaatattagattaaattaaaggttatctgaaagatttctttactacatgcacatat

SEQ ID NO: 159007 - DNA, 409 bp, Glycine max
gcgagccttgcccctcgatatatgtgacggactcatggacactatgaatgttttattccttgggataaaggtagtgttgccatgttttcaaagcccgtactaaggcatacaactccttatcataagttgaatagttaaaggtaggaccacttaacttttcactaaaataagcaattggatggccttcttgcatcaacacagccccaatcccaacatttgaagcatgacactcaatttcaaaagatttttgaaagtttggcaacgcaagtatggcggcattagatagcttttgcttaaaaacattgaaagcttcttcttgtttcactccccatttgaaaccaacatttttcttgagcacttcattgagaggtgctgccaatgtgctcaaatccgtctataaaaacttgct

SEQ ID NO: 159008 - DNA, 375 bp, Glycine max
  unsure (1)..(375): unsure at all n locations
aaccgacaacgatatagtgggacgcaaattgatgttgatcttaggtggagaattcaaattgatataacaaatatttacaatgcttatgagatcgtccgatgaggcatctgactatcctgaagcatgttctntaatatatcaaggggtgttagagcttataaagaaagtggctgaaattctattgaaccaacaaccacatggtcctcttgattccacacgtgataccacaaggtatgctatggagcctttggcatccaaaggaattggatttaagaagagagatggtgaaaggatgaaacaaattaccctcttggaaagtggactgataattcaagccaaaaagaagaaagtgaactccatgcaccatcaattcat

SEQ ID NO: 159009 - DNA, 399 bp, Glycine max
  unsure (1)..(399): unsure at all n locations
actcagcttctttctaagtaatggtcgactgcagagtnactttttgtaatttggggngngccagggagatcctttatctcttcttttctgcttgacaaaagaggtattgagtaaaggtacttctcttctggttcaaaagagaaaacttcaatatatgttttttttttttcatcatctcagatatcctctactaggagcattcttggttttcttgagggatctatctcttttacctatcttggggtccccattttccctgtaagccaaaacatatcttattgcaaggcattgcagataaaattaaaggtaaacttacgtttgattctaaatctaagcatcaataggtttgttcttaaaaaatgttgtatgtaaaataattaacttcctgtaaaggtttta

SEQ ID NO: 159010 - DNA, 382 bp, Glycine max
  unsure (1)..(382): unsure at all n locations
acctgangctgcaactgctaaccatggaagctccaatatctccacatttttgggtgggccatcttggatgccttgatttttctgggccacctggaccccattctccaactacaaccctagaaaaatatttatctacataaaggacaattctctatatttgcatagaaggtgttttcctaggactgaaaaacttgcctgagatgcctaagtgatcatctaggctctactgacactaaatatcataaaataacactacaattacctaaaacccctaagacatgatgcataacctataaggtcttggtgcatatgacctaaaagcccactaccattatacaaccaaacttggctgaaacgtttccctctcaccttttatctgatt

SEQ ID NO: 159011 - DNA, 413 bp, Glycine max
  unsure (1)..(413): unsure at all n locations
atcaaactcaagctnttcgcaaagagatttaggagggacgccgcgaccgaatgaaccagcgcttctctctattttgacaaccatcgtttcaggagcgcagagctccaacagcgtttcgaggccatcaaaggatagtcgttccaccaagagagacgcgtccagctcagggacgatgagtacacaaattttctggaagagatagctcgccggcgttggacgtcgctggtcactcccatggctaagtttgacccagatatagtcctagagttttacgctaatgcttggtccacggaggggggcatgcgggacatgcggtcatgggtgaggggccagtagattccttttgatgtagacgtcctcagccagttcctgagtgacccgctagtgttataggagggtcacgagtgcaagtt

SEQ ID NO: 159012 - DNA, 267 bp, Glycine max
cccgagctcagcccggaccgttgggcatgaacttattaacccaacacacttgtgatcttatccgatgcacctcaaatgtgtctccctttgaaagaggaggatcttcatagatctcaactcatgtggcctcccaaatgaaaaaagggcttccaaggaaaagtagtgagggcgcctctccctgtcaaaaaaagtgtgggtgaccactaagtttttcacttgttccaccaagaagagaagcgtcttatcccccctcctatatgggtaagg

SEQ ID NO: 159013 - DNA, 391 bp, Glycine max
  unsure (1)..(391): unsure at all n locations
aataatctcttagcgaggaagacgatttaagattttgttttcttccaaganctgtatgntatgcttaagagattttattcatttttctcttatgatttttttccttgtcgttttttacttttgagtaaagatttcctttaatagactttagtgaatgagccattacgggattaacaatgtgtcttgatatgaccgttgtctcacattgggaggtaaggcaaggcaatgcgggacgctctgattagagaggaaaggaataaaagttcaaacaacaacaagtgttccttttttgcgtcgaaagtaacctctagaggaatattctatagataccttctattttcttctattctatcatttccttaaatttaaatgttggaaattcaaataaaga

SEQ ID NO: 159014 - DNA, 444 bp, Glycine max
agctatatggtcaacttattatatattacttcttaggagaacctatgaaaaaatatattttctaccttattacaacacatcccatgatcaaattaatgagaaaaattatctaaagtgaagctttaattcacctatttatccacgcattcaaaaagttagctactcaaattttatcctgaaaaatattataaccatgtgtgtgaataaccgttcgtttgtgataaatgtaagtggctagaagtaactcccctgatagtatctgcctcaagtaagtcttggaggcaattttacgggtttccaaacatgcactacgttggtctgaattgtattcaaaagttttattctaataacaaatcacactcattttcgtattagatttatattgggcaaaactagccaataacattcagtgaaaaaataatatattcttcaactctatcttcg

SEQ ID NO: 159015 - DNA, 390 bp, Glycine max
  unsure (1)..(390): unsure at all n locations
aactcagctttagtaggcggggcgataaccgcttttagattttgtttttctacgtcaacatgtctcagatcccatggcatgctggtggcataagttgagatttgtcgatgtgtaaaattaaaagggtacacgttacttctcccgaaagtgctctactctataagatttgcatgttacatggacattaaaaaaaaatcacttgtcttggccactgatgactaacatgaacttgcatctcattttgaataaagataatgcattcacaaatgacaagcaccagccgataatatgcatggatatgctcaaacggtgggaaagttaacagtgcataaaccaatggcntttccccttgcgtgtaggatttctctttttatctcccacttggcgtgt

SEQ ID NO: 159016 - DNA, 401 bp, Glycine max
  unsure (1)..(401): unsure at all n locations
agctntaggggggaggggcaatcaagtcattattgatcatgacaagtgtgcactgaattctattatgtatttaaactaatatttgtaactgtctgtctctnttaaccttgctttatggtctgcataagtagttctgtagaaaaggcttgaaactgaatcctattttatggtgtaaaagagttttcattgacgttttaattttcaaaagtatcctgaaaaattatatcacccattcagttcaataagcatttagtagattaatatttgatgttaaagatttaaagatttacttgatttgtggagccatgaatcattgtgcaatataatcaacagtaatattcaagattcacctccatttgctttattagaatggcggaatagaaagtgttactctgggagat

SEQ ID NO: 159017 - DNA, 416 bp, Glycine max
gacacaagaaactcagcttctacaacaagctagaaatataaaacattatcaaacatttatctttatagttatagcttgttgatgcactcatactaaaaaaataggaatgtgtacgttagcaaaccccactagcatttgctaacgtatacactcctattttttagtgtgcgttagcaagttacaccattggtgcattttaagacaatctttagttatagcttgttaacgcactcatgctaaaaaataggtgtataagttagtaaatccttatatatatacataactactgatatttagtttcttctttgacacagtcttaacatgaataaaactgcaggaggtacaatgctggggatagtcaaaagctgcataggtaccaaattcactagtcaatttggggatttagttgctgtgag

SEQ ID NO: 159018 - DNA, 316 bp, Glycine max
  unsure (1)..(316): unsure at all n locations
agctnttcaattcgttctatgtacccgnggtggtttacattttgnngcatgtanttttattcttgttttcgtctactttttataccccttttgacgtgcttaagccatttatttaagtcatttctcgcttaatctaaaaataaaataaatttccaccgatcgtttgaattgtatcatccgttaattttggttaaaatgaattccgaccgttcggtcgtgccgtaaccacgttggaaatcaaaaaagaggtaaaataataatataataataaaataataccttgtagtgaaataaaagcgaaaaatcaatcggacgt

SEQ ID NO: 159019 - DNA, 390 bp, Glycine max
  unsure (1)..(390): unsure at all n locations
tgaagaggatgctttaatggaggaaaagatatagagaaggggctttcacgaaatngaaggaataaaagagggagagatgtggaactttgaagtgtgtctcataagactttcattcatcaaagttacaacaagggttacacatgcttctatttatagactaggtagcttccttgagaagctttcttgagaaaacttccttgagaagcttctttgaggaaactttcttgagaagctagagctttctcctttttggtttttctaatgttttccttgaataaatgttggtggcgactccacgcattttcttcatgagaagacaccattttgtttttcctcgccctcccaccgaagggtaggttgcgacatttggcgactccactggggacatta

SEQ ID NO: 159020 - DNA, 354 bp, Glycine max
agcttagaatgcagaagaagcaacaatatgtttccagctacaaggtcatgacgaaagataacaattggtacctcaaagccttacactggggcaatgaggggcatcgtgcatgagccttaagtgaacatatgggcagatcaaaagttcacacccatcgatgtttttaaacaagaaaaaaaagggggagacatgccctggaatttcaatagattgattaaacatcaaacggctccattcccgtcactcaaaaacggtcaagtgactaaatcaaacagaacatacactctgagggagttcccggatagattttcaaaaagataggatgagggtgcatgaattatcacctttttaaaa

SEQ ID NO: 159021 - DNA, 392 bp, Glycine max
  unsure (1)..(392): unsure at all n locations
ttatcaaatggatgttaaaagtgcttttctaaaaggcttaatttaatatcaagtatacgnngaacaaccaccaggttttgaaatattggataagccaaatcatgtctataaattgaagaaggctttatatggcttgaaacaatcccctagggcttggtacgagcgtctaagtaagttcctcttagaaaaggacttttctagaggaaaagtagatactactctttttataaagagaaaatcacatgatattttattagttcaaatttatgttgatgacattatttttggatccactaatgaattattgtgcaaggaattctcccatgacatgcaaagtgagtttgaaatgtcaatgatgggagaacttaacttctttcttggattgcaaatta

SEQ ID NO: 159022 - DNA, 366 bp, Glycine max
agcttaggagaattcaggatataattcatttgttcaaacaagcataaaacaggaaattaaagagcaaagttagagatactagactgcctcataggagcacttctttaacatctttagccggacgcaggttgatgatcaatcgatcatgggcctagcacctgttcgtacctaccccaaagattgaacaaagaaagtggcatcatgcaaatgtgaaacaatactacacgatgcatgcattacctttcacttacccttattgcttatctcaaattggtgtggtgttgaccatcactcaaaatgactctttattcatcctctgatttgcaggatcccagatgacaagatggaaatgcatgcatgtttatg

SEQ ID NO: 159023 - DNA, 343 bp, Glycine max
  unsure (1)..(343): unsure at all n locations
tcaaaccacagcaacacaaaatctaggtgttctaaactcttcttttttatggancnncaagggttgaaaagtgaaattgagaatgacgttaatttggcagccaactcttacttcacacaagtctataacatctatctaaacctgcgtctacaggatttacacctaaatgtccaccgaactcaaatttgacttctcatacaccccatttgccctataatggctcttggtcactttggccatatgtttttctatctagcacagcccaagctgtctcaatcgttctaaatggtattccaagcttagagtaatttactttaacctccatttaccacaggattcacat

SEQ ID NO: 159024 - DNA, 312 bp, Glycine max
atactcatcacctctttcatatctaataatcttcacattcatgtctaactgcccttttacttcattgtagtaaatttctaaggcatccattgcctaagaaatctcgggcagtaagtaaacattactcgtacgtgaataatcatcaataatggcgataaagtatcattcctttccgaaataactaacatcaaaaggtccacaaatattagtatgcacaatttcaagaaactgagtgcttctcgtagctcctttctttgtatgcttcgttcgtcctcctttaatacaacccacacaaatatgtatatccataaa

SEQ ID NO: 159025 - DNA, 298 bp, Glycine max
agcttagaaggggttatgtatattctatgttggctggccaaacagcctaatattggatttctaatgatcaaatgatgcaacttctttatatgtaatcgatgcgtgtttctatgtaaaaaggcgacgttcgtgcttagaagaaagatgcattgggactgaatattcacttgtgaacataagtaggtgactctagcattgggaaaataactgctaccttagaacctgattaaagcctgatctaaaattactcatacaagatggatctgctgaataagtcttggttttaatgatgacggta

SEQ ID NO: 159026 - DNA, 379 bp, Glycine max
ctgatgatggcgacaggatatcacgaagttgtcatcgtttatctgggggagaatgagaatgcatgtatacataatctcgatgagcccacactcacatgaaagctgatttgcttcaccattaatacaatattgtttcgacagacgaacaccttgcttcaagatttcttctcgatcaagccttgtcttaaaacagacagtttgaagtcatccactgcgcatgtgatcgattacctatacatgtaatccacttccactggcttgaaagagcgttatcgattaccatagactctacacgatggggaatccaattttgactgacgagtcgcaactgctcaagaaagatcactgtgttatcaagtacactaatgctgtaatcaat

SEQ ID NO: 159027 - DNA, 438 bp, Glycine max
  unsure (1)..(438): unsure at all n locations
atacctgccctgccgcattctttacaaatgttttctcctcancaaaaaagtaaatcttccaacaccctcccacagcttccacaacatctgagatagaaaaaaagaataaaaaacaacgttaaataacatcggaggtttcctctaaacattcctagaaccatgattaaatataataaacagttctaaattcaatttgtataatatctcacacacatattatcagaaattaaaatgaaacaagaaaagaaaaagtgtcattcctgaattaatgtggaagcactaaagatactcacaagagaccatcatctagtcgctcgccggctacatttttggcacagtgactgcagttcaccatggtggtggatacaaatctgcagagtcagcgagatggaggcatagaaaacgattgctcaacacaagtgaaataagatggagttg

SEQ ID NO: 159028 - DNA, 422 bp, Glycine max
tatccaatactcaagcttctttatcgtagcgagcaagacgagtgtcatgaccgtagaacaaggcctctatctcgacgatagacggattatgcttcttgctctcagttacagagattgccggcgcataatcggacgggagtccttcaagaagcacatcaacatactcctcatgatgaacaagaactcctacaccagcaaattcatcaacataacctttgatttttcataaatattcatcgatggatttaccgtcaagtgaaaccacacgcatcacagttcgcagttgtcaagcacgagatttcgtatagagattgaaatactcgtgaatcttctcccaaacctgataggagtgattagagtcaaagacgcgcgacagaactggcttcgagaaagtggattggaggcaaacaataagtctttgg

SEQ ID NO: 159029 - DNA, 454 bp, Glycine max
  unsure (1)..(454): unsure at all n locations
agctnnttcgtttgaatgtaagagatgcatgaatattttgtatgttngaganggttttgactagaatttggtgtggctgcctcatgacgaataccttgcatctaggtagcatggaaaataccttttaatggtatgtatatatgtgaatatgtatagcatgtacatgccttgcagagtatgtgagtatgtatagcatggaaatgccttgcaaagtgtgtgaatatatagcaaataatgcctttcaaaaatttgtatatgttggattggtagcgtaaaaatgcctttcaaaatatgtatatgtgtgagtaggtagcataaggagcctctcaaaaaaaatgtacacatgttgaatgtggcacgagaatgcttaccaaaatgaatatatatgatggggaattgcctgttaagtgtatatagatgacatgaaaattccttttaaataatgcagtgtatg

SEQ ID NO: 159030 - DNA, 402 bp, Glycine max
tattatggtttgttattccaggttcaacacctgctatgtcctatcccgatttttatagccctctaacaaccaaaattctaagaaacaattcatatccttggatgggtcctatatcaaaaactctagcctaataacataacatttatataccttaaaccattaataattaacatcatgcatctacttaattaaattccataagagaatggcacccctgtagcaggaatcataagtagtgtttctccaaccagataatgaaggtacacttaagtcatgtctgccaaaatttgtttaagcttattaaatttgtttacacttaagaaattcacattttgtatgttcttgtatgtcatgaatgtaatatgctatacaaacaattggtatttttatgttagattcatt

SEQ ID NO: 159031 - DNA, 408 bp, Glycine max
ctcaaccttgtatagttccacaatttatggttattatgtagagatttttgtaaataaatcttatttatggttaacgttgtctctagaacatttccattggatttaatgatgaaatatgtgcattttaaggtgaaaaaaaggctaagtttggaattgcaaaatgtagcatttgggctaagcttagtagttgggctaaatgtatatccaccgctaagcgcagcttcagcgcatttatcgcaaaggagaatctggcagagcatcagcatcaaagtcacgcgctaagcgcgagatcagtgcgctaagcacagcaagtgccttcagccagactaaggcgctaagcccaatttcacttactcacgctaagcgcgagggtggcgctaagcgcattgtcacgatttcagagcctat

SEQ ID NO: 159032 - DNA, 348 bp, Glycine max
  unsure (1)..(348): unsure at all n locations
aaaaaaatatcctggacccattattgatctaggaggggcacaaattaaagcggctttttcttggatgagtatttagttggctgaactttcttttttaacatttctgggacagaagtgtaaactactaacactggtgtcgagataatgattcttagcaactagctagtgccactatttaatagtagacaaactgttattcactgttcatatagagacaagaagaaaatatatttgtgtcagttaaatgtaataattggttacaatatgcataatntctgacaggtacctcaggatctcacttagagtttgtctcattcatataggtagatccagagcactgggctctat

SEQ ID NO: 159033 - DNA, 401 bp, Glycine max
ttcaatgttaaaacatatgttattgatggaaaatatatgcataaagaatttcattccaaacatcaggcacaccagggagacaccaatgtatgcaatctgcatagctatttgggtttgctatctgttcttgggttagagcatcccactgcttcctgtagatagaagggtgtccttcttttctgtattctgagagctgagtgatgttgagcatttgaacattcaagcctctggctttcaaatcatcaatcacattctccaccacatgcatcatcttaggatcagatcccttcccccaatagccttcttctgctatcatatctgcttcgctgtaacaattgttacccttagctgctctccattcctcagccctgcaattttgttttccgattataaataatata

SEQ ID NO: 159034 - DNA, 374 bp, Glycine max
  unsure (1)..(374): unsure at all n locations
agcttcntccctattttgctataaatagggggagaagtgaagaagatttggttcagccccttaggcacttctctctctctcgaaattgctgaggaaattagttctgtgaagaaaatccaagccgaggcgcttccgtaacgtttacgtaagtaattatgcgaagattctcgactgttcttcaagatatatcgctcgttcttcagtttcttcagacttcaacgggtaagtatctcaaaccaagcttttcaattcattctatgaacccgtggcggaccacattttgattcatgtatatttattctcgtttgcatttacttgttatacccccttctgacgtgcttaagccattatataagtcatttctcgcttaatct

SEQ ID NO: 159035 - DNA, 408 bp, Glycine max
tggatttccttttagtagggaatctatccttcctaatatgtagctcaacccagtcaccctcattaagaactaacggtgttaagggattgaacccatagacaacctcaaaaggggactgcttggtggttctatgaacccccctgttgtaggcaaattctacatgaggaagatactcatcccaagacttatggttgcctttcagaagagcccttaaaagggtggataaagacctattcactacctctgtttgcccatcaatttgtggatgacaagtggtagagaaaagaagtttaattcctaacttagcccataaggttttccagaagtggctaaggaacttatcatctctatctgacacaatggtcctatgcaaaccatggagtctcacaacttcctttaaaaagagtt

SEQ ID NO: 159036 - DNA, 412 bp, Glycine max
  unsure (1)..(412): unsure at all n locations
agcttggagaggatgcttaatggagggataatatgaggagagaaagagagaggggggagcacgatattgaaggaagaaaaaaagggagagaagttgaactttgagttgtctcataagactctcattcatcaaagttacaacaagtgttacacatgcttctatttatagactaagtagcttccttgagaagatttcttgagaaaacttccttgagaagcttctttgagaaaacttccttaagaagctagagcttagctacacacacccctctcataactaagctcacctccttgagaagcttccttaagaagattcctaaagaagctagagcttagctacacacacctctctaatagctaagctcacctncttgagatgagaagctagagcttagctacaccccccttatata

SEQ ID NO: 159037 - DNA, 392 bp, Glycine max
tgggtgttaaaggaggaatgactatgctattgttatgctttggtcctcgccgataagagtcataccctaatttcgtccggggacgattgtttgtcaacatgtggattttcgccagccgagttgagctgcttaacaccaattgttgtgcaatccgtaagattctgtgatggttcaaaaggaaatgagcaaaatactcaaaatgggggcaaaatggtcaatttgggggcattcctcagcccctgggcccattagaaagctttaagatgaagcaaccagctcacctgggcgagctgtgttgcaaccttctccccccattttgctataaatatgtgtggagggctaacgggaaggggcttaacatctttagcaagcatatttcactgaaattagtg

SEQ ID NO: 159038 - DNA, 399 bp, Glycine max
  unsure (1)..(399): unsure at all n locations
tgtcctccatggtgtactctctttgccaatttgcaagaagaccaaatttctttggttcaacctgtttcatttacaagtctataaatcttgcttcgcagataaacagtctttaagtttgcaaaatggactgtggatttcacattatcataaatatgagaagtgtcacgatatgaagctgagtcgactcttgctttcgaataaagtatgaataaaatatatccaattatttccttcccaaaaatccacattgaacttgattagaaataacaggcatctcaagttatcgccaattggtaaaataaagaggaaaaacactgttattagcacantttatatgtcccagcatgcactgcacaaagatattttataaatgacagcatgtgaaaaatttataatgat

SEQ ID NO: 159039 - DNA, 393 bp, Glycine max
  unsure (1)..(393): unsure at all n locations
tctcccctatnttgctataaatagggggtgaagtgaagaagaaaacggttcagccccttaggcacttctctctctttcgaatttgcttaggaaaattgtttccgtgaagaaaatccaagccgaggcgcttccgtaacgtttccgtaatgtttccgtgagtaattacgcgaagattctcgaccgttcttcaagattcatcgttcgttcttcgttttcttcagtcttcaacgggtaagtacctcaaatcatgcttttcaattcattatatgtacccgtgggggtccacattgtgtttcatgtattttcattctcgttttcatttactttntataccccctgttgacgtgcttaagccatttatgtaagtcatttctcgcttaatctaaaaataaa

SEQ ID NO: 159040 - DNA, 416 bp, Glycine max
  unsure (1)..(416): unsure at all n locations
gcaagctggtttgggcaatagctcctcacctactttcccaangtctnctgacccccgcgacatatcttcaggtaccactctgtggtcaacgaataaaagcaggaagtttcacccttcaacacnttctcatctcaaacttgtaggattatggggtacccatcacatgtggtactangtggcggtcgggcgatggtgcacaacaagtttttcacatccacaaagcgcgcataaacccaccatcccctgttgcccacctgcaactgagctcacgtactcccacgtagcccatatcctcgtttctctcaacaacgggtccccatcaatcctcccaagcttcctcaacatccaagtaatacaacattcaaacagcacaagctatcacaaccaaacanaacaaggcaatagtagaaaactct

SEQ ID NO: 159041 - DNA, 397 bp, Glycine max
  unsure (1)..(397): unsure at all n locations
ggaccataaaactcagctacctgttgtctagaacaacaaaaagatattttgcctttcctacnttagcatgaagctttagtcaaacagaataatccgaaaatgtcaaacaattgggtgttgaaaaaacataacaagacattttgtgattggttaaagatccatctttgagatgagaatgcttcaaaaacattaagaaagctatcacatgggccctaaagaaatgttataacctggcaaggatatgacaaaagtacaatgtataacagaggggtcaccctaagggctgaatcttaacactttgcaaggtactatgggcattgctcaagccgaaaggcatccttctatatgcaaaagtgcccaatgggcaggtgaatgtggtctttttctgatcctcaag

SEQ ID NO: 159042 - DNA, 317 bp, Glycine max
acagagacatgtatggtgatctgcagaagaacatacaccacagactcttacaacaggggcagatgtagatttctgattcatggcaagctgagttactaggttgaccatggcatcaagttttccctcaagctttttattcttagcatatgaagatgaatccgtggccacctcatggactcctctaaggatgatagcatcatttcttgcaccgaattgctgggagttagaagccatcttctcaatcaaattcctagcctctgtaggagtcatatcaccaatggccccaccactggcagcatcaatcatactcatcttca

SEQ ID NO: 159043 - DNA, 389 bp, Glycine max
tcaccaccaagacaagccttggataaaaagctcggattttgcttcatataggaaaagaaagacggagagaaagagagaggggggagcatgaaattgaatgaatataagagggacagaagtggaactttgaattatttctcacaagactctcattcatcaaagtttcaacaagtgttacacatgcttctatttatagactaggtagcttccttgagaagctttcttaagaaaacttccttgagaagcttctttgagaaaacatccttgagaagctagagcttaactacacacacccatctaaaaactaagctcacctcctagagaagctttcttgagaagctagagcttaacaacacacacccatctaaaaagtaagctcacctccttga

SEQ ID NO: 159044 - DNA, 395 bp, Glycine max
  unsure (1)..(395): unsure at all n locations
agcttcccttccaacaccattcaactattttacacctatnnatnngcaatgtttttaaacacccttgctcggttatggccatacttatgcgcaaaactaattacaaaacataattcttagctaaaattattgttgtcatactgattaggcaagttcgattataatcatacaaatcaactacactatctgaatggcggaacttgatcataacaaacataaagcaaacacttcattaataatggaaatggaattataagacggtgacaccaaaattaaaaataaaatggcattatcgactatctattacaaaagaagcggtcactactgactaaacccatggttgttaaccttttcatcatcaggatgcctcttttcctctttggcagaagcaatat

SEQ ID NO: 159045 - DNA, 351 bp, Glycine max
gcttttggaaaactcttggaagctgagctgcttaccactctttaaaactaagctacctccttgagaagctttcttgagaagctagaccttaactacacacacccatctaaaactagctccctcctggccaatcatgaaatcaaaaaaaggtcctactacaaagactactcaaaatgccctgaaatacaaggctgaaaccctatactactagaatggtcaaaatacaagggcccaataaaggaaaaacctattctaatatttacaaagataagcgggctcatacttagcccatgggctcgaaatctatcctaaggctcatgagaaccctaaggccttcccttggatctctag

SEQ ID NO: 159046 - DNA, 415 bp, Glycine max
  unsure (1)..(415): unsure at all n locations
agctatgcggattggtcttcttcggtgtattgatcgaagngggtctganaagaagcatatctgatcatcctgctttgataaatgcaaaaactgtggcaaataaagaggatgagaaggagggagaaacccatgttgtgactgccattcctatacggtcaaacttcccaccagcccaacaatgtcattactcatccaataacaacccttcttcttacctaccacctagttatccacaaaggccattcctaaatcaaccacaaaacccacctaccacaccaccaatgctaaacaccacctttagcatgaagcacaacaccaacctatgaatgaattctgcagcaaacaacttgtaaaatacaccctaattctggtgtcctatgctaacttgcttccttatctatctgataatgcaatg

SEQ ID NO: 159047 - DNA, 374 bp, Glycine max
tactctggcgctgtttttgaactatcactctttttttatgacttttgaaagaatcttcataaacaagttacttggagaattgtgacttttggaaatgtatttttcaaaatcacttactggtcatcgattaccattcaggtgtgatcgattacacatcaaccgatgcgactctatttgaatttcgaaaatcttaacattctaacacactggtcatcgattacatgattatggtaactgattacagctttgtaaatcagcttgaaaaaaaagctggctactggtaatcgattactaccttctggtcatcgtttaccacagaggtaaacactctggtgaaaaattttgtgaaaacttcatgtcctactcaatgtttt

SEQ ID NO: 159048 - DNA, 441 bp, Glycine max
  unsure (1)..(441): unsure at all n locations
agctngcttctacagaanagactcaatctttattgtactaaaaagtttttcaaaacattgagtagcacatgaagtttccacaaaagcttttaccaaagagtttttactctctggtaatcgattaccagtttactgtaatcgattaccagtagcaaagtttgttttcaaaagctttcaaactgaatttacaacgtttcaattaatttcaaaatggtgtaatcgattacaagattttggtaatcgattaccagtgtgtttgaacattgaaattcaaattcaattgtgaagagtcacatcctttcacaaaaatgctttgtgtaatcgattacaatgatttggtaatcgattaacagtgataagttttgaataaaaatcaaaagtagactcttccaatggttntcaagtttttctaaagggtataactcttctaatggttttctt

SEQ ID NO: 159049 - DNA, 381 bp, Glycine max
  unsure (1)..(381): unsure at all n locations
tgctaacccatggaagctcctaatatctttcacacttttttgggtgggccattattggatggcctcgaatttctcagggtccacttgaaccccatttctaccaactacaaaccctaagaaaactatattatctacacaaaaagtgcacttctctatatttgcatagagtgtgtttttcctaaggactgaaagaactttcctgagatgtcctaagtgatcatctaagctcctactgtacactaaaatatcatcaaaataaacaactataaatctacctatgaaatcccttaagacatgattcataagcctcataaaggtgcttggtgcattagtgagcccaaaaggcatcactagccattcatacaaaccanacttggtctt

SEQ ID NO: 159050 - DNA, 413 bp, Glycine max
  unsure (1)..(413): unsure at all n locations
ctgcaaagacaaacattttgattgtagtataccaggggacactactctaaaacaaaaatgacatacaacctcctcccataaatacaaacatcaatgtaaatntatagcaagcttatgcgcatatttccctacgaatgttcacttgcacaagacatcctattaactaataaaaatgcacccatatacaatcaaggtagcttcattacctagattatttacatgtacttccaaggtgtatttgttatttacatcacacacgcctccttggctaaatttacatacatgcatactcaaagcatntcggggtaccaaaaattgcacacgcgctcatcttggtatttctaatacctatacatatacgaacttcatgatgaatcttgactacctacgcaattaggtgctaccttncatgc

SEQ ID NO: 159051 - DNA, 395 bp, Glycine max
tcggaagaaagtgatgaggtacaagcgctaaaggcaaagcttgaaagagcccggttagtcaaagagaagttcaagtccatagccatcaaagtctgaagagagtatgatgaactaagggacgtcaatatggccaccgatgaagccttggaatgagaaaccaagaaggcccgaaaggaagaacacgaccaaagcaaagtttcgaggggctttatagggcagcaatagtgagctcaagctccgaagaggtgaaaggaatcatcacgggtcaaaggcatgatcttgaaggacgagctaaaggcttgccttatgtcgaaaagaaatttgtcccaacagttaagcgagactgaagggaatatgtgggccatcatcgatgagtgcaaagagaagctaaatct

SEQ ID NO: 159052 - DNA, 245 bp, Glycine max
tgagcttcatgagaagaaatcaagaagactctagaatctagagaagtctgatttccagattcaagagaagaagaatttcagttccaagagaagaactcaggaagacttcacacggatagtattgagaagatttttcaaaaaaaacaaaacaaacttcgcacagttttgtgtttcaaaagagttttctcacaatcttctaagttaccacagtttatactctctggtaatcgatcaccaatatcctg

SEQ ID NO: 159053 - DNA, 382 bp, Glycine max
  unsure (1)..(382): unsure at all n locations
tgagactntcttttccatttctagagtacacattacacttatcaatttttttttttcattcttagatatatagtcagattgtggtttaatttgtccaaagcttaatgtccgacgaccatctaatttccacgatcatccattattcactgttatttgctataacctattcgcgtgtatctttatctagagtagaacaagataatgtaacttaatttctctctgcattatttttttacagactaactacatttattaagatgatattagtttaaaaatgactatacatttatttcatattcagaataatttgttgttgatgtacaggcttttactcttgtagatgaatttgtttagaggtcaaattttctatcttactctaaaa

SEQ ID NO: 159054 - DNA, 252 bp, Glycine max
ttttttacaacccacacaggccggcggatctttaatgtaaggctctttctaccacataaacaaatcttgtcacggccgatgatgcataaaatcaggtgctggccttacaagaacctacccccacagcaggggggcgttactggcttcctcggttaaaataaaaatagcaggaccgagcgaccgagatttgagtcaatccatgaattcatagtttgaacctttactggcctagcttagggtctgttattttgg

SEQ ID NO: 159055 - DNA, 404 bp, Glycine max
tccaatactcaagcttggcactgcagcagtcaactgaacaagagaagagtccatcatcattgttatggccgcccgcccaaagtacatgctttaaactaataacaatttctgcgtgttacgtctaatcattaagaagaggcactatacatatatactttcatatataaagcctactatagttttaacacacttctttatacacactctccactgttggtcctcaattcatttggaattataaaatcagaataatgactcattatattcaatattgggacctgcccaatttgtgattttctatatatttcttgccaactaaaaaaagtgttcaagacaatatgttacagacagtgtcgttaccatttctctgtttacgaaaggcgcttgtacctatcattgaaaat

SEQ ID NO: 159056 - DNA, 449 bp, Glycine max
  unsure (1)..(449): unsure at all n locations
agcttgcaaatntaaaagggaccctaatcttattatgttctttcgtaagaaaattaacgtgccatgcataaatttacttggacataattaacgggaaaaaatgtcgtactatattaattaacaatagtaaagaaacaataaacaacaaaaataaacaagagttaaaaagtaaagtacaaactagaaaaaaaaatgaatatcattagtcaactttgtataatatttaatttgatattttggcaaatatttttaacctttccataaaggaatgtaaaaccaatacttttatattttttaataatacatatgtagtacatgggcttgcttggcgcaaatataaagtaaaactatagcgtatggcgcctatttggtatttgaattttttatgcactatggggctatttgattcatggaaagtgctgggagtaataaaataactgagaacatat

SEQ ID NO: 159057 - DNA, 393 bp, Glycine max
  unsure (1)..(393): unsure at all n locations
ctaagatggagccaaacctagtcactctcattaagaactagctcttttcttcctctattgcctntagttgaatacacctttgtttggttctctatttggctcttaaccctctcatgcaatttctttacaaactctgacctagattccccttttttatgtataaaagaagtgtccagtgggaggggaatgaggtctaacggtgttaggggattaaacccctacaacctcatatggggactgcttggtggttctatgaacccccctgttgtatgcaaattctacataaggaagatactcatcccaagacttatggttgcctttcagaagagcccttaagagggtggataaagacctatntactacctctngttgcccatcattttgtggatgaca

SEQ ID NO: 159058 - DNA, 394 bp, Glycine max
  unsure (1)..(394): unsure at all n locations
ctgcattggaattgcgaaagccccactttatcattaggatttgttcctgtcatctcaaacaaacaaatcaaacataacaatacaattatagttgttgtttgaatacctcacccactcaagtgtatcacacaattatggcttttctctaatgaaacactcttgccttttaccactctaattccccttgagtnattaggcaattcaagagattatggccacaacaaagaacaattcaccaatatgtgtaaggtaaggctagagagacaaggaaaaggttaaccaagaaaaaggctaacaatgtttttaggcacaaatgaacgaaataaaattcagaatttaggaattcaagtaacaatccttcatgctaccaatatattaccttaaatatatatat

SEQ ID NO: 159059 - DNA, 441 bp, Glycine max
  unsure (1)..(441): unsure at all n locations
nagctggaatcattaattgctctctatatctcatggtctntgnnnnccaaaagaaacaaattcctttcaataaaagccatgatacaagccttgactaagtccttgtgatcttaatgtgtgtgcatgcattttattgcttatgagaaggaaagcaaagccaatttgtgtgttcaattgtgtggtgattatgagttgatagtacctaaagcaattggtgctcgagtgatacacaagtgtaatgagggtcaagcattttttagattgtcaaattagaattgtatgcttgttttgtgtcttgaattaaaacaattgcatccttattatggtttcagttgaaagaaccactcttaagtttgaatcattggtttggtctttaatgttcaaaaagaaacatgtgttgatttgttaggctgacattggtcttagttcatgtatgtcatt

SEQ ID NO: 159060 - DNA, 393 bp, Glycine max
  unsure (1)..(393): unsure at all n locations
ntattcaagacaaaggaattaaagatatttaagatagatgattaacattgtctctagagtcttagaaagggtatattaaataggaagggaattccaattgaagtagcaaaaggtttggccaagaattttaagttaaaaagtctttttcaacaaatttactctctggtaatcgattaccagaggatgtaatcgattaccagtggccaaaactgatttacaacagctattaaaatttgaattcaaaatttgcactgtgtaatcgattacacatatatggtaatcgattaccagcagtttctgaacatttttaattcaaattttaaagcctgtaatcgattacacacatactgtaatcgattaccagaggagattttcacaaaatattctcaacag

SEQ ID NO: 159061 - DNA, 393 bp, Glycine max
  unsure (1)..(393): unsure at all n locations
agctnggaggggttgatggtgacccggtgttgataggaatgaggagaaggctacgtacgtgcacgtgagctaaatataaaggtgggcaactggggatggtgtgcttatgcctggcttgtggaaatgggatagttgatttgtgccaccgcccgattgccacctagtaccacatatgacgggggccccataatccaataagcttggtgtgagaaagcatggaagagtcagtcttcctactttatttgttgaccacagagtggtacctgcagatatgtcgcgggggtcaggagaccttggggacgtcatgtggggtgctattgcccaaaaccaagcttggccaatccttacccaacccgggcatagtcagtcagtgagaactgtgatgtacctaac

SEQ ID NO: 159062 - DNA, 392 bp, Glycine max
caaactgataaaattaagagcgatgctatgttttatatttgggatgacccctatctgtggaagttgcgttgtgaccacagtattatgagatgcattttggacaatgagattgactcggtcctgaatttttgtcattcttccgcaccaggcgaccatcttggtatacagaggataactcgcagggtgcttgactgtggtttctattggcccaccattttcaaggatgcatggagaatttgtagtacttgtgagtcttgtcagagagcaggtggttcactttcttggaaacagcaaatgcctcaacatcctatgtttgtctgtgaggtgtttgatgtatacggtatcaattttatgggacctttccatgtatcttttgggtttgtttatattct

SEQ ID NO: 159063 - DNA, 345 bp, Glycine max
  unsure (1)..(345): unsure at all n locations
agcncatagatatcaagcaagataataaattancttcacacganacacagaagcacacgggcatattatacacatcagccatcagtcatcaacacatatatcattggtctaagttacttgcatctagaagtcctaattctcttctaatggtgtagaaagagtctttggttagtggttttgtaaagatgcctgcaagttggtttttagagtataaatcttttaaaacacaatctcctttcttctaagacttagtgctaattgactatcaacacttaccaagatgatgttttataagcatagaaggttttatcatatcaaagttatcctgcgtgatatacaatataa

SEQ ID NO: 159064 - DNA, 369 bp, Glycine max
tacacctgacaaagagggagagattatcgcacttaagagaatgcttcctaactacaaattactcatggtagagaatcattctctattataactgacttaccgctgcctcatattcctcttccattcccaactaaagctactccaaactaatagatggaagaatcacaatatgaaaatttggagaccttcaagaaagtacaggggaacatacctctgctggaagccattaatcatattccaagatttgtctagtttctaaaggagctgtgcacccacattaggaatttcaaaggcaatgacaagaataacaagggcagaaacatgccaatattgatacgctaatatgtctctccccatccctgagaaatg

SEQ ID NO: 159065 - DNA, 446 bp, Glycine max
  unsure (1)..(446): unsure at all n locations
agctntgttgtaagatccaattgtggttgtgaagaatactaggtagtggaacttggtggattatgaagaattgaatgtattcttagtggtagaaacgaaccaatataaaactttttgtgtatgatttgtttatcatatattatttaattgactaagagtttgaatttggttttgttattataaaagtgttttacataattggtccattgttgtctgactatgtttgctttctttaagttgtataagatgatagtgtgcctaataaaaaaacttgcaaattcttttaaataacaattcaactctcattattatgatattnttctttacaatttattacaaaanaaaaatgcttcatgtaatattatagggaattatattttttatcataatatcatatttataaagaatgttataattattattaaatatattgttgaatataaata

SEQ ID NO: 159066 - DNA, 401 bp, Glycine max
  unsure (1)..(401): unsure at all n locations
nntgtacattntgtcatttgaagctaagccatgttcaaatgtacaattgttcgtataaattatgacttcattcttggcacatataattaactatttctcttaccactccctgcacatccaggatagttgtactttgatcaatgtgcttttttgcaacaattgaacaagctgcaaactttatatcaaatgtcctctcaaattcctttacgtggtatttgatatagcgttccatggttgtgacttgcatcatctttgtggcatcgatttggcctaatctctctatgtacacaggtcttccatctttgtccgctccatgatgtccttggggataatattgcaagacttcatcaatttctttgaattcaaaatcctggtataaagggcacataagagttaaaaag

SEQ ID NO: 159067 - DNA, 220 bp, Glycine max
ctaagcacgcgcgcgcgggaaatgaattttttctccaggccagtagaacaactttattgaattcttaaactatagggcattttaacccatccaatatttattttacgatattcttatttatgcagatgaatacgatttggatgaactacaacacatctctatgatatgatgaaactacaaatattttttggagccattaataggcatgctgctattttat

SEQ ID NO: 159068 - DNA, 400 bp, Glycine max
tgggacgttggggaagggttttggaagaaagaaggagttatgaatggttgttttccaaggctacacgaaaaataacgttcgcaacactctagtgcttttgctctcaagaaaagaagcgtttctcacacacaagaagacatatcgcagatcgcaacggtcagattgtggacatgtgcctatgaacctccagaccaaatttcgagaagatccaacggttaacgaatgcaggagggcgcttttaccgagatgactcaaacagcttccttgagaagctttctcatgaggcttccttgaaaagcttcctcatgaggcttctttgtgaagtttccttgagaggcttctttgagaagctaaagtcttaactacccacatccctctaataactaaactaacctccttg

SEQ ID NO: 159069 - DNA, 431 bp, Glycine max
  unsure (1)..(431): unsure at all n locations
ctgagctgcagcttaaagatgatttgctgctcttgcccatagtatgttggnatnncgatgcntcgatacacatcataactccatggatatagagtttaaaaaatacctagatccatggatttcgatcaaacaaacacagttgttttccttcacaactttgcatgaaaggttttttatgtgagacccacacctgttttaaagatttctttggtatttcaatccgatcagattatggaagtttaatataacttaagttcccatttctctttctttctcttcatttcattgatattttgacttcaccatatagatcctttgagtggtaaatatatcattgcgattcattctaaaacagttctttgatatatcattgctattgcattgccatgaccttacttttttctatgaattaaatttttttacaaattaaa

SEQ ID NO: 159070 - DNA, 397 bp, Glycine max
  unsure (1)..(397): unsure at all n locations
actcaagcttgacacattctggcattgtgcaccaggtgattaaagtttgaatcatttttngcaactcagaacaatgcaacagctaaaaggtttcccactgaggaaactgttgttgatggggaagacataattagcaagttgcatgaaagcattcttggtcacattctgtctttccttccaacaatggaatcagtccacactattgtgttatcaaaaaagtgggttgatgcttggaaatccataactggcctacaatttaatgatactttgctttgttttgggaaaaagatgcaaaaagaacagcttgtgtgttttgtgaacatggagtttcttcaccttgccaattcaagtatccacaatttctctctttgtttaacacgttatcagtatgattcaa

SEQ ID NO: 159071 - DNA, 409 bp, Glycine max
  unsure (1)..(409): unsure at all n locations
agctngactcataccaaacatgacaagttttcatgctttcatcaaatttcttcacaaataactatcataaggcataaacctagtaaaactacccatcatatctcccaaaacccaatacccacgaaaatttatgtgagaagaagtctacccaaacctgaaatgtgaagtcccacaatggagaggtgcgcttcacgattccgaaaatggcttcctttcgcgatttggaatagaaatggtgtgcaaaggttgaagctttgttggagcttcaatggtgaggaagaagaaaggaatatcaacgtgagaaagagagtgagaaaagcttctgaattttttttggggctgagtgaagagagagagagaacgtggcttgtgtntaaaacgcttcctcttctntttttttttaaacaaa

SEQ ID NO: 159072 - DNA, 403 bp, Glycine max
  unsure (1)..(403): unsure at all n locations
tcacagagctnttcagaagatgatatgttaagaactctattagaaaatctaaacaccactaatgaatccaaaaacattgtcttaacattagtggaatccactgtcatttacaataaaaggactttagtatgtatacggactnggcccatgtgcttgtatatacttaacctataaatataagtatgagggtagctaaacattgtatagtacattagtacccaattacaatttacccatgtctctctatctctcactgcatagtatcatagagccaagtagggtttatagctgctgtcagcaatatcctttgacagccataaaaatattggggattgaaaacaaaatttggtggctaaaacatggtgcaaatcgcanaatagaaatatctcatttttttgggttt

SEQ ID NO: 159073 - DNA, 441 bp, Glycine max
  unsure (1)..(441): unsure at all n locations
agcttctcccctantttgctataaatagggttgataagtgaagaagaaaagggttcagccccttaggcacttctctctctctcgaaattgctgaggaaattagttctgtgaagaaaatccaagccgaggcgcttccgtaacgtttccgtaagtaattatgcgaagattctcgactgttcttcaagattcatcgttcgttcttcgttttcttcagtcttcaacgggtaagtatctcaaaccaagcttttcaattcattctatgaacccgtggtggtccacattttgtttcatgtatttttattctcgttttcatttacttattatacccccttttgacgtgcttaagccatttatttaagtcatttctcgcttaatctaaaaataaaataaaattccaccgatcgtttgaattgtatcatccgttaattttggttaaaatga

SEQ ID NO: 159074 - DNA, 388 bp, Glycine max
  unsure (1)..(388): unsure at all n locations
actcaagctnggatttccttttagtagggaatctatccttcctaagatggagccatattcctttcatcctcattaagaactaacggtgttaagggattgaacccatagacaacctcaaaaggggactgcttggtggttctatgaacccccctgttgtaagcaaattctacatgaggaaaatactcatcccaagacttatggttgcctttcagaagagcccttataagggtggataaagacctattcactacctctggtagcccatcaatctgtggatgacaagtgggagagaaaagaagtatataccctaacttatcccatatggttgtccaaaagaggctaaggaacttagcatctctatctgacacaaatggttctaagcaaaaca

SEQ ID NO: 159075 - DNA, 407 bp, Glycine max
  unsure (1)..(407): unsure at all n locations
ataaanagcgtattctgaatggagggaaatgggaacaaaagtaacagtctacaaagtgtgctctgaagggttttgtttttaggatgcataatcaatatattacaacttatctgccctcaccctactntcccccataatttgaggtagaggaatacctaagaagactcaatgagaaaccgttaaagtaaatcttgatgtaaatcatcataattggtggggaaaggagaattccatataagaactaatagagtcatttcaacctcccatgtcaataatacatagaagcaggagcttattaaatgggtaatagaggaagcagtgatacagatcactttttcccttaatgaacataacaaatatgtacagtagatacctgaatggctgattagcagccatactgatgcagt

SEQ ID NO: 159076 - DNA, 315 bp, Glycine max
cccatgcaccatatttgccaatcaacttttccgaaactctcttgtgaagaaatgcgttagttgctttcaatataagatagaacatatcatcctcctataaatactcgctgaaaagcttatttcaactggacccaattttgaaactctcactccttggaggcatccactccgttctttttccaacaaaacttatcactcacgaataataaattgcctaatcaagattgtcgaaaagcattccactttatatgcctttgaaaaatagtttgctaaggcctgcctgagggtcactacttacaccttttgattcatata

SEQ ID NO: 159077 - DNA, 445 bp, Glycine max
ctgcaactaacaacttctccgcaccttaattgtttaagaactttttcctccttccactgcactgccacaacgtctacacggtgttcccacactcacgtcaacaatgtacatggtggtgcaaaatgtagggaaatgagagggacagtgattgaatatgacttttaactgatcagaaataaataatctatttttataattattataaaaattaacaaatgtaatatatttgataatttgtgattgaatgtgagtgtaaaattattttattttatataatgttagttggtagcatttttattctcatattatgaaaaattatagaattataatttctcattttctctcattatcttccattaatgtgtatgaacaccctcacataaattaaataaacatatcttctgtgcatctttttttctctctttaatctatgcactctttcttg

SEQ ID NO: 159078 - DNA, 376 bp, Glycine max
  unsure (1)..(376): unsure at all n locations
ncaattatggctcagtttgaaatcaaagctttttcagttctctttttgagagactttattgatctgtatccaaaatgttgaaagctttgaatcccatacagcctcccctggtttttcacttcttttcatttacttattttacggcttttgtcgcttttttaatttattttttgattaaccaatccttgtgaaagtgactctgtcacggagtctcctgcataagttgttcatcaggaggtctgatttttatttttaatcttgaggaaaatatagttttatcattaaaaaaatgtattatgtgggggtgattgtaccacaagtccacaaccacatccattctctgaaactgactaatttgattctggagacagccttt

SEQ ID NO: 159079 - DNA, 438 bp, Glycine max
  unsure (1)..(438): unsure at all n locations
agcttgtggaagataatgctatgtgggatttctgtcttgtnaaaagaatatcaagcgagcaggtctgtgtttctgtgtaagacattattgatgcgcttgtgctcatggctggagaagtccctactgagcancatacactgcctgggtttgggctcgagctacaacttgatgagctcttcaataggctttgggcctctatcagaagtgtcgtcacacaaacctatattgaatttgtcatccacgcttatctggtaaatggacacggctcgggtttgaggctctttgtccacacttatgacttgagtaccttcatccactgtggggtgaggataaagtgcaacctttatgctttctgcatagcactgtcatgcttgctaaatattacttaacgattacaatcttccccctgcagggtggaacttattcttagatcagcat

SEQ ID NO: 159080 - DNA, 391 bp, Glycine max
ttgatttgtcaaagccacacagttgcctctagtggacactatggattgttggatctcaagcgttgactgcttgagccttttattccgggaggtgcctttcgagtgctcgaaatattcccccaagccacttccatggtcctggtggctctgcttcttatgcttttgcttccccatgtgatgcttgcttatggggggcaccacatcaatccaaacctaatgaggccccagcgctcaattggcatcaacatttggtgtaaatacatcaagggttgccattatagcccgtctagcttggcggaaagactgcatattggctctagcttgcgccatgatttctacaaaataacacaactgataaaatttgaaagttggagcataaaatatattaata

SEQ ID NO: 159081 - DNA, 370 bp, Glycine max
  unsure (1)..(370): unsure at all n locations
agctgagaatattctntacattccaaagatctcacatgttatgtaccctcccttgttctctttgaataaccaagtggagtataacaatccccaagtagatgtaccctttacttgtaccacaaaggatgtaccctccaatgtgttgggacaaagaattcttaggcggttaatcctttgaatctttgtaaggggaaacaaaagatatctcaggtggttagtcctttgagatcttttgtttaaggggaagggaagaatcaaaagaattctcaggcggctagtcctttgaattctcttggaagagagaaaaaagacacaaaagaattcaggcgggtagtccttctattcttttggccaggggagaaatgaatga

SEQ ID NO: 159082 - DNA, 425 bp, Glycine max
gacctatacaagactcaagcttgtgcccctctctctcatgcgagctttatttaagcatattcttgtttaactttcctcatttatattcttacttgaacgtcgaagtcatttattttgcaagttcccttgtcaaaggtactaaaagccgacgtatgaagtttgggatccactgtccaccctgacatgtcacggtttcatgttttggtaaaaacattaaataaatataatactataactttatagcactaaaaactaaagcaaaagcatcatttcatcggtttttaacatttaaagttaacataaaatcaaatatatcataatatttaggtttatgagttaataagatacaacaatgtcattaacaattaacatatagagtaaaaattcaaatgagaaattaatataatactataaaattataagaa

SEQ ID NO: 159083 - DNA, 388 bp, Glycine max
agcttcgatgatgacttagctttgtcttgactaataataaagattgtactaaagagcatgatatcaatttaactatggagcaataaaaaatctggtagaatttctcctacaatttgtgcaaaatcaactttcaaatttaactcttcaatagcatatatcctgataatcaaaaccatcatccaaatttcacctcttcattacacagatcaattataaacaaagctattaaagagtatatgaaggttttaagccaatgtccatttcattccccatttatctgatcaagagatgtaccctctcttgttctcagtcacaacaacccaagtagatgtaccctctacttgtaccacaaaggatgtacccttcaatgtgttaagacaaagttctt

SEQ ID NO: 159084 - DNA, 384 bp, Glycine max
  unsure (1)..(384): unsure at all n locations
ttgatcaataaanacttattaaaggctatttaaaatttacggaaaaaaacaacagtcatatatgtggtgacaaaacgacaaagaaccaggcttaatgactttttagaccaaggctactcggccagagtgggaccctctactgtaaatttagtcaacttggaatttcaatttgattttcgaaaaaggtaaagaagcattcagtgaggttctcgccctgacaatataaacattgctttccatgacagctagatccaacagtggaaaaaagttttgcaccgtgcatgaccacactgctttcccaagctagaagcacaaagaatatatctagtcttttacctagttggccactagacctcttttttcacactatggatattctatata

SEQ ID NO: 159085 - DNA, 346 bp, Glycine max
  unsure (1)..(346): unsure at all n locations
agcttccactacttgactttgttggtgtcacaccaatgatgatgacattctctgctggttntgcttatctagagggtgaatgtgttaataatgtggtatgggctctagaacggtttcgaggtttttttctaagacgtgatgccctccctgaagttattgtgactaacagagacctaacattgatgaatgcaatgaaaactatattccctgaatgtaaaaacttgttgtgcaggtttcacatcgacaagaatgtcaaggaaaaatgtaaatccctaattggtcaaaaaaatgctttggagtatgtgatggatgccttgggaagtttgattgattgtcgttcaaaaca

SEQ ID NO: 159086 - DNA, 370 bp, Glycine max
  unsure (1)..(370): unsure at all n locations
taagcgagtctattctttgttatacacaaagtacttgtgagagattagaactttattgtaaattcactcgttgagtgttataaagaatctctggttctatatcaaacttttgttttgaaaaccacaagtggattagtgacaaaacaatacttgggtgttcttagattaagggaagtctaaggattttgccagtagtggccttgagaaaacttgtaagccatattaaagtatttttattgctcttctttagcatattaaagtatttcaaagtccattgttgtcacatttcgcacacaaggttttcatcggaaataatttttatacatcattggatgacaatccacttttaatcactanacgagggttctta

SEQ ID NO: 159087 - DNA, 422 bp, Glycine max
  unsure (1)..(422): unsure at all n locations
ctttanatagtaaaaaaagatntttttctatattctgactnttattttacaaacttaaacaaacattaaaaaactttaaagaatatcattttttaaaagaaatcttcgtaaaaagattgaaacaagcaagctcaactaataacaataaggaacagtggaatacctaaatcacgtggatcacttatttcgacaaataatagaatctgagtgtcaatttcctggtcaaggtaaaagccaccaatataacaaatatctacgtgtctgtttaaaaaaacacactaatttggtctgccataatataatacatttcaatgcatatactacacagattagtttaaacaaattttaattgcgtttaacaatttaaaattaatttccccttaactntaaaatacctcttccgatgtagagatcatgatgat

SEQ ID NO: 159088 - DNA, 400 bp, Glycine max
tggtgtagagcttgagttgtaaaagccaaaagtgatattgttttatacttataacttgttgaagttggtggaacttggtggttaaccaaaagctagtctcaatggtagagatgactagtattttaatctgacttggggtttgaatttgattttgtctgaaaaactcttttaattttgcaaaatctatttctatcgtctaaatctgttttgcgaaaatctgttatctacgttgcacaaatatacttcagatgataactttgttgtttacgaaaaaggatttaaaatttctaaaattacaattcaacccatgttcttgggatatttttcgtttcataatgcacaagagagatgaaataaagtcttattataagggacacaaaaatttgttgactacatttta

SEQ ID NO: 159089 - DNA, 430 bp, Glycine max
  unsure (1)..(430): unsure at all n locations
agcttctcagttataatccttccgttgtctctattcttgagacctnntcatttaattttctttctttatcttctactttagnttttctgtaaaaagagtatattcacttatgttatttttacaattgctttgaaggatcgggcaaatgagatatataagagggttgaagatcaaaagtctagtagaggaagaaatcaagatgctttattggctgcttgtctctacatcgcttgccgacaagaagacaaacctcgtactgtaaagggtactgcttatgattcttttaacatctggatgtttcccaatttatctttctgtatataaatgagcttccctgaacctatggatttcaactagaaatttgctctgttgccaatggggccacaaagaaggaaattggccgagctaaagaatacataataaaacaact

SEQ ID NO: 159090 - DNA, 419 bp, Glycine max
  unsure (1)..(419): unsure at all n locations
tacggacctatgaaactcaacttgctacccaggaagctcctaatatctcccacactntttggggtgggccattcttggatggccttgattttctcagggtccacttggaccccatttctaccaactacaaaccctaagaaaactatattatctacacaaaaagtacgcttctctatattttcatagagagtgtttttcctaattattgaaagaacttgcctaagatgtcctaagtgatcatctaggctcctactgtacactaaaatatcatcaaaataaacaactacaaatctacctatgaaatcccttaagacaagatgcataagccttataaaggtgcttggtgcattagtgagcccaaaagacatcactagccattcattcaaaccatacttggtcttgaaagcggttttccactc

SEQ ID NO: 159091 - DNA, 442 bp, Glycine max
  unsure (1)..(442): unsure at all n locations
agcttcttatccaaggctcatcttggtgggtgaagctccttattccatggcttattccctagtggatggcgcctcctctcacctcttctcctttgtcttctgctgcatctccatggtggaaaatcacaattaaaggaccccattgaagctcaaagatccagcctccatagaatccccacaagcaagcttccatcaagtggtaaatagagcacaagagcttcaagtaggtgctccttaaacctccattaattatttgctttaccttttcttcgattgttgtttcttcattttttctccatgtatctcctcacatgtcttgtgataaatgtttttaacatgattatttagagtttccactgattaaacttgctatagaagctagaattgattttctatgggtcanatntcttgttcttgttcttgaaccatgaattgtgttgag

SEQ ID NO: 159092 - DNA, 402 bp, Glycine max
tgtctaccacacaaccaatgctaaacaccacctttggcaccaaccaaaacaccaaccaagaaatgaattttgcagcgaaaagcctgtaggattcaccccaaattccggcgtcatatgctaacttgctcccatatctacttgataatgcaatggtagccataacccctgctaggttccctcaaacccccatttttctgaggatatgactcgaacgcaacatgtgcatatcgtggagggccctggggcattccattgagcactgtatgaccctcaagcgtaaggtgtaaggtctaattgatgcgggctggctgaaatttgaggagaatcgcgtgtaaatcctgacattgacaagagatgccacacatggggcaattttgaaagctgttgttagatgtctctaat

SEQ ID NO: 159093 - DNA, 463 bp, Glycine max
  unsure (1)..(463): unsure at all n locations
atgcaagcgttagtggaggagaataatgagagagatagagagttgtgtggggggcacnaaattgaaggagaaaaagagggagagaagttgaactttgaagtgtgtcttacaagtttcacattcatcaaagttatgacaagtgttacacatgcttctatttatagcctaggtcactaactaattgaaagcttcattgagaagctagagtttagctacacacacccctctaatagctaagctcaccttcttgagaagcttccttgagaagctagagcttagctacacacacccctctaatagctaagctcacccatgccaaaatacatgaaaatgcttagctacacacacccctcttatagctaagctcacccccatgccaaaatacatgaaaatacaaaaaagtccctactacaaagactactcataataccctgaaataaaaggctaaaaccctatactacta

SEQ ID NO: 159094 - DNA, 397 bp, Glycine max
cagcaggtgacaaggaacaatatgatgaaaatgtgttacagtattttttctaaggtaaatagagtgttgaggggtcgaaccttgaatcggtggagttttcgccttaccatcagtttgggccagtctaaattaatgttatagactggtttcagatgagagcttacttcaagattaccccattctcattttttttacttctcaaaccttgaaaattcactctattaacgggtttactgatacctagatttggatttaccttgacctgaaacttgtttttggcttaaaatcgatttattcatgatttatgagttgtgagatccaattagaccacaattggatttgggctaaacggatttagaaaaatgccctatgatacaaaaaattgctcgtgaattgt

SEQ ID NO: 159095 - DNA, 189 bp, Glycine max
atccggcctgacccaataacaggtggtatcgcaacactacagcgcatataaataagaatttcccctgactacgactgccaaacacgaggacataaacgttcattgtaaacaaggggcacacttctgaaaatctgtaaaaaaaacaactcatcattaaactggaaggagtggtgcaaaaacttgactaat

SEQ ID NO: 159096 - DNA, 318 bp, Glycine max
tatgtgaaaatttattgtaatcacatcatatccaactctacccttatttatggtcgttgagattctttgcgaacattttcaccagtcgcctaatgcccttgaccaatcacagaacgtttatgacgctttcattttggcgccgtggatgaaaactttcatccccttaaagggtgagattcttaagtctggcttatgcatgcatgcctcttgaagcataggctatctatctccggcatgttaaacgccacattatttttttcttctaaaccaccagtaactgccaaaagataatttcggcttagatcgaatgaaattaac

SEQ ID NO: 159097 - DNA, 447 bp, Glycine max
  unsure (1)..(447): unsure at all n locations
tgcaagctgaaatatncncattgtttaaaagctctcttttgctctagcatgcttaaatgggacataacatcacgcaaagtttaggaaaagaaaagttaacacctccaacaacaatggaagactataccaaanagttgtttctttttcatgacattcgtaaggcacattttgcatttcccccttttctttagaaactttgctacttattctgataagcttatttgcttttctctttattatgaacaaagatcgaagccaatatcaaagctagctacacttgtttcataataaatgcaacacaacattcgaaaagtngttgcaacacttagtcatttacaaaagaagaatttaaagttttatctcatagaaaacacttcgtccaagaatataagccatatagagtatactagattctctaaaaacatttatgatataaaaataataatt

SEQ ID NO: 159098 - DNA, 389 bp, Glycine max
tcttgaatacttgaatgaggatggaaggtgtattgagtccaactggttttttgtttacccttgtttttatgaagtactctctagtttatgattagtatgagtaccgaacttccttgaatttttgttgtttggcctataacaggtacataccagtcataccattggttcttgtcaatggtagtgaaggaattgggacaggctggagttcttacattcccaattataatccaagggacatcattgccaatgttaggcgtttgttgagtggggagacaatggtgcctatggatccatggtacaagggattcaaaggaaccattgagagaagccccaaggaaggtggatacgtagtcaatggctcactggaggaaataaatgaacaaactttc

SEQ ID NO: 159099 - DNA, 422 bp, Glycine max
  unsure (1)..(422): unsure at all n locations
agcttcttcttccacttgtgctgaaccaccttgcgcttcatttnctatcctcacacccctttattcagctaaaactgacccaccatttcaaactcattcagcagctgaatcactcacaccataaaaaacgaaactgtgaccttcacttggaccctgtaggactcaaaccagaagatccaaccagatccatggcagcccaataatcacaaaaccaccaccacaacaacaacaacaaagccttatcccactaggtgagatcggctacatggatcacacctaacaaattcactggagacttgaccaaactcgtggaacatgaatataccacactgacccacaaatcaatacaaaccactaaccatgggaaaaagaaaaagcacggtgcttgtgatgctatgagccaacaacttatatattctcta

SEQ ID NO: 159100 - DNA, 369 bp, Glycine max
attctacattattcatgccgggcgcaaaacacaatcctttcgtagacttatccctaatcgggcaaactatagtccgtgtctatagcctatcttatgagacatgattaaattagtctccattcgtatcaattctcgcgttctctttaaaaagaaaaacatgtttcccatgtcattgaattatttagacacctctttataggcaattcaatgctttagacatgagaaacaaagtcaattctaactaacttttaaaacaaacagaccttctcattgcatctaaagacgggtcaactaataaaacgtgggttgaacatacatttccgcacattaaaatgcagcttttattctacaacattcaatccataattt

SEQ ID NO: 159101 - DNA, 421 bp, Glycine max
agcttgtaagagataccaaacataattggtttgtgctacctcattgccattctttagttcaccttaaaaaaatattagatagtgcataatgacatttgttaaataacaagtcaaatgtacaccaatgcaacttgaaaaaatttaaataataattatacacaaaaaagcattgtctaggtacgtaccattccgaagcattttttttcttcaaatcttttaattggattaatatattttgccttttatgtattaattgaagattagctgagctgaagactaaaatctatatattacgaaatagcaaaacataaaaggtgaaaatattgataattaaatttgtcaactatcatatatcaatcatgcattgctatgatccatggattcatcactaaaccagccttgtccaagttgtaaattgatc

SEQ ID NO: 159102 - DNA, 395 bp, Glycine max
tcttggaagaagtctgatggtcataatcgtctacgacaaatggatctaattgttggggaggacacatagagcacatacaacatcaatcatcacttttccataaatgtcataccaagggtgcacataatgaagcaacaagccccaccaccaacatacacaattaaagtgacataacacactccaaggtgaatatcctaaatagtatgtcaattctagcaagaggagtgactcagaccaatacttttatgaaaaacaatttacctttaagcatcaacgcaactagggttaatgcttgaggggttgtataccattcaaaaagattatctcaaggcgaccgactctttttggaaacaacaacttgcccttaagcatttatgccattgggcataatgctt

SEQ ID NO: 159103 - DNA, 360 bp, Glycine max
  unsure (1)..(360): unsure at all n locations
agcttgtaggtgcataatgactattttctatnttaannataatnttaaaaatatgagaatttaacctatgtaataagttccaagctattaatctatataaatcactcttatatttttctttgtatatgcaacagttctagataataattcacaatgtatcacattttcaggtggtgcattcttatatattatgctatttccctccgcatttgagtacaaacttccttttacttccaaaacaaactaacctttgtcagtacgtaacaccctaaccctatcttaaggaagatacaatcgcttgaattgtgtcgtggtgtattttaattcaaatattattctatcaagagaatatcttttctt

SEQ ID NO: 159104 - DNA, 330 bp, Glycine max
ggacacttaaaactcagctggaagactctacatgggaaactgaatgtcaagatgttgtcagggaagcaaaagccacagcattgattcatgtataagtgagttaacgcatttgaataaactaacaactctgaatgtgcagatagaagatacttcagattttgcaagagactatcttggctttgggagactagaaagctaccagattttgattggggaaggatgggaatggtctggggtggagtctgggaattacgaaacttcaaaacttcttaagctcaatttaggtgctgatacaaacattctaatggattacggcataaagatgttgat

SEQ ID NO: 159105 - DNA, 359 bp, Glycine max
  unsure (1)..(359): unsure at all n locations
attttttggcacttttaaatatgctgcctcaggttaattcccttttccctttacaccaaaaatataatgattgtatgggttttctttgaagagcaccctctagatattataacttcttcattgaggacatcttcgtcaagtgccatagcatcaaaaacttgatattccttcattgatgggcaagttagacgatcatctctcttatcctataaatcatgatgataaggaggtagttttgatagtcttaccggtantgtttactcagcttactttttaattaaaagttacttttaatattaagctagacaccagagcttatgaaaattaagaaaacattgtntgtcaatttttattttttt

SEQ ID NO: 159106 - DNA, 416 bp, Glycine max
  unsure (1)..(416): unsure at all n locations
actatccaatactcaagctggtaacctgaatagaaaatgtccaacttttntttagaacctatttgttttttgcattcactatatacggccttcctctagttctaatcattcaccatttttagttaagaactatgatgttcctagttcctagactatgtttcagacatttaagaccttttgctttagtatcgtcaaccatagagagctctgtcaatgattccttagtgagtctagaaattttggggaaaaattgaggataatttgattaagaaaaatagtgtttagtaggttatagaataggaattcattttgaaatcgtgttaagttgtgtgtttttagaaattcactcaactttggcacaccaatgtcaaatgccaaccatccggttctaatagcttttctttttaagaacttat

SEQ ID NO: 159107 - DNA, 450 bp, Glycine max
  unsure (1)..(450): unsure at all n locations
ctgagctgcagctcaaaccagcacacaaatcttgtgtccgttccctcaattatggatttctacggttgagaagtgaaatngagaatgaggtaaatctgaagcaaactctcacctcacacaagtccataacatcaatctaaacttgctcaaactggatttacacctaaaattccaccgaatcaaaatttgactcctccacacccaattttgccctagaaatggctcttggttcactttggtcatttgtttttctctctagcacagtccaagctttctcataagtcctaaatgacatttcaagctaggattaactcactttaacctccatttaccacagaatccagatttaaccttncaactctcaaggcctcactctttttccactcaacaccacattcttactgtctaaccatagaataactctatccttcatcttaacaggtttcataa

SEQ ID NO: 159108 - DNA, 403 bp, Glycine max
aagctggtagggttaaagtctcacaattggcacgtgtcgatgcaacaactgttagtcgttgctatatgagacatcttgcgaaacaaagtcaggttagccataattcgcctgtgctttttcttccatgccatatgtagcaaagtcgttgatcctgtcaagtttgatgagcagcaaaatgaagctgcaattatactgtgccagctggagatgtattttccccctgctttctttgacataatgattcacttgattgtgcatctgttcatagaaatcaaatattgtggtcctgtttatttgcagtggatgtacccggttgagcgatacatgaagatcttaaaagggtatacaaagaatcaatatcgtctagaagcatctattgttgagaggtacattgcagaagaaa

SEQ ID NO: 159109 - DNA, 424 bp, Glycine max
ctatccaatactcaagcttcatacaattaatatagaacctatatcctaatgtcacatcctatcagagtgttgcgttcctgtgtcctctaacatgaggttcttcatagtcatccacctattcatctgctcccccaacacaagttcaagatcatcacaggatccaaacacaacaacacatagggagtgagttatcactttcctagctaatagaaaaacaggacaattaaatatacatattatataaatgagataccacttgcttaaacataactgacgtaatttcaccacgttgtcattcaaaattcactttcaatcatcaatcacattacacaagaatcccacactccaatcaagatataatagcacatcaatttcataatagacaattagcaagcgtatgcaacagttatgctaagactcaatc

SEQ ID NO: 159110 - DNA, 428 bp, Glycine max
  unsure (1)..(428): unsure at all n locations
agcttcaatgagatctacatcatgtggtattagagctttattaaataaaatctaatagaatgtctagaagcccaatccaattaaatgttagagggggaggtgagcatttggttactacacctcattgccacattatatggtcacacgttgtgcatgttcttcatgctttacatgcctcatcccacctaagcacacttagtggagaatcttggaattgatcttggattagtgggctgaaccataactaaaattcactaatcataatcggtgaaattttggctgcaaagattgtctccacaaattcaatttcaaattcaagtgaaatttgaattgaaattcaaattctccttcaattttgtgtgacacttatgctataaatagaggtcatgtgtgtgcattntttcaactctgatcatatgaaattaaac

SEQ ID NO: 159111 - DNA, 409 bp, Glycine max
  unsure (1)..(409): unsure at all n locations
agatactcagcttgttccctgncattctttccagacgatatctgcaatatcttttcttctcataacataacaataactgaactaataagagggaatagtgtatatactactttcattcaatcacagactacttgcatgttaaatttgtagactcctatgctcagatggcccctgattggttggtagtgtaaatttaaactgaacatgcacaaaaactaaactcgaagttcagtaagcataaacaatcatactattatcacaaaccaccccacctaaaatttcaccatgcaactaggaataaggaaaaaaaacccattttgcgaacaattcaaccaagatgaaaagagcagaattggtggagacccactattccttagaaagcaaagatcaaaattgaaaatttcatggg

SEQ ID NO: 159112 - DNA, 435 bp, Glycine max
  unsure (1)..(435): unsure at all n locations
agcttagatggagaattctaagaactgaatagttagtccattaaaaaggcatgactggtgcaaatagaaggactntaattagttcatgcttcccattacaatgaccatagatttaattagattaaatcatactttataaccacctgatcaaagtggccatgaagtttgaagatgaatcatggatgagaatgttggtagagtgttacgcgagattggggaggggaggagagagaagacagttttttgtttaaaataattaattaattactataataagtctgatgtaactgcttagagtaaaagagagttggatttttttttctaataattgtggtattagttattaataggaagaaatctgagtgcattaacaaatcatatatatatatataacattcttattctttatattataaatacttagaaagtacttta

SEQ ID NO: 159113 - DNA, 394 bp, Glycine max
  unsure (1)..(394): unsure at all n locations
tgccatgaaacaccataatttctttgcttgtgtatggagccggaaacgncatgcttatgtctttctgaaaaacgtaatgatataataattctcttacagaggaaaatttaactagttcagatagattgatgcttaactacttgaattatgaaccatgctgcccaaacaagggtgctaagaattaccaccaaagggcctaggaacatgttttctttgccagaagagctagttccttccattttctcagcatatctccagcgaatacttgattggcctaaaccaatggtttttccatggtaaaatgacaaaagcaaggctccactcacacacaatattgtcccgaatacctttgctagaccaaccctcttcttgattcccacattctcttgtctaa

SEQ ID NO: 159114 - DNA, 363 bp, Glycine max
agcttagtaataagagtaattatatttgtgcttttttctaagatcaaagttgtaaattacttactcaacgttgacatacaaagactcgtagtttgccataaaaatatatgatcatggaataaggaattaagcaattatgtgattatacaaatggtcactcgatcatactcttgtctttggcgcgacaaaaaactaaaatcttttttatccaacacgtggacctcttacctatgtgctgacctccgagatgactacttcacgaactatcctctcaatgagatcatttacacgacactaattcctagatgcttatagttatctataaaaactagccccaacttcctccaattgtgactgatattg

SEQ ID NO: 159115 - DNA, 384 bp, Glycine max
  unsure (1)..(384): unsure at all n locations
taatatgcntaatttatgtacaactatgttatacaagattttttattttttgaaaaaagtgacgattgcgattaatatctggtagcggttatactgctttgctactactgcagttttggtagttatgatattataatcccctcaaaaactattacaagaagtagaaagaatcttttgagacaagatggttttgattctagcaagttgtagattgacaaaatatttcttggtggtactaagatatgccagacttaacgagggtcgtgaactacaatccgatgtgtaataattggtcatgcattcttctgttacctgcagttttttattttcaaattcttgatttgtcacaaaaagatattaacttttttatgggtaaaaagtaca

SEQ ID NO: 159116 - DNA, 306 bp, Glycine max
  unsure (1)..(306): unsure at all n locations
gaaggaactaattccgccccggagtacgacagtcaccgctttatgagcgttgtacaccagcagcgctttgaagccatcaagggatggtcgtttctccgggagcgatgcgtccagctcagggacgacgagtatactgattttcangaggaaatatggcgccggcggtgggcaccactggttactcctatggccaagtttgatccagaaatagtccttgaattttatgctaatgcttggccaacagaggagggcgtgcgtgacatgagatcctgggttaggggtcagtggatcccgttcgatgccgac

SEQ ID NO: 159117 - DNA, 392 bp, Glycine max
  unsure (1)..(392): unsure at all n locations
tgtaggattatggggtacccgtcatatgtggtactatgtggctatcgggcgatggngcaaatcaactctcccacatccacaaatcaaacatgaacccaccatccccagttgcccaccttcaactgagctcacgtacccccacgtagcccttatcctcgttcctctcagcaccgggtccccatcacctccaagcttccacaatatccaagaaattcaatatccaaacatcatgaactaccctaaaccaagaaaacagggcagaggcagaaaactctgcccaaaacacattccaataccacaactttccttactcaaataccccagtaacattctctttgttctggttcgttaaccattggatcgacttgaaaattttactggaggttcctatt

SEQ ID NO: 159118 - DNA, 439 bp, Glycine max
agcttcttatacaaagcaattcttggtggttaatctccttcttccttggcttattccctagtggatggttcctcccctctcctcttctcctttgccttccactgcatctccatgggctaaaatcaccattgaaggacctcattgaagctcaaagatccagcctccatagaagctccataaacaagcttccatttagtggtatcagagcataagagcttcaagtacgtgctccttaaacctccactaattttttgctttatcttctcttccatttttgtttcttcatttttttctccatgtctcctcacatgtcttgggctaaatgtatgtaacatgattctctagagtttccaccgattaaactcgctatagaagctagaattgaattttctatggttaaatttcttgtcttgtcttgaacataattgtgtgaattagt

SEQ ID NO: 159119 - DNA, 348 bp, Glycine max
caaacggcccacacactcaaaaaggcagccctatgtacataaatacttttctacaagcagaaattcacaaagttatacacaaatgccattgaggcatttcaccgagcacttggtgggcgcatgtttcagcatgaatagcaagggaatgggggcaatgtggcacacccaatcatttaataacacaacctaagcctaaggccattgcctacaactctctaactcaacaaaaacaaacaccaattcaaagataaatgcctcatggatttgagcaagaatgagcaaaaagggtatcaaaacgtaacaatggtgagccaaagaacaaagggatggtacacttacttgtatgga

SEQ ID NO: 159120 - DNA, 385 bp, Glycine max
  unsure (1)..(385): unsure at all n locations
caagactcnagcttagaggnatgctcttacatatatgacatatantgtttgttgacaaacactacagaccgaanaaggagctcgagtgcacatgctgcgggtggcacgtactataagctttgtattacgcccttgcatatatgtcactcatcgtggatggcatataatggagtcatggtagtatgtaggtgtgcacatgctgaaggtgacatgtactggaggctggatagtatgctcttcgatatatgccattctccgtgggtggcatatactggagacataatgttgngctcttgcatgtatgacactcctcatgggcaacacacactaaaagcttacgacggtgcttctgcggacatgtacctcgccttggatggcatgttct

SEQ ID NO: 159121 - DNA, 443 bp, Glycine max
  unsure (1)..(443): unsure at all n locations
agcttgagtttgttaaataatattctacctgacgtncccaaggtctcctgacccccgcgacatatctccaggtaccactctgtggtcaacgaatagaagcaggaagtttcacccttctacacttcctcatctcaagcttgtaggattatggcgcacccatcacatgtggtactatgtggaggtcgggcgatggtgcacaacatgttttccacatccacaaatcgcacataaacccaccatgccctgttgcccaccttcaactgagctcacgtactcccacgtagcccatatcctcggttctctcatcaccatgggcccatctattcttccacgcttccccaacattcaggttatgtaacatccanatcatcacaagctaacataccaagcataacagggcaaaggcagaagactctgctcataactctaaccaaaatcacagc

SEQ ID NO: 159122 - DNA, 384 bp, Glycine max
  unsure (1)..(384): unsure at all n locations
tggatccatagnctccacgctccatctgtaaatgaaattttccaccctaaccaaagagattgtgaccatcaaggctgatcaaaagcaagcacaataatgctttgctgagagcctgaaagaacaccctatcctcccactatggagcttgccaagcctcaccctacagcggttgaaggtactcaagtcatgaacaaaaggcttccaatccgagccttcattgtttaccaaacaagcctggacgaataatttgatatagatttgtgggagaacacttttgacagaggccaaaagcccatcgaagagcttgtcaagctgcatgtaaagacctcactaaccttgaacacaaacacatcattgatgtcctatacaagaacatggacctgt

SEQ ID NO: 159123 - DNA, 382 bp, Glycine max
  unsure (1)..(382): unsure at all n locations
tagcacacaggcgcacttagcccnaatattaagtaatttttcgaacctaagtggcgcataacttagccagctgggcttaacgcctgaactactctgagtatctcagcatactattgatgcttagcgcataggcgcacttagcgtctacatcgttttagttcaatagctatgatgagcgcgcttagtgcgacatggtccgcttaacgcgatcattagaaatcctaaaaaaatttaacagttgtgatgaacaagctaagcgcagcaggcgcgcttagtgcattcatcgcaattcccagatatacacacaggggttttcacccctttcagccacattgcccctaatgatcttctaaactacctaaaagtctaaaatacctaaccc

SEQ ID NO: 159124 - DNA, 402 bp, Glycine max
ggaccataaaactcagctgcttgggacgccatttagtttgatttcgagcttattgagggccttcaatggtgattttccaccatggagatgcagtggaaggaaaaggagaagatgagaaaggaggcaccatccactatggaataagccatggaagaaggagcttcgccaccaagaatgtgccttggataagaagcttggagaggatgattcaatggaggaaaagagagaggggggagcacaaaattgaagaagaaaaaggggaagagaagttgaactttgagttgtgtctcacaagactctcattcatcaaagttacaacaagggtaacacatgcttctatttatagactaagtagcttccttgagaagctttcttgagaaaacttccttgagaagcttcttt

SEQ ID NO: 159125 - DNA, 425 bp, Glycine max
  unsure (1)..(425): unsure at all n locations
agcttgtattcagtagaagaagagacttggatttattacctttncacccaccatcactttgtacatgcaaaagctatctttgtgatgagaatcctaaaactacctaaatataaggatctatgaccaggagtaggaccaaacagaccatggatatcctccaagaaatggtagcagacgcacttaacaaggcccaagtggagaagaatgaaggcctaaaggtaaaggcactactaagaatattaattgttgttgaaggtccaaattgttttaaaggcctgtgtctatttctatcttttcatttagatattctatatgtatggatttcattttcaatagaggacttnttggcatttgatataatgtggtgagagcgtttctctaggttccttgttgaaccaatctcagacttatcaaggtaatccttg

SEQ ID NO: 159126 - DNA, 428 bp, Glycine max
  unsure (1)..(428): unsure at all n locations
gtgctccctaaacctccattaattttcagctctaccttctcctccattattggttcttcatttatttctccatgtatttcctcgcatgtcttgtgttgaatgttgttaacatgattctttaaaatctccaccaattaaatttgctatagaatctagaattgattttctatggttcaaatttcttgttcttgttcttgaaccatgaattatgttgagttntgtcttgctatttttgtggctgaaacctaaaccatataattcttaacaaaacattatagtagaataaaacctccaaaatctagagtgacatgttcactcattgtaatttgtcatagaagtcatgttgtcattaacctgtcacatagaatcctatctgngtgaaattatttcttgttctttgctactcattgtcataatggagaaatttt

SEQ ID NO: 159127 - DNA, 429 bp, Glycine max
  unsure (1)..(429): unsure at all n locations
gcaagcttttgnncaaaatgaataaaagtggtgataaattgtttatgacgaagcttcttgtataatttagttaaaaattgaccttaaacgagtaatatacatattgatattttcacctggtaacatccatacctcataaaaacaattttaatacctcagagagaaaaaatgtcactaaaaattatgttacttgaattaatgggcatcactatatttgttggtattaacacgaagcataatcactgaaacaaaccaagttaaattatagtgacaccaaattacactcactacatgttggtggttgaattcataggcaacactatattctggtggttaaaattaatattcacaggtgccaccttaccacaatattacaaatattaagtgcaataaaccacatatatagtgcactacattccaacacttgaa

SEQ ID NO: 159128 - DNA, 343 bp, Glycine max
agcttcaatctccttacagcaagttgcaatataaattgtttatcacttttcctggatgaaaatattgaataatcagagagctaaggagcaaacttggtgaaaataatgaccaccatcaaaatcctaaatctcgtattagtgctgaagttaaaaaaaatagaattgatttaacattatatcttacaatgaaggtattgcagagtggaaataaatggagcatccataaaagacagaccacttattctttgggcagtattttttcctataatgatcaacagtgctgacatcttctgacctatcaatattgcttaagagctgcaaaagatgatataaatgaaagtta

SEQ ID NO: 159129 - DNA, 232 bp, Glycine max
tcaacatttggaggccttctatatactaatcaaaactgagtcaaccaacttccacacaagcataattcagttcaatatcaaaagctttctatatactaatgtggtttgatacgttcaatatcaaaagctttctctagtctcgttcagttcacaactgtcatgtctgcagccatgcttgtgtggaatgatttctgaaagcaagggggttaatgtgaaaagagctgcaaagcaa

SEQ ID NO: 159130 - DNA, 274 bp, Glycine max
tttaaaaattttaattttttcttctatggaccaagccagcttcaaattgggcactttagatgtatcacacaatcaaataaaagggccacttccagattggtggaaaatcagtaagcaattacttgttcttgatttaagcagcaataaattgtcagggaaaattcctatgtccatgggcgcccttgttaatatggaagcctttggtttaagaaacaatggtttaatgggtgagttgccttcttctttgaagaaatgcagcagcttatttatgctg

SEQ ID NO: 159131 - DNA, 421 bp, Glycine max
agcttccttatggcacttgtgagcaagaactcttgatattatcaagttactaatttgcatgttttattgtaacttttaaataaataaataaaatgtaacctaacaaacttttgtcaacatctacatggttagaccatgatgttagagtgcaaattatatttttaccctgattacagccacaatgttcttacaaggtttccattgataagattgcaatggaattgcacggctctattcagctgatgcaacccttatccccacccccacccctcattctttaaggggataacttatgctccaaccttgtactccttcctttctaataatatattctatgaatgaaagataaagcacaagttgtacaatagaaaccattagaagcatattagcatttaaatagatcaaatatacagtgcataca

SEQ ID NO: 159132 - DNA, 440 bp, Glycine max
gattcttaagcaccgcggctgcagctttggcctagaagaaataaatttttttagattcaaggctcggaaaggattgtattaaaaagatgtgattagaaaagattgattgaatgaatgattgacaagcaaatcaaagccttgttttcataaactcttcatgtttggccaagaggaccatttagaagagttataacttttagaaaaacttaaaaccaatttgaaaaagtcaaaaaccttttgaagagttacatattttgatttattcagaaacaaatcactggtaatcaattaccaaatcagtgtaatcgattacacaaggcttttatgtgaaaggatgtgactcttcacatttgaatttgaatttcaacgttcaaaggcactggtaatcgattaccaaaacattgtaatcaattaaaactttttgaaatcaattggaacgt

SEQ ID NO: 159133 - DNA, 391 bp, Glycine max
  unsure (1)..(391): unsure at all n locations
tagcttaaattgattgaaatctgaaccttgacnatgttgtccggattcaagaccaccagagatactctctgaacaatagagatcaactctacacattcaggtccaacactttgatgtagggtaacatcaaggtggctcacaaaacactcaagtcccaaaactcacaaaataactcttcaatctcggacttggtagaaaactcgtgcagccttcattgtttatatagcagtgtgcgtatctgggctgcaacaacttgcgctggataagatctatcattctcctgaaaatctgcacttanagatctaaaagataaagttcgatcttttaggttttatctttaatctttaatccctgaacgaactattcaagtttgtaattcgaactttaatta

SEQ ID NO: 159134 - DNA, 389 bp, Glycine max
  unsure (1)..(389): unsure at all n locations
agcttcatgatgttgaaaagatactatgttttatttattgaagactaaactcgnagcttctaatgcctttgtaatgtcctacatgaatatataattgttacgctacaaattcacataattttcagtaggtttgttacattaaatttaattggcaaacatgtagaacttatggatatattgttacatcattaatangaaatacctgtaagtttaacggttacgtaatttaaaataattctttaatgctaaccctaatatttagacgaataaaaatagaataaaattataaacccaaataagttacatttaccaaatgtttggaaaaccaaatgttttcaattccagaaattattaccttcgcaaatatgaaatataaatagatgacgcta

SEQ ID NO: 159135 - DNA, 328 bp, Glycine max
  unsure (1)..(328): unsure at all n locations
agcttactgttatcagtgaatacattgtnctantttttataacatactaaacgtactttataaatttccccagaaattctagttctagaaatctcattcatagaaaagtagtttaatttagaatggaagattttctgtactacacatcatttcagtctatccaaatatctttgaataggaggaaatagacatgttatctgcctatgcgatgggaatgccactctacttttatattttttttagccgaaaggaatgtcatattttgcaaggccctaaatagtaccatattcatattccagaaaagtttgcaagttgcatgatcgagtgt

SEQ ID NO: 159136 - DNA, 308 bp, Glycine max
  unsure (1)..(308): unsure at all n locations
agctngcatgtaacactatctatcattngttgtatcttttaagngcggaacacatcttaagctatatgcacattcggaagctggaacaacgggttctgtttgttgttgattgagctttgatgattatgaataatatgtaaatccaaatagtcctgtatataagaactgtgtgtgtcttagttgcttgatacataaccttgtgattgtggtatgtacctcctgtttcctgtctccttgcggcttcctctttttgtctcatctcctctttctcggtcaatggaaaggaaatgttgtgtcttgtgttatgt

SEQ ID NO: 159137 - DNA, 197 bp, Glycine max
cagctagacaatgaaggagaagaagaatattttttttcatgagacgcatgaaacgcggctggcatgacttaataaacacatgaagtagggtgttgcgtccactataaacattagagaaaccctcatccgagtatgtgggaaagccccacaacggcgaggatcacaaaccgattaaaaacttcctcacgcatacatat

SEQ ID NO: 159138 - DNA, 411 bp, Glycine max
  unsure (1)..(411): unsure at all n locations
agctttagcttgtagtttggtatatgagtgttcattgntaattcaaattatgtatgaaatggatattatttgaatatgttctgattgaattattagtttgcacttttataggaagtctgttgggacaatatcccaatcctgttttgacgtatatataaaaattcctttccttcagaattcttctaacctcaaagaaatagggaacactgagttggatgattttatagaagaggggtttgttcacgtgaaaataaaacattagaaaaaaggtaaaaaagtgtcactcacaaagacaacccgtattaaggatatgcaagctgatgtccaaagaggaagaaatcataaagtttgaactagggttgaggaggcttcctcccgtccgaatccatgattattgcctcttggaacatc

SEQ ID NO: 159139 - DNA, 180 bp, Glycine max
agaagaaatagttatgaccctttgggagactgaaaagggacaatcaagggttggacagagtataggctgaacattccttatcaactttttctacatgccaccattctgaggttcttcctcatgtaagtgacctcacaacaaatcaatctgtaaaaaaaatctattaagtttcgagtaaat

SEQ ID NO: 159140 - DNA, 355 bp, Glycine max
  unsure (1)..(355): unsure at all n locations
taagctccttcaactgcacaaggctcttaatatttgtatatatcncttgggaaccttcacccgacaaagacactgacaaaaacttatcttctcctttttggacaaagtatggcaagctaggggcaagtaaattttcttcccatcagaccttggatgcaactatgatcgtatccccatatcagctagatcttgacgggtattcaagccatccttcatcttgccttgaatgttaaggagtgttccaatcacactgtcacaaacattnttctccatatgcataacatcaatacaatgtctaacgtctagatcagactagtacgaaagatcaaagaanatggacctcttcnttcatatg

SEQ ID NO: 159141 - DNA, 283 bp, Glycine max
  unsure (1)..(283): unsure at all n locations
agctattcgaancattctatgttcccgtagtggnccacattgggtttcgttcatttntattctcgttttgtttactttttataccccctgttgacgtgcttaagccattttacttaagtcatttctcgcttaacttaaaaataaaataaatttccaccgaacgtttgaattgtattatccattaacttcggttaaaataaattccgaccgttcggtcgtgccgtaaccacgttggaaatcaaaaagaggtaaaaaataatataataatcaaaaagactttttt

SEQ ID NO: 159142 - DNA, 430 bp, Glycine max
agcttcaatggcttagtgaggatggagaggtgcaattttatgaagctagcggagttggatatttccattggaaaagtacaatgataaggtgctttgtgatgttgttcctatggaggccagccacttactcttggggagaccatggaaatttgataagagggctaatcatgatggtttcaccaacaagatctctttcacgtatcaaggcaaaaagatagtgctcaaaccattgagtccacaagaagtgtgtgaggatcaaataaaaatgagagataaaattcttcaagaaaagagaaaaaaagaaaaagagagccaaacacttgagagttcaaaaagtgaggacaaaaagagggaaacacatgagaggaaaaagatgagtgaaacacttgaagtgagggagaattttctagcttacaaaggagaggtcaaa

SEQ ID NO: 159143 - DNA, 390 bp, Glycine max
cttaccctcggaagcaaaaaaagaatagaagggagaattccaatcaaagaaaaagagaaggaaaatttccaatgaaagcgaaaaaagaatagaagggaaatttccaatcaaagaaaaaaagaaggaaaatttccaatgaaagcaaaaaaagaaaggaagggaaatttccaatcaaagaaaaaaagaaggaaaattccccaatcaaagagtgggagaaagcaaaaagaaaagaaaggaaattcccaatcaaagaatgggagaaagtcaaaaaggaagaagaagaatgaaagaaagcccctgatcggggatcgaatgaaaacacaagaaatatgcagagaggtctttggaccggacaatatctgaacaatacagaattgtcaccaaatgaac

SEQ ID NO: 159144 - DNA, 404 bp, Glycine max
agcttattggattatggggcacccatcatatgttgtcattgtggcgatcgggcgatggcaccaatcaactatcccatttccacaagccaggcataagcacaccatccccaggtgtgcacctttaaatttagctcatgtgcacatacgtagccttctcctcgttcctctcagcccgggtccccatcaaccccaccaagctttcacaatatccaaacaattcaattccatttgtcatgaaactaccttaaacaaagaaaaacagagtggaggcagaaatctttgcacaagattcattcaaattccatagagtttttcctaccctcatacctcagcaaaatcctcttcgttccgattcgttaaccattggatcgccttgaaaatttaactgggggttcctaatacag

SEQ ID NO: 159145 - DNA, 408 bp, Glycine max
  unsure (1)..(408): unsure at all n locations
taagaacctcttanatgagatagagaatagtanatgctctcttttctcttggtactcaagcactaacttatcaatcttcaacggttgatcggagaaaggagccccaatgccttcttctttcaacaaggcttgtatcttgatgtgccaaaggttgaagctattattcctttgaaatttctcaatcttgattntgttgaccatcttttcttgataggatcttaaagatgcaacacacatagataacaaatagaatggttgatcattaatgacttgatcaacctcgaaatagatgcggaactaatcttgaactaaggctctagataccaatgtgttgggaagattcaagagattctattcgaataggaaagtttatatgatacaaggagaagagagatgtcgtgcaaagtg

SEQ ID NO: 159146 - DNA, 369 bp, Glycine max
  unsure (1)..(369): unsure at all n locations
taagtgacctgccgcatgcaagctataagcctttgccaacctcagtgtttttgtttgctcttcatatcatanccaggcaatgcaagctgaccgcattggaacgagcccaaacacaagatatgggcgaatgcaaggagcgttgctcacccgcaatggacagcagcaaaggagcctttcaataccaaatggtacttatgcatctccatatcaccatcagtttccccaaccatcaccaaaacccaatggcaaagcatagagctgatgaaaattntctttttctttttctctttcacgctttacacctttgttagtttttttttataaatgtaccttttttaaaactaacatatgcgttttatgagtctgtta

SEQ ID NO: 159147 - DNA, 419 bp, Glycine max
  unsure (1)..(419): unsure at all n locations
agcttcatgatgattcaagtagttttgatgatgacttagatgatgacaaaaagttcatgagaatgatttcaagattgagtcaacaagttcaagatcaagattaatttcaagtttaatgaaaagaaatcaagaagattcaagattcaagagaagtttgatttcaagattcaagagaagatgaattcaagattcaagagaagaaatcaagaagacttcacaagggaagtattgaaaagatttttcaaaaaacaaacatagtacagttttgtttttcaaaagagtttttctcaaaattttcgagtgaataataaatttagtccctgagattgnncccntttntcatattantccctcacttatattaaatcaaaatantccctatctttgctaagtttgcaaaatacccttccgtaaatttt

SEQ ID NO: 159148 - DNA, 305 bp, Glycine max
gagcttgggtttgacgaatcttatatgcaatgcacatgttgtgctcttgcatacatgttactcacttggggtggcatgtattggagatgtaatggtgtgaattagtatgactcaccaagccagaccttgagttttgtgagccctttggaggattgaccagggaatggtccgaccagggttttgggtgtcgtgctcttgcatacatgccactcgccattggtggcacctactggagacgtagtggcatgcttttgcatacatgccactcgtcgtgggtggcatgtactggagtcatagtactttgc

SEQ ID NO: 159149 - DNA, 421 bp, Glycine max
  unsure (1)..(421): unsure at all n locations
agcttctattcataatttcgagtgttcttatacttcacgacattatcggacatccgagtaaaaagctattgtcgtttgaatttgcacagagcttctgttttcatttcgagcgtcacgatatactacgggacacaatcggaagtctgagtaaaaagttatagtcgcttgaatttgataagagtttctgtttttaatttcgagcgtctcgatatattacaggactcaatcagacatccgacttaaaagttattatcgtttgaatttgtaacgagtttccattntcaattgcgagcgtctcgatatattacgggacacaatcgtacatccgagtaaaaagctaatgtcgtttgaatttgctcagagcttctgttttaattttcatcgtcacgatatactacgggacacaatcgaacatccgagt

SEQ ID NO: 159150 - DNA, 395 bp, Glycine max
  unsure (1)..(395): unsure at all n locations
actaagcttgagcnattcaacgacataacgttacgcggatgtttatttgtgtctcgtagatatcgcgacgctcaaaattgaaatagaagctctgagcaacttctaacgacaataaaattttactccgatctccgattgtgtgccataatatatccgagacgccccataatgaaaacagaagctctgagcaaattccaacgacaataacttttttctcggatgtacaaccgtgtcccttaatatatctagacgcctcgcaattgaaaaccgaagctcgtagcaaattcaaacgacaataaactttaactcggatgtctgattgagatctgtcatatatccagatactcgcaattgaaatagaagctctgggaaattcaacgactattacttttact

SEQ ID NO: 159151 - DNA, 414 bp, Glycine max
  unsure (1)..(414): unsure at all n locations
agctttgtgtaatcgaatacaatgatntgttaatctattaccaatgacaacttttgaacaaaaatcaaaagatgtaactcttccaatgatttttacgttttctcaaggtcataactcttccaatggttttctttaccagacatgaagagtctataaaagcaagaccttgatttgcattttaagatctgattacaaacttttatatatattctattacaacctttgaatctctttgaacatcttcttgaacctcttcttctacttcttcttcctttaccaaaagctttctaaaagttttctgggttttcaaaccttgaaaacaaaagtgtgctatatcttttcattctcttcttcctttgccaaaaagaattcgccaaggactaaccgcctgaattctttgtgtgtctctcttct

SEQ ID NO: 159152 - DNA, 421 bp, Glycine max
  unsure (1)..(421): unsure at all n locations
agctntgtgtaatcgattacaaggatttgtttatcgattaccaatgacaacttttgaacaaaaatcaaaagatgtaactcttccaatgatttttaggttttctcaaggtcataactcttccaatggttttctttaccagacatgaagagtctataaaagcaagaccttgatttgcattttaagatctgattacaaacttttatatatattctattacaacctttgaatctctttgaacatcttcttgaacctcttcttctacttcttcttcctttaccaaaagctttctaaaagttttctgggttttcaaaccttgaaaacaaaagtgtgctatatcttttcattctcttcttcctttgccaaaaagaattcgccaaggactacaccgcctgaattcttntgtgtctctcttctccctttt

SEQ ID NO: 159153 - DNA, 415 bp, Glycine max
  unsure (1)..(415): unsure at all n locations
actagctactccacaccttatactagctacctttttgttatgttcttaagaagattcctaaagaagctagagcttaactacacatacctctttaatagctaagctcacctccttgagatgagaagctagaacttagctacacaccccctataatagctaagctcacccccatgacaaaaaacatgaaaatacaaaaaaaaagtccttactacaaagactactcaaaatgccccgaaatacaaggctaaaaccctatactactagaatggccaaaatacaaggcccaaatgaagganaaacctattctaatatgtacaaagataagtaggctcatacttagcccatgggctcgaaatctaccctaaggctcatgagaaccctaggggctctccttggatttctagcccaatctact

SEQ ID NO: 159154 - DNA, 332 bp, Glycine max
gatcttaagcgactgggctgcagcttgagctattcaacgattttcttttactggagtctgatgagtctttatatatcgaacctcgaatgatgtgaatcttgaccattcacgacaataacttttattcgagttgatagagcccgtataataagacctcaaatgatgtgacctcgagcaagcaacacatattttttctcgaagcgatgagccctatatatggacctcaatgatgggaattttaccttcgagacatactttatcgagttgatgatccgctattcgaacgtcaaagatgtgaattgaccttcaacagaaatcttatcggattgatg

SEQ ID NO: 159155 - DNA, 418 bp, Glycine max
  unsure (1)..(418): unsure at all n locations
ncaagctnttggagtagaaacatgggttcttcttattttatttcagaaagncgtatctagtcaaggtctgagagaccatacaagttttctagcgatttctaattatgtgggccattaagtctatcatatgctgacaatagccgagaagcccatgaatntcttcgggggcggagtaggtgtccgccattgctttggccttggctagcaatcggggtagttcttgactcctgttcaaagtaagagcaaatcggtccatcctcattgttgcctcttggtgcaacgaatcaattaccctttcccttgcttccctttctgctgatatcttggcgtactcatcctctagcctttgttcgtgagtcgctgctagatttagcttctctttgcactcattgatgatggcccacnatattccttcagt

SEQ ID NO: 159156 - DNA, 219 bp, Glycine max
agccatgctcctcgccagatagatcaccatgagagcttaccttgggacttcactataccaggtagaaaattgagaatcttagatgccttaggggaagaaacctactcttctcagtttatcctctttactaaatgtaaatactccaattcgcacagattagacacgaagcagtcaaatgggggtggaataccaaaagttggagcaaattcgcagtgagca

SEQ ID NO: 159157 - DNA, 409 bp, Glycine max
agctttaacctcatcgactcttatagttttatatttgggagccaatccaatccttgtgtccggactctcagccacttatgatagccgccgatgctcccattactgcttcccctaagctctttgtcctttcttcacgccgcatcccatgccttgagaactccttggagtaccctcgcgttgtggtcactaacaccccgtgcgatgaaaggcgtgatgctttcgtctaatggcgctcctctcatggggtagccaagagttggtgcacaacaaacaattcttgcgccgctcttttcacatccccggtcgaacgtgtcatacatggccaaaatggcgacgaccgggctttccttgccatgatgaaaggcgaggaaagcgtcaatcgctgctacgtccactaaccctttcatat

SEQ ID NO: 159158 - DNA, 335 bp, Glycine max
accctcaaatgcaacggttgggcgctgaccactttagaatcttatcttaggtcatgaacagagatgcgcttatcacgaagcttgctcttaccgaaaggactatcttttgacaaaaaagcattctatgttatttttcagttttttttccaagaaatcgaaacccttatgttaagcattcaaagacaggctgatatactcctatgtacagaccatacaccaagttccaaatgattaaatgcatgataaactatgttaacagaaattaaatctgggttgtctcccaagaagcgcttcttaacgttattagctcgacgctattacctcactgagtaata

SEQ ID NO: 159159 - DNA, 346 bp, Glycine max
tactggcaccaaatctaaagaagctcttgactgtatgtgccttgatactatcttaatactatacttactaaatttaggcttaacactctccacatattaagcttaaatataagcttcaattcctataattttggcttctattctgcgggaattatagctgtttataaaaaaaatttgtaattttgatcaatctttcaatattgcatgttggatttattttattctaatccaattaaatcacatacctaatatattcacataagatagaatttacaaaaatatttatacactatcaaaaaacattagacctaataaaaattcctaatggtatattttaaacccaaat

SEQ ID NO: 159160 - DNA, 258 bp, Glycine max
tatatcgcagctggaacgtgttgtgctcaaagtctttggatgaaacaataacttgaaaaatttggagtaatccttgatcaaattcccttaaaatatgatagcacatgtgcgatcaatctaactaaaaatcctgtcatgaattctaaaaccaaacatatagagataagacatcattttcttagagatcatgtctcaaaaggagattgttgcattgagttcattgatagtgagaatcaactagtagacatcttcactaaa

SEQ ID NO: 159161 - DNA, 236 bp, Glycine max
gccagaatgttcacaatacaattcaacgcgggtcaaggaatcacaacgactattgtacctcagagcttatctgaatcaataagtgaatttgatgttaaacaatggtccaaaatttgcattaataattgcgtaattaatgtttttcatcttcagggcacattggcaacttaatgatctgtgtccataagacaatattgttgtctggttatgttctttgcataagaagcctatgttaa

SEQ ID NO: 159162 - DNA, 427 bp, Glycine max
  unsure (1)..(427): unsure at all n locations
agcttagaggaaggagatgaatgaagggagatgaatttatatagtatganatnntgtgctctaaaagagctatgaaatctgaagtataattttaaaatgatcaaagttaaaaaaatacacacacatgatctctatttatagcctaagtgtcacacaaaattggagggaaatttgaatttctattcaaattttacttgaatttgaaattgaatttgtggggccaaattttggagccaaaatttcactaattatgattagtgaattttagctatggtttagtccactaatccaagattaagtccaagactttccactaagtgtgcttaggtgtcatgaggcatgtaaagcatgaaggacatgcacaaagtgtgactatatgatgtgacaatggggtgtaccaagcaaatgctcacctccccctctaaaa

SEQ ID NO: 159163 - DNA, 370 bp, Glycine max
  unsure (1)..(370): unsure at all n locations
taaaccataagatatagaacataagactcccattcaactaaggtactatcacgaattacacccatatgagcattgtcctcatgaaaactttaagtgtcatatctctagtaagtggatcagctagcatgaaatgagtccttatatgatctatacaaatatatattttatggattctttatttaacaaccaaatattntatgtcaacaaacttttacttagttgaatgcttaataagaccgctaagatattatcctaataaacacccgatggctacttaatgttggcgacaacaagcaagccagctataatantttagcaatcataaattctagtatgatggatcatagcacaatattaactccaccacatg

SEQ ID NO: 159164 - DNA, 407 bp, Glycine max
  unsure (1)..(407): unsure at all n locations
agcttctaaactttatacaagaatgaagctttgatatctcnttttggacaagnggcctcagatatcttaagaaggggggttgaattaagatatcacagactattccctaattaaaaattctacttttaatttaacccaacaacccaagattccttttaaacaagaactcctagataataatgaaaattaatcttactaaatagaaataacaataaataaacaataaaggagtttaagggaaaagaaaatgcaaacttagatttatactagttcggccacacccttgtgcctatgtccagtccccaagcaacccgcttgagagttccactttcttgcaaaatccctttacaagttctgaaccacacaaggacaacccttcctttgtgttcagatttctttacaacaag

SEQ ID NO: 159165 - DNA, 385 bp, Glycine max
  unsure (1)..(385): unsure at all n locations
ctaagcttctcgggttcttagagcttctaaaacttcttgttttctatatccttatttatccacacccctctattaactaaattaaccttcttaaaaaataattacggatgaaaataacgcaacaaagaataggttatctctaagagggtttcaacgtgggaaccagttgtttctttttttatgagacggctcgggagttggaagggacaatatctttctttgggagggaggatcaccttgataaattctttgttattgagtctccctgtttatttttttctctttttatagggntctccagcacgttatatccatactatgagtattcagaggaggtttatgtggtctggtgtgttcgactcagataagatatgttgngtggatt

SEQ ID NO: 159166 - DNA, 345 bp, Glycine max
ttttatgactttataaagcgcccatctcatcttcgctcgcttaaatcacatgtcaaaatacaatctgcatataaaaccctacaacctggccagcgagagaattaatgttcaagaaatattctgtacatccccaaataattatatgaggtcagtgggattaaaaagaagactgtgcgtatgtcaaacctgcaattactcttgagttgaagattgtttgtgattgcttttagaaaatagaactaataacagacaacaatttcatataagacatatgtatgaataaaaatgactccaattatgatttcacagtataagtttttatctaatcatattttatataagaac

SEQ ID NO: 159167 - DNA, 223 bp, Glycine max
tatgtagcgggcacggccacgaacccggaatgggtttaagcaaagacaacggcggcataactagcttgataaatgccaaaggaaatcgtgggaagtatggtttaggctataaacccactcaggcagatataaagagaagcatcgcgggaagaaagagtggtggtcaaagctcgcagttgagacaagaaagtgaatgaagcccgccctgccacataagtagaag

SEQ ID NO: 159168 - DNA, 248 bp, Glycine max
  unsure (1)..(248): unsure at all n locations
aggtgcttctcacaacacagcttttgtagtattttggaggcgcaaggggcctcggtgctatctgcacccccatttttactaagtacacccnctgcctttnttggtgattctctttttggaaaggtacggaaacttacgaaattccgaacgatacttgtttctttccggaaggtaccgaacctgcggatacataatcatccccttttttgactacggaatgttacgaaacctactaatgtgcaacaagc

SEQ ID NO: 159169 - DNA, 434 bp, Glycine max
  unsure (1)..(434): unsure at all n locations
atgcaagcttgtatataatgaaaatactagatcttgtcttttanaaagaaaggatgcactattggaaggcttatatgtgttccactaacgacaggagaattgttttatttaaggatgatgcttactgcctgcaaagaaactactttatttgaggatattagaattgttacaaatattcaataccctacatatagagaagcatgctttgccgtggggtttttacaagatgatagagaattcattgaagcaatcaaagaggcaaaggactagggcacaactaattattggaggaaattatttgtgttgatgcttttaacaggtaccatcaataaacctgaagaagtntggaatcaaacatggcattggctagctgatgacattgcatatcattatagcaaatcaacaataaatacaggttagttttgattaattct

SEQ ID NO: 159170 - DNA, 173 bp, Glycine max
cttgactggcatgtctttcatcttgtgcgattctttgaaaaatcacgccaattgaccgcccggctctcatcttcggcctatttttgaaaattctgccccttttgcacatgttctggagtactcctatcggaacattaaaattgtctgaattgctaacgaagcaccattagtct

SEQ ID NO: 159171 - DNA, 376 bp, Glycine max
actcatatttaataattttcatttcgaaacttttaacaaatacatggcatggacatgggggactcaaacaattttgcttaacccttgaatttaagttattcagattatcactctcaaatcagtcatataattaggaatttttccttggtttcattcatgctcctccaatagtcactacgctatatgcatataaggccctaaaattcaaggtaaagacataaaaccttaatgatgcaacgtcctcaaaggacgggaacacttgtttgtgtgcgaacaggacttgatggtacaaatgtcaataataaccatgcaagtgtggaataatctacagtttgattatctcacatgattacctgtatgacgacctaacacaatg

SEQ ID NO: 159172 - DNA, 178 bp, Glycine max
aatctgatcattatgctttgataaatacacaaaatctcgggcaaatgaagatggtgagaataaaggagatacccatgttgagactgccactcctatacagccaagattccctacaactcaatcaatgttattactcagccaataactaaccttttgcttacccactacccgttatcca

SEQ ID NO: 159173 - DNA, 295 bp, Glycine max
  unsure (1)..(295): unsure at all n locations
gagagctctgcaaccaaatcctttatagagaacatggaaaaacaatatgttataagcaaaggggaggcacttgtaaagggaattgggttaaggatgtatcaaacaatgaatttctattcttgggctttcattgtatgtgtttgagttcgtgtggttagagccggaagagcaaccccaggagacataataactgcactgatgagtattatctttcgtgccatgtaaggaagaaaccaccttcacgattgnttagaatggagaaaatggttaatatttaatgactaagtaacaaaac

SEQ ID NO: 159174 - DNA, 239 bp, Glycine max
cacacactcggagaagataggataacagatatggaagcagaaattgactaattgttgaaagacaacttcattcgcgaagtagactataccacttggttatccaaaaaaatgtagatgtttatgtattcgatatggcagtgaaatcactattctctgattagcatgcttgcgaattagctaaaaattctgcagagctcagaaatcacatgaggttgaacactataaaaatgctcattgga

SEQ ID NO: 159175 - DNA, 217 bp, Glycine max
actccaccgctgatgtgataacagtggtgaattcctgaagcaccttttttaacaagtgactgtgactttatgcttgactttatgggtgttccaatttattgttggatatgcctattcatagtcactgtgactattgctaaacaaaccatttgccggacagaattgtttcctatgtttctgaatagttctcacgaaccttccaaggattggttaggga

SEQ ID NO: 159176 - DNA, 227 bp, Glycine max
tgcgcctcatctattatggggacaaatgcccccaccttatttgcggatgcaccttatccagggaagcgaacccacttgattcagaaaaaaatattgtggacagcaaaacaaatccctccaagataattttaatattaattatggatgcaacaagcttggtacatatgacttatatgccccaacttgatagaaagcattggcggatacaccttatctacagtgtggac

SEQ ID NO: 159177 - DNA, 422 bp, Glycine max
  unsure (1)..(422): unsure at all n locations
agcttangagaattcaggatattttttatttttacaaacaagcataaaacaggaaattaaagagcaaagttagagatactagactgcctcataggagcacttctttaacatctttagccggacgcaggttgatgatcaatcgatcatgggcctagcacctgttcgtacctaccccaaagattgaacaaagaaagtggcatcatgcaaatgtgaaacaatactacacgatgcatgcattacctttcacttacccttattgcttatctcaaattggtgtggtgttgaccatcactcaaaatgactctttattcatcctctgatttgcaggatcccagatgacaagatggaaatgcatgcatgtttatgattgaacgttaaatgcaacaattcaacaggtattaacgtcgttcaatttacttaaa

SEQ ID NO: 159178 - DNA, 235 bp, Glycine max
atgacgaaaggatctgttgaacatgaaatttgagcatcatttcatgaggagacaaatagatgacatgaagaaaaatatctatgatacttagtgcacatcaatgcattcagagttgcgcaccaaaacgctagatacattaaaaatattcagctcgtacatgatagagatacagtctagctatattttgcaaggacttgatattttagcactacaatgtatactcatgtcacataat

SEQ ID NO: 159179 - DNA, 461 bp, Glycine max
  unsure (1)..(461): unsure at all n locations
actaagcttcaaaatnactaagtaataatcaccgtgctttttattttgtntaccattaccaacgctgataatantaaataaaaaatacacatcttatcacaatactcaacgcttccaccatgaatgaataacagcaatattttcaatccagtgtaaaattcaactcaacacatagacattgactcagtttcttataaaaagtccaaattacagttaatttggtcctacctaagtgaacaatcagtctttcctaaaataagagaaattaattaaacccgtgtatcgtcttatcttaccacatgactgttcttctgaccaaattgaaccggagtaacacactaaagtataaagagaagggagtttaattaaaggttttaattaagtatttaggggataaccaagaaaatttgtgatattatctggctgggaattatacctgaatatccattggtattaaaaaa

SEQ ID NO: 159180 - DNA, 222 bp, Glycine max
aacaccctaattatgggatttctaatgaacaactgatgttaattcttaatatctaagcgatcgtggtttctatgtttaatgcttacttcaatgcttaatgtatgtatgcttgtggtttgactatccctttgtgagcatagacaggtgactctagcattgggaaatatactgttaccttagaacttgattaaagcacgatccaaacttagtcttacaagaggg

SEQ ID NO: 159181 - DNA, 429 bp, Glycine max
  unsure (1)..(429): unsure at all n locations
agcttctacagaagggtcattcctaanntctctatatttacctcacctctcaatgagctggtgaagaagaatgtggcatttactttgggtgaaagacaagagcaagtctttgtttttcttaaagaaaagctcaccaaggcacctgttgtagctcttcctgacttttctaaaacatttgagctagaatgtgatgcctctaaagtgtgagttggagcagtattgttacaaggtgggcaccctattgcttattttagtgaaaaaattcatggtgccacccttaactaccccacctatgataaagcactttacgccttaataagagccctccaaacttgggaacattaccttgtttccaaggaatttgtcattcatagtgatcatgaatcacttaagtacattataaggtaaagcaagttaaaaaaaaggcat

SEQ ID NO: 159182 - DNA, 382 bp, Glycine max
atcgtgacatctgaactcgatggatggcaagtctccatgtggttgttttctaaacatggatgctagggtggcaagcacattagccatctgatttttctctctacgaatgtggtggaaagagacctcatcaagaactcaatcagtttcttgatgtaggcctgatagggtatcaacttgtgatccctagtttcccattctcccctcagctggcgaattaccaaggctgagtctctgtacactctaagcaatttgacattaaagtcaattgccacttggattccgagggcacatgcctcatactcagccatattattcgtgcaatcgaagcccaatcgggccgtgaagggaatgcattggtgttttgcactccgagatactactt

SEQ ID NO: 159183 - DNA, 313 bp, Glycine max
  unsure (1)..(313): unsure at all n locations
agcttgtatgagtacttggaaagaaacaatatatgtgtgctangctgcctcaccaccagacttctgagcaactcgttcttcaatatttctatggggacttagcaacatggagaggagtatgattgatgctgccaatggtggaactcttggtgatatgaccactgctgaggctaagaatttgattgagaagatggcttccaactcccaacaattcagtgcaagaaatgatgctattgttcttagaggagtcaatgaggtggccacgaattcatcttcatctactgaaaataaaaagcttgaagaaaacttgatg

SEQ ID NO: 159184 - DNA, 351 bp, Glycine max
  unsure (1)..(351): unsure at all n locations
agcttctacttcttcaagctacagtattctttattctccttcaccaaccatagaatcttgaaaaataaaataaaaaatatnttccaaatcttgaaagttttttaaaaagtagatatttaaaaatagaaaactttttcttgaactaaacaagtcctttaatgaatattttttttttattttaagaacactttcaaacaaaattcaaatgaatataaaaaattgttgcaagtgtaaaatctcattataaattgtctgaattaaaaatcacaagccaaataatcttanattaaaaaaaataaatacatattgaaaaaattgaatcttaaaataatttgaattaaatatgttttt

SEQ ID NO: 159185 - DNA, 111 bp, Glycine max
tcggcatctggatacctcttccagaaggctaatggagccatatctttgaaagtgcataaaatcattaatttctacctctaccatgggagctgagcttatttcattatttga

SEQ ID NO: 159186 - DNA, 425 bp, Glycine max
  unsure (1)..(425): unsure at all n locations
agcttagccctagaggggatggacctttttttgttttgagaggatcaataacaatgcctataggttggacctcccagaagagtatggagtcagcaccacttttaacatttctgatttaactccttttgcaggtggagctgatattgaggaggaagaactaacagatttgaggtcaaatcctcttcaaggggaaggggatgatgcaatcctccctaggaagggaccaatcactagaaccatgagcaagaggctccaagaagattgggctagagctgctgaagaaagccctagggttctcatgaaccttanggtagatttctgagcccatgggccaaggttgggtccaattatctttgtacatattagactangatgtcattatanttggtccttgtatatagggctccatattgtaggtagggtac

SEQ ID NO: 159187 - DNA, 389 bp, Glycine max
  unsure (1)..(389): unsure at all n locations
ctaagctatttcagtggactctatgggatggnctaacttttttaatttgcatggngggaaaagcaattgaatgaagcagtccataatattccattcatatgggtgaatttgtctatgaagcaaacaccattttgagtgattactgtagcttgtcacttgaggacaagtgaattgttctttctttgcttgaggacaagcaaaactgtaaatttgggggagtttgttagtcgtcttatacgacaaacttttgtatagaaaacattntccaaaacttggttaattccccaatttatggttattttgtagtgatttttgaaataaatcttggtttattgttaaagctatctctagaatatgtctatttgatattaatgatgaaatatgtagaa

SEQ ID NO: 159188 - DNA, 342 bp, Glycine max
  unsure (1)..(342): unsure at all n locations
agcttgaatcggacctcagnggttataagttangattnnttgaacnncncgggagctcgcgatgttcaataccgagcgtctgtatatgtgatacgcctgaatcgaacatccgtgtgaaaagttatgaccatntgaatttctcgaaagctttcttggttcaattccgagcatctcgacatattgtgtgcccgaatctgactctcgtgtgaaaagttatgaccatttgaatttctcgagagctttgaatgtttagtttcgagcgactctatatattataagcatgaatcggaccttagcgtaaaaagttatgaccattagaattttcaagagcttccgttgtta

SEQ ID NO: 159189 - DNA, 236 bp, Glycine max
atattgtcaatttcgagcctctcgatatgttatccttcttaatcggacatccgattgaaaaggtatgaccatttgaattctcgagagcttccgttgatcaatcttgaacgtctcgatatatcattcgcctgaatctgatatccgtgtgaatagttatgaccattccagcgctcaattaccagcgtttatatctattaatcccccgaattggactactgcttgtagagatatgacca

SEQ ID NO: 159190 - DNA, 258 bp, Glycine max
  unsure (1)..(258): unsure at all n locations
agcttagtcaaaggtaaggctagcttataataaccctctatgaatctatagtagtatcctgctaaaccgangaaactcctaatctcaaacactgacttangactcttccaactcatcacccgcctttaccttgaaggatctactgtattccctcccttgaatataacgtcccttaagagctcaacttctctaaccaaaaattacacttggaccacttaacataccatctgttgtcttttagggtttgcaacacaaccc

SEQ ID NO: 159191 - DNA, 423 bp, Glycine max
  unsure (1)..(423): unsure at all n locations
ataaattgatttgcaagtcatttcccatcaaatcaaggataatgcgcatgatcatcatggatcaataggtcttttaagggtggaatcatacgaaattntggctttggtggctttggtttttttgtttgtttgcttgtttgtctgtttgtttgttgtgcatatgagagcaagcataaagatttggctagtagctctatatgggcgattacttcctatcctttcatgcttttgaccaagttgttgttatttttcttccatttcgctctttacaacaactccacacatggntcagatgttagtttattccaaagaactntgtcttcctttatattatgctttttgatcctttccatctatgattganctttntttcctttcttggtttccttttttttggtcgatgagatttaaactcctttaaaa

SEQ ID NO: 159192 - DNA, 295 bp, Glycine max
  unsure (1)..(295): unsure at all n locations
taaatcttggtgaatttgggttggctatttgaattggtctgtttttgtcttgaattgttttcattttatggtaacttgttcgcaattttattatgatttgaattttctcttggatattgtaactggaacacttgttatgcactagttggctagttcagtcttgtgttgctgtcagaagaggaaagaagaggttgacatgtttttgctcttcctaatttgggtaatgtnctgaatttttgctaaatttatgttgtgtagggtagttatgaactgtctgtaaatcctgttatggttt

SEQ ID NO: 159193 - DNA, 239 bp, Glycine max
aaaaaagagagtattaatacaattatttctcaactactattttatataaacttaatgattagtaaatgtaagaattaatgtctcatgtgaaaggcatgtgactcatgtatggactaataagtaaataattaacgattaagggctaaattgtaattgggcttaataggagaagtttctagagctaactgctacttgatgggaatagtggttatatataggcgttaatacccactaacgtg

SEQ ID NO: 159194 - DNA, 421 bp, Glycine max
  unsure (1)..(421): unsure at all n locations
agcttatnagaacaaaattgccttttatattttcaaatatgcatgtgaattaggacgcatcaacaagaatcaagccaaggctattgtgcaagcagtcaatggggcaaaacacaccaaatgattatgatgatggatgatggctcaaattctcacaaaggtaaactcatcactttcaaattgagctttcaaaactatcatgacatgtagagaagaatcaaggatttcaagtcacaaaatgtcaagaacttttattttcaaaacaattacccatttcttgaacatatcctataattcaaagaaaaacatgcaaagtcgtacatgcacacaaaattgacccaaaatattaaactaaaaatctgacgaaactaacaacattaacaaattaacacaacccacataactagcaaaaccaaagaacact

SEQ ID NO: 159195 - DNA, 425 bp, Glycine max
  unsure (1)..(425): unsure at all n locations
agcttnctcgnggcttctttgagtagcttttataagatgtttctttgagaagctagatccttatctacccacacccttctattaactaaattaaccttcttgaaaataattacggataaaaataacacaacaaataatccaacatcaaacataattactagtaatatatatatatatatatatatcagggtgttacattgattaaacgtcaaacgacttcattgccgtcactccaaaatggtcaagtgtttaaatcaaacagaacatacactctgagggagttcccgaagagatttgcaaaagataggataaggttacatgaattattatctctttcaaaaagacagtcaatatgtgttttccaaaanaatcaaatcaaatcaaaatcacaaaatagggaaagaatgtcataaacattgtacaac

SEQ ID NO: 159196 - DNA, 366 bp, Glycine max
  unsure (1)..(366): unsure at all n locations
ctcagctgcggcttaccttcaccaacactgcgtgtttttcttggccggatntaaagcgggctgcagcaccggcttcgctttcctaactgtactggaggcgggttgccgggcattatcctctatagttttctggagttntaacatgaccttcgagatggaagccatttgatcttttaaggccgatagatcggccttcatctgttcctgcacgccctcttcattatccattnttctggatcgagtgttataagggtgccttggtgttttcttagttatgatgaaattcctaaagaaataaacaacggtgagtatgccaccaaaacatgaatatgcaaatgaatgatcggagcacttggatccacccca

SEQ ID NO: 159197 - DNA, 408 bp, Glycine max
agcttatataaatcttttagttacgagttttactccaactctcattattttaattaccgcgcctaattattgcaagagtaataattgaccaaacaatttaattagttaacaaaaccaatcctctctaaaagctaagggcaataattaactgaacgtgttaatcttgcaatgcaatgcaatgcaccaaattgacaataagaaaaaaagaaattactagacatatttttttccacaatattaatatgaaataattattaatgatgattttttctaaaaaaaatctaattaaatatttctagtaatttttttaattatattttttcttacataatattcgaaatcttatataaggaaacaaaaacattaaatttaatatcacacgaaccaagaaatatttaatggtaatta

SEQ ID NO: 159198 - DNA, 272 bp, Glycine max
  unsure (1)..(272): unsure at all n locations
catattgagtaagttctactacctttttcttaatcatgctgctaaatatttaactnttttggttctatagtcctaaattagaaagaaaaaaaaaacttaaataccatttctcgggcattatatatgttttccaatcacaataaaaatttgcatccaaagtcaacataaaatctcaaggtaaaacttcaattctgatatataggagaatattgctaaaaacactcgtgaaactgtatcttaattntctaaaaaaaatatacactgttataact

SEQ ID NO: 159199 - DNA, 327 bp, Glycine max
  unsure (1)..(327): unsure at all n locations
agcactatacacttaaaaaaatatgcttagtatgggaattgccgcaacgaaatgtgcttagctcatgtaagctcggcttagggcgcggcttccataaaaaaaattgactaagttacctgggcttagtgattcagccttgcttagccacaagcatctcagcaagaggatgagtgttcatccttaaaagatgaactcgcttagcacggtaggcgcgcttagcgagttctttcgagaatgcgtatattcaatgaattctgatgaactcgcttagcgtagcatgctcgcttagcgagttcatcacgttttccagaanaacacagaaaaaac

SEQ ID NO: 159200 - DNA, 294 bp, Glycine max
  unsure (1)..(294): unsure at all n locations
tcaacaccgntaagggtaaagactcttctagtggtcttttgatgtccagnnnggtcatttaagcccccaccattttgctccctcttgggatctggacaatctctctgaaaatgccttttttgtctacaattaaaacatgttatgcctttatcanggagaattgaggagatgtgccctagctttctacatctgtagcatgtgatctgagtggggaaagtattgggtttgctaccactaccacctgcaaatcccctagcaacagtcctctgactgacatggcggttaccatattgc

SEQ ID NO: 159201 - DNA, 392 bp, Glycine max
gcttgagcaaattcaaacgacaatattattttcttggatgcccgatggagtcccgtaatatattgagacgctccacattgaaaacggaagctcgtgacaataattttttactcggatttccgattgagtcccgtaatatatcgagacgctcaaaaatgaaaacggaagctcgtactaaaagcaaacgacaataactttttactcgaatgtccgatggagtcccgtaatatatcaagatgctcgaaattgaaaacaaaagctctgagcaaattcaaccgacaataactttttactcggatgtgcgatggagtcccgtaatagattgagacgatcgaaatagattaccaaagctttgagcatattcaaacgacaataaccttttactcggatgt

SEQ ID NO: 159202 - DNA, 321 bp, Glycine max
  unsure (1)..(321): unsure at all n locations
tagatttatgcagacgagaccacatgcttctacttttttctttaccaagaagagttatgtctagccatggtccacaagcataaaattcccgatgaatatgctcaagtatatgcggaaaaagaggctagaggaagggtgatcgactctttacaccaagaagcaaccatgtggatggaccggtttgctcttactntgaacgggagtcaagaacttccccgcttgttatccaaggccaaagcaatggcagacacctactccacccccgaagagattcatgggcttctcggctattgtcagcatatgatagacttaatggcccac

SEQ ID NO: 159203 - DNA, 289 bp, Glycine max
ctgcagctctgatgagcaagacatgtgttttatttttaaagaaagaagacaagaaaagggcttaaaaaagtaactcacaccttcaaatcttatgattgtgaagatcttttgtgataagtgagttatgtcactttcttgagttcaagaagaacacctcttcagtcaagtaaggttttacagaaaggattgatcaggttgtgtctatctttactcttggttttcatgtatggttttacacatctttttgtctatgcatgaattgctgaaggcatgctataatatgtgtttc

SEQ ID NO: 159204 - DNA, 318 bp, Glycine max
  unsure (1)..(318): unsure at all n locations
agcttgtgcattcaataccctgatgaggatgtcccttatgttcttaagactggactgattcatttgcttccaaagtttcatggccttgcaggtgaaaacccgcacaaacatttgaaagaatttcacattgtctgctccaccatgaaacccccagatgtctaagaggatcacatatttctgaaggcttttcctcattcattagagggagtggcaaaggactggctgtattaccttgctccaaggtccatcacgagctgggatgaccttaagagagtattcttagaaaattntttctctgcttccaggaccacaaccatc

SEQ ID NO: 159205 - DNA, 235 bp, Glycine max
tcactgctgcagccagagttctttttggggacgtcaaccgatggtagcaaaccgcgatctgtgaaagcaagaatcgaaatgtagcttaccactcggattaaaaactcggaaaaacgggcaagctccgtgagcaaaggagacccctgcctataaattgtaccgttgaacaagcaggccatacaatagtcagctgttgacacctctctgattatgaaagcagggaccccgttcccac

SEQ ID NO: 159206 - DNA, 413 bp, Glycine max
  unsure (1)..(413): unsure at all n locations
agcttgntataacctagtattcttcgtccttctcattctactgtggatatatacaaatcaaataaatttattgtttgtttgcataacgactaactcttaatcatcttacaaatggatatacaatctcaacacttagtatttctgatgcaatcctaccccccaagggcattggatagaagactccaagaagattgggccaaagatgcaacagaaggccctacggttctcatgagccttaaggtagatttcgggcccatgggctaagtatgagcccacttatctttgtacatattagattaaggtctcattaatattggtccttgtatatagggctccataatgtacgtagggtaccctagaagtataggaattttcagcccttgtattctaaggcacctagactagtttttgta

SEQ ID NO: 159207 - DNA, 298 bp, Glycine max
gcttgtctccttcaacgcttctttttttctctttgcaggcagcgcgaacctcgtttcttcttctccgcgaacgaagttagacctccctaactcccctttgcttgtatgatacaacattgtcatagcttgtagcagtggaaccttatgatagttaccttatgatagtaaccttatggtacaagacgagaagagaggactctcgaaaaaatggggaaaggaggctgacggcggagacttccggaagacccgttaggggttcttcctgaatttccgaagaacttttctcgaaatttcccga

SEQ ID NO: 159208 - DNA, 275 bp, Glycine max
tagacaggcaaacctagactacctatactgggagccacaggaccaacaattagtgtctttggcttcaccatcaaggcaccgagtcttcacacaaaataatggttggaagatacttgaaacctaaccttttagaccaaagccagaatcaaacaactaaaacatagactaagtgtctaataaataagagcaatgaatgactatatttttgaaacataatcatagtaacacgatgggtaagaaaaacaactggtttgaaacaacataactataagact

SEQ ID NO: 159209 - DNA, 379 bp, Glycine max
  unsure (1)..(379): unsure at all n locations
gctgcagcttagccttggcatgcatttttattanttcttgcgctcaatccnaatcctttgtgccaaggttcaagctcagcaccaactttagcaagctcagagcggtatttctcagtttcaactgcttaccagtcaatgacagagttaacataggcaaaaaaaattcaagttactaaaaaccctctatagcacataggatattagctccatttgtctacatggtagataatattaaaaacataaagaccagctaccaccaccaaaaacactgaaaatcagcttgatgcatcccagacaataacaacaaaaaaacaatttagaacctgagataattatatacagctgactaaaataaacaatataagaacatatttgaaat

SEQ ID NO: 159210 - DNA, 420 bp, Glycine max
  unsure (1)..(420): unsure at all n locations
agcttagctacacatacctctctattagcttatctcacctccttgagatgagaagctagagcttanctacacaccccctataatagctaagctcaccctcatgagaaaaaacatgaaaataacaaaaaaaaaagtccttattacaaagacaactcaaaatgccccgaaatacaaggctaaaaccctatactactagaatggccaaaatacaaggcctagacgaaggagaaacctattctaatatttacaaagataagcgggctcatacttagcccatgggctcgaaatctaccctaaggctcatgagaaccctagggcctttccttggatctctagcccaatctacttggagtcttctagccaatgcccttacggggtaggattgcatcattccctccaccttggaaaggatttgacctc

SEQ ID NO: 159211 - DNA, 277 bp, Glycine max
agtcccattctgaaaattaaatgggtaaacatgctttccaaaatttgtgatcacgatcactcttccacgcaatattcttcctatagacccttcattctgatgagctgcgactgaacgtatatgtatcattgaacagactccatgccatcagcccacaaggtacaattgggagatcgtgtgaggactctaaaggtttacaagaactggtgtcattgcatccaagtccatgtaagaggtgcaggttacttctacttttggcatacccgaaacaaatttg

SEQ ID NO: 159212 - DNA, 289 bp, Glycine max
agcttgtccaccgttatctttgtcaatattttattataaattattgaggtgaaactttaattatgatggaacaacaatgctaaaaatacttaagtaactgcacataaggtttgtcctactaagaatagttggagagtctgatattctaattaaaattgaaattggttttgcaattgcatgcaggcctgtatcaggggcttccatgaaccctgcaagaagtattggtccggcacttatcaaacatgtttaccaatggttatggatatacgtagttggtccaattgtttga

SEQ ID NO: 159213 - DNA, 276 bp, Glycine max
  unsure (1)..(276): unsure at all n locations
tactcagcttcatggagcttgtatcatgtggtatcaagagcatcttctctatgtgatgntctttngcttcctctatctntttgttcggtgaattctctttaattccctggtcttcatcttattctccttgtatatcctccattttcttgtggtttggtgatgtttagagtagattcaaaaaaaataaatcgattaaatcttagatctacacttgttcttgcatttctatggttcaaattttgtagatctactctttaatcttgtttntgtgttgat

SEQ ID NO: 159214 - DNA, 281 bp, Glycine max
  unsure (1)..(281): unsure at all n locations
agcttctncccttttttctatttatagtgggagaagcgaaggagaaaagggttcagccccttagcacttctctctctttcgaatttgcttagaaaaatggtttctgtgaagaaaatccaagccgaggcgcttccgtaacgttttcgtgagtgatttcgcgaaggttttcgaccgttcttcgacgttcttcattcgttcttcatcgttcttcggtcttcaacgggtaagtacctcgaaccaagcttttcgattcattctatgtacccgtggtggtccacatt

SEQ ID NO: 159215 - DNA, 345 bp, Glycine max
  unsure (1)..(345): unsure at all n locations
ctattacgtgacctataaaactcagcttgataaggtaaaacttcaaaaccttgccattttttctttcatcttgntattcctttaacaagtttcattatgagtcttgatttaagcatgttcacattggctttttgttacttggtgatatatgatttctatcaatacttttttgcatatcattataactattatatttagctgactctttcattacagaggcaatgtaattttgggacatcaattntaatggttcctcttgttgttgtcctatgttgtgtcatgtcttaattcatatttttactatgtttagcagatgtcttcctccttggaaatagtgaaccatag

SEQ ID NO: 159216 - DNA, 356 bp, Glycine max
  unsure (1)..(356): unsure at all n locations
cggaccttaatcgacgcggctgcagcttacgtatgtctctccgagagatgtaccttttggaacaactncacgatccacaaggtgttgttgaatacctcgaaatcacttccggtcatacccatagcggaatcagaaacaaaagacataatggaataaggatgtaccttgaagtgaggaagacgatcaaaagagagaaggatattgcaagatccgcacagaagatgcaaagagattacagaaaatgaaccaaaactcaagaatgacggtgaccgaaaccgaatgtacaccccatttaagtgaggatgcaaccctctagtaattttcgagagttgaaatgacgccttagaatttgcacc

SEQ ID NO: 159217 - DNA, 193 bp, Glycine max
caggcacatcttttcatgtggttcttgaatggctatcaaaggcctatttatatgtgacttgagacacgaatttgctaagagattttcaaaacaaaaaaggcttatcctcttataaagcaaaattgttttatcctcttacaaattccttggccaaattacttgtgattcaataaagaaattttgagtgctcaaa

SEQ ID NO: 159218 - DNA, 276 bp, Glycine max
tacaaggatcatttcccttcaaatttttcctttccattgtggtattttggtgctttagttgtcatattccttgcaaattttgtgagacaatttgtttgtgaatatatggcttgattgtttgattgggggatgcaatggatggcccttggcctacctttgatcctattatgaattggcatgtcatattatccccagtcctcatttttacatgcttgaacatgcgcccaccaaccgttcgatgaaatgcctcaatagcctttgcatgtgttatggtga

SEQ ID NO: 159219 - DNA, 316 bp, Glycine max
aaaaacctcttaagcccaccttttaatataaagaagtctaaatatctctctatggagcatgtgttgccgatgaaaaaaatggagaaacattttttcaccttaactctatgaacttcttatgacagaaagcctctagattttataatattaagatttcaagtaaatgtaacaaagagtcatgtgaaccttttgctttatcggaaagcaattcattggtagcaaagtattatggaggaacaggaaatccatttatagacactctaatagacaaacaattccaatcacgatctttttttaaattaagggataatttttt

SEQ ID NO: 159220 - DNA, 231 bp, Glycine max
ctttcaagcactgttgaatacaacgaacattaaaatattgatgttgctgagtaatggtaatgaaaatgtattgaaaaataacactgacctgctaattattcctttaagataattgtctagcctattatgcaaggaacataaccaaacaacaagatttttcttaggcaaaatgaccaccatttgccagtgtgcactacagcgtacaccaatataggttatcgtagtattata

SEQ ID NO: 159221 - DNA, 312 bp, Glycine max
  unsure (1)..(312): unsure at all n locations
aatatatatcatttgtccaattagtagaatctggggtgctttgaaaatnttgcgaactctctgcttcaaccattntcttttttagttcatcctacataaatacaccttataaattattatcatacatcaatatcctgaatacttcaatatcactaaataaaactcatctccacattagttactccccctcaccccataaccttcaatattttctttgtttgttcagttaattcaggaacaaatcgaaacttactctattacgaatatcattaacaaacaaaaaagatcttttgntagacattagaagactaa

SEQ ID NO: 159222 - DNA, 348 bp, Glycine max
  unsure (1)..(348): unsure at all n locations
gcaagctttaatgctggaaacaagttttaagtttattaanncacannccgggcccgaaaggggaaaggcatgaaaaccacgacatgctagagagggcncnccactagaatntggctgccccatgaaggatacttcgcatctaggtagcatggaaaatacctttcaatggtatgtatatatgtgtgtgaatgtacgtagcatggataatacctttcaatggtgtgtatatatggtataaaatgccttgcaaagtgtgaatgagtagcaaaaaatgcctttcatatatgtgtatttgacgataagtagcattatgatgctcttagaaaatgtaccctgtcaaaaaaaagg

SEQ ID NO: 159223 - DNA, 327 bp, Glycine max
  unsure (1)..(327): unsure at all n locations
ctgacgagcgagaatttttttttctttctacaaaaccgatccaggaatcttctggcattanagcggatacaggcatggtggaagcctatactttataataatatggctataagaaaccttataatattatgggccataaccacgacatactaattaatataggagatccatataaataatggagtagatatagagtataaatgtcgtaggggtaaatttccaatgcacaatatatctgaataaagttctagcaggccaatcataattgggacgtgaaaaagggaattatgaatataaaactgcctattattaataaacaatggatta

SEQ ID NO: 159224 - DNA, 309 bp, Glycine max
caagcttgggaagataatgctagggtggattccttgtcttttagatgaatatcaagcgagcaggtctgtgtttctgtgtaagacattagtgatgcgcttgtgctcatggctggtgaggtccctactgaacaacatacactgcctgggtttgggctcgagctaccacttgatgagctcttcaataggctttgggcctctatccagaagtgtcgtcacacaaacctatattgacattgtcatccaggcttatctggtaaatggtcacggctcgggtttgaggctctttgtccacacttatgacttgagtac

SEQ ID NO: 159225 - DNA, 167 bp, Glycine max
cttttatcccgggaggtgccttccgagcgctccaaatattcccccaagccacttcgatggtcctggtggctctgcttcttatgcctttgcttccccctgtgatccttgctgatggggggcaccacatcaatcgaaacctcatgaggccccagtgctcaattggcatc

SEQ ID NO: 159226 - DNA, 362 bp, Glycine max
ccacttttttcacacccacggaaccaagaaacgtaaataaatcacaacccaatctaattgcgcaaaaaaataacaagcattgacacccctgaatgacttcatgggatgtgcaacacatatttcctgttgactaactattactactaccttgtcccaacaaacccattgactcctccaaaacgacgtgctacaaaaaatgaacttgctaagaaagaaaaacctgcttccacctcgactacaaatcttttatctgcaaaaattaattctagtttattccgccacacgatacgcttttgcgacaactgaacaatccgctatgtcatcaactcagtgcggagagtaacacaccatgacatatcttg

SEQ ID NO: 159227 - DNA, 249 bp, Glycine max
ttatacgcgacccggcatgagttccaatacaattatcataaccacacctctatctttcaatctctacattatatttagaatatctttcactcaatctttcaaaatctttctacagaattttctgaatcatttctcttatcttctaaagtttcgatcacacttctctacaagaaaagttctatggttcaaaacttgtgatagtcattttttcattctctgctccctctgccaaaagaacgaaggactaac

SEQ ID NO: 159228 - DNA, 279 bp, Glycine max
  unsure (1)..(279): unsure at all n locations
caaaatctagctgatactcgtcaaaaagggttttattctattttntacatgcncaaaatattgagtactaacatgaaatatagtcagctaaaacattagccacttgattagcttaatgtaatattatattaggtccgctctatctctaggggtgggtaatatgccaatttcatactggtccttaaaaagtttgaacctaaccttcgatagaatttttgaagcccaagcctgacccatatcccatcaaagactttatttcgcttcgggctgaccttttta

SEQ ID NO: 159229 - DNA, 256 bp, Glycine max
cacacgcttattgcgctctacgcgctaagcgaatcacagcttgcgctaaacgtatcaacccttgtttattggctgatagggtctcgctaagcgcaagccttgtgccctaagcccaataacctttctgtgatttcattttctgaaactgggctaagcgaattatctacctaaatgcacagcctcatctcgctaagtgcactgacgcgctaagcgctatttcctttctgatggataatttatgagaattgggcccatc

SEQ ID NO: 159230 - DNA, 290 bp, Glycine max
  unsure (1)..(290): unsure at all n locations
cacagctacctatgggtttgggcaacacaaaaatatctattgttcacttccaattggaatcttgtcctggacgatcaaaagaacctaatatgggaagacattctggttagtgggtttaacaacatgtatgtttattattggctttattagtcaacttctaaactaataatttagttactgttacataacacctttgatgtgcagtgcaaatttgacattccctgacgtgactatgcaaaaanatgtgatgtcaaccatcaccactacatggaggcaatttattcttcctg

SEQ ID NO: 159231 - DNA, 421 bp, Glycine max
agcttcaccggatgacgccgatcgaacatttttctattcgacgtcatgcaaatttcgttcagggattgaattgaaaactcgttaggcgacatctgtcgtgaagtagcgaccgatatttttcagccgacattgcacaattctttttagaaaagctcgctggtcgataatggtctttttacggcagagtaagttttcttgttttggtgttgcataaaaaagttacaatgtacttcggctaggtttttcgtgcgagttcaaccgacattttgtttcggccaggaaaacattagcccacctctgcaaaaaaaatatttgctaaccgtcttcatgcatatttcattcaacgattgaatagaaaactcaatagccgacaacggtcgtgaaatagtcccgactggatattttcagccggcattgcgca

SEQ ID NO: 159232 - DNA, 292 bp, Glycine max
gagatgggccaaatgccagttttcggccgaataaatgggaaaatgccatttcggcccaaacgaaaagtcggttgggctcgcacaaaaaaacctagccgacctacattttaatatttttatgcaacaccaaaacaagataactttctgtgccgtaaaaaaaaaacattacatgacagcgagcgttttgaaaaacaaattgcgcaacttcgctgaaaaatataatcgggtttttcacgacgatgtgcgtattgattttcattatcctgaacgaattgctgatgtcggtagaaag

SEQ ID NO: 159233 - DNA, 146 bp, Glycine max
cccctcgccatccagtggggaactaaaccaacagtactaccaacactctcaacaaaatgagaaccaccttctctttctagaaaagcaccagaccgattctaaaatataaactcccctaaaaaacaaagccctgcgttgttagaaac

SEQ ID NO: 159234 - DNA, 265 bp, Glycine max
tccattctccccgtttttcggagccccatgaatgttattgcctaacgctgttcatgtgtcctccaccttcgagtttggagctatgtttcatgattacctaagtgcggaccctcaaggcaatactccattctcccccttttttcagagccccatgaatgttattgcctagcgctgttcatgtgtcctccaccttcgagtttggagctatgtttcatgattgcctaactgcggacactcaaggcaatcctccattctcccccttttt

SEQ ID NO: 159235 - DNA, 235 bp, Glycine max
caatacaacaccgacagggctccctatagaacccaggagcaaaacatgtgcaagaaggaacatgagtccttccaagaggatgcccagaggtggagggatttggcggcccaagtagcaccccccatgatggagagagaaatgataaccacgacaagcgacatgccgccagcggtctactatgagaagacggaggggtatatgccctctagcttcatacatatcgggttagcgggcg

SEQ ID NO: 159236 - DNA, 436 bp, Glycine max
  unsure (1)..(436): unsure at all n locations
taagcgacgcggctgcagctgccaccactcgccaggcgattttgttgtcttctccagaagcaaccgccttctggaggaatattctggaaggcccaagtgggcctggttgctatttgcacccccatttttactaaatacacccccttgctcttttttggtgatccttttttcgtaacgttacgaaattttacgaatttcgtaatgatgcttgttttctttccgtaatgttacgaaaccttacggattacataatcatcccttttttgccttccggaacgttacggaactttacggattgcacattaacactttcttttaatttctggcatgtcacggaatttcacggattgtgctacaatgtcttcttttgactntcagcatgtcacaaaacatcacgaattgcctaacgatgggtgccaagtacctcgaagtggtc

SEQ ID NO: 159237 - DNA, 430 bp, Glycine max
  unsure (1)..(430): unsure at all n locations
gaaactaagctggagatgatgcttaatggggaaagaagagggattgtaagttatatggggggagcacgaaattgaaggaagaanaaagggagagaagttgaactttgagttgtgtctcacaagactctcattcatcaaaggtacaacaagtgttacacatggctttatttatagactanggaacttgcttgagaagcttctttgagaaaacttccttgagaagctagagcttagctacacacancccctctcataactaagctcacctccttgagaagcttccttaagaagattcctaaagaagctagagcttaactacacacacctctctaatagctaagctcacctccttgagatgagaagggagagcttagctacacacnccctataatagctaagctcacncccatgacaaaatacatgaaaatac

SEQ ID NO: 159238 - DNA, 366 bp, Glycine max
  unsure (1)..(366): unsure at all n locations
gcttgcacacatcgaagggttatatgattttataagccncccaaagaactgaattctttttatacttatgtcatcctggccactctaattaagcaatatggtcgggatatctctctaattcaggatctaaatttaacatgatatgatcaaaattaagaactaaaatcactcaattaatatatgggaattaaaattacacaaaatgtgaaaataaagaaactcaaattgcatttaaacttttttttctactaatattactattaaataatatgttctaactatgcctttaaaaaaagtatgttntaactatatattaccaaaaaaacataaaacaaccaaaaataaggtgtttccaaacaaacctac

SEQ ID NO: 159239 - DNA, 376 bp, Glycine max
  unsure (1)..(376): unsure at all n locations
cagagncacctgcagcatgcaagctcaacaataattcgatttcttttattttactggactcaancagacatccgagtaaaatgttattgtcgcttgaatttgctcagtgcttcaacattcaatttcgagcgtctcgatatattacgggtctcaatcatacatccgagtaagaagttatcgtcgtttgaatttggtcaaagcttcaacattcaatttagagcgtctcgatatattacaagactcaatcagacatccgagtaaaaagttattgtcgcttgaatttgctcagagcttcaacattcaatttcgagcgtctcgtaatattacgggactcaatcagacatccgagtaaaaagtattgtcgtttgaatttgct

SEQ ID NO: 159240 - DNA, 312 bp, Glycine max
  unsure (1)..(312): unsure at all n locations
gaagcttcctttacatattcatataagggtttgattgaaatactctagctccagctcctactcctttgtcaaccaaggtaaggcttattacatactntgtttttttcttttactgcataatatttttttgtaaggtttttcacatacactaacattatcaccttcaagctgagattgttattgctaccaatgagactccaactctagctccttctcctcaatcaagccaggtcaatgctaagtgtctntcaaacagtccaatcaagacaggtcaatgctaagcatcatccaaagagtaccatgacattggac

SEQ ID NO: 159241 - DNA, 343 bp, Glycine max
  unsure (1)..(343): unsure at all n locations
agcttttcacaatacttacgattttatcgttgttctatccanngaagaagnctccacagaggccatttcctccctcgcccagtattatgatcagcccgtgagatgctttacctttggggacttccagctatcacccatggtggaagaatttgaagagatcctacgatgtcctctagggggaaggagaccatacctcttctcagggttctatccctcattagctagaatttcaaagatagttcaaatctcggcgcaggaattagaccatggaaagcaagtcagaaatgggatggttggaatactgagaaaatgtttggaggcaaaaacaagaaccttggcaggt

SEQ ID NO: 159242 - DNA, 295 bp, Glycine max
  unsure (1)..(295): unsure at all n locations
ctcaattcatcagtgggctttccttctgtgtccagcatcttgggatgttcccagcctttgatgacgctttccaagttctgctatccaacggattgagaaaggcccaccattctgctttccagtattcatagttggttccatcaagaattggtggtctggtcactggtcctccttctttctccatgttcatcaaaatttatctccctagatcccactctgtgatttcgagtgttggctctgataccaactgaaattctgatactngggacagatgtcgtacccgatgtcacgacat

SEQ ID NO: 159243 - DNA, 373 bp, Glycine max
  unsure (1)..(373): unsure at all n locations
tataatttaaaaatatgagaatttaacctaagtaataagtttcaagctattaatctatataaatcactcttatatntttctttttatatttaacagttttagataataattcacaatgtatcacattttcaggtggtgcattcttatttattttgctatttccctcgtcatttgagttcaaacttccttttacttccaaaacaaactaacctttntcagtacgtaacaccctaaccctatcttaaggaagattcaatcgcttgaattttgtcgttgtgtattttaattcaaatataattctatcaagagaatatcttttctttagtcccatcccgtgcggactgtgtcctccctaaagagaacataacaattt

SEQ ID NO: 159244 - DNA, 288 bp, Glycine max
aagcaaaagccaaagcattgattcatgtataagtgagttaaggcatttgaataaactaacaactttgaatgtgcagatagaagatacttcaaattttccaagagactatcttggctttgggagactagaaagctacaagattttgattggtgaacgatgggaatggtctggtgtggagtctgggaattacgaaacttcaaaacttcttaaggctcaattaggtgctgatacacgcattctaatggattacggtatatagatgttgatggccaaagccgaagatttgta

SEQ ID NO: 159245 - DNA, 235 bp, Glycine max
ccgaatcctgaaatgtaagatccagtacattcaacatacctgtttataggaacagtagttgacatgctgctaattagagcttctgtaggtatgccttgctatttttattcttatctttggtcctgcaccactgatgggaattcattagctataaatgtgccttctgcggttcataagagtttattaagtgggaatgatttcctatgatttatattgaaatgagaggattttaaag

SEQ ID NO: 159246 - DNA, 249 bp, Glycine max
ttatctcgatttatctacccaaaaaacggatcctttttaacgtccatcgccttaaacatgatcactcttccaaattaaaaagaattcgcttgattcacccttaaaaaagaactacctaagtctgatttcctcttctatggagggcacgtatgagcaagaacccctctcttgtcgacctcacaaaataaaagaaataaaagtgaaggtaccacaatctccacatttctaaaaataaggctgttgtctttg

SEQ ID NO: 159247 - DNA, 429 bp, Glycine max
  unsure (1)..(429): unsure at all n locations
agcttgaaggaacaaccacatttcctactctcagtgtctcttctaaaanattctttcttcctacacttatactgaccgctcctttcatagccaattaacacaaatgaacttcttcctctactaccaatatgtgtgtcaaatgtcataatgattgcaacaaatccgttttcatgggcaatcgatatagctcactgcaaaacatcatctcgggtaccaaagacctacaatgcaaccccgataatttattttttatacaaaacatatattcaaccaaatgactcaaactaatgaacatcattacctccaaagtattataaacatctgaacaatcaacatgtggttgattcacaccacattcttgttcattttcataatccatatcaacttcttgaggcatcgtattgtcatacgtccattgatctttgtcca

SEQ ID NO: 159248 - DNA, 309 bp, Glycine max
  unsure (1)..(309): unsure at all n locations
gcttgcttctacattcacattataaaggttttctatattagttcnnncnagctatcctttcctaactgtagatgttttcattataggaagcttcgccattctcttattttctatatattctggtgcctatccatgtttttcctctttgctgtcatttaattgaaacaaattataaaagctattcgagaataaaacaactgattgtcacatcaacatagtttcatcttaggcattctgtgctgcagtcatctcatatttatttgctgcctattcaactgcttatgttttacagaccatgtaatatccatg

SEQ ID NO: 159249 - DNA, 281 bp, Glycine max
atacaaatgagcttgttgcaattcttctagacttggagtgataacatgcagtactcttgaacccttacctcccactctttcatcatgttaagactcaaaaagcccacaaaactcaataatttcttctgtgatgtacctttcaacaattgatgctccgggatggtgtagattctttgtatacccttttaagatcttcatgtatcgctcaactaggtacatccactgcaaataaatgggaccacaacatttaatatccctcacctgatgaacaattatgtgaa

SEQ ID NO: 159250 - DNA, 233 bp, Glycine max
aaactaagcttgaagaaacttgagccttggcaacctacaactcttgctttcttatttaagaaaccgcacctgttggcagagtctatggtctatgtccttctgcagaacaccatacagatctctgcgcttccttcgagcaatctggagtcaatgagcaacccgaagcttatgccgcagacatttatagtagacctcctcaacaggaaaccaacaacacagaaaattagatcttc

SEQ ID NO: 159251 - DNA, 427 bp, Glycine max
agctattaatgctgcataataggagagtttctctgtttttatatgctacacataatattaaccatgcaaaacatttcactagaggtagaaattttattgtatctcttgctgtgatcattgccattttactcactcatttcgaacatccaaccaatatattaaatgtgaattctcgtacactttaaaaaaataatctttgtgcactctatcaatacccaattatatttcttcagttaacattgtaaataattatatatttacaaatcatcaatagaaccatctttaatctgttaaaccatatatacttttgcatttggtaaaacaaggcttcaaaagtctcgtattatattttaatttatatttcctattcatcctattaataaaatcattctttaaacaaaaacaataacttattagctttatattt

SEQ ID NO: 159252 - DNA, 274 bp, Glycine max
tagaatccctttcgtttcaatgttttctgcataattatcaatcctagagagcaatgcttaacagccaaacctcaaaagatatggcctgatagtgaataacattattactattttagagattattattcagatatatgatcccatcttatgtacataattacatatgctaaacaaatacttataattaatatttcttggctgattcccaactatcaataaaaaatcataggtcttaagaaaaaccaaccatttattaaaaccataatgaagaaaa

SEQ ID NO: 159253 - DNA, 365 bp, Glycine max
ttatcgacctcctccaccttgaagcacctcttatctttctttgggtatttgattgcttcaaaaaagttgaaggttaccttttggtcgtcaacactcatttctaaaattccattccccatatctaccacacagttggcaatcaacatgaagggtctgcctaggataaaaggaatctccgtatcttcttctatgtccatgatgacaaaatccaccggaaaggtaaagtggtggagtttgacgaggacatcttctactaccccgtacggtcttgtaattgatcggtctgcaagctggagcatcatcttagtagggtctatctttagattttcaattcttctacacattgacaggggcatcaagttgat

SEQ ID NO: 159254 - DNA, 424 bp, Glycine max
  unsure (1)..(424): unsure at all n locations
agnctgctattatcttcatcaatgttccagtatataattnctaataataactttctaatattaattccttagacaggtgtttggaacgaattttggaacataattcactccacatcagcaaaaacacatagaagctagattggacgtggtttatcacatctttacccatatttccaaacgcacgagaatagtaacattcaataattattttcaaaaactttataaaacctgacatttcaaaataaattaaaccaaacatgagagagagagagatctcaacgcaggcttaaacaatcagacaaaaaagtaggagttgatcttacgtagctgccatataaacaacagcgatacaattntatatcttgctatgcactcatggaagctgccaggcaagtggccctgcagttacagacaacacgggtag

SEQ ID NO: 159255 - DNA, 361 bp, Glycine max
  unsure (1)..(361): unsure at all n locations
taacgangaagaacgaatgaagaacgtcgaaaaacgatcgaaacctttgcgaaattcctcacggaaaacgttacggaaatgtttcggaagcgcctcggcttagattttcttcacggaaacaatttttccaagcaaattcgaaagagagagaagtgcctaaggggatgaacccttttcttcttcacttcctcccctatttatagcaaaataggggaggtgcttgccgcccagctcgcccaggcgagccaggttgcttcctccagaagcaacaaccttctggaggaatcttctggagtgcccaagtgggccctgatgctatttgcaccnccattttactaagtacacccctntgttttttttt

SEQ ID NO: 159256 - DNA, 206 bp, Glycine max
  unsure (1)..(206): unsure at all n locations
tcttaccctggtgcaaaaacctcaagaaggccctacatataannattatcaaaggctacaatgaacaaacaactttaaactgaagctgcattagagtctacattataatggtgaagacatgaatctgactctacgaacatcataacgggttaaaatgactcanaatcacttgaaaaacattaaaataactntccatatgctttggg

SEQ ID NO: 159257 - DNA, 369 bp, Glycine max
  unsure (1)..(369): unsure at all n locations
agctntgtatcagtaaatctaactggatttcttcttccacaaatgaagttctagagttgtagactctattatgccttggatgttttaaagtatccaagtaatattccattatcacatttagagtcaaactttcccaagctttctgtagtgttaagaatgaaacagtgacataaaaatgatggaaatatgaaatgttaggctttcatcctttccacaattcataaggagtcctttttagaataggtcttatatggagtttttgctagaaaaagaggttttgatttgtttccctttttgacatgattcacaaagtaaatcatctttgtatgatagccttggtaatcctcttacaaggtcatgtttttgtag

SEQ ID NO: 159258 - DNA, 416 bp, Glycine max
cagcttaaacaaaattagttgagttagtcattttatttttttcattcaccaaaacaagaaaaaaatgttactttttattattaagactggctttagtatctgtcttttgaaaatgatgatcttggttcgggcgtaaatatattttctatttctttaatttaacttttttttttgtacatgtaaattagtatttttttttcattttagttctttcgtaaaatatacttattctttttaaaattttaatatgatataaataatatttttttattgtttaaagtgtcatttaatattttaaggataataaatatattttataagaattacaataattttttatagggatgaaaataaaaaaacattaaggtactggaaaatatatatttaagttttttttttatttctattattttata

SEQ ID NO: 159259 - DNA, 382 bp, Glycine max
atagtttattatctcaattcttcttacctagtaaatggatcatttttaaggtccaacgccttaaaatgatcaccttccaagttaaaagaatcggttgattcacccttaaagaagaactaccgtaggtctgatttcctcttcgatggagggcacgtatgagcaagagccccactgttgtcgacctcacaaaataaaaagaaataaaagttaaggtaacacaaattccacaattctaaaaaataaggctgttgttctttgagacaaacgtgagaggtgctaatacctttctcaaacgtaaatacaactcccgatcttggaattttttttttgcaccgttcttctttcatttttctgacgtttaccacaataaaattggtggtga

SEQ ID NO: 159260 - DNA, 297 bp, Glycine max
aaaataaaagaaagataaacgccttaacaggaggataccttgtcaatggaaccacgaccaaagtaaagaaatatattaaatatgtggtagcctattgaacgaggccatgaatgcaactacacccctccaaaggatgtgtccaaaaaagacatcgaaaatgaatccctcaaacaacaaacacaaatgaaagctctgaaggagaacgtaacccaaagcctagtaaaacaacttcaaccattggtacccgcaaaacaaccaattctctcgagtgaagagggatggagaaaaccaccatac

SEQ ID NO: 159261 - DNA, 300 bp, Glycine max
  unsure (1)..(300): unsure at all n locations
aaacctccggaaatccctacgaacgtactgaaacgtccggaagcgcctcggcttagattttcttcacggaaacaatttttcccaccaaactcgaaagcgagagaagtgcccnaggggctcaacccctttcttcttcacttcctcccctatttatagcaaaataggggagatgcttgtcgcccagctcgcccaggcgagctcagctcgcccaggcgagcagggttgcttcctccagaagcaatagccttctggaggaatattcttgagggcccaagtgggcctgggtgctatatgcacccc

SEQ ID NO: 159262 - DNA, 257 bp, Glycine max
cggaagaatataagaaaagcgtctctctctttatctcttacttcccacccatattaagtgaaagaggctcatttagggtatgggaattctacagaaacactacgggtggaccggaagccccgaaagcccattttgcaacaaaacgggggaggcggttgccaccttaagcaagaaaaggccctgaaacctggcccacatttgaaaattactattgtcaccccccattttgcaaaatacacccctagcgcccctgtttt

SEQ ID NO: 159263 - DNA, 349 bp, Glycine max
gtgccccattgctggtggccggatgggaagagattgacagagacagagtgtttcgccctttgagctggcgggataagagagagagagggtgtcccgcccttggagctggctggataagaaagagagggtgttgcgggaggtggtaccaccagtgggtgttgtgggacaaggggagagagggatgccgccactggcttctgcgggataggcttctgtgggatcatgtgttcaagctttgcacccatggttcgcgtgttagctttgcttcagatctgaaaagccttagcctgcgcctacggtttacgttgaaggctttcatggtctgcaccttgcaatattgttagctttc

SEQ ID NO: 159264 - DNA, 412 bp, Glycine max
  unsure (1)..(412): unsure at all n locations
agcttngaacaatatatttggccttcattttactgtctttgggcttggcggccacgctcaacaaagtactttcgacacctactatacgttgatttcaccaatgctataatgggaatgttgcgacaatcctttaaaaccttattgatacattctgagaggttcattgtcatgtggccatatcgacgtccttctctatcgtaagccatcgtccatttttcctttgagatgcgatcaatccatgttgctatggctggactcagttcacgaaatttttctaaattttgatcaaaaatgtgcttgcaaggagtgtaggctgcataaaattagttatcaataacaattttaagtataaatgaaagtaaaataaacgtgaccatctaatatgaaatcttacccaatttcttcaacattt

SEQ ID NO: 159265 - DNA, 471 bp, Glycine max
  unsure (1)..(471): unsure at all n locations
aagctnttctgtaattaatgaatacttccaaaacatagaaattgatgttaattctactaatcaatgcaatattatagctgggtcatcctatgggttgttttcatgcacaggcacaaatatggttgattcaaggtttccaaattttccatatctctcttactcctcttgtttgagtccgtcaatccaaaatcagagtgtcggcaataaaaaaaatcttcaaaaaatatgtttgctccaatcaacacaaccattttttttccaccaaggatattctccaccccatcaaaaactaattgctctcaagccgtagagatcactaatgtttgccttaacaaaacacaacgcaaccatatgattcatgtacaatccacattaaaatctagctaaaatttctaagaatcagcacaggataaactaatacaacaaaacgcatattaccaattatcataggaatatatgtgcccatgcagc

SEQ ID NO: 159266 - DNA, 413 bp, Glycine max
agcttattacctagagtgtgtgtaatattttttcataggctttttaatgaaagaaaaatagtcacatttagtcaccatttttttaacagtcaccttattatgggcatgttcctttcttcccttcatattttaaacagaagttcctgttttgcatacttttccctagaaaatattcaaatacccaaccagagaattacacaggtcatagacttttaaaaataatttacgtgggcaattgtcaagaacaaacttcattttttggggaaatgtccgcatatttcattattttttcattgaaacgagagtacaatttctatctttagaagactagactagatgacaattctccccatccgtatctattctacatctgtaacgggagactaatatatttacactagaagcctgcaaaa

SEQ ID NO: 159267 - DNA, 449 bp, Glycine max
  unsure (1)..(449): unsure at all n locations
tatttcattnntttcttctcctacaagtgcatctagaaaagtttacccaaacaagccccttatctttgaatgttagacgtaatagatagcaaaatttagtactagtttgttgtgtttgatgtttctgttatctgacaagtgaccttatgacctttaaatcggtaattatttccatataatcgtgtttataggttaaagctgttgctgaggaaatgggaattggatttttggggattggtttccagccaaagtggggaatcaaagacatacctataatgccaaaggtagttttttctctcttctcatctttcaagttcttgaactgctgaacacttactgatgtctcagcttgaaaatcttgctcatatgtcactttctgactgcatcagttataacttggtcaatcctttatagggatgacaccatccgttacttttcatgaattcgac

SEQ ID NO: 159268 - DNA, 372 bp, Glycine max
  unsure (1)..(372): unsure at all n locations
agcttcacccttcgtgccaaacttagnccatacttatcttcttttaacttctcatcctctagcccacaccacttctctcgcacctctatttcccatctccttccttcctttttgaattccaattgctagacggtataagatctcgcttggagcgatcgcagaccacctctttttgtcttagccagaattaatgtaacatgtgataggcatgtgacttatgcagggactatattgtgaacaataaacgattaaggactcaattgtaattgggcttaataggagaagcttctaatactaactgctccttgatgacagaaaaggaataacatgggcttgagacccgccgacgtggaatattgtccccttcccgac

SEQ ID NO: 159269 - DNA, 478 bp, Glycine max
  unsure (1)..(478): unsure at all n locations
actcaagcttcacatccttaaacctgtggttggactcgccattcaccccattctatatagtgnctttccctgtctctggggcaaactgaatctataacttctacgaagaacatgcttcattccatgatcttgctgatagaatgattgaggaaaaacactaggaaatatccacacttatagatgtaaataacaatcttgatcagtctcttcaatgaagaccaccagtatgtttttatctgcattttgaatatcatgagagttaagagataggtcatatacttttaatttccatggtctgccatatttatctgttgattttgtaatgctgctaggtcgatcagaatgataattatacaacaagtactcaattatttatagtattacaatagttgtttctttaattgtatgactaatgttgtaggtttatctaaaactgaaatttctaatgtgattatacattnggatatagattcccttg

SEQ ID NO: 159270 - DNA, 473 bp, Glycine max
tccaatcatgcttctgtacagactatgatcattactggtgccagcttcatcctttgacagcttcaagtgagtaggtgcaggtgttcttttatggctggcattttccatcccaaacttcttgacaatgttctttgcatacttgctttgtgagaggaacatgaagtcttccatctgcttcacttggagtcccagaaaataagtcagctctccaacaagactcatttcaaattcagattgcatctgttgaaaaaaatgtcgaagcatctcattcgacatccctccaaacacaatgtcatcaacatatatctgtgctatcatcaagtttttagcatcttgtttgacaaagagagtcttgtcaattcctcccttcctatacccttgctgagtaaggaactctgttagcctttcataccaagctcttggagcttgcttcaatccatagagagccttcttgagcctgtatacatgatctg

SEQ ID NO: 159271 - DNA, 398 bp, Glycine max
gagagctctatgtgagtgaaatgtaactcaaatgcaaatgaactttcgacttggacaacgccgttttgggtgcgtttggtttcaggataaacctatcccacgcaatgctagactaattgtggaaaatgttgggaaagaaaagaaattaaatggtctctttcggacatcaaacaacgaacatagagaaaaagacccaaattatgtttgagactttcaatgtgcctatcatatatgtggcaatacaggttgtcttgtttgtgtatgccacaggacgaactacaggtttgtttttgtgattgatcttggatttaccatatttactatactgtggtcatgtgattacaataggattgggtcagcttattatttgaataaatgctatatgttggctgaatctg

SEQ ID NO: 159272 - DNA, 472 bp, Glycine max
  unsure (1)..(472): unsure at all n locations
actcagcttaanataagtgatcatgtattccgaaatattggggattatacngattctcattntatctatatacaattgtttgttgcttgcttgaatcttgatttcaggtattgtattgtcatcatcaaaaagggggagattgtagatgcaattgactttgatgttttgatgatgatcatgatgatgtgttgcaattgatgcaaatgggcttttcaagattaaaattcaagacaatacttcaagattacaaggcacaacatgaagatgatcactagaatattaggaagggaattcctaattgaattagcaaaggtttggccaagtaatttaaataaaaagtgtttttcaaaggttttactctctggtaatcgattaccagaggatgtaatcgattaccagtggccaaatacattntataacagctataacaaattgaattttcgaatttaaaagctgtaatcgattacacaat

SEQ ID NO: 159273 - DNA, 472 bp, Glycine max
  unsure (1)..(472): unsure at all n locations
ctcagctntaaggacagtgcttacgtaagcaccgtcttatatagtatgctctcaagtacagtgcctacgtaagcaccgtcttataaaacttgttttctaagatagtatctacgtaagcaccgtccttgaaataaaaattatttttaattattgatatttttcctgaaagaatattaaaatttatttaaaaaataattgagatgatagattaaataaaaataagattaaaaattcctaacacatgttcatagaaacaacaacatattaaaaaatattattaaaaagtagctcctaaattaaataattattttaaacaaaaattgagagtaccaattaaaactgtgacagcctccaagatattatccctaacggcagacacagagagaacctgataaaacgacaaataaatactatatattacgctagacatcaaatatccttaagtttgtaatgcaatcatatatctgatata

SEQ ID NO: 159274 - DNA, 404 bp, Glycine max
  unsure (1)..(404): unsure at all n locations
agcttgatgtttttaatgaaacaatttttaatcttgttgtcaactttttacataattacttattttgcatagcaatttcttttcataaatatatcaactgactatataattgtaatatggagaaactttttgcatcaaatgatcaaaagatcactactagatgccagaaccagaataagttgaatcgtttcttgtatttttctgtatcaattcattatttctgtagcaactatatgatgattacgtgtagttaattatgattttgcattactgcagtaaatgaaacatttgcctgtatactttagaattaaatgcttttccatggtggtgggtctagggtgactnttattntaaacccagncaacatagctgggtcattgtntttatggctcattccgcattct

SEQ ID NO: 159275 - DNA, 425 bp, Glycine max
  unsure (1)..(425): unsure at all n locations
tgccgatnntagttttgccggtgaaaggatctaagtatgtttgaaaagaggcaaatttgattatcctgctttgacaaataaaaggcatagagcaaatggagagcatgagaaggaggaatgaacccatgttgtgattttcgttcctacatggccaaatttcacaccagttcaacaatgtcaatactcagccaatattagcccttctcattacccaccacccaatcatccacaagggtcatccctaaatcaaccacaaagcctgcctgtcgtacgtccagtgccaaacacctcccttaacataaaccaagacaccaaccagggagggaattttccagcgaaaaagcctgtagaattcaccccaattccggtatcttatgctaacttcctcccatatctactctataattcaatggtagtcataaccc

SEQ ID NO: 159276 - DNA, 453 bp, Glycine max
  unsure (1)..(453): unsure at all n locations
ntctcccaagtcctaaatgacatttcaagctagtattatctctctttaacctccatttaccacagaattcagacttagctttccaactctcaaagtctcactctttttccactcataacatcacattctcactttctaaccctagggtaactctacatttcatctctaacagttttccatgggcaatttcagcatataaacatcacaaacatcatcacaaaaaccctaaaacagtatgggtatgtttaactcatccaaacatggcgatttcaacaagttttcagcaaatgtcttcacaaataatcatcacacagcataaaccttgcaagactacccatcatatctcccaaaaccccatacccacgaaaatcaaaggagaaagaagtcacccaaacctggattttcgaagtcccactcgtagccacgcacttcacgaccccgaagatgctctcc

SEQ ID NO: 159277 - DNA, 383 bp, Glycine max
agcttttcattcatttatgtacccgttgtggtccacattgtgtttcgttcatttttattctcgttgtgtttactttttataccccctgttgacgtgcttaagccattttacttaagtcatttctcgcttaacttaaaaataaaataaatttccaccgaacgtttgaattgtattatccattaacttcggttaaaataaattccgaccgttcggtcgtgccgtaaccacgttggaaatcaaaaagaggtaaaaaataatataataatcaaaaagacatcttttagtaaaataaagcggaaaatcaatcggaccgtttctctttgggatttctcattcttaatcgaattgataataactaaagtgaaactaaggctaaaatcaat

SEQ ID NO: 159278 - DNA, 455 bp, Glycine max
tgcatgattacatctcccctttctcaagcaaattcttcttgatatcatcaaaatcttcatgatcccgactcgttggtggaggatgcatgaatgacaatcaattcatggggctccgaataaaagtggagaatggaggataggcgaagagcgctaggcaatcaattcgcggttctcccgactcgttggtggaggatgaatgaatgacaatcaactcatggtgctccgaataaaagtggagaatggaggataggagaatagcgctaggcaatcaattcgcggggctgcagactcgatggtggaggatgcaagaatgacaatcaactaatagggctacgaataaaagtggagaatggagaatacgcgaagagcgctaggcaatcaattctcggggctccacacttctttgtggaggatgcatgaatgacaatcaattcatggcgctccgaataaaaaag

SEQ ID NO: 159279 - DNA, 170 bp, Glycine max
cctcagagcaccgcggccgcagcgggcaaaaagtttaacccattgttttgggggacacgaacgccccacgcctacatctatcttcggtggtgccgggtggaagttatggccggggatcgtctggcagctgtgagaacaaagcaggctttgcacatgcctcactcgtgccg

SEQ ID NO: 159280 - DNA, 449 bp, Glycine max
  unsure (1)..(449): unsure at all n locations
aaagagagagggtttgagagtgtttgtgagcacaaaanngaaggaggaaaagggggagagaagatgaactttgagttgtgtctcacaagactctcattcatcaaagttacaacaagtgttacacatgcttctatttatagactaggtagctttcttgagaagctatcttgagaaaacttccttgagaagctagagcttagctacacacacccctataataactaagcttacctccttgagaagcttccttgagaaatttccttgagaagcttccttgagaagattcctagagaagctagagcttagctacacacacctctctaatagctaagctcacctcctcgagatgagaagctagagcttagctacacacccctcataatagctaagctcaccctatgacacaatatatgaatatacaaaagaagtccctactacaaagactactc

SEQ ID NO: 159281 - DNA, 413 bp, Glycine max
agcttaataaatctcccaagagaggtatatattttgaaatctttgaaaactcttttcctatctggctgttcaaaaattgacaagttggaaaaagatatattgcagatggaatccttgacaactctaattgctgacaatactgctgtgaaacaagtgcccttttcaatagtaagctcaaaaagcattggatatatatccctttgtggatttgaaggattatctcgtaatgcttttccttctatcatttggccttggatgtcaccaacaatgaatccgctatcttatattggtcatttctatggcacatcatcatctctagattccatggatatacataataataattttggtgatctagcaccaacgattagaagcctctcaaatcttctcagtgttttggtgcaatgtgacac

SEQ ID NO: 159282 - DNA, 472 bp, Glycine max
  unsure (1)..(472): unsure at all n locations
catactaagcttgaggttatagtgacaatgattgngctagagatgaagattatatataaattactagtggttttatgcttacaaggggaatacaaccttcacttggatgtcaaaaaagcatttgatagtcactttttcgacctgtgaggtgaaatacatagcaactacttcatgtgtttgtcatgcagtttggcttaagaatttgttataagagttaggcatgtcacaagaagagccaaccaagatctttgcggacaataggtcaggcattgctctagcaaagaatccagtgttccatgatcgaagcaaacatattgatacctgttaccactacataagggagtgcctagcaagaaaggatgtacatgtagaatatgtgaagtctcaagaccaaataattgacatctttaccaatccgttcaagcaagaagactttattaagttaagaagcttacttggaatgctaaatcaa

SEQ ID NO: 159283 - DNA, 421 bp, Glycine max
  unsure (1)..(421): unsure at all n locations
caagcttctatattaagctgagaccatnttatcttattaacacaatgttgaattttattaaagaaaattagatgtttattctcttttatcttcatggagagtgagttctcctaaatttcttgagtgattcaaagaacacccctggctgtatcaaagagactttcacacacctttgtgtgttgccctcgccggaaagagtgattctttctttcctttcatcttcaaccttgttctttcaaaccacaattccagaaaatccacttctgcccagaattatctcgtggccataactcccattttacgcactcaaattaagtgattcttgagcctaaattgaatttcaagacgagacttttcaccttgttttggaatcacctcatttggagccctgtagcttgagtttttgtcatttctatatttc

SEQ ID NO: 159284 - DNA, 484 bp, Glycine max
tacggaccttcaatctcagctttcgcaggcttaaggaaaatcaaggacctagccatggtattatgtcttcactgaggccattgcctccctcacccaatattatgatcagccgttgaggtgcttcacctttggggacttacagctatcacccatggaagaagaatttgaagagatcctaggatgccctctatggggaaggaaaccatacctcttctcagggttctatccctcattagctagaatttctaagatagtccaaatctcggcacaggaattataccatagaaagcaagttgaaaatggggtggctggaatacatgattgaggaggtccacgagggttcgtttggaacgcacaccaatgagcatgctatggccaggaagatcctgagagtaggttattactggctcaccatggaaagtgattgctgcatccatgttatgaaaagccataaatgtcaagcgttcgcggacaatgtcaatgc

SEQ ID NO: 159285 - DNA, 437 bp, Glycine max
  unsure (1)..(437): unsure at all n locations
cacctgaggcatgcaagcttctncgaagggcatgggtatttcctgtttcctgaaattatctaaaaatctcgccggatgaagatctttttctttcttggaaggtaccacaggatacggtacttccacaccttcatccacagctttttcactcttactcttctttcagacatattattattttcttctttttcaattttttcattttctattcctttttgtttttcttgggccttcaattctatattcttaaccattatttgttcctctttttcttgattagtttcacctttcacctcatttttcttgccatcagtacctttcttgtctgcagttttcttcttatgcacaacactatcctcatcctcagcctccacaaaccttttactccttgtcatcacaactatgcattcctccttggaattctgttctgtatttgc

SEQ ID NO: 159286 - DNA, 452 bp, Glycine max
  unsure (1)..(452): unsure at all n locations
ntntatttattttcgtctacctagtatgtgaatattaaattaatgacattattagttgagtaacactaatccctacttagtcaactaacccttaaccttacttagtcacataaccctaattagtcacacaaccctaaaccctaattagtcacacagccctaaaccctaatgtcgcaacctacccttcggtgggagggcgatgcgtgactcgcgggtgcgtgttccaagaaaggaatacgcgcggagtcgccaccaatgtttattttgaggaaaacgtcggaaaaatcggaaaagacgtggtctatgaactttaagtgaaagggtcgggagttgtatttacgcacggngaaggtattagcacccgacgcgtccgtcacaacagacggcagcctttaatcaaatgtgcgaatatgacttcaatttgtgttatcttccctctcttatgttcttat

SEQ ID NO: 159287 - DNA, 252 bp, Glycine max
tatgggaaactttagttaagtttgattcaaagcatacaagagcattaagcccgcctttcttttccaagaacttacgctttcgacaatccttctagaaagatccagatttcccacaaaattgacaatatccgccttgagaccttcttctaaatttgaaagatacatcattgatccttaatggccctttggctttacaagcttctccataaatatcatttaagctccttgattccccggcgggtacataatgga

SEQ ID NO: 159288 - DNA, 475 bp, Glycine max
  unsure (1)..(475): unsure at all n locations
cttcaaaccctagccctagnaaacaagacaaattcaaggctctatgaaatttaacacagnatttntgtcaaggaaanttttacataacattgaagacaatattctcatatttctaactaggtaacccaattgagtagcaaaaatctacaaaaacaatcctacaaatttctcatatgtagcaagatagagtgtttgctagttttgacatagttcaaagatgtgtaattttctccatctttccaaaaccaaactaaatgctactttttacagtttgaagctaactgaaatatctttccaacaaggaaaacattgtacaaaaattagttctttattattccttttatatttntgtttcaagcctttttctagactttaaaaatagtccttccaacaaccactctatnttgctttaccctnntaaaattgatgggagcctctattaattttccaatatacatggtaaaaaatcattatc

SEQ ID NO: 159289 - DNA, 401 bp, Glycine max
agcttgtcaaataatgtctaacactatttatcataaaggattggcactcaaacgctcccacagccttacatcttatatttttgcgtggtgtcaaagttaacatctaattagtttatcttttgttatttattgtatcgctgctgagaaaaatttgaattagaatagaataattctatttcctccacatacgtattggctctcttctctcctctgttttttataatttcctcctcaaaaccaacaattggtatcgagagccttattcttacgggacctgtaccatggaaggtgatggagagaattatgatctttgggaagtgaaagtgcaatcctacatggattctttggatttgtgggatgttgtagaagaggattatgaaatatatccgctccctgaaaat

SEQ ID NO: 159290 - DNA, 478 bp, Glycine max
  unsure (1)..(478): unsure at all n locations
actaagcttaacatggtgcattgttgaacatagacatggagagaaatattnttgctatatcatatatagagnttattggtcaacaaattatcaatgaacttattcttcatgaatgtttaaattgtcctattatttatgtttatatcaagtactttaagtaaacaaagttttgcaattgttattcaattaaacattgatattattggtaacatgtttttatcttcattgaaggtatttgcattatcagttggtccttgcaagagaaaatacaaagagattttcattcttatgcccacataatacaactccaacgaacacgagggcaatgaagctattgaattaatccacgagacaagttagtctattggaaccttacaatacnagggtaaataatttttaataattntatttaatttaatgaatttcaaaaaatataggttacttataattgctaaccaacaagttntttttgggatca

SEQ ID NO: 159291 - DNA, 402 bp, Glycine max
agcttgttgttcccgatctattaagggctgtataatctatctatgcgcgtttacctactcagggtgttgttcctgaattataaaggttgcagaatctgtctctgcacgtttacccactcaggttgttgttcctgaatgataaagggcgcataatctgtctttacgcatttacccactcagcttgctattcctgaatgataaagggcgcagaatttgtctctgcgcgtttacccactcagcttgtgtgtgcggataaccgcatgtcaagttactccagtgtcagtatgacagaaattgtctgcgcggaagatgacgtaaatctccgcgtgtcaacaggcttgttggccgcgattgacaaagggtgcagaagacgacgttagtctctgcgtgctatcatgcttt

SEQ ID NO: 159292 - DNA, 454 bp, Glycine max
  unsure (1)..(454): unsure at all n locations
tataagaacanaanngcctcaatcatatccttttatgcatgtgaattaggacgcatcaacaagaatcaagccaaggctattgtgcaagcaatcaatggggcaaaacacaccacatgattatgatgatggatggctcaaattctcacaaaggtaaactcatcactttcaaattgagctttcaaaactatcatgacatgtagagaagaatcaaggatttcaagtcacaaaatgtcaagaactcttattttcaaaacaattacccatttcttgaacatatcctataattcaaagaaaaacatgaaaattcgtacgtgcacacaaaattgacccaaaatattaaactgaatatccgataaaactaacaacattaacaaattaacacaactaacaaattaacaaaaccaacaaaactagcatgaccaaagaacactctcctccatactgtaacaacaca

SEQ ID NO: 159293 - DNA, 337 bp, Glycine max
  unsure (1)..(337): unsure at all n locations
agcttgcctcanagaggttttcttaacgattatgtggccctataaactaactccactcctgaggatgacagtcaccgctttatgagcgcttgacatcaccatcgctctaaggccatcaagggatggtcatttcttcaggagcaacgcgttcagcttagggacgacgagaatactgaattccacgaggacataggtcgccggcggtgggcatcactagttacccccatggccaaatttgatccacacataatcctccaagtttatgccaatgcttggcccacagaagagggcgtgcgtgacataaggtcttgggtgaaggttcaaaggatcccctttg

SEQ ID NO: 159294 - DNA, 386 bp, Glycine max
  unsure (1)..(386): unsure at all n locations
tgctctanattacattgnatgtngatgtatgggaggatgttatatgccatttntgctccaagagtaatgtcccactaaaactaactntccaaatgtttgccttcgcaggaatggcaccgaggaagcttgcctcatagaggtccacgaaggacaacgccgccgaaggaactaattcctccccggagtacgacagtcaccgctttaagagcgttgtacaccagcagcgtttctaagccatcaagggatggtcgtttctcctggagcgacgcgtccagctcatggacgaccagtatactgatttccaggaggagatagggcgccggcggagggcaccactggttactcccatggccaagtttgatccaaaaatagtacttgagttttac

SEQ ID NO: 159295 - DNA, 368 bp, Glycine max
  unsure (1)..(368): unsure at all n locations
agcttggttcgaggtacttatcccgtgtatanctataaacgangaagaacgaatgaagaacgtctaacaacggtggaaacctctgcgaaattcttcacggaaaacgttacagaaaccgttctgaagcgcttcggcttagattttcttcacggaaacgatttttccaagcaaattccatagagagagaagtgccaaaggggctgaaccccttccttcttacttcctcccctattatagcaaaataggggaggtggttgccgcccagctcgcccagtcgagcagggttgcttccttcataagcaaccgccttctggaggaatattccggagggcccaagctggcctgggcgatattttaactcctatttt

SEQ ID NO: 159296 - DNA, 473 bp, Glycine max
  unsure (1)..(473): unsure at all n locations
tgttcaactgccanaatctggtctcgccattattgccttttttattctctccggtttcttcaaaagggaccaaaataaacaagaaattgtcatgatcatcccaatcaattttcctgtaacacagttaaaattttcaatttactagaataatttaattaaactcaattgcttgttacatgaaaattaactggcanagtaaacgccttatcgtgtgtgtatgtcagtatgtgtgttgcgtgagatttctgcacatataaacagcgtttacacatataaaaaccgttatctagtaatggattcataataattgtgttagatttgccaatgaagagctgaatcatcatgttagaattgcacacgaaagtaattattacagtttaagttgttccatgttcacttgtatataacttcttatntgtgtaatcttctatccttgaaggtatggccttaggcagcttctgttcctagatgct

SEQ ID NO: 159297 - DNA, 324 bp, Glycine max
accaacatgctcgacaggccagcttaatcccgatttggcacttcggtatgctcacctcctgattgttatttcgcttcctctattattcggtgtccattcctcgctcaacactaccacaatgttagttccggcacttttaatattagggaattataatttacatctcaatttatgaaacttgtcctgcagcggtgaaaccgtgtgaggagcatgctggagcaacgcttgaacttccctccaaaaaaattattccgaagtcagcatagggacaagaggccaaccggtagaacaaaggctagatttttatttttgcttaagatcaat

SEQ ID NO: 159298 - DNA, 459 bp, Glycine max
  unsure (1)..(459): unsure at all n locations
cacacaggatctcacaatttttgaactattggcgccttttagcgnngaagaaatttgactttgtttgcatggctataagcatatgagactaagagtaactttcaccaaaatcttgtatataagaattaagaagcaccatatttggatcataaaggtgacaagatctatgaaacaccgatattgacacggacaccagacacaacacggacacatgaatatctgtaatgtccaaaatataaaacgtaatacggatgttgtgtcggtgtcggacaccaaacacaacaagaaactgaggtgtccgtacttcatagaacaagatgagttttgtacgaacaactcataaataaggttaggctctngaaattcatgaattatttttngccaatttaggatgtgcccataaaaatctagttcataaacaatgggacttgttatatctactctccttctttgtgtatg

SEQ ID NO: 159299 - DNA, 373 bp, Glycine max
  unsure (1)..(373): unsure at all n locations
agcttgctaacccatggaagctcctaatatctcccacactntttggggtgggccattcttggatggccttgattttctcaggggccacttggaccccatttctaccaactacaaaacctaagaaaactatattatctacacaaaaggtacacttctctatatttgcatagagggtgtttttcctaaggactgaaagaacttgtctgagatgtcctaagtgatcatctaggctcctactatacactaaaatatcatcaaaataaacaactacaaatctacctatgaaatcccttaagacatgatgcataagcctcataaaggtgcttggtgcattaatgagcccaaaaggcatcactagccattcatacaaacc

SEQ ID NO: 159300 - DNA, 457 bp, Glycine max
  unsure (1)..(457): unsure at all n locations
tatgcgcatatttccttacaaatgttctcttgcacaagactattctattaaccgaaaaaatgcacccatatacaatcaaggcagcttcgttacctagattattttcacgtacttccaaggtgtatttgttacttacatcacacacctccttggctaaattcacatacatgcatactcaaagcattttggggtaccaaaaattgcacatgtgcacatcttggtatttctaatacctatacatacacaaacttcatgatgaatcttgactatctacacaataaggtgctacattntatgctcttttcaagtntttgctacctaaagccgcatgcaaattcaagtatattttcctttgctgactaacattgtattcaaattaaaaggtatacattttttggtaatgtatcttctttacataacatgcaacatatttgtatatatctntttgtgagacatt

SEQ ID NO: 159301 - DNA, 348 bp, Glycine max
agataaagattgtcctagcttatatatattattttaacctcagcatccatcacgtgagatcttcaacgttaagaagctacaataaaacaagccacgtatgctttccaattgaaatttcacaagcagttatattgtatttggagttcagaagggaaatttaatttttaatagcacttggactatctgaaccaaccatttcatgctatatattattgactttatgtttgagtaaccatgatttttgttttaacttagcacctaccacatatgaattttttaatgctcacgtacgctttccaatttaatatttcacaaggaggtatatttgatttggagctcatacatttt

SEQ ID NO: 159302 - DNA, 416 bp, Glycine max
  unsure (1)..(416): unsure at all n locations
ttacattggtgtttgtatatatgggaggatttatatgcctattcngcttttatagaaanngcccactggtaaaactaactttccaaatgtttgccttcgcaggaatggccccgaggaagcttgcctcaaagaggtccaggaaggacaatgcggccgaacgaactagttccgccccggagtacgacagtcaccgctttaggagcattgtgcaccagcagcgcttcgaagccatcaagggaatggtcgttctccgggagcgacgcgtccagctcagggacgacgagtatactgatttccacgaggaaatagggcgccggcggtgggcaccactggttactcccatggccaagtttgatccagaaatagtccttgagtttatgccaatgcttggccacagaagaaggcgtgcgtgacat

SEQ ID NO: 159303 - DNA, 300 bp, Glycine max
  unsure (1)..(300): unsure at all n locations
agcttaaggtggtatgtgcaggcacagctttgttattgtttttttgcaangctnggggacttcggaattctggcgacagatgtgagtaacacacaacttgcacatgtgcatataataaatattgattttagaaacgtcttcataattaaatcgatagaattccatccgaccattggtaaatggcggtgctactaccatcaccatggcagaatggggttgatgatggtttccaactgccatatgaaatttttgaatggcctgctatggcggggccataaggcgcaatagcttgttatatgg

SEQ ID NO: 159304 - DNA, 481 bp, Glycine max
  unsure (1)..(481): unsure at all n locations
gcttggcgttcttgccgcgctctctggtgacgacgaacttggttttctntatttttatcggaagaggaagtagaagaagaagcggcgtccgtggcggaagatgccgcggttctgggaggagcgagaaagattctgcggcgaggtgggagaggagaatgtgcacatgagagaggggagagagaaaaatggggcattattggaacgtgttgaacaaaagaagtggctctaggttattntattcatgaattacacccctggttaaattacgattaatttggtgtagcaatgatgatgattaacggtggggattngcgtccaaatcttctaacccgaccctaccctgctctgtgccctacctcccagcaacactaccatagatagtaccacgcttctttccgattcaaataaattgtagcagatatttaataaattatcatttatagttctcagtatctgcataatataaaaatctcacttcatg

SEQ ID NO: 159305 - DNA, 99 bp, Glycine max
accttgctgaacagataacggcaaacaacgaaacaaacggagaagacccgaatgaccatacggaaaaagtaggagatgcagcctcctcagatatagaaa

SEQ ID NO: 159306 - DNA, 275 bp, Glycine max
tagagcctatctaccacacctggtataatagtcgagctcgcctccttgagatgagaagctagagcttagctacacaccccctataatggctagctcagccccattccaaaaatacatgaaaatatgatgaaaagtcccagctgcaaagactactcaaaatgtcgtaaaatcaaggcttaaatcctatctactagaatggccaaatacccgtcccaagaaggaaaaccctttctgatattacaaaaaaagtggtccagcttgacgctgggctcaaa

SEQ ID NO: 159307 - DNA, 398 bp, Glycine max
agcttatccacttccgatttaccctcgctatcgcaacccctgtttccttcaacaggtctccgatttgggagtcttcgaggattccgaggatcaactgatcaacggccaaatgcgtgtcgccacgtgatttttgcgccgcctgtgctctcctgatggccctcacgaggttggtgctcgccggcacctcttccggcggaggggactggcagggtagcttcttcagagcctggttcaacactcgctccacggcgcgtgccgattcctcgccgccgcccgcgctgtttatcgctagcacgaaaatgccgttgggatcggaaatcaacgcgtgggccaagtggatgggagtcaattgcgcgtggcctgaactcatcacgagctcgtgggccgacacaaaaact

SEQ ID NO: 159308 - DNA, 392 bp, Glycine max
  unsure (1)..(392): unsure at all n locations
tgagtactgtntgctgaaattccaattgcaatgacaagtctatctactatcaccgtgtgaaccatgcaagcttgctgccgttgaattaattctgcaacttacaattgcaactgagagacccgaatggttaggtattatttataatctcaattaattttcatatgctacacaactaaatatttcttttcataaattaaaaacttgaatatgtatttcataaaaattgatctaagactataaacatatagtattccaggaggatcaataatatccaataatttctccatgacatacctgtacgtatgccttgcttgtttgatcaatatatctcatgaatagttagacttanggtaaactggatagttagacgtgtacagggtttcatttatgtg

SEQ ID NO: 159309 - DNA, 410 bp, Glycine max
cgcagctgcagcttgctgtcctccattcgcctgtgctcagatttttgcacaaaatattatgccttcatattttccctttagttgcataaagagaaaattgaagcatgtcatgagagtaaggagaccagaacagctgtggaggacagatgatgaaatgtcaagtaaattttcctgcagttcccagggcttggaagatggtcaaaaagtaaaacaattggaaattgctgagagaaattcaccaattaatgcccatcctaatgctggaaaaaggttgaattcatatcttgatctgaagaagagggacaatattatcaagttggaggattctgagttatgtatggggctggaaactgcttcatttggtgaaagtcgtattaagaacttataccatacttcagttggccattctg

SEQ ID NO: 159310 - DNA, 473 bp, Glycine max
  unsure (1)..(473): unsure at all n locations
tttgaaggcgccttattgcgcaatccggttcaatatcattatgtttcttcttcctttaaatatactccaaccttcttaagagggtcttgcttggaagcacttttggtgagggccctctaacttaaacaatatctccatttgtcttttgttaccccttatcattataaatagacttcgatataccattaatacaaaaagtcaaataaaaataatttcatgtttactacagttggcatttaattatggacatttcttgcctttcaaaaaaaaattatggaaattaagctgtaaaaaataaaaagacgaatgcctgtttgatttcacgtttgagtaaaattgattatgaaaataacgagagacaagttgtttcgggaatgcatttntcattgaaaaaaatatgacaattgttctattatgatagaacaaacgaacttaaagtaagcagatatatgaacataaacatgaagatatgg

SEQ ID NO: 159311 - DNA, 409 bp, Glycine max
  unsure (1)..(409): unsure at all n locations
agctttgngaacacatctgtcttttttatttttctcatgatgaaccggatcctaggctaaacaaattggactcaaactgtcacaaaaaatgatagctttattctgtggaaacccaaaaatgctaataagaccttgtaaccaaatacctccctttgctgcttttgctaaaaccatgtactctgcttctgtagtgcacaaggtaactgtgaactaaagtgtagccttcccactaacaagaaaatatccacttgtgaatgcatatgctgtttgagatcgtcttacatccaaatgtacaatgtagttagaatttgagtattcaacaaaagcacaagatgtgtcatcttgatagaccagtccaatttcagttatacccctaagatacctgaatatatgtttcacaacatgctaa

SEQ ID NO: 159312 - DNA, 434 bp, Glycine max
  unsure (1)..(434): unsure at all n locations
ntgnngggtcataaccaagtatatggacagtattttgtttatgtactctgaaaaaccagaccacaacttgtttctattatgtaagatcaatttcagggactttcttcttgcaccagcaaaagttcttgtgcacacaacactgttatgaaattcccaaactaaccctactaacttcctcttcctttactttcttcacgcaccattcattcttttcttcgcattcattgtcgtgagagctcctcctttgttgttgggtccgttattttttgcaacttcgatatagttatatatgaatttacaattcgtataaaacttacgaattatcaatccttatatttcttacggattaccaatctgtatgaatcatagagattgctaatctgtaagtgttatacagattatcaatccgtataacttatacggattggctccta

SEQ ID NO: 159313 - DNA, 411 bp, Glycine max
agctttagagtgaagagagagaattgattcttaagagagaaaaaatttgagccaatgaagggagagagggaaccatgggcaggattttgtaggatgataaaactttcatccaatggtcaaggttgaaggatgaatcataaccgttggatgcaatggaggggcaaaatcggatatccattgttcattctacagtgaaaaagcacccaatagaagctagacatatgtaaagtagttgatttcaaggatagatcactaacaaatatgttgtgcattaactcttcaagtatttttaaatatttgtcaaacataaaagtaaaattaaaatgtatttcatattttttatttatttattcatctaaatgtcagatacccttagaaatgaaagtaaataaaaaatactctaagccttag

SEQ ID NO: 159314 - DNA, 473 bp, Glycine max
  unsure (1)..(473): unsure at all n locations
tagagttcannagaaaagttcatttagaaagtctaatagatcttctaacttctattctcccttttatatatggatctcttcatgaaatatttgttgcaagagagagagtttctcaaatacactacaacaaaaaaggattccttgagtgttatttaaggtctttcatgaaagcttttaattgtcatggaatccaccatcgtagaatgctcacgctttccatgatggtttaaaaactatcatagaacatgcctttctatgatgattatttaaaatcgatgtgaaatttgttacgtttttacaaaagaagactcatttacatctatttttatgacggtttttttggaaaactaattntgaaagtgtatcttctatgactgtcatatatatatatatatatatatatatatatatatatatatatatatatacacaccataataaaaaagtatatagtggctgaaaaccctatctta

SEQ ID NO: 159315 - DNA, 444 bp, Glycine max
tccctcaatgacaaatacgcagaactttcctgcaaggtgatctctattctcgatcaccttcacttgcggtcacccaaccataatcatctcaattccaacacccagctccatcaacgtaatacaaccaaattagatgtcccgcgattctcgatcacccacctgtcgcccatggctgccttccatggctgccactcgccaaatgaagcttccatggttgccgatgaccgccttgaggccgccttggtcaaccttgctgccgctcaacaccgtcttgaatcctcactggatgcccttctcctaagactaccgcggcaacttggtcacctttacccttcttcctccctgcaatcaccactgtcgctgcccccacggctcacgacagcttcgttctcctccgcacaaccaccacccacaatagcacctacgtcagtcgcacccatggct

SEQ ID NO: 159316 - DNA, 414 bp, Glycine max
agcttaaaggagcactcttactaggggtattttctcccaaggcctagactttgaagagtccgtcaggccctcttcctcctgattcaagttcaacctagaaaatatttttgcatgccgactatatctatgaactatacaaaacacacaactcctcaattgttctcaaaataattttaactcgtcgcacctcaaagtgattaaactcgttggattcccacagtggttctcatcacaatactcatcttgcattaactcgtcgcctttaaagggtcttacaatcgtgtgattttacggttcatagctcataactcaatgcatacaacatctcaatacacatgtatctcacaattcatcacatattcaatttatcacttacacacaatctcaatcacaatttcatgactccaatataac

SEQ ID NO: 159317 - DNA, 472 bp, Glycine max
  unsure (1)..(472): unsure at all n locations
taccacatatggcattgttaagcgcctaattactgctagttatgataaatttcaaacaattacggaggaaaatcgcaacaaacacaagaacactaataatcaatgatactgaacttcgaattcatattgttttagccagttttttccttgaatttttgtggaatcaatgctagtcactttataacttctcattatttgtgggtattactttagcctatatctgcgggcagtgaaaatgattatccatctctcaatgcttctgcatccattggctgaaaattntgttggatatatatttttgctttgtgcgatgtattgctgtattcttttgatgaattcattatgagctgtaatttttgggggatgttttacttggcgaaagaatatgaanaaatgttatctacaaactcttcacttcacctttcatatctggcatatatgtngatattagaatggttcttaatttatactc

SEQ ID NO: 159318 - DNA, 392 bp, Glycine max
agcttgtatctggaacctatcacaaaatttagatctccttcattgactgaactctcaagccgacattgctctttgctacaaccatgggctcctttgaccaaaccttctccaccagagggaggggtccatatggagtgaggagacgaatttggagctgaactgtccatgctcaagagagtgagagataggattagtatttgacacatgttaatgttcaattgagtaatggattgacttacgtgtacaattaataaacatatcaattttggtatatctgaacttagttttgcatcaaaattttgacatattttaattgtatggagaaaaaatagatcaaaatttttacaggaataaattctaaactatttgatatttataatgataaaattata

SEQ ID NO: 159319 - DNA, 461 bp, Glycine max
  unsure (1)..(461): unsure at all n locations
tatgctatgcctagagctacattcaatcgttctcagnctatgattagactcaaacgaatggtattccagattaatcactcaatttcccacacagacatcaataaaagtctccacatatatggatagaatatgagtgttatgtcacgctctttctggttttcaattgccaatgtaggatgtggtgttgctgcagtgatttcaacatttacctttgaattgacttggactcttcttaatttctattctttgccagtgtggcatgtattctcttccatctatcaatccaagcgaagtgggtgagagctaaactgttagctatggtattatttggttccaaaatcatacggatataaactaaaactggttattctaaaattggttntggtctactgattaaaacaacgcttaanaacaaaattacttatactctctggccgataaaagatattagagaaataaat

SEQ ID NO: 159320 - DNA, 396 bp, Glycine max
  unsure (1)..(396): unsure at all n locations
agctnntaattggtattgtgaaagaaggtttntttccatacaggtttttgcttgggcttcaaggacaagatcatcatgtatgtgccaccttcctatgtgaaattgacaaaccagtggttggcaagctcgaggtttcataagtgtttatcttcaattccccatactaattttgtttcacagtagcatcagaactggtgttatgaaggctactgtcaaaggataattttctatatttattgataaaagagcttgtgctcttaaatagaatacaaggtaatctaaaaaagaaaactcctaaactaatgttcatcattgtacccattgtcaattcctataattaagggtcaatgattcccgatcataaatacaaaatatgcaactaaccaaatctcctaa

SEQ ID NO: 159321 - DNA, 430 bp, Glycine max
  unsure (1)..(430): unsure at all n locations
actcaagctttagtaaaaaataaataataaataattagagcttatttatgctgagtaccctaggtataaatagttatattaagtcagctgcctccttttggcctcattttcgtttttccccttctcctctcaaaaccctttctttttcccgcagcccaccaaaccagtctcagaaaaatgacgatcttgaacccgttcaccgttggatcgtcgtgaaatttgagtatcatgttcgcaacagaattccgagcattctcaccgttgggaatttcgatatcatgtctgaactgagagaaacacccttcgcattgtagcctttntctttcccgcagaaacccagagctgtcttggtaaaactatgatcccggtttcgttaaccgttggattatttgtgaaattggatatgttgttcgaaattcaattccgcacg

SEQ ID NO: 159322 - DNA, 349 bp, Glycine max
tcctttcatgaatgatgctctcctacaacctataacaaggtagaaggagataaactgtacaggctcaaggttcaatcaaacaaccatactttcagctcaaactgggtgaaagggagtaaatcattcatataccaggcaagcttttttggctaaatggctactttcaattacaacatggccttcatcaatcttaaactcatgcattcattcctgtcataccctaattttcgccggggacctttgcttggtggcatgcaacttgtatttggtcattttgaggtgctgggcacccatcattaagcagtttgtgaagttccatgacgtgccagaaatcaaaataaagttttga

SEQ ID NO: 159323 - DNA, 498 bp, Glycine max
  unsure (1)..(498): unsure at all n locations
ctatcaatactcaagctngagtgatattgtcacagaatacacttgaggcacctcctctttttatccaccccacttgttttctagtcgcgcattagttaaaaaggtgtatattttgacaacatagaggagaaataataatcaagggaatagtcattctattttcaaaataataattgttacagctgtcatgaattacaagtagttagttagagggggtaagaaaataaataggaaagactgacagagggaggagaataataaatgtaagaagagttggcctctcaaagagccaagttaggattgatgcacctcttgctacttcatatatttcatttaacttaaaaatctggatcgttttagtacctctggtacttattaatgaatatattatatttttggctgataaaaaaaaaatatatntcatttaactttcacttaaaagtcgtgtgctttcacaggttgacccacaatccacatctatttctctatcataactca

SEQ ID NO: 159324 - DNA, 354 bp, Glycine max
  unsure (1)..(354): unsure at all n locations
agataaccattattaaactttnttctttctctcttaccatcaagttgatgggtgagattgtagtaggggaacgctccattactcacgcatacgttccattatacaggttagctgtaaattttttttattctagttacttaaaattttgtattgcaaatgtcgtaagaatatatctggttgtggntgcgttatttatattccatgggtggttcatttagaaactcaaacattatatatatgtgatttttttcacctaaaacatgactagaattcttgctactaataatcgagatcacgttcttattatgtatgcgaagcatgaatgttcgagtgttttaaatattagaacatgaa

SEQ ID NO: 159325 - DNA, 466 bp, Glycine max
  unsure (1)..(466): unsure at all n locations
tgccgctgtaaggatccnctcattgcaacctcaagtggattccatgaactatgtcgacgggtgcgaaatgtggcatgctccttggccttgtccttatcattattaacatcaatcactntcttatccacgatgttcacctcatgttctacctccccttcctaatcatcttcttctttgtcctcgtcctggttgtgttgggaggaaggatccgggttcgtgcatatgcacgacgagcttcagataacatggacctatttgacaacttcgtgatggtggtaatcctcgtcatccaaatcgggactttatggttatctgtgtttggaggttgtgttgaagatggagtcattatctttgaggttggttcgaagggtgcagtaattgacgaagttgtcattgtgggctacatcgacgaagccatgctagtgatggattggaggacgttgntatggaccgtcatgattctgac

SEQ ID NO: 159326 - DNA, 324 bp, Glycine max
accgagctgcagcttaacaatcggaaaagagcttttaagacataaaagagttacctatcgcggaaagctgaagacatcaaggtccacaaaaaaaatccaaataaaacaactgggccatacggaatgaaagagaaaaaacgggcccgtttcgcgatcctggaaaaaacatagggaaaaggacaaaagggagaatagggctgggatccctagggccccaaaacaaagcacttaacccaacggaggggaagaaccatacgttcttgacgatatgcatatgaggagtactgaaactatatcccggaacccagaaaaagaacaagaaag

SEQ ID NO: 159327 - DNA, 352 bp, Glycine max
tgatcaaatttcatatcatcttacagatggatatcactcggtactcttagatatattctcttaaagtatactaagtgttttgagaaattaatatctctacaagtaattacataaagccttatacgaaagaatgaaagagtttgttcacgtacatgattcgtatcttgtttttcaaagcttcttctatatatagacttcatctccaaatattttttgtctcacaatggttggattctccactctgtacttgtttgaagtcttgagtacgttggagtatatagagcttgcattaaatgcatgtccgttttctcatgcgaagtccatgcttataggctagcatggtttgttcccc

SEQ ID NO: 159328 - DNA, 324 bp, Glycine max
gcttatgcgcctatttccttacaaacgttctcttgcacaatacatttaaccgaaaaatgcacccatatacaatcaaggcagcttcgttacctagattatttacacgtacctccaaggggtatttgttacttacatcacacacatctccttggctaaactcacatacatgcatactcagccttttgggggcaccaaaaattgccatgtgcccatcttgggcttttttataacctccttacccaaactcattgaagaatcttgactatctacacaataaggggccacattcaagcgctttttttttttcaagttttcgctacctaa

SEQ ID NO: 159329 - DNA, 430 bp, Glycine max
  unsure (1)..(430): unsure at all n locations
tggaaagtgcntattttcaccttctcgctaagccaatatgttggcttatctagcatttgctaagcgcaacactcctaggctaagcatgaggaagactctggaagaagatgagcggtacaggttcactaagcgcaccgcttcagttcatccgctaagccaaaaatcactaatgtgcgctaagcggtccatacgtgcgctaagcacacgagcacgaacaaggccacctatttaagcctaaaatcagattttgtgaagagagtttggactaggatttagagcttcgcatatctagggtttctagagagagaaaggtccaagttccagagagttttgagagaatttgttgtgtgaagatctgcagagaccanagcatgaagcaggagccggtttgagagcttgagatgagtttgtgactgattgtgagattcta

SEQ ID NO: 159330 - DNA, 380 bp, Glycine max
  unsure (1)..(380): unsure at all n locations
agcttgatggtacgctaagcctcacatctcaggctaagcgcatattgcagaaaattattttgtgttgcagaaagcgctaagcgcagcctgccgcgctaagccctatatgcttacgagactttacaacttcaagttgggcttagtgcgaggctaggttaagcgcttgggttttaaactcaaacgtcacgttggcacgctaagcgcagctgtgcgctaagcgcaccatacgaatttcagtttttaaaaatcaaaggcagaggcactttgggtactacctttgcacccaaacctctgcaccttcttaaccttgagcacttgngtactttctgctgcgtgtgtattgcttgcctgcatcttcattgcttcatttcaagaaaaat

SEQ ID NO: 159331 - DNA, 463 bp, Glycine max
  unsure (1)..(463): unsure at all n locations
attattatatataatacgttgcanaataccctcaacgggctcaatccataattccttaggtcaccgacaaactatatacatcagttgctgtataatactttntagtagcaacagcgatattcatacataattcatgatttcatattagctggttttgcgtcattttcttgagtaacaaaataaattaaatacttgcaatacactttctgttttttttcttctaaacaagtatagtccatttgcattgtcgttaaaatatcattttgaagactcaaaataaatgactcacacacacaagaaatcgctagtttaaaaaaagaaattacctaattattattggttgtcaagtcatgtaagcaatgctgtctttggaatacagaatctagccaaagaacacttgactaaatcttcactatggtactcaaaaaaaaaaaaaaatcaatcaatcatcacaagttgtaaa

SEQ ID NO: 159332 - DNA, 440 bp, Glycine max
  unsure (1)..(440): unsure at all n locations
agcttgatagcaggcgttgttttcaaaagattctgcatgcanaaaatcatggctcaagtaaaccaacacaaacatgtagaaccactaataagaatgctgtccacaagttcccactacaaatggggaataagagaaccgaagctccacaacaattctaggtcaagaaaaaaaattatataaccctgaacacacgtaggttttcatacctgagtcctgagcttagcattgctaacttgctcctanaaatttcatccataactttctgctgtgttgtagggtcttctcaatggtccagcactctctggtgtgtagaaagtattcttatatgacaaatgatcttagttattcatgataacagaaacataagcggtgaagagaacttacctgtttcactcggcaaccatatggatgggttgatagggtcacaacttgatcaaaaa

SEQ ID NO: 159333 - DNA, 429 bp, Glycine max
tcaagctgtgttggtcaatgccatacacccaatttttactctcccaaaggtgagtcttactattattaatctttatggagcaacagataattgctctcaagtctcatcctatggttcattgatatgattaaccaaattttctcttattaggcttctctgaaaataaaaactcaagagtcatctaagaaggaggaagagtcaaaatttcaagctttcacgggaaagaagtattccttaattgattgatctttgttctaaactataaagctatgcagacttctgcacgaattgttcttgcttcttgtttgtgacctttttccacttcatcatcaataaatatcgttgtgcattctcaaaaagaattaatcgatctttagtgtagtcaacatggccttagagtttgaagtacagtattgcttgatttactac

SEQ ID NO: 159334 - DNA, 400 bp, Glycine max
  unsure (1)..(400): unsure at all n locations
agctttgactngagtcatcaagagattattaatatgtgaccatgacatgaatttaaaaaatctatcatctatctttcaatctatctttcaatatcatctttcatctttttcaacactttcaacaaatctttctgattcatttctcttcatctttctaaaattttttgttcaacactttctcttccaagaaaagttctttgttctaaaacttgtactattcatctttttcattctcttctccctttgccaaaagaacgaaggaataaccgcctaaattcttttgtgtctctcttctcccttacaaaagattcaaaggactaaccgcctgagaattcttttgattcttcccttccgcctaagcaaaagatttcaaaggactaaccgcctgagatatcttttg

SEQ ID NO: 159335 - DNA, 494 bp, Glycine max
  unsure (1)..(494): unsure at all n locations
cgtgacactataaatctaagcttanaaggaaggacaacaatcatcattgctcaccgcttgtctacaattcgtacagctaacttgattgcagtccttcaatcagggagagtcattgaattaggtacacataatgagctcatggaattgactgatggtgagtatgctcacatggtagagttgcagcaaataacaactcagaatgatgaatccaaaccttccaatcttctaacagagggaaagagctcccacagaatgagcgttccacaaagtccaactgtaagtttcagatcaagcactgtaggcactcccatgttgtatcccttcagtcagggattttccatgggaacaccctactcctattctatccaatatgaccctgatgatgatagttntgaagataacttgataagaacaaatcatccagctccttcgcagtggcgtttgctgaanatgaatacccctgagtggngaagagcaatgctaggaatcttaag

SEQ ID NO: 159336 - DNA, 231 bp, Glycine max
tattcatatcaggggcacacaaaccgtggctgaaaatggcttggaacacttagggatgttgaaacaatgtgttattttacaaaggattatgaaagaactgtcacattatggtttaataaccgccatgaaaaggaaattgatagaaaggaaatggcatgaattcgaaagggaaagcatatccatatgccaccaaactttgcggattggaaagaaaaaaaatggctgaagggc

SEQ ID NO: 159337 - DNA, 446 bp, Glycine max
tcttatattatcacacaaaagccaaccagtacataggtatatatataggtgcagactaagcaccttatcaaacggctacagcagagaaaaagacatgaaaggactgactattacaatttacaagaatatactaatataaaatacatactaatttaacagttggtttacactttaattattaaaaaaatattatcatttttttttttttttgctcagcaaaaaaaaaaaaaaaaaaaaaaaaaaaatttttatcattgtttagagtaaaatttattccaatattatgtgattaaattaaacaataatttgtcaacatcacccctcaagcagattttcctagggaacctttttctttaatcaaaattgaaattaaactaacatattaatttatataagctcagaatgtttgagtaactttcactcagcagattacaacctttgttcct

SEQ ID NO: 159338 - DNA, 399 bp, Glycine max
  unsure (1)..(399): unsure at all n locations
agcttctaagacccctcccctcctctttttattnggtttattcagacattgttcttcataactcaacaacaaaaaattaagacattgttttttcatatcattgcgtgctccactcagcattttatgtccctgggtacttgtttgtgttgcgtcatcatgcatgcaaacacaaacacagaaatactaatttgattagttggatatatatagagataatatggcgacttcacgaggcaatggaattgtctcaagttattgggattcccatgggcactggcaagtttgtgtcgaagacgatagaaatgtgggctctttaggaattttcattggggatcgtccatttgaatttgtgcttcctgtaacgttgtgccaactcttcaccgtcatcttagtctctcg

SEQ ID NO: 159339 - DNA, 460 bp, Glycine max
tagtcttcatgataaccaaattggtggttcaatcccttcttctttgggacttcttcccaaccttagaggggttcagttattcaacaataggcttacaggttccatacctctttctttaggtttctgccctttgcttcagtctcttgacctcagcaacaacttgctcacaggagcaatcccttatagtcttgctaattccactaagctttattggcttaacttgagtttcaactccttctctggtcctttaccagctagcctaactcactcattttctctcacttttctttctcttcaaaataacaatctttctggctcccttcctaactcttggggtgggaattccaagaatggcttctttaggcttcaaaatttgatcctagatcataactttttcactggtgacgttcctgcttctttgggtagcttaagagagctcaatgagatttcccttagtcat

SEQ ID NO: 159340 - DNA, 373 bp, Glycine max
agcttgaagatgagctattaatgcgcagttattagtcgttatcaaccaatgaagctatcagaagcttgaaaagtgaaaatttggttttggaacagaagttatctgcactttaaaatatataggaattcatttgaataattcataagggcgatacatatataggaattcattttacttttcaaagtgcttcaaactagaaaagatttgaataatccatattgattgcataaaatttatttaatttcatatttccatgtgtaatattgcgggtatttgaatgtttgaagttcgtgaatacctaaaaaaatagctccagtaaacaaaataacaaaaaaaaatgcattctacatcggttctttgaagaccgatgtag

SEQ ID NO: 159341 - DNA, 471 bp, Glycine max
  unsure (1)..(471): unsure at all n locations
tctcaatcatgcaatttaagatcaaaggtaccactaatagttctcatgcatgtggcagagtcacttacctttaatattttgaagacatgcttttgcaagacctaatattaagggatacatagtattaaataaaaaaatctgctgaacaatctcataattaggcatgcatgttttatcaagagaatcattttcctgtcctgctttaaatcttcttcagtcttcacttaaaattaaaattcctcttataactgtttaacttaatcaagtcataagaaacatgaagttgtgagttcttcagggaaatcaaagttttcctaaaaacaaaatcaaaggtagagttcanaatttcctttacctatgacatgcatggtgtagattgagggtctcgctgtttgccatagaaaattaanaatgcacctgccaaatggatcacagaccanaagcatctcaatatatggttaagtttcctta

SEQ ID NO: 159342 - DNA, 266 bp, Glycine max
accctaagaaccgcagcagcaactttcatgaaggtagcaatttctaagactccctcctgggggggaggacactcccaaagcgacccatacctgaaaccccgactctgccactcaagaagcatcagtaagctctgtcagggtcctgaacaagtggcactgaacacacaacgcagccaagaactcactatggatgcccgaacagaattgaaatgaatacactcaaaaacaaactgatcgaattggaaagacaaatataaaacccttcc

SEQ ID NO: 159343 - DNA, 399 bp, Glycine max
  unsure (1)..(399): unsure at all n locations
gctgctcccaaagaaagatgaactgggagctgaaaccccatgtccagacccattcaggttcaactgctatcccacagtaaaataaaaatattcagtacttcaaatagatgctctgtcttctccttaattattatcttgtctatttccaagattgtatatatatatatatatataaacatgcacatcaagccacttcataacagcctaatagcaccaattaatccatttaaacttagcatgtgactatacatgacacgtaaaatgaatatatttggaaatgatacattatatctagtgaggtgtatataaacatgtggaagatattcatacatntgagccaactcgtttttcacttagtcatcattgaaactttcagttcatgatcaataatgacttagt

SEQ ID NO: 159344 - DNA, 334 bp, Glycine max
  unsure (1)..(334): unsure at all n locations
agcttgtaatactgaatttgaagggaatgggtgtgttatgctatgtttgattgggcattcttgtatatagtaacttttcaccacaatttacaagtttccattcaactgtaccccattccaccatattcttgtggctatgattgtggattaaatgataatattttaaaaaatacccgaacttttgaaataatcccccttaccaaaccaggaaaatgaaagaataaagcattttgtgccaaagaaaaatacaaattttgcatgggccacacaatnatttacctgatattttaacaaaaatgacatatggacctgttgtttcagcatatggcctatt

SEQ ID NO: 159345 - DNA, 450 bp, Glycine max
  unsure (1)..(450): unsure at all n locations
tatgcgcatacttcttcacgaacgttcacttgcacaagacattcttataactaagaaaaatgcacccatatacaatcaaggcaccttcgttacctagattatttacatgtacttccaaggtgtatttgttacctacatcacacacatttcctttgctaaattcacatacatgcatactctaagcactttgtctatcaaaaattgcatacgtgcacatcttggtatttctaatacctatacatacacaaacttcatgatgaatcttgactatctacacaataaggtgctacatttcatgctttttgcctttntttttttcaagtgtttttttttactacctagagtcgcatgcaaattcaagaatattttcttttgctcactaaaattgtattcaaattagaaggtatttttgtaatgtattttctttacataacatgcaacatatttata

SEQ ID NO: 159346 - DNA, 432 bp, Glycine max
  unsure (1)..(432): unsure at all n locations
cctgccgcatgcaagctngaatagataatgtccgcaataatttacataattattccanganaattattgtaaagactaaaaaagttctagatatcaacaatcaactaaaatacagatagttgcatttctgcgtcgtctttcaagagattgggcaacctcaatttcaccaagagccttcacctttgagtatcaggaataaactaatgtcaatggctaaacaagcaaatttaattataagtttatttctagaataattacaaatgaaagtatataggttatgtatattgtttaactcatcaacaaaaaagagcattttgtgtaaattaaaaagggcatgaaggttgaaaagacaacatgtgttctgtgcatttatagacacactactagaaaataagtgtttaatatcgattatttaggactcttaacatcggg

SEQ ID NO: 159347 - DNA, 440 bp, Glycine max
  unsure (1)..(440): unsure at all n locations
acttgatgcctngatcaacctagtaactcagcttgccataaatcanaaatcttcatctgcacctgttactgtcgcaagagtctgtggtctatgttcttctactgatcaccatacagatctctatccttctttgcagcaatctggagtcaatgagcaacctaaagcctatgttgaaaacatttataatagacctcctcaacagcaaaagcaacaacagcagaataattatgatctttcaaacaacagatacaatccaggttggaggaatcatccaaatctgagatgggcaaatcctccacaacaacaacagcagcaacaacaacaacagtttgtccctcccttccagaatgttgttgctccaagcaggccatatgttcctcctccaatgcagcagtagcaacaccaataacaaagacaacaagcaattgaggccccttctc

SEQ ID NO: 159348 - DNA, 413 bp, Glycine max
  unsure (1)..(413): unsure at all n locations
agctngcacaacaattaactaaatatgtgtttgttcaaaatgaagtaactaactaactaacttatagtaatatatacagttactactcaaaaggaaggaatgtgccttgattaggcctatctaatctacctaattaaactaattacacaaagcaaagcccaaattcacagcacttccaagttcaatttgaccctcaaaatgacagaaatagaccaagcttatttctaaaacaaaattgagaattgttttcttatctttccagaactactcacgtactccatttggagttctgtaatgtcctataggccttgcacaaggcagataggtcaagtaaactcaaaaatccaaaaataaaccgcaattatcaattaagctcaatcatttgcttaagatcaaaactaagttaaagtgag

SEQ ID NO: 159349 - DNA, 430 bp, Glycine max
  unsure (1)..(430): unsure at all n locations
tctcaaagatgtacttgaccgggtccatcttggatatcagccaggtggtatggcccancatgtactgtcttaaccggtgggatgcccagactaaagcacaacatgtcctttccagcagggagtagttcatctcacaggtcatgaacttcttactcaagtagtagacggctcgatcttttttcccagactcgtcatgtngccccagcatgcacccccattgactcgtccaaaatcgtcatgtacaagatgagaggtctcctgtgcaccggcggcataagcacgggagggttcatgaggcactgtttgatctttccaaacgcctcttgacagtcctcgttccagtggatggattggttcttgcgtaagagcttgaacagtggctcacagatagcggtgagctgtgatatgaatcttgcaatgtagttcaaac

SEQ ID NO: 159350 - DNA, 405 bp, Glycine max
agcaagctttagccaaatggacttaccttgaattaattccttttttagccccttcgagcctatgatcccctttctttgtgttgaagctcattacaagccttaagtgaaaaaccatgatatcaccttacccttaaggaattttggagctttggaattgttttgggaataaattgggaataagtggggggggtatgtttcattgaaagatataatttttggccatgcttaatggtttattttggccatgcttgatgcatctggatattgcttaattcttgctctaatcttcaaattcgtactattcagaaaataaaaagagaaaaaatattggagaaaaaaaaatattgctacaaattttgcaaattcttactggtcaaaaaaaaaataaaagtataatataagtga

SEQ ID NO: 159351 - DNA, 456 bp, Glycine max
  unsure (1)..(456): unsure at all n locations
taacagacattgctggggaataactggataagtatagaacaaaattcatttntgttcaaaagaaaaaggttgtgtaaaacaatatggaaactaaaatgcgaaaattactaccttcaacttttgactggtattggagaatttcctttactctttcgattcatgaatgataactttttttatgtgcgatattttgtgccaaatcctgtccgacctcattctggtatcttttgcataattcaagacagccaataatttctagatattcaagatttgcggcgtgatgcacgttatcgaggagtgagagaagctttggacaatcttcaattgtaagtagtttgagacaaatcttttttgacagccagtcacgaagctcctcaagattcttgcaaccacaaattatcaaggaatataatttgttcatagatccttgccaccactgagttagagtgaccaact

SEQ ID NO: 159352 - DNA, 351 bp, Glycine max
atgcaagcttcttcagacaacgggcaagatccccttatagaactgtttttttgctttaaaaggcggttacataagactcttatgcttagagcaactctgatccgctaagcgcacattattgaatatcggcttatcgcatgcttttctcgctcagtggatggactgaagcggggcgcttagcgggatgaccctttgctcagcaaacatgcatagctcatccttcttccagatttattctcacgcttagccgaggaatgttgcgctcaacaaatggctcggtaagccatcagattggcttagccagtgtgtgagaatcaacacttcacaaacttgcctatataacctgtaatt

SEQ ID NO: 159353 - DNA, 456 bp, Glycine max
  unsure (1)..(456): unsure at all n locations
tggttcgaggtacttacccgttgaagatcggagaacgatgatgaacgattgttgaacgtcgaagaacgggtgaaacctttgcgaaattcctcacggaaaacgttactggaatgtttcggaagcaggtcggcttacattttcttcacggaaacaatttttccaagcaaattctaaagaaagagaagtgccaaaggggctgacccttttcttcttcacttcctcccctatttatagcaaaataggggaggtggttgccgcccagctcgcccaggcgagccaggttgcttcctccagaagcaacagccttctggaggaatattctggagggcccaagtgggcctgggtgctatttgcacccacatttttactaagtacaccccctctgctttttttggtgattctttnttctgtaaagtacggagacttacgaatttcgtaacgatacttggtttcttt

SEQ ID NO: 159354 - DNA, 395 bp, Glycine max
cgtgtcaacacaagcaacaggcctaccaccctttttgattctcttctccaagattgtaaatccatcaacaaagaaagtgcaaatgccaaggttctctctgtgaaaaaacaaagtaatatagttgctaacactctagctaagatgtcttttacggttgagggaagttattggatagattatatttcacaataggcgttagccattacctggctgatgtaaatatcaccttttctataaaaaaaacaagttcctgaatatccccattttcaaattaaatatatataaataccctttttttttggtgcagtgtgaattcgggtccttacccactaaattcacaacttgttattgacaatatattgcacactcatcttaataattccattatccataaa

SEQ ID NO: 159355 - DNA, 357 bp, Glycine max
agctttaggagaaaccattaaaactaatgttgttcctaatacaaaatcaattgagggagcttcgccgaggtgccccattgaaaaacctttattcaaacctttcaaggtagggattaggcttaacgaaatattggggacttataaaaactaaatcctttattggaggcggtggggaccatcatagcgaattacttaacaaaaatagtaagttgcttaagggcattccacatacttcccaagctttgggaaatacttccaaaatggtgacaagaaaaacctccaaatcaaataatggtatttatgaagatagtgacccacacttttataacacacctgagataggatcagtgtcacaaa

SEQ ID NO: 159356 - DNA, 451 bp, Glycine max
  unsure (1)..(451): unsure at all n locations
taggaatcttgaagaaggatagcaaataaatgggtaaggttgttaagactgaattaatgagggttattctaccccccattgatagatttctttgcttccattntgtaagtttagcctcgcatttgctaataatgggctgccacacagacctatttttagagctgacccctacaggaattccaaggtaagacaatggaatatccatttgactacaattgagagaagatgctgcctccttacaccagtcctcggatttgcccaaacacccaaattttctcttattgtagtttatcttaagaccagagaccaattcaaagcttttcaggatacactttagaattttccccgtatcttctccatatgcaatggccaccttcacgatttgaaatcaaataaagattggttggtggtgctttctcttgtgtccagcaatntctttggaagaacatga

SEQ ID NO: 159357 - DNA, 395 bp, Glycine max
agcttctccgaagggcatggttatttccatgtttcctgaaaatatctaaaaatctcgccagatgacgatctttttctttcttggaaggtaccacagggtacagtacttccacaccttcatccacaactttttcactcctactcttctttgcattcttattattgtttttcttctttttcattgtttcattttctatttctttttctttttcttgggccttcaattctttattcttgaccattttttgttcttccttttcttgattactattggatgacttgtcagctatctgctcggccagttgtcccacctggacctcaaggttcttcagtgctgactcagtgcttttgtgatatgacattgttacctgcataaactgagtcaaggtctccacc

SEQ ID NO: 159358 - DNA, 434 bp, Glycine max
  unsure (1)..(434): unsure at all n locations
ntgtcctcagatccctcttgttggactagaattagaccaaacaacattattgtaatagcatacttaaaaccaaaacttaatccgtagatccctcttgtaagactaagcttcaattctgcttcattcaagttctaaggcaacaatacatttcctaatgctaaagtcacctaactaggcacacaaatggttgatcagaccaagagcatacaaaatttaagcactaaaagaagcattgaacacaagaaacacaatcaattagatattaaaataattacatcagttgttctttagaaatccccaacaagggtgtttagccagccattacagaagaaaccctaataataatgagcttacaaaacctaagtatctctngcaaagctgctcctcttgctgccttcagagctcttttcccaaaataggcattgtggtatgct

SEQ ID NO: 159359 - DNA, 383 bp, Glycine max
agcgtacaaatatgttgtaaatccaagctcttaagcgaattctaatcaaacctagatgagataagatacgagaagatctagatgaaataatatctagatgagagcaaatctaaataatatctagagaagataagatctaagtgtatagaataaaatagtctgccctcttcaagtgcaagcccaattctagatcaagcccaatgctgcattaattcctgaaattagattaaaaacatcaaattagctgaatgggcccaaataataaaactgcctaataaatttgacaattaagactaatcagtatttaaaacggggcaaaaaggggtaagaaataggagaaaatgatggcacatcaagggctctgaaggattcattcgttgttt

SEQ ID NO: 159360 - DNA, 486 bp, Glycine max
  unsure (1)..(486): unsure at all n locations
ctattacggacctatgaaactcaagctgatgtccgttaacctaaaacatctttgttntgtaatatctcanattgggctaagcgngcaggcacacgctaagcgagtcatgcattcccggtaagcctgtggtgctcgctaagcggattttgcaggaaattttctcctgcaaaactctctaagccctatgtggcatgctaagcccaataatatctctgaagttgcaatttcatttttgggcttagcgcacaagtttgggcttagtgcgcaaaaaaaaaaatcaaaatatcttgtacttctattntggtatgtctcctacgcagcaagcttagtgcgcacttacacgctaagccttagtgttcctcaatgtttggtattttgtgttgggctaagcgccagttgcacgctaagcctaataagcttactgttctttttgttgtcaattgggctacattntggttaacttttatagataacacattttgaggc

SEQ ID NO: 159361 - DNA, 412 bp, Glycine max
agcttcaagaataatggttctaacaaactttttattcccagaaggaaactctataaataggcctcctattttaatggagagggttaccactactggaaaacccgaatacaaattttcattgaggcaatagatttaaacatttgggaagccatagaagttggaccttatgtacccaccatggtggctggtaatacaacaatagagaaacctagagaagagtgatatgaagatgaaagaagattagtgcagtacaatttaaaggctaaaaacattattacttctgctctgggaatggataaatattttagggtttcaaattgtaagagtgctaaggatatgtgggacactctacaaattacacatgagggaacaactgatgtcaaaagatctaggataaatactctaactcatg

SEQ ID NO: 159362 - DNA, 471 bp, Glycine max
  unsure (1)..(471): unsure at all n locations
ntgtagggcatgttagtttctatagaaggttcatacaatatttctctattattgccaaaccctcaataatttacttgtcaaagaaaactcgtttcactaaaatgaagaatgccttctagctttcaaactcttgaaaaaaaagctagtaaccgcactagttatagtggctcctaattgggggcatgaatttgaattaatgtgtgatgctagtgactatacgataggagcagtattagggcaaaaatggaatggaagatttcatgttatccactatgctagtatggtgctaaatggagcccaaatcaactatgcaacaatggagaaggagatactagcagtgctttatgcccttaaaaagtttcaatcatatcatgtatgttcaaagattattgtgcacaccgaccatntagctatataatatctactcaccaaagtggattccaagccaagttaatttgatgggcccttcta

SEQ ID NO: 159363 - DNA, 347 bp, Glycine max
agcttggatcatacaatttatatgctccttcttgagggggagtgttagaactaatatgtctcttgcattttgtttatggagttttatattactttatgcttggactggcctttcttgactttcctttttcctttttctctgctctaaccgcttgttagggtattctacacccctttcttctctattactcaatgaccttgtgtcaatatatataaaagtcttttggctgagtgttaggactccaactttactaaaatagaactctaaagtctcaaatctttccaagcaagattaccacattcctaaacctacatggcaataagaaaattaatgcctttttccatcaa

SEQ ID NO: 159364 - DNA, 453 bp, Glycine max
  unsure (1)..(453): unsure at all n locations
tctagctctataaaanatattctatctgactttcctttttcctcctcccccaaganctcttcactttccttcctcctaccacatgttgtgtctttctttcttttctgagtacgcactcactcacatgcatgtgtaacaactaaaataattaatataactattntaaaaccattactaaagctntttttcattaatagcgttttagcacttttattaagacaaccctaacactacaatctatatcccgtgcatgtcatcccatatgtggctagaggtttgtattgtgttgtggtcaaggctgcttacgcactagtgttcctgatgaaacactacaatttctacagttgccactttagaattttggaaaatcaactaatggtgttagcactctaaattaggtgaatatttatctgcatgctcgggttgatggagtatgaactactgcgtcatgta

SEQ ID NO: 159365 - DNA, 396 bp, Glycine max
agcttcaacattcaattttgagcgtctctttatattacgggactcaatcaaacatccgagtaaaaatttattgtcgtttggattggctcaaagattcaacattcaatttcgagcgtgtccatatattacgggactcattcagacatccgagtaaaaagttattgtagtttgaattagcttagagcttcaacaatcaatttcgagtgtctcgttatatcacgagactcaatcaaacatccgagtaaaaagttattgtcgtttgaattggctcagagcttccacattcaatttcgagcgtctcaatatattacgggcctcaatcagacatccgagtaaaaagttattgtcgtttgaattggctcagagcttcacattcaatttcgagcgtgtcgatat

SEQ ID NO: 159366 - DNA, 435 bp, Glycine max
  unsure (1)..(435): unsure at all n locations
ntgagccaattcaaacgacaatatacttttactcggatgtctgattgactctcgtcacatatcgagacactcgaaattgaatgttgaagctctgagccaattcaaacgacaataactntttacttggatgtctgattgaggcccgtaatatatcgaaacgctcgaaattgaatgttgaagctcctagcaaattcaaacgccaatatctttttactcggatgtctgattgaggcccgtaatatatcgagacgctcgaaattgaatgttgaacctctgagcgaattcaaacgacaataactttttactcagatgtctgatatagtctcgtaatatatcgagacgctccaaattgaatgttgaagctctgagctaattcaaacgacaacaacnttttactcggatgtctgattgagtcctgtcatatatcgagacgct

SEQ ID NO: 159367 - DNA, 489 bp, Glycine max
  unsure (1)..(489): unsure at all n locations
ctatcaatctcaagctggaagaatttgtagtcttccacattaagntggctataacaaagtaatgatgtgatagaactggtggtatacatgagatatctgagttgctgacatgaaaaattgcaaaaatagattttattttcaattgaatatgtgaatggtacatgggaggtatacatagaatgcacactacataaacaagaacaataatctagtctaaaaatcaggggaattgatctccctacccattctaaatatggtaaagacagaaatggcaaccaataattatgtacataaaatcctactgagttgtacgaatagaatatgttgattatgcgttcatattcaacattctccctcaacatggatggtagatatctatcatatccagattggatctgatattctagtatacattccttggtagggcttntcgttaagatgtccggtgtctggtgacatgatggaacatgattgacactcgtaatctta

SEQ ID NO: 159368 - DNA, 420 bp, Glycine max
  unsure (1)..(420): unsure at all n locations
atgcaactnnaatgaaaatataaatgactaatgtaaagccatggttatcgtgcaaaggcatgctatttatgtgcattctgccttctgaaattataaccaaaaatggccatatgtaacataaaccagaaatggtaaaaaaaatgcttttgccaaaactgataaatccttatctcaaatgtctagattaatgttctaagttcctagtttattgtgctaatttccctaaggatatatggacacggagtaaacctcacacatagtctactcacacaaagacaaattacactgcaactcaatgtacaatgcaattctggcccaaatgaaaatctagttcacataatatctatttatctgcccggctttactaaaccaattacacacacacacacacgcacacgcaacatgaatatctataattaa

SEQ ID NO: 159369 - DNA, 479 bp, Glycine max
  unsure (1)..(479): unsure at all n locations
atcaaactaagcttgatgtctnttcttgcttaagtngacttaactgtatattgacagttctcatgtaagaagagttaggtctatttcaatttgtgttatgcccccaccaagcaaagggttgttgttctctttcagtattaagattgaaaaccaacctatattaggtcaaatgaatgtattttctctttgttttagatccatttctttgttttattttctccttccataactggtatagttttgttatattcgttgttgacactttgcatgggtattaagatttagttattcacttgtagctgaatactctctcagtatgcaagtgcatttgacaattctatgctttgttaccttatgtnttaacttgacagacaaggactgggaagatatcaagtttgtggtggacaatgaagtatacttctttgttgtctcatttgtcaaggatgctagagttgggcacaagttaaaccactacctca

SEQ ID NO: 159370 - DNA, 423 bp, Glycine max
accgagctgcaacttactatgtttcgccgataatatttatagttatttctcaacgaggactgaatatagtaatagtctaattgatggggaattcacaatggtagatcccgtgtggcttatatatactctaaacctttataataaaaaaataatgcagcaaaaaataattaataaaatactctttttaatgcacttttttattaattgatttcttttgaaattcgcttaattgtgtagattttccccctatttaacgagttttacaaataattttatatatttgccatacaaaaaagaatattttaaaatattataaaaaaaaatatattaaaaatgttaggtggccatattattttacgtttatttacactaaagaattatgcaacggttacttccaaaacaaaaccatgttcttgatgtttt

SEQ ID NO: 159371 - DNA, 466 bp, Glycine max
  unsure (1)..(466): unsure at all n locations
tatgttngaggcaaannaaatatttagggatgaatagacctcttcaatgtgtgtgctaaccatctantaagatggtgtgtgacttactataaggtaccttatatccttactcattttcattcttttgagattggaggtcatttaggtccttctacgaatgctcataaagtattctagtgtgggttcttttggtctatcatccatgcaaatgctcatgcatctgtagctgcttgtgacagatgtcaacgcaccaagccattatctatgaagatggaaatgccgcaaaataacatgcttgttgttgagatgtatgatgtacgggggatagacttcatgggtttgttccttaaatcctttggtaatgaatatatacttgttgttgtggattacatgtctaagtggctggtagtagtaacactatccactatcgattcttgggtggcaatacagtctctaaagaaaaaat

SEQ ID NO: 159372 - DNA, 434 bp, Glycine max
  unsure (1)..(434): unsure at all n locations
tctatgtacccgcagaggtccacatggagtatcgcgcattttttttcttctgcgnntactcaggagacccccctcctgacgagcttaagccattatacttaagtcatttctcgcttaacttaaaaataaataaaattctccccgaatgtttgaattgtattatccattaacttcggttaaaaacaagtccagaccgccggtcatgccgtgagcacgtaggaagtctgatgaggtgaaatatggtatcattaaacagaggttatccttttatagacctgaatctgaaaatggaatccgacaatatctgtgtgggattgcccatgcttaacggattaattagtaactaatgtgaaactaaggctataatcaacttgcctagttaagctcggtcacaagaataagctattgaagtttgtcatttcaaattctcacta

SEQ ID NO: 159373 - DNA, 459 bp, Glycine max
  unsure (1)..(459): unsure at all n locations
aaaactaagctgaacaaaccgagagagtggaactaatttggagttattactagctatgagncataatctttgcatcaatctctaaatnttagaatgaaatgtataaatgaggacatgatgaaggccatgattatgcatacacaagccttttgaccaaaaagcttaccttgaatgataattgtaccctttgcaccctttgtgagttgaatgattttgtcaataattgaaccttgaacctgaatgattatctccagataccttgtttagactctatgagagcatatggttcaaggcaaattcaccccaaatttgggggagtggaactgaatgggatgtaaagaaaaataaaagattaaacatccacacacacaacaaataagttgtgtgttaataatagaaagagagaaaaagctatccaagaatatgtgtgttgatgtaataatgtcaaaagcaaatgga

SEQ ID NO: 159374 - DNA, 404 bp, Glycine max
agcttaatcaaaggtctcaaattcgagtcctaactcttaagtatataatgcattaaataattaaaagaaaaattttatcattcataataatcctactcaactaaaaaaaatactcataatcttaacaaaatgtaatgtagcaagtcataccattgaaattaaagtccaaacaatataccatgtctccttgaaattaaatagactgagccaattgcagtattgtacattttctattctatagattttttatctttgtttctcaatgataaacaatgataaaaatatagacttttcacctttatcgttatcacacgtatattgttgaagaactcaagggactgttgcgcttaaaattcaaaacacaaatacaattctaatatcacacaaattcatttttaatcaat

SEQ ID NO: 159375 - DNA, 455 bp, Glycine max
  unsure (1)..(455): unsure at all n locations
ntaagtccatntagaagcacttgaagtcttccaaacatattatccatagattctgcttctttcatggagaagctctcatagtgtcatgtcaggattgtagattttcttaattgaacgtcttatattccttcataactgatgctcaatgaatcctatatctcttgggttgtcttcagtctaaagatatttttatactcattcctagataaagcacgtgtcaaagtataacgatcttttgtgcttagctatattatagcaaggtctacttctatccattctactttagatttaagaatgagtataccttcaattgtgatgatcagccaaagtctgtactgagtgaacttaatgtacatctccattttgttcatccagtanggatacttgtgagggatgctccttcagcaataaactgactatttgttgtgtcatctaccattagaatctttttccct

SEQ ID NO: 159376 - DNA, 410 bp, Glycine max
  unsure (1)..(410): unsure at all n locations
agctagagnattgatgttttctactaatatattgaggngtacactgctttgcctgagaataacaattgcttgaccacaacaacgctggatgcggtaagggacaatggtcttttaaaaaaacttgttgttcatgaacaaaaattatttcttgcagtgaccgactcaaatgaaccggggaaggcattgcataattgttatactaactatattcaatgtacctgaacaaaatgatttccaaacacgtgaccaacacatattatgctgagcccataaaaatcaggtggtggttgacttcttaaaggataaaatatcatgcttttgtgtctggacaactatacaaggattacgttataccgtgatgcaatcacatatcccatttttggtatatccatccacttgcccaaactaac

SEQ ID NO: 159377 - DNA, 461 bp, Glycine max
  unsure (1)..(461): unsure at all n locations
tgatcaanacaatnatctaatcattccaatccattataatcttacaattgctcattcaaatcattctcaaactctcattgcatgcanaacaatccactgcatatcattttcaatcaattcactgttcaaacaagcttttatagaagcaatcaactcaaagtactaaaatttaaataactgaagtttaaagaattgaaacataaaaactcaaattaaaatgactgaacataaatcataaaataactgaaaataaactaaaatgttcaaaatgcacaaatttaaatgtccttctcctgtggttgctcctgtgcatgctcattaagatccaacacctgagcacctggtgaatcctgagggataggctgctctagctcagatgctggtgcagatggtatggcatcatctggtatgggtgctggngatggctctgggatctggtatatggaagtcccttcctcctg

SEQ ID NO: 159378 - DNA, 410 bp, Glycine max
  unsure (1)..(410): unsure at all n locations
agcttagcattcatccatgacagacatgtgtgtttatgaagtctttctcactataataataagaacgtaatactacaccagntcaatttaatactattctatttttttatcaacaaatgttagttgttaattttttgttaagagacattttccgatctcctttaaccacccaaataaccttataactccactactctatttatgtgaaagaaatctctacaaaaatagaatataaatgttattcaatgtaaaaaatagaatacaggaatccaaaatcgaattcaagataaatgagcttgggtagcttgctatttgactactctatttgccctattcttgatcaagttctctgtttcaatataagtaaaccttggtgcagaggagttgatttatcctcttaaaccttactg

SEQ ID NO: 159379 - DNA, 466 bp, Glycine max
  unsure (1)..(466): unsure at all n locations
cttgtaggactacagtcgtcatatctcaagttaatgtgggatctcaacaatannattttttttcaaaacctcaattcggtttaaagtacagaaggcatgccacgtcccattctatcaaatgttcatattcagatccagaatatatttgaagtttgcaaataataaattatcaaattttgttgacagtgtacaaggacaagtggaccaatatcttccatacagtactacaaggacaagtcaaaccacaatcttgtcacttagctntcctccaattataacacaatagaggctaaagggtaattttgtcacaataccaaaacattaagagattacaatataattagagattaagtttaatacacagctctgccagtacaaacagacaatacctgacaaggaaagacagcacaaagtagccaatgcccgcaaacaagtctactacaacctcatttttacaatctagcct

SEQ ID NO: 159380 - DNA, 262 bp, Glycine max
ctgagatccacgatgatccattgtagagtctgagctgataatctgattcttcaggcagtttcactgtgtagtttggtaattcaatagcgcgcacaatgttggcacaacaccaaaacaatattgccgtggacaaatagtaaagaaagcgcacgagtgttgtttccatctctgcttgattgtctcctcttctgaactatgagattccactttaaatatgcataaccaaccagcactacacagacacaataagtggggggtgggg

SEQ ID NO: 159381 - DNA, 472 bp, Glycine max
  unsure (1)..(472): unsure at all n locations
tctaacagtagacataagaagaaagagcttctgactgtcatctatctatggaggcagnnnaaatctgatttgactatgaaatgggcactcgaaggcaacaaggacggtgtggacaacacctgtgaaaaaatggcattatcaaggagaaatgggcccaattttgtcagacccgtacagatcccttgtgggaggtatgtactttgtaatatgaattgttttccactaaaaattcagttcttataatagattgtagcaatcattttcattaatgttcgatttttgcaggatgtgcggaatanagcacaggccatcatgaagcataacattctcccccacgtgctgtctcgtggggggtatgaatatttagaacanaagctgatggctgagaagacaatgaataactatagaaagctactaagtctggaagcactganggcgtcattaaccctctatctccattagaccacacgtg

SEQ ID NO: 159382 - DNA, 317 bp, Glycine max
  unsure (1)..(317): unsure at all n locations
agcttactngcagagatttctttatgggatagaccgataccagctgtgttgatccattgagatagtaccgcggctattgcaaaaattgagaaccgttattacattggtaagaaatgacagatacgtcgtaagcacaacactgttagagaattactctcaacaggagctgttatagtggatcacgtacgcactgatgataatttaacagatcctttgacgaaaggattagctagagagaaagtccatatcacctttaaaagaatgggactattgcccttactgagatgatcattcatgatggtaacccgacctatatg

SEQ ID NO: 159383 - DNA, 457 bp, Glycine max
  unsure (1)..(457): unsure at all n locations
taagtggtcactaataggaatgcttaagcctttgtaattatttctataagcttaagtggtaactattaagaaggcttgagcgagctatgcaaagtacgatttttgaaaaacacatggtactccaagagtgataaaatgagaattggttaattatatgagtgtatttatagatagtgtggagttgattttatgagggtatcaactaattcactttcatgtgatgattntggtgcttaattgtaagaattcatgacgttggatgtcttactatgcttaatgaactattgatgggttcatgagtatgataggtgaactcttatgatgttgaaattggtgaatacttatataattggtgtatgttggttgagttggtacatcatgtatacatgtataattaacattgcatatgaatagacgcgtaagttaagagtgcttggtgagcccttatcatggtact

SEQ ID NO: 159384 - DNA, 401 bp, Glycine max
  unsure (1)..(401): unsure at all n locations
acctgcngctgcagcttttatccaggcaattcttgggggtgtagctccttctttcttggcttattccctaggggatggggcctcccctctcctcttctcctttgccttccgctgcatctccatggtgaaaaatcaccattgaaggacctcattgaagctcaaagatccagcctccatagaagctccacaagcaagcttccatcaagtggtaatcagagcacaagagcttcaagtaggtgctctttaaacctccattaatttttttgctttaccttctcttccattgtttttttcttcatttttctccatgtatctcctcacatgtcttgttctaaatgttgttaacatgattctttaaaatttgcaccgattaaacttgctatagaaattagatttgattt

SEQ ID NO: 159385 - DNA, 442 bp, Glycine max
  unsure (1)..(442): unsure at all n locations
tatctccaataaacttcaatctagatgggatggtccttttgttattactaatgtntttccccatggtgcagntgagattaaaaaggaatttactagcaaagtcttcaaagtgaatggtcaccaactcaagctttggtcttgccaagtagaggaatttgtggcaaacctctctttggtcttgccaattttatgtgatgatgtgccttgaatggaacttgaggagtttccttcccttttcttttatatgttgtctctttgtttgcatttcattacatgatcacattgaggatcatatgcatttcaagtgtggggggagggtttagaaaaatctgtttttgttttctattttcactatttttgttatgtctgtttctatttagtagtattctattttgtctatttttctatanttgtatattggttctattttgttggtcttttc

SEQ ID NO: 159386 - DNA, 442 bp, Glycine max
accaactatatttaacacaactgcaacgagagaagaagattttttcttttatttggcccggggccgcacagctcaaaatttgatgtacaaccctgatttaatggacccaaacatgcaaaactactagaaaaagcattatagaccaccaattctgtctctaaatgggtaataggtctacatatattagagaccgaagaggagtagtctgaacaacccaagtcgatacgtgtgtttgatatgcattttcattttctggcctcatttgttgctataatattctgaaaattgctctcattttcaaaagattaaaactctgaaaatatgtgtggctcgattccttatcttttgctttcagaacataataacactgacaaattatgatataatgactgtctgtcttttttattatatatttgctaaaattaattttttgcactgcgtt

SEQ ID NO: 159387 - DNA, 118 bp, Glycine max
acccacagaacaggagacgcgcgttcgcgaacgagcgaacacaatcccacacccacaaagcgcagatgacacgccaaacgagaggacacgcgaatcttaaactaatcgagcaaaagaa

SEQ ID NO: 159388 - DNA, 411 bp, Glycine max
  unsure (1)..(411): unsure at all n locations
tgcacgctntgattcaaatgcaaacactgcattttctacncacattcttactttatataaaggcccacgtgcaaagtcctatatcttaaattttaataatatatcaaaatatctatgtccatatgttagaatctgcgctttattgatcaaaactcacatgatttccgtctagaactgtcatgtgttccaatttttcccctatggtttttttcttcactatgtttccatttgggtaactctgacagataaaaaacagcacatgttatttaactttcaaccaactgaatttataaatattccgcggccgcaataaatggccaataataataccttcttctgaaacacgatctctgaactacaaacacatgctaaccagagaccaccactatgtttattattcgaatacattcg

SEQ ID NO: 159389 - DNA, 280 bp, Glycine max
agtttacataatttccttcttaaagacttatattttcttctttgaatctgctggcatattaaaaatattaaatctcattttcttaaaacacataaggaaaaaattaatatcttataaattgcttcataaactaattcgcagtatcatatcaaaatttattaaaaattaaatataatatttatttatttaatcattattctttattgaaagttaatatttatttattttttccactatatcaattttaattatatccatatttaatatttattatttaaca

SEQ ID NO: 159390 - DNA, 312 bp, Glycine max
attttgattgattttattttgataactttacccttggcatttcttttcatattttaataatttgaataaaaaaaagtttcaaccacctttttttaaaaaaccgatgttaaaaaaagcacggtggcattcttgtaaataagttcagttatttaacattggttttttaaaaacccgatgttaactacttgatgttaacaatggttatttaaaaaaccaatgttaacatcaactgggtaaacatggtcttttaaaaaccgatgttaaccaactgatgttaacatttgatttttttataaaaccgatgttgggtta

SEQ ID NO: 159391 - DNA, 475 bp, Glycine max
  unsure (1)..(475): unsure at all n locations
gacctatgcaatctcagctaagagcgtgtaccagcatggcatattgttaacacttttgttgtgnccaccagcattggtgacatctacctcgccatcattgggggcgctacttgagctaccagatttctccaccttcgggtgtattcttaaagatacatgctccttcttacacatgtntttgagctacatcctatccggagctatatcacaattgtactaatactgcctaatgaaggccaccattaggtccttcctagaatggacccgggaaagttctagattattataccaggtgatggctgccccaataagactttgttggaagatatgcatcaacagtttctcatctttcgcgtacgcccccatcttccgacagtacattttcaggtgattcttgtggcaagtagtccctctgtatgtatcgaaatctggcaccttgaacttcggagggatgacaacgttagggactacgcac

SEQ ID NO: 159392 - DNA, 367 bp, Glycine max
agcttgagtgactatatataatatagtatttaacagtaaacactcaaatgcttcttgaaagaggaaatttcatttctctttgctgtttccacaatagtagtcagtgatttatagtcctaagttgagctacaagtaacatgacaaatcatagagatgatccatgcagctaaataacatgtgcgataaggtgatgctatacattctgctttaccatccatttgcatgtaataattgtatctagtataataaacaaataattaggtggcagtgcccttataggacaaatcacttttaatgtttggcttcctttatttaagagacttgagcaaatcataaaattgttatgcaacacattcaacattttaat

SEQ ID NO: 159393 - DNA, 458 bp, Glycine max
  unsure (1)..(458): unsure at all n locations
nttcaatntaatgaggttgaacgacacccctgcttggtatctaaagcgagcaatatattgatgcaccttcaatacttcattcttatccattgactcttttatgttcatttgcctcaacatctccatttttctctaattgattgcattttctggattcttacaaaatttgtccattggtccttttttagtcccacactttgtctttgcggctaaagcagtagcattacaagagtccgcaaactcttcatcacttccatcacatccaattggttcaccaaattcataatctcttatatttgtcacattaccactgccaaaactattgtaagtggtcctactctttntgttagccatatattccttcagctcttcgactatatatggtggagttttcttgtaagatgcaacgttacccgacttcccaatcaagtgttctttggctctggggtattcctcct

SEQ ID NO: 159394 - DNA, 374 bp, Glycine max
ctaatactactaaataatagaaaaaatgaaaatatagcatagctcatatagttactcgagaaatttctagctcgatatcaagaaatatacgttaatacaaaataaaaaaaatatccttagatattttacgaaagagaaaagatatctgtggagatacaggtatttacttctatactttccacgtagttttcattttgtgcttccaagctagagaagaagaacatttcttccccaagttttgtcccctccagtcgtgagtttattcaaataaaatatagatcttggtcgtcttctgattcacctctcacacaatcttctttgtaatattaataatgatagagaccacatactaactttctcatatgtaaaataaa

SEQ ID NO: 159395 - DNA, 375 bp, Glycine max
  unsure (1)..(375): unsure at all n locations
agcttattgcaagaaattattttgtaatttatanttatgattcagatcattatagtaaatctcggtggataatatcttgttctattatgtattagtccatataaaactgttatgtcgattgtattaaatgaatcaatcttactcacttccagatatttgataatattctgctaattgccttacatatttggatgaatcatgatataaaatagtagttctaagaaaaaaaaagatcaatatttaatgggtaaccccggtattccaaaccattcatgaatgggttaagtttcaaaataaattttgtaagcttaattgaatcaaacccatcaaatttgattgagttgggtcctgaatttggcaaaactgatctgaatt

SEQ ID NO: 159396 - DNA, 441 bp, Glycine max
  unsure (1)..(441): unsure at all n locations
taggtaattaaataaaattcgattaattgtttatataatctgttcgaaangctataatcttttatatatctaattatagtgggtaaaaagaaaattgcatgagcactgtaaaaattacaactaatgtagtactgatcgtgcgtggtacatgtgtatctgaaggagtaactttcttctctcggtcaattgaccatggactgttcaacatgtgttacacgtttgacattgacagtttattttattttatttatttaatcggtggcatcttatgagttactctacttggttaactctaaaactttttagtgtttaatattttgttttagtacttaattaattaataaatcttctatttattttataataaaataataaatcttattttagtttcaattaataacaagtgaaaatttttatactaaatagacataaattattaat

SEQ ID NO: 159397 - DNA, 382 bp, Glycine max
  unsure (1)..(382): unsure at all n locations
agcttctcccctatntttttataaatagggggaggaatgaagaaggaaggggttcagccttcttggcacttcgtattctcttaaaaattttgaggaaaattgtttctgtgaagaaaatccaagccaaggcgcttccataacgtttccgtaacgtttccgtgggtaattacgcaaagattttcaaccgttctttcgacattcatcgttcatttttcgttttcttcggtcttcaactggtaagtaccccaaaaccgagattttcaattcattctacgtacccgtggtggtccccatttgtntcatgtactcttattctcggcttcatttactttccgtaccccctttttgacgtgcttcagtcatctatttaagtcatttttcg

SEQ ID NO: 159398 - DNA, 449 bp, Glycine max
  unsure (1)..(449): unsure at all n locations
taaaggaagtgaaagaatagtatgggcagaaatgtctccgtattgattgggtaaattgttcccgaaatccctgaaaaatgtaaagatccaggtacattcaacataccttgtattatatggaacagtaagtttgacaatgccatgctagatttaggagcttctgttagtgttatgcctctgtctattttttaattctctatctcttggtcccttgcagccaactgatgtggtaattcatttagctaataaaagtgttgcctatcctgctggtttcatagaggatgtcttagttagagttggtgaactgattntccctattgatttttatattttgaatatggaggagggattttctaaaggatcagtccccaccattctaggtagaccttttatgaaaactgctagaactaagatagatgtatatgcaggcacactatctatggagtttg

SEQ ID NO: 159399 - DNA, 125 bp, Glycine max
accacccaaccaaagagacaccaaggcagccaaaagacactccaaaaaaaacctgccaccaagaaaaaaaaaccaccaacaaaggaaggcggaacaaacccacttgctccgcaaagaaaaaaaga

SEQ ID NO: 159400 - DNA, 337 bp, Glycine max
  unsure (1)..(337): unsure at all n locations
ctcagctcgctgggagctctatggatgtggatctcnancttttatatgtccttcatggtgatttttcacctgganatgcagtggtacgaatatgataacaggagaaaggacgctccatccactatggaataagccatggaagatagagcttcgccaccaacaatgtgccttggataataagctcggagaggatgattcaatggatgagaacatagaggggggagcacaaaattgaagactaaaaaggggaagagaagctgaactttgagttgtgtctcacaaaactctcattcttcacacatacaacaagcgtaacacaagctcctatatatagact

SEQ ID NO: 159401 - DNA, 395 bp, Glycine max
agcttgttgtgatgggaatatttaacactttccatttccttctttgatctcattcaggttagttatcttcttcaccctttttacacagtcaattaatattaagcgttgatgtttgtgtcttagtgagtatgttgaatgaatcttttagttttatatgcacagttggtgtagcaagtctagatcttgatcgtataggtaattgccaaaggggagttgtgaaaaaaaaattgtttgatttaacctatgcatggaaattacatgcaattaatgttaattggtattgttgttggggcttgaaaaaagttctatgacattttcttgtgttaaaaaagattcaggcaatttttggaggtcacatccaattttccattctcaagttaatagactttgtgtac

SEQ ID NO: 159402 - DNA, 485 bp, Glycine max
  unsure (1)..(485): unsure at all n locations
gacctataaaactcagctntgaggtgcgtagcccaccattntccatagtagaatactgttaatgtgtctactatcattgtcatcgntnttttcgtcattgaggtgccacttgagctgccaggttctccacctttgggcgtattctttgaaagatccgtgcccccttttttgcacatattttgtagttgcatcctatctgaagccattataccgacactgcctaacgaaggcaaccattaggtcctcccaggaatggactcgggaaggttccaagttagtgtaccaggtaacaactaccccagtaagactttcttggaaggaatgtatcaacaattcctcatcttttgcgtatgcccccatcttccgacaatacatctttagatggttcttggggcaagtaatccccttgtacttgtcaaagtccagcaccttgaacttggaggggtgatgatattgtgtattgggaacaactcttctaggttagc

SEQ ID NO: 159403 - DNA, 371 bp, Glycine max
  unsure (1)..(371): unsure at all n locations
agctcnattcatttacggttgcatgaggatggtatcctggtgactaaggacaangtcaaaataaccttttttgtcctcttttccactcctttcttatggagacaatcactgttagattccttttttctttaagggattttggttgactaaaatataatgtgagcggcttcataggctacgcattttcgcattcatttactttgctaaactagtgcacttttccatttgtcttggatgatgtgggatttgctataccgagtggggagtttaccaatttgcacaagcagtaatataaacgggttttccaagaatcatgtccacagggaattggttatacttagatgacgtatattccaattgtaaacattttc

SEQ ID NO: 159404 - DNA, 442 bp, Glycine max
  unsure (1)..(442): unsure at all n locations
acccatcgcatgtgggactaggtggcggtcgggcgatggtgcacaacaagttttccacatccacaatgcgtgcataaatccaccatcccctgttgcccacctccaactgagctcacgtactcccacgtagcccatatcctcgtttctctcaacaccgagtccccatcaatcctcccaagcttccacaacatccaagcaaaaccacattcaaacagcacagctatcacagccaagcaaaacagagcaaaggcataaaactctgccaaaacaccaaccaaatcacagcttttctcacttaaagaccccagtaacaattccttcgatccaattcgttaaccgttggatcgactccaaaatattactggaagtctatagtacataagcctacattttgaccgttgggatctattagcanacattcagaactcattctgcactactc

SEQ ID NO: 159405 - DNA, 400 bp, Glycine max
agctttgtgaatgcacttaatggaacctccgccatagtgattttaaccaggggatgtccatgttgtgcaccatcctaaccaatctcagaaaccggttgttgttgctctgcctattgttgcctttgttccccaaccacatcaactaattgtaatagaatatctttcatatttttcatattagccatcaactgagctagtgttgggttcccacgtgtagctctaggaacctcaacctctaacattccaccaccactaccaagtcttccccgaccataaccacgaccacatccacggccccttggggctacattttggggttgagtagaagcctcgtcagagactggctcaccaacacgcctattcctgggtggcatcttaacctaagacaatagtataggac

SEQ ID NO: 159406 - DNA, 474 bp, Glycine max
  unsure (1)..(474): unsure at all n locations
tctaaagaattaagaatgagatgtggctccatttgcaacctgatctttacgtagtaggcaaaatatttcgcagtccagggattcaaaactatttgtaagtgtcatgctattagagctcaaccatgaagtataattacgtatattaaatttaatttatttttgacccgttaaatattttttaaatccgtcctctcaaagagtatatcaagatcttgtgaaagggattatgtaatttaccatacagaaatccatgcgcgtaattttttgaacattttcaagtagacttataagttaatttattttagttcttacattatgtaaactttntttcatataaaaggtaatttataactctctattttttataaccatgtattgatacnngtattattttacaggattaactctctatcacacttgattaaatgacatagatcattatcttatgtcanctagtacgttaaatgttaatca

SEQ ID NO: 159407 - DNA, 349 bp, Glycine max
  unsure (1)..(349): unsure at all n locations
agcttgaatctanaagttttgtactccgtatacagcccggagatagaccccttaaactgcctacgctttgaaaaacctgtaaacatgcttggggatatcgtttgttgtgactaggtagaacggctcttgctgtgggtaactacgcatatgaaattaaccttatctcttttgccccacataggccgcgacaaaatgaatagttgggcaatcatatcttggctcatcaccaccatgaccttggacattgtgacaaaaccaacgttaaaggacatggagaggaagaccaagggcatctggtacaagaccgtatcggatagaaataagagcgatctcatggcagcgagatggt

SEQ ID NO: 159408 - DNA, 374 bp, Glycine max
  unsure (1)..(374): unsure at all n locations
agcttgctattatctatattaatgcncgtttacataatacgtaaaaagaactttctaatattaacaccgtagacaggcgtttggaacgaattttggaacataatttactccacattaataaggacacatacaacctagattggacgaggttgatcacatctttacccctatgttcaggcgcacgaaaaaagtaacattcctttattattttcagaggctctattaaacctgactttgcacaataaattaacccagccatgaaagagcgagagattctcacccaggcttaaacactcatacatataagctggaagtgatcttacataactgccatctaaaccccccggatcaatttatattagctaacactcatg

SEQ ID NO: 159409 - DNA, 446 bp, Glycine max
  unsure (1)..(446): unsure at all n locations
tgaaatgcgagataacgatccacgacagatgtttatctgttctcacgcattcnacttatagtcgagagtctgccctctctgcaagtgcgctgccgtgaaccttccttttgattagcttgtctacccgacgaaacgtgtctgtaccctactacatactgcagttataagccaccaacaccaactgatgcatttcaatatatctctgcactctattggcggactataacgagccatgacattcatgtgccgaagaccacaaccgcgagcactatcagcatgctgtgtcattctgggcatcgtctcactaccggcgccatcatgatcatctttctctttttcattgatgacgtgaaatcaagcaccatcattcatgaattcacggaagcccccgcattctacaacgccacagaatgcgccttcctcaccgactacgatgaagacagtaa

SEQ ID NO: 159410 - DNA, 389 bp, Glycine max
agcttgggtcgaggtacttacccgttgtttatcgaataactatgaaaaacgaatgaagaacgtccaagaacgatcgaaacctttgcgaaattcctcacggaaaacgttacggaaatgttgcggaagcgcctcggcttaaattttctttacggaaacaattcttccaagcaaattctaaagaaagagaagtgcctaaggggatgaacccttttcttcttcacttcctcccctatttatagcaaaataggggaggtgcttgccgcccagctcgcccaagcgagccaggttgcttcctccaaaaacaacaaccttttggaggaatcttttggagtgcccaagtgggcccgagtgctatatgccccccatttttactaagtacaccccctctg

SEQ ID NO: 159411 - DNA, 463 bp, Glycine max
  unsure (1)..(463): unsure at all n locations
taagaagatntgagagaagcccatcttgtgatgaattcagtgcttcctttgaagatctcaatcttaccctgttgcagaaacttcaagaaggccttacatataaaacttatcacaggctacaatgaacaaacaactttaaactgaagctgcattagagtctacattataatggtgaagacatgaatctgactctacgaacatcataacggtttagaatgactcaaaatcacttgaaaaacattagaataactttccatatgctttgggtatctaatcgattcatgcgtaaccaaaagatgtgttctaccatacacagaacaatgactaaagaaagacacaatcagatcaatattnttcacaaaaaccctcgttgtgttagagataggtggagcatcaacatgagcaacatggaacataaagaacaaccttatgctaaagctcgacagtcaaggatagttggtat

SEQ ID NO: 159412 - DNA, 406 bp, Glycine max
  unsure (1)..(406): unsure at all n locations
agcttataatgaataagtatttgcccaattaataaaaatattaaatnttttaagtaagttacacaaatgagttatggtaagcttacgctaattaggtgattttggtgtttcccaccttctctaaaatggccgaattttatctgtgatggggtcagttaccgacaatagtctagttgctgcatgtatggaattatggcttaaggttggctcatccattgggaaaaatggaagcttatgctggaaccagaattcctcaccacagtcaggatgcttgataaagggtgtagtgatgccaacatgtgtgcctctttacttcttggaataaagactatactcaatatggacagggatgtcaatggtgtatgtggtagagaaagaactcttttgtcatggtcatgccaatgtg

SEQ ID NO: 159413 - DNA, 464 bp, Glycine max
  unsure (1)..(464): unsure at all n locations
tgcatggtggcaaagagacacattctgtgctatgcttcactatgcctggctagaaaaacaattcctctacctgagtatgagccagaacacgaatgacagttgcatacttcttcaatttctcgagctgagattcaatatctntctttccctcctcggtttcatatntttttgaatatttggtaaaggccttcttttntgatttgcaccagtttttgtaaaatcgtctcttgacttcttcacttagatgctgagcccaaatagtattgagtgtgcgaaggccacgaggtgtcttaacatatcccacaactccaacaacaaccaatggaggagtttcaatgatagtaacagcttcacatgtctctttcttgtgaagctctacaaacagcatataatgttatcacgtacaaagcaagaaacatacaagccacataggtaaaagaaaataatagcccaagaattgatca

SEQ ID NO: 159414 - DNA, 252 bp, Glycine max
agcttgttaataggtggattaaaacttcttttgggcaggtgatctaaactaacaaaagacttgttctattaaatggttttttgtttactccccaacataggaaggggggcttggcctttaacatgtgataaccattaacaaagcggcttccctcaagctctgttggagcttcctctattctaatgacacttgggctcaattttatagggcttgattcattaaaaggaatgaaaaacttttttttgtttaaaa

SEQ ID NO: 159415 - DNA, 306 bp, Glycine max
tacgtgacactataaaactcagcttcaaggttagaaactagaaaaccttggttgcttctttttccgattattactcagagatctctccgcgtgtaaagttgtaatgaactgatggattgctcaacagctggtttaatccttatcaaaactctcgcctttttaactctgatgtctggttatatgaccctcttcaaaagtctttactgctattctaacgttcgcctatttgaaataccaaacacacttgatcgctgcatcttttgactatccaaaactacctctggtattgtttcctaatttggcatt

SEQ ID NO: 159416 - DNA, 413 bp, Glycine max
ctattacggacctataaaactcagctgaatcagagttagacgcgacatacgtttttttatttatctacctaaccgccgtgaacgtgagcgaataagatgatctaaatggctcactgttacggaatgctgagagcccgaaagtaacaccctatactccacctatggagctcgacttggcttaccctacagctgatgactgtgctgccaatatgagcattagtataactagaactacctttattgaataccactctagctctattcgatgaatacattttatatgtgaggcagatcacctttgactgaggccttatttacactaactagcttgtctagctgcgtgacaggacggtgctattcttgaacactcccacatggtcgatgtcctattcacgaacatggacctgttttct

SEQ ID NO: 159417 - DNA, 339 bp, Glycine max
  unsure (1)..(339): unsure at all n locations
agcttgtttcatntgcattgtagactattttaaaaaggaatgttgtgagagatgtccttgcaagcacgccttttttatgaatttaaaagaaaacggggaaattgtcattgttattcttcacatttatgaattgacttttactggcattgattataatatgttgaaggagtttaaaatgcgtaacactgattttcataattttgattaagaggtttaattagattgcaagaatcctctttcccttcctattgaagttccattttcattttccttcataaaacacacatgaggttcaataaactgctcatttttgggttataatgcggttctattggtgat

SEQ ID NO: 159418 - DNA, 439 bp, Glycine max
  unsure (1)..(439): unsure at all n locations
tcaaaggggcagcgtcagcacaacagactgcagaggatgtctacacagcttacgcaaataaggcaaagagcagttcccaaaagaaagtctatgcggaagatagcccaaagaagacccctgcagatatggctgttgagctggtctccgctgaccatgcgccccgatctccattacaaacaaacaaaagtattggtgggccggccccgaccaatttcgaaggaccatgtgccctgaatgctggaagcaaccacacaaacaacactcgtgaaaagataggcaccgcttgggataaatatatcagcaaggaagatggtgagcacgaagttgatgaaagtgggccaccgatattgggcctcactaacctcaacacaccggcaatactaanaaaacataacctgagcccaacaactaacaaaaatgataacagggcactgccgat

SEQ ID NO: 159419 - DNA, 384 bp, Glycine max
acccgggatcctcttaggcacctgcagctgcagcttataaattcttctctcatttattctttgaacacttgactttatcttgttaaggtttgagagttttccagaaattttaggatagatggaaaatataactcagcttgagttgaagtacactcctttataagaattcccattttattcagaaatcttgctcgacttcaagatatagtgctgggtgactgtggaaatgttcaactaccgattatcatcgtcatgttgccaaaactggctcatatttctgctctggatgcaaaggggtgctattgccaaaaccagacaaggatgaagaaaaagtgagcccaacgtgctcaaaagtaaactgtcttgtctctaggctgaatctat

SEQ ID NO: 159420 - DNA, 432 bp, Glycine max
  unsure (1)..(432): unsure at all n locations
tagattatttataattggtggattagtattacttatttaattatcatacgggtgtgctttgtttgatagagataaaagaaaggaaaatatttgcccaagtagaaggaggttgacaatgaagaagaaataagagatcttgagcgtgaggggtgtttggaaaaaatcgttggtcattgagaattttgtgattcaattcatggatccaagaatgaaaggtgtgagtcaaaatgttttctttcattgtagtgcttcactaactgtgccttcttgtatgaacaataagtacagtgatggtatgtgatgtgtgttggatctaattacaaacttttatttgtgtggcaacaacaacataaaatgtatttctcataaaaattgattatagacatactttaacatctagatctgagnagatagtacagtgagagatttttt

SEQ ID NO: 159421 - DNA, 247 bp, Glycine max
tgctcaatctgtatacaaaacaatgcttatggattgggaattcataagaaaaactatttcattctccaccagtaaccctattttttataatagaaggctttcccttaaacgcgaaaacacatattggggggactgatggcgtgaagagcccagacaagatatattctctactatgagccccgtgagtgatctctacctcagcctgacaaaatacattcctctctttgttttgttcttgacaagccac

SEQ ID NO: 159422 - DNA, 393 bp, Glycine max
  unsure (1)..(393): unsure at all n locations
tgcagcgtgcaagcttgtagccattagaagagaatgagcatgcttnttgatatttgactaaaaatgctcgttagtgcgtcagattgattgggaaggaatgcattaaccgtatcccggtgagagtgtgatccttaaattttgagagaaatgactatcatctagtactgatttttgcatgaatctctaaagtatggatttgaatgcatgaaattaaggatgatgaaggccatgttttattgtgatagccacttagccaaaaagctgaccatgtgcttaaatgaattatcgcttgtacccaatttgagctgaatgaattattgattgattgaaccctgagcctatacaatgttatcttctgctaccttgacttaggttgtaagagagcatcatcta

SEQ ID NO: 159423 - DNA, 308 bp, Glycine max
actaatcactcgtaatgtttcgtcactataacttagtaaattaattattataaaaattaataggacttatcattatctgcatatttatacgtctttgagtttctcataaaaaaacccggcggctacaatgtatttataaatggattacacttgtcatgtataaatactaatatgcatgtaaattataaaactaatatcttcatttggatctatagcctcgataaattatctatttggaacaactttaaaaaatataaaacgtggtcatattatataattaagattcaacctctaaatatataaacgag

SEQ ID NO: 159424 - DNA, 379 bp, Glycine max
  unsure (1)..(379): unsure at all n locations
agcttagtggggagtctcaggcaaagatgttttattatgttaggaaggngtggaatgctctaatacatgcttatgcattcagtggttgttacgaacgagctagagctatttttaacacaatgatgagagatggcccttctccaactgtagattccgtaaatggtctattacaggctttaattgttgacaggagactgaatgagctttatgttgtaatccaggaattgcaagacatgggattaaagattagtaaaagttctattcttttgacgcttgaagcatttgctcaggcagggaacttatttgaggtacagaaaatatacaatggaatgaaagctgctggttattttcctaccatgcatgtttacagaattatgct

SEQ ID NO: 159425 - DNA, 201 bp, Glycine max
atgaaccatataaattcgcttatgcagagtcctttattcaaaaaacttatgtatagatatacgcagactacacaccaaatgtgattatatttcagacaaggtattggaatagatggaaaacatgattaaggatggcatgtatatgttcttgcaacaaaatattgtaaatgaaaatgccaaatattcgaagagatgcccaat

SEQ ID NO: 159426 - DNA, 231 bp, Glycine max
  unsure (1)..(231): unsure at all n locations
agcttataagcttattaatttaattgaaagtgttttgntttattaactgataagctagctaataatatcaaatgacataaaattacgtgtttaatatttctaattaaacaaaaaagaaatccaagtttcataataattaagaaaacaaatatatcatctagtgtttgactatttgtaagaatgttaaaacatgtataaaagggttggggggggggggggggattaaatata

SEQ ID NO: 159427 - DNA, 346 bp, Glycine max
tttctcaaggtcataatttatgtaaagtgcgagaaaatatagagttagtagactaaaaccatgttacacatgcggtatcttggttatatagacacagtagtattgattacacatatattggaagaatattcaatgtctctataatcagatatcagattcctatcacagcatttatacattaaagtccgtgatttcaacactcccctcaatctaaagctttggtacaagaaatattattcccaacttatagataaaaacatataagtggggttcaccaaaaaacaatgttttgaatgacaactcatggatgttggcgaagttggagaaattgctagatagaaacatt

SEQ ID NO: 159428 - DNA, 374 bp, Glycine max
agcttgatgctgatagacattatcaccatttttttttatcttcaaattttcttacaataaaacaaaaaatcataaatttgaaaaagacatttatgactgtcaaagagtgcctactaatttctaacaggtaatctatcaaaattattgtgggaacaattctaagtttctaacacaacaagccaatacccctacacaaacttggtccaaagaaagaaacaactcatttgaatattctaactatttcagtgttctccctggcctatatattataaatagctagcccaccaccacaaaacaatctcataatcataacacacaacatcttatcctgctgaacacaaaaaattaaatgggtttcaatttgatagggagct

SEQ ID NO: 159429 - DNA, 430 bp, Glycine max
atataattaacactctataacacgtgaatatctttaatgtggaaatatattattattaaaataatgggtttttagtttgtacattatataaaataaatatttatttttatataattaaattttataatatatttttaagtatataaacagtattttgaatctataataagtaaattaaattatgaaattaagttatttttaattattgataatttatttttgataaaaatgattaaaagtaatttggagatagagataaaataatgtagataagagacaaaataggatagattgaaaggttaagctagcggttaagaatattaagtacacataaaaacaaaagaaagatagtttaatatgattaaaagaaatttttggcttcttggatgagtagtgtgtgaaatgtatcattaaaagaaaaaatgagatt

SEQ ID NO: 159430 - DNA, 374 bp, Glycine max
  unsure (1)..(374): unsure at all n locations
agcttggagccatgcattgtgattgcttagatctattcgccatcctcaaccctttttcggagccccatgaatgccgttttcgttcatgcgtccttcacccatgagtttggagccatgcgtagtgattgcttaatgcaattctccatcctttaccctttttcggagccccatgaactgcattttcgttcatgcgttctccacccangaacttggagccatgcgtagtgattgcttagtgcaattctccatcctcaaccctttttcggagccccatgaatggcgttattgttcatgcgtcctccacccatgagtttggagccatgtgccgtaatgtgcttaatgcaattctccattctcaatcctattttcgagcc

SEQ ID NO: 159431 - DNA, 375 bp, Glycine max
agcttatgctaccaaatataatagccaattgtgatttaaaatacatttttctctgcctgtctattaattattgaatataaaccataaatgaagccaccagttgcatattgttctgtctttacaaccccacccctcactatgaaaattaagcaccttgttgcttgtgcttgtaacaagttgaagttggcacacaagatggaccaaaaaacatatactgtcatcaaataccccatagtcacgtctatttacatatatatgtacgactaatagtgttttaatatgtatgtgtggttatttataaaaaaataacaaagttgaagataaaaaatatgtatgtgtggctaatattatttaagggtatatatggttgattta

SEQ ID NO: 159432 - DNA, 409 bp, Glycine max
  unsure (1)..(409): unsure at all n locations
ttataaactaagctattaactatcatgtatgatagaatgggtttaatatctgtggttttggattttatatgatattctatataacaattgttatgagaggcttttaagttatgataagaataaccagagggtatgagttactagtaccatattttcccaactcctagtcttaatacaattcctttcctaggtaaatatcaatccccacaatcaactaaagcctannnnccccgccataagatgttctttgcctaatatcaataccccaataatcatggatctgtcgatctaagtcaaaggataaaatattttcnngggatgatttattataatttctaatccttcaagattattaaacatttgatcatgcatttggataaaacatttctcctaaatctccaattacatg

SEQ ID NO: 159433 - DNA, 393 bp, Glycine max
  unsure (1)..(393): unsure at all n locations
cgacctgaggcatgcaagctnggnncactggcaagggacattttcattgatttttgagncccaccctcagagggaagggcccttctccttttaccttcaccctacgcaccactttagtggtggggctggccctaaaccctaacagggtcctgtactgaaaaagggggaacaacagagatggcctatcaaggaaatacctgcaaaactcaaaccttcctttctgcaggcaacagcagtcatcatcatatcagaaccatcaagtgaatgaacaaaatttggcggaaatgctgtcctctgccttgagaccatgacctacaatatatgaattaaaaatacacaatgtaattctggaaaataaaaattaaaaatccacaacttttctccccacccctc

SEQ ID NO: 159434 - DNA, 376 bp, Glycine max
agcttaacattttcacacactagcattaatgtttataaaattctaaaaataccaattcaactccaaatgtcatcaaaattgacattgatagtaacgttccataataggtataccccaacaaaaaaagttctaataccaaaattcaatcaaaatatattttatctactgtccatataataattgaatgcactaacaaaattacataaataacctatattatttttgtgaccacgtgtttacttagatatgtgtttttttttcttatcttcatcttttttatatctttttgcttttattttataaaactttcacgaatattttttctctcgtttattccacccctttcttttctctctctctcttgcacacacatttt

SEQ ID NO: 159435 - DNA, 380 bp, Glycine max
agcttcatgaacatatcagctgagttttcttttgtattaactttttggacttcaatcctcttctcagtacgattgaagtgatattggacgtcaatgtgctagtcctttcatgatggacttgatccttggcaaagcaaattgcactcagactgtcatagaaaatgatagctttattttatggaaacctaagattattgataagaccctttaataagattccttccttcgctgatttttccagagccatatattctgccatagagatgatgaactaatcaaatctcttgtaccgatgaaagatgatgaactgatcgaatctcttgtaccgatgtcttggagattgcttcagtcgatagagagactttttcaacctactgatt

SEQ ID NO: 159436 - DNA, 409 bp, Glycine max
taatgagggtcatacttgtgttccttgaagatgtgcttattttaccacctaagtgtgagattgagaatcatgttggtgtagtacccattaaaacctgtaaccgtagtttctgggagatgtctggtattaagttgtttaagagtataaagtatttaggaaagttattaggagcacttatgaggctaaatgtcctacctttacagagtgtaaagtcgatagtagggtattgttttgcttagcatacaggggttcgagagtgagtgttcttgcgtaatgttgatgacctataggattagcggtgatagttgtatgattagtgaaataaataccaattctttttacccttaatccgggcaaagttggaggatgctccgatgactaccttattacatgccatggtttctacgtg

SEQ ID NO: 159437 - DNA, 368 bp, Glycine max
agcttcaattatgttctttaatggtgattttccaccatgaagatgcagcagaagacaaaggagaagaggtgagaggaggcgccatccactagggaataagccatggaagaaggagcttcaccaccaagatgagccttggataagaagcttggagagggtgcttcaatggaggaaaagaaagagggagagaaagagagaggggggagcacgaaattgaagggaaaaaaagggagagaagttgaactttgagttgtgtctcacaagactctcacatgcttctattaatagactaggtagcttccttgagaagctttcttgagaaaacttccttgagaagctttcttgagaaaacttccttgagaaacttc

SEQ ID NO: 159438 - DNA, 360 bp, Glycine max
agcttcgataattttgtgtattcaacttttattatagatggagctacaacaaccagcttattgacttcgtacgaatgtaaacgcataactagtaatcgattttcatttatcaaagatcactagcaaaatttgaatcaataaaacatttgacagttaattttgatcctctaaaagtgatacattgttttgaagatcagaccaaattattcggtttactcgatccaactaggaactggtctgttcactccaaaaattggagcatctcaaaactggtataaacttataaagaaccggtcaaatgtggtccaaatcagtgaaaacctgtgttaaactggtgaggagaaccagtttgaactgatt

SEQ ID NO: 159439 - DNA, 375 bp, Glycine max
cttatccaaggctcatcttggtggtgttttttcttcttccatggcttattccttaatggatggcgcctcctctcacctcctttcctttgtcttccgctgcatctccatggtggaaaatcaccattaaaggaccccattgaagctcaaagatccagcctccataaaagccccacaagcaagcttccatcacacggacctagtacttttgcttacctttggctttggactgggtcgcttaattggtcgaccatgtgtcgtaggcagtgctctaacctttttgtggataagctgaggggctttggaggtggcggcggtgcgtctgttgcccgctgtcgtccaactccaagctgttgtggtgtcttgccttgcgcctgc

SEQ ID NO: 159440 - DNA, 421 bp, Glycine max
acggtcttcatctagctgggggtgtggacatgtgccaatatatagggggggaataattttcctaaccttaccaataaaagtactctttacggctttactatattgttaagagaatgaggagtagaacagaaacttaacagatagtaaagcggaattttatgcacagcggacagttaaagagtatggaagaaggaaacacacacacacgagtttttatactggttcggcaacaacccgtgcctacatccagtcctcaagcgacctgcggtccttgagatttctttcaaccttataaaagtccatttacaagcaaagatccacaagggatgtaccctcccttgttctctttgaacctagtggatgtaccctccactagaattgatccacaagagatgtaccctgtcttgttctcagtcaaacc

SEQ ID NO: 159441 - DNA, 376 bp, Glycine max
  unsure (1)..(376): unsure at all n locations
agcttngagnnntctcattctcctgggcagttgtcttattgttagcataacaaacatagacagggatgttcatccttttctcttagtagcttaaaatttatttggcataattttatcatctgctttaagtcatttttcacaattgaacagaagacctattgtaaattaattaagattcaggactttcttaattagtttagtatattagaacgaatgttagcatttagtaaattttaggtttggtttcattctaaaaattattttttattctatcaacttttaaataaaggttctcacatcgaccaggagattcaaacacacgttcatgtgggatataagtccaatccttaccaaatggactaacatttgttggctc

SEQ ID NO: 159442 - DNA, 356 bp, Glycine max
tctccttcatccaaattttggcttctggcttgatgtcaatttcatcaaaatcctatgtgtcacttagcggtatcatgtaatgcttcctctactattgattccttaaaacagaaaataaaacagctatataatgaaaccctaatattctctacaaccgtataccacaatttttggctgctggttctgtgcccattccccacattggatcttcgatgatccaatctacaaattctcccctcgccccccactaaattgaatcacagatagataataccagaaacttcttaaaccagttctcaacaaaaaagcgctacatttaaatccaattgataatctcatatgatgaaaaatgagca

SEQ ID NO: 159443 - DNA, 374 bp, Glycine max
  unsure (1)..(374): unsure at all n locations
agctngaacttggtttagacatgagggantcttgatanttttacttgcacgattcaattcgggcaaaattggatgaaggtaaaagtggttttcgaaatctgcactttatgcagaattttgctgttgaaatgtgcagcataatttttgtatatgtgtagaaaaatgcttgtgtatggatggttgtggaaatggtagtacatatggggttctgaacgtttgctaacatatcccaacggtcaaaatatagatttgtgtactagagactctcagtaaaaattcgagtcgatccaacggttaacgaactggaacgaagaaaatgttactggggtatttgaatgtgaaaagctgtgatattggtttgtgttttgggcaga

SEQ ID NO: 159444 - DNA, 301 bp, Glycine max
atgcttatgatcatttggaacttatgctattggcattctgcccatgtggacctagtgcaaattttatggtatggatgctaggctcaggatcaattcctctattataaattaaccccgatggatccgaaatatggccttctattaaatacggcattcatgcgaatacattgtgggcgttcggggaaaactttctagcagttcacccttcgggcgtatacccagtttttacaaatctatgtatgatcagcgaatttttcttcttatatgaagaaagatagaaatgattttttttataaagcat

SEQ ID NO: 159445 - DNA, 379 bp, Glycine max
agcttgtgactaatgaatattttctagcatattgatttctttttatatctagggtgtttatattcttatttggaaactattcttttacaacaaatatcatgaattaagttttaatgaagagtttaatttgatatatttttagtttaaaaattttcttacgtcaactagctaaaaatcatcttcaatatcatttttaaatatttattacaaaaatcaacaatttttacatatatcacaatccataattagataatagtgcaaataacatttatattattaatgcattcgatccatttaaattcattaattagaatagataaggaaattaaactaacaaattgttttagttgaattaatacgtaaacaaagaagcctacag

SEQ ID NO: 159446 - DNA, 409 bp, Glycine max
ttcccattatggtattggataatttgtaataatcttgtttatggtaacactgtctctaaaacattttcattggatttaatgatggaatctttgcattttcatgtgaaaataaggctaagttttgtaatgccaaaagcaccagttgggctaatcgcatatccaccgcttagcgtaaatgagaatctggcagagcatcaacattcaagttgcgcgctaggcgcgagatcagtgtgcttagcgcaacatgtgccttcagccatgcttatcacaaaactagcgctaagcctaattccacttactcgcgctaagcgccagggtggcgcttagcgcaatgtcattaatatttgacctatttaaagcctgttttgtgcaaaattttggtacatacacacctacaccttttgagact

SEQ ID NO: 159447 - DNA, 383 bp, Glycine max
  unsure (1)..(383): unsure at all n locations
agcttagtcttttaggcatgagccaaagaatattttttttatatgtgactnttgactaataatattataagagttagagttaaccataaatgataagatgttaacaattatttttgatagacttaaccaccttattatagcatgattacaaattttcatcatatagtgggcctaaattttaagaatagtaagagctaacatttgtataaacacttatcaaatcgtttaggatcatcaatttttttgtagtttctaatgaaagtttagatgtaaaatgaaattcaattcaaggtaaccttaactttggcataactaactagtaaatgtagctttcatggtccccgtatgataaaggttgaattattctcaaaatatatgacaca

SEQ ID NO: 159448 - DNA, 434 bp, Glycine max
tcatggcatacctaaccttatagtgtcagataaggattctacattttcctctaaattttggagggcgtctcaacaagcttttgggtccaagctaagtattagcactgcttatcatccctaaacagatggtcagtcagaaaggaccattcaaacccttgaagacatgctaagaccatcttttcttgatgaacgtggaagttgggataagtttttaccccttataaagattgcgtataacaacagttatcacgctagcataggcatgacaccctacaaagcccttataagaggaagcgtagatctcttttatgttggtgtgaggtgggtgaaaagaccttaatatagccatacctagtctaggagaccacaaataagatcaggttgattagagaaaggatgcacatcgctcagagttggctaaagagttatgttga

SEQ ID NO: 159449 - DNA, 381 bp, Glycine max
  unsure (1)..(381): unsure at all n locations
cggcagcaagcnnactaccaagagggaaggtttttttttatttaaacacaaacaaacaagaaggggaatgatatactcactttggttagcagctaactttctgatcaagcataactttgaaaggactacagatgcttgatcaccacccaaaagaaaataatgatgttgtatagcagcatccgcaaataataaacctattcttagggaacgcctctcggaaacaagctttgttgctaagtcccatgctctaccataacactactatctagaatttggaattcaagtaggaggcgagtatagtccctctattttatcaaatcatatccacaactctatcagttacaagataaaatatcttcaaaacaacaatagaccttaagc

SEQ ID NO: 159450 - DNA, 375 bp, Glycine max
  unsure (1)..(375): unsure at all n locations
agcttctacttatgtggcagggcgggcttcctatatcttcttgnctctaacgcgaactttgaccattgttcttccttcccgcaatgcttcttttcatgtctgcctgagtgggcttatagcctaaaccatacttcccacgatttccttgagtatttataaggctagttatgccgccgttgttttttcctaaacccatcccgggttcaaaaccgttccccaacataactcgggccatcattaccgctgcatcggacagacaaggttgcccaaagagggagtccacggaggaaatgctgaccacctcaaaagactggaaagcagtttctaacgattcttctgcggcttccacataaggcatggaggatgggcagctta

SEQ ID NO: 159451 - DNA, 374 bp, Glycine max
acctgagcatggtactggtaccctctggcctgaataaatattgtccggctgcttggtttgtggtatgagctcctctgctgaccaccatacagacctttgcccttccatgcagcaacctgtagcgattgagcagcctgaagcttatgctgtaaatatttacaatagaccttctcaacctcagcagcaaaatcaaccacaacagaataattatgacgctcttcagcaacagatacaaccctggatggaggaatcaccctaacctcagatggtccagccctcagcaacaacaacagcagcctgttcttcattccagaatgttggtggcccaagcagaccatacattctttcaccaatccaacaacaacaacaacccc

SEQ ID NO: 159452 - DNA, 368 bp, Glycine max
  unsure (1)..(368): unsure at all n locations
agcttgtgtactgaattgagtatggctcacatantgtttgtctgatatgccttttagaggtttgaaaagtgcgagaaaacaagctgtgttttttgcattttctggaaaacatgataaactcgctaagcgagcatgctgcgctaagcaagttcatcaatactcattgtatgtaagcattatttgaagaactcgctatgcgggcttaccgcgctaagcgagttcatcctttgaggatgaccactcatcctcttgctgaactacctgtggctaagcgaagctgaatcgctaagcctaggaaactttaccaattttttttggtgatagttgcgcgctaagccgagcattcctgagccaagcgcaattggttg

SEQ ID NO: 159453 - DNA, 335 bp, Glycine max
ctttaactactgcatttgtgtattttttatgatagcttgtgtgtaataagtcataacggctcaacccaaccctctatgtacgaaaatgttgggaaaccatatgtgcaatagcatccctcgtgacgacacaacgtgtgtcaccaccatggagggtgggtcaagcccttacgccactgggtgcaagcttggcatcgggagacttgcgtgttgaaggctaacctgtcgaatacattagtgagaatgttccgtggagctccatgggtgcatatcttacaataatcaatatgtcatgcacatcccagatgatggacatgatgatgattatggaaaataac

SEQ ID NO: 159454 - DNA, 400 bp, Glycine max
  unsure (1)..(400): unsure at all n locations
accttagagacgaccggcggcatgcaagcttgcttaacaagctgggcagcatctanatttatttctgcnacacccagacgcagaaggatgatagatatcagattttcatttcagaaaaccttatttctctctctctcagacaatcctagtttctacaagaacaaagtatgattagaattagacatacagaatttgaaaatacaacagaaaagggaggaagatcaagaacaaaaaaagaaaaagggataggaaaaaagtaaagaggaaaaagacagacaaagggaaagaacagaggatgaaacacaagtacagaaaagagacagaaggagaaagtgaaacacgtgtcaaacagaaaatgaagaaaagggaggacagaacaaaaaagagagaaaggaaaaat

SEQ ID NO: 159455 - DNA, 373 bp, Glycine max
agcttgtcaaagaatccaacctctcatggtttattctaacacatagaaacaaggtttcactatcttagggatcaagtgaacaaagagaaactaaaagtggagtactgctgcacatttgatcaacttgctaatattttaaccaaacccctcaaaggggagaagtttaaaatgttaagggatagaattggcttgatgaacttaggagatcagaattaagggagggtgtgaaagcttaattctgtttttgagtggtgtagatttaattgtacattggatataagagagtaacagaattttaaaattctgttataagtgcctagcctaagtgtgaagggttgttactcttgtttgcttgtataaaaggacatacatg

SEQ ID NO: 159456 - DNA, 423 bp, Glycine max
ttgaatgcacctacttttctacctaagtagtactaattatacctgatatttctgaaccttatgaactcttaattgcattattgcaatgcacaccatacacaaagactaataagccagaacaagatccaacttttgtcaatactgaggatcaaagctatatgatgttgtcagtcccctcattaaacaggtacaagcctaagttaaataaaattaagtccaaggaattaatattttaacaagttctccaagagtcatatatgtttgcacagattgttggttgaatctcatcaaaagggaaactagactcttagtctccaataaagactaaatatttcgtagacagaacggatgcctcgttgcatttacacagttccatcatacttgccaacctaatcaagtttctttgaaatgcaaaaagctata

SEQ ID NO: 159457 - DNA, 363 bp, Glycine max
agctagatgaatttcttgatgccttggtctttctattaactaagcttgccataaatcagaaatctgcatctgcacctgttactgttgcaagactctgtggtctatgttcttctgctgatcaccacacagatctctatccttctttgcagcaatctagagtcaatgagcaacctgaagcctatgctgcaaacatttataatagacccccttagtagcaaaaccaacaacggcagaataattaagatctttcaagcaacagatacaatccaggttggaggaatcatccaaatcttagatgggcaaatcatccacaacaacaatagcctatcccttctttccagaatgctgctggtccaagcacgc

SEQ ID NO: 159458 - DNA, 268 bp, Glycine max
gaactctagcttctcattgtaaacctggcatatccatatgcttctaggccgatctcatctaactcaactcagtggaactttctttcctaaccaacttgatccatacacaagatgaaggccttcaccgcccaatatgccttatgcccaatcccaactggaagatgacatcctttccaaaaccacccaaaaaggaacatcctatgggtgcttgtaagcatcctatgtacccaagaactcatatacccgcactcaattttttgttggggac

SEQ ID NO: 159459 - DNA, 360 bp, Glycine max
agcttgtatttattttaatttatgcaagatttattcagcacacgaaccttttaccataaaaacaagcagaacacttatcaataaatgtataacatatgctatgaaggatatcatactgtattgaaaatttggtttcttatagagctcaatgtcatcaatagatctatgtatcccacttcacaatgtgagataaattataaataacaaattaaaggtggaaatttctgggaaagagatgcaaggtgaaggtatttattttataatatgctctttctgtaattaagatcctcaaacactgatcccttgatcttgaactttcatgtgagggtacatatgcacaaaaatctacagcacaaacta

SEQ ID NO: 159460 - DNA, 184 bp, Glycine max
gatctccaataccccctataccataacgaaaacaaagcactggccgtccccttacaacttctcgactgggtaaaccgctggatgactaccttaatcgacactgcccaaataggagacattcctatgggcgcaataacgaagaggcttattgcgaacacaacttcatctaacctgcactccaatg

SEQ ID NO: 159461 - DNA, 382 bp, Glycine max
agcttcttagactggatcacccttcctacaccctgtttatgtgtaacctccaagaacacatgatcacccatttctaactctagcggtctccatcgcttatccatataagacttctacctactttgtcatgcttgcatcctttcttgaattagattgatcttctctatagtttggtgtaaggactctagccccacaaccatgttcacaccatcttgataccaacaaagagatgtcctacacctcctatctagcatgattgttgtaggtgaattccacaacaggtagaacctcttccccactcccaaggtgatcaaagacacaagccctcaacaaatcctctaatgattggatcttcctcatggactgcacattcgttgatcga

SEQ ID NO: 159462 - DNA, 358 bp, Glycine max
atgcgaaatgagttccagtacattggatctggttcgaccatgccctcctgatttccagttgggaaatatggaagtggaggaacgctcccggcatttacgcaacgagcataatgtaaacctctactgttgtataagccctataggtgggcctatgctttagagttttccttttggaaggctttgagtcttttgtttttgaatttaaaaaacaaggatctttcttcagttgatcctacgtgtctacccattctcattcatttgcatgtttacttctttatcagaaacggcggatccgatgacgagtcctccgaaggtgctaatacctgcgacccgcctattgtcttcgagcaaatatgag

SEQ ID NO: 159463 - DNA, 395 bp, Glycine max
catgcaagcttgaccaaacggccaaaagagcggttttttttatattctccacacaccggtgataatgaacctccaataatcaagatatatcaagctcgtggcatcacatttaagcccaagtgagaatgatgccttacgtatctacaaacatccctcataaccataaaatgaatacatcaaaacatgatgctctatgctgactatgcatatcatgtcataaatgacattctccacctttaaaagggaaccctttcactcatgactttagcagccaagaactttatccatgatatgattcatagtgactatacattaatcagtccacaaacactacaataccttctggtgcaacgctggaactatggcacgacttctaactcgccatatatcaccat

SEQ ID NO: 159464 - DNA, 375 bp, Glycine max
  unsure (1)..(375): unsure at all n locations
agcttgntgagctttccatgcgatacagcatttgttatttctttggcatggagtccaggtatgcaaggttcacatatcgattatgtatttatgttacagttttgcctttgatagaaattgaagtctaaaatggaatttctaggaaatgtactaacttatttagtcctttatatgatgctgcagaatttgccaaatctagagaaaattgacctttgtggctgcataaacctaatggagtgtccaaatctgtctcttgccccaaaacttaaacaagtatcaataagccactgtgaaagcttgtcttacgttgattcgtcaattttgtccctcccgaagctagaaattttaaatgtgagtggatgcacgtcgcttaag

SEQ ID NO: 159465 - DNA, 364 bp, Glycine max
actcatttacacttttgggtacaatccatttatgtgtgggttttctaaaaaataactccagatagaaagaacggtatatgtttcatggcccttttaaactttcataaaccgaaatccagaatataaacttttacgtcctgaaaagatcaatccagaatgtacttacattccggattacgtgcaagaagtaattatgaggctgcatgaagcaactgccaagaaagaaaacatatattagaggaggaaacctttgaaagaacgcctcctattgatacaaggccgagagaaacatttcataaagaaaaacctaacaaaaaataggattagattattattctcacaagaaatagatctggaatttctt

SEQ ID NO: 159466 - DNA, 375 bp, Glycine max
agctttatatagacttcaaagtgggacatgatgttttttctatgtagagggagagagagtgtggggaccacaaacatcttctatagcatatcttcagagatgtacgacttgctaacgttgctttgtgctcaaagctgactttcaaggtacaaatcaaatataaagttaacaacataagacaaaaggaattaagaatgtcaagacaagacaatttaaagctcctcttttgtgcgctatggcatgaattgcttgttgaacctatggacgtcactttttgatgattaccttcagtaattgaggattgagtgattgttccatggcctttgtactatgagccaagttttgaaacacttttctttttatgattggatgttt

SEQ ID NO: 159467 - DNA, 380 bp, Glycine max
aattggctgagcttcatactgtatcatcattccaaatttcaaatacccaattctaataactaacaaatataaatagaatacaactgtcgtatgaaccacataataaaaaatgagagatagctttgcaatgattggttgctttcaacgtgattcattggcgattagaccgaaaggctacaagattatatggtgaatgaatgaaagctatgaagataaaaataataccgtaacacatactttctgatacacccagtagtgaggatatcatggaagggttgtaatcagcaaagcccaacaggcatatttacatccccacacgactaatggattacgtgttgcatacctaaggccatgcatgaagcttcaacaaacaactacct

SEQ ID NO: 159468 - DNA, 379 bp, Glycine max
  unsure (1)..(379): unsure at all n locations
agctntagttaaaccatatctctagttgtattgttactagacaccacccttgaagctgcaattaaggagtccctaaagtggtcgcaactaagacaggctagggttgactgtaattaaggtggctttcaacacaaatactatacttgtaaaaaaaatatcaataactagaactcaataatttctcaacatatcagccaaagaaagccattaggaaagtctgctaaacaccaaaaagaatgaaaacatttctgcctgtgaaagatctgaaaagaaaacttcttgaaaatccaagaacttatctccaacaaaatacaccaaagatatttccaagcataaatttatatctattacatcaaatacaaattttagaaaagatctg

SEQ ID NO: 159469 - DNA, 382 bp, Glycine max
tcatgtagtggggatgtctcctccacctctataacctcacaattactcacaaactcattccaggctatcaggatgactttctcttcaaactcagttttctgtcacgtcttcacacatacaaatagctcctcaaaatttgtttggaacttggacctttctttctctagaaatctttaaacatgtaaaagcttcgagaaatgcccaaaccctcctctccatctctgatttcaggcttaaataagtggcatcgatggtgcttgcgcactcagcgcaactctggctcgcttagcgagtataagtgaatttcggcttagcgcgcgtcttctctcttaccgtgtgcatgcaaacagagcgcttacccggatgagcccttgcttaacgc

SEQ ID NO: 159470 - DNA, 374 bp, Glycine max
agcttggcaacaaatgcctcaactacatatctattttgaccaggtttgtattggcaacaacaagttattttattttttacctgtatctgaattgagcatcacggtgtcttggttttccataaacataattttgttatgcatagaaattgaacacgatattaggaaatttacaatactcacacatcatatttaactaattgagctagacacccttcttgattctacaaacataatagttacttgttttgttatatgctttataccttggaccattttggaaattcttgtttccatgacaacatttcaaccaaaacgttgacaattcatgtgacgaaataatcctattaggacaaggatgaattccatcaataatg

SEQ ID NO: 159471 - DNA, 427 bp, Glycine max
ttgaaactcagcttgtgcgttgtccccatgtagactaggcctaactttacaacagtatggtaacaacatatgtgaagacctattcttaccccgcagatccctcatgtagattaagttctgatcttgcttcaattaagtctcaggcgacagtacatttcccaatgctaaagttacctatctgggcacacaaatgggtgatcagaccaaaagcatacaaacattaagcattgaaggaagcattgaacacagaagacataatcaattacatattaggtatttacatcaggtattcattagaaaactccaactatggtgtttatccagccattactaagaaaccctaaccttaaatgagattaaaaatagagaatgatagttccctacacaagaagacggattactccttctcttctcagcattttacact

SEQ ID NO: 159472 - DNA, 377 bp, Glycine max
  unsure (1)..(377): unsure at all n locations
agcttcaaccaagaggggatggtccatttcatgntcttgaaaggataaatgacaatgtatacaagattgaattgcctggtgagtataatgtgagtactacatttaatgtgtctaacttaactattttttatgtagatggagaagccgatttgaggacaaattcttttgaagagggagagagtgatgaggacatggcaaggacagggaagttggggtggccaaacccaactttcttattatagtgtgcaaatagtgtactttgggaaatagtttttaaacaggtgtattgtgggaaaaatcaagagagaaaaggagcactttgttaaaaaaatcattgatagtagtgctacttaaatgccacccattgggctgtgatg

SEQ ID NO: 159473 - DNA, 410 bp, Glycine max
  unsure (1)..(410): unsure at all n locations
tgtatttaacggttgcaggtattcacttagatgccntgtgtatgacgcctagacctttttttggtaattatgaatgtcattagcttataataaattcttattatttttgagaatctatatgtatatagtatacattatataaactataaaaattccaaaatagcagctatcccgctatatgcaatctcgctattgtgttttttgaaccagcggctttgctctgctatcatagatttaaaacattggttctatgtagtatcatgatttcctaatgctgtcattttattttattttgttttcccctgtttcagggagcatctgcagttaccaagagaactgtcaatgcaaaagactcatcttcaactgttgttgctggtggactggatagctcgccccgggaagacatcatt

SEQ ID NO: 159474 - DNA, 364 bp, Glycine max
agcttataatgaacaccgatagatatttttttatatgacaaattttagttgcaaccctaagtactcccaattattgaaattttgtttatagaagttacaaggatacccatcctgcgaagcaggaggtgcaattggtaggtgtcaataataatatcttttttaagaagattgattttcagtaatgatctaatgaaatgtcacaaggataaaagaaacaggtccagcaactacgacactttcttctaaaaccatccatatttgcacatcagtaccttgatttggagagcactattgatagcatcacttacgagctcccagtttggacccatatcatgcaccagcaccacaagagcctgcaacaagc

SEQ ID NO: 159475 - DNA, 373 bp, Glycine max
cactcttaaggctgaaataaatactgatgttcttttcaaattgtgaatcactacatcgcctaaatggatgaccatgatgacattgacatgttggcctctcacacaacaggataaatgttattgccctactctataaggtataaattcaatctatcggatgagatcacattgataaattgctataccccaatcccttatcccaagctaaaggtcgacattagggtgctctgattaaatatagaatctggaacaacgtgctgtgtacaccttaattagagggaagaatcatattcttcttcaacagccattactccttactcctttgtcatgattgaccaagaagcatgtcggattgcattgtgcccaatgtttg

SEQ ID NO: 159476 - DNA, 383 bp, Glycine max
agcttcagtatccgaccaagatagttatctttttatgagaagaaagaaaactaagaggaatctctcaacactttgaatttttgcacaggctcaataagaaatgagtgaggagtgggctgaatttttttatagtaaatttagattattcctctgctgagagccaatgactgattcattgaggaaatccatttaaactaaaactgtatcaagcagaagacgcgtattgtccaaaaagtgtctttctttatccaatgagagacttcataattctcttatactaaccaaagagaaagactaaaagatgctaattttagacatgattttaatcttaaccattcagaagaaaggcctcatgggacaagagggagaagaagaacctggtt

SEQ ID NO: 159477 - DNA, 417 bp, Glycine max
atcgcttatgacctgtgcgatacacttgttcgctaggctctgattttaatatggagcgaacatactgttctatgtgtcagtttgaccacaaatatcacacaaaattagatgacttgtgatgttagtatctgtcgaagttgcattgtttagagacattgtattttctaatgatatggagatattctaaatattttgacacttgtcacaatgtacatgatcgtcttgactttgacatatgtcgcaaccctaaataacattgcaaacatcgaaggtggctttttactacagaaaatgtctttgggggtgtagtcttgtttggtgccccctttggatgatgactattgtagtagctcttggataatgaaaacaccattattgacgaatctttctagaaatgttttatatgtaagagtttta

SEQ ID NO: 159478 - DNA, 360 bp, Glycine max
agcttccatcaagtggtaatcagagcacattatcttcgagtaggtgctccttaaacctccattaaatttttttctttaccttctcttccattgttgtttcttcatttttctccatgtatctcctcacatgtcttgtgctaaatgttgttaacatgattctttagagtttccaccgattaaacttgctatagaagctagatttgattttctatggttcaaatttcttgttcttgttcttgaaccatgaattatgttgagtttaggttcctttgagttttgtcttgttattttttttggctgaaacctaaaccataaaattcttacaaaaatattaaagtagaagaaaacctcaaaaatcta

SEQ ID NO: 159479 - DNA, 288 bp, Glycine max
atcatttatcatgtgatccacttggatagttataggatgattatattaaacggaatatcatagtcaagccagaagttgagggaatataaaattgaatattcataataacaaaaaatataagtgctgattctaaaaactgtagtgttcctgttaagctgtaaagcatgcacagtatttgggtggtaaatggtgaacgacttcattcaacattgacactttcttaagattgaattaaaaattaatttttcatcggctttgatatacctatattgagtgacaccctcctga

SEQ ID NO: 159480 - DNA, 363 bp, Glycine max
agcttgaagacaagactatacgaggtatcttttttgggtatagcaatatctctaagggctaccgtgtctacaacttgcaaactaagaaactcgtcatcagtcgagatgttgaagttgatgagtacgcttcttggaattgggatgaagacaaagtggagaagaacgttcttatacccgctcaactacctcaagaagaagctgaggaagaagacccaggtgaaccaccttcacctccactacaacaacaagatcaagaactatcatcaccagagtctactccaagacgagtaagatctttggtggacatatatgaaacctgtaacttggccatacttgaacctgaaagctttgaagaagcgtcaa

SEQ ID NO: 159481 - DNA, 379 bp, Glycine max
tgctaacccatggaagctcctaatatctcccacactttttggggtgggccattctcggatggccctgaatttctcgagggccacttggaccccatttctaccaactacaaaccctaagaaaactacattatctacataaaaggtacacttctctatattctcatagaaggcttttttcccaaggattgaaagaactttcctgagatgtcctaaatgatcatctaggctcctattggacactaaaatatcatcaaaataaacaactacaaatctacctaataaatcccttaagacatgatgcataagccttataaaggtgattggtgcactaatgaacccaaaaggcatcattagccattcatacaaaccaaaattgatc

SEQ ID NO: 159482 - DNA, 387 bp, Glycine max
ctgccgcatgcaagcttgcaaagatagcaaaacgaaacatttattttgcttggctacacaattttataactgtaataatagtttatttcaatgggtatcatgggacaatataatatatcctgatatttcaaatcatgctgtatatgtatatactacaaagctattataagttaatcatcttataaaacattattcaaacaaagtatttaaacgtttgaaaattggtattaatgctatttatggtactaataatttctctgcttatgtatacgcgtaagtacgagtcgtgcatatatgaagagaatgggagatacagctttattcataagttattgacggcataaaagagaaccctaaatgccaaaataatgtaccattcacattatt

SEQ ID NO: 159483 - DNA, 105 bp, Glycine max
actcttacacaatataatttatagagtaggcttactctattatgccaacacaacgtgtctcccttgtggcccaatctactaacgatgcactctacaaataacaaa

SEQ ID NO: 159484 - DNA, 383 bp, Glycine max
agcttcatgatgatgaatcaagttgagtcattttgttttgataatgacaaagatgatgacaaaaagcccaaagaatgatttcaagaatgagtcaacaagttcaagatcaagtttaatttcaagtttcatgagaagaaatcaagaagattcaagaatcatgaggagattgatttcaagaatcaagagaagatgaattcacgattcaagagaagaaatcaagaagacttcacaagggaagtattgaaaagatttttcaaaaaacaacatagcacagttttgtttttcaaaagattttttctcataattttctaagttaccagagtttttactctctagtaatcgattaccagtttcctgtaatctattaccagtggcaaagtttg

SEQ ID NO: 159485 - DNA, 429 bp, Glycine max
aagtgtacgaactaggatgggccgaaatgtctcttctctgactggtgaatctgttccccaaattcctgatacatgtaaagatccatgttcgttcagcataccttgtgttatatggaatagttaggttgacaatgccatgctacatttaggagcttctggtagtggtatgcctctggctatctctaaattctctatctctagggcccttgcagacaactgatgtggcaatatcatttagctaataaaagtcgtagcgtatcctgttgtgttcatagaagatgtcttaattagagatgacgaactgattttccctggtgaattttatattttgaatatggaagatggattttctcaaggatcagttcccattattctatgccgaccctctatgaaaactactagaactaagatagatgtttattcaggcac

SEQ ID NO: 159486 - DNA, 303 bp, Glycine max
catcccatggagtacggcgtagaaccaaactcaagcttttacaaaaaggtccatcaattccagtcgaaatatggtagtcaccgacttgcctaattagggcacaagatgaatcgagtcacatcactgctttggctactgccaaacatatttaggatcgttaatgctcttgatacttccagtttcatcttgacaaagatgtcatggaccatgttgaaaatctaaattgattccaccccatatcctgcgtaaaaattcgtaatcttgaactgctcatcattcgcatacatccatgccttctcattg

SEQ ID NO: 159487 - DNA, 314 bp, Glycine max
actcaccatatgattatgataacggatggctcatatctcaaagaggaaactcatcacttataaaatgagctatccaaactatcatgacatgtatatgataatcaatgatttctagtacaatatgtcataaactattattttcaaaacaaatacccaattcttgagcatatcctataattcaaagaaaaacatgctaagtctaacatgcacaccaaattgacccaaaatattagactaaaaattcgaagaaactaacaacattatcacattaacacaactaacaaattatcaaattcaacaaaactagcataacc

SEQ ID NO: 159488 - DNA, 379 bp, Glycine max
agcttgcaagcagcaagtatattgcaggattttatgtatgaagctcaacaatacatctccttgccatatcttcttccggtggcacgtttccatgtgcgttgcaagcatttaataaggttttataaattacagaatccggcttgaaaggcattgtttcaataactcccatagcttcctctaggcgaccacctctaccgaggagatcaactaaacacacatggtgatccaactttggtgttatatgatatgttttttccatggaatagaaataatcaagacccagattcaataaactaccttggctgcaagcaaaaatcagtgataagaatgtgaaagaatcaagtttaactcccgctaacctcatgtcatcaaaggcaga

SEQ ID NO: 159489 - DNA, 423 bp, Glycine max
cttattatagcttggtgctgagaaccacacaatactttatggttgcaaattctgttcttgcccccactattatggagcatgaagaccccacttagaaatttctgcaaggaagaatcatttgaccaattgattcatttgttattggcctaatagcgacagagagtgctacacccaaccaccggaacagaaccaacacacaaatgccatactggcgaccataaatttgaacaagaaagttaagaatttggaacaatgttagtcttacaaaattcaaattgaatgttggaaattcaaatttaaccggtaccgatttaacttaacttctacgatcattcgtctagaaaaatgccaattacaattttgtacgcatgtgtttcctagataaggtacaaattgtaaagttgctaaattcattattggtac

SEQ ID NO: 159490 - DNA, 375 bp, Glycine max
agcttcaagagagtacttcattgttaatgtttttatctactgtttcaagtgttttctctcctagttcagctctcactattaataataataatctactgtaatggctgattctgcatcttcttctctcagtattgctaatctctggcatgctagattagggcacctaatgatcatgtaatgaaactagttctcactcattgtaatacttcttcttcaaataaaaattccacagggttttgtgcttcttgttgtatgggtaaatctcatagattaccttctcatatttctacttctggttattctcccttagagctcatttttacagatgtgtggggaccttctcatattacctcatattctggctataaatattat

SEQ ID NO: 159491 - DNA, 367 bp, Glycine max
agctattttaactttttgaaaagttattttttatttccaaaaaaagattgatggtgaaggttcctattatttttcataaaaaaatttaatctctaaattttttaaaaactcattattttagatcccaaaatctcattaaataaatttttgtttagggactaaaatctaaaatttatagcaagttagagactttaactgattaaacaaaaatttagaaggtaaaaatctaaacaaaaaaaagttaaatgacttgagaagtcaaactcttgttcaaagattaaaattgaatctcgaaaaaaaattaaagactataaattttgttaacccaaaaaatatagggagagtcagcgtagatttgactgattga

SEQ ID NO: 159492 - DNA, 377 bp, Glycine max
agctttaatccttttttaaatgatatgtgatttatttagaatgtattttaataaacaataatcaatttaacaatgttctttaaatgtgcaagataaagtaaattgcaataaaaataaatgagataagggaagagagaattgtaaattcgatttattttggttcggtcacttcctgtacctacgtccagtcctcaagtaacccacttgagattttctactatccttgtaaattctttagaatttctgaacacacattgggattcctcacccttgtgtttgagtttctcacatgccaagagataaacaatctcttgattacaactattgagttttataagatgaacaaaatgatttctctcttttagagcagatgatac

SEQ ID NO: 159493 - DNA, 411 bp, Glycine max
tatgtcgatcccatatggttggagcattcgtgcacaacaccgtgaccctgactggtttccctatgatcttacctagtgagagtgacctgacttgctagtgtgtggcttgtcttgtcatgtactcctaggcgcccgacgagatttttcactgacatggtaccacattgcatataagattgagtcttagtgtatatgttgcataatgcttgtgtattgatcgatattgattgacttggtgatattgtgtgttgatccttgagtacgtgaatattgtgaaaatgaatgagatgtgttgtgttatgatgtgatattgggtgacaaagaggtgaaatgatgtgagctatgtttaagcaacgtttattttgtatttatgatatgtatacctacatgctgcatcggtactcttcatta

SEQ ID NO: 159494 - DNA, 375 bp, Glycine max
  unsure (1)..(375): unsure at all n locations
agcttgcatgatttacatctccctatttcttatgcaaattctnctggatatcatcaaaatcttcatgatttacattctccccctttttgatgatgacaaccacctgtaggttaggagaaacaacaaagaaaatatctatttgcatatagtttactcccccttggttttacaatgattgcttatatgagacaatttaagatttcatatttttcatatataaaaagttgtctcataaaacaatagataatttttcttactattttatcttttatctttctctccccctttgtcaacatcaaaaacaaatcatgaatagaaaggagaaagatgttaccacttgttgcaatgtatgagaatcaagtgataccaaaaggc

SEQ ID NO: 159495 - DNA, 421 bp, Glycine max
ttatatgactatactatgtattattctagtgtagtaatttcttgattaaaactagttcatattcatagaatatgacgcggagaagatatatattcaaggcatgcacgtaccttatgagtagcatatggtacatacaaaggatatcattagaccttaacgtatgagttaatcatgctaaacctcatatattttgcaggtgattaattaatttccaagtaactaaataagatgtactaatctgcttgatagttgattgataaccttccttgtaggtacgtaagttcgtttctatgcttttggggcatgtcattccttacattatctctgggcttatggcaaggataggaacccagtggatttaaacaagctggacacaattacgcaccagtttaaaggaagcagctcaaggtaaaaacctaat

SEQ ID NO: 159496 - DNA, 374 bp, Glycine max
  unsure (1)..(374): unsure at all n locations
agctngtgaaataaggtaaaatggactttgtctttatcaatagcctttatatgttcggacccctatgtagaggtgtcaaggtgggccatgagtttgtcaaaacctggctgatctggtcttccagtttaagcagcgggcttcacgcttcataaaactcacctgtttggatgggaagggaaaggcatcaaatggaaaacaagagcatcataatttcaaatggtagactggtcatgataagatatcaatctgttatatactataatgtgaatggcctacattataggaagttgccacataaagtgaaaacttgtatttacctgcagggacccatcaagttttagtaagcatggtttctcctccgagaataatcattc

SEQ ID NO: 159497 - DNA, 369 bp, Glycine max
ttcaactggtaatccatcagtgacctattttatctattacaaactagtcatgtcttataaatttgttgaatttttagtaatctactaactagcttaaaagtcatacctaccaactgattgatttatcgtgcaaaaaagtttatactactagcatattataataaaattcattgtcttataccttaaaatttgtttatttttatagttatgactttaaaagctatattgataataaattctgatgggttaatgatttacaatagcaatgcatggaaattaaactgataaataataactatttatgcattaacaggtgtttatttatacggaatttgtgctgttgtaacataccctgtctatcaacctcca

SEQ ID NO: 159498 - DNA, 381 bp, Glycine max
agcttcaagctttagtcttcatgttgttcatgttgctctctctataagttccctacactaagtgagtgcacccaatgtcaggtagtcaccactcgctaatttccctaggttcctcaaacctttctgcctactatacccttgtgttccttgtaaatcgtctatttctcaacataaacctcaccatctcatggatggaacataactacatacctcaccctctcatagattgatcataatcacattcctcaccatctcatagatgaaacataaccacatacctcaccatctcacaggtggaccataatcatatacctcaccatctcatagatggaatctaaccataattacaccatttcacagatgaaacctaacaacaaaaca

SEQ ID NO: 159499 - DNA, 422 bp, Glycine max
  unsure (1)..(422): unsure at all n locations
ctgtccacagttcaaaaggagtgttgngaataaatntactgagaactatattcaggatgtaaagggtcgttttcaaggcttctccccacataaattctagcaagttacatctactaagggtgtacatgggtcagtttgggttaggtttgaccaaacccatgacctaacccaatcaaatttgaacgggtaggtttgggtcgcgtttccaagaaaaaaatgaaaccaaacccgtttgtaaatggttggggttgggtttggccgaccaacgggtcaaaacatttagttttaattgttcctttttaaaatgcaatatttttataagctaatttttttattaaattgtaatacattacatataattgtaacgtatagtcaaatgtgaaagtaaacatcaggggaggaatcacattgttgtcatattg

SEQ ID NO: 159500 - DNA, 361 bp, Glycine max
  unsure (1)..(361): unsure at all n locations
agcttccaggcttgctaatggaaaatttnctttttttgaaagccacatttctgcacaacagaaggaagggcaaggagaaagtgagtaaatatatcaaatcaatgacaaactgactaacccataacttcggaagtaaaatggtaaggaacatttcattcgtaatattgggcttgcatgcatgcatgtgaatatgccttcagtcaaaccagacattttatgtgcatgcaagagagaaaaggagaaagatctaaccaagcttgggcaaccacatgactttgaaatattccatgaaagcagtttggtcaacaaaatccaacaagaattgttccaaggcaagcgatgcattaatacctccccaaat

SEQ ID NO: 159501 - DNA, 356 bp, Glycine max
agcttcttgcgtatccgctcttggagctcttatttttccaaaaacaaatccctgttattactagctattttgaattctttagttcctgaatgtacaacctttaaattggtgctcggtcccctctttgttttatgcaaaaaaaaatcggtattattactcgaaccataaggaataacatctaaacaagttatgcataaaatgatacttttttattttttggtatttttccatatttgattacactgttcacagatgagacatgatggaatgttgtacaaggaattacatgatggaaagaatggaggttaatatatatacatgctctgtacacaacaaaacttttagatagaagaaaa

SEQ ID NO: 159502 - DNA, 347 bp, Glycine max
actcagcttccaacatgggtgatgtatcctcttatgacaatgactttcttactaatacaagaagaaagccagaagccgtgaagaatatggatgaaagggtccccaagtgaatgggttctaccccttctctcatgcccctaacttttattttgggcccctaaaagaactctctgatgtctcccttctatttcctttaaaaagcagcataatcgtgtttttgatattgactgagccctaagcccgcatgtgctcgctaaacgcacatgcaaagttcaactagaataagtgaccgtgtgctaagccgcaatgtgcaggataaaccgcagatgcacgctaagctcaccaat

SEQ ID NO: 159503 - DNA, 379 bp, Glycine max
  unsure (1)..(379): unsure at all n locations
gcaagcttaaaggaggaccgcaccctatcataatttattcatgatctgntcagattatatttgttcatgacaaaattacgtagaaattaaaaaaacatattatcaaatcatgttgttgtttttctgttttattttaaagtagatgctactgatattgatttttatttgtcattttttaagaaaataatgcatttatttacttattaattaaaaattgaatgatattaattattttcttatcaggataaaaaataataatatatacaatatcataaaataaatgaaattaagaaataaaaaatattaaattaacgtccaaaaatattaataaattatcaacttgtaattttaaatgtaaaaaaaataaactctaatgaac

SEQ ID NO: 159504 - DNA, 201 bp, Glycine max
atttatctctcattgattattccaatttcgcttctatctcttagacagctaagtaatctggcaagcttaggttcactggaacaaccacgttaagctatccctctaacctaatgataacgataatgcatggatagggggtaaagagtgttgtggccctcatatttttcattaatttgtgcgttacttgcttgtgtacactgt

SEQ ID NO: 159505 - DNA, 381 bp, Glycine max
agcttagaattatacaataacactgtgtggctttattatgaagaccttcttaattatcatgctatcatggaacttcttggtcttttctttgtagaacttggcattctcatacgcttctaggaagatctcatctaactcactcagttgcaactttctttcctcaccagcttgatccatagagaagttgcaggtcttcactgccctgtatgatttgtgttcaatctcaactggaagatgacatgccttttcaaagacaacccgataaggagacattcctatgggtgctttgtacgcagtcctatgtgcccaaagagcatcatctagcctggtactccaatctttcctgcttggctgcacaatcttctctaaaattctcttgat

SEQ ID NO: 159506 - DNA, 225 bp, Glycine max
  unsure (1)..(225): unsure at all n locations
taagagcaggggaggaggattttttttggggaaagtttttttttttctcccncccccgagacgcctgtatcaaaacgaacccactcgatcaagaccgggaaacagaccatatacgacaaaaaacaagggcaaagctgcgaaatgcgcatacaatcagaaaaaaaccctcacccctcacaacagagcgtgaccaacccatgcaacaaacggtcggcagagggacaa

SEQ ID NO: 159507 - DNA, 387 bp, Glycine max
  unsure (1)..(387): unsure at all n locations
aagtcacctgcagctgcagctgaagatnagtttgtgggtggcaattatcactgaacgtgtgtcggtttcttactgcaagatcagggtaaaacttcaaggccaaatttcatgcccacatgtagtattatactatgtggaatgtggacgttaaagtattaagagctaactacaagaagtctaattccacttcaatgtcaatgaagttaagatctagcaacatccatcacccatcatatatatacatttaatcataggctttcaactaattgtggttccatggatttacgtaaaaccgtaaaagtttgtattagtttctaaaatatttcaactcgtctatcaccaacatcttgtatcgtacccaaatcacctttggttgatgaacaatat

SEQ ID NO: 159508 - DNA, 401 bp, Glycine max
gacagagagttgcgtggataatccacaaggattagaatgtgtatccttatttctacaaattatatagacagacgctgttgttcatcaacatctaccccatggagcctcattatccgatcattgcagatgatgcctaatccttataccataggaaaaaagtgaaatgatggtgcgagtaatgttcaatttttcttttaccatgttgaggatctgaatgataaagcatggatatgctttaatgctgtatgctaacgatatggctaatgctgtatgctgaagatgaacaatataacttggactcaaaaaatgaactgatgttggtgtgattgttaaaagaacttctaaataactcatctgatgtaattcaatgaattcacatctatactatatggccaacattt

SEQ ID NO: 159509 - DNA, 376 bp, Glycine max
agcttatcccatgcttctttggccggcgtttttattgttatcttctcaaatgtatcttcatccaccgattgataaatgagaaagagagctttcttgtctctctttcttgactccttcaacgtctcctttacaccttggcttagagaggcttcatcttgctcctcgaagccattctctacgatatcccacacatcttgagctcctagtagcgccttcatcttgatactccaattatcatatttgttctttgtgagcatccgcatttggaaaggaaaacctccattcgccatcttttgaggatcttgaagctctgataccactttgttggaactaagggcttttatgtttaagaaaagtgtttaggaatattggagac

SEQ ID NO: 159510 - DNA, 414 bp, Glycine max
catattccttatttccagaatggaatactatcaatatatctccaatctttaatggagagggttaccactactggaaaacccgaatgcaaatttttatcgaggcaatagatctaaatatctgggaagccatagaaatagggccttatatacccaccacagtagaaagagtttcaatagatggtagttcatcaagtgaaagcataaccatagaaaaacctatagatagatggtctgaagaggatagaaaacgagtacaatacaacttaaaagccaaaaacataatagcatctgccctaagaatggatgaatatttcacgcgttcaaattgtaagagtgctaaggaaatgtgggacactcttcgataacacatgaaggaactacagatgttaaaagatctaggataaatgcactaac

SEQ ID NO: 159511 - DNA, 267 bp, Glycine max
agcttctcgatatattatgcgtttgaatttttctttcatgtgacaagttatgaccattcgaatttctcgagagcttccgttgtacaatttctagcctcttgatatattatgcgccagaatcggacttgcgtgtgactagttatgaccatttgaatttctcgagagctttttgttgttcaatttcgagcgcctcgttatattatgccgccagaatccgactttcgtgtgcacagataatgaccatttctaattattcgacagctttca

SEQ ID NO: 159512 - DNA, 387 bp, Glycine max
cacaagttgtatgttattcagaaaattagagtatatctcttttatcttggtgagagtgaatctcctaaattctcgagtgattcaagaacaccctgactgtatcaaaggacttgtacaacctttgtgtgttgtcctcgctggaaagagggattctttgcttactatcatctccacccttgttctgttgaaccacaattacataataaacacctctgcccaaaattatcttgtgaccataactcccattttacacactcaaatcaattgattcttgagcctacattgaatttcaaaacgagaccttacacctcgttttggaatcacctcatttggagccctgcagcttccgctattgacatttctatattgttcgtcagccaccactta

SEQ ID NO: 159513 - DNA, 300 bp, Glycine max
agcttggagaggatgcttcaatggactaaattatataggagagaattatatatgggggggggggggggaccaccatatttcattatttatatacccatataaatgttactttttatttattctccacaacactccccttcttctaatttacaacaatttctacctccttcctctatttatatactatatactcctttcttatcaaactctttttaacaaacactcctttgacaatcttcttacaaaacacttcctttacaacctcctatttataaaacttccatcttaacactacatctt

SEQ ID NO: 159514 - DNA, 392 bp, Glycine max
acattacccacaaattgttgttctcgttggaaatgctttgcaattactattattactagcaaactaggtttcaaaacagagtctggcaccgcaatgagagttgtaacgtgaaggttttgaggattccgttagggtaccatgaccatgtttgttgcatttattcttaacaatttttacaatataatagtgcatccacaactaccattgtaacatgattgccaagactttataaccatgattagaactgactcataatactataaagtctagtaagttgaacaatatgcggaaattattatatattctctgctatccacattgaattcatgtgaatgtaaaagaaaaataacaccataatacttattgtggaactttcgtcattaaatgatatc

SEQ ID NO: 159515 - DNA, 376 bp, Glycine max
  unsure (1)..(376): unsure at all n locations
agcttgcagnagctcacacataggcctttattatgttttgacaaaagtggatgtgatgaatggttgatattcgagatggagaaaaaacacgttgaaggagagacaactaagaaatcatattctacttgattaagacatttttataatgtatattcaaatttgcttttctttttataaatagagaaaaagactcattttaataataatttaaaataattttacatttttatctaatcataaattattaaaaatatatacatctaattattaaaaatatctacatctaataaatttttctgaagtaacagattatttgagtttaattatcacttaatacatcctcgaggaatatatgttctcaaaaattatgaattaa

SEQ ID NO: 159516 - DNA, 360 bp, Glycine max
agcttgtcaaataatgtctgacactatttattattttgattgccactcaaacgctcccacagccttacatcttatatttttgcgcggtgtcaaagtgaacatctaattagtttatcttttgttatttattgtatcgctgctgagaacaatttgaattagaatagaataattctatttcctccacatatctattgtctctcttctctcctctgttttttataatttcctcctcaaaaccaacaattggtatcaagagctttattcttacgggacctgtaccatggaaggtgatggagagaattatgatctttgggaaaagaaaatgcaatcctacatggattctttggattaatgggatgc

SEQ ID NO: 159517 - DNA, 394 bp, Glycine max
caccattcttctttgacataatggttcacctggatgctcacttggttagagagacatttttgtgtgggctaacttatatgagatagatgtaccccttccaacattatatggaaattctaaaaaggctcgtaaaaaattacagttgaccaaaggctgcattgttgagttggtcatatctgaagaaactattgagttgtgtatagaatacataagcaatgttgattccatatggcttccaagggctcctcatatagaaagaacaacatgggaagagatcagaagagatgaactattgactgtatcatggaaagaatgggaacaatcacacttatatgttctatacaaagatgatgagggtgagccctatgttgaaataataataaactacctttga

SEQ ID NO: 159518 - DNA, 382 bp, Glycine max
agcttcaacattcaatttcgagcgtctcgtatatattacgagactcaatcagacatcagagaaaaacgttattgtcgtttgaatttgctcagagcttcaacattcaatttcgagcgtctcgatatgttacgggactcaatcagacatccgagaaaaaagttattgtcgtttgaattagctcagaagttcaacattcaatttcgagcgtctcgatatgttacgggactcaatcatacattcgagaaaaaagttattgtcgtttgaatttgctcagaggttcaacattcaatttcgagcgtctcgatatgttacggggcttaatcagacatccgagtaaaaagttaattgtcgtttgaatttgctcagagattcaacattcaat

SEQ ID NO: 159519 - DNA, 382 bp, Glycine max
caaaccacaatgactgtgtaatcggatgtctgattgagtcccgtaacatatcgagacgctcgaaattgaatgttgaacttctgagataattcaaacgacaataacttttttctcggatgtctgattgagtcccgtaacatattgagacgctcgaaattgaatgttgatcctcttagctaattcaaacgacaataactcttttcacggatgtctgattgagtcccgtaacatatcgagacgctcgaaattgaatgttgaagctctgagccaattcaaacgacaataacttttttctcggatgtctgattgagtcccataatatatcgagacgctcgtaattgaatgttgaaactctgagccaattcacacgacaattactttt

SEQ ID NO: 159520 - DNA, 343 bp, Glycine max
agcttgctgacatagttggagctgctgggttttatgtagttgttcctgacctcttggatggtgaaccctttaatcctcagaattcggacaggccctttcctgcttggataaaagattgtggttagttcttatattgagcctgtttggattaaaatgtttcactgtgagtctgtgactttgcctactgcctagtacaaggcccaattcacaaaactttctcctgcaaatatccatttgaatgcactgagaatctaaaaaaaacatatatatagattcataatgatgcttggctgtttatgttaatttttttcttttataaataaataacaatgcttgtttttta

SEQ ID NO: 159521 - DNA, 362 bp, Glycine max
agcttcagttcttaaccaaaactcccttcattaaatctgatttcaggcttaaataggtggccttgttcgtgctcgtgcgcttaatgcaattcaggaccgcttagcgcacattggtgaatttcagcttagcgcgtgcctttctcgcttagcggatggactgaagcggtgaaattagtgagatgaagcggtacgcttagcgaacttgtacaactcatcttcttccaaattcttccttgtgcttagccaatgagtgttgagcttaacggacgctcgctaagccagcggattggctaatcgagaaggtgaaaaatagtacttttcaaagcttgcctaattaacctgaaattgagaggaaatgatta

SEQ ID NO: 159522 - DNA, 381 bp, Glycine max
  unsure (1)..(381): unsure at all n locations
agctntacccatttttttatataaaaaaatcttttcataaatgagtatcatctgttttgaattactactatgtgtgtggttggattatctttgagaatacaagttttagatgcaaaagaagaatgaaatagagaacaatataagcaaaaaaaaaaaaaaattcttctgaaaaacaaaattacaatataaactcttcaaaaaaattcactcattgaaaaacattgtagatttgtagtcgtataattcttatttaaagaccaacaacatgaagagtacctattcaccaacactaatgaactttaaagtgacctcttcaaatgacaaaatattattgattagcaattcataaacaaaaccatcttaaaaattcattggactatc

SEQ ID NO: 159523 - DNA, 378 bp, Glycine max
agcttctcaaccaacttgctggctcactagtctttgttttgctacaatctcagattccataggggactgagctaagatagtctgtttctttgactttcaagaaacagccccaccagctatgctaaatatatagccgctgggtgctttggaatcatctgaaagagtggtccaatctgcatcgctatacccttcaagcacagcgggaaaccttttataatgtaatccacggtttatggttcttttaaggtatctcattaccctttcgatagcgtgccaatgctccttactaggtctactggtaaacctgcataataatcccacaacataggctatgtcgggtctattacaatcagcggcatacctaatgctaccaatgat

SEQ ID NO: 159524 - DNA, 234 bp, Glycine max
atcccattttggcgctcttaactctctctttgctccgctgccttctggcgaaatacctttaaggcctattatctacagaccatcctctaaagcccacaccacatcatacatttttcatggtccactttcgcgaagtatagaaatctatccttctctatttttgtgaaagcccttcgataccctaacttctctttttatcgaagtcaatcatgaccttcatctattttgaccctc

SEQ ID NO: 159525 - DNA, 379 bp, Glycine max
  unsure (1)..(379): unsure at all n locations
acgccgctgcaacttagtgctcatgctccgatgttatantttagacagagatttgtatggtgatccacagaagaacatagaccacagactcttgcagcaggtgtagatttctgattcatggcaagctgggttactaggttgaccaaggcattaagttttccctcaagctttttatttttagtagatgaagatgaatctgtggccacctcatggactcctctaaggataatagcatcatttcttgcactgaattgttgggagttggaagccatcttctcaatcaaattcctagcttcagcaggggtcatatcaccaagagctccaccattggcagcatcaatcatattcctatccatgttgttaagtccctcatagaaat

SEQ ID NO: 159526 - DNA, 393 bp, Glycine max
tgccctattatactaccatttctatttaaccatgggttaagttccaagttcaattattcttgttttaagtgaatccggtttatgatcccaacatggatggctcgtggtgcctaacacatgaaactaagaatgtagtgtgcagttcacgctctcctcttttttggttttgttttgtacaggaaaacgcaaggatgagcaaacatgaaaacaaatgggatgcatatttgcagatcaaaaaggttgttgaacgcatatgcgtgatgatgccatgacctatgctcaatgtgaggctggaatatgataacggacaaatgcaggatatgtccattatgatgttatgaagagatgcttatgcgatgcatgatatgaatgcattttactgacaccagagcc

SEQ ID NO: 159527 - DNA, 384 bp, Glycine max
  unsure (1)..(384): unsure at all n locations
agcttttgcaaatcattgttggtactaagtttttcttgatcaangatttggntgactacgattagagagctactagattaattaggataagcactataaagctacactacaagatagaaaagtaaagatacgtcattcatttcataataaaaacatagtaattcctacattaatatacatagtaattttagtaaaatatgaaaatagttctcaacaaaaggtccaaactaataaactatcaagggtccaactatttctagtagtagtccttaaaccagtatggctttgaagtgattcgaatgagcctgaaagttctctagcatcagtggcccactaacattatccccctcttcatatgggaccttggtcgcaagggccattggg

SEQ ID NO: 159528 - DNA, 390 bp, Glycine max
  unsure (1)..(390): unsure at all n locations
agagaatctattctgtgtangcgaatctcttcccggcgtcgacgtatgtcacttacacttaaccgctattccaggcttttatcccttttttaacatggtggtagcttgctgaggtccatagcactgccctaagacaacattgctgaagaaagtctaacacgaagtgctatgttgcctatatcaccaaatagtaacagacattattttcttttctttgtatgagtgatagatcgtggagctttttatttcatctagtcagtggaggagacatacgagtactcaaaggcagtgattgctaagagacttacacctaacgatgggtattactaactggatggacagatattatcaactataaaagtagtagcatcgtgcgctccatattgcatt

SEQ ID NO: 159529 - DNA, 388 bp, Glycine max
  unsure (1)..(388): unsure at all n locations
gaagctntgaacaatatactgtgggcgcgcagggaacnggtcatttctctcgcgcggccacagctcaacaagagtatctttcgaccacctactgtcacgttgactttgacccaatggctgttatgtggaatgtnttcgacaattccttcaaataccttattgatacacttctgaaaggttgagatgtcatgaggccatagtaacgaacttctttatcataagccatcgtccatttttcctttgaaattcgatcaacccatgtggctatggctggactcagttcacgaaatttttgtaaattctgatcaaaaatgtgcttgcaaggagtgtatgctgcataaaaatagttatgaaaaacaatttttaggttttaggaaacttaaattaa

SEQ ID NO: 159530 - DNA, 439 bp, Glycine max
  unsure (1)..(439): unsure at all n locations
ttcttgctatagtgcaacaaatcagcaagacttccattctgcatgtactcataaacttttagcttgctgactttactgttgcagcaacaccataatctcacaatattcttgtgccgaatctttcccaatgtttcaacctcaacttcataaccgtccttcttagaatcaacagattcatttcccatcttagttgctctccacaatttcttaactgccaccaactcgccattactcagcgcaactttgtaaaccttcccagatgctccactccctattacattatcctcactcagcaatttaataatctcaaactcactaaaacccagcttatgaaacgacctccactntgaaaagtgaaacccctttctcatcttcttgaagtcccggaatttgaagtaaaaccaagccaccccaacaattaacacaatcccagcaagca

SEQ ID NO: 159531 - DNA, 368 bp, Glycine max
agcttctacttatgtggcagggcgggcttctttcactttcttgtctccaacgcgagctttgaccactgttcttccttcccgcgatgcttcttttcatgtccgcctgagtgggcttatagcctaaaccatacttcccacgatttccttgggtatttatcaggctagttatgccgccgttgtctttgcctaaacccatcccgagttcataaccgttccccaacataactcgggccatcattaccgctgcatcggacagacaaggctgcccaaagaaggagtccacggaggaaatgttgaccacctcaaaagactggaaagccatttctaacgattcttctgccgcttacacataatgcatggaggatggg

SEQ ID NO: 159532 - DNA, 415 bp, Glycine max
  unsure (1)..(415): unsure at all n locations
tgatcaaaacaattatctaaccattccaatccactcatatcatacaattgctcattcaaatcattctcaaacactcatttcatgcaaaacaatcaatccactgcaatcattttccaccaattcactgttcaaacacgctgttggtacaagcaaaaaattcaaagtgttgaaatttaaataactgaaacattaaaaatgaaattaaaatgactgaacataaatcataaaataactgaaaataaactaaaatgttcaagatgcacaaatttaaatgttctgctcatcctgtggctgatcttcattaagatccagtgctggagctactgatgaatccatgctcataatggatggcaagcccaagcctgaaagctctgcatgatgatggactacccnctgtgtatgctctaaagcatgg

SEQ ID NO: 159533 - DNA, 378 bp, Glycine max
agcttgccgccacggagttttccgactatgttcttgtgtggtggaactatctacaaaaggagagagcaagaaatgaagagccaatggttgatacatggacagagatgaaaaagatcatgaggaagcggtatgtgccggctagttactcaagggacttgaaattcaagctccaaaaactaacccaaggcaacaagggggttgaggagtatttcaaggaaatggatgtgctcatgattcaagcaaatattgaagaagatgaggaggtaactatggctcgatttcttaatggtttgactaatgatatccgtgatattgttgagctgcaggagattgttgaaatggatgatttgcttcccaaagcaattcaagtggagcaac

SEQ ID NO: 159534 - DNA, 334 bp, Glycine max
tacatcagagacgctcgaaattgaacaacgaatgctcgtcagaagttcaaatgatcataactctttgaacggaaggcggactcaggtacataatatatggacacactgtaaattaaacaacgaaagctagtcagaagctcaaatggtcataaattgtcacacgggagggcgattcaggcgcataatacatcgagacgctcgaaattgaacaaccaatgctatcgataaatttaaatggtcataacttttcaaacggaagtccgatttaggcgcataatatatcaagaatgttgatattgaagcaccaatgctctcgagaaaattaaatggtcat

SEQ ID NO: 159535 - DNA, 395 bp, Glycine max
ggaccttaagcacctgcggctgcagctgccctgcgcagaaagtgttttatgatttgtcgacagtcattggatggttgcttggtagaggtacatgtaattaactaataagatttcctacgtgttaggtataattattaagaagaggcactatgtatatagacttttatatataaatcttattagagttttaacacaatctccactggtggttgaaatttattgagaattataaaataagaagaatgactcatcaaatgactagtgggacctgccaaatttgtgatttttaagaaatctgagccaacaataaagagtgtgttcaacagaatgtgttagagacagtgttgctagcatttctctgtttaggaatggtgtttgtagttattagtgaaaat

SEQ ID NO: 159536 - DNA, 416 bp, Glycine max
tatacagaaccatcaatattatgttgaatccaatcattgtgagggaccacccatttgatgcccggtggacagaaccaacagatttggagcaaccaaagcttctcaactgacaaggcatcacattaacagcaactaaacaaatatcgaattcagctttttcttatcatacaactgaaaacgagaatttagtatctaaatcaacttagtgcgattcaaattattagaatttgcacgcccatatgttcagagttgataaaattaattctataccaataaaggaagttaaaatacatatctaaattaaatctcaagcatgcactttttattgattttattagaaattacaattattaaattcctaactttatccgataagagaaaaccaatgtttcattcgtggactgattctacaacac

SEQ ID NO: 159537 - DNA, 354 bp, Glycine max
ccgcggctgcagctcctacctgcctaccgattttttatttgaacgctcctttttaaaaaagggagccggcaacaccctcccacaacttccacaacattcgacaaagaaaaaaaaacacttcataacatcggaggtgcattaaagtaatctttcaacacccttccacagcttcctctaaacatttctagaaccatgagtaaatataataaacagttctaaaattaatttgtatgatatctcacaaaaataatgcggatgcgctatagatactcacaagataccatcatctagtcgctggccggcgacatttttggcacggagaattgcatacaccattggggtggtaacaaatct

SEQ ID NO: 159538 - DNA, 378 bp, Glycine max
agcttagatccaattcaaacgacaatttctttttactcggatgtctgattgagtcccgtaacatatcgagacgctcgaaattgaatgttgaagctctgagctaattcaaacgacaataactttttactcggatgtctgattgagtcccatcatatatcgagacgctcgaaattgaatgttgaagctctgagccaattcaaacaacaataactttttactcggatgtctgattgagtcccgtaacatatcgagacgctcgaaattgaatgttgaagctctgagccaattcaaacaacaataactttttactcggatgtctgattgagtcccgtaatatatcgagacgctcgaaattgaatgttgaagctctcagccaat

SEQ ID NO: 159539 - DNA, 409 bp, Glycine max
gtcacgcgtctcgatatattacgggtctcaatcagacatccgagtaaaaagttattgtcgttcgaattggctcacagcttcaacattcaatttcgagggtctcgatatattacgggactcaatccgacatccgagaaaaaaattattgtcgtttgaattggctcagaggttcaacattcaattttgagcgtctcgatatgttacgggactcaatcagacatccgagtaaaaagctattgtcatttgaatttgctcagagattcaacattcaatttcgagggtctcgatatattacgggactcaatcagacatccgagtaaatagttattgtcgcttgaattggctcagaggttcaacattcaatttcgagcgtctcgttatattacgggactcaatcagacatccgagt

SEQ ID NO: 159540 - DNA, 342 bp, Glycine max
agcttccaagatcttacacttgtcagaagttttgtaagaaagagctacaaattttcaatgtagtttttccctagtgcttttgttgtcttgtttgtttcgataaggaacaaaaatatgtctaaacaaagaaatggagggagatgcgttgacccaaccacaaaatttttcaaaggccaaaacaaaagcccaaccatttgtgtgtaattgtgaggggcaaatgaaatagaaattaaaagcattgagttgaaaattcataaagggcaatgtcattccaagatccttgaagaatgtgcgatacgctggaaaaaagtctctatttaaaatcgtggaagagaaccagat

SEQ ID NO: 159541 - DNA, 342 bp, Glycine max
  unsure (1)..(342): unsure at all n locations
agctngngactctttccaatttctttaaattttgtcactgaaaaagttgtgacttttgaaagaatcttcaaaaacaagtcacttgaagaattgtgacttttggaaatgtattttttgaaatcagtcactggtaattgattaccattaaggtgtaatcgattacacatcaacagatgtgactcttcattttgaattttgaaaatcaaaatgtttagaaacactagtaattgattacaagtattgtgtaatcgattacacgagtttaaaatgatttaaaactgttgaaatttgaaatctaacattttaaaacaccagtaatcgattactacctttctgtaatcg

SEQ ID NO: 159542 - DNA, 374 bp, Glycine max
tgtgcaaagatagagatgatacataaagagaaaacatttttaattctagatgtctggtgaatggaaaggtttgttctctaatcattgatggtggaagccgtaccaatgttgcaagcactaaatcaatggagaaacttggtttaaaaatcacccctcaccctaaaccttataagatgcaatggttgagtgacaaaggtgagttggttgaggatcagcaaggcgtactcacattctacattggaaaagatgttgatgaagtgctttttgatatggttcccatggaagctagacatgtgttgcttgggagaccttggcaataagatagagatgttatccacaatggggtcaccaaatgatattctttcttgcataaa

SEQ ID NO: 159543 - DNA, 378 bp, Glycine max
agcttgatcttgatttttcctcagttctttaacatgctttgaacaatatacttgtccttcatttaactgtctttgggcttggcggccacgctcaacaaagtactttcgacacctactgtacgttgatttcaccaatgccgttatgggaatgttgcgacaatcctttaaaaccttattgatacattctgagaggttcgttgtcatgtggccatatcgacgtccttctctatcgtaagccatcgtccatttttcttttgagatgcgatcaatccatgttgctatggctggactcacttcacgaaatttttctaaattcttatcaaaaatgcgcttgcaaggagtataggctgcataaaattagctatgaataacaattta

SEQ ID NO: 159544 - DNA, 347 bp, Glycine max
agcttgcagccattagaagagaaagaacttgtgactagaattatgaatcaaaatgttagtcagtttgtcagattgattgtgaaggaatgcattaactgtatctcggtgagagtgtgatcctaaaatttggagagaaacgactatcatttagtactgatttttgcatgaatctctgaagtatggattgaatgcatgaaattgaggatgatgaaggccatgtttgattgtgatagccacttagccaaaaagcttactacgtgcttgaatgatttatcccttgcacccagttttgagctgaatgattgaaccttaagcctatacaactttatcctctgctaccttatctt

SEQ ID NO: 159545 - DNA, 265 bp, Glycine max
  unsure (1)..(265): unsure at all n locations
ccctaaagcgtcatttttacacattaaaaaattttaagcaggtaaattgaatttagccttgacatgtgacataaccatctatatgagagtctgactaaaatttgaattatatttccttctcctttgctctacagaatcatatgtgtatcgtncacgccatctatttctgtgattggacattacatttggcttagatataagcatgctctcttattactttcaggttgagaatgtattgactattgacccccaagaagaattcccg

SEQ ID NO: 159546 - DNA, 378 bp, Glycine max
agcttatgactagtcaagtacaaatctaagcatcttaatactttcatcaacttatgcatacaaaattgcttctatttgttttcgttccaaatcattcttatggcattatgcaggactaaatgtgtctctttttgaattggaatgggtgatgctgagcaatttttcatcttgaaactctctagtactttattgatatatgttttctagaacaagcctaatagtccttgtgatttgtctctgaatatttatattcctatcacatagcttgcctcacccatatccttcatttcaaaattactaaagagaaacttcttaatctcacgaaaataccaagataattagttgcaagcaagatatcatcagcatacagaataaaaa

SEQ ID NO: 159547 - DNA, 417 bp, Glycine max
aattaaatagaccaggcttatgcttattaataagccttataagtctgatatgtcgacatatatatatacttatattatttttttgggtacaactaatcttttttgaaactgaattaagactttaattacaatttatgtgtaagtcatgtgccctctatatttctcattatttttattggttttcctactattcctcttgaaatttacgtttcctttaactttcctattacattcctagagcaaagcatttaatgtgaacagggcttttaagaatgcttttaaaaaggctatcatgcgaggctaagcttttaaacaggccaggccgagccaaaataaaagcctttgataggctataagccaggctcatgcctcaaaaattcatggtaggctaggctcacgccttttaaagtctggcct

SEQ ID NO: 159548 - DNA, 379 bp, Glycine max
agctgggtgtatggtctaatgatgactcatgccttttgtttagttctgagatccagcaagctctgtcgaatgtttgacatcatctagaatcgatcctacaagagcaattttacttatttactatttgtgaagtgacaatttaggggaaaaaatgaacaaaatcaattttgatttacctagcaaaaatagtttcgacctagtacatagtttgttagtggttagccaaacaatagctatactgagataggcgataaatgcataagaaaacatgatggttatctgtccactagcagaatgacataggggtgaaaaaccttgtaaacctaatatagctagttaggggtgcaagcttaacgacccctacgtggcataacatcaa

SEQ ID NO: 159549 - DNA, 267 bp, Glycine max
attcctcattttctaatcattgaaactggcgcctatctattcgtagttactatctcacgagagacacgtcgactgccattaaatctatcagtactatcgcgcgaagaaatacaaacctgtgaaattcaaagctacaaactctgatgctgaacaatctgaggttccatactgagacttgcccgaatagtgaatattatttcggaaatatgctggctgattatctatcactgtaaaactcgagtacaggaaaattaatttcaggtcgca

SEQ ID NO: 159550 - DNA, 373 bp, Glycine max
  unsure (1)..(373): unsure at all n locations
agcttagcaacagccccaaaacccaaangatgtcttattttgggtcangaatnctatattaccaattttgctagctgttgatgttgcatcatagttttgctatgtcatctacctttggtctcatctctttaccttacaattcaagcaattctattattaccctttttcaatatatagaattgggaacatgccaacatatctaatccaggaaattccaccactaatatgccgcctataatccataaccaatgaagtcccccatctccaatttatttcatcttctcattttattgtagcttctgcagaaataaaataagcgcgtggttcttcgttttaacataaatctattggttaatttataattcacccaatt

SEQ ID NO: 159551 - DNA, 377 bp, Glycine max
gatgatatcggatatgacgactttaatcccaagagaatgagttcaagattgaatcaagaacacttcaagaatcaagagagaatgagttccagattgaatcaagaacactgcaagaatcaagaggaaatttgatttcgagattcaagaatcatgtttcaagattcaagtttcaagaatcaagaataatcaagttgaagattccagaatcaagaaaagactcaatcaagataagtactaaaaagtttttcaaaacattgagtagcacatgaattcttcacaaaaccttttaccaaagaggttttactctctggtaatcgagtaccactgtattgtaatcgactaccagtagcaaagattgtgttaaaaaagctttctct

SEQ ID NO: 159552 - DNA, 353 bp, Glycine max
agctttgagattttagtgtcatactcttttggttgtcctttgtaaatacatcagttaacttctttttttattaaccatgtaactcaccccatcatattttaagcatgttccatgttccaagttccaatccattgatgaatagcaaagagtagcaacaccctttagggagggtaactttttgtttatcgctcaaccacaaagtagcctctagttgtacctacgaactctgtggtaaaaagctaattgcttcaagcatcttgctcatgcctgtacataaaaaagaagggccttaccatgagcatattaatccaagaaatatggtgattaattaagaagaaaaagaaacctgttat

SEQ ID NO: 159553 - DNA, 314 bp, Glycine max
gggagaagcgaatttataatggctcagtcccctaagcacttgtctatttttcgaaattgcttaagaaaagtgatcccatgaataagattctaacctaggcgctatcgtaacgtttctgtgaggtgatctcgcgaatgatttcgcaccgtacttcgacgttcttcattcgttcgtcatagtacttacatcttcaacgggtaaagacctcgaaccaagcttttacattcattctatgtacctgtggtggtacacaatttgtctcatgtatttttattctcgatatcattcgctttctatacccccctttgacgtgc

SEQ ID NO: 159554 - DNA, 375 bp, Glycine max
agcttctagtcaaatggacttaccttgaatttattcctttgatagcctctttgagccttgtttccctttccttgttttgaagctcactacaagccttaagtgaaaaaccatgatatcaccatatccttaaggaattttggagctttggaatagttttgggaataagtgtggggggtttttgtttcattggacaacttgttttgttggctatgcttcatgatgtattttgggccatacttgatgtacattgtatattggttaaatgttggacatgctgaatgaaatgttgtttctcaaaggctatagaataaaaaaaaaatatattctaaaaaataaattctaaaaaagaaaaagaaaagccatatagttgagtga

SEQ ID NO: 159555 - DNA, 412 bp, Glycine max
  unsure (1)..(412): unsure at all n locations
tcttatccgatgcaattcttggtggtgaagctccttcttccttggcttattccctaggggatggtgcctcccctctcctcttctcctttgccttccgctgcatctccatggtgaaaaatcaccattgaaggacctcattgaagctcaaagatccatcctccatagaagctccacaagcaagcttccatcaactggtaatcagagcacaagagcttcaagtaggtgctccttaaacctccatgaattttttgctttaccttctcttccattgttgtttcttcattttttctccatgtatctcctcacatgtcttgtgctaaatgttgctaacctgattctctagagtttccaccgattaaacttgctatagaagctaagattgatnttctatggctcaaatttcctgttcttg

SEQ ID NO: 159556 - DNA, 376 bp, Glycine max
  unsure (1)..(376): unsure at all n locations
agcttgtacgaatataagaaacatctttnttgatcttggtgattctngactccatctcattgaagcgcatgtccacttgtaattccaaagtatcaaacctttcaccaacaaaagtttgaagacgatcgaacctatccaaaatcttttgaagaagagaggaatcttctccaccatgtccttcttcatcaataggtcgagcaccctttttcacccaagagccatcatgctctttttgataatcaaaggatgcaatgacagccgcgcctattagaaaggatctcttgattggaacataaggttcataatcaagagggatgttaaagtgttgaaggaagagggtgactagatgtggatatggcaatggagaatttaattg

SEQ ID NO: 159557 - DNA, 416 bp, Glycine max
  unsure (1)..(416): unsure at all n locations
ttgatgtaacagagaatatgagagcgcgagagaattctctttgaagaagagagcgcgagcaaaatatgttgcgtcaaatataatttaaaatgtaatttcaacactcggttttaataaaaaaactgatgttaacaaattgatgttaaatgatcatacgttaacatcgggtttctacaaaactgatgttaacggatacacattatttacaattatgccaccgcgtgtatgttaacatcgattttgtcaaaaaccaatgttaatctgtcgatgttaaaattgctttttgtagtagtcgacggtcgcacgaagaacacaaaacaagaaaacgacgtagggaatgatcgtggttgcaattcggtagcgcctcggcttcgtatcctcttctttctctcttctcttaattntttcaacttctg

SEQ ID NO: 159558 - DNA, 343 bp, Glycine max
  unsure (1)..(343): unsure at all n locations
agctngaatcgccagaggcaagggctttttatgtttttgccgctattgtcattngcgggacaggggtaagagtgagaagtgcataccgccattcctcctggtgggacatgcctacgtggccagtcccgccattggagctggcgggataggctatggcactgtcttttgatgcagttgatgcaccctgatgggactgaactgtgatgagtgaagcctgtacctagggttcacatgctatctctgaaactttttttgatgctagggctaaagtacttcacatgcacccagttgtaattttagaggaaaagaagggacttgtattgggatagaattcaaaaatgac

SEQ ID NO: 159559 - DNA, 359 bp, Glycine max
  unsure (1)..(359): unsure at all n locations
tgtagacctatgtcgacgctntgttaacctgtgacgatttctctacgcaaagcttgngtttgacgagtcttattctcaacacatgtgttgtgctcttgcatacttggcacttatggataagtggcctcaataacttaagagagggggtgaattaagttcaaaacatttccaactcaatagatttttaatcccctctttaaatgaaatatgggggatttataatgcggaagaaaaagcagcattccatttaattgatgttctttaaaagttcaagacaaaatcaattgctgtaaaggttatgagataacagaagagagaattgtttactcgattattcttgttctgcccgttccagtgat

SEQ ID NO: 159560 - DNA, 372 bp, Glycine max
ggatccttaagtcactgcagctgcaactgatttttttttctatacattccaatccactcaattcatacatttgctcattcaagtcattcacaaacactcatttcatatcaaacaaaccactgaaacatgagtcaatcatttcactgttcaaacaagctttttgtacaagcaatcaacactaaaacaacataaaattaaaaagactgaaatttaaagactaataaagcataaactaaataactgacatgaactaaatatctgataaaataatctgttcataatttggaaaatcttaaaaactatgcagaatttaaaactcctgatcatcctgctgctgatcttctgcatactcgttcagattcagcactggag

SEQ ID NO: 159561 - DNA, 345 bp, Glycine max
  unsure (1)..(345): unsure at all n locations
agcttctatggaagtgttgcttgagaggattttttcccgtgagttcctacacttctttcagagaaaggagcttaacattttctcctcaaaaaactgaaaataacactactaagtcttcaatctgtacttaatgatgctgaggagaaaaaaatcactaaatctgctatcaaggaatgggtggatgagctcacacacactctctatgacgctgatgattngntagatgaaatcacaccgagacattgtgatgcaaagtggaagtgtgaactaaagtcaacccattggtgattaggcgccaaacgttctttttaattccttcaaaaggttttatggggtcaataatta

SEQ ID NO: 159562 - DNA, 238 bp, Glycine max
ttccatgcagcaacctggagcaattgaacagtccgaagcttaggctgcaaataataccataaaactcctcaaactaagcgcagaaacaaccacacggagaacaattgtgacctttccacaacagatacaccctggatggaagaaataccctaacctcagatgggccaacccttcagaacgacaacaacagcctgctccttgcttccaaaatggtgctggcccaagcagacaatacatt

SEQ ID NO: 159563 - DNA, 355 bp, Glycine max
agcttgatatgatgttttgttgaagggtgtttttttctgcttttattggtgaccacagagtggtacctggagatatgtcgcgggggtcaagaaaccttggggacgtcaggtggggttctattgcccaaaaccaagcttgaccaatcccgacccaacccgggcatagtcgatcagtgagaacctatgatgtacctaaacaggcgagctcctggcagtcaacagataaaaggagcaaagaccacaaagcaaggaggcttgtggtggctggccagttgtgaaacttgattgatatgtgagatatggtctctggtaatcgattaccaagggtgggtaatcgattacaacgcttaaaaat

SEQ ID NO: 159564 - DNA, 378 bp, Glycine max
  unsure (1)..(378): unsure at all n locations
catcttgtgtcacaattcattgtgacagtcaaagtgccatttatttatcaaatcaccgaattgtccatgagaggacaaagcacatatatgtgaaactacacttcatcanagatgtgattgaatctgagaaggtgaaggtatagaaggtttcacagaagnaacccgactaatatgttcacatagtccctctctagtgtcaagttcaagcactgcttggacttgataaattttgaagatgcctaaagcagattggtagaagtgcagccttgaatcacaaggtagacacttgctgatttagagtcaaggtggagatttgtggtgtgtgactcataatcacaaatgacacacgtgacaatactatttagtattgatgtgata

SEQ ID NO: 159565 - DNA, 246 bp, Glycine max
  unsure (1)..(246): unsure at all n locations
aagcttttttttttttganacaagagccccgacgcatctgcatcaaacacaatccgtcccgctgcaatttatcatatttacgctcagaccatttacaatgttgatcttacgttatcgtcaatcaccttccatcatttacgaccagcttatgtttaattgcgtctcctgtcgaaccatggaagcagaacctaggtgtgttcctttgagacaaacccaactttttaggttcactgaatcggtccctgc

SEQ ID NO: 159566 - DNA, 380 bp, Glycine max
agcttgaagcacttccttatgtagagaacctttatttatttctacttcaattatttctttcatcctgcttgaagcactttttatctagagaaccttgatatggtttgtgggtagcatttgatggttgagttgtgagttgggtaactcctattcttgtttcaattcatgaaaataagagtaggacctacactaacttcccactcattgaatatagcagaatacaaaactaactaacataatgccactagctaactgatccacttaaatggttaacagctattggcacatgtataaaaaaatgattgttgactgaaaattatttggatttaaaaagaggtgaaaggaatgaaagaggggatgtactttacctgatttcttta

SEQ ID NO: 159567 - DNA, 377 bp, Glycine max
agctttaacctcatcgtctctcacagtctttatatttgggagccaatccagtccttgtgttcggactcttatccacttatgatagccgccgatgatctcattactgcttcccctaagctctctgttctttcttcacgccgcatcccatgccttgcgaactccttggagtaccctcgcgttggggtcactgaaacctcgtgcgatgaaaggcgtgatgctttcgtctgatggcattcctctcatgggacatcctttgccgctcttttcacatccccggtcgaacgtgtcatacatggccaaaatggcgacgaccgggcttttcttgccatgatgaaaggcgaggaaagcgtccatcgctgctaagtccactaaccctt

SEQ ID NO: 159568 - DNA, 367 bp, Glycine max
agcttgccaaagtgaaggctcaagtttctgtattcaagggtgttatgatggaaaacattgaaaaggtaagacctatacaaaatgacattgtatagaggtctttaacagagtcgatgccatcatccatcaaatatatagtactaatttggattgaaaatttacattttctcgtaggttcttgatcgtggagaaaagattgagctgctcgtggataagactgacaaccttcggtcacagggttcattttcttctttattcttttagatatatttttaatctaatttacacgactttttggtcattttttttttatttttttgttaaatatttcttacattatttaaatttttggcgttaggatatgctg

SEQ ID NO: 159569 - DNA, 361 bp, Glycine max
agcttgccccagctcgcccaggcgagctatttttcttcctccagaaggcaccgccttctggtggaacttcctggaaggcctaagtgggcctggttgctatttgcaccccctgtttactaaatacacccctaccttttttttgtagattctttttccgcaatgctatggaactttacgaatttcgaaacgatacttgttttctttctgtaatgtcatggaaccttatggattacgtaatcatcccttattttcgctttcggaatgttacagaacctcacaaattgtgcaacaatgctttcttttgacttccggcatgttacggaacctcatcggttgggcaacaatgctttctttttacttc

SEQ ID NO: 159570 - DNA, 367 bp, Glycine max
agctttacagcatatttgagcaacgatcttacttttctataaagaaaataacttaatgccattaacctaaggaattaaaacaaactaaacggctgagtgtaactgaaattgatggcaaccaaaagttacccccaacagccaacaagtcagccaccatttggtatcacaaaaggctgatgcctaagttgccaaatgggcccttattacaacttgaactaaagcccttttaattgattaacccaaaacatatttttggtcatccaactttacaaggattgggccattatttagaccaactaaacactttaaaaatgtaataaagcggtggaattaatccctcatgtggccatgatacaactcacaacct

SEQ ID NO: 159571 - DNA, 374 bp, Glycine max
  unsure (1)..(374): unsure at all n locations
agcttgagatgaggaagtgtcgaatgttttttcttcctgctntnattgttgaccacagagtggtacctggagatatgtcgcgggggtcaagagaccttggggacgtcaggtggggtgctattgcccaaaaccaagcttgaccaatcccgacccaacccgggcatattcggtcagtgagaacctgtgatgtacctaagcaagcgagctcctggcagtcaacatataaaatgaaaacaagaccacaaagcaaggaggcttgtggtggctggcccactgtgaatattgtgtaatatgtggatcgcggcctctggcaatccattactaagggtgggtaatccattacagggcttaaattgaagaccggatgcttaaat

SEQ ID NO: 159572 - DNA, 367 bp, Glycine max
gatgcacaggccaaagttgattatttgaaagcattgcattaccatatgagcgcgaatagtgcatacaagaatgaaagctttgccaatcaagccatcaagaatatgaaggaagtggttcttgaaccccatgatgatcttggacatttaaaggcacatgccttccaataaggagggaatgatgagaatcctgaaactggttaaatacaggtctaaggcccaagtggataaggacaaacaccccgagtggaaaatgatgaatgcctagaggctgagacactacctagactattaattgttgttgaacgcctagattaatatgaaggcccataccaaatatgctctatttttattaataatatttatttat

SEQ ID NO: 159573 - DNA, 369 bp, Glycine max
  unsure (1)..(369): unsure at all n locations
nagcttgngatcattggagcatttagttctttcttttagggcatatcatnttgcatgctgaaaaatctctttggttggttttcgtatcgagcactacagtaagaaatcacttcctttgagtcaaagtagatttgtaatagcaatgcatgtcttttgatgttgtttgacaactccacaaaacctacatttgttcttcataggattcaaaaagatcctaggaaaatgtcttatgatacaattcttgcaaaatgattctcacacataaagtattaaattaaatcttaaatattgtgtatagcccatgttgctaaaggtttttatcaaatggtgatgaaatttatagtttatccaaatttttattattcatta

SEQ ID NO: 159574 - DNA, 233 bp, Glycine max
gatatcatttctcttcccagctggaacatatctattgggacccaccccctggaagtttattaagggtccgaaccacttgcctctgcgaagattgactgtttaaaccagggaatgaaagttcgattgtgctcttgcaacaaccttatcatgttgatttttgagtgaatacgactaagatgcggcttgtgatgcatctatgtaatggaccgtctcaactgtgtgcgtaatacata

SEQ ID NO: 159575 - DNA, 367 bp, Glycine max
agcttctgagatatttggttgcagatgacattcatgttgatgctgacacaccgtatgctgaagttgaggtcatgaaaatgtgcatgcctcttctttcgcctgcttctgggattattcatttcaaaatgtctgaaggtcaagcaatgcaagtatatagcattctattccacataggaagtacaattgttgaaattgaaaaagataataaaattgtatcaccttttgcaggctggtgaacttatagcaaggcttgatctggatgatccttcagctgtaagaaaggcagaacccttcactgggagcttcccagtcctgggacctcctaccgcaatttctggtaaagttcatcagacatgcgctgcaagct

SEQ ID NO: 159576 - DNA, 356 bp, Glycine max
  unsure (1)..(356): unsure at all n locations
agctncattttatatttgttattgncaatctattctgcagaatagttacaaattaaaatttaaatacaaagcaaatttgagcaaaattgagttacattaattctacctcactttcaaaatggttttacatcaatttttttaaaaaggcaatttcaagacgtcttcgattgtgtttttgtttctttaatctattttttacaataatttttaaaatagagatgttttgatttttttagtttcttagtcaccatagcattgcattagtataaaatattaatcaattttactaatgactaattttttataaagacatatatttattaatactaaataagttatttatactaataccactc

SEQ ID NO: 159577 - DNA, 358 bp, Glycine max
agcttgcttttttctcgcccaggcgagcatggttgcttcctccataagcaacagccttctggaggaatcttctggagggcccaagtgggcctggttgctatttgcactcccatttttactaagtacaccccctgccttttttttggtgattcttttttcgtaaagttacggaaacttacgaatttcgtaacgatacttgttttctttccgtaatgttacggaaccttgcggattacataatcatcccctttttgacttacggaatgttacggaacctcactaattgtgcaacgatgctttcatttgatttctggtgtgtcacggaaccttaccgattgtgcatcaatattttcttttg

SEQ ID NO: 159578 - DNA, 430 bp, Glycine max
acctgaggctgcagcttcgcagcagagaatagctattttatatctcttaccatcgaagacgatgcgatgctagtggagttggcattggggctgcatgatcaaaacaaaacgcctatatcttatttctcggagaaattgggaggagccacattgaactattgcacctatgaccaagagttctatgccactgtgagagctcttgatcataggcaacactatttgcgttctaatcactttatatcgcattcacattatgagtcatcgaagtatatcaatgggcaccacaaattgagtccaaggcatgctaaatgggttgaatttcttcacatcttttaattctctccaaaatacaaagatgagaagagatatgtggcggcttgtgcactttcacggaggatgctttaatccaatttcttgaactcacttactt

SEQ ID NO: 159579 - DNA, 369 bp, Glycine max
  unsure (1)..(369): unsure at all n locations
acctgcggcatgcagcttctttttcatttacgaccgacttttatattttttgactcaancggacaacgcgagataaagttatcgtcgtttgaaattgctcacagtatctgttttcaactccagcgtctcgatttctacgggacacaattggacatccgagtcaagacttattctcgtttgaatttcctcaaagcttcttcttttatttacgagcgactcgatatattacgcgactcaatcggacatccgagtataaaagtattgtcgtatgatattgctcacagtttcttgtttcaattcgagcgtgtcgatatattactggacacaatctgacatctgacgcaaaagatattggcacttgaatcttct

SEQ ID NO: 159580 - DNA, 449 bp, Glycine max
  unsure (1)..(449): unsure at all n locations
ccatgacggagtgttgcatcacagattattttttgggtgcatactcgtacgcctccatttacaattgtcaccgaccatatgagccttaatgaattgcttacacaggttatacagaccccagaacagcatacctatttggctcgtttaatggggtacaattacacaaattctatattcgttcggtgctcacatctatcaagcatgctgacgcgctgtctctactaccagagcacatgccacacactgccacgatgtccctgctcctttcagtcccatgtntgactctttcagatgaatcgcacaagaaattactccgtaatctccaatatattcagcagttccaggaggttgctaacagctctgagtcacatcctgagttcactattgcaaatgacctcgttttatataaaggtcgtatctggttgcacgtaatattccactaattcact

SEQ ID NO: 159581 - DNA, 389 bp, Glycine max
  unsure (1)..(389): unsure at all n locations
tagcttgtanggttaaagtgtcatgattgtctcctgcttattcaacaattgnnagcccgggctatacgagacatcttgccacacaatgtcacgttagccataactcgcttgtgcgttttctttcatgccatatgtagcaaagtcattaatcctgtcaaatttgatgagatggaaaatgaggccgcaattatattgtgtcagttggagatgtattttccccctgctttctttgacatcatgaatcacttgattgtgcatctggtcagagaaatcaaatgttgtggtcctgtctatttgcggtggatgtacccggctgagcgatacatgaagatcttcaaagggtatacaaagaatctatatccgtccaaaacatctattattgagaggta

SEQ ID NO: 159582 - DNA, 476 bp, Glycine max
  unsure (1)..(476): unsure at all n locations
taagctcatccacatcgttcttgacatacacatcgatttactttattgtgtcgtatagacacaacatgttgtagctgcactaacatgttttacaaaactgatgtatatatacaataacttcatttttccaaaatgatgttgattgataagtaacatcgattttggtaaaatcaatattaatgtgaaatatatgatttttttataatctactatatacatcggcttttaataaatcgatgttgtcattntattttacatcgacttagaaaaatgattaacagattactttaacatcagtaataaccgatgtgaagtctttatagccgatgtaaaatctatttctatagtgtgtgaaggctttgcaaagttgatttattctcattgtgcaaatgagcaatacctattgtaaattaatgggcccactggatcatctaccacctatgcattggttattagatccaatgtgtcttgataaa

SEQ ID NO: 159583 - DNA, 267 bp, Glycine max
gtggtccgacagaggagtcagctgtctgctcaatgccacagagaaacttgtggacgtgtttgtgctagacatagactgacgtgcttgccattatgcacagctacctgtaatactactgctatccacagtgcatcgattcttttgaggcacaccaataagccctgagaggatggtccgatatgatcttacccttaacggaagtcaacaaatccctctattgctgcccaaagacgaagcaatgcggatggactgatgtgctcttaacta

SEQ ID NO: 159584 - DNA, 369 bp, Glycine max
  unsure (1)..(369): unsure at all n locations
cttctctctctntcgaatttgcttagaaaaattgtttccgtgaagaaaatccaagtcgaggcgcttccgtaacgtttccgtaacgtttccgtgagtgatttcgtgaaggttttcgaccgttcttcgacgttcttcattcgttcttcatcgttcttcagtcttcaacgggtaagtacctcanaccaagctntttaattcattctatgtacccgtggtgggccacatttggtttcatgtatntttattctcgttttcatttactttntatacccnnctttgacgtgcttaagccatntatttaagtcatttctcgcttaacctaaaaataaaataaatttccaccgatcgtttgaattgatcatccgtaac

SEQ ID NO: 159585 - DNA, 376 bp, Glycine max
  unsure (1)..(376): unsure at all n locations
acctctaagcaccgcggctgcagctaggagaagcgcttttttgtttctgtgannaaaaaagaaagcagaatggtgtgataaaaatattgaggttatgttgaaagtgtgcatagaagaggtgaatgttggaaataaacctcatagccacttcactaagcttggttgggcaaatattgcagaaaagttcaataaggcaacaaatctgaaatatgaatataaacaatccataaataagtgggattctttganaaaggaatgacaattatgggttaagcttatagggaaggacacaggtctcggctgggatggggagaagaaagtcattgtagctagtgatgaatggtgggaagccaaaatttatgtatgtattattcaa

SEQ ID NO: 159586 - DNA, 285 bp, Glycine max
ttcatctatgagttttctatctaggctcgcgccccgcacttagttcggagcctaactggccgccttatgtcagcacctaatgctgttagcgactgccgacatatgcttttgatactttgatacgcgtctcaggacctgagcctaagacgtccagttgaggaagaagccctcagctcaagtcttgtacaaaatgatctgggatgtgtcgagaggatagctttaacaggcacctcaatgcacactccaagactttcggtctgctgtgttataagtatagctccagtc

SEQ ID NO: 159587 - DNA, 434 bp, Glycine max
ggaccctaagcactgggctgcagctgaccaaggagaatatgtactatcctatgggggcatgtacgaatgattgctcctaattctgttgaactatagctgtcatacccctctaatatcatatataacagcttcacaatctaattcaataataatccagactcaagcttttaattttttttagtttaagtcagattatatatattaaaaagaagcttattaagttttatagactaacctatttagtaataattaatattgtattaataaaaatattgtttaatatgaaatataatacataattattttagaatttggatatttgaatattctaatgtcgaaataagcaattaatgtaaacataatgaataataaaactatgatattttctttggtgggcataaagatttgattcctacacatggatgctatagata

SEQ ID NO: 159588 - DNA, 323 bp, Glycine max
cgctgacttgacaaagcatttgaacttaatccaatcacaagagccccataccacaaaacagggttccttacataaactgaaaatatcaattaataaagattataaatattgtgaatactacgatatacatactaataactattatatagcttatacaattaattgattctgaaaaaatatttatgattatatttagtttagtgtttaacctgacattattataaaatccataactctaaatagatttattcaatatataaaagctgttaaaataaaataaaaagacaacttcttgaaaagaaagataattctatgaaataaaa

SEQ ID NO: 159589 - DNA, 437 bp, Glycine max
acctctaatcgcctgccgcatgcagctacgactcacgaatatttatttttctctgcgacctcagcaccaggctacttagcatgacacctgtacaaatcaagggcaactatgataccatgagaacagtccattgtctggttcaagaaaagaaaaattaactggcatcaaatttcataaggatgaaatcatattcttctatagttcacattgcataaacgtgaccaagcattttatgactcccatctggcatggaacacacggtcctgaaataagggtccagctaacacgtacgacaaatattgatgtgtgtgtgtgtgcaatagcttatagtggacacaaatatgttcaaggatcagattgttattgtactactacaagttgttagatacaagggatcaccttttatatgcaactttaagcacatacctaccgcgacc

SEQ ID NO: 159590 - DNA, 348 bp, Glycine max
  unsure (1)..(348): unsure at all n locations
gaatggccattagcatttgtcaaggtgtatattatatttcattcacaatatattctttcgtagcaaaatggatttaattaaaaaattaacattatatatttaataacctcatgaatttgatataattaaatcattaacttctaattaatgattataattgtatattntctcttaaaatatactttctaaacaaaaagctaatttcagataagatattcttcaagataattaaaaaatgactacaggcttctgtttctaaatatggttcttctagtaggttaaagacatcctactttagagtatacaagtgtattctgctctaattattatgtgagacgtgcgttatat

SEQ ID NO: 159591 - DNA, 330 bp, Glycine max
  unsure (1)..(330): unsure at all n locations
agcttcaggttacagaaggagcatcnntttantttatgggacnccaccggacatgcggagaataagctacccgtcgcagaaccacgaacgacgcatcacatccaaatggagcatccggaactattacaagactctgtcggcccatcgactaaaaacatactggactcagagataggtacaaccatccatccccaacatggaacgccgtgatatctgatgggactcaactcgaacatccgtgtataaagctcatctcaaaacgacacgatcacgagctcctgatctgaatctcaagcgtgtacatatattactcgacggactcacaacatc

SEQ ID NO: 159592 - DNA, 273 bp, Glycine max
  unsure (1)..(273): unsure at all n locations
tgtgagantgagaatcatgtaggtgtagtacccatagaaacctgttaccgtagttcctgggagatgtctggtatagagttgttaagagtataaagtagttatgatagttatgaggagcagctatgaggctaaatgtcaaaccttaagagagtgtaaagtcgttagtaaggtattggtttgcttancatacacgggttcgagagtgagtgttcttgccgtaggtagatgacctataggattagtggtgatagttgtatgattagtgagataaat

SEQ ID NO: 159593 - DNA, 414 bp, Glycine max
gcttgcaaagggtatctattatatctctctatgggtggcagaacaaccctcattaactctgttttaacagctttactcatttacttgctgtctttttttacaatccctaaaaaagtggctcataagatagtctctatttagagaaactttctttggggaggtggcaatgaggcaaccaacatcccttgggtcaattgggatacagtctgtcttcctaacaacaaagaggggttagggattaaagatttgaacaagtttaatgacgccttgtttggaaaatggggttgggagttggcaaataattataaccagctttgggcaagaaccctaatgtccaaatattgtggatggaatgctctattctatggcagaaacaatgcagactcctcttctttgtggaaggatttaatatct

SEQ ID NO: 159594 - DNA, 305 bp, Glycine max
  unsure (1)..(305): unsure at all n locations
ttacttgtgccagtttatgtggatgacatcatttttggttcactaacanatctctttgtgaagatttgtgccaagatgangggggagttgaatgtcatattgaggagtaaatactttcttgtctccagtgaagcaatggccatggaacattttcaacaaaaaaactgcaggaacttctaggaagttaagatgacaaagcaggatgtcaactctatggtattaattcaccttatgcgatgaaaaggaatttgtgacaaaaacatatngatcatgggtctacttactgacttaagaactgacatatg

SEQ ID NO: 159595 - DNA, 404 bp, Glycine max
  unsure (1)..(404): unsure at all n locations
cagcttattacacgtgtttcttntgtatattttgancccgaacgcaggcgaggttcactttattgcttctgccgctgcaaacatatcaagctaagcttacttttaccaaccaattacacgccagtgcgaagtgagacgcttatgctcttgactttggaaaagaaaataacacctttacctccaattacgcaagtcaccacctagggtcgaggagtggaatttaaaacgataagctacgcttttaacaatataataatgcataacaagaagagatacagatggaggtaatatctaccaatctactaaaatgaagggaggctatatttccaaacgacaaagatggacacatgaatggtacgtggcgtgagttttacattacaatatgggttctattacatccaact

SEQ ID NO: 159596 - DNA, 376 bp, Glycine max
  unsure (1)..(376): unsure at all n locations
tactcagcttccttggacaaccaacgtatagagatggtctattgtattcattatttgatttgacacatcatcgtaggtagcacgtgccggctgtcgttgaagacatatcaatcacacgaatgtaagttcactcaaaccacttatcaactcagaaacatcagttcactatataataactaatcgaatcgagttaagaaaatctgtagcagaacttcaacagcgaagttgaaacggaaattcggaactcgttattccccttgggctcggaataatgatggnggcgaaaaaaacgttatgtactaaccttgccgtcagggtgaaaacaagggtgaatgatgccgttcatgtccaagtacaagttgtcgaactccatgcc

SEQ ID NO: 159597 - DNA, 461 bp, Glycine max
agcttattgcccgcatttacattaaatatattaccttcttgcagcaattaatacttgcaacaacattggatttttgtccatttcttattattattaaagcccaacagtattcacaaagaatgcaagcccacttaacatcagcaaaatcaccacattatttgaagctattcattaagtatacatagtaaatgtttcagcctttcaggatccacagccaagacattcttttaacagatcttcatcttgggtagacatttaccaagtctttaatttctcaagttgctttcttcaaaacacccattatggccaactcacatacagataccccttttaagagaacaggcacaaagcttcacaaattagaattgatataaccaagattgtccttactcctgcaggtggtatactagttggcttcctactcatacgaaccaatgaatagtataataatgaaacagtaa

SEQ ID NO: 159598 - DNA, 357 bp, Glycine max
ttataactctcatgtctgtcagacaccattagagagtttaactttagaaaattaaaccatttgaaatgtcaaaactattggagagtacatctttgatttattcagaaacatcactggtatcgataccaaacggtgtatcaatacacaagctttatgtgaaggatggactccttcattgaattgaattcacgtcaaagcctgtatcgatacaaacatgtatcgataagctttgaaatattgggcgtgtaattcattgaaacttttaaacatttgtctggatcatatacaattgaatgtaccaaagtaaactttggaactgttggaaatatggtctcatttgaaaactttatctatatg

SEQ ID NO: 159599 - DNA, 370 bp, Glycine max
  unsure (1)..(370): unsure at all n locations
agcttcaccggatgacgccgatcgaacattctcttatcgacgtcatgcaaatttcgttcagggattgaattgaaaactcgataagcgacatctgtcgtgaagtagcgaccgatatttttcagccgacattgcacaattctttttagaaaagctcgctggtcgataatggtctttttacggcagagtaagttttcttgttttggtgttgcataaaaaagttacaatgcacttcggctaggtttttcgtgcgagttcaaccgacattttgtttcggccaggaaaacattagcccacctctgcaaaaaaaatatttgctaaccggcttcatgcatatttcattccacgattgaatagaanactcaatagccga

SEQ ID NO: 159600 - DNA, 216 bp, Glycine max
  unsure (1)..(216): unsure at all n locations
ccagcnnctttagactcgacgtcatgttcctgccgagacactatattttttcatcatgcngtgaaaatagtttttaccgagatggctaatgtttcctggccgaaaaatgaatcatgccactttcagccacaccaaagtcngttgagctcgcacataaaacctagccgacctacatcgtagatttttatgtaacaccaaaaccaagatacttcctct

SEQ ID NO: 159601 - DNA, 431 bp, Glycine max
  unsure (1)..(431): unsure at all n locations
agcttatgttggctttggttctggatgcatctttatacttcatttagctaaagnacaggtatgccttcttcaattttaggggatttaatcatttagagaagatagatcaagaatcaatgtcctaaactcttcaatatatatttcattttaatctatattcttatcaactttctcctcccatattcatttctctttctattattttctaatgttatccatttatttattctaccttttgtgtgtgcctactatatttgaaaaattaaacaaaaaaagcacccttactttacatttggttattgtttctttaattacaaacaatggttgttatggttttctcatcttagatcttatgctccaatattattggaattatttaaatggttctttaaatactgcatgttataataactcgtatatttctttctttt

SEQ ID NO: 159602 - DNA, 457 bp, Glycine max
  unsure (1)..(457): unsure at all n locations
taagctcttgaagaactctgttttgcatcaaagcaatctcagaactcaatgtatatggatgtacatgtttcttccttcaacaagagacccctcattactatggaaaagttgaagttgagttgcatccattaccccgaaaccaattatcttctgccgtgtcccgatatgttctgagattcttgtcaaactcaacaagagtcttggctctcactacagggtcgattctttgtattcacgccacgagccacacaccaatagaactcttcatttgtaacccatatacaaaaacttggttacccattcccaccccanaggaagttcataaaagatatgatgctgctgatcccacaatggtgttgctagaatcttcctacgacggctgtgatgatgaatacatggtatttcaccttgaacttgaaagccaacagattggtcctcaattatgcctgcaagattt

SEQ ID NO: 159603 - DNA, 432 bp, Glycine max
agcttgtattcgcctcatactggtcgcttcttactgtagtaaacagaccgagctaatgtgtgatgcaagcgattatgccatgggtgccgcgctaagacagtgacaagacaagatattccatgccatatactatgccagcaaagaccagaatgacacatgggtgaattatgctaccactaaaaaggagatgtcggccattatctatgccttggagaaattctaggcatacctggtgggctctaacgaagtcgtcttcatagatcatccagcagtccaataccttttcactaaagcagattcaaagccaacgttgataagataggtcctttagattcaagaatttaacatcatcatcaacaactagaaaggagctaacaatgtattctccgactatctctctcgaatggggaatgaagaagtgactcaagagga

SEQ ID NO: 159604 - DNA, 368 bp, Glycine max
  unsure (1)..(368): unsure at all n locations
tttangctatatcatagaacacaagaacacgattgattagagaaatatatttctatgcatcagcttgtttggtagaaaaaccaaacatatctacctactgttgtcattttatttaccatgcatttgatagtttttagcatataagttttgtcgcaacatgcccttttgcgggcgagcgaggcgaggctcactggtgcgctttccatatgaggaaagatgcgccgagtcgccaccaacgtttatttgtgggaaacgtcggataaaccgaatganaccggtcaaaatgaaaattctaaagtcgggagttgtatttacgtctgatgaatgtattagcacctctcacgtttgtctcataggacaacagccta

SEQ ID NO: 159605 - DNA, 377 bp, Glycine max
  unsure (1)..(377): unsure at all n locations
acttgattggacaacatgcctcttattcactggaattgcgagggaaacccccgctttaccaacgacaaatgtaactttacgttaaagctcttagtgggctagcttagagttttactttgttaaagctttgtgtctattgatcttgaagttataatacaaggatctgttttcagtctgtcctacggctctactcattctcatccatatgcatgtctacttctttntctgaaacgacagatccgatgacgagttccgcgaacgtactaatatctgcgacccgcctatcgactgctagccagaaatgaatcacacggaagatgaaggaaacgaggatgtgggacttcccccacatatagaaagaatgcgtgcccatgaag

SEQ ID NO: 159606 - DNA, 340 bp, Glycine max
agcttgcagaggctgagaatattagtgtttatcttgcatacgctaggagaatactggtggagagcccatagaggatcaaagattattggagaagggtctacaaaggataagagaatactagtggaaagcttgtagatgcttatagaatagtagagaaaagcccacaaatgctaggataatattgagtgaaatctacataggttttgaataatgatgcaacctgcagaggcttaagaagaatactaagaaagtctcacgaggcttaatgagaaaaaatatattgtattttatgcttgtgttagtagaaatcctacagttgtagggactgaatgtaacattg

SEQ ID NO: 159607 - DNA, 288 bp, Glycine max
  unsure (1)..(288): unsure at all n locations
tatataaatcaaatgtattatatttcgttgtaccattacgggcctatattcacatcgtcttgccttgttcttctgtnatatacatatttctcttatattgtacttcgtctattatggctttacattggaaatcaataaagtattacatctattcgcttaacttttcatatttatctataaaaacaaaatgattgagcgaatggtcctntcatgcatccaaactacaccaaccaaatctcaaatcttatcnttgtaatggtagaagactatatatgtgagttaaccctc

SEQ ID NO: 159608 - DNA, 390 bp, Glycine max
  unsure (1)..(390): unsure at all n locations
agcttgccacccagctcgcttaggcgagtctggntgctncccccagaaacaacagccttctggaggaatcttctggagggcccaaatgggcctggttgctatttgcactctcatatttactaaatacactccctgccttgtattggtgaatctattctcggcaagcttcggtaacctatgaatttcttaacgatactttgtttcatttcgtaaagttacggaaccttgcggatcacataatcttccccttttcttaataacgaaatgttacggaacctcactaattgtgcagcggtgctttcatttgatttacggtgcgtcactgaaacttatcgatcggccataatattttcttttgatttcccgatgtcccaaatttacatttagcta

SEQ ID NO: 159609 - DNA, 79 bp, Glycine max
cagctcatgtcgatatgctctagtccatttcattatttgaggcgatatagactgactttttaaaactcacccatttcta

SEQ ID NO: 159610 - DNA, 402 bp, Glycine max
agcttgtccaagttatatagctaatggcttattttcttgtagaatctatgatgttagccattccaaaatcacatttcaggaagaaaacaacatgccaggataatgaaggcacaaaaatagatgcccctcaaagttctgtcacctttgtttatcaaaccaaagtagcagaattattacgaagtataacaatttcatggtgcaaggatcctacagatcatttcctttccatgagcgtcgacaacactttggaagagaacaagtacacctgcaagattgatttggaatctggacagtcttggggtaaaaagggtctcatatcatttgaaataacgggtgcaagagtagaccatttttgtgaatttcgacgtgcaaaattctctgccacgggtccacagccttact

SEQ ID NO: 159611 - DNA, 400 bp, Glycine max
atcttgtaaaagaatacaacttctttgtgtattagccaacacatagaaacaacgtttcactatcttatggatccagtgaacacagagaaactaaaagtggagtactgtcgcgcattatatcaacttgctaatattttcacccaacccctcaaaggggagaagtttaaaagttaaaggatataattggcttgatgaacttatgagaacataattaacggagggcgtgaaaacttaattctgtttctgagtggtgtagatttaattcgtcatcggatataagagaattacagaattttaaattttggtattagtgctaacctaatgtgacgggtagtactctgatttgcttgaaaaacgacatactgctctaatatgagatattcttctatatttctcatct

SEQ ID NO: 159612 - DNA, 447 bp, Glycine max
  unsure (1)..(447): unsure at all n locations
tactttaacctaatagtacaattaacctgatatttctgaaccttatgaactcttaattgcattattgcaatgcacaccatacacaaagactaataagccagaacaagatccaacttttgtcaatactgaggatcaaagctatatgatgttgtcagtcccctcatcaaacaggtacaagcctaagttaaataaaattaagtccaaggaattagtattttaacaagttctccaagagtcatatatgtttgcacagaatggtggttgaatctcatcanaagggaaactagacttttagtctccaataaagactaaatatttcgtagacagaacggatgcctcgttgcatttacacagttccatcatacttccaaccctaatcaagtttctttgaaatgcanaaagctatatggttgcacanagaacaggggtgcagatacaatcaaattc

SEQ ID NO: 159613 - DNA, 434 bp, Glycine max
  unsure (1)..(434): unsure at all n locations
agcttctntnttattctggctatataagtggcatgggacgctgagggaaggggttcatcaccccgggcaagcatatttcacttaaaattagtgaaaagaaggagaaagaagaggaaaatcaaggtcgaggcacttccgtaacgctttcgtgatcaattccgtgaacgttcatcgtcgttcttcgttcattcttcatcgtttgtcaatcttcaatcggctagtttttttattttgaagctttgaattcattctatgcacctttaggggtcccttcttgctttgtatgttttcctcttcattcttatgctttcggtattcttttnctttcgtttaagcgaagttcgatcgaactttaagcccgaatctcacgtaatcaatggttaaatgaatttcactgaccggttgattgtatctcatttatccccttaaaaaaa

SEQ ID NO: 159614 - DNA, 418 bp, Glycine max
  unsure (1)..(418): unsure at all n locations
agcttgtgtagagggattcatctgttatgtgtgtcgncactcccgcaagatcaggacccttttctgtattatgtactacctctactacttgttattacatattacatattatcttcgctttccaaaaaaaaaagacaattcaccaacaacagaaaaaaatgctgatggggacgttttgggaggaggaaataaaagacgccatgtgggactgtgggagtgagaaaagtacacgtccagagggactcaatttcaagttcatcaagaaattttgggtcaccatcaagcccgacgcccttcgatttttggatgaattctatgttaaggaatgcttnccacagggatgcactgcatactctatatcactaatctcacagattgctgatccacaacgatcgaatgattatagacctacttcact

SEQ ID NO: 159615 - DNA, 340 bp, Glycine max
  unsure (1)..(340): unsure at all n locations
tgattttactaaagtgtaccgatagtaaagattgtgtgttgctaacagcataagcattatanggaagttaggaatgttgctcactagtatgttgaccataatgccangaactgccttagccttggctaactcccaaaatgctgagagggtgacaaatttaccactggtcttgttggggagtttcttaagaaatcactgcctttactaaccattngagctgagacaagaaacttatacttaagatcattgttgatatcttacaggctgaatctgaacttgaactcttcaacttctatagatagaagtattgtacgtttaatgtctgaatctcactccatgt

SEQ ID NO: 159616 - DNA, 384 bp, Glycine max
  unsure (1)..(384): unsure at all n locations
agcttctttntagacctcgatcgagcatctttccttgtttttttccacttgggccttagtccttctccacttgggcctttagcctgtatttggccaatttcaggattctcatcagaagtcgactgtcatttttttcgatccatttcggtgaataatatatttttgctgatatgggcaaatgttttcctagccgaataaatgggaaaatgctcagttcggccgaaacaaaacatcgattgagctcgcacaaaaaaacctagccgacctacattgtaaattttttatgcaacaccaaaacaagaaaactntctgtgctgtaaaaataatattatntgtcatcgagggtttttatataaaaattttttcattgtntgtttaaaaata

SEQ ID NO: 159617 - DNA, 450 bp, Glycine max
  unsure (1)..(450): unsure at all n locations
aagtgacctganggcatgcaagcttgcggatttggtcttcgacaatgatttgatattatttgatccggcagaccaaccccagcccccgctcccccacanataaaactggggcaaataaaaagggtgagaaagagggagaaacccatgctgtgactaccattcctatacggtcaagtttcccaccaaacccaacaatgtcattactcagtcaataacaaaccttctccttacccaccacccagttatccacaaaggccatccttaaataaacgacaaagcctgtctaccgcacttacaatgacgaagaccacctttagcacaaaccaaaaaaacaccaacaaaaaggaatttttgtataaaaagnttttatgtgtgggggggagattncggtgacatatactaaaattgatnnnatatgcactcaataaatcaatgggtagcataaaccca

SEQ ID NO: 159618 - DNA, 368 bp, Glycine max
  unsure (1)..(368): unsure at all n locations
agcttggtattgngctattgngtgcttctgttggtgttcttcttgcttttgagcngattgccgtctatagaaagtgggataagagatagaaggaagatatgcatcacacggaaattgaaagcggtgtgaggaacagtgttttgcctaacactggtgccaaatggtttcacatatcggagcttgagcgagccacaagtaaattctctcataggaacatgctacgccaaggtggtgatggtgttgtgtacaaagggactctttctgatggcaccgtggtcgcggttaaagagatttttggtttggagactaaaggggaagaagatttcacctatgaagtggagatcattaacaagatatagcacaggaat

SEQ ID NO: 159619 - DNA, 397 bp, Glycine max
  unsure (1)..(397): unsure at all n locations
actaattgctaatctaaactcttctcttctcttttaaattcaattgtgcacaaatctttcaagaatcacaatgacacatnntttagacgtcaaattatttatattatatatatttgcgctataacaaaggaaagataattagttataatattactttatctaaaatactattatttctattttgtatccataggaatattactatgagattaacactactcaaatcctattaacaaccagaattagactgttgtagatatatattatgtgagcaatatattttacaataatcaaattaaactattgaacatgtttattattgttaacctctactatttatttatttattggacctctgaatatgaatacgctcatctttactttatgtatatcttac

SEQ ID NO: 159620 - DNA, 439 bp, Glycine max
  unsure (1)..(439): unsure at all n locations
agctngagggaaagactttcaagagtgcccctctattgtcccatttatctttccagaaaatgatgcttctctcatccccaatgagctaagagatatttctctggaatttctgccaacaagcgtgaatgccacaccataagtttgaacaagtggtgttcaagttaatggaaggcaaaagattattcgtgcatccatacttagccctgacaacttgggcccaaaggttgtccttattgttacacatgtctcgaatgaccttcagctagcatatatgctttgttatgctcatcaacatcatcccattggaaagatgagtcaattgatcaagtttatcgcatgtggattttgggaggaaagaggattgcatggtatacgcagcactactagaaaataatatatttatgtccggcagttaacatcgattttagaaaaatcgatg

SEQ ID NO: 159621 - DNA, 485 bp, Glycine max
  unsure (1)..(485): unsure at all n locations
tctagctgaacagacttcagatctnctgggatacanatctttatggttccgngtctacactgaagcttagagacctcgtctcagtcgagatgtngaagttgatgagtacgcttcttggaattgggatgaagaaaaagtggagaagaatgttcttatacccgctcaactacctcaagaagaagctgaggaagaagacccangtgaaccacctttccctccaccacaacaacaagatcaagaactatcatcaccagagtctacttcaagacgagtaagatcttcggtggacatatatganacatgtaacttggccatacttgaacctgaaatctttgaagaagcgtcaaagcaggaagtatgtgtcaagggcantggaagaagatatacagatgatcgagaanaacaacacatgcgagttagtaaatcgtccccatgcgaaatatatcattgtggttaagtgggtctatatgacaaagctcaaccct

SEQ ID NO: 159622 - DNA, 381 bp, Glycine max
  unsure (1)..(381): unsure at all n locations
agcttngcgaagtatccccattgaanattcttattttattctttcaaacgtagcgagaaggataaacgaataattagggaactttgaaaaactaaatccttaattgaaggcgtaggtgacaaccatagtgaattactaaacaagattggtcgtttacttaaggtcattccacatacccccaagcctcggaaaatacttccaaaatggtaacaagaagtacctcctaattagttaatgctattaacgaagatagtgaccaaaactcagatnacacaactgagataggatcagtgtcataaaagaatataaattcaattaattcctaacactggaaaacatcctccaaattatattatcaacgtccggctgcccctgaccctc

SEQ ID NO: 159623 - DNA, 341 bp, Glycine max
atcctgacccaacccgggcgtagtcagtcagtgagaacctgtgacgtacctaagcaggcgagctcctggcagtctaccaataaaagaacaaaagtccacgaagcaaggatgcttgtgtggcggctggccagctatctatcttgtgtttatctgaaaatactctctggaatcgatacagggtttaaaattgaaacagaacgttcagtagctattggtattcgattaccatctgtgtgtaatcgattacacagtgttatacgctactggtaatggattaccaatatgtgtaataattacatagtggtatctggtactggtaatcgataccatttatgtgaatc

SEQ ID NO: 159624 - DNA, 441 bp, Glycine max
  unsure (1)..(441): unsure at all n locations
agcttaaacttggaggtatatatactatttatttctttcttaaagggtatctatcatttatcatattccagattaggatgattggaaacaattcttgtccaggaacatggtttagtgcatgtttggataattgttttgaaagttcttttagagaaagctactcttttaatcttttgcactgaatgtatttttgtaaggggtgcaacagttattcaaacatgcacttatttgttaatttcttccatataatggatccataatccatatattaaatatgcgaagacttttgtgatgtttagtaaccttttattatcatttangtgtggtgttaggagacagatggatctctccttaagattttgtgtaagtacgagaattgttgtagccactagtttataacttttcacatttgaattattcaattgacactgcagttttcat

SEQ ID NO: 159625 - DNA, 407 bp, Glycine max
  unsure (1)..(407): unsure at all n locations
accataacactccaactatgatcgtcaatacattttgttttgtgctccctcggaaatcactactctcacatacaacttgacagcttataactctaacatattggcaattaatatgcccaattgggatacctaaacctttgggttattatataaatcaatgatcacacaaatcacctacaattatttcactactataagacaactaatcaanctttggcagtccctaacgacttataacaatgattttagttatcatataccatcaaccatataatttacctccattattttatgagttactgaaataatcactaatacgaaattaaaaaccttataaacttggcactttggtgctaacagatcatcatacatttaatctcacgcaatatatggcgtgcacatactta

SEQ ID NO: 159626 - DNA, 346 bp, Glycine max
catacagccaacaactcacttgctctataattctgcagaatgctaatcattacaatcacttacatgccatggtagaattcaaagagaaaattttttcctcttcttcctatttgagggacaaaattgatgctggaaagagccaatcacgaattaacccttctgatgctgttcaatctatccgtgatatactttaactgtttactgttctagtacaagaattatattataatccactggtacaagcatctctatctaagctacacagctgagagtgagataaccctgtcatagtctgtataaatcttttcttatctaaagaatgcttgctcgttcaggtgacaaatca

SEQ ID NO: 159627 - DNA, 396 bp, Glycine max
  unsure (1)..(396): unsure at all n locations
agcttgtcctcccctcccaacactccatttttgcttccattctcccccaaagntgctggtatgtgatttttttaattattccaaatttatctatttcttataaattgctatattttatttgccgtatgtcttttttttgcaggtggtcatcttgtgtacaaattgctgttagtttaatttgcttattattttagttattttttattaattatataacaaattgtttatttgtgttacggctgtttaatttttagaatataaatntaattaagattcataataaatattactataataatgttattatgcgtatttaaaaaagagacgcctattattattatatataaaatatatatatatacgtgttcttatattactttctgaaattcgtgaaat

SEQ ID NO: 159628 - DNA, 307 bp, Glycine max
  unsure (1)..(307): unsure at all n locations
ctagagcctaactacacacacctctttaatagcagagctcacccccatgcccaaatacatgaaaatgcttagctacacatacccctttaatatctatactcacgccctaccacaatacatgaaaattcangaaagtccctactacagagactactcataatgccttgaaatacaaggctcaagatctatactactagaatgaccaaaaatacaaggccaaatagaaggaggacctattctaatatttacaaagaagagtggacacaaccttggcccatgggcttagaaatctaccctgaggttcatg

SEQ ID NO: 159629 - DNA, 401 bp, Glycine max
agctattagttcctcccaataggttcctgaattaggggcacggagcaaacacactacgtgctgtttccttgatattgccatgcatatctttatgatatcatgtgatgcaatcctaccccccaagggtattggatagaagactccaagaagtttgggccagagatgcaagagaagaccctaaggttctcatgagccttaaggtatattctgagcccatgggcaaagtatgagcccacttatctctgtacatattagattaagatttcattatttttgggccttgcatttatggctctataatgtaggtaaggtaccctaaaaatgtacgaattttccacccttgtattttacggcacctacactagtttttgtattacggggtcttctgtaatttcacatgc

SEQ ID NO: 159630 - DNA, 374 bp, Glycine max
  unsure (1)..(374): unsure at all n locations
cccctactttcgaaaggcaactctcccttatgacgactatcccgggcaagacgatgaggaaggagatacccatcttggccccctgctccacctcanagattcgtgcccacatgaactaccccaaccgaacatagtccgccatatcccggcttcacccacacccgtaaaagaatctgtttccttcgcggaagataacggaaagattgaggcgcttgaagagaggttaagagcagtcgatggccttggcaatnaccaattctcggatttagcggatntatgtctcgtgctcaatatcgncattccttccacagtcanagtaccggactttgatatgtacatagggacgacatgtccgaaagggatcttctgatgta

SEQ ID NO: 159631 - DNA, 437 bp, Glycine max
  unsure (1)..(437): unsure at all n locations
agctatagagcagattatattaatgacctactaacctagaattaaaataacttaatgccattaacctagggaattaaaaaaaacttaatggctgagtgtaactgaaattgtggcaaccaaaagtcacccccaacagccaacaagtcagccaccatttggtctcccacaaggctgatgcctangttgccaattgggcccttattacaacttgaactaaacctaactaaagcccttttagttgattaacccaaaacatatttttggtcagccaactttacaaggattgagccattatttatacaaactaaacactctaaaattgaaacaaagtggtgtcatttagtccttctccatttgggccatgatacaactcacaaccttggacttttctcttgaaacttgggcttgtattcaaacaagatggacagcactttgtt

SEQ ID NO: 159632 - DNA, 375 bp, Glycine max
  unsure (1)..(375): unsure at all n locations
agcttgcatacgacaatggagcttatcttatggagttatcaatgctaagaaaattcaggatttaaagagggagttgaatgctttggaggcaggtatttctgatagaactttgactcaacctgaagtggagctcaagaaatctcttcaagagcagctatggcatgcagctaatgcctatgaatcgatgttgaggcaaaaggctagagtgaaatggttaaaggaaggggacagaaattctgcttacttccataaactgattaatcacagaagaaggcacaatgctatccaaggattgatcattgatggggtgtgggtccacgaccctantagtgttaacaatgaggctttctatcattttaaagacagattctctga

SEQ ID NO: 159633 - DNA, 368 bp, Glycine max
ccaagaaccactcacgtgaatcaagaacaattcaagagttcctgatatgaatcacgaagaattctagactcacgaagaatgtttatagtccagaatcaagattcaagggtcaagatctcaagactcaagatcaagattcaagactcacgattcacgaatcaagagaggcctatcaacatagtatgaaagttttctcaaaattaagtccacatgatcttttcaaacatgttaccaaagagttttactctctggaatcgattaccagattgttgtattcgataccagtagcaaaactggttcgaacagttttcaaatgaattacaacatccaataatccaaaagtgtatcgatacatgtttggaatcata

SEQ ID NO: 159634 - DNA, 391 bp, Glycine max
  unsure (1)..(391): unsure at all n locations
agcttaanagcccttgttcatactgttgtgctgtggcctcannaaatttaagaaggggaggggggttgaattaagattttgttgactattccttattgaaaatttcccttacttagatattccctagattcaattatttctttaattataagttactcgaataataaataaggagaagttaccttaaagaaatataaacacaacagaaagtaaaagagattaagggaagagagaatgcaaaaccggatttatactggttcggccataacctgtgcctacgttcagtcctcaagcaaattccacttgagcgtttccactaaccttgtaaaatccgttacaaacaatgaaccacaaaggacttncttcctttatgtttagtgtctacaccaag

SEQ ID NO: 159635 - DNA, 406 bp, Glycine max
tctagctctctcatgctattattgagcatcatcccacatattttgtcttattgagtcctctagccactaccgagaaaagctcatatcaacatactgcttggcttctgataacagcgggcaccatagggccaatgtagtgatgatactttatatatacatgcccacatcgcagaacatatcctacctatgaagaaggcaccacccgttatgatctttacttgatgaagctttacaggtcaaataaagatgaacagcttgcagctgatgataatcaagaaacagacatggaataaggtgccctatggtcacttcttaattaggaatgcttagcactgaaaaacttggacccattacaaccagctctaactatgacattggaacatatatggtgtaaaatactatcatt

SEQ ID NO: 159636 - DNA, 388 bp, Glycine max
  unsure (1)..(388): unsure at all n locations
attgggactgcatcttacttattcatgatgctccatcaaatccagtggttgaaagttcacctagcaattagtctctgtcttcgagaaccggagatgactcagctgttgaactactcaaagaaacatttctcgggcctgcagatttgggagagagagagggagaatcatgagaaactaacaagtagagaggaaatgtctaaaaaaaaaaatagcagctagctctagctataattttacgaattgtaaaacatataatccatacgcttcgtacacacctactcttgatgcaatactattgctagtcgttgtcgcctcttctgaaccaatntgacaacatcctggccgtaccttaactctgcccaagttatttatggaatgacacacagag

SEQ ID NO: 159637 - DNA, 417 bp, Glycine max
  unsure (1)..(417): unsure at all n locations
agcttccaagaattaagatcaagattcattcaagaatcaagagaagacttaatcaagatgagtattaaaaagttttttttttcaaaaactgagtagcacatgaatttttctcaaaaccttttaccaaagagtttttactctctggtaattgattaccagattattgtaatcgattaccagtagcaaaatggttttcaaaaagctttcaactgaatttacaacattccaattgacttcaaaatgttgtaatcgattacaatgttttggtaatcgattaccagtgcctttaaacgttgaaattcaaatttaaatgtgaagagtcacatcctttcacantaaagctttgtgtaatcgattacaccgatttggtaatcgattaccagtgattgtttctgagaaattcaaaagatgtaactc

SEQ ID NO: 159638 - DNA, 464 bp, Glycine max
  unsure (1)..(464): unsure at all n locations
ccatacttgccctttatttaggcactcaacttcatttcattattttgcagcatacacaattattaatttcatttggatttatagcnttttttttaacacaagatatacaaaggcattatgtgtatatacagaanatagtgtgtgtatgctctatactttgaccatttcaattcttacccagtgcctnccncaaatttggaaacaaattaccttgataattactccctccacattgggacaaatattgcttgaaccacgcttcctatagatgatggtctcctacaacctaagtcaggtagcaggagataacactgtatatgatcagggttcaatcaatcaataattcattcaactcaaactgggtacaagggataantcattcaagcacatggtaagctnnttggctaagtgtctatcacaatcaaacatggccttcatcatctcaatncatgcttcagccatac

SEQ ID NO: 159639 - DNA, 422 bp, Glycine max
  unsure (1)..(422): unsure at all n locations
agcttgttagcatgctctttaattgtgttatactccttcattntctgcatctcaaattctctaaccagatttagggctcgcattcctttaatccattcatctccttcgcattcattctggaggaaactccatattttatatgttgatttggtggtcatgattctagtgaaaatttcttttgagacagcagcaaacaaattagttcttgcctttcactttcttgctttcctttctttttgattttttatcagagccattgttggattagttggtatgggaagaacttcgtagtcttccttaacaactttccaaagatcatntcctccatatgtgcctccattctagctacccagatttgataattgtcaccatcaaacacaggtggtgctagtggtgtgtatagtgtttcaaaatccatttat

SEQ ID NO: 159640 - DNA, 446 bp, Glycine max
  unsure (1)..(446): unsure at all n locations
tcatgatcatgaagtatcaacttgaaaagccaggatcctctctatcagtactccactcatcattcgattcaaagcatangatcattagnatctcttttctcctctctaatctcttggctcaattgaacttaatacttaatgaagacaagaacatttaatctntgttgctctaagcaatttctcttcttaatatctaatatgaacttgatcaaatgtgctccaatntctttcgcaccagtagcactacaaatgagactcanaactctcacttcttgcttttgtaactctttgtcctctccaccagaaacttctcacaaaagagttgcagtgtcaaactaaaagacaacatatanatcacaactatatcttcactgtcatgaatcatgaaataatctnaagctaccaagtacttctttttctgtgtcagtgcttgtcttgccaaactc

SEQ ID NO: 159641 - DNA, 351 bp, Glycine max
  unsure (1)..(351): unsure at all n locations
agctntatgaagttntctggttttccaatccttgaaaacttgtgctactcatctttttcattctcttctccctttgccaaaaagaattcgccaaggactaactgcctgaattctttttgtgtctctcttctcccttttccaaaagaacaaaggactaaccgcctaaattcctttgtgtctcccttctcccttgtcaaagaattcaaaatgacacaatctgagaattcttttgattcttcccattcccttatacaaaagtgttcaaaggactaaccgcctgagaattcttttgtatccccattcacaaagtatcaaaggtttaaccgcctgagatctttgtcctaacacatt

SEQ ID NO: 159642 - DNA, 225 bp, Glycine max
  unsure (1)..(225): unsure at all n locations
gagctcctggcagtcaacagataaaaggaacaaagaccacatagcaaggatgcttgtggtggctggccagctgtgaatcttgtgtgatatatgggtttttgcctctggtaatcgattaccaagggtgggtaatcgattacaacgcttanaaatgaagacatgaggctaagatggtctctggtaatcgattaccaaaggggtgtaatcgattaccaggcttgaaaa

SEQ ID NO: 159643 - DNA, 414 bp, Glycine max
  unsure (1)..(414): unsure at all n locations
ttctaagcaaggaagcatgacttatgcctacggatctaaattttggttttaaatgggcattaatattacgacatggttgagagggtttttactanaatttggctgccccatgatgaataccttgcacctatgtagcatggaaaatacccttcaacggtatgaatatatggcataaaaataccttgcacagtgtgaatgagtaacaagaaaaaaggcctttcaaaatatgtatatttgtggataggtagtataagacccttttttttttacaaaatgtactcatgtcaaaagtggcccgaggatgcctcccgaatgaatatatgatgtggaattgcccctcaagtgtatatggatggcatgaaatttcttttcaaaatgcaagtgtgtgcaagacgtgagatcggatttcaatgt

SEQ ID NO: 159644 - DNA, 294 bp, Glycine max
  unsure (1)..(294): unsure at all n locations
atctacaataaacttaacaatttatgtgatatctcttttccttctatcatctattctccgtatctggttgcacacttcatagtcctaaacccaatatctttcatggaatggatgatgcaagaaaaaatgagattatgggtatgagggtggctatgaaaatatcacanagacaggttcctcaagtgaacgaggaaaagatagtcatgagaagaaagaagcctatcaagactgtgttagttgtgggatgatgctttatctcagtttggcattagtaacaagaaataacaaatcatg

SEQ ID NO: 159645 - DNA, 424 bp, Glycine max
agcttatgctgcagacatttataatagtcccctcagcagcaaaaccaacaacaacagaataattatgatctttcaagcaacagatacaatccaagttggaaaaatcatccaaatcctccacaacaacaacagcctgtccctcctttctagaatgttgctggtccaagcaagccatatgttcctcctctaatgcaggaacaacaacaacaacaacaaagacaacaagaaactaagtctcctcctcaaccttccttaaaagagttagtgaggcaaatggccatccagaatatgcaatctcagcaagagacaaaagcctccattcagagtctgacaaatcagatggcgcagatggcttctcaattgaaccaagctcagtcccacattctctcaatcgcttacagactgtgtgaatctgaaaaatgtg

SEQ ID NO: 159646 - DNA, 285 bp, Glycine max
ctgtgtcaacatcttggatgtcccagccttagatgacagctttacaggttctgctaatcagtgatttgagaaaggccaccatcctcgctttccagtattcatagatggtcccatccagaattgagggtctggtcactggtccgccttctttctccatgttcatcagaaattatctccctagatctcactcagtgatttcgagtgcctgctctgataccaatagaaatactgatactgtggacagatgtgcgacaggatgtcacgacatcacgcttcagaacatgc

SEQ ID NO: 159647 - DNA, 289 bp, Glycine max
  unsure (1)..(289): unsure at all n locations
agcttttcccncaatgttctgataatatgggtatatgtgaaanaaacaaggcgtcagcccattaggcacatcctctctctcccaaaatagctgaggaatttcacttccgtgaagaaaatctaacccgaggcactttcattacattctcgtaacagtttttgtgagttattattcgaagaatctcgagcgtcaatacgaaacattgtgtagctattcgtttgtttcaatcttcaacagtcaagctccccaatcctgagctttcaattcattcctataacccgtggtggtc

SEQ ID NO: 159648 - DNA, 430 bp, Glycine max
  unsure (1)..(430): unsure at all n locations
cgaaattacataaccctcacncagctcaatttttctttgagagcacnatgactttcagaacagatcaccctggatgagaataccctaacctaatggtgcagcctcacaacaacaacagcagtctgcttctttcttccaaaatgttgctggcccaagcagaccatacatttctccaccaatccaacaacaacaacaaccccagatacagccaatagttgaggcccgctcacaaccttcccttgaagaacttgtgaggcaaatgactatgcagaacatgcagcttcagcaagagaccagagcctccattcagagcttaaccaatcagatgagacaattggctactcaattgaatcaacaacacgtccagaattctgacatgctggcttctcaagctgtccacaatcccaaaaatgtcagtgcccatttattg

SEQ ID NO: 159649 - DNA, 263 bp, Glycine max
tgtgatgatgctagtgatgcttgtatgctgaaattgcttgtggaaaaactgctagaaatgaaacgtagagacaacctatggttggaaagtgagaatgtggtgttatgagaggaaaaacagtgacgctttgagggctggaaggttaactctgaatactatcggaaatggaggttaaagtgagttaataactacctgacatgccatttaagacttgggagaaagcctggactgtgctacagagaaaaacacatgatcaaagcgaa

SEQ ID NO: 159650 - DNA, 435 bp, Glycine max
  unsure (1)..(435): unsure at all n locations
tagaataaaataaaataaaataacatgtttgaaacatcatgcaattaaaatagaaactcatgccctaatgtcacatcctatcagagcattgtgtcctgacgtcctctatcacaaggttccttaaagaaatccacctagtcatctgcttccactaacacaaggttcgagatcatcacatgatccaaacacaaacagcacacggagagtgacttatcacattcctaacaaatagagagaaacaggacaacatatagatatacatgtcatataaaaatacaacttacttaacacaactcacatcattccaccacttgtcacgtaacatcacatctcaacataataagtctcattcattttcacatcattcacgtactcaaggatcaaaacacantatcacttaacccaacaatatcgatgaatacacaagtggtattc

SEQ ID NO: 159651 - DNA, 385 bp, Glycine max
  unsure (1)..(385): unsure at all n locations
agcttccatcacttccgttntcaatntttagcgtccccatatattacagggcacaatcggacatacgattctaaagttattgtcgctggaatttgctcatagcttcagttttcaattacgagcgtctcgatatatttcagggctcacttggacatccgagctaaaagttattgtcggttgaattttcttagagcttctgttttcacttacgagcgtctagatgtcctacgggactcaatcggacatccaagtcaaaagctattgtcgtttgtcgttcttagagcttccgttttcaattccgagcgtcttgatatattacagggctcgatctgatatccgagttaaaagttattgtcgtttgaattttgctatagcttccgttttc

SEQ ID NO: 159652 - DNA, 341 bp, Glycine max
tgacaatcacacaactttgatcgtgtcaatttccgagaatcgagctgtattgaacgatcctgaaaataaacacatatttctcgatgtcatgacccgtatatatcagacgctgattgaacgagcttagaaagcaacacatactttgacagagtcattagccgtataatgaacctgaatgaacaaacttgacaatcaacacataacttgaccaagtcgatagccctagaatgaacctctattgaacgaacttgaaaaacaacgcatagttactcgagctatgacctgaatacaagccaatgaacgagctagaagcacacatactactgtgcgatacctgaaat

SEQ ID NO: 159653 - DNA, 424 bp, Glycine max
  unsure (1)..(424): unsure at all n locations
agctntgcagcagatgccactctactcttattattgaaatatatgctaacaaggaagcataaatatattcattaggaaaacatcatagtggaaggaaactacagtgctgtgatccaaaagatccttccacccaagcataaagatccagggagtgtaactattccttgttcaattggagaattcaatgtgggaaaagctcttattgacctgngagctaatatcaatttgatgccactctccatgtgcagaaacttgggagagttggagataatgcctactcgaatgactttacaattagctgaccgctccattaccaggccatatggagtaattgaagatgtgttggtcagagtaatacattctatctctctggcagactttggtggaatggatatctctgaagatactgacattcctataatat

SEQ ID NO: 159654 - DNA, 415 bp, Glycine max
  unsure (1)..(415): unsure at all n locations
atatcacagtgaccccatatagcanaacatttcttacctataatttgnttcttagtttcttgaatacaaagtaattgaatcctctattgagcaaccaaatttctaataactctgtgtttgatctggctgcccgaccccttcacgttcaaagataggatcctcataattaaatcagttcttttccttttctagtgtntntttttcactccttttcattcttgntcctccaaaactataatttctactccataatctnnctttgtctcgaanaagaacattaccttntttgttcccagattccacacttcctttgttgtatcctacatagtatgtacccaaacattgttggcactcttcatctnctgagaattanngcccaaaaataccaaaatatcaagatctctataattcttgt

SEQ ID NO: 159655 - DNA, 449 bp, Glycine max
taagcgacctgagcatcaagcttttcatatatagtgctcgctctaagtttcattgtcttcaaggggggaaccttcactctattctatgtgtgaggactcaagtcttttgaagcatttaatgcttgcattaaatgcacgtccctgctacatgcaaagtccatgctgataggaaagtgtatattgtactccgataaggaaatcacttcttttatcatagtacgtttgcaataatagagtgttccttttgatgatgatcaacgttctttagattgtggacttcatttattcttcataggacatttcagattctacgagaatgttctatgcatgaaagaatctcaaacatcgagtattaaatgaagggtttaagcacattatttaaatgctataccacatcgtcttataagttaccactctgaaacttcacatgcacacagataaatcatgac

SEQ ID NO: 159656 - DNA, 448 bp, Glycine max
  unsure (1)..(448): unsure at all n locations
agcttactgcatgcaagatgnnaggccttgatgctctttatacatcacggagccgataaggctcatatacaacttttcatccactttttcagctccatcttctatgcaaaacttctccttttgattcattggaattgcagttggtttgcacccttccatgttgaacttcttgagaatttcatttgcatatttttcctgccaaagaantttttcattctgtttatgatacaccttcataccgagaaagaatgtcatccttccaaggtctgtcattacaaaaacatctttcattncttccttgaacttgtcaatatgctccccgctgcttcccgaaaccagtagatcatcaacatatagagatactacaaggtattcaccatcagtcttcttcagatataatgtagattcacttaaactttttctgaagccctagctcaccaagtgtgca

SEQ ID NO: 159657 - DNA, 312 bp, Glycine max
gaaagttcggctccgctcttaatttaaactgggacaatcactacatgggaaggaaaaaaaaataaatcatcaaacctcgaggcttgactttcgaagacaaatgggggaactaactggggcccaaatttctaaagcttagcgagccctcctttcctttaggaggagggacgtcaaagtatacctacatcttcgtatggcaaaactttggaaaaacacaagcttcgacctttacattggaattcatgctatgctacgctatctctgttttactcctaagccaacacttatcatagcctaggcatgtggcttata

SEQ ID NO: 159658 - DNA, 433 bp, Glycine max
agctctggacgcatagaggatgtacaatctctagtgatttatgattggttcacagcggcagcactaaccatatgaccaaaagctattataagtgcttgataaaactatcatttccaaagtcaaaattggacatggtgcaattattcaaatcaaggtcaaagtaaatcaagttgtatacatcttaacaagtttgaaatatatttctgatgctttataagtgcttgacattgaccaaaacctacttagtgttggaaagatgattgaataaggttttgcggttatatttgaaaacattggaatggtgcctaatttaagatgcaaatggcagacatatatttaaagtgcatatgatggcgcaaagctttgctctaattctaatggcggaagaacacagagcattctaatcactgtatgccatgcagaattattgcac

SEQ ID NO: 159659 - DNA, 441 bp, Glycine max
agcttgtagcaaattcgaacgacaatatcttttcactcggaagtcctattgagtcccgtaatatatcgagacgctcgaattttaaaaccgaagctcgtagcaaattcgaacgacaataacatttcactcggaagtctgattgagtcccgtaatatatcgtgacgctcgaattttataaccgaagctcgtagcaaagtcgaacgacaataacatttcactcggaagtcctattgagtcccgtaatatatcgagacgctcgaaatttaaaaccgaagctcgtagctaattctaacgacaataacatttcactcggaagtccgattgagtcccgtaatatatcgagacgctcgaaatatataaccgaagctcgtagcaaattcgaacaacaataacttttcactcggaagtctgattgagtccttgtatatatcgtgacgctcg

SEQ ID NO: 159660 - DNA, 331 bp, Glycine max
  unsure (1)..(331): unsure at all n locations
cggtttaatttcaacggctcatatttacggatcatcgactccatgaatgtattgcgtcgatttgctacacttcgtttaaatccagcgctcatatgtacagactcatcggactccagtgaatgtattgtcgtagcattgctggacttccgtttaatttgagcgctcgattataccggactcatcggcttccagtgaatgtatngtcgtcaattgctacacttcatttaaattcgacgtacgaatttacggactaatcgacttcgatgaatgtattccatacattgctgcacttcgtntaatttgacgctcattattccgactcatcgacttc

SEQ ID NO: 159661 - DNA, 434 bp, Glycine max
  unsure (1)..(434): unsure at all n locations
agcttctntgagaaaacttccttgagatgttatagcttatctacacacacccatctaaaaactaagctcacctccttgagaagcttccttgagaagctagaacttagctacacacacccatctaaaaactaagctcacttccttgacaaaatacatgaaaatacaaaaaaaaaagtccctactacaaagactactcaaaatgccctgaaatacaaggctaaaaccctatactactagaatggccaaaatacacggcccaaaagaaggaaaaaacctattctaatatttacaaagaagagtggatccaaccttgacccatgggctcaaaattctaccctaaggttcatgagaaccctagggccttctttagtagctctagcccaagcctcttggagtcttctatccaatacccttggggggtaggattgcatcaa

SEQ ID NO: 159662 - DNA, 464 bp, Glycine max
  unsure (1)..(464): unsure at all n locations
ctaagcttatgctaactatgtatggcanaacntcattattntagggcaagacttacaaatgttcttgtaacaaatcttctacactgggagtgatcacattgcagcctcttgaacccttaccacccactctgtcatcatgtcgagcctcaggaagcccaacgggtttagccttctctaagtattctgaacaaaattcaatggcttcttctgcaatgtacctctcaacaatagatgcttatggacgatatagattctntgtatacccttctaagatcttcatgtatcgctcaactgggtacatccaccgtagataaataggatcaccgcatttgatttctctgaccagatgcacaatcaagtgaaccatgacatcaaagaaagcagggggagaatacatctncaactggcacagatagggaatngcgaacattcttggaattcatgcatgtacagtatgcaatcat

SEQ ID NO: 159663 - DNA, 442 bp, Glycine max
  unsure (1)..(442): unsure at all n locations
agcttagccggagggggaacataatctatttccttgtcctcaantttcaaaggtgcagcaaggaacgggttaccttctgctgctactctttttgccttagcatctgcagggtcaatcaaggcagacttttcaaacatatttgagaccatctgctgctggaaattcattgcaggccactcccctttgccattctctctttcttggtcaaatttgactgcacgaggttctgtccctcttccattcactaccggtgactctgaataagtttgtagatcaaggaacgcaagctaccaagcacgaatatgcttcccaggaggctcttctccttattgcacaaagcttggattacgcacccgttctttcacaactggaaactgaagatggtggtgtgctaacataaccggttcatcatcattaacataatgatcaattttccgaatac

SEQ ID NO: 159664 - DNA, 424 bp, Glycine max
  unsure (1)..(424): unsure at all n locations
agctngaataatacccaggcctacttttatgttatgctcaaatataatttaatccttcaaaatgggggtgccaattaccaaactcttgatcacttggttatttttggaagatattatggttatgaacatattagtcttattgttaatggggttgggcttctgtttgtaacactagtacttaaccggattatcagtataaatgaaagtattaaggtttgggtattgcaatttcttactataatacattgttagctgctattcttgtttccttttccctgtctaaaccctgaagcagttagaatagctttgattatatatcatacgctaacctctccaaaatcttgagctggttggagtaggctcacgaatggtttatatctctatcaaattccagtagcgcctatctaagaagtaatatcaataa

SEQ ID NO: 159665 - DNA, 357 bp, Glycine max
agctagtagcagtttttggtctaacaattcgtgcaactgtttcagcacctccctctgttggtgtcgatctacatcaagaagaaaggtgacctccgatttcacaaattattcgtttcactttctcatctattttatgtgaatgaagctaactcgtatgaaatcttgaggacaggcgggaatgctgcaacaagtgctttatggaactgcaaaagatccaaatgactcttccaatactgatacggtaatcatgcagtctttaatgttgctttcctgactaattatgtaaatagaaaacaattttgtagatatattgtctttaatataaaaaataagggaagactcttgctggtctctatt

SEQ ID NO: 159666 - DNA, 455 bp, Glycine max
  unsure (1)..(455): unsure at all n locations
acccggatcttaagtcacctgcggctgcagcttatgaatgatatgagttaactttttgtcttattcaatttctaattataattattatccatactttatttatttatttattatataaaaaacatttaatgtgaatttaattaattaaaacacatcacttaataaatcactaaaatttataccttaattatattcttgtattaaattaaataatataataatgaaggaaaaatccctcgagaaaaacataatntgtagaaatgaaccactcctctcacattaaagttctaccaacacatgtatggggcgtgtacagatattgtttttatcaggcgtatgagaatggttctatagtacccttttgagatcctattcattgctatccatattgatgatcccattttgtgttcaagagctactcatatttcttatactatcaataggtataattttat

SEQ ID NO: 159667 - DNA, 358 bp, Glycine max
  unsure (1)..(358): unsure at all n locations
acttcatgtnagtttctctagaagcttcattaagagggctcctccagaagcttcattaagaggtntctagcatactacagacatcttctcaaagatcccaacggtcagatcatggaatattgtttgtgaagttcagaccaaattctagaagatcaacggtttatgaaggctgacagcgttttaccgaacagctcatgtactttcttagagcttattaaaggcttctctaaagcttctcgtgcttcttgaaactttctcagaagctcttgagagctcatcctatctatcccctctttactaataacttctaaaatatacgagaaataccacaatataactcaactatctatatttattt

SEQ ID NO: 159668 - DNA, 352 bp, Glycine max
  unsure (1)..(352): unsure at all n locations
actcagctaactttaggccnnaccttgcacctcttaaagatttttatctatgatagactattgaaatggttctcttgatttcttgatcttgacctgaatcaacgtttgaatagctntaaatctttggcatcatcanaatcttcatacatcatatgcatctacaaaaatgtcctttctattttcaaaataaagccactacttatagttaaaatgcaagttccaataagttccttaggttttgcataccctgtanagaaatntcaatatggatagtagatccaaaatcaatccaccaggtgttaatattaacactagccatattagattcatagcatgctaatgagattgatta

SEQ ID NO: 159669 - DNA, 425 bp, Glycine max
  unsure (1)..(425): unsure at all n locations
agcttagccgaattcagatagaattgaagttggcttagctcatccttggccagcttagcggaatgaatcagcctaagatgaaggggttaggcgctaagcgcttgagactcatggcttagcgcatgaataatgatgcgcttagtgtgagacttgcgcttagcgaaaggagtatttttttataaaatattttctgagttatttttcagtcctttttccaagaaattgaaacccttatgtttaacattcaaagataggctaatatactcctatgtacagattatgcagcaagttcccaatgatctaatgcatganaacaaaaactacagaaattaaaactgggttgcctcccaggaagcgcttctttaacgtcattagctngacaattntacctcactgggcgatcttatgttntggttcttactttc

SEQ ID NO: 159670 - DNA, 280 bp, Glycine max
  unsure (1)..(280): unsure at all n locations
ccaaagaagccaaatcaaatgatgaacttccaagagaatgganagcttcaagagatcatncnctttgacaacattattggtgatatctcanaaggggtaacaactagacattctcttanagaaattatgcaataatatggctttgtgtctatgatngaacctannaaattaaatgaagccataatagatgatcattggatagtngctatacaagaagaactaaatcagtttgagagaaacaatgtgtgggaactagtatagaanacctgaaactacccca

SEQ ID NO: 159671 - DNA, 427 bp, Glycine max
  unsure (1)..(427): unsure at all n locations
agcttgtagagttgagtctcgtttcttttcatcgattaccgatatctcgtaatcgattgcactattgtttgtgatgtaagctaaattggagcttgtaggcctacgatcttcttcaccaatggatttctttgattcttggaagatgaatgacaatggaatggagaaggaagagagagaggagaccccacttcaaggagaagatgagtcaagaagaagctcaccatcataggaggctatggataaaagcttggaggaagaacgagatgaatgaagggagaggaagagaagagcacgaaantttgtgcttataaaagctcggaaatctgaagtttaattttcaaatgatcaaagttgaaaaaatgcacacacatagtctctatatatagcctaagtgtcacacacaattggagggagacttgaatttcta

SEQ ID NO: 159672 - DNA, 324 bp, Glycine max
  unsure (1)..(324): unsure at all n locations
gtatccatacttggaaagatctgattactgcctttctaaggcaatatcactataactccgatatggcttccgatcgcactcaactgcagaatatgttcaagaaagacggcgaaacctttaaagaatacgcacaacggtggagagacctggcggcacaagtggctccttccatggttgagagagagatgatcaccatgatggtagacactctgctagtgttctactatgagaagctagtaggttacatgccgtccagcttcgcggacctagtgttcgccggggaaagaatcaaggtaagaatganaagaagaaagttcgattacg

SEQ ID NO: 159673 - DNA, 379 bp, Glycine max
cctcctatcatgcggactaacttcggcattgacacattatacacttcgaaagtattggcataaattaatttccctctttctacctcaactctctgaaacggcatagatctcctttacttctctttaatctaaatagggatttgacccttaccctccattagtcgctgctgaactaccaaagtcccttcatgctctaagttcatctccctcatccaaaattgaaccaacctgccttaggacctaacgtacacaagtgctaactatgccatcttgccactgcatatttttgcattaaagcgatagcaaaagaaacattcaacctttctcagcgccaatgcttccaaatctatagtgtcgcaccaaacatgtgataccacct

SEQ ID NO: 159674 - DNA, 445 bp, Glycine max
  unsure (1)..(445): unsure at all n locations
agcttgttgagcactaggtgaccattgttttaatctanttggagtaattggntcacaggatgggcaatatcagcataccctctaatgaacttgcggtagaatcctttgagtcctacgaatctgcaaagagctcgaacaaaggaagggatgggccaatcggtcattgctttttggagggttttgacgccactccagactgagatataatatgaccaatgtactctaaatgacgttggccaataatgcatttggaatcccataaatagaatttgttctcctaaagacgagaagacactggccaagtgttcaagatgcgccgccaaagaatggctctagacaacgatatcatcnaagaanatgaccacaaaccaacgaatgaacggagctagtgttgtgttcatggtaaccctaaacgtggatggngcgttacatancccaaacagca

SEQ ID NO: 159675 - DNA, 440 bp, Glycine max
agcttatccaaatactggtattcgagatttatgtcttgttaccattaaaggtgcgtccttagtataataggggtactcgggagggaaaccttgcaacgattcaaggtgtccttggtcgaataagggtactcgagagagaaaccttttagcgattcaaggtacacccttggacgaatatggatattcgggaggaaccttacaataattcaaggtgcatccttagccgaataatggtatttaggagggaaaccttgcaatgattcaagttgctccttattcgaataggggtattcgggaaggaaaccttgcaatattttgaggtgcatccttactcgaataggggtgggtattcgggagggaaaccttgcgaccagtcaaggtgcatcattattcgaataggggtattcgggagcgaaaccttgcgacaatttaaggtgcat

SEQ ID NO: 159676 - DNA, 399 bp, Glycine max
  unsure (1)..(399): unsure at all n locations
agaagctagagcgtagctacacacaccttcttgttattattcctgaagaagctacagctgagctacacacaccccctataatagctaagctcacctccacgccaaaatacatgaaaatataaaagaagtccctattacaaagactactcgaaatgccctgaaatacaatgctaaaaccctatactactagaatgggcaaaatacaaggcccataagaaggaaaaaccaattctacatttacaaagaagagtgaatccaaccttgacccatgggctcagaaatctaccctaaggttaatgagaaccctaaggccttctntagtagatctagcccaatcctctgtgagtcttctattcatacccttggggggtaggatgcatcaccaactgtcgcaaccta

SEQ ID NO: 159677 - DNA, 406 bp, Glycine max
agcttagagcttctcttcttctttgtttctaaacaacccaagacatcattcagcatgtctagtcctagaatgacaagtagaaatgatgcatggactccttcacaatcaagaataggagaggatattcaaggaatggatgatttgaaccttgatgatgacccaaatccggtgccggctcaggattcctcttcctctacacagaaagttgatgaaccacgtagtaaggaacaggtggaggattttgatcttccacatttcgaggttgtggataaaggggttgatgttcaagagaacgaagaagatggaggagaggaagctgatgaacctgtccaacaagaggaatcaacttcaagtgatgttgtcaaagaagtagtgcttgatcatgtgcaccctactaaatagtctg

SEQ ID NO: 159678 - DNA, 431 bp, Glycine max
  unsure (1)..(431): unsure at all n locations
agcttgtctnatgtacttttgggtctctatttatcgaaccttatnattagattcaaccaatttttgcttggtatcttcctacctggtatcttcctacacaaaattccttaaaattcaatttatataccaaaatagaaccatgtccccttcccaatcccattaacacaaaccttccttattgtgtaatgcctttttataaaatagggaggtaatgtggggtcaaaaaatggaagggtctcaagtgcaatattggtaaagttagaggtgtaatctgaccaaacaaatttaagtgttttgtaaattttacatagaaagacaagttcttaaaattcgagctaaggcataactcaaccttccaagaagttgaagggaaggactgcctgaacttataagacttcttatgtatatactaagcatgtgggactaacacc

SEQ ID NO: 159679 - DNA, 345 bp, Glycine max
  unsure (1)..(345): unsure at all n locations
actttgtctataaaggagaagatacgttgcgtcattgtttctgccatgctcaagagtctcggggattctctggaagcaatgtcttccacggttattttgatgatgtcaaagaatcaagagttatgcanagtttcaagctcagattcatgaatcaagtttctagattcaagactcaagaatcaagtttcaagaatcaagactctagaataatcaagatcaagattcaagactcaagattcaagaatcaagaagaagactcaatcacgagtagtattatcaacgttctgcaacattgagtncacaagaagtttcacanatcataccaagagtttacttctggtatcg

SEQ ID NO: 159680 - DNA, 298 bp, Glycine max
  unsure (1)..(298): unsure at all n locations
agcttgctaacccagggaatctcctaaattctcccacacncnccggcgctggccatacatgtacggccttgactttctcacgagtcacatggaactcatctctaccaactacactcactaagaaaactatcttatccacacaaagagcacactacactatattatcataaaagctgattctcctacgaacagaataactcgcctgacatggcataagtgatcatctaggctcctactgtgcagtaaaacttcactcaaatatacaaccacaactatacctcgtgaaacactcacgaca

SEQ ID NO: 159681 - DNA, 343 bp, Glycine max
cgcatattcgtcctttacccatcccttaaatacctctaatcaattttagatggacgatccatcttatgagaccctatgcattcaaccctatctaggactggccaatagtcaatcacgtgacaaaaaacatatagatgatgattgattgtcttgatctactcgctatcctacactatgttatgtatgctcctgcttatacaaaggaccatggaagttattttccctgtataccctatttaatccaagactgacatggggtagattaatatctaccacaacttggtgtgttagtgtacgaccgtctgcgctcgattacccatttaatcgcacaatgtattttaat

SEQ ID NO: 159682 - DNA, 389 bp, Glycine max
  unsure (1)..(389): unsure at all n locations
agcttagtaccttgaacttggacactctttctactagctctacaaaggagtcggtgcacattcgccatttgccgatgacctttttgaccatgacgacattggcgaaccaggtagagtaccagacttctctgataaaattgactttgaagagcttatccacttcttttttaaccattttgcatcattcttctcgtagcttccttttcttttatgatactgngttggcctggggacagatggagagcttggggcggataatgctggggtgaattcttgggattttagatggctgccaagcgaacaggtctgcgttcatgtgtacgacatcagctatgcgtctgttctcatggctggtgaagtcccttgataattgcgtacttttgccactt

SEQ ID NO: 159683 - DNA, 295 bp, Glycine max
agaccctgaaataaacctatacaaggcataacataaactagccccttaaaacacttaaggcatcagatttcaaatattccacaatatacactctataaacacattatatcaataatacatgtttacgcatgtgtgcccaatacagatgttataacactatttattactataaacaaaaacactcataaactcacttatattcaaaaactgttaaaatgccgtaaactattgccggaagaaccttgagtactaataagtactatatgctatataataccaaattaacctgaataaa

SEQ ID NO: 159684 - DNA, 434 bp, Glycine max
agcttcaccgatgatgccgttctatctttttctaatcgacatcatccaattgttaatcagggattgaataaaataaacaatggccggtgtcggtcgttatatggccccgactgatatccttcagccgacattgtgcaatttcttttacaaacgcaggccgataatatttttttacgggagaggaaattttttgttgtggtgttgcctaaaaaatatacaatgtacgtcggcaatgtttttgcgtgcgagctcaattgaggttgtttttcgggcgaaattggcttgttcttcattagtcggacaagaaaacgttagcccactgcggcaaaaaagaaactttattcacggaaattgatcgaaaaaatgatgactgacgtcggcatgaggagatgcctgatcgaggttaaaaatgatgagatcttgatagtgctctg

SEQ ID NO: 159685 - DNA, 392 bp, Glycine max
  unsure (1)..(392): unsure at all n locations
agagtntatctctnttatcttagtgagagtgattctcctaaattcttgagtgattcaagaacaccctggctgtatcaaaggactttcacaacctttgtgtgttgccctcgctggaaagagtgattctttccttccaatcatctccacccttgttctttcaaaccacaattccagaaaatccacctctgcccagaattatctcgtgaccataactcccatgttacacactcaaattaagtgattcttgagcctgaattgaatttcaaaacgagacgcttcacctcgttttggaatcacctcatttggagccctgtagcttccgttattgccatttctatatttctgtccagccaccacttaacctacgtttaccatcccatcattcatttatg

SEQ ID NO: 159686 - DNA, 396 bp, Glycine max
  unsure (1)..(396): unsure at all n locations
agcttgtatagntccctaatttatggttttttcatattaaatggggtaaataaatcttgttttatggttaatgctgtctctanaacatttccattggaattaatgataaaatctgtgcatttttaggtgaaaaagaggctaagttttgaattgcaaaaagtagcagttgggctaagctcagtgattaggctaagcgcataaccatcgctaagtgcagcttcagcgcgcttagcacaaaggagaatctggcagagcatcagcatcaaagtcgcgcgctaagcactgtaggtgccttcagccaggctatgcttgagactggcgctaagcccaatttcacttactcgcgctaagcgcgagggtggcactaagtgcaacaccgtgatttcaaacctattt

SEQ ID NO: 159687 - DNA, 335 bp, Glycine max
  unsure (1)..(335): unsure at all n locations
atcagatggaagaagaagcttgagctgaagccttgttagaacctacacaccaatggagtccttttgagtctctcatgattcanaagatggatgtcatgcttcacctccatcaagagcacttagctgacattcacagaactttagaaaacattactactcgacttgaaacatagaaactaagtcaacccttagtaaccttcttaacccagatgaggatgaagcttagttatgtttatgtgcttgttcctattatttgatgggctgctctaatttggtatgttatggttggttggctttggttgataaaaagtatgaattttgtcaatagttctatg

SEQ ID NO: 159688 - DNA, 440 bp, Glycine max
  unsure (1)..(440): unsure at all n locations
agcttgngactcttgcccatttcttatatactaatcacagaaagagttgggactcttgaaagaatcgtcagaaacaagtcacttgaagaattgtgacttttggaaatgtattttttgaaatcagtcactggttattgattaccaataaggtgtaatcgattacacatcaacagatgtgactcttcattttgaattttgaaaatcaaaatgtttagaaacactactaattgattacaagtattgtgtaatcgattacacgagtgtaaaatgatttaatactggtgaaatgtgaaatctaacattctaaaacaccagtaatcgattactaccttctggtaatcgattaccagagagtaacactctttggcaatgattctgtgaaaacttccggtgctactcaatgttttgaaaaactctttaatacttatcttgactgagtc

SEQ ID NO: 159689 - DNA, 396 bp, Glycine max
  unsure (1)..(396): unsure at all n locations
tactcagctgtgcaagatgagtgatcataagagaaacatttttattctatatgttnggngaatgganagggttgttctctaatcattgatggtggaagctgtaccaatgttgcaagcactagatcaatggagaagcttggtttaaaaatcacccctcaccctaagccttatanagtgcaatggttgagtgacaatggtgagttggttgtggatcagcaagtgttacttacattctacattggaaagtatgttgatgaagtgctttntgatatggttcccatggaagctagacatgtgttgcttgggagaccttgcaataagatagagatgtttccacaatggngtcaccaattgatattctttcttgcataaaggtaaaaaggtagttctctcacc

SEQ ID NO: 159690 - DNA, 422 bp, Glycine max
  unsure (1)..(422): unsure at all n locations
agcttctcctaatcggcgactcttgcgtttganaattctgtttgcttctcagaaacggtgtgagttatcactttatttgcttcttctaatctctctttttgttcacttcctttgtttcttcgtttcgtttcaggatgactcctaggtcgacagctacgtaagtactattggagttgatttcgaattatcactcttattctctcttgttatttctatttatggcccaacactcatttttattttattttcaggaaatcagaaccgtggacatggaagggaaaaccgtcaagctgcagattgtgagtattctcaagtagtggcgttgtcaacgatcatataacagtgttaggactttccaaatgttatccctcccatgatttgattattattatttccaacccagaatttactattatatatta

SEQ ID NO: 159691 - DNA, 325 bp, Glycine max
  unsure (1)..(325): unsure at all n locations
cttaccttccactctcttatcatgtccagactcgtgatgccaacaangtttgcattttaatgcattctatactcaataacttcttctgcaatgtacctctcaacaatagatgcttcagaatgatgtaaatattntgtataccctcttaagatcttcatgtatcactcaactgagtaaatccaccacaaataaatgggaccacaacatttaatntccctcaccagatgaacaattaagtgaaccatcatgtcgaanaatgaacgatgaanatacatcttcaattgacacaatataatagttacctcatttttcagctcatctaact

SEQ ID NO: 159692 - DNA, 422 bp, Glycine max
  unsure (1)..(422): unsure at all n locations
agctntacaaggcttcctgacaacaattttattatgtgattaactgaaattaagtggcaggaagtgggaaccgcatcactgatcacccacagaccagcagagcacaaaaactcacagacatgctgccctcaatgtatgtttgggaagccactataattactatggtttagggtccaataaaattaagcagaaaatactaaattcaagcgaaatgattaaaacatttgggcaaaaaatcttgttaccaaaccttgtccaaaactgatgcccgtggttctccaggcatctctcctcttgccctagctttcatctcttcattaatttctggagcctgaaaaacaatcaaatcacaagtattgcatatcaggaaataaagtttaaaactatattanagaaatatatacctcaatcattcagttcat

SEQ ID NO: 159693 - DNA, 358 bp, Glycine max
gatgtttcgtaaaatatctattgcactaatctgaggggatatgggagagactcaaaccaaaaagagtacaaatcatcctcataacaatgtttacatctttcttgcagaaattcaatccaatgcgcagaaaaagaatatacatccacagacagacactctacctgctggactggtgtttacaaggtaacaatttacacaatgcactaatcacctatatgctttgatcagctacctttattggagtaaagacttaaactatcatgatctgggattgtacttgcagactccagcgacatataaaaattatccagttccgctgcatgaaacttcaaccatctaggtgaaggcaactttctta

SEQ ID NO: 159694 - DNA, 388 bp, Glycine max
  unsure (1)..(388): unsure at all n locations
gatctcagagcgaccgaggctgcagcttacaagttcataagacccgttcttaattctgtaagaggacatgatcgctgttctcactgaacttgagcgccaagaacaagtttctctcgctctcatggtttttgctctcctattccttttacttttttaattcttatgatatctgcccgcaacctgtttgtcataatgcttctatgtcagaacctggttgttcttacttatactcattattatgactacttgtagtattgagcttacaagtaactaacttaatgaattntcagatgtttaaggtgatgcaaaagcaagaatggtacaagcctgacgcatacctttataaagacttgatcattgcattggcccgcgcgtagaaaattgatga

SEQ ID NO: 159695 - DNA, 343 bp, Glycine max
cttccactatatgtgacagattcttgacactcctcctcaccttatatagactctatattttggagttccctcatgttagcaaaacataagttgaatattgatagagaagaaaaaacaggtcggagtgaattcttgttacaaaattacatttcatactatattgctataagaaacgaagtgataaacatctactattactttgattgcttccatatatagaaccttttccttttctattaatacgcgctccctctaagttttttcttcactttgcttataaagccgcttaaatgtgaggttatataaaaaaatttatttttcataatttcgatacaaacttgtt

SEQ ID NO: 159696 - DNA, 424 bp, Glycine max
  unsure (1)..(424): unsure at all n locations
agctntttctttgattttattttctttttgtcttttatttggcgattgaatagattctaaacatgtcaacatttactaaaaatgacatcatcacactaaatagttacatataattgttttggtcaatacatacttttgttttgtttggtggttgtttctccgagtttggaaaccgtgtgatttttcgtagccaacattgtgaatagatttttaggcaaatgccaagttacaaaatccccctcttttccatgttggagttgatttttttgtatcagaaacttataagggcaaaaacatactactcaaatatcttatttgtgaaaagaaaaatagttaaacaatttttaatgttagagcatatggcattgctattgagtgtacatctttgtcagagctttcaaccacactgatgcaacaaaaaatg

SEQ ID NO: 159697 - DNA, 444 bp, Glycine max
  unsure (1)..(444): unsure at all n locations
tttttgatnttattcgtgcccctacgattctttgagcagagccagaagttcaagtgttggctgattatcctgtaccttctagcacattgttgagttctgattcttctattgaagaccaaagagttagttaataacatagctgtctataggaagctttcagctttccttggtatgaatataagatanaaaanataagagtgctatgtgtgtgagtgttctaactttgactaaattggaaatacgtgactaactcaaattttaaagtgtgaatggctctcaattctagntttacgttgctagtggtgtattattccagaaaccattagaatctaaaagattcatgtctgacgaatgagtaatgaaaacatgaaagaatgggaaacattaagtatattaatattcatctcttattagttcgggacatnggtattcaatgacccctca

SEQ ID NO: 159698 - DNA, 446 bp, Glycine max
cgcaagcttggttgaggtacttacccggtgagatctgtttattacgagaaacgaacgatgaatgttgcagaacggtcgagaatcttcgcgtaattactcacggaaacgttaccgaaacgttacgaaagcgcctcagcttggattttcttcacgaaaataattttcctcactaatttcgagaaagggagaaatgccaagaaggctgaactcttttcttcttcactcctccccctatttatagcaaaataggggaggagcttgccacccagctcgcccaggcgagctcagcttgcccaggcgagcaatgttgcttcctccaaaagcaacagccttctggaggaaggatctggaaggcccaagtgggccagattactatttgtaccccccttttactaaatgcacccacttctacttttttgtggtaattctttttccgtaacgttacg

SEQ ID NO: 159699 - DNA, 342 bp, Glycine max
  unsure (1)..(342): unsure at all n locations
atgaagctactaactgcatggatcatatataccatttcagataacacttgggcttcatctatcaccatgacctagncgaggtagtgggtcaatgggttagtgatccaactggtgggctagtaattgccctaatgtgacctgatacatattaaaaaaattcacaattatatatgtatctattatatataaggatataactaatattattgactaagaaaagtccatccattggtccatacttcataattcaaaataacaattgaagtattaaagctgataacataagtgaagtgtttagtaataaagaaagtgtaatagcaactacttaaataaaacacaagt

SEQ ID NO: 159700 - DNA, 431 bp, Glycine max
  unsure (1)..(431): unsure at all n locations
agcttgagatttagactatctcttttggttgccttagnacatacatcagttaacttcattttttattaaccatgtaactcaccccatcatattttaagcatgttccatgttccaagttccaatccattgatgaatagcaaagagtagtaacaccctttagggagggtaacttcgtgtttatcgctcaaccacgaagtagcctntagttgtacctactaactctgtggtaaagagctaattgctccaagcatcttgctcatgcatgttcataaaatagaagggccttaccatgagcaaactaagccaggagatagggtgataaataaagaagataaagaaacaagttattaaagaagcagcaaagacccataataaattgacaccaaaccatactaatcgtccaacattaggttctccaatcacaataacac

SEQ ID NO: 159701 - DNA, 330 bp, Glycine max
ttctctctcttcgaattgctatgaaaattgttccatgaagaaaatccaagcctacgcgcttccgtaacgtttctgtgagtgatatcgcgaaagttttcgaccgttcttcgacgttcttcattcgatcttcatcgttcttcagtcttcaacgggtaagtacctcgaaccaagcttttcgattcattctatagtacccgtggtggtccacatttttgtttcatgtatatttattctcgatgtcattcgctttctatacccaccttttgacgttgcttcagtcatgtatttaagttgtttctcgtctaatctacaaatacaataaatttccac

SEQ ID NO: 159702 - DNA, 421 bp, Glycine max
  unsure (1)..(421): unsure at all n locations
agcttgccagtctgatgcattttaangttgttccgagttatgtnggggaacggttacgaacccggaatgggtttgggcaaagacaacggcggcataactagcttgataaatgccaacggaaattgtgggaagtatggtttatgctataaacccactcaggcggatatgaagagaagcatcgcgggaaggaaaagcagtggccaaagctcgcagttgagacaagaaagtaaaggaagcccgccctgccacataagtagaagctttataagcgcgggtctgggagacgaaggtcaagtggtcgcgatatacgaagatgatgttccgagtacattgngattggtacgaccatgccctcctgatttccagctgggaaattggcgagtggaggaacgccccgacatttacgccacgagcataatgt

SEQ ID NO: 159703 - DNA, 333 bp, Glycine max
  unsure (1)..(333): unsure at all n locations
cttctcttaacgttatgcctctgtctattatcaatactctatcgcttggcctttacagcaactgatgtggtgatgcatttagctaacagaagtggtgcctatcatactgggtacatagaggatgtcttacttagagttggtgaactgattttacctcgtgattttatatcttgaatatggaggagggatattctcagtgatcagntcccatcattctacgcagaccttttatgaaaactgctagaactaagatagatgtatatgcaggcacactatctatggacgttggtgaataactgtcatttgaatttctaaatgtatgaacaccatctg

SEQ ID NO: 159704 - DNA, 413 bp, Glycine max
cggacccaagtcacctgagctgcagctcagactgaccacatttgtgttattaagcccgacaagcgccgcttatgaaacctttctatcatgttatagatactagcttcttttcactttggagtgacttattgtgttttagcactctacattgaacatagtgttgctgttatgtgaccgtgctccatctagatatcgtgtctagaaggcttaacaactctagctactatgcttgttgacactatggaaattgcgttagacactgaatgaaaaaatgcttgttcacattcattttctgtagagaagattttttctacccaaattataatacttctgtgcttttgccagcattaaaactccaccgctgtgtactcttcattgaatctcaaaataatccaatctaaagcacagtgtca

SEQ ID NO: 159705 - DNA, 370 bp, Glycine max
  unsure (1)..(370): unsure at all n locations
gcactcaatgggggctaacacaccaaactgattatgatgatggatggctcanattctcacacaggtgaactcatcactgtcaaaatgagctttcaaaactatcatgacatgttgagaagaatcaaggatctcaagtcacaaaatgtcaagaacttntattttcaaaacaattacccatttcttgaacatatcctataattcaaagagaaacatgcacagtcgtacatgcacacaatattgacccaacatattatactaaaaattcgacgaaactaacaacattaaccaacttacacaactaacatattaacagtaccaacatcactagcagaacccaagaacactcccccccatacttaaacaacacatt

SEQ ID NO: 159706 - DNA, 372 bp, Glycine max
agcttgaacaaacatatatctatctatttaatccactcaattcatacatttgctcattcaagtcatacacaaacactcatttcatatcaaacaaaccactgaaacatgagtcaatcattttactgatcaaactagcttcttgacaagcaatcattactttaacatcataaaatttataagactgaaatttaaagactaataaagcatcaacttaataactgacatgaacaaaatatctgataaaataatctgttcataatttggaaaagtctaaaagctattcttaatttaaaactcctgatcatcctgctgctggatttatcgatactccattcaaataaacactgcagcagctggtggatattgaacaat

SEQ ID NO: 159707 - DNA, 411 bp, Glycine max
  unsure (1)..(411): unsure at all n locations
acttagtaagctacttgatcttagtctattcttacatgaaggatctgcggacgaaacttatttaaagttagtctacacctaacagggctgtctaaatcgggtgtagtcttaaatgagggatctgcggacgaagcttggatattcatcctgacgtgggatcgagggtttagtaatttatgctatagcatataacacaagagcacgattgattagagaaatatatttctatgcatcagctngtttggttganagacccaacatatctacctactggtgtcattttctttacctctgcatttatagtttctagcgtacaagtttacgttaaattctggttgaaattatcacttatacatgttctctcaacaatgctntgattctgaacttatatcacgctaacattagatccct

SEQ ID NO: 159708 - DNA, 423 bp, Glycine max
  unsure (1)..(423): unsure at all n locations
agcttatcaatacatattgtagatgttattcaccactncattatcactgtcaatgtttggattggtgtaaaagaactttggatttaaataataacccgctgcatgcaaagggtggcgaagttggcaatcccatcttttatcaatgattgcaaggatatccttattcttcccttcattgttattgaaagctctctgaattgcttctttggccctatccattgcttcataaatgaaacccattgcaggtgtttttttcattatccaccaaccttaacacacttacaagaggccccatttgatcctcttattggaagcagttgaagaggcttcatttgatgttgtcggacgctctttttccactttatagtcttgcaatctctaggatcacatctctatctttctcgatctcttcttgcattgcct

SEQ ID NO: 159709 - DNA, 380 bp, Glycine max
  unsure (1)..(380): unsure at all n locations
cctctcagcttcttctgaatagataatcatcaacacatctttttgggatatgagaatcaatctcccanatacggtttgctccgtatcagtagtaacacattcagtagaaaaactatgaataacatctaccactttctttatatcgtattactcacctacaaatacataatatatatttagtagaacataagcaaaaatagatatttgaggaatctaaaaatatttaatgtttgtctttntatttacctattggtgcgatgcgagttatntattgaaacctgctgatgagtgttgatgacaatactaacatgtgattaatcannttattctctattagcttcgaataaattattacaattcatatnaaataccgatatctt

SEQ ID NO: 159710 - DNA, 414 bp, Glycine max
  unsure (1)..(414): unsure at all n locations
atcctctgagtcacctgcggctgcagcttgaaatttggttcttgattatatattgcgcaatctattgaaaggcctctcagacatgcagttaattattgcagaaaggatctctaagccttatttttatgtttactttattttttaatagattatcttttcaatttaccttctttaatctcaatttctaaattaaattgccataacattgtttaaagaaattatcaatagttaaaaataatattatatcgcaatntaaattattcattataaatcttaattataatttaatttatatattaaagaatatttacttatgtaaattttaactatataaaaataagcatttttcatgtacaatatatgactaaaatactagttagagtacttatagctcgtactacgttgaatttgttt

SEQ ID NO: 159711 - DNA, 394 bp, Glycine max
  unsure (1)..(394): unsure at all n locations
tcatgttttctatgtcanagtgcatatattagaagttgtatatgactagaagtatcattttggaggtagtttaagtcaaggggcagatattggaagctgcacatgacttaagaatcattagaagatgcaatggttngactacaagtgaagataaacatgtctacatagtcaagaagcacacattgagagttgtaatggtcaacaccatgcatcagtgtattgatgcattaccttgatgaagcactctngatccaacanatctaattcanaataagagagataagctctactttagcaagataaccatgaagaagaaatgtagtcattcacaagctgcagatagtaaaaaagaatgaacaccatttctgcgaatgactcacttttcttaagaagt

SEQ ID NO: 159712 - DNA, 406 bp, Glycine max
  unsure (1)..(406): unsure at all n locations
agctttgatggtgtcgagaagaaatcacatgtttgttatcatcaaaaagggggagaatgtgaatgtatgtatacatgatnttgatgatttcaaagaagaatctaacaaggcttcttcaaatgataagcatttgcttcaagaataattcaagattgcttcaacaaacaaagccttgtttcaagattcactaaagacaaagccttgccttaaaacaaagtgctttcaagacatgcaaggctctggtaatcaattaccaggaagtgtaatcgattaccagaagacagggtcgagaaatagctgttgaaaaaggttntgaatctgaattttcaacatgtaatagattaccatatgtctgtaatcgattaccaacaacaaaactttggaaattcatattcanaagtcacaa

SEQ ID NO: 159713 - DNA, 226 bp, Glycine max
tccattgtatattgtcaatctcgattgtccactgcctctgttcactggaatggcatgagaccccgcttaccacagctatgaaccttcgttaagctttagtggctagttaagttcgttgtaagcttggtttgtttgattataacagcttttattgtctgcttaccatctatattgtgtacttttttgaacgaatcatacatcccaagctatactggaccgttactca

SEQ ID NO: 159714 - DNA, 380 bp, Glycine max
agcttgagatgaagaagtgttgaagggtgaaacttcttgcttttattgttgaccacagagtggtacctggagatatgtcgcgggggtcaggagaccttgtggacgtcaggtggggtgctattgcccaaaaccaagcttgaccaatcccgacccaacccgggcatagtccgtcagtgagaacctgtgatgtacctaagcaggcgagctcctggcagtcaacagataaaaggaacaaagaccacaaagcaaggaggcttgtggtggctggccagctgtgaatattgtgtaatatgtgatttgtggcctctggtaatcgattaccaagggtgggtaatcgattaccaggcttaaaattgaaacaggaggctagatggtctctg

SEQ ID NO: 159715 - DNA, 351 bp, Glycine max
  unsure (1)..(351): unsure at all n locations
aaattcaagccgaggcgcttccgtaacgttttcgtggggtaatacgcgaagattntcaacccgttcttcgacattcatncgtggttcttcngtttcttcgggcttcaactgggtaagtaccccacaccgagcttttcaattcattctatgtacgccgcggttgtncccattcngttcatgaaattatattctcgttttcatttactttccgtacccccttttgacgtgcttcaatcatttatttaagtcatttctcgcctaatcaaagaataaaatatatttccaccgatcatttgatttgtaatatcccgctatttctattanaatgaatttcgactgttcggtcgtacc

SEQ ID NO: 159716 - DNA, 425 bp, Glycine max
  unsure (1)..(425): unsure at all n locations
atcctcagagccacctgcngcatgcaagcctttgacattatgacttccggatgttacaacttttcttcgcattaagaaaattgtaagattgtttgagtttttttgcgttttcctctttcttttttccctttaattaacacacaagggtaaagcctactgaaagagagatcttcatgatctctccatagatcttccatagaccatagtgagattgtttcttactctactacggcaaagaacatttctatgtgtttttgggttgtctcctccctaaactaactggctttgttctccatctggttgtgcattttttctcagcactatatctaacttgtttcttcttttgggcacgacaattagattctgaggatcataaaagtgtcccaaaaattttatgatctgggggaagagacctaccactatac

SEQ ID NO: 159717 - DNA, 378 bp, Glycine max
gcgttttccttcacgcattgttcacattaaaagtgataatggtgagaccgcgatgaaaaaatagttggtaaaaaaattccgtttaatttatatctcaatagctaaatcgatttagacactaatttacaataaacttattctacaagattggtttgaattgaagtattcttaatcgttcaaactacgtttaaagttgaatcacattgaattgaagtcagttaatagactaatttatagagacaattggtaactcaataatttataaaaaatgatttttttactattaaagaatccattcattgaagttggtaaatctgaccaatttttaacccccaatcattaagtgcctttgatatatgtatcaatcaactcactaca

SEQ ID NO: 159718 - DNA, 434 bp, Glycine max
  unsure (1)..(434): unsure at all n locations
agcttgccaaagagatttgctaagtttctgaagtcaagggtgttatgatggaaaacattgaataggtaagacctatacaaaatgacattgtatagaggtctttaacagagtcgatgccatcatccatcaaatatatagtactaatttggattgaaaatttacattttctcgtaggttcttgatcgtggagaaaagattgagctgctcgtggataagactgacaaccttcggtcacaggtttcattttcttctttattcttttagatatatatttaatctaatttacacgactctttgttcattctttttttatttctttgttaaatatttcttacattatttaaatctttggtgttagtatatgctgacatcattagttaattggttttaacttctatntcaacttggtatgcgatgacttcgttatttatata

SEQ ID NO: 159719 - DNA, 395 bp, Glycine max
  unsure (1)..(395): unsure at all n locations
gatgtgtatttcaaattcctgattcttaatggccacaanaggattacnagattgcatttatttggatcnggtcaataatttactccttgatatacaaccgtttagttggttgttgaagttggtaatatggtattcactaatatctacatatggtgttgttcaatgtgaaggataatntgtgtgtagtttgggccaaaattgttagaatcatggataataaaccttggtgggagttagaatatggccaacgattggtagaatatgataacaccggacattactacactaaactcagtgttccaattattcccaagtaaatatatttaattgatacanttctgtttgaattcatattgaacctgtgaacagtgacacattgtcgcaacctacccttc

SEQ ID NO: 159720 - DNA, 448 bp, Glycine max
  unsure (1)..(448): unsure at all n locations
agcttcaagaaaaatggcctccgcaaacttcttatttccagaaggaaattcactcaatagacctccaatctttaatgaagagggttaccactactggaaaacctgaatgcaaatttttattgaagcaatagacttaaatatttaggaagccatagaaatagggccttatatacccaccacagtagaaagaattacaatagatggaagcacatcaagtgaaagcataacaatagaaaaacttaaagatagatggtctgatgaggatagaagacgagtacaatacaatttaaaagccaaaaacataattatatctgccctgngaatggatgaatatttcacggtttcaaattgtaagagtgctaangaaatgtgggacactctacaattaacacatgaaggaacaacagatgttaaaagatctangataaacacattaactcatgaatat

SEQ ID NO: 159721 - DNA, 401 bp, Glycine max
  unsure (1)..(401): unsure at all n locations
agcttataacacatctagagtggggagttattattaatctaacttncgcatagcgtacgttgacttcaaacttctctctcatgatgtgacacaatgatgggttcttgcttaagccccacatgtcaaactagtcattatgacagctgggtgacttcttttctaagaagacagattactgctaactgtacagatctgaactccttttctatcaatccattatatggttgacattctaattgtcaaattttgagcagctgtctaatgagatatcatgattatatattgatgntgccgagaaaggacatatgctgatgtaggtgccttctaatgaataaacatgatgtgacatttgagatagatcaaatccattaatccaacactttttccatagcatatcattc

SEQ ID NO: 159722 - DNA, 116 bp, Glycine max
gatttcatcatcgtttagcacacgtgacaatatcatacatcttacaagcctgattctagacttttcttcacttgaccaaacttctgaggtttagttttaaccttgaacttggcttc

SEQ ID NO: 159723 - DNA, 338 bp, Glycine max
agcttgagaagaggaagagtttaatggttatacctcctgctcttattgtagaccacagagtggtacctgtagatatgtcgcgggggtcacgagaccttgtggacgtcatgtggcgtgctattgcccaaaaccatcgcttgaccaatcccgacccaacccggtcataatctgtcaggcagaacctgtgatgtacctaagcacgcgagctcctggcagtccacacatatgatgaaaacaatgaccacaaatcacggacgcttgcggtggctggccacctgcgaatcttggcaataagtggatcgtggcctctggtaatcgattactcacggtgggttttc

SEQ ID NO: 159724 - DNA, 334 bp, Glycine max
  unsure (1)..(334): unsure at all n locations
gtatgtgaaaagattgtatgaccaagtgaacgtgaaaattgcacagaagaatgaaagctatgccaaggcagccaacaagaaaaggaatgatgctgtactttgaacccgtgatgaatctggacatttaatggcaaatgccttccaagaaggagggaatgatgagatatctgaaactggtcaaatacaggctataggcncatgtggagaaggacatagaccccgagtggagaatgatgaatgcctanaggcagagacactacctatactattaataggttgtgaaggcctagaataatcataaggcccataccatatatgctgctattttattaat

SEQ ID NO: 159725 - DNA, 335 bp, Glycine max
acaccgtatgctgaagttgatgtcatgaaaaagagcctgcctcttctctctgctgcttctgcgattattcatttcaaaatgtctgaacgtcaagcaatgcaagtctataacattctattctctcataggaagttcaattgttgaaaatgataaagaaaataaaattgttataccctctgcaggctggtgaacttataacaaggcttgatctggatgatccttctgctgtaataaaggcagaacccttcactgggagcttcccaaacctgtgacctcctatcgcaacttcttgtaatgttcatcaaaaatgcgctgcaagcttaaatgctgcaccg

SEQ ID NO: 159726 - DNA, 332 bp, Glycine max
  unsure (1)..(332): unsure at all n locations
cttcaccttcntctatgtggcaggttgcaggctgcgctatatgtggtggagctcatgagtcaagatgctatattcccactgacgatcatgcacatgaagttagctacatgggaaaccagcctagacaaaattttaatgcaagtggattctcaagatgtttgcacggccacnattataaccagcagtatggacagtgaagagctcatcttggtaatcaattcaacaaagaccatcgagggtcatctaatangccagagcaacaagggcctaacctctatgagagaacgacatagatggaagagactcttgctcaattcatgaaggtttcattg

SEQ ID NO: 159727 - DNA, 349 bp, Glycine max
  unsure (1)..(349): unsure at all n locations
caacgagatgatgcgctccatgagaggttggatcaaatggagaatacagaccatatgaattgctcaagagctcccattgctcaacttcgagcagccagatatatagtgcgcctcaagcggacctacgaatcaaaagccatgaccatctgaaatgccaaagagcgtgcattgaacaatttcgagcgtcacgatatattatgcacctgaatcggacctgcgagcgacaacttatgaccatatgaactgctcaagagcntccaaggggaaatctcgagcgccacgatatagtatgcacccgaaacagacctgcgaaagacaactcataaccatatgaaccgccaacagcttc

SEQ ID NO: 159728 - DNA, 392 bp, Glycine max
  unsure (1)..(392): unsure at all n locations
ggctgctgcttgcccccgctcgncatttatttggctgcttcctccagaagcaacagcgcttctggaggaatcttctggagggcccaagcgggcctggttgctatttgccactccatttttactaagacaccccctgcctttttttgggattctttttcgcaaagntacggtaacttacgaatttcgcaacgatacttgttttcttttcgtaatgatacggaaccttgcggaaacaaaannatcccctttttgacttacggaatgttacggacactcactaattgtgcaacgatgcttccatttgatttctggtgtgtcacagacacctacagatagtgcatcaatatttctctttgttttcggcatgtcccgaatttccatattgctaatga

SEQ ID NO: 159729 - DNA, 389 bp, Glycine max
  unsure (1)..(389): unsure at all n locations
atccactttaggcggtcgaacaagcttcttttaatttataagaatccgagacttggattggacaccatgcttctgatttcactggaatggcatggagaaccccggcttacgcacagcatatgtaacctttacggtttaaaagctctatagttgggcctaagctctagagttctcattttgttaaagctctgtgtcttttgtttttgaatttataatacaaggatctttcttcatctgttcctggtctctacccattctcattcatttgcatgtatacttcttttcctataacggcagattcaatgacaagtcccctcgaggtactaatacctgtgacccgtctatcaacttctagcaagaaatgaatcanacggaagatgaaggagatg

SEQ ID NO: 159730 - DNA, 436 bp, Glycine max
  unsure (1)..(436): unsure at all n locations
agcttgtntaagttccaatatattaaatgttgtacttttncttcaatactttttattttttaaaacttaataactgcacttaggaaactcattagtaaaaccccataaaaatataaagatattaatgaggtcatgtcaaaatgtgtttgttattcattgaccgtgtaactaaagaatttatatacaggacagcaataaagatgatttcttgaatctttgaccgcatatctcaacaagcattaagtttctaccctgctgctttggaaattgtacatgattcatcagagggcgagctgagactggtgggacagccgtcgttccatgaatcaaatcctacaatgacaagtaaaatgtaaaaagactaagctaatgatggtcaaatattataataaacattntcagcgggaaaaaaatgcttataatttgatctgattga

SEQ ID NO: 159731 - DNA, 445 bp, Glycine max
  unsure (1)..(445): unsure at all n locations
atctatctgaatccattttgntaaaccaatactattcacttttgttaagccctaaggtattgtgtagtgcgttgctctactaaaactatcattctcattctttaaattcaccatttgtgattttacagtaaataataaaggcatatattactgtaaaaaaaaggcatatatgaaaaaaacactgtatggaggatcaaaattcaccttcaaaatttaaggttggcttttagtgctctggaatcaattaatcaaatgggttgctcctctaaataattacgggttgaggctgtaattcacagtgaanataagataaacaaattaaactagcacaagccactctcttntatcagagccttgtttcgatccacggacctgtgggttatgggcccaccacgctttcgctgcgccactctgatttgctgatttatacttcgacagctatata

SEQ ID NO: 159732 - DNA, 435 bp, Glycine max
  unsure (1)..(435): unsure at all n locations
aacagacaaccatacttttcttgagagaacanctatgatggtgagaaagtatgagctcccaccatgggtcttcactctacatggtccgcataaattagaacgcacatactccaaaggcctagatgaaacatgaatacccgtgccaaaacttattctatgtgactcaccaagcacacactgatcacaaaagtcagaggtatctagtatatcaccatctaacaagattcgcttctcaagtgcacggaatcctcttctactaacatggcctaacctcaaatggcagagtcttgttgatcaaacaatgtattactagcctcccgtgcatgtccaacaatagtggaaccatcaagaataaacaagcgatacttctactcatgtaccctacctatgattaagatccattgaaccctaaaacacatctaaactcagtgaaat

SEQ ID NO: 159733 - DNA, 355 bp, Glycine max
tctgcttatgtggcagggcgggctcacttcactgtcttgtctctactgtgagctttggccactgcttatccttgccgccgtgcttctcttcatattaccctgagtgggcttataacctataccataacttccacaatattctttggcatttatcacgctagtcatgccgccgttgtctttgactaaacccattccgggttcgtaaccgatccccaacataactcgggccatcattaccgctgcgtcggacaggcaatgctgcccagacaatgagttcacagaggaaatgcttaccacctccaaagactggaaagcggtttctaacgattcctctacggcttccacataatgcata

SEQ ID NO: 159734 - DNA, 512 bp, Glycine max
  unsure (1)..(512): unsure at all n locations
ggatctctaagtcacctgaggcatgcaagctataatgtttctcttttgccttcaaattctttgaccatatcaaacttccttgtcattctctgtaataatatgacaacaaanaagcagtcaaaatatgatatatntaagacctatggatgaaaatatttatgttaaaagcaatcaattagtttttgctaaaggaatagcacaatctatctagaagactaaatacatcaatttcctttgcaatagaaaaaacacgtgaacagaaaatagaagagaaagggagaaagaaaaatgcgaaaacaaagaaaaaatgaaaagaggaaaaagtaaatattacctgagtaaatagtcaaattggtcattgaatttgtttaacactctcaatttagtcccccaatttaatgaaattaaaaaaaagtccttgaaactttagtcactcaaccatagactctaatagtctctgaaattctttgtccaatacgtgtgatgcagagtgatctacactacaattttgt

SEQ ID NO: 159735 - DNA, 448 bp, Glycine max
acctataaaactaagctcgttgaatataatctccatctactctctgtagggtgtaggagtatattgtggttcaaggaacatttgttccacatttgagggaaggtactgggtgatgataattgtggtaagacaagcaacaaccacagaaaagtgtatcatgaagcagtaagtaaaaaccgctaaaaaaagagggaaaatgaaattttaagaataagccaaatctatgtgtgttgttgcttaagttaagcgtcttatataattgtggcagttcaatagaagttgggaataaaaggaaaagatgtgatctaaggatgaatgctctcctacaacctaagttttgcatcttacaaaaaccatgaattgtttgtagcccagcctcattacaagccaagatagtctttcagattcaatttgtgtgcttgtgattgtatgtcatgagatgaaatgc

SEQ ID NO: 159736 - DNA, 326 bp, Glycine max
  unsure (1)..(326): unsure at all n locations
agctngnaacanacatatctaatagaaataatttggttttcaccacacanggangataagaccatcatcctagagacctgggtaaaatatcgcatcacgaacaaaacagaatccatcaactcacggttcattgagacacgagaaaccaccactggcgtagaagcactgagaatgctagccatctcatctgtgctactgtacacgctggttagctaaagacagcgactgctggaaagattacaacgcaagactactctagcctctagtaaataaactgattactgatcttgcctatcagactgtaaagtttgcactgcacgctcact

SEQ ID NO: 159737 - DNA, 341 bp, Glycine max
catgagatcattattgccaccccatagagctctccgaaatatgtcccggccatactcttccttgcgagccctcttggcctctcgtgcaaaggcttatgcggaaattgcatactcttccccgacgccgcgcactccatacgaacgtgtgtagcagccaacttgaacatctccttggcgagctctgcctttcctaactcgctatagagagcgtggactccttcgacctcttccggcgcgtcaaaaatcgcttcgctgacgactcttaacccggcgagccaatctaaagctcgcatgcgaactatcagccattcgcggtacacaccaatgatgccattaccaat

SEQ ID NO: 159738 - DNA, 451 bp, Glycine max
  unsure (1)..(451): unsure at all n locations
agctntntcagtcgcctgtaggatgaacgtttgttataatttgtgacgcctactgtagactgtttttcttccatgtttaagatgtatgtaactcgtattttcttcacagatggcgcatgcgtgatgacccttaacactgtaaccgctgtgtcgcaacctacccttcggcgagagggcgacgcgtgactcgcatgatgcgtgttccacgacaggaatacacgcggagtcgccaccaacgcttatttgaggaaaacgtccgaaaaaccggaaaagacgcgatctacgaacttttaagcgaaaggatcgggagttgtatttacgcacggcgaaggtattatcaccccacacgttctgcccaatggacggcaggctgtaatccaatgtgcaaacatgaccttgatctttatgtggcctcttatgtcttatatcctcatacgcttctatatttctc

SEQ ID NO: 159739 - DNA, 478 bp, Glycine max
  unsure (1)..(478): unsure at all n locations
ctaagctggcacccagctcgcncaggcgagctcagctcgcccaagcgattatggtgctttttccagaagcaacaaccttatggaggaatcttttgaagggcccaagtgggcctggttgctatttgcacccccatttttactaaatacacccccttgccttttttggtgattcttctttcgtaaagttacggaaacttaccaatttcgtaacgatactgtgatttctttccgtaatgttacggaaccttgcggattacataatcatcccctttctgacttacggaatgttacggaacctcactaattgtgcaacgatgcctccttttgatttccggtatgtcacggaaccttacggattgtgcatcaatattttcttttgatttccggcatgtcacggaacttcacaaactgcctaatgatgggtgtaaacaccttacaatgatgaaacacaagttgcatgccacctagcacagcgtcc

SEQ ID NO: 159740 - DNA, 438 bp, Glycine max
ttcatgggaaacatatattggttattatggttcccaaagctgagtatatgaagaggcaaaatttgagtctctggactttaaagacgctactccctcttatataaataacgtattccgccaaagttattaaattaagaaaaacaaatttaattagagatatattagtctaaaataattaatacatgggacattatgagttgggtcttatatatagaaaccaagggaggaattaattaaaagatttagagtgataacacataaactttcataaacctttttgtcatcttattatctttagggattaagagaaaaacattatacattacttttataaaaaaaaactatgcgatcacttaattagaacctatcatgtatgataattattaaatgtagttattattataataattacttaaaatcatttatgtgtgattagac

SEQ ID NO: 159741 - DNA, 260 bp, Glycine max
actcagcttaaggttaaaactgaaacttggacgcttttttctatacaagcactcaagagatctggcttgtcatgattgtttcaattccacgcttcgattaaaagcgatataatatgctaacacagcctcgttttatgtaccttcatgtctggcggaggaccatcttgagagcttcactttttaaaactaaaactatcggaaaagtaaacccattgaaaagttcgtctttgatattcgaaacactatggaatcacacccat

SEQ ID NO: 159742 - DNA, 190 bp, Glycine max
taatccggtccttgctgtcacacgctaccatcatcaggcgcatggaggcttgcctggtgtgtctaatgacctaactaacttgcattaattgcgggcctctctcgtgcctcgttgaaatcgcgatacctgtccagccccccgcattatacaatccggcaacacgaaccgtttgtggtggggcgcctaatga

SEQ ID NO: 159743 - DNA, 185 bp, Glycine max
ctaagcttgctggcggctggctggtctccggatccgcgggactcgttttttattctgcctatgaagagagctgatctaagtcacagcgcggagaattacatcctcgggactgcgatagccatgtcgtctgcctgcatgttcaccttgcaggatatccgggtatcgaccgctggtgtactctataa

SEQ ID NO: 159744 - DNA, 443 bp, Glycine max
agctatccttctacacatagctctatttattgttattataactgctacaagtacgttaccatgcataagtggatgaatataaccgacatgggatttgcgattgcattgatgtaatgtcatccttagaacagattgtcctgtgcatcgcgtcatatgtatccatcatctgtatgacaatcattttgttcacgtaaaagcatgatcatcatgtttgtgtaatgtatctaaaaaaaatgttctgataattcgaatgtgtatgtccctatgtaacaggtattgttaagagactgttgtcccttaccgccaatagctctgctatggtctacacattgtcattatcaggcaaagcagtggcctacaccatacattatgagaatgcaacagtatgcatacttgtctgggctgaaaacatactttgttgatttaggtgaagattgaacttt

SEQ ID NO: 159745 - DNA, 470 bp, Glycine max
  unsure (1)..(470): unsure at all n locations
cgtattcttacgatcttcttcattaatggattccttcgcttcttgtaagacaaatggaagtggaatggagaacgaagagagagaggagacgccacttcaacgagaagatgagtctataagaagctcaccaccataggaggccatggataagagcttggaggaagaaggatatgaatgaagggagagggagggaagagcacgaaattttgcgctctaagagagctntgaaatctaaagtttaattttcacatgatcaaagttgaaaaaatgcacacacatgacctctatttatagcctaagtgtcacacaaaattggagggaaatttgaatttcaattcaaatttcacttgaatttgacattgaatttgtggacccaaactttggagacaaaatttcactaattatgattagtgaatcttagttatggttcagcccactaatccaagatcaattcgaagattctccactaa

SEQ ID NO: 159746 - DNA, 383 bp, Glycine max
agctagatgtgagaaagcgtggaatagtctctctttctacttttgtttgaggaccacagagtggtacctggagatatgtcgcgagggtcacgagaccttgtggacgtcaggtggggtgctattgcccaaaaccaagcttgaccaatcccgacccaacccgggcatattcagtcagtgggaacctgtgatgtacctaaacagacgagcttctggcagtcaaccaatataagaacaaagaccacaaagcaaggaggcttgtgtggtggctggccacctatgaatctcgagtggtatctggaatttggcctctggtaatcgattaccaagggggtgtattcgattacaaggcttacaaatggagataggaagttaagatggcctct

SEQ ID NO: 159747 - DNA, 494 bp, Glycine max
  unsure (1)..(494): unsure at all n locations
tatacaatattctcaattacactcccagttgcataagaagtatgttcaattaaattaattaaaaatagtggtatactaacagactacattctgatcaacattaacatattcttagagcaaggaaaacaacatcttcattcgagtttagaagaataataccctatattgctgaattaacctattgatcaatcaacaaaaggaactgaaaagaaatctataaactagtgatcctagcctgggtgtgactgcagaaggtcacaataaataataaataaatttcattataaatatattgcatatttagtgattaacattaaataaattttaatgtgtaaacaatgtatccttattcattaacataatagatactctcctacaaaaacgcataatagaaataaaaactacaaggtaataaacataaacaacattatggtcgccttttttaattnttgtagcatgataatgaacacacaatggcagcagtatagaatact

SEQ ID NO: 159748 - DNA, 429 bp, Glycine max
  unsure (1)..(429): unsure at all n locations
agcttgtagcanattcgaacgacaatatcattttattctgaagtccgatcgagtcccgcaatatatcgagacgctcaaaatttaaaactgaagctcgcagcaaattctaacgacaataacttttcactcggaagtccgattgagtcctgtaatatatcgagacgctccaaatttaaaaccaaagctcgtagcacattcgaacgacaataacattttactcggaagtcccattgagtcccgtaatatatcnagacactcaaaatttataaccgaagctcgtagcacattctaacgacaataacatttcactcggaagaccgatagagtcccgtaatatatcgagacgctcgaaatttaaaaccgaagctcgtagcacatactaacgacaataacttttcattctgatgtccgattgagtcccgtaatata

SEQ ID NO: 159749 - DNA, 428 bp, Glycine max
  unsure (1)..(428): unsure at all n locations
tcagttntaaatntcgagcgtctcgatatattacgcgactctatccgactttcgagtgaaaagatattgtcgttagaattcgctacgatcttcgattctaaatctcgagcgtctcaacaagttacgggactcaatctaacttccgagtgaaaagctattgtcgttcgaatttgctacgagcttcgattataaatttcgagcgtcttgatatattacaggactctctcggacttccgagtgaaaagttattgtcgttcgaatatgctacgagcttccgtttaaatttcgagcgtctcgatatattacacgactcaatcggacttccgagcgaaaagttatcgtcgttcgaattcgctacgagcttcagttttacatttctagcgtctcgacatattacgggactcaattgcacgttcgagagaaaagtt

SEQ ID NO: 159750 - DNA, 431 bp, Glycine max
  unsure (1)..(431): unsure at all n locations
ctaggnggcgatcgggtgatggtgcgaataaactctcccacatccacaaatcacacatgaacccaccatcaccagttgcccaccttcaactgagctcacgtacccccacgtagcccttatattcgttcctctcagcaccgggtccccatcaacccctccaagattccacaacatcctaccaattcaatatccgaacatcatgaactatctcaaaccaagaaaacagggcagacgcagatagctctgcccaaaacacattccaataccacaacttgtcctactcaaatactccagtaacattctcttcgttccgattccgtaaccgttggatcgacctcacacttctattagaggcgcctagtccttaatcatacactttgaacgttgggatctgctaaatacgtccagaacaaatatgcactacctttcca

SEQ ID NO: 159751 - DNA, 405 bp, Glycine max
  unsure (1)..(405): unsure at all n locations
atattattgaccaaccctccgaaaccttctaccgagatatcttgggccacgtgtggcctcgtcaaaaccttcactagcagagctcgatgaggctcggagctcatgaataactccaacagcgagaccctggccggggttttgttgagctgttcgataaccttgaattcgctctgctgaattatacggaggaactcgctggcttcctctagtgacacctcctttntaccatcctttntcttcggaagacctttcgccggaatatctttattcgaagcgaggggtgcttcgtcatcttgttcctccaccactcnttgcattcccttgacgttcgcgggttggactggtangtcttggggtgcaaacacacgaccgctacgggtcacaccactcagtcccgtgatattt

SEQ ID NO: 159752 - DNA, 445 bp, Glycine max
  unsure (1)..(445): unsure at all n locations
caagctttacactcgacggagtatagcaatgtttaatcngtncccaaggatatgacatctgtanataaaaagggctctttcgtctacggctttatagaccttttcagtggttgtggagaaacatggagttggagttttggaatggatgaaactgcagtaaaaagttcttctctttctccatctaagatagatgcccaaaaccactggagaagaaatttgatagtaaggaaacaccattaataatgcaagaacttcctgtcaaattacatactgttggagaaggtctgaagacagctcaatagtctatctttgacttcttccgtacatcttttgcggaggatcttttacgaacaaaaatgaagtgacaagatgtatgaagatttgcttttgcagtcctggactgctgtttattcaaccactgttttttttgtttcgatctaataag

SEQ ID NO: 159753 - DNA, 303 bp, Glycine max
ctatcgccacccgcgaacatgatgcctgctggcaccataatgccacatggaaatagaccgcacgcgcttgctaactcgttggctacggaaatctgactacacaacaaacattatacgatggcattatgacagctctcactagtcgaataccagcctatcaatcattttactatttctaccgcctccatcgcattcaatctagcatatatgagcctctgcagaatggcatgcatatgtgttgcggaaccttcttgacataccacaaacctatctgcagcaattgggtcagccagcatctatgac

SEQ ID NO: 159754 - DNA, 440 bp, Glycine max
  unsure (1)..(440): unsure at all n locations
agcttctgataaactntgattttcggctagtccagcactcttctcttcgatatattacttgctgaaagtatccctgatcccattgataacgagtaggaccgaataattcaataggggttgttgctgaaccataccacatagttccagcaacgacaaaagctgcaaaaaagacagcagcaatactgctggaaaggacagtttcaatatttcccatccgtaatcctttatatagacgttggggtggacgcacactaagatggaaaagacctgctaatatgcccaacgttcctgctgcaatatgatgagaagctaccgcccccggaacagaaggatcaaaaccttccacgccccacgcgggatttacggattgtatccttccagttagtccataaggatcggacacccatattccaggaccatacaatcctgttacatgaaat

SEQ ID NO: 159755 - DNA, 445 bp, Glycine max
  unsure (1)..(445): unsure at all n locations
agcttataataagacataccagcattntattgaaccatttcaagaccacaatattgggcccagacacaatatacacaccctgttccaccatataaaagggtccaaagaggaaggccaaagaaaaatagaaagagatctgtagatgaggacaatgtcacaggacataagctaaagaggaaattggctgagtttacatgtggaaggtgtggccaaactaatcataacattagaagctgtaaaaatattggagttcctgttacgccaacaaaatatgttgcaccatcaactgcaaatgaggatgaccacctattatctcaagatgaacaagctttgaatgaggctgaaaaagatccggtggagattaatttatctcagcctcatttgtcacaagatagtgacatggagttgatggtaaatatttgtcacaacacagtagttttatctc

SEQ ID NO: 159756 - DNA, 451 bp, Glycine max
  unsure (1)..(451): unsure at all n locations
attattctctcttatttcacagtatattattgagaacaaagaaggtcagattcaatactttcaaatgatttatcagttgaagtagaactatcttctatagttcctcttttttcattctcctcctctagaataatagatttagaatgttcatatgctacaatttaagatcttgtaagatacaattttatggtagtaagagaaaaaaaaatccacaataaagaaaagaaaaagagtccaaccaaataatcagacacatagctgttaactttccaaactgataaaaccagctaaagaaaacatcaacaaaggcaaaatgctactctcatgttaaaacattaaacatgattntagatacgaacaagaggatactatntacattatttaatctatgttattttcttaagtaaacatatataaagaaattgagtgcgttgttacttgatttctcacc

SEQ ID NO: 159757 - DNA, 465 bp, Glycine max
  unsure (1)..(465): unsure at all n locations
agcttccttctccaaaaacactaccctcgatgtaatcctattgattcgtgatcgtacgtgtgatctttgattcgataggaaatcatgtgcaaaataaagtcatggtgtagttatggtttggggtaagggtaaaacacttgcatgtgtgagtttttatacactatgagtgatttattcccagtttcagctcaacccgatgtttcccctgaatgttcatttaaaagctaaatgttgacatcctgcccttcattttcggntacaaggaagattacccttggcatgagtantattgttctctaagatatggtgttctcgcaaatgatttacttttcttttgcaaaagcatgtctgcctttttatgtggaaaaaacctggtggaccattccgtcctgccaaccaatcttgttcggagacccatgaattgattgcctagcgttgttcccaattttccattctccactttat

SEQ ID NO: 159758 - DNA, 493 bp, Glycine max
  unsure (1)..(493): unsure at all n locations
cttctgacacaggagaattatnttctgacccaagtagatattttagtntgtcatatagctaaactaatccaattgtaacaagaccaaccatcttttgttgtaagtgtggccattagaatgcaaatgtcaaaattatgatatttcttagaggatcactagtaaaaggattgattagtgttttataagagacgacataatgagattattacctatatttaataggagatccacctatggatattgtgttctatttggagtcaatctctttaatggaaaacctcaagaagcaaaatgtggttgcaaggtccacagctgaagcaaaatatcaagctatgactctcactacttatgaactaatatgtctaaaaacaaaataaatgactcattaaagagattaaatcttgtgaggttggaactgagacatatctgtgataatcaagcagcccttcatattacatctaacctagttntctgatgagcataccaaacatat

SEQ ID NO: 159759 - DNA, 456 bp, Glycine max
  unsure (1)..(456): unsure at all n locations
agctnttcctctggtttctctactagggtttttttcgttatacagaaggagaagggattgaagcctctatttcattgtttccatgcgagggacatttctatcaccacagacattattatacaaatcccaatagtggggatgtgaaaaaatgagttctgaacctggtgtttgtagaagcaagactacaagagattntgatgatgccaacagtcaagtgttcttcatggataattcaagtgaccttcaagcaatccaagaaatacaagttacatctacaagttagatttgaaagcacaaatgtttgaccaagaggatttttctttcaaaactttttattttaaagatttctctctgctaatcgattaccacaagatgtaatcgattaccagtggccatgtgccttctgaaaactttaaatgtgttaaatatttagaaacatgtatcaataccatggtt

SEQ ID NO: 159760 - DNA, 492 bp, Glycine max
aagaacttcaatataccaatcagaaggtggaccaccgattcttatgaatggccaacaccacaaataggaaggtcttggatctgaacaaatgagtatctttaacattttcatttataaaagaaaatcagacacagaaagaaactagtccttggatcacaagttgataattactgtttcttgcagtgtgcgatagcacctatcaaatttgaactgtacttcatcagcaatgaggaagtgatcaaacccactagcatatggcgttgcaatgatcaatatacccctagtaacagaaagggttttataattagttttttttcattgtagatcctagatttgagtctcaaaattatccacatgttaatatatttcacagaacagataagtgtttgtcagggaattggaaaaccttcacacgggacactacactaacacataattatcatattttacacaaaaattctgtgatgagaatgtaattcagaggactttggg

SEQ ID NO: 159761 - DNA, 390 bp, Glycine max
agcttaccagaagcgccaatcagaggactgtgttgttggcgattatgtctgagctatcatgagttaagatcgtctacccactcattaatacaactagcttattgctaaaaaaatcgagtcatattcatagttctaatgctatcaatgttaatttccttatcgtggtaatgcttcttctgatgacgagatggcttttgatctgaggatgaatcttctccaccccgaagaggatcctgcagtgctagattgaccaaagttgacccaacaaagtcattcgtgtccatttttttacaaacgagtacacttttttgaatggaaatgaccttataatgagactgcattccctactagcaatgtgttgattgatttttcatccatattctattgtta

SEQ ID NO: 159762 - DNA, 497 bp, Glycine max
  unsure (1)..(497): unsure at all n locations
ctcagcttcaaacacagcaacacanaatataggtgtccacaacccctctatttaatggtttttctaggtttgagaagtgaaattgaggatgaggtaaatntgaagcaaactctcacctcacacaagtctataacatcaatttaaacttgttcaaactgaatttacacctaaaatttcaccgaatcaaaatttgactcttcaacacccaaatttaccctacaaatggctctctgttcactctggtcatttgtttttctctctagcacagcccaaactttctcacatgtcctaaatggcatttcaagctaggattaactcattttaacctccatttaccacagaatccagatttaaccttccaactctcaaagcctcacttnttttgcactcataacaccacattctcaccttctaaccctacgttaattctacccttcatctctaacacgtttccataagcaatttcagcacataaacatcacaagcatcatcacaaa

SEQ ID NO: 159763 - DNA, 428 bp, Glycine max
  unsure (1)..(428): unsure at all n locations
agcttggntcgagggacttacccgttgaagatctattaacgatgaagaacgaatgaagaacgtcgaataacggttgaaatctttgcgaaattcctcacggaaaacgttacggaaacgtttcggaagcgcctcggcttagattttcttcacggaaacaatttttccaagcaaattcgaaagagagagaagtgcctaaggggctgaaccccttccttcttgccttcctccnctatttatagcaaaataggggaggtggttgccgcccagctcgcccaggcgagcagggttgcttcctccagaagcaaccgccttctggaggaatatttcggagggcccaagtgggcctgggtgctatttgcaccctcatatttactaagtacacacccctctgctgtgtttggtgagtctttttcgtaacgtacggaaac

SEQ ID NO: 159764 - DNA, 499 bp, Glycine max
  unsure (1)..(499): unsure at all n locations
tactcagctgcttggggctttatggggctgatcttgagcttattgatgtccttcaatggcgaatttccaccatggagatgcagcggaagacaaatgagaagacgtgagacgaggcgccatccactacggaataagccatggaagaaggagcttcaccaccaagatgagccttggataacaagtttggaaggatgcttcaatggaggaaaagatagagggagagaaagagagaggggggagcacgacattgaaggaataaaagagggagagaagtggaactttgaagtgtgtctcacaagactctcattcatcaaagttacaacaagtgttatacatgcttctatttataggctagttagcttccttgagaagctctcttgagacaacttccttgagaagcttctttgagagaactctcttgagaagctagagcttagctacacacacctncttgagaagcttccttaagaagattcctaaagaagctagagcttagcta

SEQ ID NO: 159765 - DNA, 404 bp, Glycine max
  unsure (1)..(404): unsure at all n locations
agctgtccanaactaggtaaagatgttcatgtgttataatccaattaattaagtccatgccaagattagataacactataacaatcatgaagctgtcataataaaattaccgcttttatttatggcagatactttactatcaagcaaacaagataaataaaattagatagatacccaagagagatgaagaaacacttgagaattttcgctctagtaactaatttgttataagaattgcactgctagatcctcccacaaccaatctttccagagaaatcattaatgagttaccattcttatttaaaaaatattaaggttaacttttatgaaccataatcatggatcatgttatttgaaagaaaatttataccatcatcaagaaggagagtgatactttaataatg

SEQ ID NO: 159766 - DNA, 459 bp, Glycine max
  unsure (1)..(459): unsure at all n locations
ntaaaatatgatntcgcttgctcttgcaccatagctagtttgtatttgtatgctttgatacacatcaaaactccatggagaagagtttaagaaatacctagatccatggagttcgatcaaacaaacacagttgttttccttcacaactttgcatgaaaggttttttaggcgagaccaacaccgtttttaaagatttctttggtatttcaatccgatcagattatggaagtttaatataacttaagttcccatttctcttcatttcattgatattttgactttaccaaatagatcctttgagtgttaaatatatcattgtgattcattttagaacagttctttgatatatcattgctattgcattgccatgaccttactcttttctatgaattaattntttttacaaataanacaaagcagggcaacaacataattaaacatatctctcatgtctaacat

SEQ ID NO: 159767 - DNA, 376 bp, Glycine max
  unsure (1)..(376): unsure at all n locations
agctngaaggtgtgtagctcaccatcttttttattagaataccggcaatgcgtctactatcattgtcatcatntttttctgaggtgccacttgagctgccaggtctctccacctttgggcgtattcttttgaaggattcgtgccccttttttgcacatgttctgtagttgcattctatccgaagacattatactgacactgcctaacgaaggcaatcactaggtccttccaagaattgactcgggaaggttccaagttagtgtaccatgtaacagctaccccagtaagactttcttggaaggaatgtatcagcaattcctcatcctttgcgtatgcctacatcgtccgataatacatcctctagatgggtcttggg

SEQ ID NO: 159768 - DNA, 482 bp, Glycine max
tactcagctttatggggttgatcttgagcttaatgaggtccttcttggtgattctccaccatggagatgcagtggaagacaaaggagaagaggtgagaggaggcgccaaccactacggaataagccttggaagaaggagcttcaccaccaagaatgtgccttggataagaagcttggagaggatgcttcaatggaggaaaagaaagagagagagaaagagagggggggggggggagcacgaaattgaatgaacaaaagaggaagagaagttgaactttgaagtttgtctcacaagactctcattcatcaaagttacaacaagtgttacacatgcttctatttatagactacgtagcttccttgagaagctttcttgagaaaactttcttgagaaattaaagcttatctacacacacccctctaataactaagctcacctccttgagaagattccttgagaagattcctaaagaagctagagc

SEQ ID NO: 159769 - DNA, 439 bp, Glycine max
  unsure (1)..(439): unsure at all n locations
ctaatngaaatattatatggaatctagaacataacgggattatataacttaccatatcttccgacacatgcctgccttcttcgttctcttacactgcatcgaacgaagggtcaaagtgaaacgtacatttaagtatgcaatactatcaaaaactacaaacagatacagaactacttgtgaggtgaaagcgcaagaacgcggcttctggatctaacaaaacaaacgagagaagcataccatggtttctggatcgaacgctctgccgccgcgttgtctattatactaatacaagagactcaacactttcacacacaccctaataatctatcgccgactttttctattgagactaaaccattttatcatacaaacgtaattggcacaagtaaatatcaaatccgccgtagactattcggctaggatactcggctctcacccg

SEQ ID NO: 159770 - DNA, 412 bp, Glycine max
  unsure (1)..(412): unsure at all n locations
agcttgtcaccaagcttctcgaccctcttccttatacaaggattagtatntccaaagtgatggagtcttcttggtttaaaaaaccggtgccgaggaagctcgctgccgaaaaggtgganttggaggaggagaagatngagagccagctggagaccatcaatgctctccacataatttccttgtcggaggggttcaatttgtcgcccttgctcgaggacaagaggagggaggagatgaggttcgtcaccgcggggacgcccagcaccgtcatttcgcggctggaggaggtggccaaggcctggaagttcgacgtcaggagtagctacaccaaggtgaggcttcatggtctggagcgtggcaggaaggggaagctgtccattgctccgatatctactccgtgactcgcttttat

SEQ ID NO: 159771 - DNA, 490 bp, Glycine max
gtgttaccaattatttgaatatttaattcgaccggaaatattattgttcttcatgatttcagatcatggttagaacacgaggtttaggttgtgcgttacgagctggtagaggtagagacattattgaggatacgcatgaggctgatgttcctctgcgtcgcagacctactgcttcagcacgtaggcaacaggttcatctgcgtgaggacgtgacacagagacctgaggatgtgcctcagttgcatgaggatgttcctcatgtgtctgatgccaccccagagatgacaggcaccgccgatgctgttcatatagagggagtggctactgatgggagcttggggtcacctgctgcagatgagggtttccccgatggaccacacgaccgcatttgctgagcatgttacacacagcatctggagtggacgggtacgtagtctttaatgctgactaactacataacacatatctgtagttggattgtttctatata

SEQ ID NO: 159772 - DNA, 275 bp, Glycine max
  unsure (1)..(275): unsure at all n locations
cgacccggatcttaagtcacctgcggcatgcaagcagctccctaatattctttctttgtttttgccagcaacacaggcagtggagtgtcaaacataaaatatcacttgaaagaagtaagcacgagaactattaaggaccttctgcaaggtcacagactaaactatacgtaaggtgaatggaatnagtggccgttggatagaacacaaacctcaacatataggcctatactaaatgagtgcaattgtatctaccagtgacctattttatgacgtcc

SEQ ID NO: 159773 - DNA, 456 bp, Glycine max
  unsure (1)..(456): unsure at all n locations
agctctcttcaagtctataatataccctcattttaatactcattggaagtggagcccttagctctataactntataaagtgaagttcaaaatatgccagttgtacttgacttgaaaatttctaaattgttctaaaggattcattctaatgatcaaatatgaacaacttctgaagattatgactgttttgtaggaagagcctattctaacatatgctccttcgaatcaaaaattcattatatgaatttttagaattctgaaaagtcttcatagcttcattatgatgttccacatcaaaatctctcaaggacatgtgtctcagctttcaaccaaatgcatctttaaatgttacccaacttattcttctttattatcaatctatggatatggatgctgcttttgtatctcttactatcatactttcgcgtttaatgaaacctcggtattatgaatcata

SEQ ID NO: 159774 - DNA, 483 bp, Glycine max
  unsure (1)..(483): unsure at all n locations
tacctatacattgatntacttttagctccatgtgacatatttcttaataggaaagaaaaacagttgacataaaaattaagaatgatcaagacaatttagctcgatgatgctcaaattattataaacgcttgatatctgtcttctaccccaatggataaaagaaaccatgcaaatacaacagtacagtgaattaaagatttcaattctcctataaatatttgtgctttgtaaaatgataggtagttgagcagtttggaattggtgctcaacaaaaactatataacacactgattctcgtcaagctttctcaaattntatttaatctttttattctttgaagtaaaaactgtaagttgggccaaatcttctcacgcattcgtgcatctttatgcagcagaacttcataacattctagctctgtttgtgccttactattatgagatggatttgataattgatcctaagtgaacattataattgaaa

SEQ ID NO: 159775 - DNA, 431 bp, Glycine max
agcttgagatgtggaagtgttgaagggtgaaatcttctgcttttattgttgaccacagagtggtacctggagatatgtcacgggggtcaggagaccttggggacgtcagatggggtgctattgcccaaaaccaagcttgaccaatcccgacccaacccgggcatagtcggtcagtgagaacctgtgatgtacctaagcaggcgagctcctggcagtcaacagataaaaggaaaacaagaccacaaagcaaggaggcttgtggtggctggccagctgtgaaacttgattgatatgtgagatatggtctctggtaatcgattaccaagggtgggtaatcgatacaaggcttataaatgaagacagggggctaagatggtctctggtaatcgattaccaggggatgtaatcgataccacgcttgaaacggagtc

SEQ ID NO: 159776 - DNA, 443 bp, Glycine max
  unsure (1)..(443): unsure at all n locations
ttggtataccatgctacagctgctccggccaagctgtcttgaaagaaatggaccacacaattttcgtccgcagaatacgcccccatcttccggcaatacatccggagatgctcctttggacatgtcttccctttgtacttatcaaagtctggtactttgaacttgggagggatgacgatgttgggcacaagacataaatctgccaaatctgagaaagggtaattgccgaggccctcgactgccctcaacctctcttcaagcgcctcaatctttcccctatcttccgtgaagggaacagattcttttacaggcgtgggtgaggctgggatatggcggactatgttcggctggggtagttcatgcggggatggatctttgaggtggagcacgnggccaagatgggtatctccttccccatcgtcttgcccgggatagtcttcata

SEQ ID NO: 159777 - DNA, 357 bp, Glycine max
  unsure (1)..(357): unsure at all n locations
gatagaggcacagaagctgtacaggataaattagtttaagccaaatagctnttgacttaagctgagataagacagaaatgtagaattgcaaagctgcaaaatctacttatatgataataacagcttagatttttttggaatatataaatagatttcatgtcgctttgtgggcgttacattctaagcaggtaaaaacaattcctttgtccatgtttgtgctcttcaataacctttctttcattttcctccttccattatgctcctggatgctacccatggagatgggtagctaaaagatatatccggaccttatactctcatgtatttcttctggaatattgtgatatattatcattt

SEQ ID NO: 159778 - DNA, 487 bp, Glycine max
  unsure (1)..(487): unsure at all n locations
gtcacacgagcggngaggttgttaactacatgtctattgatgttcagagggtaggggactactcttggtatcttcatgacatgtggatgcttcctctgcagattgttcttgcccttgcgattntgtataagaatgttggaatagcttctattgcaacactgattgctacaataatttccatcgcggtcactgttcctattcgcaggatccaagacaattatcaagacaaattaatggctgctaaggatgaaaggatgagaaaaacatctgagtgcctgaggaatatgaggattctcacacttcaagcttgggaggatagatatagagtgaaattggaggaaatgcgaggagtagagttcaagtggcttcggaaagctctctattctcaggctttcataactctcatattctggagctccactatatttgtgtcagcagtcacttttggtacttccatattcgtgggtggtcagctgactgctggtgg

SEQ ID NO: 159779 - DNA, 317 bp, Glycine max
agctagtttattataccaccaagaagagggtcttctttccatgttccctgtcactgaaagaggatttatggggcatgcatgctatttttaaacaacaaatctctatcatgctgcttttgtatgcgtgaagtaaatctttgtgtgctgtgactctgatatcttgtgtgaaattcatcttagcgatgcctgaccattgatatacatctaatgaatatgactaagcataattataagggcttatatactcaaatgctgaagtgtgcttatcatttccaatcatcaatttccgctaatgtgtctaataggctgaggcaaca

SEQ ID NO: 159780 - DNA, 501 bp, Glycine max
  unsure (1)..(501): unsure at all n locations
gcttctacacttggagtgataacatgcagtcctcttgaaacccttattgttcactctatcttcatgccgagactcgggaagcccaacaggtctagccttttcaatgtactctgaacaaaatttaatggcttcttctgcaatgtacctttcaacagtagatgctctgggacgatgtagatttttcgtatacgcttctaagatcttcatgtatcgctcaaccgggtacattcaccacaaataaataggaccacaacatttgatttcttttttgaccagatgaacaattaagtgaaccatgatgtcaaaccaagcaggaggaaaatacatctccaactgacataatataattgcagcctcgttttccaggtcatcaaacttgacaggatcaacgaacatgctacatatggcattgaagaanaagcacacgcgagttatgactaacctgatcttgttaggcaaaatgtctcgaatggccacgactaacaacttgtgcatcaagat

SEQ ID NO: 159781 - DNA, 455 bp, Glycine max
  unsure (1)..(455): unsure at all n locations
atccttaagcaccgcagctgcagcttagacagcttgttgcaatcgggtacgtataattttataatntttgcctctgaagaaacttttctaacttataaacttttcttcacacaaaccatgatgttgtatgatgcaatacaaatatcaaatgtactaagatgcaacagccaagataacaaccaatacaaatgcaactcaagggagttgggcatgtaaaagccaaaacttcttcaagcttttccttgagcttcaagcagcatttagggtgttcatcatgttgctcccttatctctaacaaatgaagcgttgggcttgtcatttggtcttcaaaatgggaataaaggagtgagtacttcatcccttttggaaccacagtaacggacattaagtcccacacctaacgtaacaaccgccacgtgtggttgattaacaaacatgactcacaacatcctatg

SEQ ID NO: 159782 - DNA, 501 bp, Glycine max
  unsure (1)..(501): unsure at all n locations
actcagctttatctggagggtgtgactcttcacttttgaagttgaatttttatgttcaaaggtactggtaatcgattaccaaaacattgtaatcgattacaactctntgaaattaattggaacgttgtaaattcaatttgaaaactttttcaaaacaatattgctattggtaatcgattacaacaatctggtaatcaatttacgtgagagtaaaaactctttggtaaacatgttttgagaaaaatcatgtgctactcaatgtttgagaaaacttttcatacttatcttgactaagccttctcttgattcttgaatcttgagtcttgaatcttgatcttaattcttgagatcttgaaccttgaatcttgattcttgactcttaactctcctcttgagtcttgaattgttcttgattcacttgagttgttctttgatcgatctttaagcttcttgtcatcacctctgtcatcatcttttgttatcatcaaaacacctttgaat

SEQ ID NO: 159783 - DNA, 321 bp, Glycine max
  unsure (1)..(321): unsure at all n locations
aatctgctggagggcccaaacgggcctggttgctatctgcacccccatcttactaaattgcccccctctctatttttttgaattctttttccgtaacgatatggaaacttacgaatttcgtaacgatacttattttccttccgtaacgtacgaatccttacggattatgtatttactcttttttacctctctaagaaagtacggaaactcacggatagcgcanaaacacctcttttcgactcccgacacattactgaatgtcatggatcgcgcaagcctgcatccttttgatttctgagacgtcttcggacttcatttatt

SEQ ID NO: 159784 - DNA, 453 bp, Glycine max
cggattgtttttagccttaatttcgctctagttattattcaattcaattaagaatgagaaatcccaaagagaaaacgtccgattgatttttcgctttactttactcaaaggtattttttttattattatattattattttacctctttttttatttccaacgtgcttacggcacgaccgaacggtcggaattcattttaaccacaattaacggatgatacaatttaaatgatcggtggaaatttattttatttttagattacgcgagagatgacttaaataaatggcttaagcacatcacaagggggtataaaaagcaaatgataacgagaataaaaatacatgtgtcgcaacctacccttctgcgggagggcgacgcgagactcgcgggatgcgtgttccacgacaggaatacgcgcggagtcgccaccaacatttatttgaggaaaacgtc

SEQ ID NO: 159785 - DNA, 478 bp, Glycine max
  unsure (1)..(478): unsure at all n locations
agcttcaccaccaagatgagccttgtataagtagcttggagatgatgcttcaatggaggaaaagaaagagagaaggggggagcacgaaattgaaggaataaaagagggagagaaggggaactttgaagtgtgtctcataagactttcattcatcaaagttacaacaagtgttgcacatgtttctatttatagactaggtagcttccttgagaagctttcttgagaaaacttccttgagaatctttgagaaaacttccttgaaaagctagagcttagctacacacacccctctcataactaagctcacctccttgagaagcttccttaagaagattcctaaagaagctagagcttagctacacacacctccctaatagctaagctcaccttcttgagatgagaagctagagcttagctacacacncnctataatagctaagctcaccctccattccaaaatacattaaaatacacaaaa

SEQ ID NO: 159786 - DNA, 456 bp, Glycine max
ttagcatggcctccgtgatagaagccatttgatcttttaaagtcgatatgtcggccttcatctgttcttccactccctcttcattatccatttttctggatcgagtgttatagggtgcctctgcgctttcttagttattgtgagttccctaaagaaacaaacaatggtgagtatgccaccaaaacatgaatatgctaatgaatgatcggagcacttggatccacctcaagatttttagataacgcgatgagtttcagaacttcttgttttataaaaaggaacaaagcttttatctagccaagatcatacaaaagtgttacaacagaacctaacggcttctaattatatgggccatcaaatctatcatgtgttgacagtagttgattagcccataaatttcctcaggggctgtacacacttcagcgatggcctttgctttggctaatagtcgcggga

SEQ ID NO: 159787 - DNA, 466 bp, Glycine max
agcttatcaaataggataaggcatatatatatatttttagcttagttatgtctttttccacttcagtcaaccgattgttgtttactacttacacctccttccttccaaagccaccattctcccttcttccattgtttgttactcttttctcactacacaattctctctttcccaatatagtcgcaccctttgtagtcaagctatgaggctttgtttccatgtttatccttcatggggtgacggcatttctctgtcttttgcatcatgggtttctccttcaaaaagggttcttttcagatgatgagtcggcgagtactgtggtatctattttgggttttggctttatttttaactggataacgtggcttctcttgtgagaaaaataacgccttcttctgtcttaaccgtgtgtggaactaagatagctaagcagcttgatactccctgttgcgtgataatgctcttc

SEQ ID NO: 159788 - DNA, 422 bp, Glycine max
  unsure (1)..(422): unsure at all n locations
tgatttgtgagttgattntagccttagattcactctggttatttttaattcattccaggaaacttccaaagaaaaatgtccgattgatttttttgattattttattcaaagatattctgactattttattattatttttcaagatactttgactattttattattattttgctcttttttggattaaccgtggttacaacgtgaacgatcggttagattctatattaacagtgattaaacgagattacaacacaaatgatcagttgatactcattttatcttttattacgtgagaaaacgacttaaataagcggtgaaaatcttgttaaagtacaagaacagaacaatgaaagtcagcgaaattaaagtgaaagtacaccaaacaagtgggactactgatggtgcatagaatgaattgaaag

SEQ ID NO: 159789 - DNA, 396 bp, Glycine max
  unsure (1)..(396): unsure at all n locations
agcttggggaccacatgggtcatgacattggtttttatgatngngtctttttctttcttcaaggttgtgtatacaataaaatcgttaacgagttgtggcatatgccaaaagtggtcaatagcttttgcaggggacattgtgctcaagcccaacaattagtaccatttccaccaaatgatctgtgcagttttacatgagaaaagtacatgagagacatcctcatacattagattacaaaaagcacatgctataccaccttgaagagtgacttgcctttcgtgtaggcttacctttgtaagtaacctactcttcaaaactctccaaatcatgagagtaatcttttgtaggattataatttccataagcttttaaacacatcgacttaataagtcctta

SEQ ID NO: 159790 - DNA, 442 bp, Glycine max
  unsure (1)..(442): unsure at all n locations
aaaactcacttgtcttgataaatgaaattctgaactctcatttttctattttccttgnggnggatccaagtgctccgatcattcatttgcatattcatgttttggtggcatactcaccgctgtatgttcctttacggagttcgccataactaaaaaagcacaaaggcacccctataacactcgatccacataaatggataatgaagaaggcgtgcaagaatatatgaaggccgatctatcggccttaaaagatcaaatggcttctatcactgaggccatgctaaaactccagaaaactctagaggataatgccacggcaaccgcctccaatgcagttagggaagcagaaccagtgcttcagcccacgataaacttatgccgggtcagaaacccgacggtgttcgatcggatgtacagtccgcaagcttatccttatggcttg

SEQ ID NO: 159791 - DNA, 448 bp, Glycine max
  unsure (1)..(448): unsure at all n locations
agcttagaggaagagatagattctatggcctgctcgtgttcaccacgtagctccacaaggtggccggcggccatgaatttcatcgtgagggtggtgtaatccgtcaacaccggccccagcgttttcaaccattgtactcccaagactaaatcagcaccatagataggtaaaacatggaaatcaatgacgaagggatgtcactgaatagttacctcgatgttagggcacgtttgctggcactgaagttcctcgccgttgccaaccatgaccctcaacggtgaagtcacagtcgtcgtgaggcctaccgacataaccaccccgtggtgcacaaaattatgcgtgctaccatcatctatcaatatgctcactgngtggccacgaatatacccttgcatacgtaatgtttccagtaccacgtgtccggataatgcactaaatgctaattggc

SEQ ID NO: 159792 - DNA, 443 bp, Glycine max
tactaaggcacctgttctagctcttcctgactcttctaatatctttgagctagaatgtgatgcctctggagtgcgagttggagctgtattgttacaaggtgggcaccctattgcttattttagtgaaaaacttcatagtgccaccctcaactaccccacctatgataaagagctttatgccttaataagagccctccaaacttaagaacattaccttgtttccaaggaatttttcattcatagtgatcatcaatcacttaagtacattatagggcaaagcaagttaaacaaaaggcatgcaaaatgggtagagtatctatagcaatttccatatgttatcaaatacaaaaagggaaaaaaaatgtggtagctgatgccgtctctatgagaccatgggagggttaagaaccaaatagagaagttgcatgagacggttaagaacc

SEQ ID NO: 159793 - DNA, 442 bp, Glycine max
  unsure (1)..(442): unsure at all n locations
agcttctgagagtgacatattgtgtgtcttttttttgnngtagaatactttgggcttacaagcttctgagggtgccctattgtgtgctgttntttattttagacaaattcccttagcaatcccccaaattaaggacttattataacttgaaacccttatgctttcttagaaccctaaaacaaggtcaaggatatcaaaattaagctcaggggttcattcaaacaaatcattattacttttggctcaacaggggtgcaagggataaattcatcacaggttagctttttggctgagtggctaaaataaaaagaaacatggccttgatcatatccaccttatgtaaataatctaacagtctaagaatgatgcagaattaataagttaaaaacagacgctttctcataattaagtttacacagctcaccgggacaagataaagtta

SEQ ID NO: 159794 - DNA, 456 bp, Glycine max
  unsure (1)..(456): unsure at all n locations
nggtgggagtgaccgacactccattgaattgtttaggcctgtgaccaaagcangaaacccgagtgccctggtggactatttcgggtccattgggtgtctatgaagcgtgatccctgcaaatagatatatagcgtctgagaccaactgggccacatggatacttacctgagttaggatggtgtagactagctggcactttggccggcggaggtcgaaattatggacgctggggaggatgttgctgagtagcaacatcatccaaatctgtgcgagggtggtcatgctattgcacatgatccgcacccatctccccaccgagctgtgggcaaagtccttctcctggtacacacatgagctggctgatggccttcttgtcaaactccgaagcctggctcttcgttggtaaactcgaaacactggcctcctcaagacaatgatgcctagaactattaatgc

SEQ ID NO: 159795 - DNA, 397 bp, Glycine max
agctcgcatacgacaatggagcttatctaatgtagttatcaatgctaagaaaattcaggatttaaagagggagttgaatgcttcggaggcaggtatttctgatagaactttgactcaacctgaagtggagctcaagaaatctcttcaagagcagctatggcatgcagctaatgcctatgaatcgatgttgaggcaaaaggctacagtgaaatggttaaaggaaggggacagaaattctgcttacttccataaactgattaatcacagaagaaggcacaatgctatccaaggagtgatcattgatggggtgtgggtccaggaccctattagtgttaaaaatgaggctattaatcattttaaagacagattctctgacaaaatcttaatagaccaaccc

SEQ ID NO: 159796 - DNA, 483 bp, Glycine max
  unsure (1)..(483): unsure at all n locations
tcatggtgaatcacaggtgattcaaaggtgtttttatgatattattatatgatgacaaaggtgatgaccaagagctcaaagatcaatccatgaacaactcaagtgaatcaagaacaattccagagttcaagataagaatcaagaagaattcaagactcacgaagaaagtttagagtcaagaatcaagattcaaggttcaagatctctagaatcaagatcaagattcaagactcaagattcaagaatcaagagaaggcttaatcaagatgagtatgaaaagtttttctcacaaattaagtagcacatgatttttctcaaaacatgtttaccaaagagtgtttactctctggtaatcgattaccagattgttgtaattgattaccagtagcagaattgttntgaacaagttttcaaatcgaatttaccacatctcaattaatttcacaaagttgttatcgactaccatgttttggtaatcgacta

SEQ ID NO: 159797 - DNA, 464 bp, Glycine max
  unsure (1)..(464): unsure at all n locations
agcttgttgtgcaccatcgcccgaccaccacttagtactacatgtgatgggtaccccataatcctacaagcttgagatgaggaagtgttgaagggtgaaacttcctgcttttattgttgaccacagagtggtacctggagatatgtcgcgggggtcaggagaccttggggacgtcaggtggggtgctattgcccaaaaccaagcttgaccaatcccgacccaacccgggcatagncngncagtgagaacctgtgatgtacctaagcaggcgagctcctggcagtcaacagataaaaggaacaaagaccacaaagncaggaggcttgtggtggctggccagctgtgaactttgattgatatgtgggttatggcctctggtaatcgattaccaaggctgggtaatcgattacaaggcttaataatgaagacaggaggctcaaatggtctctgggtatcgataccac

SEQ ID NO: 159798 - DNA, 449 bp, Glycine max
  unsure (1)..(449): unsure at all n locations
cccctcagccaaatggaatccatcttgtgcctttttcccacaactctagtaaattggagagaaatgttcatctaaagcatacaagtccctaatattatcaaatcctacaattagagctcctagggagcaaaacaatgtgtgtctcctagagtgggcatcagctaccacatttgcttttccctttttgtattttataacatatggaaattgctctaggtactctaccattttgcatgccttttgtttaacttagcttgccctctaatgtacttaagtgattgatgatcactatgaatgacaaattccttggaaacaaggtaatgttcccaagtttggagggctcttattaaggcatgaagctttntatcataggtggcgtagttgagggtggcactatgaagtttttcactataataagcaatagggtgcccaccttgtaacaatacagc

SEQ ID NO: 159799 - DNA, 407 bp, Glycine max
  unsure (1)..(407): unsure at all n locations
acctcaagtcacctgcggcatgcaagcttcnccatttccttaagactgtatagtgtttctttattctgttgnagaacaaccancggcaaacaggagaaaggttctgttcttgaattgcctgaagttggatcaacaatctcttgagtccattgcgtngaatgcacaaatcaatgtgatgaaatttgcaaaccagcacctctctacagtgatatacgatgatgttgaaaatttccacgatcatgattaaaaacttcattcttatcaaaatcttttcgttgtatccacgaattagtgctccagagtaattggagtatatgaccacacagaattatataattattgatatctcttctgctccaccttcttctctggcaagcttattctctgttcatccttggtcgtatggc

SEQ ID NO: 159800 - DNA, 406 bp, Glycine max
aaaattgagatttactagaactaataactaaagaacagtgaactcatatgcttacgaagggaacaacaatagcatgcccatgtcagctaggttacaaatgcaaaatatatattcaccaacaaaatacacaatatatatttcttacccaggcaacaagacaacaacaccatgattcaagtgcgagccaggttacaaataagcattggatattaaagaatccatgctagtgtgtcagtcatttataaagcacagttgttgattacatgacaactgcaatgcgaattggagactacaataatcaacatgagttccaacccatcaaaatgaatcaactcagttaaatcagttgcaactgtgacaggattaacaaagttacaaaactactacaataagatgatgaaaacat

SEQ ID NO: 159801 - DNA, 450 bp, Glycine max
agcttcacatttctctccgaaaggatattccggccaataatattgtcatcgatataaaatttctctttgcataattggctagcgagatatgcactcacttatcccagagacactttattttaaagaatggcttagcgagcagcggtggcttagccatatgcatgccgcaatgaatagcgcttagcccaaggggcagcgcttagccgcgagcaacacttccaaaatttgactaatttatgtgggcttagggactagactcgcttagcccaattactgccgcaacgaatagcgcttaccttcgataggcacgacttagcgcgagacagtcaacaaaaaaatatctgtctaaggtacctaggcttagcgagacaaccctcgcttagccacaggtttgtcattaatgacgtggatagtggcttaacgcacatggtgatagttagccgcgatgtt

SEQ ID NO: 159802 - DNA, 468 bp, Glycine max
  unsure (1)..(468): unsure at all n locations
actcagcttctaaggatgttntctcaagaaagcttctcaggaagctacttattctatatatagaagcatgtgtaacacttgttgtaactntgatgaatgagagtcttgtgagacacaactcanagttcaacttctctccctttttcttccttcaattttgtgctcccccctctctctttctctccctctttcttttcctccattgaagcatccttccaagcttcttatccaaggctcatcttggtggtgaagctcttttttccatggcttattccttaatggatggcacctcctctcacctcttctcctttgtctttcgctgcatctccatggtggaaaatcaccattaaaggatcccattgaagctcacagatccagcctccatagaaaccccacaagcaagattccatcaataggggtaagcttgcggactataccttcgaccaaacactgccgtgtttctgtcac

SEQ ID NO: 159803 - DNA, 383 bp, Glycine max
  unsure (1)..(383): unsure at all n locations
agctataaaccttcantatagatgtggctgttttaatgtggcactcattaattccactacagntattttaatctctagtgcaatgcacgcctggcgcgcacatatccctattattattttcttgacagggaagtatcaaattaatctgggaaaattaaaaaattgtgcacgagtagaacatgggagttttttattgcccatgacattaactatttttttagtttctttattagaattagcatgggtcatttaaatttcaaaaagaaaaataattcttgaacatccttgtaccaggtaggtgtagacactttaagtgagataaaaaaaaaacaagaaataaataatttatttgattgataataaaggatgatatgaaaaaagag

SEQ ID NO: 159804 - DNA, 466 bp, Glycine max
  unsure (1)..(466): unsure at all n locations
tctaactctctaagttgtaattgcagttcagatatgatgatcactttttattgcctatnnggaatgactaatgaatggtaggcgccatgttctctctgggggcggtggggagtgttcaaacggcgccacttataaagaaggggctaatgggctatatatgcatcagtgcctgcatctgctggatccaaattttagcatatccattttgctggcactntctttctcgtaccctttatttttcttacaatgccaatttccgaatccaaaataactagccctcttctgctctttgcacataataataatgatatagtattattaatagtaaaccaaaataagaagacctaccttgggttcaaaacggacgttatcaccaacagcttacttttacctaccttcatatgaataaagaaatgacgatggttttaactaaatctatgagaagtgtgtttggtacacttaccac

SEQ ID NO: 159805 - DNA, 471 bp, Glycine max
  unsure (1)..(471): unsure at all n locations
gtgatctctaagtcacctgcggcatgcaagctaggcangtttttgacaagctntanaagcaatacttttatattataannataaagnccaggtatatctagagtaatcatctacagtaaccaaagcatagtaattccctccaatgctcatgggtctaaaaggaccanaaagaactaaatgtaaaagtttgagcactctagaggtagaaacaacatttttagatctgaaagatgctttagttcgatttccctttggacatgccttacataatccatccttctcagatttgagctttaggagtgctctaactaactccttagagactagctctattagatgagttatgtggatatgagctattctcctatgccgaagccaagagagatattattacttattaacaagatatgttgagtgagatacacttctacattaagcatattgtgttgcatacgactccaacacactaat

SEQ ID NO: 159806 - DNA, 474 bp, Glycine max
  unsure (1)..(474): unsure at all n locations
tgtcttcatggngaatagagtgaaaactccagtggaagcagtctatacttatcgtctaaaacttgacattagacatcatttagatttactgggaactttctatgttcctagtttatctaggaatttagtttcattatctaaacttgatgttactagatactcttttaattntggtaatggatgtttctgtttatttaagcataatcatctcattggtactggtgttctttgtgatggcttatataaattgaaatcagatggtttgtatgctgaaacctctttaactctgcatcataatcttggcactaaatgtagtttagtgaatgaacgatctactttcttgtggcataaacgtttatgtcacatttcaagagaaaggatggaaagattaataaagaatgaaattctcactgatctagatttacaaatctaaatatttgtgtagattgattaagggaaaacaaacanacatac

SEQ ID NO: 159807 - DNA, 458 bp, Glycine max
  unsure (1)..(458): unsure at all n locations
agcttgaagaagatgctntaatggatgatattatatagagaagggggggagcacgaaattgaaggaataaaagagggaaagaagtggaactttgaagtgtatctcataagactttcattcatcaaagttacaacaagtgttacacatgcttctatttataaactaggtagcttccttgagaagctttcttaagacaacttccttgagaagctctcttaagaaaacttccttgagaagtttctttgagaaaacttccttgagaagctagagtttagctacacacacccatctaaaaactaagctcacctccttgagaagctttcttgagaagctagagcttagctacacacacccatctaaaaactaagctcacctccttgagaagctttcttgagaagctagagcttagctacacacccctataatagctaagctcaccgccatgacaagataacatg

SEQ ID NO: 159808 - DNA, 486 bp, Glycine max
  unsure (1)..(486): unsure at all n locations
tatctctgaacaaatggaatatatccttcttagctctcttgtatctactcacatgctccatttggagtgttgtagtattatcctataggccctaaacaagacagataagtcatgtaagcacaaaaatcagaaaataagctataattatcaattaaggtcaatcatttgcctaagaccaaaactaagttaaagagaaaaaataagagtcaaagagattctaattgagctaagaagaatagaaaaatactaaactaaaaattctcaatcaatcggacgcaatttccactaaatattgaagaagaggcacttacatgtccttcgaccacccacctctattctcaagctacttctacttccactgagctagatccacctacagggattgaagctcttcctccaccagagtggaagctacttcacnctaaggtatccaagccttcaactatcatggcttagcgcaaaaatgtctataagaattcttcaatg

SEQ ID NO: 159809 - DNA, 350 bp, Glycine max
agcttagctacacacacccctcttataccttatctatctccttgagaaggctccttaagaagattcctaaagaagctagagcttaactacacatacctctctaatagctaagctcacctgcttgagatgagaagctagaacttagctacacaccccctataatagctaagctcacccccatgacagaaaacatgacaatacaaaaaaaaagtccttactacaaagactactcaaaatgccccgaaatacaaggctaaaaccctatactactagaatggccaaaatacaaggcccaaatgaaggaaaaacctatttaatatttacaaagataagtaggctcatacttagcc

SEQ ID NO: 159810 - DNA, 469 bp, Glycine max
tcatgatgatgaatcagaactgattcaactagttctgatgattatatagatgatgacaataagcccaagagaatgatttcaagaacaagattcaagaatcaaaagaagtttgatttcaagattcgagagaagatgaattcaagattcaagataagaaatcaagaagacttcacaagggaagtattgaaaagagttttcaaaaacaaagatagcatagctttgtttttcaaaaaagttttttctcaaaattttctaagttaccagagtttttactctctggtaatcgattaccagtttcctgtaatcgattaccagtggcaaagtttgatttcaaaagcttttaactggaattgcaacgttccaaatgatttcaaaatggtgtaatcgattacaagatattggtaatcgaataccagtgtatctgaacgttgaaattcaaaatcaattgtgaagagtcagatcctttcat

SEQ ID NO: 159811 - DNA, 436 bp, Glycine max
  unsure (1)..(436): unsure at all n locations
agctagtagtagattgattnatttacatatatggnccgcgngatttgttgtcaactcttatatctctttatgcgttccattccactttgaatcttattattcagccctcatgtaatttattaagtgcactaataataaacggacttgcatacggaaggggactttccaacttagattctatagttgcattctttatcatcacttcatcaccacttataagcacacataattataacttgtatgcatatcaacagatcatcaccaatttgtatctatatccctatgcaagcttctgttttcttttgaagattcaggtcactatcattcaatctgttaaatggaagcattccacatgccttatcgttgttaactcaatcgtcagactgtgtgagttatagcattgcctcatctcatactaagcggtatattttccata

SEQ ID NO: 159812 - DNA, 496 bp, Glycine max
actcagcttgaatgaggctgaaaactgctgctatgtcaacattattcttggagattaatctatctcagcctcatttgtcacaagatagtgacatggaggtccctgcaactattgttccaccaatagcaaggaataagctatccataacaagagccaaaaaaaggaaggttgctgatcaagatgatgcagaaaactgaagaaccattttttgttgcattttgaaggttgctgaagacccattttttgttgcgcattttgaaggttgctgagtttgaaggttgctgatgaagaaaactgaagaagcattttttgttgcattttgatattacgatgtgtagttgtatattttgaaagcttcactggcatgtgaaatgatgtcaaatattacgatgtgtagttgtatagtttgaaggcctactgaacaattgcttctaactaccatgctttgcgatgtcaaatattatgtgaaattgatctaaagccatgtctcttctct

SEQ ID NO: 159813 - DNA, 449 bp, Glycine max
  unsure (1)..(449): unsure at all n locations
agcttnggctgcgcacgagctccgatttcggatgatttatagaagatgacgcattgtaatcgattacaggtattggtaatcgattacaggcccaataagccttctggtaatcgattacaggatgttggaatcaattacaggctgcctgttcaagtgtaatcgattacattgtagtggaatcgattaccagagcctatcctacgctagtttctaagagaatatctatatttatgctcaaatacatcttatatgactaattttcactactaatacactaaattcaatcattcaattactatatacacaataaattatatattctatcatataaacaagaattctaactagatcaaacataataatcttctatcaaaaggtataaagtaaatcaatcaattcactaacttatcaattcaccaatcaaatcctattttcctaaatcctttaca

SEQ ID NO: 159814 - DNA, 476 bp, Glycine max
  unsure (1)..(476): unsure at all n locations
tacttgtggggcttctatggaggttggatctttgagcttattctatgtcctttaatggggactntccaccgcggagatgcagcggaagacaaaggagaagaggtgagaggaggcgccatccactatggaataagccatggaagaaggaacttcaccaccaagataagccttggataagaagcttggaaggatgcttcaatgggggaaaagacagagggagagaaagagagagggggggagcaccaaattgaaggaataaaagagggagagaagctgaactttgagttgtgtctcacaagactctcattcatcaaagttacaacaagtgttacacatgcttctatttatagactaggtagcttccttgagaagtttcttgagaaaacttncttgagaagcttctntgagaacactctcttgagaagctagatcttatctacacacanccctctcataactaagctcacctccttgag

SEQ ID NO: 159815 - DNA, 448 bp, Glycine max
  unsure (1)..(448): unsure at all n locations
agctnnggacgatattaattacacatttaattatgcttttggttattattactaaacaagtttgattttaataaacatgctcttgagaaaaaaaaatgcaaacataaatcaagttatataaattgaatctttaacaaatttaagtttcaaagatactattattttttatccaaacagccacgaaaatgttacatcctttctcttttcctgtctgagaagctaatccaattattttctttgtttccctgaagacgcaaagaggggataatatgcaataccttggtgcatctggctcctcttcctttattgagggttattcgtatagtctcctccgccacagttatcctctctccagaattcgcagattgagtttgcttaaacctcactgttctcagagacagccgagccgaaaaagcctgagaacttcatgggcttcagtgtcacttac

SEQ ID NO: 159816 - DNA, 487 bp, Glycine max
  unsure (1)..(487): unsure at all n locations
tgtagttgctggaaatccttctggaagaatagtggagagctctgatgggtggaacacagcttctgttgtgggaacattctcagggcctaagcatcgcttggccacagcagcaactgtgaaggacgggaaggtgtatctgaaccatatggttggaattggatacccaaaaaagaagcatgcaattgttgaggcagttttttaacgcatactttctagaaatctaaacattgnggaactgggaatgtggggatcatacatttacaggacgtttagttgaaatttggtgtacctttgcttatttatgtttggttttgttgcattacttggcctcagacctcaatgcttttcccttgaatctcaacctaacataagatgctcgatcgagtaagttaattacccttttgtcttggaaaaattataggtaattccgaatatgaagtatctagagtttcgagattaatctctatttgaatacatttaagttttc

SEQ ID NO: 159817 - DNA, 423 bp, Glycine max
  unsure (1)..(423): unsure at all n locations
agctgtctgcctctcatcaataagaccagatatcactcgtctcaatctatttgctaataacttagctatcaccttgtacatacatccaatcaacgagattggtttgtagtcatcaaatgactggggatgtttggttttgggaattagagctatgaaagaagcattactgcctctggggaagctgccatgcacatggaattcatctacaaattttctgaagtcagttttcatcatttcccaaaattctttaatgaattctaagttgaagccatcaggtccaggacatttgtcctcatcacaactccacactgcttctttgatctccacatctgagaaaggaacaggcacaaactccctctgttcctggtttattgaanagaattgcactccatcaagagtgggtctacaaaactactgctcagt

SEQ ID NO: 159818 - DNA, 403 bp, Glycine max
  unsure (1)..(403): unsure at all n locations
agcttntattgatagccactcatgacttatttttctcacgctacccctcctttgagagatattgttgcaatggcattgtgacatggcatacctacatcaaagtggtataatcagcacacatgtaggttatgaatgaaaaacaaagactatgataaacacaacctgttaggtgacgtacttcacaagagcatgtccattcagcttaatggaccctaaccttatttccctacatgtggaccttatatcttaggcccatgtgtttaccacaccaaaagggagtcccttgattgacaaatgaaattgttttttagtctctatactacctggacatatcgttcagactttccaaaagataacctgctgcgagcaggtctcagaattactttaattctcacacatgtat

SEQ ID NO: 159819 - DNA, 371 bp, Glycine max
  unsure (1)..(371): unsure at all n locations
agctagcctnanagaggtccaggaaggacaatgtggcccaaggaactagttccgctcctgagtatgacagtcaccgctttaggagcgctgtacaccaccagcgctttgaggccatcaagggatggtcatttctccgggagcgacgcgtccagctcagggatgaccagtacactgatttccacgaggagataagtcgccagctgtgggcatcactggttacccccatggccaagttcgatccagaagtagtccttgagttttatgccaatgcttggccaacagaggagggcgtgcgtgacatgaagtcctgagcgaggggtcagtggatcccgtttgatgcanatgctatcgcgcacctccttgggatatcg

SEQ ID NO: 159820 - DNA, 491 bp, Glycine max
  unsure (1)..(491): unsure at all n locations
tgtagaatggctagacacgatacatgtcagggcttggtttggttcaaggataatatggatgccccacattatttccatgacacaaatgcaaaaatgatgatttggagaatttatgcaaaactggtcatgcatgcacctatgtggacgctcaagtgtcaaatttttatggtcatgtgatgctagggctcaagattcatttcctctattttaaatcaacccaatgtttccaaaatatgttcttttatcaatttgtgcattcctccaagtccctttcaggcgtctggggaaattttcacagcattcacccttcaggtgtagacacatttttctcttaaaaatcggntatgatcaatgaattttttttcaaagaaaagttggaaatcatctctcttcaaaagcatgtcgagttttagctagacaacttatnttctctcgtccaccttcttcttacttgcttctttcttcttatatgtctcttttcttactcgtct

SEQ ID NO: 159821 - DNA, 462 bp, Glycine max
  unsure (1)..(462): unsure at all n locations
agctntgaagtctcaatatacagntcttggtgttgtgttgatcgtaagaaacaaactcatatgagatttgttgttgctcttctctgaatgttgtggctttacttacgcctgcaaaataaaccaaggatgtttcacctcttcagcaggacaaatgacaagtaatagctgagattgaactaatatacctgaaaaacccaatgagtgtcgctcaattaagcccaaaattactgctgctgttaaacccaatgagaaattcattattgctgctattaaacccaatgagtggcagtcaattaagcttcatgttttgtttcccacgaactctatagctacaagatacactttattgggttctaaaggtcacacatcgaggaagaggttgtttgctacccatagcctcttgctgactcggtaatgtaatcttgcgatctgaggacacctatcgaaacgactgagaaaata

SEQ ID NO: 159822 - DNA, 419 bp, Glycine max
  unsure (1)..(419): unsure at all n locations
ctgttcaatcgcttcagattgttgcacagaagggcttatattgtgtggtggttggcacaagagcataaaccacagagtctggcgacaggtgcagatttctgattcatggcacgctgagttactacgttgaccaaggcatcaaattttcctttaagctttctatttttagtagatgaagatgaatctgtggccacctaatggactcctctaacaaaaatagcatcatttcttgcactgaattgttgggagttggaagccatcttctcaatcaaattcctagtctcagcaggagtcatatcaccaaaggctccaccactggcagcatcaatcatactcctctccatgttgctaagtccctcatagaaatactgcagaaggagctgctgaganatctggtggtaatgacagcttgcacacaa

SEQ ID NO: 159823 - DNA, 482 bp, Glycine max
  unsure (1)..(482): unsure at all n locations
agctataagagcaattcctttctttttcttatcattctcctcatggngattcaatctcatcaattccatttcatgttcctataactttccaaacaaagtatcaagagacatgttagaaagatctcttgattcagtaatgggtgttaccttatgttgccattccatgcttaagcaactcaaaactctattgataagatcttcatttggaaatatttttcctaaggatgcaagatgattaattatgtgtgtgaatctcttttgcatgtcctgtatggtttcattaggattcattctaaataattcatattcatgagttaaagtaattgtcctagaccttttcacatctgttgttccttcatgggttacctataaagtatcccacatatcttttgcattgttgcaatttgacaccccaaagtattcactcatttctgatgcagatataaatatatttntggctttaaattgtattgactaacttc

SEQ ID NO: 159824 - DNA, 493 bp, Glycine max
  unsure (1)..(493): unsure at all n locations
tctatggaggctggatctttgagcttcaatgaggtccttcaatggtgattttccaccatggagatgcagcggaacataaaggagaagaggttagaggaggtaccatccactatggaataagccatggaaggagaagcttcaccaccaagagagtgccttggataagaaacttatagagaaagcttccatggaagacaagaatgatagagagagggggcgggaggcacgaaattgaaggagaaaaagagggagagaagttgaactttgaagtgtttctcacaagtttctcattcatcaaagttatgacaagtgttacacatgtttctatttatagcctangtcactaactaaatgaaagcttccttgagaaacttccttgagaagctagagcttagttacacacacccttctaatagctaagctcaccttcttgagaagctttcttgagaagctatggcttagctacacacacccctctaatagttaagctcac

SEQ ID NO: 159825 - DNA, 435 bp, Glycine max
  unsure (1)..(435): unsure at all n locations
agcttcctcgcggccattcctgcgaaggcaattatttgtttagttaactccaccagcgggacactactcttaaagcacaaatggcatataacctcctcccataaatacaaacatcaatgtaaatttagagcaagcttatgcgcatatttcattacgaacgttctgttgctcaatacattttattaactaagaataatgctcccatacacaatcaaggcagcttcggtatatagattattcacacgtacttccaaggaggatttgttacttacatcacacacatgtgcttggctagattacatacatgcatactcaaagcagtgtgggtgaccaaaaattgcacatgtgcacatcttgtggattctaatacctatacntacacaaacttcatgatgaatcttggctatcttcacaaaaaggagctacacatcatcc

SEQ ID NO: 159826 - DNA, 481 bp, Glycine max
  unsure (1)..(481): unsure at all n locations
tctccttgacttgcttggagagctcaatgtaacatctctggatttattgcactcttctganagagaggcactgtggaagaatggaatgattacttcttgccagaagatgcccttgtcactcttttagagattgacgaaagggttgcttgctctgctgtgccaaatgtatggaacgccactctccactcccatgcccaaatggtcacatataacctgacaattcataacgaggtgtgtctatcttgataaacgaagaagctttctgaaaagaaagctttaactagcaatgtggataatatactcaaaaacttgaaaatagaaaataaaacactcatgaaaacaacaactagacctaaataccacctaattaaatcacttgaatagaaacacatcaagttggccttcacacactaagggcttgtaatagaacagggaccatgattatcataccttacacaccatcagctcacatatatcgatc

SEQ ID NO: 159827 - DNA, 462 bp, Glycine max
  unsure (1)..(462): unsure at all n locations
ntctatggacctacgtgggagtcctccgtaccaggtcaatgttttcaccttgagggacatanggaagacatgacatataatcgtgtcgtcattggtgtagaggcttgcctgtgtcacgaaagcatccagatgctcgtttgtatttgttgtcccatcgtaccggtcgaggttaagtggtttccaccctacaggtatgtctgcctccataatgcaattgacaaaagcattctgatagatagtccaccctactggacggtgcatgtgggagaaacttaagctatctgcagcgttacttgtgtgtcgggggtgtgattccccttgcgtgtgttcatgcaacgtgtgggcagctttctcgtcgccttgtgaatgattgagacgagcccccacttggtcatggtcaacctttagctttgtcaactcctccttgtggcgtcactccatttctgtgatgcggttctggag

SEQ ID NO: 159828 - DNA, 421 bp, Glycine max
  unsure (1)..(421): unsure at all n locations
agcttcttatccaaggctcatcttggtggtgtatctccttcttccaaggcttattccctagtggatggcgccgcctcttacctcttctcctttgtcttccgctgcatcttcatggtggaaaatcaccattaaaggacctcattgaagctcaaagatccagtctccatagaagctccacaagcaagcttccatcacaactgttcttgggtgatggagatggaggcacgtgatgtcctttcatagtattgacttattatgaccccagaccctgctgcatgaacacgacctccacctccatgatctgatcgtcctatggccgcgttaagtatgtcgtcatgaccatgggggacaaatgaaccctgtgtcatttgttctttcaacgagtcctacgagaagcacaanattcacatcctctaactta

SEQ ID NO: 159829 - DNA, 357 bp, Glycine max
  unsure (1)..(357): unsure at all n locations
tcagacgtgcggcttgcatagctttgtggctgcattacgtataactcctcntgatgatggcgctgtcatgactgtgggggtgccgggtcctgagaaagaccgatcttggtcgagtcttgatattacagacactggtgcggaacttgggcatgtggcaatggtaccctcagtatgggaccctacctcatacgtactatctccatacgtcacagacttactattcattcagtcatgatgatctacctttctcttcttcaccaccttagaactttgccgcagtaactagttgggagcttgaagcgaggcaccatgatcttctatggggaacctgggacggctactatcttgtatatctcc

SEQ ID NO: 159830 - DNA, 416 bp, Glycine max
  unsure (1)..(416): unsure at all n locations
agctnntattaacaatgtgagagtactatatatgattgtgtctaantatgctatagcacctttgtcccagtatctattggatccgcaaaccaaatcacagtctggcaagcttcttgctgctttggctttgggagatctttcccagcatgaaggacatgctanatctagtgcctctgtttctgcatgtcgtgcattgataaacttacttgaagatcagccaactgaagaaatgaaggtggtggctatatgtgcattgcaaaacttggtcatgaacagcaggaccaatagacgagctgttgcagaagctgggggcatactggtgattcaggaattgcttatgtctccaacacagaagttgctgcacaagccgctgtactgatcaaatgttgatgttacccatacattgcaagatatgt

SEQ ID NO: 159831 - DNA, 323 bp, Glycine max
  unsure (1)..(323): unsure at all n locations
agctctaacaaagggtatcggcatgtccaactttcattttttcattcgcttaatcggtcattgttttttcaatttctgatttccatctatgcctgccggtaatgtaatgatttcaatttgtaattggagatacaactatgctgattnttcttttttgttctcttttacataaaaaggcaaaacttacgaatgtgatgattttgaattttctcgattgggaatctctctgcgtggcatttataaattgcattataaggatgttagcattggccctcgggatgagctgactgaacaaagatgtggttcttttagtcgttctattc

SEQ ID NO: 159832 - DNA, 465 bp, Glycine max
tgttagaactatcatcacatgatgctgtatcggcacagaatattttgttttctatgcaactcgagaatttaacagaaacactcggtaagttgccaactaaactgtctattggtcaacctacacattcttctgttttgcaggttacaggttgtaccatctatggcgaggctcatgaaacaagtcaatgtattcccattgaagaaaacactcaagaagttaactatatcggaaatcaatagagacaaggatgtactcatggaggattctcacgcttctagcagggtccttataaccaacaaggactgtggagatcacaccctggcaatcaattcaactagggtggaccttccaatatgccaattcaacaagggcctaacatctttcagaggactactaagctggaggagactttgactcagtttatgcaagtaacaatgcccatacatataagcactgagtcagcac

SEQ ID NO: 159833 - DNA, 444 bp, Glycine max
agcttgccatcctaaaggtacaacacattgagaatgtttataattaacagtagcagcagttaaaaaatattatgcatgcaatctccctcacctactctcatccttgacatgagaacactcagaaacttggaagttctctaacaataactaactggtgcactacccaacaaccaaaagaaactcattagaaatttcacaaattgtttaatagagattgttagacttgtagtttgaaaaaaaaaaaaaacttgatgaagacaatcctactagcctgtataacttgaccatggcaaccaggcacatttatcactagcatacttttccccaaaaaaggagggttaatcagaagaaaaccaaaaacaacatgatgaactaatgataacttatcgagaatacaattctcgaaaaaattaccagagggttcaatatattggacttctcatg

SEQ ID NO: 159834 - DNA, 464 bp, Glycine max
  unsure (1)..(464): unsure at all n locations
tttttaactcattcaatgcanatctctctagtaacacatgtttgttttcaaacataatgtactaaacttttggcaatcctttgcagatgaacacgttactgagagaaaacagaatggaggatgtggttgacaaaagatgcactgatgcagatgcaggaactcttgaagtaattcttgagctggctgcaagatgcaccgatggaaatgcagacgatcgtccttcaatgaaccacgtgttgcagttgctggaacaagaggtcatgtctccttgcccaagcgagtattacgagtctcattcagatcattaatgacaaanatgatcctattctggatgtcattgctagttccactgcaccaagggatatatgatgcgtctcttgttttggttaactgatttgttggtatttcttaccctttctgtgtggctttgtggattattttgtagcacatgtgcgacagaatat

SEQ ID NO: 159835 - DNA, 347 bp, Glycine max
atatgggctacgtgggagtacgtgaactcacatggaagtgggcaacaagggatggtgggtctatgcgcgcattgtggatgtggaaaacttgttgtgcaccatcgtccgaccgccacctagtaccacatgtgatgggtaccccataatcctacaagcttgaaatgaagaagtgttgaagggtgaaacttcctgcttttattgttgaccacagagtggtacctggagatatgtcgcggcggtcaggagaccttgtggacgtcatgtggggtgctatttgtccaaaccaagcttgaccaattctcacccaaccctggcatagtcctgcagtgagaacctgtgatgtacct

SEQ ID NO: 159836 - DNA, 486 bp, Glycine max
  unsure (1)..(486): unsure at all n locations
tgaaccacaaccggtgagagtgtgaacttaaactgtgagtgtactactagctgcgagnaataatctttgcatgaatctctgaattctggaatgaaatgtataaatgagaacatgatgaagggcacgatttgtgtatacacaagccttttgaccaaacaacttaccttgcaaaataattgtatcctttgctccttttataagctgaatgattttttcataaattgaaccctgaatttaaataattatctcctgataccttgcttagattctaggagagcatatggttcaaaacaaaatntaccccaaatttgggggagtaaagttagttagaatgcacagaanaaggtaaagcatcagcacacacaacanataagttgtatgttaaaaaaaaaacaaattgttgtgctaaggtcacaagcatattaagaggaaaagatagtgagagagttacttgtatgacacaagatcatttggataagtctagga

SEQ ID NO: 159837 - DNA, 474 bp, Glycine max
  unsure (1)..(474): unsure at all n locations
agctngccgntnntcttgtcatttcattattttattttacttgnacttctctntttcatgctttaagtatttattttttcaattcatcataaataaaacaatgttgtttcaatgttttttaaatgctaatcgagtgatctatttcttcctaatattaatcaagtcaaactagacccataaatttgagtaacataaagtaaaaatctcatatttaaattttgtgtatatttctatcgagagagttaataacattatattagatatatgctccttattcaagccgaattagtatgcatatctgatacctgtgatccttaaaaataattaaaaaatgcataactgatctgacatactgcctgtatcctgaatcatngtaagtatctacttaacctcacatncaaccaacaaaatcaacattcagaatagatctttgcttgaacacgtacaatattattngaaatgaagctttttcta

SEQ ID NO: 159838 - DNA, 454 bp, Glycine max
  unsure (1)..(454): unsure at all n locations
aaatacaggaaacctcctgttttacactatatatancccggcttactgaattggagttatactttgcgatttctaaaagagaaataaatactttaacttcctctactgatatagtgcaaactgatgctaccaaatcttctaccactaagcatgatggttttgataaagatattttatgtcatggacgcactttaagtgctttggttgataacatatataaaattttttgtcatactaaaacttctgtcgagttatgggaagcacttgaattgaaatatggatttgttgaagaaggtttaagtcaatagtcttgtgaaagaatgattgagtctcaaatgattgatggaaaatctatttcagatcacattcatgaatttgaaacattgcttatgacatgatattgaaggaattgctttgctgacatatgcttggaccttatgattcaaattgctct

SEQ ID NO: 159839 - DNA, 460 bp, Glycine max
  unsure (1)..(460): unsure at all n locations
agcttctcatgtaagatcctgagtaccttctagagttggtgttctctcggcggattctagctntcactgcccattctctcaaattgaactctgactcatctcttcttcttgagctataaggaagtggttcagctgttgaggccatgaatttgagttagaaaataattcaccacagtggaatgttgttgttgttgttgttgtaaatgttggttcaagtcactttcactccaactcaaactagcacagatttgaaagtgggtgctgcatgttcagacatgacaaaaaaagagtgtnctgaagttgaagctatttgtctacgtaaggtatangtacgtggaatgtgcctttggttngatatcaaagactagggcctgcctaagtagttctgtgaggagtggtcgtctcttctaagatttgctctttcacttcttgaatcttcatgtgcaacgacataacctca

SEQ ID NO: 159840 - DNA, 495 bp, Glycine max
actcagcttgagttgctatctttcgtgagtcttatgtaaaattcttaatgtggtttctatactatcaatgataggaaacaacaggatcttgaaacctatggttctcacaaacaattaataaacaacaatagataatgatgtgtacctttctccataggaagacttgtacctttcttcataggaacttttctccagtgcactttgatttccttgaaagaggagagaaataagatttcacttccttaggcctttcttttctgcctctctccattcgtgatggctatgggtgagagagaacactttctggtcaggaaggggaccttatttcacgttagtgggtattaagcccattttataaccactactcccatcaagtagcagttagttctagaaacttctcctattaagcccaattataatttagcccttaatcgtaattattacttatagtctctacataagcacatgtctctacatgagacattattttacatt

SEQ ID NO: 159841 - DNA, 476 bp, Glycine max
  unsure (1)..(476): unsure at all n locations
agcttancanatggacctgngtgttgcccagtttcatttatcttccgtaatactcatcacctctatcatatctaataatcttcacatttatgtctaactgtcattctacttcattgtagcaaatatctaaggcatccattgcccaagaaatctcaggcagtaagtagacataaccgcaacgcgaataatcatcaataatggtgataaaatatcattcctttctgaaagaactaacatcaaaaggttcacaaatatcagtatgcacaagtttcacagatagactgaagtgcgttctctgtaacatcctttacttcgtatagtgtatgcgtcgtttatcccttaatacaacccatacaaatatttagatccgtcaaatctagataaggaagaatatcattctttattaatccttccatcctttcttcagaaatgtgaactaaccgttataccaatagaaagcaaccgtccgtcactaa

SEQ ID NO: 159842 - DNA, 472 bp, Glycine max
ctagctgtcttctgaactcgttttctctattggccgtcaatgaaaaaccactaaatatatttttatttaattattctatttaatcactcaatttataataagtatatttatttacgttcgtaatatcatctattattacataagaataaataaaataaattaataatactatttaatatatagttatttatttaacattatgtaatatttacagcaaaaattaagtattaatgaattcatttctaatcctaatttcttatttaatgaatttatttatggtattgacagtctttaacattaatatcttattttttattttagtaagttgtgtaacttctctgtagccctttgttgagaatgtaggtacggttcaatataatataactcacagagaaatcataagaagaatgtcgagaagaagacacgctatataatatctacaccacaaattattattaatgaattattttta

SEQ ID NO: 159843 - DNA, 469 bp, Glycine max
  unsure (1)..(469): unsure at all n locations
tctatataagctgaaccatnttatcaataaacggaagntgatttttattcatattattagagtttatctcttttatcttagtgagagtgattctcctaaactcttgagtgattcaagaacaccttggctgtatcaaaggactctcacaacctttgtgtgttgcccttgctggaaagagtgattctttccttcctttcatcatcacccttgttctttcaaaccacaattccagaaaatccacctctgcccagaattatctcgtggccataactcccattttacgcactcaaattaagtgattcttgagcctaaattgaatttcaaaacgagacctttcacctcgttntggaatcacctcatttggagccctgtagcttcagttattgccatttctatatttctgtccagccaccacttaacctaccgtttaccatcccattcattcattttatgccgagaaccaccttat

SEQ ID NO: 159844 - DNA, 469 bp, Glycine max
  unsure (1)..(469): unsure at all n locations
gcttgactnttaaacttctcgagagcttccggtgtacaagtttgatcgtctctatctatcatgcgcccgaatcggatattcttgtgaaaagttatgactatntcaacttcacgagaacttccgttgtacaattattagcgtctcgatatattatacgccagaatctgacatccgagttagacgtcatgactatttgaatttctcaagagcttccggtgttcaattccgagcgtctcgatatattatgcgcccgcatcagatcatcctgtgaagagctatgactattgcactttctcgagagcttccgatgatcaattactaccgtcttgatatattatgcgcctatatctgacatcccagctaagagtcatgacattggaattttacagagctcccgtgtcaatttcagcgtctgattattatgcgccgattgattacttgtggaagcatgatatttcattctcagact

SEQ ID NO: 159845 - DNA, 418 bp, Glycine max
  unsure (1)..(418): unsure at all n locations
agcttataaactcanactgtgagcataaatgtgttattttgtgtaatgtgaacatgtatatttttcatggcatgtgtgtatcacttagtttattatagctagggcacacttgctaaagcaaatgcattgtttctaccaccttctttattatcagggaaatactatgtaaccttcaccaagtaatgtgccagtgattctcctcaataagagaaaaggggttggaaaatgatgcatgagcgagcgtcactgtcatttctttcatttcttttacagctcctgtgacagcgtttttcaaaataagtaacctaatgactgttcctccaaaactaattccaacccaacatgcatgactttactgtggctaaatatttatattcattctcctcctgagtgaacaacttgccgactctaaatttca

SEQ ID NO: 159846 - DNA, 465 bp, Glycine max
  unsure (1)..(465): unsure at all n locations
tgcgcaagtttgaatgacgagggaaatggcccttgagaccatattttatagtnnncncnangaacngaacataatacctaagattaacaatattcacacactctcctcaattaactaactgagttagactgcttgatccatatttgagagctttagattaaggactctgttctcatcagggtgccaacattcaaccccattaaacttacaaacaaagccttcattttgttgttgaaattccaagattgcaaatagttgtaagggtctctaagggactctctgatgctcttcaagcagaagatatcattgcccataggtcatgccacacataatcagcaacaagaaactcacacaaagagaagtgaaaatctggccactccgaanaaatcatttcaccaatactgctcctaagaaacattgagaagaaaataaagtgagcagaaaaaattaatacggttcaacatt

SEQ ID NO: 159847 - DNA, 483 bp, Glycine max
gacccggatccttgagtcacctgcggcatgcaagcttccataatttatatgactttctgttctcgctattatctttcacaggacgcgaaagtcgtcgctcttatctctcacaagactcagagtcgtcacttctatctttccaggactcaaattcctcgagtctatgtctcacatgacttagattccttgcttttatctctcacaggactcggaggcctcacttttatctttcataggactgaaagcgctcgcttttatctttcacaggactcaaagggctcaccttaatgcttcatacgactcacagacctcctctttatgcgttcataggactcagagtcctctatcttttacatttcagagactgcaatggctttaggcatttacgcttgggagagactaccaagtcttttttagatctgcaaaacttctatgcttctgcgtttacacttcagagactacatgcctcggtacattcaagac

SEQ ID NO: 159848 - DNA, 388 bp, Glycine max
  unsure (1)..(388): unsure at all n locations
tcagctnttgtaaaagtcaaccataagccagaattttgagcttctcccaatttcaactttttgggaggctgtctcatatggacaaaataccctcatgtaatttataaaattacactgatgtcccacactttctgtttggagtcacgaaccctaatcattctctcttttgttctctctcgcattcctcttttttcgtatgttcctaaacttctctcctcgtctttgatcaaggtttgttcctccgtcttaatcaagctcccgtcctattttctggtttttctctctttcgaccggagcctcatgttttaactgaaatcgttgatttattccatatttcgagaacttagtcttggtgaacgctaatcattagatcctgtgagtgtcctat

SEQ ID NO: 159849 - DNA, 398 bp, Glycine max
agcttcatgatgatgaatcaagatttattcttggtgttttgatgataacaaagatgatgacgaaaagcccatgagaatgatttctagattcaagatcaagattaatttcgagtctcatcaagaagattcatgaattatcaagatcaagattcatgactcaaagattcatgaatccagagaagactctctcaagataagtgttaaaaagcttttcacaacattgagtagcacaagaagtttttcacaaaaccattaccaaagagttttactctctggtaattgattaccagattgtagtgatcgagtaccagcgttctaaaacgttaagattgtcagaattcaaaatgacgagtcacatctgtggatgtgtaatcaattacacctttatggtgatcgat

SEQ ID NO: 159850 - DNA, 499 bp, Glycine max
tgcatgaattaatagcaacacattcagagtaattagtgatgtatgtaatctgaacacaatttaacagtaataatagaacctcaaagagaattgcgcttgatcctcaagagaaagcaacgctggggacttagccttccattaatcaatagataacaaacttataaattgaagaacgaaatttttttgctactggaattgcaaaacgaaaaaatgtttcatagaaaaacctacaactaaaaaaaatgaaaataggggagagagtaaagagagcctaactagaaccttggtgctgttatatagttttccagccccaaagcttacaaatctgttttaaattcaagcccataaaaaaattaaattgaaatctagataagataagataagataagatctagattaaataatatatagatgagatcaaatctaaataatatctagataagatagagataagataagatctaattttgtagaatataatagtctgccctcttcaagt

SEQ ID NO: 159851 - DNA, 369 bp, Glycine max
  unsure (1)..(369): unsure at all n locations
agcttaccatgtatagtaacaagcatttaacttgtggagctacgctcaaanatccgacacactgttcacctcaattatggattcattaacaactctaacacgcgcctgagaccggttccaaaagatcgtgaaaattcaacattaatccttctatatgaagatgatttcaatatagatcaagttgctcatgagctgaacaaagtctacttggaatgccacgcaatagggactgcataccttaacccggagtctatctaatactttccttatccacacaggaagaagattcctggctgttcgtcatatcacaatccttgatttatcagaacgggtcacagttgactcatgtctctcccaaaaagttaactc

SEQ ID NO: 159852 - DNA, 406 bp, Glycine max
tataaaactcagcttctagaagatccacaaagtagagcgtagttcgtttcttctctaatagctaagctcacctgcttgagatgagaagctagagcttacctacacaccccttataataggtaagctcactcccacgactaaaaacatgagaatacaaataaaaaagtctttactacaaagactactcaaaatgccccgaaatacaaggctaaaaccctatactactagaatggccaaaatacaacgcccagaggaaggaaaaacctattctaatatttacaaagataagcgggctcatacttagcccatgggctcgaaatctaccctaaggctcatgagaaccctagggccttcattcggatctctagcacaatctacttggagtcatatacacaatgcccttgca

SEQ ID NO: 159853 - DNA, 257 bp, Glycine max
  unsure (1)..(257): unsure at all n locations
agcttgcaagatctctgataattatacttaattttcctctttgntgcgnngaattgagatactacttgcttagctcttcaatcatgaacatagttgatctagtcttctccaaattattctctttttcatgtagtatattaaggtgggtgtactttttatcttgatagaataggtgagtccgctacgtaacgaagaccgggggagatagtggggaaccaatacttacagcattgtggtgtgtgggggtgggccatgaa

SEQ ID NO: 159854 - DNA, 452 bp, Glycine max
agtagggaatctatccttcctaagattgtctctacccagtcaccctcattaagaactagctctgttcttcctctattgcctttagttgaatacaccttcgtttggttctctatttggttcttaaccctctcatgcaacttctttacaaattctgacctagattccccttctttatgtataaaagaagtgtccagtgggaggggaatgaggtctaacggtgttaggggattgaacccatagacaacctcaaaaggggactgcttagtggttctatgaacccccctgttgtaggcaaattctacatgaggaagatactcatcccaagacttatggttgcctttcagaagagcccttataagggtggataaagacctattcactacctctgtttgcccatcagtttgtggatgacacgtggtagagaaaagaaagttagttcctagcttagccca

SEQ ID NO: 159855 - DNA, 390 bp, Glycine max
ctcagcttccttttaattacgagcgtctcgatatactacgagacttattttgtcactcgagttaaaagttatggctgtttgaatttgctcagagcttctattctgaattacgagcgcctcgatatattacgggactcaatcggacatccgagtaaaaagttattgtcgtttgaattcgctcatagcttctgtttcaattacgagcgtctcgatatattacgggactcaatcggacatccgagtaataagttattggcgtttgattcttcttaaagcttcagttttcaatttccagccgcttgatatattacaggacacaatcggacatccgagtcaaaagttattggcgttggaatttgctcagagctcctgtttcaaatacgagcgtct

SEQ ID NO: 159856 - DNA, 398 bp, Glycine max
  unsure (1)..(398): unsure at all n locations
ctcgacccgggatccttaagtcacctgcggcatgcagctagatagatccctatttatggttatttctttctcgataggtaagtaaatcctgctntatgggtagagctgtctctacaacatttccattggaattgatgataagatctgcgcatttttaggggaaaaagaggctaacttttgattctctataaggtgcagttgggctaagctcagttattatgctaagcgcataaccatcgctaagtgcagtttcagcgcgcttagcacaaaggagaatctgtcatatcatctgcattaaaaacgcgcgctgagcactgtaggtgctcttagctacgctatgcttgacactgacgctatcccaatttgactactctcgctaaacgcgatgtggcacttat

SEQ ID NO: 159857 - DNA, 420 bp, Glycine max
  unsure (1)..(420): unsure at all n locations
caatangaaacgtggatcagatggaagaagaaactgaagctgaagctatgttagagcctacacaccaatggaatccttttgagtctctcatgattcacaagatggatgtcatgcttcacctccatcaagagcacttatctgacattcacagtactttatataacattactactcgacttgaaaacatagaaactaagtcaacccttagtaacctccttaacccagatgaggatgaagcttagttatgtttatgtgcttgctcctattatttgatggcctgatctatcttgttatgttatgttggcttgtctttgtatgataaaagttatgaatttgtctcatagatctatgattaaagtcgtaatgttctatgatcaaaggtataatagtgtgatgtagcgtttatttccttcacatttg

SEQ ID NO: 159858 - DNA, 487 bp, Glycine max
  unsure (1)..(487): unsure at all n locations
tattgcgcgcatntacattatatanaccatccagtatgcagtctttaatacttgcaacaacattggattgttgtccattccttattattattaaagcccaacagtattcacaaagaatgcatgcccacttaacatcagcaaaatcaccacattatttgaagctattcattaagtatacatagtaaatgtctcagcctttcacgatccacagccaagacattcttttaacagatcttcatcttgggtagacatttaccaagtctttaatttctcaaggtgctttcttcacaacacccattatggccaactcacatacagataccccttttaagagaacaggcacaaagcttcacaaattacaatcgatataaccaagattgtccttacttctgcaggtggtatactagttggcttcctactcatacgaaccaatgaatagtataataatgaaacagtaattatgaatcaatggcgtggaagagagagc

SEQ ID NO: 159859 - DNA, 424 bp, Glycine max
  unsure (1)..(424): unsure at all n locations
agctngaccctatcttantaatagttggtggcaatgaattgctgaaggacagagcagcggactatgcaacaaggttaagagaacaagggaagaacattgaatacgttgagtttgaggggaaggaacatggctttctcactcatgattcgcactcagaggctgcagaagagctcgtgcaaatcattaaacgattcatgcttgaaaattctaattagaatatatatgtgaaaaaaaaaatatcatcaaagggtgttagacttttcatatgtagtgatctagagttaatccatgttttctagtttggtaaaaagggtaataagtgtacgttggttgcagatggagaatgtagtcaattgttaattctatatatgttacttttaactagacaatgctgcattgcaaagttgcaattgctatctcttct

SEQ ID NO: 159860 - DNA, 199 bp, Glycine max
  unsure (1)..(199): unsure at all n locations
ggatgtgcaccagcttaccatacgtgtgatggtttagcttctgacattttagaacgaaatgactaaagtagacatagacaaaaatggagtgaatagacaatttagtccctgagatncgacctactctgcatattactctctaactcaatgtaatcttcaaatacccttttctttgcctacacgttgccaaattcccctt

SEQ ID NO: 159861 - DNA, 479 bp, Glycine max
agcttggtccacaaaaatagggtgttgaaagtttattatttcagtttcttaccaagtaaaatggatcattcttaagggtccaacgccttaaaatgatcacctttcaagtaaaaagaatcacttgattcacgcataaggaagaactacgtaggtctgatttcctctttgatggagggtacgtaggagcaagagccccgcttttgtcgacctcataaaataaaaagaaataaaagttaagataacacaattccacaattctaaaaaataggttgttgtcctttgagacaaacatgagaggtgctaataccttcctcaaacgtaaatacaactcccgaacttagaaatttcattgtgaccggtttccttcggtttttctgacgttttcctcacataaacgttggtggcgactccgtgcatctttcctcctttggaaagcgcacccgtgagcctctgcttcgctcgcgcgcagaaggcacatt

SEQ ID NO: 159862 - DNA, 486 bp, Glycine max
  unsure (1)..(486): unsure at all n locations
ntgtgctactagccctcaccatcaaattagtaagcaattgtttatttcattatttcatgaagggtcgatgttaatggacaaaagtatgattcattcagccagtggaggcactttaatgggcaaaactcctgttgctgctagacaattgatttccaacatggaagaaaattaccagaaatttggtactagagttgctgcaccaaatgaagtttctatttctatggttgctgataatcaaaggctggagaataaacttacagagttgacatcccttgtgaggtagctagccattggtcaacatcagaatgtggcggcagccaatctaccaaggctatgtggtatctgtagtgctcctgatcatacaatagatgcatgctccacactctaagaagtagaataaactgctaatgtttctgccataccacctggctagccattcagacctcaacaacaacaatataatccttacttcaacacctataatct

SEQ ID NO: 159863 - DNA, 415 bp, Glycine max
  unsure (1)..(415): unsure at all n locations
tgatcttatggataaaattaataaagcccgaactgaggaggatctgaagccgtgcttatagatgaagacccaactcttcaatntggacgaaggcgctaacgttaaagaccttcaagacaatgaaatgcatgagaatgaaactgttgtaattgatgtggtaccagcagaaggattagattattctttaccgaaatttgttaccaccactgagaatgatctagaaactctcaacaccatagacaaacactcttctacccaggatatagagcagctatgagtctagatttcttaaacattgtgatttacctcgaaagaacagaaattaaatgtgtgctgtctacgaaatgtctctatcaaattagggtcaatgcaccaaaaggtttagaactatctggtcctgaccggtgagtggaca

SEQ ID NO: 159864 - DNA, 464 bp, Glycine max
  unsure (1)..(464): unsure at all n locations
tctcagcttccacttcattggttgcattacataaacatatcttcacttattatattattcatattanaaaacacaaaggctaacttcagatgttaattcttgagaaacgatggaactgaattttgatcaatcaacaatagggtggaaaacgaaatgaggtaataaagttgaaaatacctcacagaaaaaaaataacgaataaaagttgaataaaccatccatctgagccaattttcaagctgaagtaatagtaatcaatgcccatatacagaacgtttcttcagaaacgatcaacatgaagagaacaagaaaatataaacgcagacttgcaatgacacacattcaccgagaacccctcacagctcttaagttgccatctaccacaagcaacaacggngttatttcttttatcttttagatttatttcctttaagctattctaaagcagaacctttataaaccga

SEQ ID NO: 159865 - DNA, 443 bp, Glycine max
  unsure (1)..(443): unsure at all n locations
agcttcctcattccttaatttttaacaatgtgatnttatattcttgntatacttatgatttagttctcttggaaaccttgagaaggggcagagaagtaactgcagttttatattttataagagatagcaatagtactatagtagtgtttgcaccagataaagctgtatagaatttgatattatatcagcctttcactccattggttcttgaatttttttctcaaatttcatctctgcttctacgttctccttattttttgaatcttggagacaaagtttcttgttggtatttcttgagtactactgccttctggaaagtccacctggttgcttaagcaacttatgctatattctggagagaactaggtaagtgttttatgatcagtgtcttgttttattggtgggcntaagtaaatatctaaaactatgatatttactgctta

SEQ ID NO: 159866 - DNA, 473 bp, Glycine max
  unsure (1)..(473): unsure at all n locations
tcaccttccattccacacacanaccacaggtgcggagttccgttatgtcactcgtggggcccatccaaaccgcaggcgcgtctcttcgtagtggataacaccgaagacgaggcacaggttctgaaacccaacctcttccatggcaattccaacgcacatacttggtggaatttcccgctcacttgtacacactgtcgctttctttgtctttgcctactgagaaattgcaacaaaaaaaacgttgtagaggttgaatacgctgaacttgtctctcgaatgcgttttctttgttgctcttcttcgatacaatggctaggtgagcttagaatcagtgatgcccaacactgcagaaacaaagttttcgtttgtgaagttggagagacatgtcttgtttcgaaagcttcttcctcttttatttttattagccccttcaactcctttttttgtgtgtgggttgggtgtaacatggacct

SEQ ID NO: 159867 - DNA, 455 bp, Glycine max
agcttcggaagaaagtgatgaggtgcaagctctaaaggcaaagcttgaaagagcccgggtagtcaaagagaagttcaagtccatagccatcaaagtctgaagagagtatgatgaactaagggacgttaatatggccaccgatgaagccttggaatgagaaaccaagaaggcctgaaaggaagaacacgaccaaaacaagttttgaggggctttatagggcagcaatagtgagctcaaactctgaagaggtgaaaggaatcatcatgggtcaaaggcatgatctggaaggacgagctaaaggcttgccttatgtcgaaaagagatttgtcccaacagttaaagtgagactgaagggaatatgtgggccatcatcgatgagtgcaaagagaagctaaatctagcggcgactcacgagcaaaggctagaagatgagtacccaagatatcatcaaaggg

SEQ ID NO: 159868 - DNA, 471 bp, Glycine max
  unsure (1)..(471): unsure at all n locations
tctagccgaatggacttaccttgaattaattcatttgattttctctttgagcctatgttcccctatctttgatntgaagctcattacaagccttacgtgaaaaaccatgatatcaccttacccttaacgaattatggagctctgcaattgttctgggaataagtgtgggggggtatgtcttattgtaacatatgacttttggccatgcttactgttttattttggccatgcttgatgtatatatatattgcccagatcttgctttaatcttcagattcatattgtttattattaaaaaaaaaatcaaaattcaattgctgcacattctgcaaattcgtactattcacaataagaagacgaagaaaagtgaagttgaataaatgaggtcttgttatgacgacttgatatacgagccttgcgtgactttgtactacttgtgcttaatttcacttattccccatagtcctctat

SEQ ID NO: 159869 - DNA, 451 bp, Glycine max
  unsure (1)..(451): unsure at all n locations
agcttgccagtctgatgcagcagttatgattgttttagttatgttggggaacgggtactaacccggaatgggtttgggcaaagacaacggcggcataactagcttgataaatgccaacggaaattgtgggaagtatggtttaggctataaacccactcaggcggatatgaagagaagcatcgcgggaaggaaaagcagtggccaaagctcgcagttgagacaagaaagtaaaggaagcccgccctgccacataagtagaagctatataagcgcgggtctgggagacgaaggtcaagtggtcgcgatatacgaagatgatgttccgagtacattggattttggacgaccatgccctcctgatttccagctgggaaattggcgagtggaggaacgccccgacatttacgcaacgagcataatggaaacctttacgggtntaaacactctatag

SEQ ID NO: 159870 - DNA, 516 bp, Glycine max
  unsure (1)..(516): unsure at all n locations
tacggacactatgaaactcagctanaggaagtgagagaattagcatgggcagaaatgtcttctctttgatttgtaaatttggtccccacatccatgaaaaatgtaaggatccaggtacattctgcataccttgtattatagggaacagtaagtttgacaatgccatgctagatataagagcttcttttagtgttatgcctctgtctatttttaattctctatcgcttggtcctttacagtcaactgatgtggtgattcatttagctaacagaagtgttgcctatcatactggttacatacaggatgtcttanttagagttggcgaactgattttacctcgtgatttttatattttgaatatggaggagggatcttctcaaggatcagatcccatcattctatgcagaccttttatgaanactgctagaactaagatagatgcatatgcaggcgcactatctatgtgagttggtgatataactgttcatttgaatgttctagatgctatgaaacacc

SEQ ID NO: 159871 - DNA, 458 bp, Glycine max
  unsure (1)..(458): unsure at all n locations
agcttcagactgacctacagactgctgagaagtaatgtctcgatatcggncagccttattgaaaacactttcatatccatgttcttagatactagcttactcttctactttggagtgacttatttgtgttttcagcatctagcattgaacatagtgttgtctgttatgtgaccgctgctccaatctagtagatagtgcttataaggcttaacaactctagctactatgcattgttgtacactatggaaattgcggttagatcactgaatgaaaataatgcttgttcacattcatttattctgctagagcacgatttttttctaccaaaattattaaatacttttgttgttttttgcgagtcattaaaactccagcgcgcctgtgtagtcttctattggtaattccaacactcactctcacatcttaaagtgacatgtgttcaaaaatataatcacaca

SEQ ID NO: 159872 - DNA, 313 bp, Glycine max
  unsure (1)..(313): unsure at all n locations
ccccccccccaccnccatattaacctaacatccacccccccccgccggcattgacctcacacgaccaaaaaccgctagaatacgacacgatggggccacattttcataccaaagacgcaaactgcgaaaaaaaaccacgatgctacaaaacaccaaacagccacctactgacgcgcccaacaacagactctcctgccttcatccatagaacacacacccgctaataaacatcaactgatacaaagctgatagaacaaactactgacttgaatttaaatcacaaaaagcctaccacaacttgaacaaacaataa

SEQ ID NO: 159873 - DNA, 456 bp, Glycine max
agcttgcatttggaattgcgaaagccccactctatctttatgattagtacctgacatctcagacaaacaaatcaaacgtaacaagacaattatagttgctgtttgaatacctcacccactcaagtgtatcacacaattatggcttttctctaatgaaacactcttgccttttaccactctaattccccttgagttcttaggcaattcaagagattatggccacaacaaagaacaattcaccaatatgtgtaaggtaaggctagagagacaaggaacaggttaaccaagaaaaaggctaacaatgttcttatgcacacatgaaggagataaaatccagaatttatgaattcaagtaacaatccttcatgcaaccaatatattaccttacagagagttttttaaaggtcttaagctgaaccattcaaccaattttgtttttttttaaatttgctatac

SEQ ID NO: 159874 - DNA, 488 bp, Glycine max
  unsure (1)..(488): unsure at all n locations
tcanaccacagcaacacaaaatctaagtgtgcaaaacctctcatttcaatgggttctctacgtttgaaaagtgaaatttagaatgaggtaaacttgaggcaaactctcacctcacaccagtccataacatccatttagacttgttcaaactggatttacacctaaaatctcaccgaatcaaaatttgactcttcaacacccaaatttgccctagcaatggctctttgttcactttggtcatttgtttttctctctagctcagcctaacctttctcacatgttctaaatgacatttcaagctagtattaactcactctaacctccatttaccacagaattcagacttagccttccaactctcaaagtctcactctntttccactcataacgtcacattctcactntctaaccttgngttagttctacacttcatctctaacagatntccatcagcaatgtcagcatataaacatcacaaacatcatcac

SEQ ID NO: 159875 - DNA, 472 bp, Glycine max
agcttatccctcttaagttattgaggccgctgttccaacaagtgtatagttgcgtttagcgtgcctacgtgacgtttgagtttaaaacccaagcacttagcctagccttgcgctaagcccaacctgaagttgtaaaatccagtaagcatctggggcttagcgctgtaggttgcgcttagcgctttctgcaacaccaaatatttctgcaatatgcgcttagcctgagatataagtcttagcgtaccatcaagcttcaacttatagagagtagttcaggcttagcgcaacaagcgcacttccaagaattcaaaacccgtaagagattggcgcttagcacctcctggcccgctaagcccagcttaaaaaatcaagttacagaatggatctggggcttagcacaagatagcgcgcttagtgctgctacaataaaaattttcccatgaagaagtggcgcttagtgcatcatccatgc

SEQ ID NO: 159876 - DNA, 440 bp, Glycine max
tactaggttggacaattgtcgtttcacttgtttgtagccatcttatgcctgagttaaggccaaaatctttagtcattaatggtatgtttgtacgttgatttagtcgtggtcaaagcagttatcactttggtggtagtttttaggggtaagcttcatttgatcaagattcaagaaacagttagttcttttttttttgctaaataatagctttagcacgtacgctggactccttatttctctttcttttgagtctgaacaagaagcaatgatttttttgttgtaaatatcgtagatattttagggtgtgcaaaaatatctttgcattttgatatttcttttgatatagtttttcaatttttaggctcttgttgtttccctatagcttgattgaggatatacttatatattaaattcttctatgacactgttttatttatttt

SEQ ID NO: 159877 - DNA, 471 bp, Glycine max
  unsure (1)..(471): unsure at all n locations
atccttaagtcacctgcggcatgcaagctttctaaagtttctggttntcctaaccttganaacaaaagtctggtattcattattctttctcttctccctttgccaaaaataatgtgccaaggactaactgcctgaattctctttgggtctctcttctcccttttccaaaagaacaaaggactaaccgcctgagttctttagtgtctccctcctcctttgtcaaagaattcaaaatgacacaatctgaaaattcttttgattcttccctttccctaaaacaaaagatttcaaaggactaaccgcctgagaattcttttgtttccccttcacaaagtttcaaaggactaaccgccggagaactttgtcttaacacattggagggtacatcctttgtggtaatattagagggtacatctactcgcgttgttgtaactgagaacacgaaatggacatctcttgtggatcagtcta

SEQ ID NO: 159878 - DNA, 478 bp, Glycine max
  unsure (1)..(478): unsure at all n locations
taagataccacctaaggcacagatatttacctggcgactcatattagaccgcttaccgacgaagctgaacctaagagggagacaagtggagataactgacccaatgtgctcgttatgcaacaattctgaggaggatgcagcacaccttctcttcaactgcagcaaagtcctccccttgtggtgggagtcactntcatgggttaagtcagtgggtgttttccccacagaacccatagatcattttatgcagcatactataaggaacgctacacgatcaaaacatatgagatggagctgctggtggatagccttcacaaggaccatatggcaacacacaaacaacctggtatttgataatcacactcttaacgcaactaagctgatggatgaagcacttcttcttctatggtcctggcttaaagcaatggaaaaagattttatacacatgtcaatcagtggtcctctaatctggcagatg

SEQ ID NO: 159879 - DNA, 428 bp, Glycine max
  unsure (1)..(428): unsure at all n locations
agcttgtaggattatggggtacccatcatatgtggtactaggnggcaatcacgcgatggtgcaagtcgactctccacatccacaaatcacacataaatccaccatccccagttgtccaccttcaactgagctcacgtgctcccacgtagcccttatcctcgttcctctcaacaccgggtccccatcaatccctccaagcttncacaacatccaagaaattcagcatccaaacatcatgaactatccaaaaccaagaaaacagggcataggcagaaaactcttcccaaaacacattccaataccacagttntcctcactcagataccgcagtaacattctctgtgtttcgattcgttaaccggtggatcaactcaaaatttttactgggaggtcctaatacatatatttacagtttgaccggtgggatc

SEQ ID NO: 159880 - DNA, 477 bp, Glycine max
  unsure (1)..(477): unsure at all n locations
tctaactcacaagcctctcatgaaccttatgatatgtntaatgatggccaacaagaacataacaggccatattggattgaagatcgcgtttgcaattatctgttatcacattggaatgcacctacatatcgttccaagtgtgcacatgctaaaacaaaaaaaatccagcatctgaaaagggtgggtgtatgcacacaggtggttcaattagcttgcaagatcacaccattcacttgataagtacattaaaattataatacatactcgtttatacttgcttaatttaccacttaatgtttttataatgtttcgtaatagatagaggagcttggtcaatctgcatacgtagatgacgtctttcaatgaactcatttaccacaggatactgctcaatttgtggatgatagatctacgcaccacatgtgacaccattatctgcatctctttttattcttcaaacgttattatattataaat

SEQ ID NO: 159881 - DNA, 464 bp, Glycine max
cgcttcacacaatttatgtttctcacacttgagttttttaagaccaattactaagtctttcttaactagatgattaagatgatgcatgtttatgtgtgcagtcctacaatgccacaaccaagagtcatttatcttaccaaacaactcagctcctataatgatgcatgttcaatatttaacatatagatattacctactctcttgcaatatggacattctgaccagacatagcttcactaataagacaataattcttgttgaattcaatattgaagcctttgtcacatagttgactaatacccaagaggttatgctttactccattcacatatagaactctctttatctgagttgtgtactgagttccaatattttcttcttccattatcttcccttgttattgactcaaaagtaaatattctccttctttgacacacagaatgtacatcatgggagcttgcagc

SEQ ID NO: 159882 - DNA, 493 bp, Glycine max
tactaagcttgaaaatgttgttttcaccttctcgctaagccaatctgctggtttatcgagcgtccgctaagcgcaacactcatgggctaagcgccaggaagactctagaagaagatgaactatacaggttcactaagcgcaccgcttcagttcatctgctaagcgagaaggcacacgctaagccgaaattcactaatgtgcgctaagtgcacaagcatgaacaaggccacctatttaagcctgaaatcagatttcagaaagggagtttggactatgattcagagctttgcatgtctagggtttctagagagataaaggtccaagttctagagagttttgagagattttgctgtgtgaagatctgcagagacaagagctcgaagtaagagtcggtttgagagcttgagatgacgttgtgagtgattgtgagatcctacaggtgaaggagacatcctcaccacttggatatttgcaatccttcatcttggtattc

SEQ ID NO: 159883 - DNA, 262 bp, Glycine max
cgcaagctctacataagatctggagcatgtcgatatattcttggtactaagcggacatccgagtgggaagttgtagtaagtcgaatctgctcacggctcctgtgttcatttcgagcgttttatttattacgggactctatctgacatcctagtcaaaagttctagacggttgaaattgctcatcagctgttgtcttcaattccgggctttctctatatcactggacacattctcacatacctgtaaaaaagtttggtagctt

SEQ ID NO: 159884 - DNA, 422 bp, Glycine max
tctcgcctcacatacaagagcaacactactatattacaactcgaggccccaacttaacatactcaatatctactaacaattaccccaagccatgaatcactctaggcccctcgtctaaaaactacactgaacccgatagtctgacatacccaacaacgattcaaccgttagccaaccacatcagtcggcacgtcatataaaccattacatctcaaaaaagctctatagtgacacacaacagcccaacgcaatccctaaatttacacacagcacacttcaaccacacgtgagtattacaccgtaaatagtacctaatgtattcgctgcgcatcagacggggtgccacaccgaagagattaaacacaggcttcctaaccacaaaaatcaacaccacaaagtaacttacacccacttgatcaaac

SEQ ID NO: 159885 - DNA, 424 bp, Glycine max
  unsure (1)..(424): unsure at all n locations
agcttgacaagttcaggtgcaggtgctactatcttgtgtatgcacttgaatttggttgctaggcctcaaggtgatggcactcacatttttcggattctgcacagttggcgaaggcaatttgtcataattttgggactgcgcttgattcatctgagtagccatctgccccatctgatttgtcagactctgaatgaaagctcttgtcttttgctgagattgcatattctggatggtcattttcctcactaactcttctaaggaaggttgaggagaggcctcanntgcntgttgtctttgttgtgactgctcgtgtattgcacgaggatcatatggcttgcttgggccaacagcattctgtaaaagagggacaggctgtttgtgttgaggaggacctctccatcttcgatatggatgattcctccac

SEQ ID NO: 159886 - DNA, 466 bp, Glycine max
  unsure (1)..(466): unsure at all n locations
tctatgcacncttangggtccgttcttgctatgtatgttttcatcttcattcttctactttcgatattctttttcttcgttataagcgagtttcgaccgatcgctgaagccgtaacctcacttaattaatgtttaaatgaatttcaaccgatcatttgtgtggtaatctcatttaatcgcctctaaaataaaattcaatcgattgttcatgccgtaaccctgattaaatcacaaaataataaaataataaaataagtgtcaaccagacattttactttgaaagtcctctgtaatggttgagaaataaccaagtgaaactaaggctaanattaactcataaatcaagcatttgcccgcaaaaaggtaatttgaaaccgctgtaagatccagtgccttaacagtccctttttactattatcatcgaaagcaaaccatgtataagtgtaaaatcaacacaccgcataac

SEQ ID NO: 159887 - DNA, 427 bp, Glycine max
  unsure (1)..(427): unsure at all n locations
agcttctagccaaatggacttaccttgaatttatttctttgtagcccttttgagccttgttttcctttccttggtttgaagctcactacaagccttaaatgaagaaccatgatatcaccatatccttaagggaatttggagctttggaattgttttgggaataagtgtggggggtttttgtttcattggataacttgttttggtggctatgcttcatgatgtattttgggccatacttgatgtacattgtatattggttaaatgttggacatgctgaatgaaatgttgtgtttcaaaggctataaagtattctaaanacaatcgaaaaaagaaaaagaaaagcactagagttgagtgaataagatcttaattggcacaagaatgatgaaactcttggtctactctttatgttaagacttatctttac

SEQ ID NO: 159888 - DNA, 440 bp, Glycine max
  unsure (1)..(440): unsure at all n locations
tcgtccgtagatccctcatttaagactactctctatntatactaccctcttaggtttagactaacttaaactgagtttcgtccgcagatccctcatgtaagactagactcagctcaagtagcttactacagtgtagcctaatttagcctaagcttcgtccgcaaatccctcatgtaaggctaaatttcaatcctgcttcaatcaagttctaagacaacagtacatttctcaatgctaaagtcacctaactgtgcacacaaatgggtgatcagaccaaaagcatacaaacattaagcattgaatgaagcattgaacacagaacacacaatctattagatattagctatttacatcagctgttcattagaaatccccactacggtgttagccagcattacaagaaccctacataaatgagattaaagcaagaatgtaattct

SEQ ID NO: 159889 - DNA, 413 bp, Glycine max
aaattcactcaatagacctccaatctctaatgaagagggttaccactactggaaaacctgaatgcaaattcttattgaagcaatagacttaaatatttaggaagccatataaatagggccttatatacccaccacagtagaaagaattacaatagatggaagcacatcaagtgaaagcataacaatagaaaaacttagagatatatggtctgatgaggatagaatacgagttctatacaatttaaaagccaaaaacataattatatctgccctgcgaatggatgaatatttctcggtctcaaattgtaagagtgctaatgaaatgtgggacacttctacattaacacatgaaggaacaacagatgttaaatgatctatgataaacacattacctcatgaatatgaactatcta

SEQ ID NO: 159890 - DNA, 454 bp, Glycine max
  unsure (1)..(454): unsure at all n locations
agcttattcagagacctttctattggaccatattatgttcacaaatttataatgtaattctatataaataacagaaaacaaaaccggtgacagaactntgaattcatttttttcattntggagccaaattaaaattttttttctcttctttcatgagtatgtgctctatggtctctgctcttcaatggagttctccatgcaaggatagatccacaatcaattcaaggttctgatgttacgattagaatttgaatttcatccttaattgcagattcatacatttcatcctctctctctctctttccaatttcaattgtgtttgtgatcgtgatgtgtttgagaattgatactgattacatcagatccattgattaattgagttgatatattcttgtttgaggttaggagatngattgatttcctaagtcaaccggttatcgcactggattcatgg

SEQ ID NO: 159891 - DNA, 462 bp, Glycine max
tgagatgaggaagtgtagaatggagaaactctctgctcttattcgttaaccacagagtggtacctggagatatgtcgcgggggtcaggagaccttggggacgtcaagtggggtgctattgcccaaaaccaagcttgaccaatcctgacccaacccgggcatagtcggtcagtgagaacctgtgatgtacctaaacatgcgagctcctggcagtaacagataaaaggaacaaagaccacaaagcaaggaggcttgtggtggctggccagctgtgaattctgtgtgatatatgggttgtggcctctggtaatcgattaccaacggtgggtaatcgattacaaggcttaacaatgaagacaggaggctaagatggtctctggtaatcgattaccaaagggtgtaatcgattaccaggcttgaaaacgaggtcaagaagccatgagggcttctcgttatcgattac

SEQ ID NO: 159892 - DNA, 439 bp, Glycine max
agcttggactcatgagtggtaagttgttgttcttgtggatcggtccttttcttgtactaatgtgtttccttatggtacagttaagatcaaaagtgacttcacaaacaagagcttcaaggtcaatggacaccgaattaagccattccttactccaccctactcttcctccaccatgacttaaggaaggtttcttttcctatctccttctttacttttattacatttgtctgattctatctgctagtttaattgcttttaatcttttaattgtgctacattgaggacaatgtgttgtttaagtatggagggagaagtccttgggttaggttttgctagctttgttagctttggcaattatgctagtcgtgtaactacgtacgtatggtgggctctagttaatatttaagtcattctgtttgacgtgcactctgcataattt

SEQ ID NO: 159893 - DNA, 494 bp, Glycine max
  unsure (1)..(494): unsure at all n locations
gctntccttaatcgatatactttctcctcctgtccttgaattatgaaccctccaagctgctcaacaaaaatttcttcctccaagtatccatctaagaaggatgattcctcatccatttgatgtataatccaacctctctgtgcaccaagagacatcaacattcttatggtttctatcctgccaactggggcaaaagtctctgataaatcaacaccaaacacttgagcatatcctttaacaactagccttgccttgtatttgtttacaaaaccatctgaattgagcttggttctataaacccacttgacaccaatcgctttcttgtggttaggtctgtccaccacctcctatgtgttatattttcaatcattataagctcctctctcattgcatatatccatttctgatcacctgcagcttcttcatattcctcacgctccatcacaacaacattacacctttggtagatgtctgacagtcctggttcctctcat

SEQ ID NO: 159894 - DNA, 477 bp, Glycine max
  unsure (1)..(477): unsure at all n locations
agcttcctcaatcacctcattaagggctaatttctccntgaangatgtgtctgtttttgatgaaagctgtctgcctctcatctatgagaccagatatcacttgtctcaatctatttgctaataacttagctatcaccttgtacatacatccaatcaaggagatgggtctgtagtcgtcaaaagactggggatgattaatcttggaaattatagctatgaaggaagcattactgcctctagggaagctaccatgcacatggaattcatcaataaatcttctgaagtcagttttcagcatatcccaaaattctttaatgaatttgaagttgaagccatcaggtccagggcatttgtccccatcacaactccacactgcttctttaatctccaaatctgaaaaaggaagaaccaacaactccctcttgttctgggttagtgaagagaaatgcactccatcaagagtgggtctacagagct

SEQ ID NO: 159895 - DNA, 476 bp, Glycine max
cgaagagaatgcttgaatggcgaataagatatatggagtatttgagagaggggggagcacgaaattgaaggaagaaaaagggagagaagttgaactttgagttgtgtctcacaagactctcattcatcaaagttacaacaagtgttacacatgcttctatttatagactaggtagcttccttgagaagctttcttgagaaaacttccttgagaagcttctttgagaaaacttccttgagaagctggagcttagctacacacacccgtctcataactaagctcacctctttgagaagctctcttaagaagattcctaaagaagctagagcttagctacacatacctctctaatagctaagctcacctccttgagatgagaagctagagcttagctacacaccctctattatagctaagctcacctccatgactaaatacatgaaaatactaaatatattcatactacaaagactact

SEQ ID NO: 159896 - DNA, 357 bp, Glycine max
  unsure (1)..(357): unsure at all n locations
agctngctggtggagcttctatggaggctgtgttctctgagcttcaatgaggtcctttaatggtgattctccaccatggagatgcagcggatgacaaaggagaagaggtaagaggcggcgccatccactatggaataagccatggaagaaggagcttcaccaccaagatgagccttggataaaaagcttggagaggatgcttcaatggatgaaaagaaagagggagagaaagagagatgggggagcaccaaattgaaggaagacaaagggagaaaagttgaactttgagttgtgtctcacaagactcttattcatcatagttaccacaagtgttacacatgcttttatttatagact

SEQ ID NO: 159897 - DNA, 463 bp, Glycine max
ctacggcttccaagcattatagatatcgagaagatatcaaagccttaatttcactatctccgtgcgacggatatttctctctaccaacattattccacaaatcgcaatggtgagaatgtgcaaaaatgagttctaatagtggtgtccaaattttacggtgatccaacgattaacgagtctgacatcatagttttattggaacaagctttagcgtgtgaaaaaaaaaggaatcttggagaggaataatgaaaatgaatttgggaggaatagacactgtataaacatattgtcaatgtaaaaactgatctaatatgtttctatttataattacggtactccgaacctattatctattctactcttctttacattattactctatacaaaagaaatgtatcttacctcctttcaaatgaataaataaaatattctttctatcttctacaaacattcatttatttat

SEQ ID NO: 159898 - DNA, 352 bp, Glycine max
  unsure (1)..(352): unsure at all n locations
agcttatcccatgcctccgtagcggatgttgtttcatatatcttttctaatgcatcatcatctaatgcttgatagatgaggaagaaagctttcttgtgtctctttcttgaatccctaaaagtctcattttgtgtttaggatagcaaagtctcatcttgcagctccttatagccttcttcaaccatttcccaaacatcatgtgctgcaagagaggccttcattttggtgctcaaattatcatggtgctcccctttanaagtggaacttggaaggatgccactccattgcttgccatgactatatagggatttcttatcagaacctaagctctaataccacttttttggaaagg

SEQ ID NO: 159899 - DNA, 482 bp, Glycine max
tcttagtctcacctgatgaagatgaattcatggctacttcatttctctctctaacgacaatagcatcacttctggcactaaattgctgggagcttgaagccatattctcaattaaatttctggcttcactaagggtcatgtctccaagggctccaccactggcaacatctatcatacttctctccatgttgcagagtccttcataaaaatattgaacaagaagctgctctgacatctggtggtgagggcaactggcacataattttttaattatcacccagtattcatataggctctctccactgagttgtctaataactgaaatatcctttctgatggtcgcggtcctggaagtatggaaaatgttttctacaaatactctcttgaggtcatcccacctcgtgatggaccttggagcaacgtaatatagccaatcctttgcactccctctaacgatgaggaacgacttcacaaaatgtgat

SEQ ID NO: 159900 - DNA, 345 bp, Glycine max
caagtgagcttgtaacaaatcttctacactaggagagatgacctgctgtcctcttgaacgcttaccacccactctgtcatcatgccgacactcatgaaaaccaacagctttacccttctttaagtattctgaacaaaattcaatggctccttctgcaatgtacctctcaacaatagatgctggcggacgatatagatgcttcggataccctttaagatcttcatgtatctctcaaccgggtacatccactctttaccaacaggaccacaacatttgattgcttgaccacagcacaattaagtgaatctgacgtcaaaaaagcacggtgaaataatcttcaactgg

SEQ ID NO: 159901 - DNA, 448 bp, Glycine max
acctgcggcatgcaagctttcttcttcttgcactttctcggcttcttaattcatacagtaagaaaatcgatccgaaaggaacaatgaacatcatttgtcgaaggacccgccttaccggatgcgatgaacggagagcttgctcgtagtgaaatgaagtttgcctgattttgatggcggtttgagacttgagagtgtagaatggaattaatggcaacccaattatggtagtaactttctgcacctcacaaattgctttctgctccaatgcgtaaaaaaggtgaaagaaatcactaattttgtgggaaatttatttggatgaagttgagaaaagaaccaataactatctttttttttattcatatttattagttaattgcagataacatgtcccccaaaaaattatatttaaagcatttaatatactatttgaattcttaactatacaaat

SEQ ID NO: 159902 - DNA, 420 bp, Glycine max
  unsure (1)..(420): unsure at all n locations
atttgtgagttgattntagttttattttcacttaggttattagtcaattcattcaaggaaacttccaaagaaaaacgttcgattgatttttttattattttattcaaagatattttgattattttcttattatattttcaagatattttgattattttattattatttttccttttttggtttaactgtggttacagtgcgaacgatcggttagattttgctttaacagtgattaaacgacattacaacacaaatgatcggttgaaattcattttatcatttattaggcgagataacggcttaaataaacgattaatgcacgttaaaaacggaagaaaagaaaaccgaaagtgaacaaaattaagatgaaagctcacaaaacaagaaatgaattgaaagtctcggattcagaaacttacc

SEQ ID NO: 159903 - DNA, 449 bp, Glycine max
  unsure (1)..(449): unsure at all n locations
tgagatgaggaagtgttgaacggtgaaacttcctgcttttattgttgatcacanagtggtacctggagatatgtcgcgggggtcaggagaccttggggacgtcaggtggggtgctattgcccaaaaccaagcttgaccaatcccgacccaacccgggcatagtctgtcagtgaaaacctgtgatgtacctaaacaggcgagctcctggcactcaacagataaaaggaaaacaagaccacaaagcaaggaggcttgtggtggctggccagctgtgaattatgtgtaatatgtggattgtggcctctggtaatcgattaccaagggtgggtaatcgattacaaggcttaaaaatgaagacaggaggctaatatggtctctggtaatcgattaccacggtgtgtaatcgattaccaggcttgaaaacgatgtcaggaagcttatgaagcctc

SEQ ID NO: 159904 - DNA, 203 bp, Glycine max
  unsure (1)..(203): unsure at all n locations
tgactggatacaacccttttctaagagaagggctttgaattgatcccatgtctcactaatgtgaaacaaaacccagtgcgaatcaaaactctcacatctatnatgggtggaatggaataatgcctgaacaaatgcctatatacagatgtatatatgaatactggggcccgggaaattgtcttcttcttataatcaacgtcttg

SEQ ID NO: 159905 - DNA, 373 bp, Glycine max
cgtgatgctcaagagcacattggaaaaaatgccattttacgctttccatctaaggacgagttccatggtggtccgtgccttctacggcagccgccgagaggtaaggggagagatcgacctcccagtacagatagggcctcataccttccaagttacattccatgtgatggatatcaatccggcctacaactgtcttttgggatgtccatggatccactcagtgggagtcgtcccctccacactccaccaaaagctgaggtttgtagtggaaagacacttggtcataatatcaagtgaggatgatgtcctggtaagttgcccttcctctatgccgtacatggaagccgcggagaagtcattggaaacgactatg

SEQ ID NO: 159906 - DNA, 428 bp, Glycine max
  unsure (1)..(428): unsure at all n locations
agctngatggagtntcatgcatcanggaactatntctctttaaaagttggtcccaaatggcttcctaattntcagctttcctatatggatgtgacatcatggcagttaggtcccaactttccatcatggattcagtcacaaaaccaacttcaacattttggactgtctaacacggggattttagattctattcccacctggttctgggaagcactgtctcaagttttgtatttaaacctctctcataatcatatacatggtgaaattgggactacattaaagaatccaatatctatccaaactattgatctaagctcaaataacttgtgtggtaaattaccctatctttcaagtgatgtgtttcaattagatctttcaagcaattcattctctgaatccatgaataacttcttatgtaatgatcacga

SEQ ID NO: 159907 - DNA, 421 bp, Glycine max
tgtgagatctctaagatcatttccttgacaactctgtgtattgattgtcatcaatatgaagagatgacaatttagagatattcatgagatgacaatttacagagtgagcaaagactttctaatcaatttccactgaatttatcaatagacacatcaagatatcttaatgttgaaagtatgccaaatgatctagaaagggcaccaccaatcgagttggtgaaaaaatctagcatgtcaacatttttaaaaactccaatttaatccgtccaattgggttattttatcatctagggataaatcttttgtgtgtttttctcatgtgggtacttttcaattatgctccaaagtgaacaagggtatttaacattatagtataatctacatctatcagactaatatttttttacttaatgcaaatttt

SEQ ID NO: 159908 - DNA, 427 bp, Glycine max
tccgttcccgagagcatcgattaattaagcatttcagcctatgctttcttggagcttaggaaaaatgccatttcttcttctttctttcttccaaatccatttctaaagttccaagtactttctccatcacccacatccaccattagccaccacaaaccatcattgttctccattgaaaacccacaccgagaggaacccttcaaccgaagcagaatttccaacttggcttgcggtttcggtagagaacgaaaaccctaatctgatctttcgttttctttcgagggaaccatggttctatgcttgtttcttgttagtttcatcttggctttgcatcttttctaactttgcaaccaccattgcatgtcttatgcttccttttgaaaaccttacaaaaagagacgttgtaaacattatcccttcatgaaat

SEQ ID NO: 159909 - DNA, 276 bp, Glycine max
  unsure (1)..(276): unsure at all n locations
acacttactggcatggagttctctgtttntaactttaacgcctgaaactgcagccagaactaaaaggaaaaaagacacaaaggagaacacacatnagtctaaaaatatcaactccagtactaactcataagtcatgatcttataactagtacactaactaaagaaaaaaactatattgattgaagaattttgccatgacatgaattgaagtgaaaagagaaaaataatttattcatgacagatagtctatctgtaattcttttattaacaaaaaat

SEQ ID NO: 159910 - DNA, 375 bp, Glycine max
taaaccctctttctctcatgctaaagaacctttagatatgattcatagtgatcccaatcttgtctccatctaattacaagtactacgttcactctattgatgatttcagcagattcacttggatttttcccttgaaacaataatcagaaacaattacggctgttattcaattaaaaaacatggttgaaaatcagttcaacaggaaaataaaagttcttcaatgtgatggtggaggtgagtataaacctgtccataaaatagccatagagtcaggaatccaatttagaatgtcttgcccatatacctcccaacagaatggtggagcagaaagataacatttacatgttgctgaactatggctcacactactatcac

SEQ ID NO: 159911 - DNA, 419 bp, Glycine max
agcttagcagttggactaagcgcatatccttcgctaagcgcagcttcaatgcgcttagcacaaaggagaatctggctgagcatcatcatcaaggccgcacgctaagtgcgcgattagtgagctaagcgttgtaggtgccttcagccaagctaagcatgagactggcgctaagcctaatttcacttacccatgctaagcgcgagggtggtgctaagcgcaacgttgtgaattcagagcctatttaaagcctatcttgtgcagaattagggtaagcaaatgattggcacagattccaaagcacaccattgtgcttatctcgggaaaagagccctagaagcagcaaagaaaaacaacttgtgcattgaagcctatgttttgtcatttgagagagataattaagtaaaaagtgagtgtgagat

SEQ ID NO: 159912 - DNA, 307 bp, Glycine max
agagtacaccatcttggttcgagacaatgaacgagctatgcctaaaggtatggtgtaatcgattaccgcgtgatataatcgagcactccactctctatgatacgttccaaagtaaagaacttcactctgatcagtaacggtgagtatgtaatcgatgtcatcgctcttgaggagtctctcacgtttggataaacactttgattgaggtagtaataatcggattgattacttcatttaagtgatcgataaccttctgattaaatcgattacacgcggctctaattggtatgctcgtaataatctcctt

SEQ ID NO: 159913 - DNA, 274 bp, Glycine max
tcctaatctctacgagggagtgacctgtctcattaaaatgagggaatgttcaatcaatttaaatcccctcacaaatgctaaagaacagagcccttgttactatctataaagtctatttttagatcaaggtataatacctgatgcctgtctgttatatgcacaatatggttttaacaaccctacaaggtaaactcacttctcaacattaaagactgatttggagaacccctaatctaaagagccaaaattaacaaatcaatcacttaactactac

SEQ ID NO: 159914 - DNA, 425 bp, Glycine max
  unsure (1)..(425): unsure at all n locations
tgtcntgtgtaacagacacgaactcatattatttcttttgagtagcttacgccatagccaaattcatagacctttggacccttagtaaaccgataacttctcccacgatagtctactgaatgatgagctgacatgtcagtcatcggtactttgatgtaaaatcttatgggtaccaagatattggtagtcctccatctgcattgtgttcatgatagacaacacacaccatttcagtcatgatctcgtatacttatgaactattaggccattttgtgtctttgttcattacttgatcaatataattctagtaaatctccacttcactacttgagattagcaagtgttagtcactgtaatccatgtaaaatgttgccaaatatactttatgcctanagtgatagatgtccgattaaattaaaggtttt

SEQ ID NO: 159915 - DNA, 325 bp, Glycine max
  unsure (1)..(325): unsure at all n locations
ctacctagtctataaatagaagcatgtgtaacacttgttggaactttgatgaatgagagtcttgtgagacacaactcanagctcaatttctcttcctttttcttccttcaatttcgtgctcccccctctctctttctctgcctctttctttcctgcattgaagcatgctctccaagcttcttatccaaagctcatcttggtggggaagctncttcttccatggcttattccctaggggatggcgcctcctctcacctcttctctttgtcttccgctgcatttccatgggggaaaatcaccattaaaggacctcatttgagctcaa

SEQ ID NO: 159916 - DNA, 239 bp, Glycine max
gacaatagccgataagcccatgaagctcttcggggaccgagtacggggctgtcatctccttgtctttggcttacacacggggaaagtcttgaattccgttctaagtatgagcaacccgatccatacacctggattgcttatggtgtatatagtagaagactctttcactagcctcttgaatcgtatatcctcggcatactcgttcgcgatccagtgatcaaggccttggataacctaac

SEQ ID NO: 159917 - DNA, 340 bp, Glycine max
cacaagagcttcaagtaggtgctctttaaacctccattaaatttaagctctaccttctcctccattgttgatacttcagattttctccatgtatctcctcacatgtcttgtgctaaatgttgttaacatgattatttagaatttccacctatttaacttgctatagaagctagatttgattttctatggatcaaatttcttgttcttgttcttgaaccatgaattgtgttgagtttaaattcctttgagctgaaacatttaatgagttttatagacacctgttacaaaattagaaaaaaagaaccaagtgatttggtaaaaaggataaaataagaaaaat

SEQ ID NO: 159918 - DNA, 399 bp, Glycine max
cttaacctcatcgtgcctcacaggcgttatatttgtgagtcaatccaatccttgtgttctgactctaagacacttatgatagccgccgatgatcccattactgcttccccttagctctctgtcctttcttcacgccgcatcacatgccttgcgaactccttggagtacctttgccttgtggtcactgaaacccctcgtaatgaaaggcgtgacgatttcttctaatggcgctcctctcatggggttatcaagctgtcttatggcgagaacgggattatcaattatccaaccccttgttcccatcactggaacatttggacatccttcgcatgaacatagaatcttgattctttctctcttctagcgaggggaccaattaacttacgcccgcccatgcta

SEQ ID NO: 159919 - DNA, 424 bp, Glycine max
  unsure (1)..(424): unsure at all n locations
gcaagcttcatgatgatgaatcaagtcgattgtgnttttttgatgatgtctatgatgaggacacctaacccatagaatgatctcaagattgagttaacaagttcaagatcaagattaatttcgagtttcatgagaagaaatcaagaagattccagattcatgagaagaaatcaagaagacttcacaagggaagtattgaaaagatttttcaaaaaacaaacatagcacagttttgtttttcaaaagagtttttctcagaatgttctaagctcccagagtttttactctctggtaatcgagtaccacgttcctgtaatcgattaccaggggccaagtttgatttccaaagctttgaactgaatttgcaacattccccttgtttttcaaatggtgtcatccattacaatatattgggaatcgatta

SEQ ID NO: 159920 - DNA, 374 bp, Glycine max
  unsure (1)..(374): unsure at all n locations
tatgatctatatcctatcgtctatatgaggcctccatttgtcatatatctattaatccacattnttatgagagatatccttcttctagtctttatcaaaaatcggaccctctgcaagacatccttatgtttcatcgatggttgttagagacaatactacattcgtggccttgaccgcgctcctattactctttacatgccatcccccataataaacaaagggaccatattgccaagcactgaacttttgcaaaaagttcatccatcctatgctgatcaagagacccttaacaataaaaccctcttttcaatactctggaagttcatctctcgttcatggatgagagagtcttcctataaggccttcttgatatc

SEQ ID NO: 159921 - DNA, 435 bp, Glycine max
  unsure (1)..(435): unsure at all n locations
tgcaagcntggcaacctgagagctgtagagaggtaccttttttcttattgactctgctaagacgtacaataatacctgactggactcggaaaagaccataaatgagaaccatgagaagagactaacgaaaaacatacaacataactattgtaatagacttgttttatatattggtaatatgatgtatattggaagtttgtcctatactacaatgtcaaaatctataaaagagttaatatcatattgaatacaaatttatgtaacagtaagacgccaaacaatataaaatcggtggcattcaatgatgttatcactcggcatgggtatttcatttcagaattgatgaagaaataaaattatcagatttaacatattattcatgaataatccgaacttctgtgatatgtttcacatgatttctaatagaaaaataac

SEQ ID NO: 159922 - DNA, 428 bp, Glycine max
  unsure (1)..(428): unsure at all n locations
agcttctttcttntttctcatgaatgaaaccatcattctacactatttttatttgaagagtgaactatgctttcaaactttaatgtactactcgaacacaatgtttgaatttttaagcataaaaatttgtctatacttttgagtaaacaattttatcaaagaagagtaaccgatattagttctagtgcacaaggaaaatagttcaagctaacatattgtgaacttcaaacatcatttcatcaaagccttcaataacttggattttaaccttgcatgaaaaggtgaatctcatttccccatgatattgactctgagttagaagaagacctctacaacgggaaggaaagcactggtacttanctttttattgtctgttatataaaaaaacatgtatatggttatttttaaaaaaagaaaaatagtcaaac

SEQ ID NO: 159923 - DNA, 455 bp, Glycine max
  unsure (1)..(455): unsure at all n locations
cttgagtntcttcattttccttcgcagatgcctctgtgctattataataaatatatacaattatgttcatccttttctcttagtaacttaattataatctatttggcatacatttatcatctgctttacatcatttttcacaatttaacagaagacctattctaaattaattaagattcaggattttcttaattagttcagtatattataacgaatgttagcatttagtaaattttacgtatggtttcattctaaaaattattttttattctatcaacttttaaattaaggttctcacattgacgaggagattcaaacacacgtncatgtgggatataagtccaatccttaccaaatggactaacattggttggctcaactactactacctctatcaatattattatcaccacctcaatctcaattgttcgattgtcacaaccaccaatgtgatc

SEQ ID NO: 159924 - DNA, 375 bp, Glycine max
  unsure (1)..(375): unsure at all n locations
aactggatagnggggagggttgctacntgtgtgtgaaggaaaaaaaaaataaaaataagggatgattatttccttaaaatatagtatttacttattatagtgaccttcgagatattttaatgagtttaagatgaattgaattcttccctacaaaacccaaggccaccactcatgaataaatataatattatattttgatgtagcaacaaacttttcactttgaccatgtatgattcattgctcataagtatatattaaggctctagctcctgttcttaatgttcaactcaaccaacacttttaattttgagttaatctagtgtttaatcttgaatatatatagatcattgaataaattgtgctttatcttatcta

SEQ ID NO: 159925 - DNA, 451 bp, Glycine max
tggcatataatcatgattcgagaatatagagaattgatagaatttgtgttagatattattatatttgttcttatgtttcttattggaaaactttaaaaaaatacatgcgtcctttgactcttacacaccaagagtaatttattttttatttccatattttttatacctttattataaaatcataaaaacaaaatatttgactaaattttaatataaaataataacttaattaaaaatataatgtatattttttttggatgttaccaacattcgaactcaatctcttatgaaattgtcttacaccaattatcatatgagccaaggataccggtaaaatataatgtatatttagtacttgtaacaaatataaccacttaaataaatttaaatctaacagcaaatttataaaataaatcatttataaacttataagtttggtacttgcacctcc

SEQ ID NO: 159926 - DNA, 435 bp, Glycine max
  unsure (1)..(435): unsure at all n locations
agctnttcttaattgcaatatagacttaatattaaattctcaagtgaatcatgaagaaagataattaatatttataattaactaattactgggatggatgcaaaaagatggcacaacaataattctcaactgcaggtgatctaagataattataataataataataataataataataataataataataattattattattattattgaagagaaaaatctgacttattctgaaatttcttatgcatatgcctgccgaatccccaaaacgaaaaagacaattgtggatcaatacacaccgagtgtaacagagcatgaaaaattaaaataaaataaaattgaaatgaaaaatcagccttattctggaatttcttgtgcatgtacctgccgaatccncaaaacgaaaaagaccataataatcataataataataat

SEQ ID NO: 159927 - DNA, 327 bp, Glycine max
tgagatgacgaagtgttgcatggtgaaacattactgcttctattgtttacctcccagaggtacctgtacatatggcgcgggggtcctgagaccttggtgacgtctcgtggggtgctattgttcaaaacacatcttgaccaataccgatccaacccggtctgtatcagtcagagataacctgcgatgtacctaatcaggcgaccctctgtgcgttaacagacttaacgaggactcccacacaatctttgtggcttgtggtggctggccaactgtgaataatgcgatatatgcggattgaggtctctggcgaactattaccaaatgtga

SEQ ID NO: 159928 - DNA, 328 bp, Glycine max
  unsure (1)..(328): unsure at all n locations
agctntcagccatttgacacgttttatacttntactcggatatctgattgagtcccgtaatataacgagacgctcgaaattgaatgttgaagctctgaactagttcaaacgacaataactttttactcggatgtctgattgagtcccgtaatatatcgatacgctcgaaattgaatgttgaatctctgagccaattcaaacgacaataactttttactcggatgtgtgattgagtcccgtaatataacgagacgctcgaaattgaatgttgaagctctgagccaattcaaacgacaataactttttactcggatgtctgattgagtcc

SEQ ID NO: 159929 - DNA, 324 bp, Glycine max
  unsure (1)..(324): unsure at all n locations
tcaacattcaatntcgagcatctcgatatgttacgggtctctatcanacatccgagaaaaaagttattgtcgtttgaattacctcacaagttcaacattcaatttctagcgtctcgatatgttacgggactcaatcagagattcgagaacaaagtcattcgcgtttgaatatagctacaagttccacattcaatatcgagcggctcgatatgttacgggacttaatcagacatcccagaaaaaagttattgtcgcctgaattggctaagagcttcaacattaaatttcgagcgttccatgtggttcgggactcaatcagacatc

SEQ ID NO: 159930 - DNA, 424 bp, Glycine max
  unsure (1)..(424): unsure at all n locations
agcttgacagcatggngnnnggatggttattaatgttcttaaacactcccaagtttgggagattaaaacatgaaatctcacaaatagaggggaaaggaagaacagggggtaagtatcatctggaggggtctagagtcttagactcgacaatgaaaccagaaaaaaaggctcactctcagcaagggtcgtacgcggaggttgtgaggagacacacttcaagaacagcacaaaggggaactctgtataaaggggaggttaattgccatagctcgaggtcatcagtgaacctcgagatacatgggattgggcagcaatggcttaaaggagcctggatagggagactaaaaaatatggcaatgtttgatanggtagaggagtacctatggtgggatattggagagaacatatacccgcagtacatccg

SEQ ID NO: 159931 - DNA, 455 bp, Glycine max
tgagagatcttcaactctcacatctgtcgaggttaccactctcgacactgaacaacatgtgtccatgcttaagggctcgataaactcatcacctttctacatgtcaaggctactaccccggacattcgacaaactcccttgatgtgagacaacctctttcgatacatcagagcttagaaggcttatgtactatacaacatccaccaaatacacgtggcatcttacgtggcactcccaaacacatgtcaaccctccatgttagccttagcataggagcacaaacatccagcccttagcagctgggctccccaaccaacacgttatctctgacctctaattatttgaatatattgacatcttttatctctcggcagggattgaattatctacgaagttacacattatccataaggtacaattatcaactagcaattatttataaggtacacattatc

SEQ ID NO: 159932 - DNA, 357 bp, Glycine max
  unsure (1)..(357): unsure at all n locations
agcttgttgaaattagtaattattattgtttcttatacgnaatggatatgnnnnatcaactgcgaagtgcatattttttcatcattttgacatttcatgtcttataaattgcttttggtagggttttctgcttactttattttttgagctattggacttgtattattgttaattttttgttttcaatgtcttggctcaaatgtattgcttttctagtggaaaagccatttatatttattaattgggtttagtttatgcatatataatgagtgcacatatatgtacatgtgtatgaaagttcttatatcccctgaagaatgatttgaaatatggttttgctcataccattttgtaaca

SEQ ID NO: 159933 - DNA, 447 bp, Glycine max
  unsure (1)..(447): unsure at all n locations
acactatacaggactcaagctctggtatctggntagagcgcatgggatgctaatcgtcatttactgaagtcggtcaacacatattagctgcacctcaggaattcatgtaagcgatatggaatttcctaacaatacaaggcttctgtacagcaccctgactaagtaacctagagcagaggtgtatcaagaaaaatggaatggttatgaattaatgattggcattatgcaaatctaggggagatgcaatcacgtgaaactaacattactgtataagaacaatgcgtccccgacccaaacattcgtgactagaggacatgagctgatttaaatatctccactattgtatgtagttgttggtgatagcgatcgtttctagacattctcctcttttaatagatctcttcattctctgagggagatgtgttcttataatgaaaaatctcctta

SEQ ID NO: 159934 - DNA, 350 bp, Glycine max
  unsure (1)..(350): unsure at all n locations
tatgaattcatctattatgtgtcgctatacctccatgaatatttgccgatgccatcgatatgaatgtggaattggcttgcttgtgtttcttgtacgaacatctcagcgatgctaacatgcatggttgtcactagttcgtccgatatatatatgaccttccacatgtacaaacattttatacatgatttttgtccagaaatattaggtncctacttttaccacaaatatttattgttcatgtgattcaaccatggatatatgacccctttctgattgtcgatcgccacatattctcacatacttccccacatactctgtgcctgtcgagaaagctctatggggaaccattg

SEQ ID NO: 159935 - DNA, 456 bp, Glycine max
tcctttccgcaagataacaaaaaccatttctaaatattggtttagtcattgatctggaaacaaaagccttgatcaaatgccaaattgtggttgaactgaaagtacctttaatatctaaaagtatatgcataaagtaactaataaaagtcataaaattaaaatgccgttaagtagcaagcctttgtagtggatttctggggggcttgctttgtttgggaggcgacactcttagtgtcttgtctttatgtgtaattcatcagtacttctggtactgatttgatattattaataatatatatctatgtttgccttccaaaaaaaaagcaagcctcaagccatataattctaaaattttattctacatagcagactactgatagaaagatttaaaattttatgtttttcttcttcatcacaaaactgtgattttactgagtgtttcagcactattacaaa

SEQ ID NO: 159936 - DNA, 247 bp, Glycine max
agctagaaattgagcaacgtaagctctttatatattcaaatgggcattacttttcactcggaggtgcgattcaggcgcatcacatatagagacgctcgaaattgaacaacggaagctctttctaaaggctaatagtcttaacttggaagtccgaggtccgctcatagcacatcataactctagaaactgaacaatggaaactctacaccaattcaaaaggtcttaggttttcactctgaagtccgag

SEQ ID NO: 159937 - DNA, 300 bp, Glycine max
ccaacatcagacgcacttccaggtgctggatctacttttcatggacttgatggggcctatgcatttagtgtaccttgtacgaaaaaggtatgtcctatgagatgaggaagatctctcctgaattacctgcgtcggctttataatacaaaagtggtgcacctatgaagtattcacggagttgagactgacacttgaatgagacaaagactgtgtcctccagagcatcacgagtgaccatggcaagaagtccgagtacagcatggtactggatgtcgcacatttgaaagcattcctcatgag

SEQ ID NO: 159938 - DNA, 413 bp, Glycine max
  unsure (1)..(413): unsure at all n locations
agcttcaccattgcttatgtggaccttattccattctcatatgcactagggtcgtggcttatgaattggagcatccggccactgctagaatccatctcatgttccatttggggctattttgccgttacagaggaccccttccaccagctcctttgaaatttccttctttgtcattacttgaggagcaatgtaaatcctaaccccaacttcaagagttcaccattccttcatttcctcatctcaaaaatgggtgagttagcatctctatctctcactgtcacaccgaccaatagtgttcattcattggattttcctccaatagtcagcactgggcctcttcccaagaccaccactnttattgcctttgaggacaaagttgtagaagcgagcttcatgatgatgaatcaagttga

SEQ ID NO: 159939 - DNA, 406 bp, Glycine max
tcctatagaagctacagcttagctgcacacacctctcttatatctaagctcacctccttgagatgaggagtttgtactatactatacacccccacttatagctaagctcactctcatgacaaaatacatgaaatatcatattaatttcccactacatagactactcataatgccctcgaatacaatgctaaatctctatacaattagaatgggcacaatacaaggtccaaaagaagaaaaaatacctattctaatatttacaaagtaaaatgggcccaacctttgcccatgggctcaaaaatctaccctgatgttcatgagaaccctagggccttctttagtagctctagcccaatcctcttggattcttctatccaataccctaggggggtaagattgcatcata

SEQ ID NO: 159940 - DNA, 430 bp, Glycine max
gcttcatgatgttgaatcaagaatgattcatggagttttgatgattacaaagatgatgacaaaaagcccaagagaatgagttcaagattgaatcaagaacacttcaagaatcaagaggaaatctgatttcaagattcaagaatcaagtttcaagatttaagtgtcaagaatcaagaatcaagaataatcaagttgaagattcaagaatcaagaaaagactcaatcaagataagtactaaaaagtttttcaaaaacattgagtagcacatgaagttttcacaaaatcttttaccaaagagtttttactctctggtaattgattaccagtttattgtaatcgattaccagtagcaaagaatgttttcaaaaagctttcaactgaatttacaacgttccaattgatttcaaatggtgaatcgatcaatgattt

SEQ ID NO: 159941 - DNA, 372 bp, Glycine max
ctttatccatggcctcctatagtggggagcttcttctagactcatcttctccttgaagaggtgtctcctctctctcttccttctccattctgctgccattcatcttccaagaagcaaaggaatccattgatgaagaagatcctaggcctacaagctccaatggagcttacatcatgagcttacatcatgaaagaatgtaactttggattcactctgaacccttcaaccaagtcccaagccgtacaaaataaaaaagatgacaaatgagagataatgatttggttaccaatcataagatcagaggcactagagtcaaggattcaaggtttagtagtaggggactaagagacaaaggctatatgattaccatac

SEQ ID NO: 159942 - DNA, 430 bp, Glycine max
agcttaactacagaataagaagtcataattctgccttgtccacagcatggaggtagcacaatatttttgtcaaaactatagacactatcacaccaatgcaaagtaaatctttctgaaacttataattctaaatctttcttccagttactgattttaaaacccagcagttcagaacttccatatccaagtccttttcaaaagttaaggcttcctcagctcctctagtctaggatgaacacttctgtttggacagtgttaattataatccatgcatttgtcacttgcatttacttatgtacaattaccagcatctacaaattaccttatgaactacaaagctaccatataacctatgcatttgttcttcaactgtaatttgcaaagctactatctcccatatttgtgcatcattttcgggtttggttctaac

SEQ ID NO: 159943 - DNA, 433 bp, Glycine max
tcttctgaaacacgattatataggctgtgtttgacaagattcatgcattaagtggcgcaacaaatcaagtaaagaatcatattaaccattcgaagaaaatctcattgaatgaacaaccttttttttttggtgaagtacatctagagaactaactctctctggaaggaagaatatgaacagaaatcaaaattaaagcttgtaaaatacaatcaggagcaatctcatgctcttcaaaaccaaaactcatcttcaaagcttgctttgccatttcatccacaacactgttggcttctctgaccacatgattccaaacctcattatcatattgccctgaaaatctgtgaatctcttctacaagttgatgctgatgatgaccctaatcacatctcccatcaagaagggttatagccatcctagaatccgaatccacacg

SEQ ID NO: 159944 - DNA, 410 bp, Glycine max
  unsure (1)..(410): unsure at all n locations
cagaagctggggatccactattagcattgttacatgtgttntctccttaaccaaacaaaatgcgagaaaattttgaaattgtttcttaaagtcaatttttctctcttttttctcttcatttcctcatttaacccaacaaagaaaatgcatagttaaatatgttttctcttaacctaacatacactaaaaaattatctcgtcttaatctttgtccaattacccttggctatagtttcataatattgctcataagcttaatacctctataagcattgttacatgtgttttcttcttaaccaaacaaaatgcgagaaaattttgaaattgtttcttaaagtcaaattttctcatcatttcctcatttaaccaaacaaagaaaatgcatagttaactatgttttctcttaacct

SEQ ID NO: 159945 - DNA, 419 bp, Glycine max
gggagtttagaatcagaaagattaagaattaattaaggatcaaggtgttttttttaaatactttaaattaaaaataaaaatattaaatttgtaaaaagtccttaactgtgattacaagtacagttacttaactttaataaacatatttaagcagacttaattagtgcaacaagttaacttcatttttcaaaaattataattaaataaaatactactaaggagtttacaaaatagaataaagatgttattataaagaaaaatatatatttaaacttaaaataatactatctcttaaaagaataataagttaactggtcttaataataaatatttcagacttagaattaattcattgaaaatgattggaaaaacaaaatgaaaaagattgcacatagtgctttaaccacgttaactgtgat

SEQ ID NO: 159946 - DNA, 434 bp, Glycine max
  unsure (1)..(434): unsure at all n locations
atttcagccaactcgcttcctcactggtagttgctagtgttatcatcttatattccataggggactgagctaagatagtctgtttctttgactaccaataaacagcctcaccaactatgctaaatatatacccgttggttgctttggaatcatctaaaagagggtgccaatctgcatggctgtgtccttcaagtatagcgggaaaccttttattatgtaatccaacgtttatggtgctnttaaaggacctcattaacctttcgatagcgtgccaatgctccttactaggactactggtaaacctgcataataatcccacaacataggctatgtctggtctaatacaatcagtgacatacctaaggctaccaatgatacttgcgtactcaatattgccgataccctcaccaatgttcttatacaagcttacactt

SEQ ID NO: 159947 - DNA, 418 bp, Glycine max
  unsure (1)..(418): unsure at all n locations
gcttgtaagaaaggtntngggactttcatttatgtttttatgaacttgagngaacgngacggaagcaataagttgtgttatgctctatttcggacatattgtgttgttaataaatttatcttaggcttataaaaaaattatggctttaccattaaatttgaggggcttgagttaagagatagatatgggatgatttttgaacagttaaatacaaaattctagaaatataatctaactttgtctaaatgtatatgtttgataatcatgttgattggaatcactagctggtgttggaaaagatgtctattatgtatctcacataatcataaatgttgggatcgtttagaatggaacaatgaagatgcttatgtgcctctttataataatatggaccggtgatatattgaacggaggaacc

SEQ ID NO: 159948 - DNA, 332 bp, Glycine max
  unsure (1)..(332): unsure at all n locations
tgttacanatagctaaccgagatacttagacctgaagattatttattgtatggcactgtggccactacactgattgctgggcgccccagcagtaatgctgggtgcacgggtcaacttccaactcttaacccgctggcaagcatcctttggcctatattcaacgtcgtcaacttgcactaaatcctaactaacaccgtctctctgtatgaagcccagaaccagcactagcactatcttttaagcccgaactcaacgtttaaagtcctgatacagcaccggcactctaactcaagcccagaacttacattgtcagcccacatcaagcatggaac

SEQ ID NO: 159949 - DNA, 422 bp, Glycine max
agctttacatgcatgttcacttcatatttactatacttcgatcaactgatgcaatctatttgattgaaaagataatttatattactcttgtaatgtagtcgacaactaaaaaaaaatataacagaaagttatgcttaggccaatctaatcaagtcattttgaatctcgtcattactatcatgcatctcaaagagaaggagaatcatgcatcgtaatacatagcacaacaaaacattaaaagaaaacatgccttccaaagccaaccaaggttaaaatgtattcatatttggtgaactttttcaaaattataacacatatatatgaacatggtggaacaatcttaccacatgcacaacacattccacacattacttcttgaaatgagtggcaggggatataataaagcattgttattaaaactg

SEQ ID NO: 159950 - DNA, 413 bp, Glycine max
  unsure (1)..(413): unsure at all n locations
tgatactcttagctgctgtaggtgtgatgacaatacccatagcagtagtcacttcgggagaaatgaaattgtggctcgcaccactatcaatcaacaccaataaatccacattctgtatcttacctataaccttcatggggtgagactcacccatgctctccaatacccccatcaatttacattccaccttcactttttcttcactttccaccgtcacatcctccatacttacaatttccccttactctgtcatggtttcatcatcttctattagnagaaccctaagagctcgttctggacatttatgcgacgtatggtggtaattttccccacatttgaaacaaagacacttcgctctcctctcttcgatacatcattgtggatacttcaggatccctttcacctctcccttg

SEQ ID NO: 159951 - DNA, 387 bp, Glycine max
  unsure (1)..(387): unsure at all n locations
agcttgnaaggacctcagtgtgaaaagttattaccattttaattncccgagagcttccgttgttcattttcgagggtctttatatgtgatgcgccttaatctaacatccgtgtgaaaagttatgaccatttgaatttctcaagagcttttgttgttcaatttcgagcctctctacatattatgcgcccgaatcggatatccgtgtgaaaatttatggccatttgaatatctcgagagtttctgatgttttattatgagcgtatcgatatattataagcctgaatcggacatccgtgtgaaaaggtatgaccatttgtatttctccagagccttcgctgttcaatttcgagcctttctacatattatgcgcccgaaatcgacattccg

SEQ ID NO: 159952 - DNA, 379 bp, Glycine max
agcttataatatatcgctacgctcgagattaagcattggaaactcttgggaaattcacatagtcataacttttcacacggatgtccgattccggcgcataatatgtcgagaggctcgaaattgaacaacgcaagctcttgagaaattaaactggtattacttttcacaccgaagctctcgtgaaagtcatatggtcataacttttcacactgatgtccgatttacgtttataatatatcgatacgctcgaaattaaacatccgaaactctctagaaattcaaatggtcataacgttgcacacggatgttcgattatggcgcttaatatgtcgagaggctcgaaatttaacaacggaagctctcgagagattcaatggtc

SEQ ID NO: 159953 - DNA, 417 bp, Glycine max
  unsure (1)..(417): unsure at all n locations
agcttggactcatgagtggtaatttgatgtctaagtggattggtccttttgttgntactaatgtttttccttatggtacagttgagatcaaaagcgactccataaacaagagcttcaaggtcaatggacaccgacttaagccattcctcacaaacccttctttaatggacgtagtggtggaaaaaacttccttactccaccctactcttcctccaccatgacttagggagttttccttttcctatctccttctttgcttttattacacttgtccgattctatttgatggtttaattgcttttaatcttttaattgtgctacattgaagacaatgtgttgtttaagtagggggggagtgttctttggttttgctagttttgttaaatatgctaattttgttagttttgttgggtttct

SEQ ID NO: 159954 - DNA, 440 bp, Glycine max
tccgcttattagtgcacagctccttcaagaatatagcatatcttggaatatgctttattgcatccagcagaggtatgtttacctctacttttctaaatgtttccaagatctccttctccgcctcttccatttttttgttggaaattgctcttggagggaatggaagagggatatgctgcttttgtaaatcagaattaccagtggaagattcaccttcatagaaattgttacgtaacttactctttaaatttttgtcatcatctttttctggagtatagtgaggttgggcaggttcatttgcagatgaggaagatgttgctggttgaggtccttgacattgctttcccgatcttaatgtaatggaactcctcattttgggattctagacagattgagaaagtaatctgtcagaattctggggctgctcgtgatataactgt

SEQ ID NO: 159955 - DNA, 421 bp, Glycine max
  unsure (1)..(421): unsure at all n locations
gcttaaagtatgcccgagtcattcttctctatgagatgttgntgaagtattggcgatcaaaattgccattccttggattacggggttgaaccaaactcatgcttttacaaaaaggttcatcaagtcaagttgaaatatggaagtaaccgtcttgcaaaattggggcaaaagatgaatcgagtcacatcactgcttcgtttactgccaaacatatttaagattgtttatgtccttgttacttccagtttcaccttgacaaagatgtcatggaccatgttgaaaatctaaattgattcaaccccatatcctgcgtaaaaattcgcaatacttcaactgtacatcattcgcatacatccatgcttttcattggttgcattgctcattgcattctttcgttgaaaaataaaataaaataaaatga

SEQ ID NO: 159956 - DNA, 457 bp, Glycine max
ctgatgatatggtattcaccgacgaaaggatcaaagtgtgtctaataagaggctaatcagatcatcatactttgataaatgccaaaaaaaatatggcaaatgaagagggtgagaatgatggacaagcccatgctatgattgccattcctatacagccaagtgtcccaccaacccaacaatgtctttactcagccaataaactaaccttcttcttacccaccgcccagttatcgacaaaggtcatccctatatcaaccacaaagtctgtctaccacactttcaatgacaaacatcacctttatcacaaaccaagagcaccaaccataaaattgaattttgctcgagaaagcctcgttaattcaccccaattccagtgtcctatgctgacttgctcccatatctacttgtatattcaatggtagccataaccccaaccaaggttcaatcacctccattc

SEQ ID NO: 159957 - DNA, 450 bp, Glycine max
  unsure (1)..(450): unsure at all n locations
cggaaggatgcttcaatggagganaagaattatagagatatagagagaggggggagcacgaaattgaaggaataaaagagggagagaagtggaactttgaggtatgtctcacaagactctcattcatcaaagttacaacaagtgttacacatgcttctatttatagactaggtagcttccttgagaagcttctttgagaaaacttccttgagaagctagagcttagctacacacacccctctcataactaagctcacctccttaagaagattcctaaagaagctagagcttagctacacatacctctctaatagctaagctcacctccttgagatgagaagctagagcttatctacacacacccctctcataactaagctcacctccttgagaagcttccttaagaagctagagcttagctacacacacccatctaanaactaagctcac

SEQ ID NO: 159958 - DNA, 400 bp, Glycine max
  unsure (1)..(400): unsure at all n locations
agcttatntgtgacaatcaagttgctcttcacattgcatctaattttgtcttccatgaacagactaagcacatagagagcgattgtcactttatgagaaaaaaaattctctcaagagaaatcaccaccaattttgtccgctccaatgatcaactagtggatctattcactaatctatcgagggaactttgttgattatatttgtaacaaacttgggtgatatgacatatatgctccagcttgagggggaatattaaattgctaatatttagggatcatgtttcgtattatatgcttaattgtagcatccttattattataaataagccaacatgtgtgttgtacaataaacaattnttatatatatatatatatatatatatatatatatatatatatat

SEQ ID NO: 159959 - DNA, 426 bp, Glycine max
tgatgtcattcaaaagacactatgtctatctatatgaatactaaacatgcatggtttgtgtaattgtattcattatgcgatataatttgttttaagccattaataaccaataaatattattaagtactcgttttgttatgcaaaaaaatagttggtccaaaagaaatcaattacacgtgtacgatacatcattgtcataattgacaacacataatgacatgcatgcgtattaaagtttgagcacgacaccacattgactgctcattctgaaggaaacataaacacaaaacatgttcacgcgtgtctattattttgtaaaaaagtgaagcattctgtcggtgacaaccatgtatatatatgagacaccgctaataaatcacacattatctttgctttacataggctctcaattgatacacagagtat

SEQ ID NO: 159960 - DNA, 411 bp, Glycine max
  unsure (1)..(411): unsure at all n locations
agcttgagacttaattgctntgttcttcttataagcagtagtcagtagtgcactctcacccatctccattacaagcctttcttcttcctgaacacacatggtcattaattcattgatagaccatttatctttatgtgtgttgtaagaaatcttaaatggcccatattcatgcggaagggtgttcaaaatgaaatgcactaggaaggactcagacatatcaacctctagtttcttaagttgagctgaaatatctcgcattttcatgatgtactcacgcacacctttcacactggtgagccgaagagaagaaaacttcatgatcaaggtgcttgctaaagtcttatctgaagtgatgaactggtcatcaatggccttaagcaagtctcggaccttttcatgctggtcaacaaa

SEQ ID NO: 159961 - DNA, 405 bp, Glycine max
  unsure (1)..(405): unsure at all n locations
tgcatttncactatcgaagaagaagatgcacgatatatattcttcagcggaccaaagtagaatgtccaaatcccatgccatttcatacattctacttatattcctccttatctaattagaacatatgtcgtccattcacattcgcacataactatgtgcactattattttatctccttttccatatccaactgtttgaagaagatcgtctagggtgtgtacgtgttacatgctctccttcaatccttatacactaccaaaaaaaaaggccttctacatcagttctaatgacctttgaacattggttatgacgcgtggtggttacacaagtgtcgtgaataccgacatcagctggaagaccgtctttgaacgacaatcttactacattggttgtgtagctgaaccg

SEQ ID NO: 159962 - DNA, 389 bp, Glycine max
  unsure (1)..(389): unsure at all n locations
tgcaagctgggacgaatccgaacctaagtttctgatgtgtgtccactaataaccagacactatcctactttctgggggnctttctctctctctctctctcaaatgcaacgatcctagcctctcttccttctctttctctacccttcgcagtctctatttctactccgaacccttcttgcccttgccccctcctctcacctccatgacaacctcgatgacaagtggttcgccttcccctctttctctctccctccaaatctaggactccaacaatgacttcctcctcatcaaggcggtccttccacctcctctggtggctcaaccctgacactgtgcaccactgtctcttcctccgagggatgcctctacatcgacaaccacatttgcga

SEQ ID NO: 159963 - DNA, 441 bp, Glycine max
  unsure (1)..(441): unsure at all n locations
tcttccagcgtcatcttggataactctgaagccaattgtttctctatcatctcagccaagtcctccattcccgcttgtctcatattacaagcactctaaataccaaaacaaactcttaaggaattttcaactcccagcgataaagattgttacactgttaaccaattaccaacgaaatcacacatgaataaaggtcaatttttcaattatatggcaattcatgattggatgacacgctacatttctagttagcactgttgcttgttaggaaaaaaaagagtaaaccaccatttgagtctgttacattagttcttacatatagtccctagctaaaagctaaaactaaggaaattntaaataagttcctgaaaatacaatctgtctatcacattagtccaaanatataagaaaatcgtgaattaatgataatattaataaatg

SEQ ID NO: 159964 - DNA, 431 bp, Glycine max
agcttatcgaggacgggccttggattctgttaacctgtgaggatcaccaagtgcagagcttgggtttgacgagtcttgtgtgcagtgcatgtgatgtactctttcatacatggcactcgccatgggtggctgataacgacaatcaaatcgttcaaaaacaaatttactagggaattctgtagcacaagattaacctagatcaaactcagaaatatgattcaatatggttcctacattcattcacatataaatagaaagggggatttttgtcaaacaatttgtgagaaactctaaaagaatgtgaaaacacaaaaacattattgaagaaacaaaacacaacaagaacaagatacaattcaagattaaaagcgtctatccaattcaccaaaccaatgcaattagaattatcatagtcactacaaatgatgttc

SEQ ID NO: 159965 - DNA, 433 bp, Glycine max
  unsure (1)..(433): unsure at all n locations
tgcttgtggggcttctatggaggctggatctntgagcttcaatgaggtccttcaatggtgattntccaccatggagatgcagtggaagacaaatgagaagaggtgagaggatgcatcatccactacgtaataagccatggaagaaggagcttcaccaccaagatgagtcttggataagaagcttggagaggatgcttcaatggaggaaaagaaagatggagagaaagagagaggggggagcacgaaattcaaggaagaaaaagggagagaagttgaactttgagttgtgtctcacaagactctcattcatcaaagttacaacaagtgttacacatgcttctatttatagactaggtagcttccttgagaagctttcttgaaaaaactttcttgagaagcttctttgagaaaactatcttgagaagctagagct

SEQ ID NO: 159966 - DNA, 389 bp, Glycine max
  unsure (1)..(389): unsure at all n locations
agcttctatataagctgagaccatgnatcaataaacttaagtngatttntattcagaaaattagagtttatctcttttatcttaatgagagtgattcttctaaaatcctgggtgattcaagaacaccctggctgtatcaaaggacttttacaacctttgtgtgttgccctcgctggaaagagtgattctttccttcctttcatcttcacccttgttctttcaaaccacaattccagaaaatccacctctgcccaaaattatctagtggccataacttccattttacgcactcaaattaagtgattcttgaggctaaattgaatttcaaaacgagacctttcacctcgntttggattcaccttatttggagccctgtagcttccgttatt

SEQ ID NO: 159967 - DNA, 447 bp, Glycine max
  unsure (1)..(447): unsure at all n locations
tcaacattcaatatcgagcgtttcgatatattaatggactgaatcantctaccgagtaaaaagttattgtagtttgaagttgctcagagcttcaactttcaatatcgagcgtttcgatatattacgggactgaatcagacatcagagtaaaaagttattgtcgtttgaattatctcagagcttccgtattccagttcgagcgtctcgatatattacgggactcaatcagacatccgagtaaaaagttattgtcgcttgaatttgctcaaagctttaacattcaatatcgagcgtttcgatatattacgggactgaatcagacatccgagtaaatagttactgtccgttgaagaggctcagagctttcacattcaatatcgagcgtttcgatatattacgggactgaatcagacatccgagctaaaagatattgtcgtgtgaattatc

SEQ ID NO: 159968 - DNA, 405 bp, Glycine max
agcttgagaagaatgataatctcaaaggactacctttttatgtagcaaaacttcatcaagagattcaatccttaagagagactttccaaattcattggaagcactgagaatcttgacaaactgttaatatacagtagatgtccttctaacagatctggacatggatatgaaagaaatacttatgttcatgataaggaaactaccaaatgttatttctggggaaaggatcaatgtttggtcaaagatcgcattggagacccttctaccattgtcatgacttgagtgccttcaatcactatggggtgaagcatggcacgctcccaaatgggaagatatggtgctacctttatgctttctgcataatattaatgtgcttggctttggtcaaccttgaccgttacaatc

SEQ ID NO: 159969 - DNA, 402 bp, Glycine max
gacactacaaaactcagctccttaaaagattcctaagaagctagagctagctacttcacatttctaatagctaagctcacctgcttgagaggagaagctagagcttatctacacaccccccataatagctaagctcacccccataacagaatacatgaaaatacaaaaaattccctactacaaagactactcaaaatacctcgaaatacaaggcaaacaccctataatactagaatggccaaaataccaggcccaaacgaaggaaaaacctattctaatatttacaaagataagcgggctcatacttagcccatgggaaccctaaggcctagccttggatctctggcccaatctgctttgagtcttctattcaatgcgcctacagggtaagattgcatcaat

SEQ ID NO: 159970 - DNA, 376 bp, Glycine max
  unsure (1)..(376): unsure at all n locations
cgctgcagcttatcaacgatactaaagtcttctaattatcataccttttgaagtaaaaatattaaccttcttttgtaaaaaaaaaaaaaaccgacattataatgtaataattttttttaccctatcatgttaatcatgaattattatatataataatattattgactttttaataatccttttnatatatatatatatatatatatatatataaggaattctaattaattaataatataaaaaaaattattctggaattatattacaattaaactctaaaaatatgcaagatggtacttgtgtcatattgaattccactacttattaattatagtcttatgtaattttgttaagatatgtattcactaaataaatg

SEQ ID NO: 159971 - DNA, 448 bp, Glycine max
tactcaaccttggaaaatgggttctatacaaaagttagtcgtataaagtgactaacaagctcccccacattacaattttgcttttcctcaagcaaagaaagaacaattcacttgtcctcaagtgacaaagacagtggctaatcaaaagaaaatggtgtttgattcattaaggacatcaaccatatgaactgaataccatggaatgcttaaatcaattacttctcacaagcatgcagttttttcaaagataagagcacaagtattagattcatagctgaaataagctagtaagcatgacagaaatcatggaaggatcatcaaccaaaatctcacagtcattgtttcactcaaactcaagtgtttaggcttatttcatcataaacaaccaacacaagtgtcaacctttgcatttcatctcctatcatacagtaatgaacacacaacaatg

SEQ ID NO: 159972 - DNA, 294 bp, Glycine max
gagctgcacagggacgacctcttattttctaccattgggcgaaaaggatgaacccccacaaatcacatatcaacctcaagaaatatgagtaacaaccttcccacaaaaactgaaagaaagaagaaagaaacatctcctacgcaacataaaacataaaggagtcaaccaaaacatccggcaagaagtctgatataagagacacagcgtctggcgagaaacccataactccatcaacgctaactcccaaaactacccaaccagccaaggggagaaataggaaccaaccaccacaaa

SEQ ID NO: 159973 - DNA, 419 bp, Glycine max
  unsure (1)..(419): unsure at all n locations
tgtgctananaacaatctctgacccttagatatgtcattgttttcagtttgggttgaatgtgttagagaaaaacactcaaaccaaaggaatgtacgtgtcacaagagttaagaatgtcttataaataattcatacagatgtttgcggtcccttccctatggattcatanaatggacaaatatattttattatgtatatagaaaatgactatttctttaattgatgaaaagtcttggtctctagatgatatccagtctatcaaagctgaagatgaacttcacttatgaaagaccattaatactgaccaatctgattatgatggtgaatactatggtagatatgacagataaggtgagacacgattataactcttcatgtcttatctctttcttcaatgagtgtgaaatagttctgcacta

SEQ ID NO: 159974 - DNA, 437 bp, Glycine max
  unsure (1)..(437): unsure at all n locations
tgaaagaattgacgagccaggccattcaaacatcggaggaacaccatatttggcacgattgttaggattcgattactttatccaatatcgaataggaaaaccaaatgtggttacgaacgtgttgtcgcggtgctcagagttacccagtgcttcatgtttcatcctctcaatgccacattttgtgtttcttgaagatctctataaggagttgcagtcgcataacgacttcatcactctaagggagaagatccaggcgaaccccgcagattaccctgatcacgtgttaacacccaattttgttttgcatcgagggcgcatctggctaccttcagactgcaccttcatcaaggctttgctcacgacatatcatcaaacaccaacagggggtcatatgggttttcgaanaaccttgaatcgaatagtggataacttcacat

SEQ ID NO: 159975 - DNA, 416 bp, Glycine max
agcttagaaatggccagtacaattatgtttgtattactatgaaatgcattttacaaattcttgtggggaataagtattaggttggatttaacgatttaattctaaaaaaattgcatgtttaaaataaatttaaattgtgttgcttaattttttatagattggtttattggtctcgtttttaaaatttagagaaattaaaagtgaagaaatttttttttaaaaaaatctcttgattgaaatagaaacgctatgctaattaggtaagcaggtattatttgtaagatttgtcaaataagttctgcttttaaaaaaatgaatggaatgttttaaaagaattcatcatccaacatgtaatataaaaaaagacatcgcattttagatagaccaatatggacacaaaattgtgactacatttt

SEQ ID NO: 159976 - DNA, 341 bp, Glycine max
agataatggtgttgagtttatcatgaaacagtattatcaccgttctggtatcatacaccaaacttcctgaggtgaaacttcataattaaatggaatattggagaaaaaacactaacatttattaaatgttacttaagcccttctttttatgtccaaggtaccaccaatgttttggacttttgctttacaacatgttgttttacttatcaattggttgccaactccattgcttaataatatatctcaatttgaaaaattatatgacattgcatatgacatttcttccttaaaaaatcttggttgcttgtgctacaccaacagtctcactaataacaggaaga

SEQ ID NO: 159977 - DNA, 405 bp, Glycine max
  unsure (1)..(405): unsure at all n locations
agctngaaggcaaactggatgcgtnggtctacttggtaacccagctggccttgaatcaaaaatctgtacctgtcgcaagggtttgtggtttgtgctcctctgctgaccaccatacagacctttgcccttccatgcagcaacctggagcaattgagcagcctgaagcttatgctgcaaatatttacaatagacctcctcaacctcagcagcaaaatcaaccacagcagagcaattatgacctttccagcaacagatacaaccctggatggaggaatcaccctaacctcagatggtccagccctcagcaacaacaacagcagcctgctccttccttccaaaatgttgctggcccaagcagaccatacattccttcaccaatccaacaacaacaacaaccccagaaac

SEQ ID NO: 159978 - DNA, 458 bp, Glycine max
tgaaagagcccgggtagtcaaagagaagttcaagtccatatccatcaaagtctgaagagagtatgatgaactaatggacgttaatatggccaccgctgatgccttggaacgagaaaccaagaaggcccaaaaggaagaacacgtgccagcaaagttttgaggggctttatagggcagcaatagtaagctcaagctccgaagaggtgaaaggaatcatcacgggtcaaaggcatgatcttgaaggacgagctaaaggcttaccttatgtcgaaaagaaatttgtcccaacagttaagcgagactgaagggaatatgtgggccatcatcgatgagtgcaaagagaagctaaatctagcggctactcacgagcaaaggctataggatgagtacgccaagatatcatcagaaagcgaagcaagggagatggtaattgattcatggcacccagatgcaacaat

SEQ ID NO: 159979 - DNA, 414 bp, Glycine max
  unsure (1)..(414): unsure at all n locations
agctntggctgcgcacgagctccgattttttgtttatttatagaagatgacgcattgtaatcgattacaggtattggtaatcgattacaggcccaataagccttctggtaatcgattacaggatgttgtaatcgattacagactgcctgttcaagtgtaatcgattacgttgagtggtaatcgattaccagagcctatcctaggctagtttctaagagaatatctatatttatgctcaaatacatcttatatgactaattttcactactaatacactaaattcaatcattcaattactatatacacaagaaatcataaattctatcataaaaacaagaattcaaacaagatcaaacaaaataatctacaatcaagagggtaaaagtaaatcaatcaatcaatcaactaatcaat

SEQ ID NO: 159980 - DNA, 448 bp, Glycine max
tcaagaatcaagtctcaagaatcaagagaagactcaatcttgataagttaagtactaaaaaagtttctcaaaacattgagtcgcacaagaatctttcacaaaatcttttaccacagagttttaatctttggcaatcgattaccaaaaggtagtaatctattaccagtagccagcattgttttcaaactgatttacaagctgtaatcgattaccataatcatgtaatccattaccaatattttaaaacattagattccaaattttaagagtcacaactagtgataaaacatgttcaaatcattttaaacttgtgtaatcgaatacacaatacttgtaatcgtatactagagtttctaaacgctttgatcttcaaaatgtaaacatgaagagtcccatctgttgatgtgtcatcgattacaccttgatggtaacccattaccattgactg

SEQ ID NO: 159981 - DNA, 416 bp, Glycine max
  unsure (1)..(416): unsure at all n locations
agctntaaaatntaaatntaaatttctaattgctgttataaaacaatttcaacttctggtaatcgattacatattgtgtgtaatcgattacaaccttttaaaatcaaattcgaaatttgtaaaactgtttcataaatcaatttagccactggtaatcgattacatcctctggtaatcaattactagagagaaaatatcatatatttgaaatcacaaaaaaacttttgtaaaatatcctttggtcaaacctgtgcatcatcaattaagaaactcttccttagattctaggaactaagttcatcaattatcttgaatttctgaattcttgacttggatcaaacgtgagaagcgcttatctttgacatcatcaaaacttcatatcatatttgcttctacaggggcggtgcagtatggat

SEQ ID NO: 159982 - DNA, 438 bp, Glycine max
taccacctgaaaaagtgcggatatttatatctattcttctaccaaaataaatataatgcggagaaactattttcataatcaaagtgatctaaagacagtcacacaaaccattggaatgccaaagtatgctgcatcccatacaatgtatagcatctaaactatgatctggaaaaggaagcctccctctacctaaaagactaatcactgctgggaagccccgttcaagcgcctcctgagctaagatcactaagtcattcttcaagcctattgataatgctaaaatctacttgtcaaagagagcagctgccaagctggaatctggcatacaatgtccaggacatcactaatagttttaccccattcaatgccctggaccctctatagaactcaaaatgagtttcataaatgtttcaatatgacagcgatagatcttggaaa

SEQ ID NO: 159983 - DNA, 417 bp, Glycine max
agcttatccttatggcctgactccagacttcacccccagtgccaccccggaagatttaagccaagcccctactttcgaggggcaactcccaccttatgaagactatcccgggcaagacgatggggaaggagatacccatcttggccccctgctccacctctaagatccatccccgcatgaactaccccagtcgaacatagtccgccatatcccggcctcacccacacccgtaaaagaatctgttccctttgcggaagataagggaaagattgaggcgcttgaagagaggttaagagcagtcgagggcctcagtaattacccgttctcggatttagcggatttatgtctcgtgcccaacattgtcatccctcccaagttcaaagtaccagactttgataagtacaaagggacgacatg

SEQ ID NO: 159984 - DNA, 418 bp, Glycine max
tctcaggaggtgagtttagatatgataggggtgtgttgtatctaactctagctcgccaaagaagctttctcatagaagcttctcaagaaagtattttcatgaaagcttctcaaggaagctacctattctataaatagaagtatgtgtaacacttgttgcaactttgatgaatgagagtctcgtgagacacaactcaaaggtcaacttctctctctttttcttccttcaattatgagctcccccctctctctgtctctctctcattcttttgctccattgaagcattctctccaagcttcttatacaaggctcatcttagtggtgaagctcattcttgcatggcttattcctctatggatggcgcctcctctcacctctattcctctgcatcttgtgcatctccatggtggaaaatacc

SEQ ID NO: 159985 - DNA, 430 bp, Glycine max
gcttatcttatgtcagacacccaaatatcagtagttgcaaacaatcacagtttacttggtgccaacttaaagtggaattaaacaaggaatatacttaaagtgcataaaaagttaaataatgctcaagataggcaatcctagcttaaatcttaccctttccttgatgtcacccaaagtcggaaagtacaacttattaaattcctctctgaatgcaaccacaaacctaaataaagtttagaaaccagcaagaataagacaattagaatctgtttgatttgtataaatttaagggacaacaagatacatctactatattatagtattttcacttttaaaggactaaagatgaattattgaccataattgatatattagcatttgtatatcattaactcactcttacttagtctgtctctcaacttgcaattac

SEQ ID NO: 159986 - DNA, 465 bp, Glycine max
  unsure (1)..(465): unsure at all n locations
tacaaatctgttntaagtgcaagcctatcaataaaatttaatctagatcagataagataagatctagatgaaatagtatctagatgagataaaatctagataagatctagatgaaataatatctagatgagatcaaatatggatatgataagataaaatctagatgaaatattatctagatgagataaaatctagataagataagatttggtagaataaaattgtctgctgtcttcaagtccaagcccaattccatattcaagcctaattgcttataattctcctgaaattaaattaaaaacacaaatttagtctagtaggcccaattgataaaactgcataattaaattgatagttaagactaatcagtaattaaaatggtgacaaaaagggttgagaaatagaagaaaatgatgacacatcattcactaagcccgtgtccaaagctactctcatgcattttcg

SEQ ID NO: 159987 - DNA, 443 bp, Glycine max
  unsure (1)..(443): unsure at all n locations
accttaagtcacctgcggcatgcagcttgatccctactctgctagcatgttttttattgtggtcgcggacgcacanccattgtatgttccttgatattactcaaattacagcgtaatgtggttgatgtggccaccattacagtcactgtcactcaaaaaacctggactgtgtggccaaaattcacaagtcacacgaccatttttttaaaatcttgctgctatcctatttggtgtcactacctaagactgctgaaggagaaagaaatttcacttctcacatattttgatcaacagaggtaaaaaattatgatggactccttctaaaatttatctaccaacagtacgaaagggtcatgatatcgctagcttctatttcattctttcattgtaaatgttaacttgaaactattatcatgcgctctcgtgaggaatcggagaagagc

SEQ ID NO: 159988 - DNA, 409 bp, Glycine max
  unsure (1)..(409): unsure at all n locations
tgcgaaggcttactattggaaagtttgttntaccaagaaatgctactcttaaaacaaaaatggcatacaacctccttcaataaacacaaacattgatgtaaatttagagcaaacttatgcacatacttctttacgaacgttcacttgcacaagacattcttctacctaaaaaaatgcacccatgcgccatcaaggcacctttgttacctaaatttatctatgtgtacttccaaggtgtatttgctacctacatcacacgcacttccttggctaaaattacatacatgcatactcaaagcatcttggctaccaaaaattgcacacgtgcacattctggcatttctaatacctatgcatatacaaaccttgtgatgaatcttggctatctacacaataaagtgctacattt

SEQ ID NO: 159989 - DNA, 461 bp, Glycine max
tgtaggattatggggtacctatcacatgtggtactaggtggcggtctggctatggcgcacaacaagttttccacatccacaatgcgcgcataaacccaccatcccctgtggcccaccttcaactgagctcacgtactctcacgtagcccatatcctcgtttctctcaagaccgggtccccatcaatcctcccaagcttccacaacatccaagcaaaacaacattcaaacagcacaagctatcacagccaagcgaaatagagcataggcagaaaactctaccaaaacaccaaccaaatcacagcttttctcacttaaagaccccagtgacaattccttcaatccaattcgttaaccgttggatcgactccaaaattttactggaagtctatagtacataagcctacattttgaccgctgggatctactagcaagaaatcagaactaattctgcactactctt

SEQ ID NO: 159990 - DNA, 422 bp, Glycine max
  unsure (1)..(422): unsure at all n locations
agctttgggtgattgcataccctgatcaaaattctatgtgtcctcctncagcaaaggttaacacaaaaggtgcaccgaagaaaccgatgaacaaaaacccaaggtcaacaaagcgtgatccatcttattgggagtatgtagatgcttttcatactcagcaaaatagcaattcatcaatgaagcgtagtgcatcatcttcttaatagcccaatccaagaaggatcatgcctatgttggatcaatttcagccatttatccatgacttcattgataacattgttgatgtccaaattgatggaaattgtgggtatcggtcggctgtcactttattatgtatgggtgaacactcttggtcgttggtccgcacccatctacttatagaacctggcaaattctcaaaagactgtatctaactctttgat

SEQ ID NO: 159991 - DNA, 439 bp, Glycine max
tgctggaactacttgttatggacttgatggggcctatgcaagttgaaagccttggaagaaagaggtatgcctatgttgttgtggatgatttctccacatttacctgggtcaactttatcaaagagaaatcaaacacctttgaagtattcaaagagttgagtctaagacttccaagagaaaaagactgtgtcatcaagagaattatgagtgaccatggcagagagtatgaaaacggcaagtttactgaattctgcacatctgaaggcatcactcatgagttctctgcagccatcacaccacaacaaaatggcatagttgaaaggaaaaacaggactttgcaagaagctggcatggtcatgcttcatgccaaagaacttccctataatctctgggctgaagccatgaacacagcatgctatattcacaacagagtcacact

SEQ ID NO: 159992 - DNA, 296 bp, Glycine max
ttggtattttgtttaaataactgagtgtgatcacgcaacgattgaggatgaacttgaactatataaatagcctctgtgtaaatcaatttcatattgcacttcatctcattttagagtatgcttttcctggctttctctctttctcccccacaaattatatctatagttctagaaaaaacagttaaagctcgcacgaatacatgtgttaatttggttttttggaaatctgaagataacacttacataataactggtgatataatgtgaccgaactacacaaatttaaaaaaaatgag

SEQ ID NO: 159993 - DNA, 326 bp, Glycine max
ctattgtagccttgcttcatcagtcccactctggaggttgtgatgaatattgatgacgtgctcatgttggcggcttactaagacttgaatttgcctctttttgacccgtggagaatattacctgcctccacttctgaagccagaggcttgttgaagaactcctcttcatttcttcttcatcgatgaactcaaggcccttgctagataacccctccattatggacgagtgaacgctttctcctcaagtcacttgattccgaattcatatccgattttattctccatttgctcaatgaaattcaattacaactcttggttcctttgcc

SEQ ID NO: 159994 - DNA, 265 bp, Glycine max
  unsure (1)..(265): unsure at all n locations
ttgtctaatctgtgatgctcgcctattatggtttacgttctccagaaggaaaaataaaggaaaggaggacaacttangtgttgatgcttctataaatgatgagtttgagagacgaactgtgccaaataggttcacctatccataactaagcaacgcaacctactactttgcagaagaaagaaagcttcgagaacgaggattttgaggtgtttacaaaggcatcattgtacactcccaccttgatgtggccgtgaatatggtttca

SEQ ID NO: 159995 - DNA, 429 bp, Glycine max
  unsure (1)..(429): unsure at all n locations
tgtctaagttgatcacacacacacacacattatttctctctcataaatatatatacatagcatggaattctatgattaaaaacatataactattgaaattaaattcatacatgcacgaatgacacaacacaaagtttcctttgtcagtctgagttgtaatttctcaaggtgtgataactctagcttattttaattattctacatcatatgattataaactctaattattaacaaactaattaaactaaaattctatatttaaactagttatataggcatttacaaaaataccctctactttaaactcttatgacttaattaccccatttctaattctatggaatccagatcaccatttatcaaccttaactatccgcatttaatttcgaactttgcttactttgattactaatnttctttcaagcttct

SEQ ID NO: 159996 - DNA, 283 bp, Glycine max
  unsure (1)..(283): unsure at all n locations
aactgtaggcntgcacaccactatcgctggaaggaatatattattttttgtttttttagccncgcactcggctatgtcttcatgaccattcaatactcactatttctttttttgaatactatgactgaacatgatgaatatatttacttgctcttgggtgtctatggatatgaaccttaaacttaactattttgatgatctatcactagagggttgcacctttatttggatattatgaatgacctttctggattatatgatattatatgaagcattattcttc

SEQ ID NO: 159997 - DNA, 439 bp, Glycine max
atcctctgagtcacctgcggcatgaagcttctatccttagagtgtgcgcccatcttgcgacagtacatcttgagatggtttttgggacaagtcctccctttatacttgtcgaagtccggcactttgaacttcgggggaataacaacatcgggtactaaacaaagatccgtcatgtctgcgaacggatagtccccaaatccttccacggctctcaatctttcgtcgaggagatcaagcttcctcttttcttctgttgccgagggcggtccttccgtggacaaaactattggttgtgtcgcgatgttgggttgaggcaacgtgctgggtgccggcccttctgggatcgggggatataactcgacatcccttctagcatattcttgagggtctttgtgggcctcgtcgggctgttgagaaagttctctttcaggacaggaga

SEQ ID NO: 159998 - DNA, 417 bp, Glycine max
tatcattaaaatatatctaaatgggtgatgatgccatgatctatatctttcaaatgttgtatgattactcgtatgacatgtctacaagtatttgatcgatttctcattttttcttaaaaaccattatattatacaaaattattcttttgatatatttaaactttttatgttcatgttggtaagtgtgtctttttgtttgctttataagaagtgtctggtaatcgattaccttctcatgtaatcgattacaggcagttaggctaagtgtaatcgattacaacattcctataatcgattacatagcgtctatgtctatataattaaaatttcagaaaccacaagaacacaatttctgctgcatctcgattccagaatccctacaacttcaaaacttgatttcttcctcaattctcaacc

SEQ ID NO: 159999 - DNA, 409 bp, Glycine max
  unsure (1)..(409): unsure at all n locations
ctgcagctgcaagctttgctcgatgatgaggattattttgttttcagncgcggaaacataatggaagattggtgtattatacgtatggctgctaccataagtgagtcaagagtgctatattttggatgtgctaaacatctattacagaactgtgtttgacagaaacacatatctctattaaatattaagtgcacatttgcttnccaatttgtatttcctgttttcctaantattctattaatatgttatcccgcaccgggttatntccatggatacgaataactcatgctgaaaaattcatgcataattttggttagtaaaatgaaaggttaccacacgatttttgacctcttgaacccctaatatcttttgagggatggcccacctatattattaaaacttattggaa

SEQ ID NO: 160000 - DNA, 347 bp, Glycine max
tcctgcggacagttcaacgaaacagcagatgatagctttgatttttaatctcagcatgcaaatactgagatgacacttattatcggtcatgatcaacaaaacaatctatttctcattaataagccaaatgttacacttatcttcgatacaaatataatttctgatcagacacttattttgggtaatggaatatactctatattctaacgttcatgtttttctgagatgatcttattccatttgatatgattaaaacgatgttcttagtaattaatattttcatacatttatattatcatacactaattttggttgccagatagtgctagttacaaaaatcatatttc

SEQ ID NO: 160001 - DNA, 310 bp, Glycine max
  unsure (1)..(310): unsure at all n locations
agcttangggcaggtacgagcaggtgcattgtccgtaatcaatcaaccatcatctagtgttcggctcaagacgttaaagaagcgctactaggaggcagcctaataactttagaatttttgctttttattttttttcgtttatttccttaagttatgtttgaatatgcctagtttatttgcaatcctaggaattaaaaaatatatatacaagcacaaacaattggggtatttagatttttgcagagaaattttgaaaaaaaaagtacagggttagctcgcctgngcgagcatatctacacgagaaagctta

SEQ ID NO: 160002 - DNA, 416 bp, Glycine max
  unsure (1)..(416): unsure at all n locations
agctntaattgaggaaaagtatgagaggtgtggtgaggggcacaaaatggaaggagaaaaagagggagagaggttgaactttgaagtgtgtctcacaagtttcacattcatcaaagttatgacaagtgttacacatgcttctatttatagccaggtcactaaccaaaagaaagcttccttgagaagctggagtttagctacagaccccatctaatagctaagctcaccttcttgagaagattccttgagaagctagagcttagctacacacacccctctaatagctaagttcaccaccttgccaaaatacatgataattcttaactacacacacccatctaatagctaaactcacccccatgccaaaatacatgaaaatacataaaagtccatactacanagtctgctcataatgc

SEQ ID NO: 160003 - DNA, 369 bp, Glycine max
  unsure (1)..(369): unsure at all n locations
tcgttgtatattgttattcttttggtggcggaatantgtacctttttgcggggctcttgcaaagattgtaacttttattgaggctcttcgttgtacggaaatatacctctttgttgagatcttgctcaagggataggtttagtgtggtttggtgatgtttttctggctggatccggaattctgttaggtttatctagccctctattttctttcaacaaattcgtgacgtaacctttcttgtggatgacaacacgcatacgttttgaacaccgtgatctgggccccttttctgggtcataatgactaattcattttcttttgaaactatatctaatcatttcacaagagcccttttctcttctttattgt

SEQ ID NO: 160004 - DNA, 448 bp, Glycine max
gtcacctgcggcatgcaagcttgacagattatggactacacgtcatgtgtgtactacgcgtttgtctaggcggatggtgcaaggtttacatatccagaatacagacaatggcagataatatgcagcatcactcttacctcacacaaaattgtgctcacaaactaaacctgctccaacaggctctactcctaaaacaccagcgactcataaatcgactcctgctcacacaatatacactcgaaatggcattcacacatactatggtaattcattcatgaacactgggcagacgcagataactctgagccctacacgaaacaataccagaagattacttactcataacctccaatacaaccatatccataaataagcttaccgacggatagagcataaatctttatcggacgtacctataccataagactatcttacgaccggtgggatc

SEQ ID NO: 160005 - DNA, 303 bp, Glycine max
tattagtggtcggagatggcactccttatattgcggcgctgaagcaatctgatgcttgtactgtaatgctcatatgatcaaagttgaataaatgcacacaccatgttgtctatatatggcctaagagtactcaagattcgtcgatgattcgaatactgactcaaatatcactgagagtttaatctcaagtggctgaccataatccgtagccaaaatgtcactgaccatgattaaaatatatatcgatggttccccttcttgtgtagatcaagccatcttcacttgtgatcattgcgtgcatac

SEQ ID NO: 160006 - DNA, 410 bp, Glycine max
  unsure (1)..(410): unsure at all n locations
agctngataaattntggaacaatggaagtttatgattttttgttgaacgatgaacactcgagaacagatagggctcgatagatgaggtgggttcttaaaaacaagaggaaatttggaaaaggggggaggatgtcttgtatgatttttaaactaagggagtgggcatatatatatatatctatctctctatatctctatatatatatatatatatatatatatacactctagaagctcactcgacactcaaactctctctgctcgtgcccctcatacagacttctttgtcgacattttcctatatttgcgtgctacacctacgtgatgttacactatttatactctccacccggcatcttatcctttccatatatgtaccatccccctcttctctctcctcactcctctaa

SEQ ID NO: 160007 - DNA, 393 bp, Glycine max
  unsure (1)..(393): unsure at all n locations
actgttgagtcacatctggtgatggggaatcgattacaccttaatagtaatcgattaatagcgactcatttcgaaaaataaatntccaaaagtcacaattcttaaagtgacttgtttttgaagattntttccatagtcacaactttntaagtgattagttttcaaaagagtcacaatttttaaaacctgactagttttaaagaaattgccaagagtcacaaactttaacttgagtcatcaaatgattataaatatgtgaccatggcatgaattttaaataaccgttttacaaaactttctaattcatttcacttcatctttggtagagtttnttgtcaatactttttctttcaagaaagatcattgaccaaaaacttgtgctattcttcttct

SEQ ID NO: 160008 - DNA, 382 bp, Glycine max
  unsure (1)..(382): unsure at all n locations
ctaacctttagctagagtctattcataataataacagtaataattatattgactccccaangaaatagaattgtaaccagcttctatgacaatctcaacaaatgtctaagataatgaaaaatacaatgtcctatgtgtgacatcacatgctaccatggacataacaaacgataacattccctcaaagattaattaactttcaaacctgctctcagggtcgaatactattcataagaataatcattatcatgatctaatctgaacacggcgtattaacatgcatgtttatttgttatgcagaacataagtcacatcatagacaacactgactcttctttataaattaacataaataacaattcatctggcactattcgactaa

SEQ ID NO: 160009 - DNA, 436 bp, Glycine max
  unsure (1)..(436): unsure at all n locations
gatctctaagcaccgcggctgcagcttctgttttaatttcagcgtctcatattttctgggctctatctgacatccgagttaaaagttattgtcngttgatttttctaagagcttcccttttcaattacgagcggcgcgatatattacgggacacaatcggacacccgagttataagttattgtcggttgaattttctcagagcttctgttttcaattacgagcgtctcgatatactacgggactcaatcggacatccgagtaaaaagttattgtcgtttgaattttgtcagagcttctgtttctattacgagcgggtcgatatattacgggacacaatcggacatccgagttaaaagttattgtcgcttgaatntactcagagcttctcgtttcaattaccagcgtctccatatattacgggactcaatcggacat

SEQ ID NO: 160010 - DNA, 351 bp, Glycine max
  unsure (1)..(351): unsure at all n locations
ttgagcaagtncaaaccacaataactcttgactcggatgtccgantgttgtcccgcatatatcgagacgctcgcatatgagaattgaatctctcaaaataaactcacgacaattactcttcactcggatgtctgatagactcccgtaatatatcgagacgctccgtattgaaaacagatgctctgagcaaattctaacgacaataactttttactcggatgtccgattgaggcccgtaatatgtccagacactcgtaattgaaaacagaaactctgagcaaattctaacgacaataactttcgactggatgtccgatagagtccccttattatcgagacgctcgtaattga

SEQ ID NO: 160011 - DNA, 424 bp, Glycine max
gagcacctgagctgcagcttgacccaaccgggagaagggaacttaactgttttgaatgacagctatgagaataatcttgcatgaatctctgattttaaaatgaaatgtataaatgaaaacctgatgaatgccgtgatttgtgtacacacaaaccttttgaccaaacatcttaccttgcaaattaactgtattctttgctccctttttaagctgaatgaatttgtcataatttgaaccctggacttaaataattatctcctgataccttgcttagaatctatgagagcatatggttcaaggaaaatttaccccatatttgtgggagtaaagttagttagaatgcaaagaaaaaggtagagcatccacacataccacagataagttgtatttgttttttttttttaaattgcttttcaatatggca

SEQ ID NO: 160012 - DNA, 349 bp, Glycine max
actcagctgagaaagcccaccaggttccaatcccacacagaacaatggtatttaaattcttctggagactcggcaggaagaattctttgttggttatgtgatttgatgttgttccttctatttggcctctctcttatgttatatactatctttctagaactttggctcttttaatggccttctttcttcttgtgacgtttatttgtagcgatgttgacagctctatgggatcatgatgcacgaaatgtacataagcactcttattaaattaatgtagtgagaagcattttgctttgcaaaggcatttttacttccatttgttgattatgtgaattttattcaccccccc

SEQ ID NO: 160013 - DNA, 338 bp, Glycine max
gcaagtggacatcaacgagtcatataaaatcacctatcctatcccttctttgtacattactctcactataccgctaacatacaaaattatcctaacatcttaatacgtaaaccaaaattatcctgtctaattatatcagcccaactactctcagaaataaagattgaccaccatgttcacaccgcttcttgctcatagtgacgaaactaattatactcctcacaagtactcattcccgccactccaggaacacaccacatcatcgcgagtcctcattcaatatatacaaagcaaatacgtgacattgcacactctttcttattcactcttataaaaaa

SEQ ID NO: 160014 - DNA, 242 bp, Glycine max
  unsure (1)..(242): unsure at all n locations
tcagcttgctcgatacacaagggaggatgtttgattttaacccctccaancgagaacgtcccctgagccattatcgcttttttgtatgaatcactaaaccaccactcttttgtccttggcacttccaagtgttccaagcgaatatggaaccctacacgatactgtggaggtcagttactcggtatatatattaggcagactagcctgacatttttgggtttagaaacaatataaaaatggag

SEQ ID NO: 160015 - DNA, 422 bp, Glycine max
agcttgttcagaaacgtgcaattgtgtgttatacacaattcccggtacaccacaacaaaatggtgtatcagaaaggcggaataaaactttaatggatatggttaggagtatgttaatcaattagactttatccgtatccttgtggatgtataccttgaaaactgccatgtagttgttgaacatggttcctagtaaggtagttccaaagacaccttttgaactgtggacaaataggatacctagtataaggcacctgcatgtttggggttgccaggcagaaataaggatttataatccgcaagacagaaaattggatgcaagaacaatcagtggatatttcattggttattcacaaaaattaaaagggtatatgttttattgttataatcatagtatgagaattgtcaaaacgggaaatgcaa

SEQ ID NO: 160016 - DNA, 440 bp, Glycine max
tgcaattgctctatgcacacttaaactataatataacaccctcttatccttctccccttttccctggctcactctcttctcctctccctcttgactgcctgcttgccgtcactggtggatgcaccttataaagtgtgggaagctgggagcaattgtctccacaagtgtttattttttattatttgtatctgatttagacaaaattgcccaccataaaaatttaggtagtcccttataagatattatttataatgaattaaaaatctatcaaataaaataagagaaaatttgatattattcttactactttatcctttataattcttttcaaatattaacaatgaaataatcatagaatatttttaaagtataaaaatgttataaattatttcttgtcccactaaagaagattatggatccaccaccctaattcattccct

SEQ ID NO: 160017 - DNA, 414 bp, Glycine max
agcttatttagacgataactttgtttttttttttaaaaaaaaaagagcggtttagaaaaattctaaatcaaaattcaatcatccctcttgtgatattttcctttacgtaaaccaccactagaaaagttgaacaccgtttcattcaaaaatcaaaatctaaaaaaaatgttgcatactttttgtagttagatttgattttgggatcttattatcaaaaccgaaccaaagtacatattataattgtattaattttatttaatggatgtttgacattatgtaactagttattttaaatttataatgattatagtatgtaatttatggtgtcttatttatatactaagattggaatatgtgatttttgttatgggaattaataataagtattgaattatttattatattccttttttt

SEQ ID NO: 160018 - DNA, 452 bp, Glycine max
  unsure (1)..(452): unsure at all n locations
tcttgatgggcctagatgggcccaaggctgaagaactcccccaaaaactgatcagttcacccccattttgagttattggcttatttacttccgaaacattgcgaaatcttacggatcgcgtggcaattggctctaagcaactcaacatgaccagcaaaaacccgtatgtcgacaaacaattgtccctggacgaaattagggtatgacaataataatgggaataaagtcttaatacttctaaaaggggatgggtgagtcattttattttcttagcttatgatatggatttatattatttgattatttactcatcatntttttatgttacacagcgttggtcctcgcattttattttgtcctgcatagatgtctcattggtagtcatcatttatgactaacttctgtattgaaaagtttcatgaaatctatactatttcccccaacttatagtt

SEQ ID NO: 160019 - DNA, 416 bp, Glycine max
gctgacagacctcggaatctcacactttgttgatgttatcactctcacacaagggcaatgcttgtccatactcgagcgcctgacaaactcatcaccccctacttgtcaaggctaccacctcggacattagtcaatcttcaacactagacaacctctttcgcctgtaagccgactcagagcgtggggggcttatgtaatgtccaaggtctataaaatacatgtggcatcctatgtggcactccgagacacgtgtgaaccctcaatgttagccctaacacaagagcacagacgtccgacccttagcagttgagctccccaaccaacaagttatctctaacctcttaatatttgaatatattgttacctgtttatctcctggcatgtattcaattatctacaagaccacccattatcta

SEQ ID NO: 160020 - DNA, 384 bp, Glycine max
  unsure (1)..(384): unsure at all n locations
taatagggacctcgttgtccacaatgcgcatcataacctcggtgtctntggattttctccgcattcaataacttcttaagatttcactgtatcgatctggcttctgcaggttggagaagtcaacttcatcagcttcaagctggtgcctgctcctcatcatcaccctttgtatatcatgcccttttctcttgcaccagtaatgtgagttcttccactgtcctcttaagctctctgatgtagataatagcatctcctaccactgaaactctatcactcttttgtttccaaaacaaaaagaacattattactccaaccactttgtttggtgtgtgtctgtttacatcgaagaaaatgttatataattattaaacttaaatctacttc

SEQ ID NO: 160021 - DNA, 443 bp, Glycine max
agtcacctgcggcatgcaagcttgtatctttccaaaagggctataatgttgccaatacgataatgactcgggagtcagcatcaaaatgtggtcaatctgaatatcatgaactagcatatgagaaagtttctaaaatcctaaagtgacttaaccaggctttcaatgattttaatcagtcacttaaccatgctttcaatgattttaatcattctcatttgtcatctggctttggtgggtttgtgagactcacgcatgtcaacttatctgattctaactttgaaggggatattgcttcccaaatctctcatctttccaaatcaatgtcacttataagcaatgcatatatcttaatttcaaagtgaatatcctttttctaccaagtagtgcctgaaaaaacataatgcctatatgcgttagaccaatgaaatttgagagaatgaaat

SEQ ID NO: 160022 - DNA, 404 bp, Glycine max
  unsure (1)..(404): unsure at all n locations
agcttcagcanagggatcacatgtcatattgggttaattggcgaagcggttntatggaccttttcaaattgaggaacgcattgggtctgttgcttatcgtctcaggttaccggcagaagctcgcatacaccctgttttccactgttcattattaaaaccattcaaagggtcactggaatccgttccacaagttcactggccgaaacaatttatccagcatcaacccttgatcatgcctttggctatcttagactctcgtcgaactacagctcangggcctctggaggtgttggttcagtgggatggactgtcccgagatgagacatcatgggaaaattgggcgccattgaaggaggattatcaccttgaggacaatgtgtattttcaaggggtggaagatgata

SEQ ID NO: 160023 - DNA, 398 bp, Glycine max
  unsure (1)..(398): unsure at all n locations
tcctcggggccatttcctgcgaaggctaacatnttggatagttaagttaccagngggacactactctctaaacataaatgacatacaaccttctcccataaatacaaacattaatgtaaatttatagcaagcttatgcgcatatttccctatgaacgttcacttgcacaagacatcctattaactaagatatatgcacccatatacaatcaaggtagcttcattacctacattatttacatgtacttccaaggcgtatttgatatctacatcacacacgcctccttggttaataacatacatgcaactcaaagatctgggggtacaaaaattgcacatgctctcatttggttatcaaacctatctttacaacttctgatgaatatgacactatgcaaa

SEQ ID NO: 160024 - DNA, 413 bp, Glycine max
  unsure (1)..(413): unsure at all n locations
agcttccaccaagtggtaatcatagcactttatcttcaagtgngtgctccttaaatctccattaattttttttctttaccttctcttccattgttgtttcttcatttttctccatgtatctcctcacatgtcttgttctaaatgttgttaacatgattctttagaagtttccaccgattaaacttgctatagaaactagatttgattttctatggttcaaatttcttgttcttgttcttgaaccatgaattgtgttgagtttaagttcctttgagttttgtcttgttattttttgtggctgaaacctaaaccataaaattcttacaaaaatattaaagtagaagaacacctctaaaatctagagtgacttgttcacctattgtagttttgtcatagaagtcatgtctagtcat

SEQ ID NO: 160025 - DNA, 318 bp, Glycine max
  unsure (1)..(318): unsure at all n locations
tagtgacatccgtgacttgatcttgtgctaagatgttctcctgagagatccaggagaatcttccagtcatgctttcaattcagcattgaatactgtatgcagggtaaggactacccacaatggtcacaatggtcnacgcatatcatagtcattatggaaacgtctgagagaatttcaaagtgacgagtcttgatggaattgtgactagagaggtcactttatcaatcagtgcaaggctccaaagataaacaagtcgtactatatcaagaagcgcgactatgatgaatctcgaaatgcttcaactgatgaacttgatga

SEQ ID NO: 160026 - DNA, 425 bp, Glycine max
  unsure (1)..(425): unsure at all n locations
gcttcttcttccttctctaagttcttctcttcctctctaagctcaccctcgagctcgcattnttctctctgcgagtntcttaagctcccttagattcacatattcgtcaggaggttccctagccctcgaaagctaggtatcattggtgctttcattgacgcactctgtcgcaagtatggctgaaggaactagatcgaaagctctgtcatcggaaaaattggaggaattgtttgcgaagtttgcagcgacattcgaggcgaagatggagaccctagcggaacgattagcgcatctcgaagcaaattgatataatccacaacaaacacaacctgaggcgacttcgttcccagcatcaggattacacacaacactgcatcggatgaagctcgatgtgccaagattcgacggctccaacgccacagact

SEQ ID NO: 160027 - DNA, 462 bp, Glycine max
  unsure (1)..(462): unsure at all n locations
tctcagcttttatccaggcaattcttggtggtgaagctccttcttccttggcttattcccttgtggatggtgcctcccctctcctcttctcctttgccttctattgcatctccatggtgtaaaatcaccattgaaggacctcattgaagctcaaagatccagcctccatagaagctccacaagtaagcttccatcattcccttgctcctacatattcctcaattgcgatgagaaaatcagacctacgtagttcttttagaactaaacgttgcttaagttgttttgatctttttccgcaagatcgattttaaccgcacaaaagttgtttaaggcattggaccattaaatgatcttttgattcttttgaaaggagagaaacgttaaggcgttggaccattaacgatctcttggggtggtcgacaaaagcgnggctcttgctcctacgtatcctcaattgcgatg

SEQ ID NO: 160028 - DNA, 429 bp, Glycine max
  unsure (1)..(429): unsure at all n locations
agcttaaagtatgcccgagtcattcatccctatgagatgttgttgaagtattggcgatcagaattgccattccttggattatagggttgaaccaagctcatgcttttacaaaaaggttcatcaagtcaagttgaaatatggaagtaaccgtcttgcaaaattggggcaaaagatgaatcgagtcacatcaccgcttcgtctactgccaaacatatttaagattatttatgtccttgttacttccagtttcaccttgacaaagatgtcatggaccatgttgaaaatctaaattgattcaaccccatatcctgcgtaaaaattcgcaatacttcaactgtacatcattcgcatacatccatgcttttcattggttgcattgctcattgcattctttcgttgaaaaataaaatnaaataaaataaaatgaac

SEQ ID NO: 160029 - DNA, 439 bp, Glycine max
tcatccgcagatccctcatttaagactacacccgagttagacagccctcttagggttagactaacttaaactgagttttgtgtgtagatccctcatgtaagactagactcagctcaagtagcttactaaagtttagcctaatttagcctaagcttccacaaatccctcatgtaagactaggtctaaactaaacaacattattgtaacaatataattaaaaccaaaacttaacctacaaatccctcatgtaaggctaagtttcaatcctgcttcaatcaagttctaaggcaataatacatttcctaatgctaaagacacctaattgtgcacacaaatgggtgatcagaccaaaagcatacaaactttaagcattgaagggagcattgaacacagaaaacataatcaattagatattaggtatatacatcagctggtcatt

SEQ ID NO: 160030 - DNA, 405 bp, Glycine max
tcttgccaccctatatttctattcttctctgttttaaaacattactgattattgccatatgtactgtgaaagtcaaacgcctaaaaattgtctcacgtgatatctctatggtaaaataatataatattacaaaattattatattaattataaataaaaaagctaataaaaaaataccggccttaaagtgttcctaatgacagtgatagagccattgtaaacagaatgtaagttctggcccaataatggagcatgtggcaagaagttgaaaatacataaccgatatacgattaatgccacgaaatcatacccgaggagtgtggtacttggataccacaagaatcactgaaactgagcatgttgtatgtggtaccaacataataaaatcaataatttaaattgtcat

SEQ ID NO: 160031 - DNA, 357 bp, Glycine max
  unsure (1)..(357): unsure at all n locations
aactgaggagaaacaaccctacagtcgttattgtgaagaacaccctcaaaggatgtcaacttatatgaaaagctatccttacttaaggaccgaatgaagaagaagtcctgtcccctcgtacatgctctggatgaatcatataaaaggagacatacccgctgcttgactaaaagcctaatggacagacaatgatattgctacaatgaaatttaacacaaaaagctcattatactatgacgtgtgctctatcctagaatgagtacaaaaaagatatgggactcgtcgagtatcaactatgaagggccattatatgctcacgtgagaanaggtgttactctaatgagaaattttagagct

SEQ ID NO: 160032 - DNA, 425 bp, Glycine max
  unsure (1)..(425): unsure at all n locations
agcttcttgagaaaacgttcttgagaatcttgagcttanctacacatacccatctaaaaactaagctcacctccttgagaagcttccttgagaagctagagcttagctacacacacccatctaaaaactaaactcacctctttgacaaaatacatgaaaatacaaaaaaaaaaaaaaaagtccctactacaaagactactcaaaatgccctgaaatacaaggctaaaatcctatactactagaatggccaaaatacaagggccaaaagaaggaaaaacctattctaatatttacaaaaaagagtggatccaaccttgacccatgggctcaaaaatctaccctaaggttcatgagaatcctaggggcatttttagtagatctagcccaatcctcttgtagttttctatccaatacccttgggggga

SEQ ID NO: 160033 - DNA, 444 bp, Glycine max
  unsure (1)..(444): unsure at all n locations
tcaaccagntagtgttcgatctcgaagctgtcaattcactctacgcacccttagtggtccattcttgctttgtatgctttcatcttcatctcgtttactttcggtatccttttcttccattttcaacgagcttcgaccgatcgtttaagccattatctcgcctaataaataataaaatgaatttcaaccaatcatttgtaatctcgtttaatcactgttaaaataaaattcaaccgatcgttcacacagtaaactcggttaatcaaaaaggggtaaataagctccaatcagacattttactttgaaagttcttttgaatgagttaatcaataaccaagtgaaactaatgctaaaatcaactcacaaaccaagctntgtccgcaaaaaggtcatttgaaaccattttaaggtctaaccccttatacggtcttctatgcttttatc

SEQ ID NO: 160034 - DNA, 433 bp, Glycine max
gatcttaagcactgggctgcagcttgatgcaacattggagaggttatttttcaactagatgatgcgctccatgagaggttggatcaaatggagaacagagatcataatgaagaagaaaggaggagaagagggaatgatggtgttcctagacaaaaccgaattgatggtattaaactcaacattcttccctttaaaagaaagaatgatccggaggcctacttggagtgggagatgaaaatagagcatgttttctcatgcaacaactatgaggaggaccaaaaggtgaagcttgccgccatggagttttccgactatgcttttgtgtggtggaacaagctacaaaaagagagatcaagaaatgaagagccaattgttgatacatgggcggagatgaaaaggatcatgaggaagcggtatgtgccggctagttact

SEQ ID NO: 160035 - DNA, 456 bp, Glycine max
tcgttcgtagatccctcatgtatgactaggccaaaactaaacagcattattgtaacaacatagttaaaaccaaaacttaacccgcagatccctcatgtaagattaagttttggtcctacttcaatcaagttctaaggaaacaatagatttcccaatgctaaagtcacctaactgtgcacactagtgggtgatcagaccaaaagcatacaaacatcaagcattgaatgaagcattgaacacagaaaacacaatcaattagatattatgtatttacatcagttgtttattagaaatccccaactagggtgtttagccagccattacaaagaaactctaacaataaatgagcttacaaaacctaggtatctctgcaaaagttgctcctccttactgcttccatggctctttttccaaatatgcattgtggctgttttgtgaatctatgccctgtgcact

SEQ ID NO: 160036 - DNA, 409 bp, Glycine max
  unsure (1)..(409): unsure at all n locations
cgcttgagatcctatatccgtcttccaattatcttttcaccgggtgctctggcgatacaaagatgattggaagtctgcattgggggtattcagatgggccacttcgcgatcgagctttaaacattcgcggagtcgtagtaaacatattgggtagaatgaaggttatggaaaagttgaaggatttgtgcgcgagggcggtcttgtcactatgaatactgntgctaagacaatgagatggtttgtttggacaggatagtgggtagatgctgtgaagatatttgatgacttgcaagctcttgggttggagaaaaacacgaaatccatgaacttgttgcttgctaccctgtgcaaagagaaatttgtggagcaagcctgcaaaattttcttggagttgcagcagcatattgct

SEQ ID NO: 160037 - DNA, 264 bp, Glycine max
tgcctacggagggaatccactgaggatatgcttactatctcgaaagactggacagcgggttctactacttctctgaggcctccacattatgcattaaggatgggcatcttacccagatgttcttctcgcctgatacgatgaccagatgcccttccactaccaatttcaacttttgtgtgtagtgtagaaggaacaatcctcaccgagtggattctacggctcaccaacatgcagcttgttggggggtctatgtccataatttgg

SEQ ID NO: 160038 - DNA, 413 bp, Glycine max
  unsure (1)..(413): unsure at all n locations
gtatccctcagattattcatgtctttttatgccaccagctgtgtcgnaggctcgactccttttgtccttttactgattctgagacttgccgcataacactctcttgctgtcatgtggtcagcctggacgacaataattcttcccatgataagcattctgagtatggtagaagcttgccctatggtggttttccctactggtgtcttgttgccatctgcagccattaatggtggtcaaaggagaagttttcccttgtcccatggtgggcgtcaaattctcttaccaagtttgaaaaaaccctgtcatggtggtgatcttccatgagctcctccacgaaacaaggtggagatacttgccaagaccctctgacgctcaagtttgaacatagagataataggtatataggatatggg

SEQ ID NO: 160039 - DNA, 376 bp, Glycine max
  unsure (1)..(376): unsure at all n locations
ntcaacttggaggtacccatcatgttacctgtgaccaatacctccaggccggggttaggtgctaccaaatactataggtaccacttcgggatcggtcataatacagaacactattgggccttgtaagacaatatanaaaagcttatacaaactggtacttagcccatgttgttaaaatgttggaaaaccacctattaggataaagacttggagaacaccatgaggagtatcataagaatcacgatgtggacaaaagaagagacattgcccatgatcaaggtagactgacacaccaatctctaaggcactattgaatacctcccacaaaacatgaatcagcctagcaaatccgatgtgtatacaacaccattgggaa

SEQ ID NO: 160040 - DNA, 382 bp, Glycine max
ggtcatatcaagaatgctataataaatgttcttaaaccatgatcttggctgcaacatcaaggtttttagaccgattgcgaccacaatcggtagcagttgtcagtgatttaccgcaatgtcaagaattatgacaaaaccgtgtgagtgagaccacaagtaaaaaccttggactatatatataacactagaaatatcaagttcaccacagaaatttttaaacaacgagaatttgatccataaacaaagaagagaaaaagaaagggaaagtttttatttgaagcaaacatccgcttattcatcaagatatttggtacaatattagtattaagtaaaattttaaccctcatttattcattattttataattcttatagacatatta

SEQ ID NO: 160041 - DNA, 395 bp, Glycine max
  unsure (1)..(395): unsure at all n locations
cttgatttgctcttcacatacttgtcctatcaatcttaacaatcctttacagccttgaatctctctgaacttcttcttcttctttgtgcgcaaagctttccaaagtattatggtgttctaaaccttgaaaacttgggctattcacttctttcatctcttctacctttgccgaaaataattcaccaaggactaaccgcctaaattctttttgtgtctctcttctcccttntccaaaagaacaaagaacttaccgcctgaattcttttgtgtctcccttctcccttgtcaaagaattcaaaacgacacagtctgagaattcttttattattcccttacccttatacaaaagtgctcaaaggacagactgcctgagaattcttctcattcatcaaata

SEQ ID NO: 160042 - DNA, 413 bp, Glycine max
  unsure (1)..(413): unsure at all n locations
agcttctcggcattgcaaacttaatacgttatcttggcaccgaaattcctgactctcgaattgttcaaaaaatacttgtaacaattccagaaaaatatgaagccacattgacttccttggagaactcaaaagatctttctactatcaccttggcagagctnttgaccgcacttcaggctccggaacaaagaagactcatgagacaagaaggtactactgaaggggctttggtagctaaatcactggacaaaaaaaagagaggcaagtcaggaagtttcaaccacaaaaatggtagcaaatcctctcatgattnttcatcatgtccttttggtaaaaaaaacaatcatctacagaccaagtgctgatggacgccagatgtgaaatgccataaatgtggacaattatggcatgtg

SEQ ID NO: 160043 - DNA, 374 bp, Glycine max
  unsure (1)..(374): unsure at all n locations
agcttctagccaaatggacttttctttattaattccttngatagccctnttgagccttgtttccctttccttgttttgaagctcactacaagccttaagtgaaagaccatgatatcaccatatccttaaggaattttggagctttggaattgttttgggaataagtgtgggggggtcttttgtttcattggataacttgttttgttggctatacttcatgatgtattatgggccatacttgatgtacattgtatattgcgtaaatgttggacatgctgaatgaaatgttgtttctcaaaggatatagagtaaaagaaaaaaaattcgaataagacaaagacgagcaatacagttgagtgaataagatcttaaat

SEQ ID NO: 160044 - DNA, 403 bp, Glycine max
  unsure (1)..(403): unsure at all n locations
tctatgtatcttattcccctcaatttaatggatnttcaacgtttgagaagtgaaaatgaaaatggggtaaatttggaacaaactctcaccttacacaagtctataaccttaatctaaacttgctcaaactggttttacgcctaaaattccaccgaatcaaaatttgactcctcaacacccaatttaccctagaaatggctcttaccttaactttggtcattcatttttctcctttgcacagcccaagctttcccacagtcctaaatgacatttcaaactaggattaacttcctttaacctccaattaccaccaaatccagatttaacctttcaaactctcaaagcatcactcttttacactcatagcactacattctcactttctaaccctaggttaactcta

SEQ ID NO: 160045 - DNA, 451 bp, Glycine max
  unsure (1)..(451): unsure at all n locations
taaagtatgcccgagtcattcatccctatgagatgttgttgaagtattggcgatcagaattgccattccttggattacggngttgaaccaagctcatgcttttacaaaaaggttcatcaagtcaagttgaaatatggaagtaaccgtcttgcaaaattggggcaaaagatgaatcgagtcacatcactgcttcgtttactgccaaacatatttaggattgtttatgtccttgttacttccagtttcaccttgacaaagatgtcatggaccatgttgaaaatctaaattgattcaaccccatgtcttgcgtaaaaattcgcaatacttcaactgtacatcattcgcatgcatccatgcttttcattggttgcattgctccgtgcattctttccttgaaaaaataaaataaaataaaataaaatgaacttatccaaaagaaaaggaaacatgc

SEQ ID NO: 160046 - DNA, 329 bp, Glycine max
  unsure (1)..(329): unsure at all n locations
tgaaagaagttnggctcattttacttgtttacttttcttcttacacagagttttctgatatgtttgtcccactctatctactatattcagaagctgcttcctgcagatcctgcaaagttgaggcctcttttattctctctctattcccttcatggcagcatttatactttactctgtatttcagttatattttcatttcctgttgaaataaataaaatctatcgtactgcttggggtaatgccacttaccatgtgcccgtttaatttacccccaaaatcattttatgggccatataacatggtttatacagatcttctgccaagattga

SEQ ID NO: 160047 - DNA, 366 bp, Glycine max
  unsure (1)..(366): unsure at all n locations
gaccttaaatctcaagctttgtaagtggctcanaactgaactggtgacacattgttatcttatcccatattattagttttgtcatctgcaacaatttaaccatgtaactcccttgatggatattgcatgttgaattttgtgttgtacgcactggtatagccaacttacaatgtgttgttctacctccgggcagcagtaatgaagctatcccacttgaagaaactgtttaaacaatgtcaccattagaccgtatagcaaatgataaagtttttcagacaaaagtcttgccggtgccaccatatccatatagaaaataaacttctcccgattaagttacaacaacacgcattatgttataaaaaatag

SEQ ID NO: 160048 - DNA, 421 bp, Glycine max
gagatcctagagattctctaaggcttattcttatatccttccctctacaagaaggttagaaccctaatgacgattattctggcaaggaaagcttttactatgtaatttattatttgcattgggttttgatgttgattttgtgatgctcatttgatgaatattgggtgtttaaattgtttttatcattttttggtgttggtgtagattgagggttggatttctttgtttttaaggcaaatcatgatcggcataattttgcaatcttgcttagtgagccaatccctttgatttagaaaatttagaaatttataagactcgcttagtgagcaaaccctactggagaaaaagaagattggaactcctaagtgagacacacaagtttgtcttatctagaaatgctcgctgagctcgtcactttttt

SEQ ID NO: 160049 - DNA, 337 bp, Glycine max
aactaagcttttcagtctggttgtaaaatcagtgatctgtcttattgaagcatttgatcttcacatcacgcaccccttgacaatttgaatcttgtgtcgaatccctggacagtaggatcacagacggattgctcttgtccatgccttaacacgggatcctatttcctggtgagggctaagaccgactatatcactacgatggggtcatatgatccttattgggcaacaccccctttccttcttcaacaatttcctttcctatgcgacatgtgacgtctctaacccatctccatcaatggttttgaattgtgcgccattggactctctacaactgtta

SEQ ID NO: 160050 - DNA, 409 bp, Glycine max
agcttagaggttcggatgagtattatcattatttagtctcagaaatgactaaatgcacaaaccaagctccttctctattgaatcagatgacaagatttagtttagtgcatggcatgaactaaggttgggatttttaccagtagttaagacctaggttgatatggaagttgttaattttctgaataacattaaacaagagaaaattaaacaaaattcattggaagtgcaaataacgaatgatgatatggaggttgagaaggggaagggatataagatgggagagaatgtgaatgaagcaaaaaagggaagttgtcttattatggtgccatagacgagaaagagagactcatgataaaggtttctctaaacttattaataatcttatgcaagagtatctgcttttttttgt

SEQ ID NO: 160051 - DNA, 455 bp, Glycine max
  unsure (1)..(455): unsure at all n locations
ngagacttaatggctttgttcttcccatatgcagtagtcagtagtgcactctcacccatctccagtacaagcctttcttcttcctgaacacacatggtcattaattcattgatagaccatttatctttatgtgtgttgtaggaaatcttaaatggcccatattcatgcggaagggtgttcaaaatgaaatgcactatgaaggactcagacatatcaacctctagtttcttaagttgagctgaaatatctcgcattttcatgatgtactcacgctcacctttcacactggtgagccgaagagaagaaaacttcatgatcaaggtgtttgctaaagtcttatctgaagtgatgaactggtcatcaatggccttaagcaagtctcggaccttttcatgctggtcaacagaaccacgtagtccagccgagattntagtcttaatgaacatcacgctgac

SEQ ID NO: 160052 - DNA, 418 bp, Glycine max
cagcttgatgatgacgacaagaaatcacatgtttgtcatcattaaaaagggggagaatgtgaatgtatcgttacatgaatttgatgatgtcaaaacaagaatcaaacaaggctcatttgtttcaagaatagtacaagattgtttcaacaaaccgagccttgattcaagatttcttcaagatcaagcctctcctcaaaacgaaaggtttcaagtcatcccaggcacatgtaatcgattaccattacatgtcatctattaccaatacatgctatcgattaccaatgggttgaaagtgtgtaatcgattacacatcatatgtaatcgattactagagactctgaacggtgggaatttcaattttaaataagagtcaccattgttcaagaaaacatattgcgcgatcgattacactaatgct

SEQ ID NO: 160053 - DNA, 325 bp, Glycine max
ctagactccttgggaaaacctacagtttcgcttatactttcatatcgacctgtaactaatgatagtggtgcatttgttgacaatatacatcttatttggagaagaaatttttcttatgtcaccgaatttattacaatctattaattttttatattatcgaaaaaaattacatccattcaaatgtttgaaatatagagcttatgtatttataaagagtaatagaagagctatataaataaaaataaacgtcatcaaagataattgaatgtaattaattttccatacactataaaattaatttcgacaatatactttttctgaaagt

SEQ ID NO: 160054 - DNA, 407 bp, Glycine max
agcttcgaaatcgaaaactaaccggtcttttatcgaagaatggatgaagaaaagcgaagaacgttcgcgaaattgatcacagaaatgtcacagaagcgttacggaagcgcctcggccttgattttctccttctttcttcttttcctcactaattttaagtgaaatctgattgccaaaggtgttgaaccccttcccctcagcccccccatgttcatttatagaaaaaatgggggagaaggttgccacccagctcgccctaacgagctggttgcttcatgttgaagtttcctgatgggcctagatgggcccaatgctgaagaacaccccctaaattgatcttttcacccccattttgaagtttgtttgctcattttctttcgaaacgttgcaaaattctactgatcacg

SEQ ID NO: 160055 - DNA, 410 bp, Glycine max
gcattacggaactatgaaactcagctgaagcaactggatgcataggtaacttggaacctactggccttgaccaaaattgacctgccaaggctgggttgtgtcctctgtgacacctacaaccttgcccttcatgcaaaacctgcacaattgacatcccgaatcttatgctgcaataatttacaatagaccttctcaacctcatgcacaaaatctaccacagtagaacaattatgacctctcctgcaacagatacatccctggatggagaaatcaccctaatctctgatggtctagccctcagcaacaacaacagcagcctgctccttccttccaaaacgttgctagcccaagcagaccatacattccttcaccaattcaacaacaacaatagccccaaaacagtcaacagt

SEQ ID NO: 160056 - DNA, 240 bp, Glycine max
agaattcaatatatattttgctccatctatggctgttcttgattatgatccaccgactgagctgctcaagaatactgaatatgctgatcaggcctctcccatggtgaggcatcattaggtgcatactcacgcgctgggaagggatctatagaaagctctccagtaccttgcttcatctgatactggggtgttcctgcatcgaagctgacaagctcatgaggagtgagctaatactcatcc

SEQ ID NO: 160057 - DNA, 220 bp, Glycine max
ctcctgtgccggaggctttttcccgactgaccatgggtgcccaactccaattgtacgctgtcttctggaccttggtttgtcaggttgcgactgcttttttgactcgacattttggacttgacaccactgatttcttgcagctgctttcagtcgtttaaacaactttatctttcgactaagttttctaaacttactgaaacattacctggttacttccctt

SEQ ID NO: 160058 - DNA, 266 bp, Glycine max
  unsure (1)..(266): unsure at all n locations
gctgctatggtggggcacccactttgtgcttattttatattgaagacgcgatacaaaagcatcatgaatatgagnatgcaacactctactcaaagccactccagctttatctctatgtaaagaatccattcctgcttcaacccttccttgagagagacctacctttgctaaagcttgtcatttgtactttatgagaaaaagtgactaccttctacaagacgatgaaacttactaaccaacaggggtgtggatgggaattgtttttt

SEQ ID NO: 160059 - DNA, 307 bp, Glycine max
agcatcttatacaatgctcatcttggttgttaagctccctcctccatggattattccctagtggatggcgccgcctcttacctcttctcctttgtcttccgctgcatctccatggtggaaaatcaccattaaaggacctcattgaagctcaaagatccaacctccataaaacttcacaagccagctttcatcaaaactggtatctttaacgtatgcacaaagaatccctttggcattctttactggtaactctcaaaatcaaccatcatctacttcttctggttaagtacaaagaaaacccctcccc

SEQ ID NO: 160060 - DNA, 422 bp, Glycine max
  unsure (1)..(422): unsure at all n locations
ggatcttaagtcacctgcggctgcagcttcaaatttttgtttcaaatttttattcagaaccaaataaattacaaattacataaaggcacaagctaattgaatgaaaaatcgaacaaaggtgatgataaatgcgtaaatagatacctgtggagattgtgttatagaaatgatctttttcccagctgtcaaaacttgatgccatgaatacatatggttcgcttcaaatatcgaaaataatctcaataattaaaaaaattgagataaatgaacaaaggaacaaccttgcttctagcagagaggactgaactgaatgcctttgcatttttcccagcagacttttcccttacgttntatcccttaactgcttcaggttcatcatcagagctaatgaccatcgcttcaggttcttctttaacattctg

SEQ ID NO: 160061 - DNA, 371 bp, Glycine max
ccttgaaatacctatctacaaaggactgagacgaagctacgcattattatttaaacttatgacggatcgagatgtattgttttacgctacatcatataacacaaaagcatgattaattagagagatatcttcatatgcatcaacttgtttgttataaagacccaatgctttttgcctatagggtcaactttatttatatgcatgcattgtttttaccatataagtagttaatatctatcttaaccatccattatcaatgttattccaacaatgctctatttctgaataaaactctgtctaataagcaagttccctgagtgcgatactctgatgactacattttaatcctaaatactccatgacctggtgcg

SEQ ID NO: 160062 - DNA, 449 bp, Glycine max
cagctccaatcatatgttaatgcgatgaaattcggctgcggtagataccatctcattaattgcgaaagctacatgtgtttatccagttagagactattccttttctttgttctaattaaacacggggagaaaaaaaaagttattgtcttacacgcgtgtttggttaattaaattgagaatatatagactaaaaagtctgcgatccgtatttattcatttcattgaattatgcagaaatattatattgattggcttgggcatattgaatcacaaatgctactcatttcaaacaatatacatgatatttttgtttggtgaaaaccggccattcagattcttaaattgcctgatttgacgattccatataattgaccaatctacaaattatcatcacatcaattattaatgacaaatataattctttttgactcaaataagattattatggg

SEQ ID NO: 160063 - DNA, 181 bp, Glycine max
attataactttggagcctcgagtgaagagcagagagccactcgctaccttgcttcttctcatggcgctccatgaaacgattgcctcagtaccatgattcctcaaaaatggatatcattccatcacatcgcggacgccgaagagataataacgaggccagtatcatcaatcgatccacaatt

SEQ ID NO: 160064 - DNA, 387 bp, Glycine max
  unsure (1)..(387): unsure at all n locations
ttttttttggaccgagctaaaggtggtcttcgtcattggaagtgccgtaaacaagctttgtggttgatttatggatggcctttgtggataactgggtggtgggtaaagaagaagttttgtattgactgaataatgacattggtgggtttggtgggaaactcggccgtataggaatggcagtcacagcatgggtttctccctctttctcaccctcttcatttgccccagtgttctcagtaggcctagtaagatgatcaaattngcctctattcggacccacattgatcctttcactggcgaagaccaaatccgctaagctttgatggtgcgtagcccaccatctttttatagtagagtatcgattatgtgtctaccatcacgatcatc

SEQ ID NO: 160065 - DNA, 417 bp, Glycine max
  unsure (1)..(417): unsure at all n locations
ctgcgaaggcaacatnggaaattattttaccagtgggacactactcttaaagcaaaaatggcatataacctcctcccataaatacaaacatcaatgtaaatttagagcaagctcatgcgcatacttccttacgaacgttctcttgcacaatacattctattaactaagaaaaaatgcacccatatacaatcaaggcagcttcgttacctagattatttacacgtacttccaaggtgtatttgttacttacatcacacacatctccttggctaaattcacatacatgcatactcaaagcattttggggtaccaaaaattgcacatgtgcacatcttggtatttctaatacctatacatacacaaacttcatgatgaatcttgactatcttcacaaaaaggtgctacacttcatccctt

SEQ ID NO: 160066 - DNA, 479 bp, Glycine max
  unsure (1)..(479): unsure at all n locations
tatanaatactcagccttctcttttgtgcaactatctcatcctctgtttcaggtgtattatgaagcttgacaagttcaggtgcaggtgctgttactggtggaggcacttcantttgcttgccagacctcaaggtgatgacacttacatttcttggattctgcacagtttgtgaaggcaatttgtcagaattttgggactgagcttggtttaactaagtagccatctgccctatctgatttgtcagactctgaatgggggctcttgtctcttgctgaaatttcatattctagatggtcatttgtctcactaactcttctaaggaaggttgaggaggagcctcagtttcttggtgtctttgttggtgctgctgctgcattggaggaggaacgtatggcttgcttggaccaacaacatntttggaaaggagggacaggctgttgttgttgtggacgactcgttcatctcagaattggatgat

SEQ ID NO: 160067 - DNA, 455 bp, Glycine max
  unsure (1)..(455): unsure at all n locations
agctntgttcttttataaaatgagaagttcttatctcatcatattatctaaaaaacccttggggtggatccaagtgctccgatcattcatttgcatattcatgttgtggtggcatactcaccgttgtttatttctttaggaatttcatcataactaagaaaacaccaaggcacccctataacactcgatccagaaaaatggataatgaagagggcgtgcaggaacagatgaaggccgatctatcggccttaaaagatcaaatggcttccatctcggaggtcatgttaaaactccagaaaactatagaggataatgccacggcaaccgcctccagtacagttagggaagcggagccggtgctgcagcccgccttatatccggcccgagacagaaacacgacagtgtttggtcgaaggtatagcccgcaagcttatcattatggctcgcctctggac

SEQ ID NO: 160068 - DNA, 435 bp, Glycine max
  unsure (1)..(435): unsure at all n locations
tctcccctatnttcctataaatagggggagaagtgaatgttataaatgttcagccctcctggtaattcgagatcacttgagattagtgaaaaaaatcatttccgtgaagaaaatccaagccgaggcgcttccgtaacgtttccgtgggtgattttgcgaagattttcgaccattcttcaacgttcttctttcgttcttcgttgttcttcggtcttcaaccagtaagttcccgaaataaaacttttcaattcattctgtgtacccttagtggtcctcatttatttcgtgtacttttattttcatttcatttacttttcgcacctccttttgacgtgctttagtcatttacttaagtcattttctcccctaatcaaaaataaaataaatttccaccgatcatttgaattgtaacatccgttaatttctggtaaaatg

SEQ ID NO: 160069 - DNA, 466 bp, Glycine max
  unsure (1)..(466): unsure at all n locations
tactcagctagcgagagttgcngggtttttgatgtgcagaatttgttctagcacccctttgtgcgctgagtccaactntataaaaaagaaattcagattttgaatttcaaacttgggctaagcacgcagttctgctaagtgaacctctttgagaaaccaaacgtctctctggctcgcttagcgctgcggttcactaaacaagagggtcgaaaattgcttaagtgagtgtaacatcagttacactcacatttgcctaaaattttcagaacactgcctgcatcctctctctcaccaaattcgtgcattcttgcattcattctttctgcatcttctacacatcttcagcacacaacaatcccagtaagttcctcattccctttactcctttactttggtgaaccttangggtagaaaaccatagaattagctcttaattttagggtntaatgatatagatagttaaaat

SEQ ID NO: 160070 - DNA, 422 bp, Glycine max
  unsure (1)..(422): unsure at all n locations
tgtacttaaagtggtgcagcgaacgcagcatgtgcagcttgaattgggagaatgataactggtgaatgtgaataacacaaaatggaggaagccaaccaatgcaaaagaagaaaagtacatgaaataataattcaaaggaccaaaaaggaaaagttattaagaaaaaaccgacaatcattttagagtatttttctatttaaagttggaaaagagaatttgtgggaaagttaatccagtttagtcactaaaagtactaacaataaataaatggcttttattattcttctgggttagggtttgccccaacacgagtctaatgggtgatcaacatcaattaagaataatgtanaagaaaacctatactgagctgctacaaggaatgccatctctctatatctctcatttctggatgtcatagatat

SEQ ID NO: 160071 - DNA, 466 bp, Glycine max
ggaccttagatactcagctatctttaagcatacaagtctgagaatattcactcttctctactcgatgcttgtgcatgttgtgcactacatcgttgttgggttgtcattgatgagtgttggttttgattataattttggagcctcgagtgaagagcagagagccactcgctaccttgcttcttctcatggtgctccataaatcgattgcctcaataccatgatacaacagaaatggaaatcattccatttcattggggactttgatggcataattttgtgcaccatcatcattaacgattcacaatttgtgttaggattaaatttatgtgcctttagttgtggatttgtggtataattcttgtatttgattgtcaatgtttgaaatgaaatgttataattgatgtacttttctaaatctaaaaacatattttgcctttggagaattgcttccctgaatcctcttaat

SEQ ID NO: 160072 - DNA, 428 bp, Glycine max
  unsure (1)..(428): unsure at all n locations
cagcttcaaaccaaagcaactcaaaatctttgatctaaaacccctcaatttagtggattttcaaggtttgagaagtgaaaatgagaatggggttaatttggagcaaactctcacctcacacaagtgtatatcatcaatctaaacttgctcaaactggttttacgacaaaaactctaccgaatcaaaatttgactcctcacaacccaatttaccctaaaaatggctcttgccttcactttggtcatttggttttctctcttgcacagcccaagctttctcatatgtcctagatgacatttcaaactanggtttactcactttaaccctcatttaccactgaatcccgttttagccttccaactctcagagcctcactctttttctactcgtaacactacattctgactttctatccctaggtaactcta

SEQ ID NO: 160073 - DNA, 377 bp, Glycine max
  unsure (1)..(377): unsure at all n locations
acactataaaactcagcttctaccaatggacttaccttgaataattcctttgtagctctctttgagccttgtttccctttccttgttttgaagctcactacaagccttaagtgaaaaaccatgatattaccatatccttaaggaattttggagctttggaattgttttgggaataagtgtggggggtttttgtttcattggacaacttgttttgttggctatgcttcatgatgtattttgggccatacttgatgtacattgtatattggttaaatgttggacatgctaaatgaaatgttgtttctcaaaggcttanaaaaaaaaaaaaaaannanganaaanaatagatttttcggtaaattttcggaaagaaaaaa

SEQ ID NO: 160074 - DNA, 332 bp, Glycine max
agcttagcagttggactaagcgcatatccttctcttagcgcagcttcaatgcgcttagcacaaaggagaatctggctgagcatcagcatcaaggccgcacgctaagtgcgcgattagtgagctaagcgttgtaggtgccttcagccaggctaagcatgagactggcgctaagcctaatttcacttacccatgctaagcgcgagggtggtgctaagcgcaacgttgtgaattcagagcctatttaaagcctatcttgtgcagaattagggtaagcaaatgattggcacagattccaaagcacaccattgtgcttatctcgggaaaagagccct

SEQ ID NO: 160075 - DNA, 410 bp, Glycine max
tgcagagttacgtcttgtatcgatttaatcgattaattcttaatcgtaatcgattacacatctttttttgagacaatgattgatttattcataagtctatgctttaatcgattaccgtgtgatataatcgattacttctctttctataagtgtttcaaaagtaaacaataacactttaatcaattactttgagtatctaatcgattacattgttcttgagttgtttctagtgtttggaaaaacactttaattgattaaaaaataatctaattgattacttcatttaattgatcgattaccttgtagatttaatcgattacaggcggttataattgttttctccataaataatcaccttttgtgttctctctaataacacaatattttaagcttcaaaagagctaggatca

SEQ ID NO: 160076 - DNA, 392 bp, Glycine max
  unsure (1)..(392): unsure at all n locations
agctntgagccaaaatcctgactcatcanattccttaccctcggaagcaaaaaaagaatagaagggaaatttccaatcaaagaaaaagagaaggaaaatttccaatgaaagcaaaaaaagaatagaagggaaatttcccatcaaagaaaaaaaagaaggaaaattccccaatcaaagagtgggagaaagcaaaaagaaaagaaaggaaattcccaatcaaagagtgggagaaagcaaaaaggaaagaaagaatattcccaaccaaagaatgggagaaagtaaaaaagggaaggaaagaaagttcttgatcaaagaaactaaaagaaatatgcagagaggtctttggaccggacaatatctgaacaatacataattgtcaccaaatgaacaaa

SEQ ID NO: 160077 - DNA, 467 bp, Glycine max
  unsure (1)..(467): unsure at all n locations
tctgcacaatggactntatataatgagcgtaggaatacttttggaaatagcaatgagcgcaggatcaacaatggctaaaatcactcctagtggaatctgaacatcaaatgagagtaggccttataatcaattaacataggtaataagtgaggttgttatgcatacaggcagaagacaatgaggttgttaagcatagttgtaatatatgtctttaaaatctggtcctagttactttcattttagacaaaactgtacatcatgtatttgcattcaattaatatctactattatcccaaaaaaataaaaacaaaaccttttggcaattcagaaacctagtcacgtaatctaagtccatgggtaggtcaactatttctaaacccattaattataacgataatgaagaattttgcgcatctcataatgtgtctgacatgttatctagtggtgtctcttagatgatgacgaac

SEQ ID NO: 160078 - DNA, 362 bp, Glycine max
  unsure (1)..(362): unsure at all n locations
aaaataggcattccttgatccatatgggctatattgggcttgtaacatggtcagggggtaagaaagctatgatagaaaagaatcaagaggctcaaagagtgtttaagggttatattgagtaagaaccttgagatccttgtttgtacttctatttatttcaatggtttgagctacgctctactccaattgtcttaaacattaatccttattgcactttggtgccttacttgtaaaatatgaaggagttttgtctttttttgcttcacttgccttttggcgaatnttctttatgctctcttatacttctgttgtattttgttcattattgcccaacctatacctttgtangaactcaattgaca

SEQ ID NO: 160079 - DNA, 432 bp, Glycine max
  unsure (1)..(432): unsure at all n locations
tgtaggcactntgaacgcaatattctccattattttctattctccaaatgactatnntggtggtgtaccttgcataataggcacttgaagaatggtattcacatcccttagattgaatatttgattaatcacatccatgtttcaacttccatgtgaagtatccataatatttgttactttgagatttttcatcccattgattataagagtttcaatagtgagattttacttcattctcaactagggttcgttccaaataccaatattagtaccatttcccaactttcatttatatccttcctttatgaccattttagaagagaacatacttcaccatgtaaatgatgggttgtgccttactaaagcttccataaactctccccttaagaaatatttagctttgatgactcttgacagtaaaacatttagcat

SEQ ID NO: 160080 - DNA, 401 bp, Glycine max
agcttcaaaaaagtttatatggcttgtattattcaccgaggcagtggtacaagaagtttaatgagtttatgagcaactcaggattcaacagatgtgacatggaccattgctgctatgttaagaaatatactaatagttatgttatccttgtcgtgtatgttgatgacatgttgattgcaggatctagtatggtagaaattaacaagttgaagcagcagttgacagaaaactttgaaatgaaggatcttggtccagctaaacaaatccttggtatgagaattcttagaaacagatcagaaggaatcttgaagttgtctcaagagaaatatatacacaagttgcttgatacggtttaccttggagattctaagaccaggaatacccctttgtgatctcatttg

SEQ ID NO: 160081 - DNA, 459 bp, Glycine max
  unsure (1)..(459): unsure at all n locations
taattagcttctttgctttctaggaataatcttattgtttatccctcttgtagccatctttactttcaaccatattctaacgataatagttccaaaaacttggtagataaaatagaattttattgtcttggatactaattacttagaaacactcattgaatcactctttgtctctctccaaataggacaggagtgttgcatgaaaaggaatttgcagttttattattgtcttgatggacaacattaatattcaacctattatttgcctctttagactatatgtcaaggctttcaagtaaaatgaaggattgtagtaaaattgtacacaattaaactagggcaagagaaactattatccaacaattaaattatcaacacaaaatgatttatttcccacaaaagaaccaaaccatccnccatttcaagataagacaacaacatttacatcgtgtataatga

SEQ ID NO: 160082 - DNA, 453 bp, Glycine max
cacctgcagctgcagctttaaaaaggtagaggttatgattatttcccctttttatgtaagattgtgatagatttttattgaaaaatatataaagggctagaaggttttcaatattaaacgctgataattttgtattgaaacattattaatcttgtttttctttaaatgtaacttcaaaaatttaaaatcactatcatacaaaactctcttggttatacaaattattcaaaaggaagttttaaaatcatttaactggattttatatcagacaaattgcaaggaataaaaaatgggagtgaattgaattttcaaaaacatgacccaaaaatgttttctaaaccctcggaaagattccttttaaaaaggttagcataattgacttatattctcgggatgcagaaaacatgatcatataattctagtggtcctatatgatgctaatatgataacata

SEQ ID NO: 160083 - DNA, 467 bp, Glycine max
  unsure (1)..(467): unsure at all n locations
ntataagcgcgggtctgggagacaaaggtcaagtggtctttatttctaagatgatgttccgagtacattggatttggtatgaccatgccttcctgatttccagctgggaaattggcgagtggaggaacgccccggcatttacgcaacgagcataatgtaaacctttacggttttaaaagctctatagttgggcctaggctttagagtttttccttttgttaaggctttgtgtcttttgtttttgaatttataatacaaggatctttcttcatctgttcctacgtctctacccgttctcattcatttgcatgtttacttttttttctgaaacggcagatccgatgacgagtcccccgaaggtactaatacctgnggcccgcctatcgacttcgagcaagaaatgagccaaacggaagatgaagganacgaggatgtgggacttcccccagaattagaaagaatggtcg

SEQ ID NO: 160084 - DNA, 451 bp, Glycine max
agcttctataccaccccatttttctccccttttggcaacatcaaaaagccaaagttcgtgggaatcaatacagataaaataatgaagtggacaatgatcaattataagtcataaccaaccaaaatcataaataagtcataaccaaaatataatccaaacagtcataattcaaaaccacatagaatctaaacataaaagactaaagtccaaatactaaaagataaatagagtgctgaaaatgataacttaaatagcatagccaaaatacaaggcttaaaagaaaattagaaactaaactctaagaaggtggaggtggtggtggaaggtcaaagctctgacgaatacaacccacatcttcttcaagctgtgtgagacggatatccatgtcggcaaagcgagtatccagagaatcaaaatgtttgccaacataagtacgaagaaccccgtactc

SEQ ID NO: 160085 - DNA, 449 bp, Glycine max
  unsure (1)..(449): unsure at all n locations
tcctcatgttattgatatcccaaacctcaatcgggatgtcctatatctgtatccatataacccgattatttggtctgagccctggtcgccacttctctagagaatagaatattgatttgccgccatcaatctccgatgatatgatttgttgagctgtatcatcggatagtccaatgagaagaaccatatcgtcacccaaaaatttggtacgaatgttgtaccctaaatcccacgatatacgatcctccatactctccatcgtcattggtgtttttaatttcccaacccaagccccgttgcaccagtactcgccgtgttcgttggttggaatggagatcacgaatgatgatcctacgtctgccgccatacctcctgaagcaccaccctgngccgtcacctctgcgtatgatcgcagtcgtggtgtacggccttctcggcatttgttaacg

SEQ ID NO: 160086 - DNA, 363 bp, Glycine max
aactccttaaaaggtatgaaccctagcagagttgattccactttgctgttagccaaaagcgtgtgcttatgtggttgagtccttgttacttactatcaaatagagcaattctcttatttctttgacgcacattgacggaaaatggaatggaggtggatctgaaaaaagatgttgctaccttgggacgaccaacttcaacgggcgatgatcctgctagtgataccaagtgtgacactttcactgcaacatactggaccagccaaccaactgctttgggtgctcttgtgctcaaggaaactatatcacactctccaataccattacatgagaatttgccccccactctgaagcactcatacccat

SEQ ID NO: 160087 - DNA, 423 bp, Glycine max
gatttcctttgatccggaaacctttcttttctcatgtgcacccaaacccaatctccgggttcgaagacaaccttctttctccctttggtggcttgtttaacatagcttttatttttcctctcaatttgatctttgactctctcatgaagcttcttcacatagtccgcctttgcttgaccttctttatgcttaaaaacagaaacattatgcataagcaaaagatcaagaggagttagtgggttaaaaccataaacaacttcaaaaggagaacaattagtggtgctatgaacagctctattgtaagcaaattcaacatggggtaaacaagcttcccaagtttttaagttcttcctcaaaactgtcctaagcaaagttcccaaagtcctattaacaacttccgtttgcccatcggtttgtgggtga

SEQ ID NO: 160088 - DNA, 409 bp, Glycine max
  unsure (1)..(409): unsure at all n locations
actctcgaagtttgtcctttctcgcgtgctatgctcaaatcactcatatcaggcatgggagaagattcacgagcatttcagccttcacaccaagtctatggcacgacaatacggatcgcgatgcgtgttgtctcactcgaagggaaaacaatggatgagtaccttcacaaaatcaaaggctacgacaagcttgctggcattggagttccggtatggcatgaggagcatgtcgatgctatttttgaaggtctaccttctgattatgcgctagtagtttctatgattgaaagcaagaaatgtacgccatcaattgcaaagattgaggctctactntatggccacgaaattcgtcttgttcggtataatcgagacactcagatgcttgcgtctccatccctgaattacactc

SEQ ID NO: 160089 - DNA, 431 bp, Glycine max
agcttgctacaaccaatatgcggtgtcctttcttgtcactactatctctaacagaaataagaagatttattgggttaaatgcataatgactaatactttatcctcttatagacaaataaacaatttcactactgagcattttatcagcaagaaatcacttcctttttcgatagagcaggtttgtacaacaaagcttttctgtggatggcaattgaggaaatttaaacttgtcttgatttattcttcatcggattcaatagatcctaggagagtgtctctgctaaagagatttcaaacacagtgtggaatgaagtcataaatgtcatcgtctatgtcatatcaaatcatgattcaatttgttatcgtctaccacacatgatgcctcttttaacctttgtatttggttatatctaatcaaaataattaagagt

SEQ ID NO: 160090 - DNA, 386 bp, Glycine max
  unsure (1)..(386): unsure at all n locations
ccttgaaactaagctgtggatatgggtcccatacatgtggactggttggngtgggcgaggtgcagacaattctcccatgcacaatacgtatgacccaccatcccatgtgccacctccactgagctcacgtactcccacgtagcccttatcctcgttcctctcaacgccgggtcccatcaatcctctcaagctcccacaacatccagaaattaacatcccatcatcacaaacttcaaaacccgcaaaacagggcaaggcagaaactctgccaaaacacaactagaatacagcttttacaacataacccgagaacatttctttgtccattcgtaaccgtggatnactcaaaatttactgggagattatacatagtctacatttgccgt

SEQ ID NO: 160091 - DNA, 387 bp, Glycine max
  unsure (1)..(387): unsure at all n locations
gaaactcacctgtgtcataaaatctattntgctataacaggccgtatattatgctattataaggattgattttccctctagagccttctttgctttcttccattaactccaaaatagaaaaaccatgttcaattcctccttatgaacacaaacctcttattattgtgtcaaatgcaacaaagttccatttgatcccatatattttcatatcattaaaaagatcaagaaccttcccattcctacaaagtgcatgaagcanagtgttgtaaaccatagtgtttggggcaacccctctcgacttaataagctacaagagcttaaaaccttcagctatcctattagtgaggcacaaccctttcatcanaattcgaaaagtgtaattaaaat

SEQ ID NO: 160092 - DNA, 182 bp, Glycine max
tcactctaaccctggtcattcttcttcatcaattgaaatttctctcatgttcctgaattatgttgaagcttggtttttactcaagagacttcattcttggatgtacccttctctttcacatggagactacaagagagaaggggggtctctcccatctttgaatcctaaccatgtgatgcatg

SEQ ID NO: 160093 - DNA, 368 bp, Glycine max
  unsure (1)..(368): unsure at all n locations
cttctttgagaagctagattcttatctacccacacccttctattaactaaattaaccttcttgacaataattacggataaaaataacacaacatataatcaaacatcaaacataattattaatatatagatatatatatcagggtgttacaccttttgacagtcctcgtcccaatggacagactggttcttgcgtaagagcttgaatagcggctcacaggtagctgtgagctgcgatatgaatctggcaatgtattttaaatgccctaagaaacctcggacctgcttctcggtacatggttctggcatctcaaggatggcttntacctattcggggtccacctctattcctttctgacttaccatgaa

SEQ ID NO: 160094 - DNA, 442 bp, Glycine max
  unsure (1)..(442): unsure at all n locations
cttgatgccaacattggagaggttaatgaaacactttattattctctccatgagaggttggatcaaatggagaatagagatcataatgaagaagaaagaaggagaagagggaatgatggtgttcctagacaaaaccgaattgatggtattaaactcaacattcctccatttaaaggaaagaatgatccggaggcctacttggagtgggagatgaaaatagagcatgtattctcatgcaacaactatgaggaggacaaaaaggtgaagcttgccgccacggaattttccgactatgcccttgtgtggtggaacaagatacaaaaggagagagcaagaaatgaagagccaatgggttatacatggacggagatgaaaaagatcatgatgaagcgatatgtgccggctagttactcaagggacttganattcaagctccaaaaac

SEQ ID NO: 160095 - DNA, 360 bp, Glycine max
agcttttggttattaaataaaagggtttttctctttttctattattttatttaagcaatgccacatgtctccatttgagtggagcaagaagggcccactttctcttttaattgtgactcatactcagccacaaacagtgagaaaaatctgacctttgaaacgctaaaatcctgcctcggtttgcatgccgtttctctggttctagttcctcgcgtttctctgcgtccgtcggggccagttttcgaaagcaagcaatatatatatcaaaacgctcagaataaaaccccgagcgtggttcagaggttggtttcgttaaattttaagtcgcacgcaaaacgatgattttagactaattaataa

SEQ ID NO: 160096 - DNA, 462 bp, Glycine max
  unsure (1)..(462): unsure at all n locations
actcagctattcgcgtctctgggctccgtgaatccgccaaacttctctaccaaggtcngagcttcgcctacctcgacttcctatccgaccccaaatccctctcaagctcttcagcaaggcaagcactaacaatttcttttttaagcgagctgaatgacgtcgtgtgattcatgtaaccgacctcacctgataggattagtataactctagataaggcgtttacacctcacaaaggtaaggttttaaatacgggtcgcggtcgcattgcggttttgttgcgtttgttggtattgcggcaaatcgcggataaatgccgtcgatgcagttgcaattaataattaaaaaaccttgttgttgccaaatcatggccgcggaccgtttntaaaaaccttgaggagaagtataaaatgatagagataattcccanaacttaaggtacataatagtgatataccaatcgta

SEQ ID NO: 160097 - DNA, 430 bp, Glycine max
  unsure (1)..(430): unsure at all n locations
agcttgttaaagagcacgtcggtgtattctctcgtatataaatatataatttagagctagaaatatcattttgagttattttaatttccaaaaattgtattttatacaagttagtcttcagaattatcgtacaatattagaaaatattacttatgttttgttttcatacttaagagttttattttatgtaaataatttttcaattttcgtatatgaaatgctttatttttattttaaaatatttctattatatgtgtcattatcttaaaggaaacacactcgttgtcaatttaaatntatactagtcaacggcaataataaataaagtgccaactcgtagaacatttttccttgtcctactacagaatgtgcatgattaacaaagaagtgaaattaattgaaaacagtgcatcttacacaatatgttgat

SEQ ID NO: 160098 - DNA, 448 bp, Glycine max
  unsure (1)..(448): unsure at all n locations
taagcagtgatcaaacttgctctgtggaactggctttgtgaacatatcagcaggattgtgcagagtgctgttcttatgaactttgattcttctttttgaccgaatgaagtgatatctaacatctatatgtttggttctatcatgatgaacctgatccttggccaagcatatagcactaaggctgtcacagtagatgttagcatattcttgattaattccgagatcatttatcagacctctcaaccaaattccttcctttgcagcttcagtaagagccatatattcagcctcagtagttgagagggcaacagaaggttgaagtgttgccttccaactcaccaagcagccaccaagggtgtaagcataccctgttaatgaccttctcttgacaagatcaacagccaaatctgcatcagaatagccggtgagacagncatctgagtgagat

SEQ ID NO: 160099 - DNA, 389 bp, Glycine max
  unsure (1)..(389): unsure at all n locations
agcttcagacaacttgtgtaatcgattactattgggtgtaatcgattaaaatagagagttttgccttctgaagaaacttttctaacttggaaattttttcttcttacttactcatgatgatgcatgatgaacaaaagatatgatatgcattaagatgcaacatagaatataacaaccaatacaaatgtcacttaagggagttagagatataaaagacaaaacatcttcaagcttttctccaagctccaagtgttacacatgggtcttgatcaacaatcaatgttacacctaggtcttattgggccttagtcaataaccactatgctcttgctatttacacccctattttctagtacacctacatacncttctttctaccctctcactac

SEQ ID NO: 160100 - DNA, 462 bp, Glycine max
  unsure (1)..(462): unsure at all n locations
tagctatgactntatacatgcagcctatcaatgatatgtgtctgtaatcatttagggactgtgggtgagactttttgggaattaaagccacaaaggaagcattggagcctctaggaaagctttcatgagcatagaactcatccacaaatcttctaaactcaggattcaacacatcccagaattccttaataaaattgaagttaaggccatcaggcccaggacacttatccccttcacaactccacactgcttgtttgatctctttgtcagagaatgggacaatcaactattctctttgcctctgagaaatagatttgaagtgaactccatccaaggtaggtctagaatgcatctgctcagtgaatctattatggaagaagttggcagcttcatttttcactgcatcaggtngcttggatccactcccatatataaatatacctggaatattattataagctc

SEQ ID NO: 160101 - DNA, 416 bp, Glycine max
agcttcaccattgctgatgtggaccttatcttattctcatatgcactagggtcgtggcttatgaattggagcatccggccactgctagaatccatctcatgttccatttggggctattttgccggtacagaggaccccttccaccagctcctttgaaatttccttctttgtcattacttgaggagcaatgtaaatcctaaccccaacttcaagagttcaccattccttcatttcctcatctcaaaaatgggtgagttagcatctctatctctcactgtcacaccgaccaatagtgttcattcattggattatcctccaatagtcagcactgggcctcttcccaagaccaccacttttattgcctttgaggacaaagttgtagacgcgagcttcctgatgatgaatcaagttgattc

SEQ ID NO: 160102 - DNA, 458 bp, Glycine max
  unsure (1)..(458): unsure at all n locations
tcctaaagaagctacagcttagctgcacacttctctcttatagctaagctcacctccttgagatgaggagttagaacttagctacacacccccaataatagctaagctcacccccatgacaaaatacatgaaaatacaaaaaaatttcccactacaaagactactcaaaatgccctgaaatacaaggctaaaactctatacaattagaatggccaaaatacaaggcccaaaagaagaaaaaaaacctattctaatatttacaaagaagaatgggcccaaccttggcccatgggctcaaaaatctaccctgaggttcatgagaaccctagggccttctttagtagctctagcccaatcctcttggattcttctatccaatacccttgtggggtaggattgcatcataccctccaccttggaaaggatntgacctcaaatcctgaggttcttcatactct

SEQ ID NO: 160103 - DNA, 401 bp, Glycine max
  unsure (1)..(401): unsure at all n locations
tanggatggactacttacttgttggtgatgaacaaaagctcatatctttatcaaaaaatgcgaaaaaggatgaccctagggctgcaaattcgtcaatcccgtgggtatggcttttgaaaggggggaaaagaagtttttgaatgtaaaaacgccccccctttcgtcatttttataatttggtgcaggggtggctcgcccaggcgagctaacctgcacttttttttttttttttttttgaggggaacattaaccatgtcccctcccttctcatggattaacattttgcctaacttgaacttacttaggttagaattaggcgttgattacttattttattattacccttttcctttttaaaacaaacaaatagtaaaagaaagctgcaaaatacaaaggatacg

SEQ ID NO: 160104 - DNA, 426 bp, Glycine max
  unsure (1)..(426): unsure at all n locations
gctttcacagttgtcaatggcggtggcctctttctntgccccagtagtactcctccaagcaatgctggatcggactatggtgtcataaagttcaccagagaggatgtggaggcattgctaaatgaaaaagccaagagaaaggacagatttaattataaggctgattaaagtttggaattttaattaaggagtgtgttgcttgttctgatatttggatttgagatcaaattgttcaaggttcatggcttagtgtgttgtatgatttacatcgtacaaggtgtcgcttgaattattgcttgattactcatatattaaattattaacatcattctctatgcntttaggaacgatgtgaaaatatgatggattatataaaaaggcttaaggtttgtatcagatggttccaagaccttgagatgtactact

SEQ ID NO: 160105 - DNA, 457 bp, Glycine max
  unsure (1)..(457): unsure at all n locations
tctatgtgaaatttccattctcttccattgtctgagtctgtttgagccttttcatactcagttgtttctgttcatcctcttttagttttttctcatgttccatatgcttctgttcatccactgaacttcacttagcttttgtctatcatcaatctcttttgatttctggctctctactcgtttatgctccttgcattgtttctcagacacttctttcaagcttcctgattggtcagccttaggtactttttttttcagtttttccatgcgagtggaccattcttgccttctcactcttttcaagctcaaagatttcggcagggacatttgccaataaaaaacaaacttcctccggcagggactcactctcccaaacagagggatgcaacaataagctcttcaattccttcctcttnctccttgatggccaactctngataacatttctttcagcttt

SEQ ID NO: 160106 - DNA, 333 bp, Glycine max
gtgaggacgaaaaacatactgaaaattctgcaaggataaattcccaacattttgatatttataagaacaaaaaatatattttagccttgtttttatcgataaaaaaaaaaagagagaaatgctacatttgagaaaatggtcaaaggagctatcgacccatttccaatttgattctggaaataggtaatgattcttttttgtgaggattctaggataatcgtacgtatgggttaggtttaatatgtttatgtatggaatgtttctttagtctaacttattgtgatgaaaacaattatggtgtgaattagcattcaggatgcacataaacttgca

SEQ ID NO: 160107 - DNA, 469 bp, Glycine max
  unsure (1)..(469): unsure at all n locations
tntacggcaggtaaattcataactaattgatacacagcttcctctgtaccacggntcaaggcagatcatttgctttactttactttactttacttcgtaccccattgcccagaggctcttcgctatgcgaaggtatgggggagggatattgtacgcaaccttacccttgcatatgcaaagaggctgtttccagattcgaacccatgatcaacaagtcaccaaggcacaactttaccgctgcaccagggctcgccctcaaggcagatcatttgcatctgataaaaattgagtaactccatgttctgtgaagttttaaataactgaacaagataatttgattatgtaactgctgattaaactatatgcatgtattttgagaaaggaaaaaatctgtatatctatgacagccgtgtgtggaacaaattgaaagacaatgaagtgatagaaagtatcattatctagcctatat

SEQ ID NO: 160108 - DNA, 388 bp, Glycine max
  unsure (1)..(388): unsure at all n locations
atcacaaggaggagcatgataatgagcatgaagagaaagagaataagagccaggtgatgaaatgggcattgccagggttgcaatttcaacaacatactaaggcacttgaagcaagtactgaagatgcttccggttctggttcttcttctttttgttgtacttctgatttgggccaagggatttcagtttcttcgtcttgggattttagccatgcaaggtttggcttttggctctattatgattagattaaggacaaagcttagatgtagttccttaggtgcttttggtgcacagtattgtgattagattaaggataaaacttctccaatcaaaattagagttntacttcagtaatcctctctgtgttaaaggtcaacattgattcttg

SEQ ID NO: 160109 - DNA, 450 bp, Glycine max
  unsure (1)..(450): unsure at all n locations
ccttgaatactcagcttgtcagtgagtgaaatggttaccagggcactttctttgttttattcgtccggatgccttaagaccaagaccggatatgtaatctaatatcctttcttcttttcatttgatatatatagncttgtatgacattgtattcaagttaagagtatctcttagtactttaattcttaaatatgtttttcttataaaaaaaatcacgaaaactcattaagatgtaaatatttctttttatatatttaaagaaataccatagtcaatatcaaaactgatgcaaaacagataaaaaacattgctccaaactagtatatcattcttggattccaaggcacatctcaattacacagcctactctgagcattatttcactttnttctgcaattaacctcacagtgactntacaaaatctagttaactaacattagttaatggagt

SEQ ID NO: 160110 - DNA, 425 bp, Glycine max
  unsure (1)..(425): unsure at all n locations
agccttagctaaaaaatcagagcatactgtgtcttatctgcagactaaaataaaggagtctgagctcaaagtggaaaaagagaaacgaaaaaacaaggagcttgaggaggagctcttaatgctaaaaaagaaagtcatagagaagcacgagaaggggttctttaaggcctttaggcaagctagattctttaataatggtttcgaattaggtctttttgacctgtttaaggatgtgaaggatgatgaattgcttgacgaggaagacattgctatcggggaggatgatgtccaagaataacactatgagccatatgaaaggttgngctctctatgggtcttctttactatgacggcgtatacccgatcgaccttcgtactttgacaataatgttcttctataatgaacttccttttttaaatgtgct

SEQ ID NO: 160111 - DNA, 481 bp, Glycine max
  unsure (1)..(481): unsure at all n locations
ntgttgattagtccaagtatagtagttcgcacgatcattatctaagaaatgaccactgttgataagtgcccagttcgttccaaccttatgaaatctagttggtccaggctcactcgaatcatcatcatacatcttatttccatcagaagttacaagctttccatcacaattaatatagagagaatacaaagctaggacaagtagaatttggttagaaactacttaaagaattaatcattgttataaatcatatttgaaaattatactacactaagatttttgtttctaacattctaatagaactagattagaaaagatagagagaatgaaaaaacttattaattacagaaccttatattcccaatagataccaatgcaatatttcttctaggcaagggcagaaagaatcaagtgataactaggtgtcaagagacctcaactctccacaacctccaataggttgtgtctctctaagatgtta

SEQ ID NO: 160112 - DNA, 417 bp, Glycine max
  unsure (1)..(417): unsure at all n locations
agcttgattgcatgaccgatttgaattcttatttctatgtatgtccattattgataatctctaattcgtgtagttgctgtgaggaaggagattcaagacgaaactgattgagagactggacgaaccaaacaaatttctactgttcccattcatcttagtatatactctcccaatggtgcgtttgaatttcgtttttctatattatcgccctacattcttatcttagatctgtcaagaacaatgcttagtaacatctgtttgtttgacttcaggtgacctcttggacttttgcagttgttaactcgacactcgttgatctttctgtgcttacgaaagtagctgttggtaagcatctaattgacatgtctttgttgtccgtggctacagacggcgagagttcttannaatttatgatgt

SEQ ID NO: 160113 - DNA, 477 bp, Glycine max
  unsure (1)..(477): unsure at all n locations
ggaccttaaaactcagcttgtgtnaaggcataacgtcactaccaagactttttttacccattcctgttattactacccgcttttttggatccttttctctctttggtgctccaacagttggggaagccatggccttgattgttctgcatcttggagctgctgcttcaatccacaataaagtataacataaaaatgcattctagtttacgtcctcctatttacggttacccatggaatattgggatttgactcatctaaagtaaacaattccctttagaagctagaattagtaatcactgtcaacattgatttttaatgttatgtttacatacataacataacaaatcataaatacgttagaactccaactgttagattggtaataggatgtagaatagctcanattcaaaataggagaaatagacataananacaaaaaggaatgcaccgcttaaacagtctggttaacatgatagt

SEQ ID NO: 160114 - DNA, 429 bp, Glycine max
  unsure (1)..(429): unsure at all n locations
agcttgaagaaatattatgaagaagttttttcttttacatgcgcaactcccttgagtggcatttgtattggttgtttcatcttaatacaattgatatttgggttgcattgtgcatcatcatagtgtgtataaagaaaagtttctaagttagaaaaatttcttcaaaggaaaaaactctctgttttaatcgactacagcttcattgtaatcgattacaataagctgtctgaagcttttagagttgagtcttgtatgagttcaatcaattaccgatatctcatattcgattacactgttgtttgagacaatgactgatttatttaggagtctgctttaatggattaccaagtgtattaatcaattacttctctctcgttctagtgttcaaaggtgaacaagaacactntaattgattatgtagagcatcta

SEQ ID NO: 160115 - DNA, 461 bp, Glycine max
  unsure (1)..(461): unsure at all n locations
tctagtttctatttctagaccaaaatccaattattatcttctatgtcattaataagttgaccattttttgaccagagaattttctatgaattatccttatcctttgtagactttaacttaaaaacttaagagtttaaccatgcctaggtatcctatggtaacatctcatttttttaccatttctatagtttaaaaacactatctaattgcataacaaaataataatactgtctaccacacacacatggaaaattgggatgttacaagcttcgacaagtcaatcacttgcaacattctaaaattccaacctaactttcctcanaatcttgaatttgtcatcaagtacatgtaattccagtttaactntaataagtacatacaaaatttattcataaattcattaatcaatacttaaattaaccacaatccanaaatgctaaatcaagaatagatccaaatta

SEQ ID NO: 160116 - DNA, 266 bp, Glycine max
  unsure (1)..(266): unsure at all n locations
gaaaccttatattaaagccccnggccggcgccatcagacaaatggaagagatgagctctaacacctacaacaacccacgggacaagaggaataaaacaaggcgccaacaggggggaacaagaacccaaaccaaacgggaaagcacacgcaacctctagcaccgaagataaagacactcgggagagctcaagctcaagtccccaataccatgcctccactccgaacgcgtgacaaatgtgggattgtgcacaggccatgagaacgca

SEQ ID NO: 160117 - DNA, 463 bp, Glycine max
  unsure (1)..(463): unsure at all n locations
actaagcttaaatattggccgatgcaactgtgagccaccaccnattaattctagtcacagttgaagaactgcgactcgagagtggtggtagctgtagttgagccatgaaagaatgtgtatgtgagtgtggataaagaacgtggactaaagtgggaaaaaaaaattcattaagaatcaatgaaggaaggttgaaggttacttatggggatccattttcatcctattatgtggctatcatatttatattccttgttagtactattggacctcgtctccgatgggtccattgtttcttcttcttttcttaaatcttgttttttcggattatcatatactcctactaaaaaggaaaaacatatatgaagttatgagaaaattaaatagaagcaagattattgtgttatgtacgatttatatatggctaaaatcggccgcttgttttatggtgatagaaacacaatat

SEQ ID NO: 160118 - DNA, 428 bp, Glycine max
  unsure (1)..(428): unsure at all n locations
agcttgagcttagctacacatacctctcttattgctaagctcacctccttgagatgagaagctagagcttatctacacaccccctataatagctaagctcacccccatgaccaaaaacatgaaaatacaaaaaaaaagtccttactacaaagactactcaaaatgccccgaaatacaaggctaaaaccctatactactagaatggccaaaatacaaggcccagacgaaggaaatacctattctaatatttataaagataagcgggctcatacttagcccatgggatcgaaatctaccctaaggctcatgagaaacctagggccttcccttggatctctagccaatctacttggagtcttctacccaatgcccttgcggggtaggatngcatcaagaatatgtgtgaactttgatgaatctccatcata

SEQ ID NO: 160119 - DNA, 483 bp, Glycine max
tgcatgatttacatctccctctgtctcaagcaaattcttcttgatatcatcaaaagcttcatgatttacattctccccctttctgatgatgacaaccacctgtaggttaggagcaacaacaaagaaaatatctatttgcatatagtttactcccccttggttttacaatgattgcttatatgagacaattgaagatttcatatttttcatatataaaaagttgtctcataaaaacaatagataatttttcttactattttatcttttatctttctctccccctttgtcaacatcaaaaacaaatcatgaatagaaaggagaaagatgttaccacttgttgcaatgtatgagaatcaagtgataccaaaaggcattaaaacaatcattcaatattaatcaagcaaaaacaagtacaataacacatcaatcaaacacaatcaaacacaatcaatcatcagatatttcagatcaaattaattaaat

SEQ ID NO: 160120 - DNA, 364 bp, Glycine max
attttccaccatggagatttagcgggaaacaaaagagaagaaggtagaggtggcaccattcactaaggaataaaccatggaagaaagagcttcaccaccaagatgagccttggataagaagcttggagaggatgcttcaatggaggaatagatagagggagagaaagaaagaggggggagcacgaaattgaaggaagaaaaagggagagaagttgaacttttgagtgtgtctcacaagaacctcattcattaaaggttcaacaagggttactcatgcttctatttatagactaggtaacttccttgagaagctttcttagaaaacttccttgagaagctttttgagaaactttcttgagagcta

SEQ ID NO: 160121 - DNA, 454 bp, Glycine max
  unsure (1)..(454): unsure at all n locations
tggttcgaggtacttacccattgaagatcgtttatcgatgaagaacgaatgaagaacgtcgaagaacggttgaaacctttgcgagattcctcacggaaaacgttacggaaacgtttcggaagcgcctcggcttagattttcttcacggaaacaatttttccaagcaaattccaaagagagagaagtgcctgaggggctgggatccattccttcttcatttcctcccctatttatagcaaaataggggaggtggttgccgcccagctcgcccaggcgagcagggttgcttcctccagaagcaaccgccttctggaggaatcttctggagggcccaaatgggcctgggtgctatttgcacccccatttttactaagtacaccccctctgctggttttggtgttcttttttcgtaagttacgganactacgaatntcgaacgatacttgtttctttc

SEQ ID NO: 160122 - DNA, 413 bp, Glycine max
agcttgtaggttacagtggtaatgattgttcgggctagagatgaaggtgatccaaaaagtactagtagatttgtgtttttcatggggaacacaaccttcgttaggatgtaaaaaagtagtcgatagtcactctttcgacttgtgaggtagaatatgtaacaactacttcatgtgtttgccaagcagtctgtctcaagaattttttaaaaaagttgggcatgtcacgagaagagttaaccaagatctttgtggataataagtcagtcattgctctagcaaaaaatccagtgtttcatgatcgaataaaacatattgatacccattcccactacataagggagtgcatagcaagaaaggatatacatgtagaatatgtgaagtctcaagaccaagtagctgacatcttcacaaag

SEQ ID NO: 160123 - DNA, 462 bp, Glycine max
  unsure (1)..(462): unsure at all n locations
ntgatgtgttctagaagttggttatggaatttatagaatgctggtaaaattttgaatgcttatgtgatactttatgaattgtttatatgtttaaaacttataacttgttatttattatgttataattattatttataggctctagattaattgaagaatcaacttttactgatgagattgaatccgatgatgaaggtatattcacttttagttgctctaaattttttttgatatcattatacatatctaaattttcaaattttttaaaatatagatggatctttggtcagtagcatcactcaatgcttgcaagattagtagacactattggtgatcggtaaagtaataactatacttatttactaatgcgatgtatgatgttaagatgtgaaacatctaaaatatgatgtgtgattntataaataccaggttacgcgttgaagaagaaatgtcgatgacatt

SEQ ID NO: 160124 - DNA, 451 bp, Glycine max
actgagctgcagctctcaggaagttgttaagagagtcttttattgtagctacctagtctataagcctcgctaagtgcaccttcggggtcaagtcatggaaattactgggtttcatcgtaagccaaaaagggatagaggtggatcctgaaaaggtgaaagccatccttgaaatgccagaaccgcgtaccgagatgcacgtcccgggtttcctggggcgattcaactacattgccagattcatatcacagctcaccgctatctgtgagccattgttcaagctcttacgcataaacaaatccatctgctggaacgaagactgtcaagaggcatttggaagatcaaacagtgcctcatgaaccctcccgtgcttatgcctacggtgcaccgaagacctctcatattgtatatgacgattttggacgattctatggggtgtatgcttgagcaacat

SEQ ID NO: 160125 - DNA, 478 bp, Glycine max
  unsure (1)..(478): unsure at all n locations
ccttaaatactacgctaacatcgatnntgcaaaaatcgatgttggtcgaaatatctgtttttactaaaaactgatgttgggttttggatttttttaatatgttgtctattttttgaattatcccaaattaacctataaatgtaaaatcagaaccattttcagcctgttttcaaatagattttagcaaaaattccataaaaattgaatatttactatgaattaaaagaatatttaatatccatacgttacatgaattgtgaaaaatgtaaattaaccaaattacaattccaaaattgcttaaacactaattgctttatttttaactttcaaatagtagcttgcccgctggatgcaaaacactttcaatctctctgattccaatagtctagcatcattgaaatactgcatgatatagtaaaaacataagtttataatatataataccgattataacaaaatgaaatacgtttaaattaaa

SEQ ID NO: 160126 - DNA, 461 bp, Glycine max
aaaactggctatgctcgagagctgctcttgcactcggcgcttttttatgtgttcgccaaatggccaatagacacccttcctgcatattcttgcagaactctggtgttaccaacaccacatggtgctatctcattgacacacgcaatgcctgctacatacgggactgctcttacgagaagcttatccactacctttggagattctgcctcaacagactccccttcctactcaatgcattcatactatcaggaatgcgggtgacgagcatgcccattcccgagctcaagctgaacaaatgctctcgctcacgagacatctattgccctcctgggcctactaactgatccaacatcatcttgactctctatattatacacaaactctatctacttcacttcagacccagcagacagcatctgcctgaccctctccgccactatctctcttggatacacacactc

SEQ ID NO: 160127 - DNA, 439 bp, Glycine max
  unsure (1)..(439): unsure at all n locations
tgcaagctttgcatcctagagaaaccatgatttattgtttccaaacctcattgcaagcctagtaaagtcctttggattcagtttgtgtgttcttgactgtatggcatgagatgaattgcaaagattgagacttatgttggttgttgattgatggataacctaaacacttgtgcttgagtgaaacagtgaccatgaggctttgggtgatgatccttccttgatatttgtcattcttactagcttatttcagctatgtttcttaataatcatgttcatatcttttaaaagctgcatgtcttgtgagaagctatgattgaagcattgtatgccattcatttcatgcgattgaattctttggagcacacaccttgtgaataaccattgtgattttgtcattggaggacaagtgatatgttctttctttgcttgangacaaaca

SEQ ID NO: 160128 - DNA, 472 bp, Glycine max
ttacgcaccttagaaactaagctttctttacaatcagtctgtctagtgactaaccattctattataagttcacactcttgttctttctttgttcaacatgcacatttgctcaaatttatgaaaggaaacacacatctcatcataagcatgcattcaatttaaaacaaggcatacaaccattttcacaaaataaataaactacttcactgccataccatcaaaagttaagttaaattgttcgcgatgcttcaagatgagcaagtatactactcatgcacaagactaacaaaaagtaactaatgtactaacatcaaagttatactaataattcaaaaagcacaaaaaataatcaacaggaatttaaaagtcctgtgattggtcttgggtgtcctgtgtctaaacctcctcctcatcagtcaaatgaagtacaagagtagatacaagagaggcgttctgagactggactggtgtg

SEQ ID NO: 160129 - DNA, 460 bp, Glycine max
  unsure (1)..(460): unsure at all n locations
ttaagtcaccgccgctgcagcttgcaactgattattctaacacttttttgtataataagatacttttcatgactaaaaatctcaattcctattttcttaatttcatatagcagccgaatatgcatgatgtgaccatatccagattttggattcacgaaaaaatcccaggcagggaccaagggggatttaaacgtccttcagggacccataataactaagcaaaagtcacttatttntgcaacatgatgagcggacacatttcaagtatatgtaattcatatccatatattgcacaattcatttcccaaatcctgtaacaaattaactatacgtgttttcttttctttggacagcattcgaacaatcattatatattatccatcagagaaacactttgtaaatagttactgtgggggtcccttcccttcttcaattccttaagtactatgtaaccaacttt

SEQ ID NO: 160130 - DNA, 439 bp, Glycine max
tttatattatctagctatcatattgaagaatctatcatcctaagtaaacaaaatgtaaaagaaaaagagaaaataagattttagttcatgatgcttgataaactacttttttaccttgtttattcatgagttttctagccataatcatgcatttattttttgtatattttattggcaaaactaacatttgagtgctagtttgtgcaacacaagtactcaggagccaaagaggggaaaaaattaaaaaataacacatgctggctgaaaataagtcaccgaccacgagcacactggcctaaccatgacacaacattgatttcctacgaagtttttgaggatggccatactcccttcatcacaacccaacgtgaaatctttgagttttaccacaaccatggcgtgtacactattagtcacttaggcggatcttataaatagt

SEQ ID NO: 160131 - DNA, 448 bp, Glycine max
  unsure (1)..(448): unsure at all n locations
agctttananaaggtaagaggctattatttttttccctttntatgtaagagtgtgatagaattttattgaaaaatatataaagggctagaaggttttcaatattaaacgctgataattttgtattgaaacattattaatcttgtttttctttaaatgtaacttcaaaaatttaaaatcactatcatacaaaactctcttggttatacaaattattcaaaaggaagttctaaaatcatttaactggattttatatcagacaaattgcaaggaataaaaaatgggagtgaattgaattttcaaaaacatgacccanagagtttttctaaaccctcggaaagatntccttttaaaaaggttagcataattgacttagattctcgggatgcagaacacatgatcatataattctagttgtcctatatgatgctaatatgataacatagagga

SEQ ID NO: 160132 - DNA, 452 bp, Glycine max
ggaccataatactcagctataaacctaaacatatcattctcttttttatgtcagcttctaggagagtgtagagcagcacaacttcttctccttctcgctcttgagggctggtctaaaaaccttgaagcctgttggtaagcaagttaacccttcactctagccttgttcattcttcttcatcacttgaattatctctcatgttcttgagttttgatgaagcttgatctctactcaagagacttcattcttggctgtacctttctctatcacatggagactacaagaggtaaggggggtctctccaatctttgaatcctaaccatgtgatgcatggaaacttagcttcaaacatgtagtagcggtgtactcgaagctctcgcgctagctgccattactaggaactatatgctaggctatctttttcttgatatgatgatgccaaacatgagttc

SEQ ID NO: 160133 - DNA, 442 bp, Glycine max
  unsure (1)..(442): unsure at all n locations
agcttatcatgaaaggtatcatctacccctatgattgttgntattgctctaaccattttgaaatgattgtgataaagttgcaacttgcccgtctaatgatcctttacatgggattggaggtcctatggcaaggtcaaagactaagaggatgaagcaagcattgcaaggcctaattctaaagatcaaagagaaagaagaccaatgtgaactaagggttgcacccaattgggtcactttcctacaaattgatgaagatgctttgaggccaacttgaagaatcactttgggaagcccaatttataagaaaagaagcattcatgggttgagttgatcaattntggtggactactcaatatgngttgatcaaataataactaagtcccaagtctgtcactttatttgtaatnttcataactatnntttgggctgaatttctggtgac

SEQ ID NO: 160134 - DNA, 437 bp, Glycine max
  unsure (1)..(437): unsure at all n locations
agcttcatgcaattaatacagaacctcattcttaatgtcacatcctatcagagcattatgttctagcgtcctctaacatgaggttctccataattatccaccaaaccatttgctcccacgaacacaaagttcgagatcattataggatccaaacacaaatagcacatagggagtgagttatcacattcctaaataatagagagaaacgagacaacatagatatacatattatataaatgaaatataacttactttaacatagctaatgtcattccaccacttatcgcataacatcacatctcaatactatacgtctcatacattttcacaccattcacgtactcaaggatcaaaacacaatatcactcaaccaatcaatatcgatcaatacacaagcgttatgcaacaaatatactaagactcaatnctatatgtaa

SEQ ID NO: 160135 - DNA, 457 bp, Glycine max
gttcgcagagcttacagtaaaatctgggacttagctatggtagaagtcccaacacaggccattgcctgccttgcccagtattacgatcagccgctggggtgcttcacctttggggacttccagctatcacctatggtagaagaatttgaagagatcctaggatgccctctagggggaaggaaatcatacctcttctcagggttctatccctcattagctagaattctcaagatagtccaaatctccgcacacgaattataccacacgaagcaagtcaaaaattggatggctggaataccgagaaaatatctggaggcaaaagcaagaatcttggcacgtaaaggcgagtgggccccgttcatagatattctcgcactgttgatcttcggatgagtcctctttccgaatgtggatgggttggtggacctatcaacgatcgacgctttcttgccttcat

SEQ ID NO: 160136 - DNA, 461 bp, Glycine max
  unsure (1)..(461): unsure at all n locations
acccggatcttaagtcacctgcggctgcagctanacttgaacccagacactttatttctatcatgtcgaggttgggtaaagggtatgcatctttgggacacaccctagtcaaatcagattagcctgtgcatatttgatgatggattggcaagtgcaccaatttgtcccaagtagtaaagttaaaatggaagttcgagtatcgtatccatatggactttgtttgtacttaagtagatgaatatttaattaataaaaagaattggaaaaggtagtacaacataataaattaaatcgctgaaaattaaatccaacaagaaaaagaattaaacatgaatcttaattaattgattaatgacagaaaagatgagaaaatcctataatattgtagaagaaaatttacaagatgagaatgttgggaacttagcctaccagagctactctttgatgtaatggtaatgatt

SEQ ID NO: 160137 - DNA, 404 bp, Glycine max
ctaagctctaaagtcctggtttttgtaaaatatttttcagtctttgctacttattttattatgtgggactatggataataaagactggtttgatgaggtattagtgttttaaaataggtggtctcgcacatcactgatgctattaaagattggattgagggtgttgtgattcccgtggatggaaaggacggccctgcatatgtttgtgtgattgaactgggaggcactgagggtaagaaacaaaattttattaatatgcttgttcctaactcaatatattattttatttgtattataatttaaattaaaataataaatgtaaaaacataattctattactatgcttgttcctaacttcgtaatttaaatatactctgtagacttgaaaacataatattattact

SEQ ID NO: 160138 - DNA, 386 bp, Glycine max
  unsure (1)..(386): unsure at all n locations
agcttagactaagttcagcctaccattcttgattgatggccaaactgaacggaccattcagtcattggaggaccttttgagggtgtgtgtcttaaagcataaaggaagttgggagaattttcttacattgatagagttcacttataacaacagttttcactctaccattggcatggctccttatgaagctttgtatggtagaaggtgtacgacacccctatgttggtcagagctcgaagaaggccttaccttangaccagaagtggtacatcaaaccacaaagaaggtcaagttaatccaaaaaaagatgacgactgctcagagtangcagaatagttatcatgatnagaggangaatgatcttgaaatcgagggtggtgatcatg

SEQ ID NO: 160139 - DNA, 478 bp, Glycine max
  unsure (1)..(478): unsure at all n locations
tgttggattatggggtacccgccatatgtggtacnatgnggctatcggccgatggcgcaaatcaactctcccaccatccccagttgcccaccttcaactcagctcacgtactcccacatagcccttatcctcgttcctctcaacaccgggtccccatcaacccctccaagcttccacaatatccaagcaattcaatttccaaacatcatgaactaccctaaaccaagaaaacagggcagaggcagaaaactctgcccaaaacacattcacatattacaactttccttactcaaataccccagtaacattctcttcattccgatttgttaaccgttggatcgacttgaaacttttactggatgttcctagtacataaatatacattttgaccgttgggatctgctagaaaatgtccagaacccaatatgtactacctttcccataaccaacaatacacaagcattttctgcacatgaac

SEQ ID NO: 160140 - DNA, 456 bp, Glycine max
  unsure (1)..(456): unsure at all n locations
tacaaatgggtttagagatgaaagatataataatatctttatcgcatatcctttaatgcgggaaaaaaattgttaactatataacaggacgttatctatcagtatgttattgagttttgaacctaggaagttatctatagacctcctctactgactaaagcaataagtcaagttgttagaggtagtcaactagttctagactacttcatcaaggtaagaaagtacaattatgcagaataaacataaaattaggatgatactattaagggaaaagtcacctttttggaccaatatcaaatagcttatcaacttcagcaggtcgtagggatcgatcctggaaaaacatcaagtntcttatgcagaataaacataaaataaactatgcatgaaaaaagaaacttgaataaacaaatgccatgacaagctacgaagagtcttttccaattcattattaca

SEQ ID NO: 160141 - DNA, 392 bp, Glycine max
  unsure (1)..(392): unsure at all n locations
agctntntacctccaccagtagctntgttacccctaccaacaggcttcttaaccctaccagcaacctccttacctccaccagtagcctccttaccatcaacagccttgtccaccagtctaaaatgtgcattactccgcacttcacttggtaggtttaagttttccttttggctgaagtaataatcagatacttcaattaagtcaacacgtacacgttggctattaggtatgtcatcatctttatgaacaaaaacactggcacaagcatcatcacttgattcaccttccttcctcagattacacaccttttttaagacctctttattcgtttatttttcattctaccaatttctgaaataggtaaatcaaaaccatcatgcaaaccaattgca

SEQ ID NO: 160142 - DNA, 404 bp, Glycine max
ggcgggagtgactgacaccctatagaattggctaatgttctgatcaaagctggaaaccccaatgcctgttggagttctctcggtccactgggtgtctatgaggcgtgatccctgcaaactgatatatagcatctgagatcaattgagccacatgggtactcacctaggtcaggatggcgtagaccagctgacaattcggcagggggaggttggaattatggttgctagggagaatgttgctaagcagcaacatcatccaaatctgtgtcatgatccgcacccgtctccctgccacacttcaggcaatgactcctcctgatgcaagctccattggagcttgtaggcctaggatcttcttcatcaatggattcctttgcttcttggaagatgaatggcagcggaat

SEQ ID NO: 160143 - DNA, 404 bp, Glycine max
ttcagaaccatgctatgtgctcgcgactggtccctttcttcccttcgcaacttgagttcattattgctaccccatagagctccgcgaaatttggtccggccatacttttccttgcgagccctcttggtctcttgttcaagggctcttgcggtaattgcattctcttcccgtaacccggcgcactccttccaaacgtgtgtagcagccaacttgaacttctccttggcgagttttgcctttcctaactcgcttttgagagcttggacttcttcgtcctcttccggtgcttcaaaattctcttcgctgacgacttttaacttggcgagccaatctaaacctcgtatgcgaactttcagccattcgtggtacccaccaatgatgccattacgaatgcctctaagctc

SEQ ID NO: 160144 - DNA, 458 bp, Glycine max
  unsure (1)..(458): unsure at all n locations
tagaaaagaagcttcatggaggaagagaatgagagagttatggggtgcacgaaattgaaggagaaaaagagggagagaagttaaactttgaagcttccttgagaagcttccttgagaagttacacatgtttctatttatagcctaggtcactaactaaatgaaagcttccttgagaagcttccttgagaaacttccttgagaagctttctggagaagcttccatgagaagcaatagcttaactacacacacccctctaatagctaagctcacctccttgaaaagcttccttgagaaacttccttgacagggttccttgagaagctaaagcttagctacatacacccctctaatagcgaagcttacccccatgccaaattacatganaacacaaaanagtccctactacaaagactactcanaatgccctgaaatacaaggctaaaaccctatactact

SEQ ID NO: 160145 - DNA, 376 bp, Glycine max
tgccagcctaaatatctgaaaaagatactattatatttttgatccttgatatatatattcgactcttgtatgtgattcctaataaaaattttcttcctatctgctcactaatatttgaaaaattctattttagattcctgtcgttagttagaaggtgatatgtccattgaatatttgataacgcgatttgtgataactaaaaaaaacctaatatgtgttttaaaatcaaattaaaaatgaatttttttttctcttatttcaaccttcttttttgcctctctttcttcctccctattctttttcttccaccatcgaatgttggagtacccattggaagcctcttcacaatttcatgttgccttgtttaaagtagggg

SEQ ID NO: 160146 - DNA, 483 bp, Glycine max
gcacctataaaactaagcttgggaggatgcttaatggaggaaaagagagagggattgttatatagagggggaagcacgaaattgaaggaagaaaaagggagagaagttgaactctgagttgtgtctcacaagactctcattcatcaaagttacaacaagtgttacacatgcttctatttatagactaggtagcttccttgagaagctttcttgagaaaactttcttgagaagcttctttgagaaaacttccttgagaagctagagcttagctacacacacccctctaataactaagctcacctccttgagaagcttccttgagaagattcctaaaaaagctagagcttagttacacacaccccctataatagctaagctcacccccatgccaaaatacatgagaatataaaaaaaaatctctattacaaagaaatactcaaatgccctgaaatacaaggctaaaaccctatactactagaatg

SEQ ID NO: 160147 - DNA, 363 bp, Glycine max
  unsure (1)..(363): unsure at all n locations
cagaaatgaaaagccaatggttgatacatggacggagatgaaaaagatcattaagaagcgatatgtgcccgctatttactccagggacttgaaattcaagctccaaaaacttacccaatgcaacaagggggttgatgattatttcaaagaaatggatgtgctcatgattcaagcaaatattgaagaagatgaggaggtaactatggctcgatttcttaatgngttgactaatgatatccgcgatattgttgagctgcacgagtttgttgaaatggatgatttgcttcacaaagcaatccaagtagagcaacaattaaaaaggagaggagtggctaagaggagtcttaccaactcttgttcttc

SEQ ID NO: 160148 - DNA, 457 bp, Glycine max
  unsure (1)..(457): unsure at all n locations
gatgccgatcgacatttccaatcacatcatctcatatttattcagggatcgaatagaataaaaaattgccggtgtcggtcgctatatggccccgactgatatccttcagccgacattgcgcaatttcttttagaaaagctggccgataatgtttttttacggtagaggaagttttttgttttgctgttgcctacaaaatttacaatgtagggcggctaggattttctgtgcgagctcaaccgaggttgtgtttcgggcgacactggcatgttctcatttagtcggccaagaaaacattagcccaccccggcacaaaaaaaacatcattcacggaaattgatcgaaaaaaatgatagctgacgtcggcgtggagagatgaccgattgaggtctaaaaaggaagcatcaccggatgacgccgattgaacatnttctaatcgacatcatgcaaatctcat

SEQ ID NO: 160149 - DNA, 331 bp, Glycine max
cacaaagcaaaagatagatgtggtgaatgccaataatacattgaaacatgacttaaggaatcccaatttgaggtgtacctcggagcttacttccatcagtaagtcatgtttaacaataatactttaaccgatgttggtggtatacatatgtaacgtgcatgagatgcacggcccattggcagctcgtagttttgtgtactatgcaacatgttgcttggtttgttcgttgcatacgaaaccatgttttcatatcatagccgcaataacacgtgagtgatacatataacttatccctgccttctaaatgtcatgattgatatcaacccgatat

SEQ ID NO: 160150 - DNA, 475 bp, Glycine max
  unsure (1)..(475): unsure at all n locations
gctgcgtctctgcttntcacaatctgaaagtcatgcgtccaatggctcatctgaagattctctatggtatctacgtctagggcccatgagtgaaaaaggtttgaatattctgagcaagcgaggcttatttggaaatcacaaggtggaacttcttcagttttttgaacattgtgcctatgggaagcaacattggaggaagttcctaaaggttgtgcacataacaaaggctatgttggagtacgtccattctgactacttggggcctttgagagttccatcactgggagggccaaggtatttcctctccatcatcgatgattactccaggatgacatgggtattcatgatgaagcaaaaatcaaaattttcaagcattggaagattcttatgaagaatcgaacatganagatagtaaagtgtcttataaatgacaatagctcggaatattgttctaccaaattcaatgagttctata

SEQ ID NO: 160151 - DNA, 427 bp, Glycine max
agcttagagttgcaatagtgctaatgtttctggttttagttactccatattgtcgataattaacttgggttcctgtcttcatgatttttaagttcactgtgcaaagttgtttcaagtttggtctttggcaagtgcgtacaaagatattcatgacccgctgattaataggaaagattcaacacctataggatatgaggagacttttggtgtactgctaaattgctgatttcttaatatgatgcaaggctaactcaatgatgtctactccaatatcaatgatatagagtcttggaaattgtgggtttttgcttaaaaaaattcaaatattgaaaggtttatttccttaatatcttggctctataaagattcccaataaccagaagaaaagagacacttatcttccaataattgtattggctcttacatt

SEQ ID NO: 160152 - DNA, 434 bp, Glycine max
  unsure (1)..(434): unsure at all n locations
agcttnttggagtagaaacatgggacttttctattttatttcaaaaaggaagtcgtatctagtcaaggtctgagagaccatacaagtttcctaacgatttctaattatgtgggccattaagtctatcatatgctgacaatagccgagaagcccatgaatctcttcgggggtggagtaggtgtctgccatcgccttggccttggctaacaagcggggaagttcttgactcccgttcaaggtaagagcaaaccggtccatccacctggttgcctcttggtgtaaagagtcgatcacccttcctctagccgtcttttccgcatatacttgagcatactcatccgcgattctatgtctcgtgggccgggctagacctaactcttcttggtacttggcgatgatagctagcatggtggtctccgtctccataaacgctg

SEQ ID NO: 160153 - DNA, 468 bp, Glycine max
  unsure (1)..(468): unsure at all n locations
tcaagaatagatatggcctcatccaaatttccatttcttgtggaaattctatcaataggctcttatgttcaatggtgagggttatcattattggaaaacccgaatgcaaatctttatagaagccatagatctaaagatatgggaagccattgaatttgattcatttattcctacaatggtagagagaaatgcaactacataaaaaaaaactagagaagaaagatgatgatgatgaaataagaaagaagaaggttcctctttagccccaaaatgctgagtgcgatcaacttgggcacatgagattcaattatcctgtgtttaaaagaagaatggaaaaatccgacaagatgaatttcanagagaagaaataaaagaaaggatatatcacttgggaagataatgtcataaattattcaagtgattcagagaagaaaatcataagtctggatatcatgatgaaagaatatg

SEQ ID NO: 160154 - DNA, 396 bp, Glycine max
agcttggtcgaagcctgaacatccaacgttcttgtctccaacaccttcatctcgccataaagatccaaatgcaccccttgaagtttgaattgtcttcaaccaaagtagtattggcttgaaaagctgagtcaagagaacttccagccctcttcaaatcgaccttcaacttgtcaatatttaagaatccttgaaagtgccgagcaatctcgaccgaatagaaaacccaaaaattcacccagttggccgcatcatcatatgtgtcaacatgtggcggccatgatttgaaatgaagctcaagtcaacaagcctgttcgaatcaaactcattaacaaagaatccctgatttggcaagcacaagagggatgactaaggattggctgaagagaactccaccat

SEQ ID NO: 160155 - DNA, 466 bp, Glycine max
  unsure (1)..(466): unsure at all n locations
tctaaaatttgaattcatatcctgctcaactgattatttatactcattntttcttatagtattaatttagttttattttgtcatgtgctttacagtgaattttaatgtttgtgatactttgtcaaaaatgtatgggctatttagaattatatttcaaaaattcttaatgaaatttatcgtcgaaccttttcataaaccattaatgattgttatttagactgtttcattgcatctctatttatcctaaaagataattactgtcccggcatccagtgcttttcaaatttcaatggctcacctatcagctatatctgtattagtatacatgtattagaagtgtcttcgacctatactataattatgatgttatgtgcctttatcttgatgacactaaatatcatctntgacataatatatatcagtataattcattngatactttaataaaacgtgaaatgtatgttta

SEQ ID NO: 160156 - DNA, 450 bp, Glycine max
  unsure (1)..(450): unsure at all n locations
accttaagtcacctgcggcatgcaagctnnangtgatactattgaggnatcgnatggtttattatccataaccctgcatctacaggagtcaaagaatcaattctttttcataacttatgtcttttaaataaaatgaaactatgaccttccagaataaataaataatcttccttattcgaaagctataagtttaggtctgtaacatttatcactaactaatatttatatcatcccaaaatactaatacggcttgatttggatgttaaagatccaaattctcaatttaaatttaatgggcagaaatatattataattggagaaataattagccatggtcatggatattagaaacaacaatttaaaactgtttattgctcactgaaaccgtgagcatcagagtaatttctattttgtgtcacctaaaactacttacctaanactgtgagcatc

SEQ ID NO: 160157 - DNA, 465 bp, Glycine max
  unsure (1)..(465): unsure at all n locations
ntaaaagttaggatctctcctattgtgataaaattgtttgttctctctgtgnggctatcctttgatgatgtatcaacccaatttcaaaaatagacttaaagatatttatgtgttgacaaatttcataagaggattgagaaatgaaaaagttattgattttaataaaattgtgacaaaacatggcatatggtgttattggtttaattataattaagtatagttctacttgtgcattgtgatgttattctataagttgaattcatgatgcttgttaattaatgttaggagacattgaaattatgaatagaagtcaatatatgactctattaaggagaatgataaataatatgtaagtggtgaatgactatttgatactctaattatttgactctatcatntatgatttgtagtagaactatgaattaatgaatgaaccttatggtctttgtattatgaaaacatgat

SEQ ID NO: 160158 - DNA, 381 bp, Glycine max
tgcggcatgcaagcttaaccacacatacgaagagcctgtcttgcttatataatttcatttatagaataacaattgtgggcaacaaaaaagagataaaggtaagacacaaaaaaaggttacatggcactcacagttgtaggcggcttaacttccatagctcgagcatggtaaacaaaacactcagttgggggaccactgaaacagaatgacagtcataagccaattgaatgaatgataattttcctcttttaagtcatggtaattggtaacaccaagcaaatatgcaagtggtgtcatgcaacagcaatctcaaaagtttaaactattaggtgaaaacatatgaatggttttatatcatatttctaacatgctccctcacac

SEQ ID NO: 160159 - DNA, 477 bp, Glycine max
  unsure (1)..(477): unsure at all n locations
tanattctcaacattagatccaccatctacctgtttgtttcttatcatacaaagaaattatttgaggctaccatgaaatagaaacataaaatatacaagatgattcaaatctttagttaggaaagaaagagagattccccataaagaaactacacagttattttactagtctcatttatggttgagagaattctcaagttcatgcttcatttaccttataccgtggtcgctttcctgtaagtgtttggaacaatgacaaaaaagcagacacaactacatcaatgctaacatcaaggtgccatgaaccaatttcattagccagcaccttcgctcgtgaccttgtcatttcagaactgaaatgagagaatttttagtgaacatcacatctgataagagtgtgttttagttgaactcaagtaatntatttgacatgtctcttcttatacaaatatagatggagtatcaatggaatatagc

SEQ ID NO: 160160 - DNA, 241 bp, Glycine max
aaccctttcgaattgtcacgatccctaagattcacatgacatcccataatcttaccgggctgagcatgacgacccgtatcacaatcactgtacgagagtgaagatgttgatgttacagtcaagaatgaggttgctcaccatcccccaaaagttgtcgcgtatataatatatcgcgattgatcacgtttaactttggaaagcctaatacggagctaccttcactccatgaacttcagatcaa

SEQ ID NO: 160161 - DNA, 418 bp, Glycine max
  unsure (1)..(418): unsure at all n locations
agcttccaccaagtggtaatcagagcttctttatcttcaagtaggcgctccttaaatctccattaattttttttctttaccttctcttccattggtgtttcttcatttttctccatgtatctcctcacatgtcttgttctaaatgttgttaacatgattctttagaagtttccaccgattaaacttgctataaaaactagatttgattttctatggttcaaatttcttgttcttgttcttgaaccatgaattgtgttgagtttaagctcctttgagttttgtcttgttattttttgtggctgaaacctaaaccataaaattcttacaaaaatattaaagtagaagaaaacctcaaaaatctagagtgactcgctcacctattgtagntttgtcatagaagtcatgtctagtcatgaaa

SEQ ID NO: 160162 - DNA, 427 bp, Glycine max
  unsure (1)..(427): unsure at all n locations
tagtgacatccgtgacttgatcttgagcgatatattttgctttagagattcangagaatcttccagtcatgtttccaattcagcattgaatactgaaggcaggggaaggactacccacaagggtcagaatggtcgaggcagatcaaagtcaagagggaaaggtcagagaaaatttcaaagtgacgttacttgttggaattgtgacaagagaggtcactttagcaatcagtgcaaggcaccaaagaagaacaagtcgcacaaaaacaagaagcgcgatgatgatgaatccgcaaatgcagcaactgatgaacttgatgatgcattaatttgcagtttggatagtcctgttgattcatggatcatggactcangtgcgtcgttccacactactccctctanagaattattgtctaactatgtttctgga

SEQ ID NO: 160163 - DNA, 402 bp, Glycine max
  unsure (1)..(402): unsure at all n locations
cttcttaatagtagatccttgggttggagaggtaaatgaaactttactttgattgaatgctttatttgagtggttgatgcttgaaatgttgtttttgggtgtgaagtaatatgtatgtatggtatatgatgtgtaatttgaattgngtttgatttaaaaaccatttaaggtcttagtcaagaaattcgactagagaagtttacacttaaaataagagtgattttcgcttcagttaaaatgtctagaaagaaatgtgattgttggatttcaaacttaagcgtacatgaaactaggcttaaacatggccaggtttaagggtaagtaaaactaagcttaagcgtggcaagacttaagtgtaaataaaataggcttaagcgtgaccaaggttaagtgcatttttac

SEQ ID NO: 160164 - DNA, 448 bp, Glycine max
  unsure (1)..(448): unsure at all n locations
tagccacaatntccctctctttcatgcaatggtggtggttgtgttcgccaccctagttcacgggggatgagccgccatcagtccccttaagcttacctttatgctgagactataccctcctgagagtacaatctccaaacccaatagagatgcagttgaagaagtccctagagaagctattgctgccacacccaatagatctagatctcgaaaccttgcactcaaaagaagaagcatacgcagaagtcatttctcttcctgggactaaaacccctaatgaccaactcctcgtcatcgtcgaccaaggagtggtttcttcatgacgtggtgatggattttttgcgcttgagaatgatattatgggaggaagaggaagaagtgggtgctgatgtggtgatggaagaaggtgcgatgtcagatctaatagaaggggagtaagtagaggaag

SEQ ID NO: 160165 - DNA, 359 bp, Glycine max
  unsure (1)..(359): unsure at all n locations
tgtgtacnttgtaggtcatttctaagacttgatcaaattgataatactgaatagggaagacaaaggagagttgaggtcatcacgaaggccatttaggagggagagttgaagatttgaccttaagaattatatatatctttcacaagtctctaatatgtcatagactgagaaaatataaatggaccttaacttaaaaaattatgctttgtcacccttttggccatttacaacttcatatcaaatgattaaataacttgatgacattcaacttaatcacaaaaaatgggatggcaaggataaaattttaaccgcctggtaacaccatgtgaagtataaattctctcanatgtttaagctat

SEQ ID NO: 160166 - DNA, 450 bp, Glycine max
  unsure (1)..(450): unsure at all n locations
tactaagcctgcaatacatttgttgaggccatcttccatttaacatctttgtctatgtncgaataggtgtaatagaacctaggatttagataataacccgtcatatgcaaagggtggtaaagttggcgatcccatctgtgatgaatgatggcaaagatattcttatacttctctttatgatcatagaaagctctttgaattgtctccttggccctatccattgcctcataaatgaaactcattgtaagttttttttttttcgttatccaccaacctcaatacacttacaagaggccccatagtcttcaaagtgaaggcaacatctaactggaacgatgccatgagaacaacatttgtggctttctttcccttaagatccttatctgcctttgacttcatccattcttctgaagtaaacatccttcttagattgaccctttgcttatgatc

SEQ ID NO: 160167 - DNA, 411 bp, Glycine max
agcttgcttactatatttacttgctacttacaatttttaaaaaataaaaaaaatacaataggcaagaatcaaacctactccacactagactcaaacaaatttaaccagtaagctaggttgattagatgatatatacaacaaatttaatatatatttataattctattatattaatttatatagttttaagtttcaaccttaattcactgatccgaccaaatgactaaaatgactcagtgccattgcttaatcgatcaccttctgagttttaaaatattaaatatttgtatgtgttatttaataaacacattagttctaattttaatttttattccttttaaaaatattgcgtaatgttgatttcaaaaataatttaacaactaattccaaaaaaaaatatttctaaactat

SEQ ID NO: 160168 - DNA, 364 bp, Glycine max
  unsure (1)..(364): unsure at all n locations
gctattcccatccgagttccttaaaatcttgagctccaatctactgtgcttgaaactggttgacaaaagttttgacgtgtcttaaaattaacttattctgtcctcaaaaaagctaatgatcaaaaacttactaatatgattagttttccatgtattgcatggtatctctttaactagccactccacggaagtttatttgtggtgctttcctaacatattaacatcaattaataaagttaaacttgttgctccaactcccatctataaagcattgttcttcatggctctgctcagcactcgccatatntggggaacaccataagagactaggagcactctccatgtacagttaaagttgagatat

SEQ ID NO: 160169 - DNA, 405 bp, Glycine max
agcttgcacaaaactaggtggtagtttactttgtttgtaaactcatgcataataatatatttgcttcacttccatcttgctcttctttttctttttccttttttttttccttttttgatcttttttaatgtttattctgctagaattgatagcttaaaagatgtttagtttagaaatttttttgaagtgtgaacaaaagctctgtctgaattttcgctcaactttatgttgtatatgcagctatgactattcatgatatggagcatctacaggtaaggtatgtaactcgtctgatttccttttttcccccttattcttttgtagattggttcacaatgaaactttctttgaactatgtttgtgattatctctgtcaactgtggcagctcttctgagttcatcacc

SEQ ID NO: 160170 - DNA, 391 bp, Glycine max
  unsure (1)..(391): unsure at all n locations
atgtgtntgcaagaatctctctcgaaaagtgggtatgttgctacttcctcaatcctttttcttcgattctctctcaattgtttgattcttatatgtttagtatttttagtgtgtcattactatatcttttcacaaactatgtggaggctagggtgggaaacctcctcatatctcccaccatgggaaacaactttttaaccgttagatctatttaattttaaatcaatggataagattttttttcttttctttcctcatttttccattttgtccttgattcttctactctcttagactgtgtttggtttacanttttattttctgttttcatttcctgaanatggttttcattttgaaaaaattagaattctgaaaacatgtttggtttaac

SEQ ID NO: 160171 - DNA, 194 bp, Glycine max
agaatctatatgagtattccatcaccactcattttatatgataagcttgttcacttttaaagctgttatttctaaataatttaaactactatgtgagatcgaatgatggcctcaaactcattgacacatccctgcactaacattagagtctaaaattattggggacaaattggatgtgcgttaataatattcat

SEQ ID NO: 160172 - DNA, 458 bp, Glycine max
  unsure (1)..(458): unsure at all n locations
ataattaaaataaaattatcatgtatatttatttatagacacgtgtctgttaaggtttacaaagtatatatatcaatgtttgaaattaaccacaaaaactaaaattgtgaatttttttaaaagtgggggacgtcttaattaaaaaatgggggactaaaatggaaaactttttaaaatgggggatgaaatgtctcaattaaaaaataggaggactaaaatcacaaatttgaaaaaataaagggacgaaaattacattttagccttttctttntaactacatttgtagctttctatcgatactttaccctccagaactgaattcttataactttcttgaacaaagaanaattaagtgcaaaacttttctctcaaacactgtngatctgtggctctgttctgatttaaatatgttatcttgtgctgactgttaatgcttaatattccaggtattttctctg

SEQ ID NO: 160173 - DNA, 418 bp, Glycine max
agcttctttgagaaaacttgcttgagaattttgagcttagctacacatacccatctaaaaactaagctcacctgcttgagaagcttccttgagaagcttgagcttaactacacacacccatctaaaaactaaactcacctctttgacaaaatacatgaaaatacaaaaaaaaaaaaaaaagtccctactacaaagactactcaaaatgccctgaaatacaaggctaaaatcctatactactagaatggccaaaatacaagggccaaaagaaggaaaaacctattctaatatttacaaaaaagagtggatccaaccttgacccatgggctcaaaaatctaccctaagggtcatgagactcctacggcgatttttagtagatctagccaatcctcttgtagtttctatcaatcccttggg

SEQ ID NO: 160174 - DNA, 461 bp, Glycine max
  unsure (1)..(461): unsure at all n locations
ggacacatgatactcagcttaaccagttagttntcgatctcgaagctttcaattctctctacgcacccttagtggtccattcttgctttgtatgctttcatcttcatctcgtttactttcggtatccttttcttccattttcaacgagcttcgaccgatcgtttaagccattatctcgcctaataaataataaaatgaatttcaaccaatcatttgtaatctcgtttaatcactgttaaaataaaattcaaccgatcgttcacacagtaaactcggttaatcaaaaaggggtaaataagctccaatcagacattttactttgaaagttcttttgaatgagttaatcaataaccaagtgaaactaaggctaaaatcaactcacaaaccaagctntgtccgcaaaaaggtcatttgaaaccattntaaggtctaaccccttaaacgggcttctatgctnttat

SEQ ID NO: 160175 - DNA, 379 bp, Glycine max
  unsure (1)..(379): unsure at all n locations
agctggtctaattaacctgaaagtgagatataatgattattaaacacacaaaatgaagactctaagcatttattacctatacttaacagaaaatacttataaccttacaaaataaccataaattgggagagtttgatacaatttatacaagttttatacacaaaagttagttattttcaccgactaacaattgtcggggaacttctttctatgtggaaattttagttcaattctttaagggtctatttattattntttgattatctgtgaatatttgctnttgattcatatttttttcttcttgaattggataaccggtattgctgtcagtatattgtatgcaaagatctctcacaggcgacctagtttctttggactt

SEQ ID NO: 160176 - DNA, 465 bp, Glycine max
  unsure (1)..(465): unsure at all n locations
tccncaactntgctcaattcagaatcaattcaatgccattctccaagcaaccaatggcattcactngattccttaaattatctattacacaaagaccacctcatcttcatcattaaggcagacttgacatttctagcaactttcaaacccaatctaccccaagctttaggcttgcaaatattctcccatgcaactgtatgaacttgtctctgattctcattatctccccaaacgaaagctctacacttttgaccaacttcatgacattgatctaggcaagcatgcaattttcatagcataagatgagagagcttgtaacacaggtttcaccaaagatatatggatctgacatgtctataattnttaaccagcttgagagcttttagttcttgcgtgatgctatataaacatggtgagaacagccaaagcataataagctggcacccaagaatccttctttcatta

SEQ ID NO: 160177 - DNA, 426 bp, Glycine max
  unsure (1)..(426): unsure at all n locations
agctnttctttctcaatcagagggtcttctgtttaacattnctaanggcaagctcacattcttgttctttctttgtctaacatacacacttgctcaaactcatgaaaagaaacacaagcttcatttcaatcatgcattcaatccagaatcagttcataacaccaatttcacaaaaataaaattgtttgcactgcatactcaaaagatcaagtcaaactgtttagtatgcttcaagacatgcatactaactatccataaaaacaaaagtatataattataaaaataaaccaaaatcactaaaaacaaagtactgaaaccataataattatccaaaagaanaatcaggaattcaaaattcctgtgaatggttctgggtgtcctgtgtctgggtattctcctcatctgtaaaatgtagaactggagtag

SEQ ID NO: 160178 - DNA, 427 bp, Glycine max
  unsure (1)..(427): unsure at all n locations
ntgaatgagactgaagaagctgctgctcatgttcatcttgatctcggggagattaatttatctcagcctcatttgtcacaagatagtgacatggagttgatggtaaatatttgtcacaacaaagtagttttatctcaacctaatttgttgcagcactccatttttagatattacaattattcatgtttggcatttacatgtaggtccctgcaactatggttccaccaatagcaaggaataagctaaccataacaagagccaaacaaaggaaggttgctgataaagatgatgcagaaaactgaagaagcattttttgttgcattttgaaggttgctgaaggttgctgaagacccattttttgttgcgcattttgaaggttgctgagtttgaaggttgctgatgaagaaaactgaagaagcattttttg

SEQ ID NO: 160179 - DNA, 426 bp, Glycine max
  unsure (1)..(426): unsure at all n locations
agcttccncgtggcttctatgagaagctttctcaagaagcttctttgagaagctagattcttatctacccacacccttctattaactaaattaacctccttgacaataattacggataaaaataacacaacaaataatcaaacatcaaacataattattaatatatagatatatatatcagggtgttacacctcttgacagtcctcgtcccaatggacggactggttcttgcgtaagagcttgaatagcggctcacaagtagctgtgagctgcgatatgaatctggcaatgtattttaaatgccctaagaaacctcggacctgcttctcggtacatggttctggcatctcaggatggcttttaccttttcggggtccacctctattccttttgacttacatgaaaccaacaatttctgacttaccc

SEQ ID NO: 160180 - DNA, 463 bp, Glycine max
  unsure (1)..(463): unsure at all n locations
tagctatgactntatacatgcagcctatcaaggatatgtgtctgtaatcatttagggactgtgggtgagactttntgggaattaaagccacaaaggaagcattggagcctctaggaaagctttcatgagcatagaactcatccacaaatcttctaaactcaggattcaacacatcccagaattccttaataaaattgaagttaaggccatcaggcccaggacacttatccccttcacaactccacactgcttgtttgatctctttgtcagagaatgggacaatcaactattctctttgcctctgagaaatagatttgaagtgaactccatccaaggtaggtctagaatgcatctgctcagtgaatctattatggaagaagttggcagcttcattnttcactgcatcacggtgctggatccactgcccatatataaatataccttgaatattattataagctct

SEQ ID NO: 160181 - DNA, 451 bp, Glycine max
agcttgggtgatcaagtgaattctctctttttgtcatatcaagaatgctataataaatgttcttagaccatgattttggctgcaacatcaatgtttttagaccgattgcgaccacaatcggtagcagttgtcagtgatttaccgcaatgtcaagaatcatgacaaaaccgtgtgagtgagaccacaagtaaaaaccttggactatatatataacactagaaatatcaagttcaccacagaaatttttaaacaacgagaacttgatccataaacaaagaagagaaaaagaaagggatagttttcatttgaagcacacatcgtcttattcatcaagatatttgttaaaatattagtattaagtaaaattttaaccctcatttattcattattttataatttttatagacatattataattattattattatttaaactacaaatcccaatcat

SEQ ID NO: 160182 - DNA, 439 bp, Glycine max
  unsure (1)..(439): unsure at all n locations
cttgattngcttttcaacatactgttccaatttatcttatacaatcctttacaagccttgaatctctgtgaacttcttcttcttctttgtgccaaaagctttccaaagttttctggttttctaaaccttgaaaacttgtgctattcattcttttcatctcttctccctttgccaaaaataattcaccaaggactaaccgcctaaattctttttgtgtctctcttctcccttttccaaaagaacaaagaactaaccgcctgaattcttttgtgtctcccttctcccttgtcaaagaattcaaaacgacacagtctgagaattcttttgattattccctttcccttatacaaaagtgttcaaaggacaaactgcctgagaattcttctcattcacaaagtatcaaagggttaaccgcctgagatcttttgtttaacacatt

SEQ ID NO: 160183 - DNA, 426 bp, Glycine max
  unsure (1)..(426): unsure at all n locations
agcttcattaagaggcttctagtacactctagatatcttctcaaagatcgtaacggtcagatcatggaaaattgtcttgtgaagttgcagaccaattttagagaagatccaacggttaacgaaggctggacaacatttttaccgaggcagcttcatgtagttttctctaaaagcttcattaagaggcttcctcccgaagcttcctcgtggcttctttgagaagctttctcaagaggcttccttgagaagttagatccttatctatccacacccctctattaactaaattaacttccttaaaaataattacggatgaaaataacgcaacaaataatcaaacatcaaacataattactaataatatatagatatatatatcagggtgttacattactcacaacataacanaatatatatcataacatt

SEQ ID NO: 160184 - DNA, 460 bp, Glycine max
  unsure (1)..(460): unsure at all n locations
tacaaatgggtntagagatgaaagatataagatgttctttatcgtatattcttttatgcggtaaaaaaattgttaactatataacaggacgttatctatcagtatgttattgagttttgaacctaggaagttatctatagacctcctctactgactaaagcaataagtcaagttgttagaggtagtcaactagttctagactacttcatcaaggtaagaaagtacaattatgcagaataaacataaaattacgatgatactattaagggaaaagtcacctttttggaccaatatcaaatagcttatcaacttcagcaggtcgtagggatcgatcctggaaaaacatcaagtttcttatgcagaataaacataaaaaaaactatgcatganaaaagaaacttgaataaacaaatgccatgacaagctacgaagagtctttttccaattcaattattacaaa

SEQ ID NO: 160185 - DNA, 421 bp, Glycine max
  unsure (1)..(421): unsure at all n locations
agcttctatagaaggtttgttcctaatttctctacaattgcatcacctctcaatgagttggtaaagaagaatgtggtatttacctgcggtaaaaaaacaagagcaagccttggctttgctcaaagaaaagcatactaaggcaccagttctagctcttcttgacttttctaaaacttttgagctagaatgtgaatcctctagagtgggagttggagttgtattgttacaaggtgggcaccctattgcttattntagtgaaaaacttcatagtgccaccctcaactaccccacctatgataaagagctttatgccttaataagagccctctaaacttggtaacattaccttggttccaaggaatntgtcattcatagtgatcatcaatcacttaagtacattagagggcaaagaaagttaaac

SEQ ID NO: 160186 - DNA, 368 bp, Glycine max
  unsure (1)..(368): unsure at all n locations
tgtatatccgcaaacgggacccactcttcttgactcgtcatatcccttgccttgccttccaagtatttccgtggtaggcccactacgccatttcgagtttgcttcatacgatccaactctctcgccgaatctccgaccacagctgcaatcttgctcaaggaaggaagaaacccggagaaaagatacggttttcttcccccaagagggcatcctagaatctccccaaattcttcaacagtcggtactatttggaagtccccaaaagtgaagcatctcaacagctggtcatagtattgggcgagggatacagcggctttcgtaaatacctccgctgtggtcaaatctaanatctttccgtacactttgcg

SEQ ID NO: 160187 - DNA, 273 bp, Glycine max
ctcaacaacatgaccacttacagaaatattctcctatgcatcaacttgtttgttacgaagattcaacgctgtttacctatctgtgctacacttactattttgcctctagtgtttttaatatactagtaccctattcttgctcttaaccatacattatcaacgccgctataacacagcgttacttctgaatacaactctcgctaactaacaccgaaccctgagctccatactcgcaccactccgctttaattctaaatacttgaacactcggcg

SEQ ID NO: 160188 - DNA, 288 bp, Glycine max
  unsure (1)..(288): unsure at all n locations
ctcttgtcatacacacaccatacacctttggcatttttgcctacgacatctctcacatgatagattagctgtcataaaacaatcgtttcttaatatttccagaaataaaccttctgcttgtgacacttcccactatgccaagcaaaagaaattaccatttctgaacagcacttctctttccnctacacctctctctttaattcatgtagacatttggggcgcttctcacattctatgaatgaccacacatatcttttgacaattattgatgatcattctagatatgta

SEQ ID NO: 160189 - DNA, 455 bp, Glycine max
tcacctgacgcatgcaagctctagcgtccgcgtgccgaatatattgataacttcttcgccattccccaccatatctactacatccacacttatataccgacacctgcagaccacaacgaaatattgcaacaactatgttcgtaacgttacccagccaatatttatcaaattcatccaatccgattaaaaaaatattgtgtcagccaaagacatacccaataactggcactttgaggaacacgttctaaacggcggcggaactcatatgtcgccctgcatactcaaaacgtatatttaaccgacctcccatatttaaagaaacaactgaccacggatgataaaagactgctgcatcaattaaaaccattttgtactgtatgaacaatgaaaatcacttcacgaattactaaattatttatactcttgtaataaaaacctattcttcctaacatata

SEQ ID NO: 160190 - DNA, 318 bp, Glycine max
atcatcccaccttataaaatgctctaacagcacgacatgataatacacgtgttcaacacacacgacaatacaacataatcctgcctgagtcctatgatgctctacatgggtcatcatatgcaccagaaggggcaaaatccatggctgcaacatcctctctatcctcagagagctccattacccgggtcgtccttggcgatgcctatacaatagagagcttcagcacacgtgtggtcactggtgatgcctgcggaatcgcatctggagttgcctcccgagtgtcctatgagtagctaagtcagcctctggtcagtctct

SEQ ID NO: 160191 - DNA, 381 bp, Glycine max
  unsure (1)..(381): unsure at all n locations
cacctgccgcatgcaagctttcacttatctttgctgtcagaatttataattangatttaacgccagaaaatgccataaattgacatatcatataagagcttacagaaaacatgtattgagttgaacttcaaaacttgattgctttaggattattcttacgcaatggtaaaatccttgagcaagaccattttctggtgctggaatcacatttttcatcatcccgtgttccttatcatttagccactggtattggctgcttaattagcgatgttgatgaaactttctcttttactaatattgtcttgacactggcattgataatcagtggatattgtatcaactgcatcctccactcgagtattagtttatgtggaagttact

SEQ ID NO: 160192 - DNA, 420 bp, Glycine max
  unsure (1)..(420): unsure at all n locations
tatatactgcgttgatgtcctatattttcataatagcctgtatcaagtcagagttggtgcttcatatctcatggcattgaaacttgccacctgtnattttaagagaatcttgctcaatgtaatattgtaatctcaatctgcaaatttgacaataggctgcctgcatgcccatgatacttgattgagtaatgattgatgaacatctggtaactctcaacacctcattaacacctattatctttctcttcncatcacatcatatcaatcaccatagctatatttctttctcttctcttttatttcctctcctaggtgtcatctacagtggacatgtccactaacaatccttgtattcaactcnctatcttcttctctgctctctaactgtgaattggaaatcacacttagtagaaatttatt

SEQ ID NO: 160193 - DNA, 331 bp, Glycine max
cagctttgttaagagaccattcatctttattcttttgtctcctcaccattcctgcgcaaaactctctttcttggttccaaacttctttattcttcatgcttttaagcctgggaacctccagatctgagttcttggctcatatgagaattttcgcgcaacctctactaacgtaaggggggtctttccacttcttgaaccctgcccttgctgtctttggaagctaggcttcattgcatgctgtttcgatgttcacatattcatacttaatgtcttggctgcaattggacgatatgttgttctctgcacatttaccgctaaaaatgagttcttt

SEQ ID NO: 160194 - DNA, 293 bp, Glycine max
  unsure (1)..(293): unsure at all n locations
gacacaaaacgctagtgcaaatcacaacttcgatttcttatgggtgggatggacgaatgnatgatggaatgcatatgacatagatgcaatntacatcagcggcggcccggggaatctgttctcatcttatacacaacgcctaggggtagtaaaatgccccaacgtacgtctgtaacagggcgacaccatnccctccgttgccttgtttacgaacgggatcaagacacatcccatctgtgatgcctatgcaaaagacacaatgcgggaatgtacccagcttgaccatatcccct

SEQ ID NO: 160195 - DNA, 440 bp, Glycine max
  unsure (1)..(440): unsure at all n locations
taaccactgcgatgcactcattacacttgtctttttttatctcactncaacgcgtcattctgttangtgatcgctcccttactcaaatgcacgcgctcctgctcacgttaaacgttgttttttttatattctacttgcttcacactttttatattccatgtttcgttcatttagaaactcaaacactatgcatgtgatttttgtgtccacctaaaacatcaccaaaattcttgctattaataatacatgatcactctaaaattatgcatgccatatgcctttttaccctaatatatgttcctatcttggcgctttctacgcatgatgtaacttatgcgacttacatacatgtcaattgctatacatagagcgataaaatgtgaaatacaattgtgaaacaactgttctgtgctgcttgtgacgaacatacctcacacatg

SEQ ID NO: 160196 - DNA, 239 bp, Glycine max
caacggaattaactcgattcacttatcattttactcaacttcggcgctattcccaaaacctgcaaacaactcaagaacaatgtaattgattacctacctaaagtaactaattaaagcgttcttgctcacttttgaaacacttacagaaagagaagtaatcgattatatcacatggtacataattaaagcagaaactcctaaataaatcacccattgtctccaaaacaaatgcgtaatcg

SEQ ID NO: 160197 - DNA, 458 bp, Glycine max
agcttctagccaaatggacttaccttgacttaattcctctgatagcccttttgagccttgcttccctttccttgttttgtagctcactacaagccttaagcgaaaaaccatgatatcaccatatccttaaggaattttggagctttggaattgttttgggaataagtgtggcggttttttgtttcatttgataacatgttttgttggccatgcttcatgatatattttgagccatacttgatgtacattgcatattggttaaatgttgcacatgctgaatgagatgttgtttctcaaacgctacggagtaaaaaaaaaaatcacaaaagaaaaagaaaagccgttcaagttgagtgaataggatcttaaatgacaaaagaatgatgacgctcttggctctactctttatcgctaacatttatctttacttctttttattctcttaatttcttcttaat

SEQ ID NO: 160198 - DNA, 464 bp, Glycine max
  unsure (1)..(464): unsure at all n locations
tatgccatcaccattctaatttctaaatagtaccagcaaaaantttaaacaaagtgttcacacacccagtcaaaaagaaagacaactaaaatgcaaataaacagctacaactttgaccttctgtgattcatccattaaatgctgaggttataataatagttagctcactcaaactttcaagtttcaacaattggaataagaaccccttccatccaaaaggcttcaatttataaagcttaaattaaaattcaatttgtagaagaaaaaatttgattcacctaacttgttggtcatgataaccatactgatcaattcaaggcaagcttagcttctagagacagcattcatatacacgagtaagattattgtgacatttcatgctctaggccaaccagcaaacaccaggtattgctgtctattntagagctctaaaagacaaaggcactactcctactcattacact

SEQ ID NO: 160199 - DNA, 424 bp, Glycine max
gtattttaactgcacactaagttactcttctctaccaagcaccgctttacactctaacatttcattgaaatatttccaaccaataaaaacatgaagtttcacttgtcttgtcaaaacttgaacaatcgcacaatcaaatcaaatttggcttctcttattgaagtaatagtcttttatacagcaagaagtaatagaatgacaagctatattattcatttaactataatattttcttatcacattgcgcaacattcaatgcagaaaaaagacaaaaaagatagtcttattcacaatagaaaccatttacatggtgttgttgtaagttacagaatcatatgaaacaattaaaaatatcttgaagaattatttacgatcgattattccttgaatagctgaatataatagatacaacaattgatgtatt

SEQ ID NO: 160200 - DNA, 426 bp, Glycine max
  unsure (1)..(426): unsure at all n locations
ntacgagagtacgtctgactgcaactaccaataaaatgtttctatatcatgtgcaacatcaagcgatccacatctcaattacaatgttagctctagtaattatcatggcgataaaaataacaaaagaaaaacgggaaacaaaaatgtttttatatatttaaatgaaaaaaaaaaatacttacgaaactgagatacttgttaattagagaaaagatacctgcattccctggtacgtttcttttcttcttaccaggtggttgcgaatctgagaatttacatgcataccaatgatacaaaaaattatactcgccaaacgtcacacacaaataacagcgaacagatgctccctatactcacaataaaatcttcaagaccaaacaaaatacagttctcaaaccggccaacctgaatatatctgcatgtcac

SEQ ID NO: 160201 - DNA, 400 bp, Glycine max
  unsure (1)..(400): unsure at all n locations
ggatctctaagtcaccgcacgctgaagcttacatagtgaaagagagcttcatcttatgagtgacacgacctttaatcacgtcgaaatcacacctgagacgatctcatgtcatctacttccttacttcacataagaccaccaggccttgctggctacatcaccaaggtcttgcttcctatgccgtacaagacttcactcgcatcatgacaacctattcatactaccacaagtaacaaagcattacatagacaaagaccaacacacacggtataacaatagtgcaaaattcgtcaacaaacgaaagcaaatgcattagaagaaaaattgtcataattacaaaccctatgccggacaaatccaacactgaagaacaataaagaaaacgcatcctanacattga

SEQ ID NO: 160202 - DNA, 441 bp, Glycine max
tgtaccaacattcattagctcagtacacactcaacaaatagtcatcatccatccacaattccaatcattcatgctcaatatgatgcatgcacctgacctcaactatcatatgcaacgtggtaccatccccaacgaaatagcctacgcgtgtctacacgacactctcacttgggaaaactaggcagtaagtgtcgaggtcaccctatcgtgcacaggcaactccaccccctccccttcacagtgatcagcctgagtctcaagggagttccaaaccgagtgacatgcccccaagtacaagtatctctcctcatgagaaactacaagtacttactaataaagtttatactatttccatgtcatatgaagtatgaaacatgggcactatcaaatgcattaactgcggataattaaagattctaagctatccttttccacagatgc

SEQ ID NO: 160203 - DNA, 326 bp, Glycine max
  unsure (1)..(326): unsure at all n locations
tanggatgagagcaataaaagaggaattactgtccttatggaatgtaccattcacatagaattctgcaataaaccttagaaaatcaggttctagctccttccaaaagtgtttaatacacctgaaattaaacccatcaggtcccgggcttttgtcgctaccacaacttcacacagcacancttatctcctcttcattaaaaggctcaaccatcatctccctctgagtaggagacagagtattaaaataaaccccatccaagttacgtctattcagatgaggctccttgaatctaatctggaaatgctgcaaaatttctgccttaatc

SEQ ID NO: 160204 - DNA, 363 bp, Glycine max
agcttgagatgacgaagtgttgaagggtgaaacttcctgcttttattgccgaccacagagtggtacctggagatatgtcgcggcggtcacgagaccttgcggacctcccgtggggtgctatcgcccaaaaccaagcttgaccaatcccgacccaaccccggcatagtccgtcagtgagaacctgtgatgtacctaagcaggcgagctcctggcagtcaacagatcaacggaaaacaagaccacaaagcaccgacgcttgtggtggctggccacctgtgaattttgtgtaatatgtggatggtcgcctctggtaactcattaccaacgcgcgggaatcgattacaaggcttaaaattgacgaca

SEQ ID NO: 160205 - DNA, 319 bp, Glycine max
cgagatgaggaagcgttgaacggtgaaactctctgcttttattggtgaccacagactggtacctgcagatatgtcgcggtggtcacgagaccttggggacgtcacgtggggtgctattgcccaaaaccaagcttgacgaatcccgacccaacccgggcatactcggtcagtgagaacctgtgatgtacctaagccggcgagctcctggcagtccacacataaaacgaacaaacaccaccaagcacggacgcttgtggtggctggccacctgcgaaacttgattgatatcgcacatatggtctctggtaatcgattacca

SEQ ID NO: 160206 - DNA, 402 bp, Glycine max
  unsure (1)..(402): unsure at all n locations
agctcgatcaaaccaatacgatttacttgataacttcgccgactcacataaatgaatagtgattaaccaattatacaaattgcgttaatcattattaatcatatatttcttttctacacgcgacttttacacgctgaggcaaaatctacaatgctgatagagaagttgatcaaaattacgccgatgattgatcacgcaccacagaagatcacggaccgctgtgcctttgggtgggtgagactgcatgatctacccattacagtttaatttgtggatttgatgccaaagacggcttatgtcatcttaagcataaattatgtccatgtgaatctacataagcaaaggggatttcagtagagtcatgatgtattataaatagactatcaactcgaattntactct

SEQ ID NO: 160207 - DNA, 387 bp, Glycine max
  unsure (1)..(387): unsure at all n locations
tgctaacccatggaagctcctaatatctcccacactntttgcggcgggccatccttggatggccctgattttctcacggtccacttggaccccatttctaccaactacaaaacctaagaaaactatattatctacacaaaaggtacacttctctatattcgcatagagggtgtttttcctaaggactgaaagaacttgtctgagatgtcctaagtgatcatttacgctcctactatacactaaaatatcatcaaaataaacaactacaaatctacctatgaaatcccttaagacatgatgcataagcctcataaaggtgcttggtgcattagtgagcccaaaaggcatcantagccattcatacaaaccaaacttggtcttgaaagc

SEQ ID NO: 160208 - DNA, 262 bp, Glycine max
  unsure (1)..(262): unsure at all n locations
tccgaacaaatcatatctacttcttgcctctacatcctaaaatctttttttctaatctcacacagttgcccccaaatcttataatttaatttaacagcaaacccctgcttgctgctctcgtcaaacccttacaattccccacagtccacggaccacagcggtaaaacaccaaaactctgtgcccggcttacccacttgcgattaccgcaaccaaaccgatgacccaccctnactgatgctcgtctactactacaacacatac

SEQ ID NO: 160209 - DNA, 459 bp, Glycine max
  unsure (1)..(459): unsure at all n locations
cgtacgactatggcgcacccatcacatcgtggactatgtggcggtctgccgatggcgcacaacacgttttccacatccacacatcgcgcataaacccaccatcccctgttgcccaccntcaactgagctcacgtactcccacgtacctcatatcctcatttctctcaacaccgggtccccatcaatcctcccaagcttccccaacatccaagtaatacaacattcaaacagcacacactatcacagccaagaaaacagagcaaaggcagaaaactctgccgaaacaccaaccaaaatcacatcttttctcacttaaaaaccccagtaacaattcctctgttcaaattcgttaaccgttggatcgactccaaaattctactggaagtntctactacataagcctcacatttgaccgctgggatctactagcaaacatccagaacgcattctggactgctc

SEQ ID NO: 160210 - DNA, 468 bp, Glycine max
  unsure (1)..(468): unsure at all n locations
cgctntgcggattcggtcttcctccaataaatttcaaaccgggtctggaaaaacgcaaatctgatcatcctgattttatgaacgccaaaactgcggcaaatgaaaaggatgacaatgagggagaaacccttgctatgattgccattcctacatggtcaaatttcccatcaacccaacaatgtcattacttacccaaaaacagtccctctcacccaatcatccataaaagccatcctcaaatcacccacaacgcttgtctgcttaccacacgcccaatgcctaaacaccacctttagcgcacaccaaaaaggaattttacagcaaaaagcctgtacgattcaccccaaaattccggtgtcacatgctaacttcgcttcatatctacttgataatgcaatggtagacataacccctgccacggttctcaacctccatttttctgaagataccactcgaacgcaacatgtg

SEQ ID NO: 160211 - DNA, 483 bp, Glycine max
  unsure (1)..(483): unsure at all n locations
nttctntctcttcatcattctaagttaggtccttcaacctttgtggtactctcatgttttaagctcactcagaaacacacactcgagacagaacnnacactttttttcggttcactgtcctctttctctcgctcttaatgcttccctttgcaaatcactctccttccctctttttttctccttgtggcgatggcttccctggctaattttccttctattgctcaggaatgatctcccttatcttcttaccaatgccaaagctatcgaggcctctatcttcatcaatgatagccttggcaagcctcttctgcttattaatggcatccaggtccactagtggagcctccttcaagttctattcaagagaaatcttcatagctttcaggttagtcttcctattcttttttggtttgcaacaactaaacctttggcattagggtgtgatgagaatactcgccatctcatagaagacatgatacacgt

SEQ ID NO: 160212 - DNA, 365 bp, Glycine max
  unsure (1)..(365): unsure at all n locations
ctaagcttgtcctaaactgcaggacaccatcgacatatattttggctgtcttcgaacgctccatgcctagcaaggctatcaacaactttttattaacggaaggagacaaacactactagtattacatatttacctctattaangcgtgactctgcatcttaacttttcaatctctttctttacaatcaatcttcaccatctaatacaacaataaaggatgacatcactcgatagataatagtatacaacatatcttaataatatttttaataaaaacgaccaaacttttaacattcttttttaaaactaaaactaaacatcctatatgtaaattcgtatgaaaaaaataccccatacttttacat

SEQ ID NO: 160213 - DNA, 427 bp, Glycine max
  unsure (1)..(427): unsure at all n locations
gcaaagagacaaatattccaactgattatagcagcatatgctcttttgagtgaaaaacaatgcgtctaccggggaacgagagtatgctgatgaaattttctcataaccataaatgagattttggatgtttagcatttcatttctaaatgaccatttagaggaaacactgcgttccacaaaaatagaagaaactcactcaaagcgtattaatctcgcacagataactgttttatcctaattccgaaccatagatatgtcacaacttgactctgcgaattatttcctatcaaatcaaagattacatgtgtgatcatggatcaatacgactctccttggaaatgcgctttcttggtgggctctccggcttttgagttctttcggctttctccttttntgtcttgtctgacgcgacgtgaacaactcaccg

SEQ ID NO: 160214 - DNA, 381 bp, Glycine max
  unsure (1)..(381): unsure at all n locations
tgccgccacggagttntccgactctgctcttgtgtggtgtaacacgctacaaaaggagagagcaagaaatgaagagccaacggttgatacatggacggagatgaaaaagatcatgaggaagcggtatgtgccggctagttactcaacggacttgaaattcaagctccaaaaactaacccaaggcaacaagggggttgaggagtatttcaaggaaatggatgtgctcatgattcaagcaaatattgaagaagatgaggaggtaactatggctcgatttcttaatggtttgactaacgatatccccgatattgttgagctgcagaagtttgttgaaatggatgatttgcttcacaaagccatccaagtggagccacaattaaa

SEQ ID NO: 160215 - DNA, 447 bp, Glycine max
  unsure (1)..(447): unsure at all n locations
tcctgccgcacccatatcaccgccgatgcagcttactccttcgcgctgagatttgtgttaaatatcaacggacaagagtgttacttgcttgccacttcccatgtctcaataccaccaagacatgagatgcacataactttccaaatctattgatcttacttccttatatctgatatcttactacttaacttctactgcataacaatactaaaaatatctgcgctataactcttctactctactcttaacactcaacaacattaattctttcttatccatacaaattaaacttacgtatcaacgagctcatgacaactcacgcacactattcaanccattgaactacacctcttttgtcaagaacattaatttaagccaacaataccgttcgttccattatcacttcgcacatatgctcttggttgcactggtgatacctgacaaacc

SEQ ID NO: 160216 - DNA, 353 bp, Glycine max
  unsure (1)..(353): unsure at all n locations
agcttctcgatatattatgcgcctgaattgtattttcgagtcaaaagctatgaccatctgaatttgttgagagcttccgctgctcaattctgagcctatcgatatattatgcgcccgaatctgacctctgagttaaaagtcatgagcatctgaattgtctaagagcatccattgttcaattttttgcgcctcgatacattatgcgcccgaatcggacctccgagttaaaagttatgaccattcgaatttctcgagagctctcggtgttcaattctctgcgtntcgatatattatgcggctgaatcggacctccgacctaacagttatgaccacttcaatttctcgagagctcc

SEQ ID NO: 160217 - DNA, 74 bp, Glycine max
  unsure (1)..(74): unsure at all n locations
atagagcaatctaaatgagtataactgttcattacgatgtccgaccctngcacatcatatatcgacacgcccga

SEQ ID NO: 160218 - DNA, 422 bp, Glycine max
agcttacgggcaagtacgagcatgtgctatgtccatgatcaatcaatcatcatctcgcgtccggctcacgacgataaagaagcactcctacgaggcagcctactatctttaatcttgctctttaaaactcctgcttttatttatttgctctcttgaattatatttgaattcgcctactttatttgcaaccatacgagttttaaaaaaaatatataaacatgacaaggaataatcacaatttttgccaaacgcgttttcgataaaaaaaaaaaagagggttacctcacttaggccagcacctctgacattggtttttaaaaggggagggggtgaacccattccttcaccccatttcttccctacaactccaaaaacactatcgtttccggcaatcaccaattcaccaccccccaccgccccca

SEQ ID NO: 160219 - DNA, 441 bp, Glycine max
gggtatgagtggaaaattctgctgcaagtggtacactcaaacttgcctctcttgttagagttcttgctagatttacgttctcaagccttgtccatccagttcttatttgacttcaatccagaaccagaaaactttgtcttgattgagctgtactttataagcaattctctaggatgagtttgtctagactctataagcattttctggcacctcatctgctactagtaataaataatacattaataaagtgaaactctaattctaacagcagaaaaatgccaaaaacacctaataaacgatatatatgttttctccaattataattgcacacataccatctaccaaaatcttcaaacaccgcatgacaaagactgctgcaatgaagccagcacgagtcctctctgtggatttttaagacaccagctggcaattgtgctccaa

SEQ ID NO: 160220 - DNA, 363 bp, Glycine max
ttattatcagctaagtgataacatgacaccatcttaatagctcttctaatgtatatcagtcgttcggatggtctcacgtgattacttgcctgacatcatacactaacaacaatttttttaatatattaaacaattctttttaatagcgactcaaccaacatcggatatatattatatacgtaaaagttattcaagattaaaataacaactatatatacttgcacattaactagtaaaaatatatgagagctgcccactaaccaattaaatgtaacgtgagctcgcataaattaaatttaatgcgcacccactacattcacacaccctacgcattatacgacccggtctttatttgttattttc

SEQ ID NO: 160221 - DNA, 364 bp, Glycine max
  unsure (1)..(364): unsure at all n locations
attacaatcgatctcgaacttgaactaatctaacactgaacacgcaaccgacttaacagcccaaaggcctntgtcttgaatataacacagtgacctctaggcggtacactcagtatgatcgtgaaccaagactctgcagctgcgatatcgtcatgattgcaaaaagtactctcccatcgacattgtatttcagcacctctgtctctggtgaacactagcgctggactgcatgctgatcagcttgaacttggccagaattagattacatcttaggatcaacccacgctcggagaaaatcatcccctccctgaacaacactagagtatgaaacaaccatgcttctccacacgatagtacttctcct

SEQ ID NO: 160222 - DNA, 428 bp, Glycine max
  unsure (1)..(428): unsure at all n locations
agctntcacaacggctcctgtntttgttttggtctctgcacatctttacacaacaaaatatctcacaaatctctggaacttggacatttctctctagaaatcctagacatgcaaagctctgaatcccagtccaaactccctttctaaaatctgatttcaggcttaaataggtgtccttgttcgtgctcatgcgcttagcgcacttatggaccgcttactgcacattagtgaattctggcttaccgcgtgcctatctcgcttagcagatgaactgaagtggcgcgcttagtgagatgaagcggcgcgcttactaaacttgtacaactcatcttcttccagagtcttcctcgcgcttagcccacgagtgttgcgcatagcggacgctcgctagccagcacgtggcttaacgagaactgaaaaacacactt

SEQ ID NO: 160223 - DNA, 419 bp, Glycine max
agcttagataccaccagcatcaacgaattatggcggttgatggaacctctccaaatgcaagctttccgcaagacttacggaaagatcttacagttgaccttagcagaggtatccatagaagccgttgcatcactcacccaatactacgaccagcctttgagatgcttcacattcggagacttccaattagtaccaaccattgaagaatttgacgaaattctacgatgtcctctccggggaagaaaaccatatctttcatccgggtgtctcccctctttgagcagaattgcaactgtggtcaaggaacgtttggaccacataaaacagactcggaacggcatagcgggcctaccacggacgtacctaaaagacaacgcaaggcgtatggccaatcaacgagatcgggtcccgttatggat

SEQ ID NO: 160224 - DNA, 453 bp, Glycine max
tgaaccataacccagcgagagtgtgatcttaaattgtgagtgaacgactagcattgaaaaatagttcttgtatcaaaatctctgaattttagaatgaaatgcataagtttgaaagtgatgaaggccattgttctatttttaaactacttgaccagaaggcttaccttaaattataattgtatcctttgcaccctttctgagctaaattgaattttcaaatcgaactctaaacttgaatgaatatctccatctaccttgcttaggttctaggagagcatatggttcaaggaaatttgccctaaatttgggggagttagttgagatgtgaagtgaaaaggtaagacacatcaacacacacaacaaataagttttatgcgttcaaaaaggaaaaagagagtaaaataaaaagagtgtgtgttcgtgtaataacgcaaagtgcaacgatagtgagtg

SEQ ID NO: 160225 - DNA, 338 bp, Glycine max
  unsure (1)..(338): unsure at all n locations
agctngcccattctctctctctctgtcctattgattcttcttacccttgatgatgaaccaagcaaagcgttacatgtatagtgataaatcttgaacgaaatacattatactcgctatagagatacgtacttacgaaagtgtacattacaagttctgccattttatgggatcttattttttctccatgctaattatgttagctggtccacaccaatgtatttttttcgtactaaatttatctatcacctctcaagattttgtgtacgccttacaacaaattttgtaattaatgaaaatgacattttggctttttcccaaaatttttgcttccaccatga

SEQ ID NO: 160226 - DNA, 420 bp, Glycine max
gaggtgagcttggaatctctgctagaaggtactgttctgatgctaaaactatctacttgctcctgttaataatatggaagaactttagaatctacttcaatgatcggtgccattatattgacaaacatgaatgctctctttctttatctctcccttgtatataatctctaataactaatttgccaagatgtgtcttgccatttattgatctttgagatctgcattacattgggtaccactcgcgtgaaagggtatttgggtcttttgttatcgacgacatcttattgctatacaattagaggctctcataaagaactagcgctccaattgcatcatgtctaactgctattatttatagccattgcacaacatgaatgctctctttctttatctctccgttggatataatatctgatcact

SEQ ID NO: 160227 - DNA, 373 bp, Glycine max
  unsure (1)..(373): unsure at all n locations
cacgcttgggcgcatcgcccaactgaattttatttacntgccctcacaaatcctaacttgtatcatacaaaggccagtccgtgactaatggccccccaagtcggacactacaaataacagatcgacagaatgcctcgacggagcatagcacacaagatacattgtgagagacagagaatccataacacgatacacacacagaagccagatattttccttcttattcttcctacagcgcacagctctatatatacgcccatgtgcgcgacaaaccgaccagcacagacagtgactccacaaccacacacagcaacataacacaccacataacacgatgctactcgacgcactaaaagacaagcactaataaccg

SEQ ID NO: 160228 - DNA, 458 bp, Glycine max
  unsure (1)..(458): unsure at all n locations
tggactcacatttatgtaataaactctcttcaagctgttacacaatgaaaatcattgttttaattaatcgcttgcattatccaattttgacatgtgtacgcttcattgtaaaaacatttttattgcttggatgatgtggatactttcaagcaattacaaaatctaaccttcgtctaccgataaggaagtagagttgttgttacaaccataaacaacccaatacttacatgaaatatatgaggtcaagaaattgacctttcatcactctcttcaacttttctgtttgacttgtcttagtgaacaacaacctaagcctgcatatgaagatttatcaccaagtgaaatttcctattgtaaaggtattnctttggctttaaaagctttgggtgctagtcttgctaacagatgtacagaaccatgacaaagtgaattgacaaaactacaagagattcccaatg

SEQ ID NO: 160229 - DNA, 412 bp, Glycine max
agtcgactgcacgcatgcaagcttctatggagttcttttaatgcctaataataaaaaaatgtagtacaatttaatcttccattcttgtcttattgactctcaactgtcaacactctacttattttttgtcatctattttaacattggggagccgtaaatgtctaccttgttctgctacgatattttaagaaaatgtataatatatatatatctatatatatatatatatatatatatatatataaacaattataaacttctatttttatatcttttattcattaaattttattatgcatcacacgttaccatcgtcctccaatttttttatcaactatatctttgtcgcattcacattctctaacatatgagacgcaatcaactcacccttttcggttattctacctatcac

SEQ ID NO: 160230 - DNA, 464 bp, Glycine max
  unsure (1)..(464): unsure at all n locations
taacccacgactttcattctttgtgcaggtaaaaagcatgtgaatatttgtttcaactttaaatctatataacagacaaataatgagatacaatacgccactagaattcaaagttgctctagttggaatgtagcctctacgtattcttnatatcaaatttcttactcatgatgaaacatttgctctctaaatttcttattcattatccattacctcatttattatcactctatacgcactatttactgaatatacttcatttgatgtataatctcatattttagcgttttgttgatcaacatttaacaataatattcttaagatgagcttcacatcctccactttaaaattttgctcaagaaatacgtagttccaacaaaaagtgtctttatccataaactcttacttttaaatcctccacgccacttagaggtggagttcgaatgagtgcataatccttatgc

SEQ ID NO: 160231 - DNA, 329 bp, Glycine max
  unsure (1)..(329): unsure at all n locations
tatggaagaaatatgtgttctcaccgccccaactaagcattcatccaactcctcaaaacttcacacttgatgaatntacactgataaattttttctgctctcatgtggatctgctattgatattagtgatggactgacatattcggatttgatcattaaccagattgacgtgagaacattatacttaatgtacaaattatgataattacacatttctatatgaccattttcctatgcaaatcatcggtttattccttgctctttctttatgaatgctctggattgcgcactccgctcacctacattttcttatgtccccttttatatgt

SEQ ID NO: 160232 - DNA, 84 bp, Glycine max
  unsure (1)..(84): unsure at all n locations
tctagacaatgcatcaacagagatattctncctcactgttttatactgtatggtataatcataaccaacgatttttggtaacca

SEQ ID NO: 160233 - DNA, 437 bp, Glycine max
tctgaccccctattttaacccccgccgcagcagctccagaggactggcgactgtgttttatttcacgcctttatgccttagatctcaaggaccctctcgatcgccaatatacttttcctgctatccactcccatacacattccattccttgtaaacatgctcatatttggcattctagatttggccatctctcaaacacagttttcacacatttgaataataaaattggtctgtacctctctcctaatttctcttcttctaattgttatgtttgtcctctcgctcaatttacaagactatcttttcctaactctaaccatttatctaaactagcatttgacttaatatactgtgatatatggcgtccctatgctcaacctacctatgacggaaggagatctttccttacattggatgatgattactcaagactcact

SEQ ID NO: 160234 - DNA, 299 bp, Glycine max
  unsure (1)..(299): unsure at all n locations
tgtcactggagctgagccatcaactgccttatctcttttcgactggtgattnctaggctcttgaccttgacttgatagaacctctttttaagcgaaggcgcttgactcgatcccatgctttactaaagtgaaacaaaacccagtgcgaaacaacaactccacatctatcatgggtcgaatggatgaatgcatgaagaaatgcaacggtatagatgccatttatgaataccggagcccgggaaatcgtccccttcttagatacaacatttgggcagcatggcgcctgacgtatgtattta

SEQ ID NO: 160235 - DNA, 363 bp, Glycine max
  unsure (1)..(363): unsure at all n locations
cacttttggataaacaagacccttgtcttacttaaagaaaagttttattggccccctatgaagaaagatgtncataagcattgcactaagtgtgtggattgtttacaagccaagtctacggtgatgcctcatgggctatacacacncttacccatccctttctcaccttgggtagacattagtatggactatgttcttgggctttctacaacacaaagaggtgtagactctatctttgcggtggtggatacgtttagcaagatggcacactctatatcgcgccacaccgtagatgatgcttcccacatctcacaactctttntcacgaagttgtganatccattgtttgctacgacattgcgt

SEQ ID NO: 160236 - DNA, 437 bp, Glycine max
  unsure (1)..(437): unsure at all n locations
tctaanattattctttaatcatgtccttcaattgaatatgatcagtaactaaatcaccattatggtctagaagacccttaatagagttagtcttcttcctaatcatagctgaaaaatgaaaaaaaattggtgttacaatcactgtaacatcccatttttttgtaaaataaattaaaaagactttttagttaaaaaaaagaaatagagttttacaaaatggtgaggcttttataattaaataaataaggagaaataactgtattaaaataatggtttgaaggaaaataaaaaaaaattaatttattcatttgattggaaataaaatagagttcatttttataaaatcagaaaaaaaaaataaataccgtaaataataggttgtgagtaccttagctataaatagagacatgttaagtaactttttagaccgatgatag

SEQ ID NO: 160237 - DNA, 466 bp, Glycine max
  unsure (1)..(466): unsure at all n locations
agcttcatcttcttcaccacacaaccataaccacaacctacacctccaccacacttgccattattcttacctattcctatctttgaggagcctgaaatggcgggagaagaacattctacaacgacacttggagactatattgcacatgttgcgcaaaggcacttcatattggaatgtgttattttggctattaaaggttgtagtgtcaatctataattaggattgctcccatcaattggtcttagcacatctctcaatttcatgtaaaaaaagttaatggaccggattgggtaatgctcaccactacttactaatatattcacacacaacanaaccactacttattaatatttgaagatgtttaactatacattttcattcaatattgctacttttacgtacactaattagattcagtaaaaaacaatacactaattagaaatatttattatcattcatttatact

SEQ ID NO: 160238 - DNA, 393 bp, Glycine max
  unsure (1)..(393): unsure at all n locations
tgtcgagttgttntcttagccctattctctttntgcttttgcttcttccttaaggcattgtttcttctacaagttcttcgaatctcttgatccaaagggactagatcttcttaagaaactctacctcacatacatggaacaaagcaactaaagaacatgttagcaaagtactcaagagaaatacaaaaacagaatttaaaagcaaagaattgaagaatagtgaatcattgcatacaatatgaaattagcataagttgcctaatacgagaaataagtccccgacaacgatgccagaaaacttattacatcattgacaaacgtaccaattagtgtagtattttcaatagtaagtagaaagactgtctcctaaaggacttgtttgtactaagcttt

SEQ ID NO: 160239 - DNA, 421 bp, Glycine max
  unsure (1)..(421): unsure at all n locations
tctgagtcacctgacgcatgaagctcgatgctcagctgccgcaccattgatttcaacctacaaatcaagagtagtgtttatgttgcttaacgcttgcatagctacaatttttgtttgcttatgctcaattatcttgaataacacaattcaaaagatcctaagacttatttgactcacaaatcctgccacaactcagcaccacatctcagcaccacaactcaacttcatcatacgcatcatgtacgaaacttagaaaacaaaaaaaaaagagttcaaccacaagactacttctaggaattgatttagaacatgttatgaactaaataacatgcatgaattagactcaaaattcanaagatacgctaagaatgacaagaatacatgaacaaatgtatctagaattccatcaacaaaataaaaa

SEQ ID NO: 160240 - DNA, 437 bp, Glycine max
  unsure (1)..(437): unsure at all n locations
cgaagcaatatctagaaggctagaacattntgtgaaacaaaaagatattcttggcttgcaaagtgcttctacgagagtctcttgtagaacagctacagattcattgattgaatctgttgttgtggcacgagaggatgagaaagagaagctactacacatgcttctatctgatggtgacaacaagaataataataacatagaagtgatcacaatattgggcatgggaggtctgggaaaaacaacccttgctcaatgccttttataatgacaatgaagtacaagatcattttgatttgacagcttgggcatgggtgtcagatgattttgatgttcttaggctaacgaagaacatcgttgagtctcttactatgaaggattgtcataatactaatcttgatgttcttcctgctgaattaaagaataacttaagagagaac

SEQ ID NO: 160241 - DNA, 328 bp, Glycine max
  unsure (1)..(328): unsure at all n locations
catggcagaagagcatgaccagaggattactcttgaggattattccagtagttcagtgccataattttttaccagcattgtacgtnctgaagtgcaagctaacaacatcaactatccacattccttaatttatttagtacaggggaacttatttcaaggattacctaacgaagacccttatgcacacttggcaacgttcattgaaatatgtaacattcgtaagattcgcggcgtaccacacgaagctattacgctcaacctcttctcattcttattggcacgagaagccagacgtggctccactcattcacggccacagtctaaaacc

SEQ ID NO: 160242 - DNA, 379 bp, Glycine max
  unsure (1)..(379): unsure at all n locations
gaactatcaaantcaagcttctaaggaagctacctagtctataaatataagcatgtgtaacacttattgcaactctgatgaatgagagtcttgtgagacacaactcacagttcaacttctctccctttttttccttcaatttcgcgctcccccctctctctttctctccctctttcttttcctccattgaagcaccctctccaagccttttatccaaggctcatcttggcggtgaagctccttcttccatggcttattccctagtggatggcgcctcctctcacctcttcntctttgtcttccgctgcatctncatggcggaaaatcaccattaaaggacctcattgaagctcaaagatctagnctccatagaagcccc

SEQ ID NO: 160243 - DNA, 405 bp, Glycine max
agcttcagaagagagataaaaaacggtttttctcagctctaacagcgcaaatgtacgaatctgatgaattacacaactctgatggatccatagatgatgaaacggccctcctgtctagaaagttcaaacagatgatgaagaagaaaggaacgtttcaacactcctttagacgcacggaatcacgattcacaaagaagaaaagggaggaaaacaatgagatcatttgctttgagtgtagaaagcctacacacaagacggcttaatgtccccaactgtaaaagaagagatattctacggacaacaaaaagaaaattatgatggtcactcgcgatgactcacacagtgagaagagtaatagttttgacaatgaacacgcccacattcgtctcatggtagatacatatg

SEQ ID NO: 160244 - DNA, 413 bp, Glycine max
tggctcgctccctctgcatctgttgagaatacgctctatacttaagatccaaacgattagcttgagttcctatagtttgatcaacatcaaatagaggagtcttaatcacctatttcttcattttcttctttatgtgcctttgcacatactctgggaatttttcagcaatccccatcttcacgaaggtagcaccctttagctaagttgctccaaatgatggctccatcaaagagacctccactctagatagccttagaatttgggtgaagagcattccataaggaataaggctcttcttcaccttggggttgaacctatccttgaaggcctgcactccataaaagacaatcttatccagattcacccttctacctaccatgactttgtagatgcaaaaaatggtctttatcgct

SEQ ID NO: 160245 - DNA, 379 bp, Glycine max
agcttattttctggaaaattccttctttttttggtgtttttgctcgtattaagggtggtgtctggcctcggatgtgcaccacgcaggttctgtggctgatttacgggcggcctttatggatgattgggtgttcttggctggtagggtggtgggtaataagaacgactgatattggctgactattgatattgttgagccagcgggaaatttggccatgtaggaatgacagtcacaacacgggtttctacccccttcttattctctccattctccctacgcttcctatttatcacagcaggataatcaaatttgcctcttctcagacccacttcgatcctttcactggcgaaaactaaatccgcaaaggttgaacgcatgt

SEQ ID NO: 160246 - DNA, 451 bp, Glycine max
  unsure (1)..(451): unsure at all n locations
catgcagcttggggctgctgttctcgcacatctcgtgagcttggcggggttttgaagcgaacgggaagagttntgggtgaagaaaatgttccccctccacccctttatattttcgtacaggggttgctcgcccaggcgagctaacctgtactttttttatttttagaaacattaaccatgccttccccccttacgggttagcgtttgcctactccaacccacttaagttagaatcacgcgtcgattactttatttaaaacaattaatacgtaataaaatattgtgaattcaaaagatactgggctgccatgcagccacgttctctgcttgtctagcgcccggaagggacaacggtcggccgcgacctatcctcatttgctccatcctaagtacctgcaagacgagaaaacaatacccggcaatcgcgaccggccatgtttacttggtgatt

SEQ ID NO: 160247 - DNA, 413 bp, Glycine max
  unsure (1)..(413): unsure at all n locations
actcagctcttaaggaggtgagcttagttatgacaggggtgtgtgtagctcagttctagcttntcacggaagttttctccaagaagcttctcaaggacgttttctcaacaaagcttctcaaggaagctacctactctataaatagaaccatgtgtaacacttgttgtcactttgatgaatgagagtcttgtgagacatacttcaaagttccacttctatacctcttttattccttcaatttcgtgctcccccctctctctttctcttcctctttcttttcctccattgaagcatcctctccaagcttcttatccaacgctcatcttggtggcgaagctccttcttccatggntctattcttaatggatggcgcctctctcacctatcttcctttgtcctccgctgcatctcca

SEQ ID NO: 160248 - DNA, 317 bp, Glycine max
  unsure (1)..(317): unsure at all n locations
atctcacttctatctcttttaagtgcttatcttttacctgaataatgtcaccccaactccacacaagcttatcttgccttccagcttcttcttccataagctcagatatggttctgacatcgcccatccttcgcacatgttccccatacatactatcgatcttgtagtcatctcgcccgggcaacccatgcataaaggccccacttcacgccagaattagtaaaccaatccttttttcatgatgatctaattnatatgctcctctcaacgccaatgcattatgtaagcctgcccgttttattgaatccacagagcag

SEQ ID NO: 160249 - DNA, 381 bp, Glycine max
  unsure (1)..(381): unsure at all n locations
tactccatctggcgctcttcatttatctcaagctaaatatattagatatatacttcacagagcaagcatggaagactgcaaagggatttncactcctttacctgcaaatcttaagttgtccaaaactggtgttgacccctttgacaaccccactctgtacagaaccattgtaagagccctgcactatgctacaattaccacacctgaacttggatactcagccaccaaggtgtgtcagtttttcgctcagccactggtctctcattggagcgcaatcaaaacgatcttaacatacttaaagggctncattgatcatggtctcacccttctagctgccaccaccagtgccgctctcagcattaatgctttctgcgatgcaca

SEQ ID NO: 160250 - DNA, 406 bp, Glycine max
  unsure (1)..(406): unsure at all n locations
ttgccgtcagtcgccaggcgagtattgttttttctccaaacaaagccttctggggaatcttctggagggcccaatgggcctggtgntattacacccccctttctactaaacgcacccactttttctattttcgacttccgccacattacggaatttaacggatcgcgcaagcctgcttcctttatatttctgagacgtctccggacttcatttattgtgcaacaaaggacgccaagtatctcaaaccggctaacaaaagattgcatgtcatcaagtaataatcccccgacgacattacgcgatgacagctgcccctctttacttatctntcatcggagaaagaggaaagcaagatacgaactcgattctccccctgctttcatatgacgacctcgcctacttttct

SEQ ID NO: 160251 - DNA, 261 bp, Glycine max
  unsure (1)..(261): unsure at all n locations
tgtgatcttnctcaatagctcatggacctctcttcaaactaaccttattacaacattgctgtcttcccattttggaactttcaccttaatttgccacatcaagaaatcattatcccttgagagttaacaaagtgtgacaacatacaacacgagctatttaacgctgaagcaaacatgctgccagttcattcacacattctaaaaaaagcacgtgctctatgatagcggcgataaacgattgcatacaaccgccctttactt

SEQ ID NO: 160252 - DNA, 324 bp, Glycine max
cttcgctgctctgattactcatggatccattcttctttctgccagtctttgaacaattctattttcaaaagaaaaacactgttcagctcttcacactggttctattttccaagttaacaagataataatcatgtctgcttgatgggcagttacatcatacacactattctattctctttacgatagcactccaagtatctgcaccatcttcatgtaattgttaacgagtgacattagattgacgacaacttcgttaatggcaaaatttaatagaaaatattaaataaattctaatgtcttaattaagaatctaaaaagctttta

SEQ ID NO: 160253 - DNA, 448 bp, Glycine max
  unsure (1)..(448): unsure at all n locations
taagaacaagaatggctaacacttactaaccaagaaaatgatgagactcacaaggatataagatatgacggataaaactcagcacatgatgtgaatcatcgaagccgaaatatccacatgtaaaccctgctgcaagtagtaacatggccctattagtattaatcattatataacttccagggaaagaagaaactgacggatccctccctatatatacnccaccatttaaaacacaaatcatttcgctcctatttgggatgaacataacgaaacttaattcatgtcancacaaccacaatgagagcattgagaccaactggaaagtgaacccccacattcaggtgaaatatcatataatcataacgtcattaaccactttctctcatactatcatcaccggcattcagaacacaatggcgggaaacctatccaaccatgatcctacttc

SEQ ID NO: 160254 - DNA, 281 bp, Glycine max
caatcatgcttaggccttgccattaaacctcacacacccattctcattgttcaccccacacaacgaccaatgaaatgcctttctgaatcacgtatggtacaggcgccatgaatcccatcaatgttggggaattatcgccaaagaggcttttctcaagaacaacaaaatgaggagaacaaacgcttgtcaaaaccaacgtccgctcttggtgagcctcgacaaaacccaagtcgagcattccctagtctaagactcatcacccaatgcctggtcttagtgag

SEQ ID NO: 160255 - DNA, 402 bp, Glycine max
tggacttaccttgaattaattcctttgatagcccttctgagccttgtttccctttccttgttctgaagctcactacaagccttaagtgaaaaaccatgatatcaccgtatccttaaggaattttgcagctttggaattgttttgggaataagtgtgggggggttttgcttcattggataacatgttttgttggctatgcttcatgatgtattttgggccacacttgatgtacattgtatattggttaatgttggacatgttgaatgagatgttgtttctcaaaggctacagacgacaacacaaatcaaaaaacaaaacgaacagccatacagtcgagtgaataagatcttaaatggcaaaagaatgatgagactctcggctctactctctatgtctaaacct

SEQ ID NO: 160256 - DNA, 428 bp, Glycine max
  unsure (1)..(428): unsure at all n locations
attcttaacccactgccgcatgcaagctngaacggaccaaaagtgctattgtcttgtgaacggctttatgagactcatgagagagagtaccggagatccctcctcacttatcacacacaaccatgcgcatgtggcggggtcttttctgggtttgcgttgccgtccgcgtcattcgtacaggtaaagaatcgaaatattcacatactgcgtcgtgtaaactttatccattttcttttcatggaaaacattaacgataaatccacatacacgtccccccaaaaaaaagactctaattataaacttaatcttaacttattcaatttgattttaacatttctcacacattaatttaatcactaaatttctaaaaaatttcatctgactatatacttttaaacgaatctacttcacaatgacactaaattttt

SEQ ID NO: 160257 - DNA, 457 bp, Glycine max
tctttggtctcgctctcaacaatcgcaaaagtaagtggtaaattgttcatactaccatcttatcttatggcaatcaacaaagtatcatgatatttttgagttaaaaatatcccatctacttgtacaattgacttgcaatatttaaagccttcaatgcatgggttaaaaacccaaaatacacgtttaagaatcaccctataagattcatcctcaccatcctctattaaagatgaagttttgtattttactattgtacttggtacaaagtgttgagcagttgttaaccatacaggcaaataattgtatgattgttcccaacttccaaatgtcaagggctttttgtttagttatccatgcttttttgaatgaaacaatataatcaaaccgttgtagtatatctgcaatcaaggctttgatttcgatactacgatttcgtttcaccaaatgaacaatatta

SEQ ID NO: 160258 - DNA, 390 bp, Glycine max
tgtatctttctcacacataggacatgcgctatgtccttttacactatatccactcaaatctcatatgctacaaagtcattaatggtacaaaaaaccatagcacgcaaggtgaacgtctgctgcacattcgcatcccacacacgaacctcctcttcccataattttctcaagtcttcaatcaagggagtaagatagacattaatatcattccctggcttccttggaccaactatcatcatacaaagcataatgtactttcgtttgatgctcaacaaatgagggaggttgtaaatcatcagcaaaataggccatgaactgcggctagtgcttaagctaccaaaaggattcattccatccaaagcaagaccaagcctaaggtttcttgggtcg

SEQ ID NO: 160259 - DNA, 470 bp, Glycine max
  unsure (1)..(470): unsure at all n locations
gcaagcttagggttcaactcaatcaattatttttttatctcacaacgggtgcaaaggattcatcattcacaaacagggtaagctatttggctaagtggctaattcaatcaatcacagccttcatcatttccaaatcatgcattcattaattattcacagattcatgcaaaaattggtactcaatgctagtcgttctctcacaattaaagttcacacaactcactgggttatggctaatgattacattcactatttatctatcaaacaaactaacaatttcactcatgcccctaattcatgttctttctcttctaattacctcatacttattcaaagcatgtgatctaacatcgcaattcactcaagtcatgcaatcaatcaaattcaaaaccaatcaccaacaccagaaatttaaaccaaaacaaaccactgcataaaaataanaaaactcgtaaatgttcacaatctgt

SEQ ID NO: 160260 - DNA, 358 bp, Glycine max
ctagaaattctatacggtttcagggcttttcatcagctctgataaatctgccatatactcagccggtattaggcctcatgagctttctcatattcagcagattactggatttagcttgggtgatttccctttcagatacttaggtgttctccttttatcatctagattaaatgtatgtcattatgctcccttggctttcaagattactggcctgattcacggatggagcaaaaagtctttatcttatgcaggtaagttagagttgatcagagcggttattcaaggaattgtgaatttctggatggggattttttctttgccgcaatctgttatggaccggatcaacgcttcgtgccga

SEQ ID NO: 160261 - DNA, 73 bp, Glycine max
cacacatacacacatctacatatatacatacacacatctatacacatctatatacccatatatatatatatat

SEQ ID NO: 160262 - DNA, 423 bp, Glycine max
  unsure (1)..(423): unsure at all n locations
ttggttntggctntggttctggtgagagcttaaggagttataactttgtcnaacttgggaatactgaatatgcatctattttcattcccctcttcatcaattctcaaaataagacattttttctatgtttttctccttatgcttattcagcaacaaatccagcgtgcccacatttccgattgaagaatagaccgccttcttctataaccaatttcaaatatgttctctattgaatctgctttgtgctaccaacaatagaatctatgttttataatattatacagtcacagtncatagctcagttcatttaaagatagcatttatgtttacttcacataataataataatataaatcattctgcaacgtttatatcttatgatattataaattacgccacgttatatgtcgtcgaatacgagaa

SEQ ID NO: 160263 - DNA, 408 bp, Glycine max
  unsure (1)..(408): unsure at all n locations
acctgcacgcatgcaagcttnttatccaacggtcatcttggtttattatctcttcttccatggcttattcgctagcggatcgcgcctcctctcacttcttctcctttgtcttccgctgcatcttcatggcggaaaatcaccattaaacgacctcattgaagcctaaagatccagcctccatagaagccccacaagcaagctttcatcaagtggtatcagagcacaagagcttcaagtaggtgcttcttaaacctccattaatcttttgctttaccttctctctcattggtgcttcttcattttttctccatgtatctcctcacatgtcttatgctaaatgttgctaacatgattttttagagtcttcacccattaaacttgctatacaagctagatttgattttctat

SEQ ID NO: 160264 - DNA, 253 bp, Glycine max
tcaacatcagaccacttccagggcgctggttctactttacatggatttgatggggcctatgcaggttgaaagccttggaggaaagaggtatgcctatgttgtcgcggatgatctctccacatctacctgcgctaactttatcagagagaaatcacaaccctttgaagtgttcaaagagtcgagtctaacacttcaaagagaaaaggactgcgtgatcaagagaatcacgagtgaccatggcagagagcttgaa

SEQ ID NO: 160265 - DNA, 420 bp, Glycine max
  unsure (1)..(420): unsure at all n locations
agctctctagctcttcattgctgtatttttatctccttttggcgctctaaatcgtgggaatgtgctcacatatgtggggcaattttggtttgttttcttgctcgattaacttgaattgggggtttgtatgagatggccctacgcctataatgcattttgaagtaatggggcatgccacattgtccnccttctcttgctattgatgcctaaacgtgcgcccaccacgtgttccgtgaaatgcctcaatggcattagcgcgtgatttttgtagggaaacaacccatggggcgatttggtttgcacatattcttgggacatgcattcattttccaaagagctagagtaattgccccacatgtgtcctangcctacgaaccaaagtttttatgtaaaactacacaaaaggacgcgctattgggt

SEQ ID NO: 160266 - DNA, 358 bp, Glycine max
tatagcttcttggtagtctcttagtaacttttaccttcttttgaaatactacttgaactagtatttctaaaaacgttagctcttagctcataccttttcaaattttcttccaattttattatcgatacatttattcatttttctaatttatcttttttaaataaatcataattttattatttttctatcattttacagttttcacttacttgaacaagtacttttatcgaatacttataatttggtaagctagtttttcaacaactatagcttctagctattacctagtttcattgaacataggctatgttcaccacaactaggcggaaagttagctgataactgaacagctaactta

SEQ ID NO: 160267 - DNA, 402 bp, Glycine max
  unsure (1)..(402): unsure at all n locations
gtcacctgcacgcatgcaagcttagccctagaggggatggacctttttatgtttcggagagggccaataaaaacgcctataggttggacctcccagatgagtatggaatcaacaccacttttaacatttcttatttaattccttttgcacgcggagctgatattgaggaggacgaactaacagatttgaggtcaaatcctcttcaacgggaagggaatgatgcaatcctccctacgaacggaccactcactagagccatgagcaagaggctccaacaggattgcgttagaactgctgaacaacgccttacgattctcatgaacctcaaggtaaatttcttagcccatgagctaacgttgggtnccattatctttgtacatattacactangatgtcattata

SEQ ID NO: 160268 - DNA, 402 bp, Glycine max
  unsure (1)..(402): unsure at all n locations
tcttgtatcanaagcctagattcagatgttgaaccatttccaatattcagagaacgatggtccacatcaagagttctccattgtcataccctacatgtgaaagaaaaaagaaacaacgctacaatatatatctcaccataggaacttgagagaggtatggtgtatctcatttgaacccaatgccatgatggctcttgatcaagctccataactgaaatattaccattacaatttgaatgtcaaatgttcctaccaacacaactacatgctcataacttacaaagctctacttcatagcttgttccacattagacgtactaatcgcataaaggcagaatgactatcaaggaagtgatttcttctctagctatgtacacattacaaaactggctcttgtctatg

SEQ ID NO: 160269 - DNA, 417 bp, Glycine max
tacaatccacgcgtcaaaagaattacatgaaagcttcacaaatgtcaccgactcgcacgaaaagatgtacgggcgaaactcgaaactctgtctgaagcttaaatttacagatactgtaaactgctgaacattgtgcagcacagcatatttcatcagcctgttgaagagcttgggctctgccataccgcaacgcgtgaattcaagattgagcagggaaactgaaccatctcggccagacagaacgcgagacacaaatttgttgaatttgacaacattgttaaagagggttgtattgaatccaagataagttagacgctctcaaacgtccttccatcttttagacaagacacaagtctgtacagcatatcttgcgtccataaattccattatgtggagcacaacacagtcacgccactc

SEQ ID NO: 160270 - DNA, 461 bp, Glycine max
ttgcgtaatcgactacacttatttggtcatcgactacaagtgactgtttctgactacataacaagatgcaacctcttcaaatggttttttgactttctcaaattggctctaagtttttctaacagttataactcttctaaatggtcctcttggccacacatggagtgcccataacagcaagggtttgatttgctttttaatacactttttacacttatttcatacaatcctttacaagccgcgaatctctttgaacttgtttctcttctttgtaccaaaagttttctgaagttctctggttttccaaaccttgaaaacttgtgctattcatctttttcattcccttcttcctttgctaaaaagaattcaccacggactaaccgcctgaattcttttgcgtctctctttcccttctccacaaaacaaggactaccgcctgaatttttcatgtccccttctcc

SEQ ID NO: 160271 - DNA, 458 bp, Glycine max
atgcaagcttatgaaaaaacatgctctccactatgttatataatctacaagcaagccgcgtcttttaccagaataacagcatctctggctgccatagtgacaatatcagcgcacgacacaacttcagcgcactctgattcaactatgttcttgatcttatcaacaattcccaagccttttaaagagtggatgttgcgagccgcgtttttctcacctttaagcgtgattgtgccatcaagcaaaactgatccatcgcagccctcagcccaagaatgtaacattctgttagtgtgtatctacttttttctcattagattcatattggctttctaaaaacgaaactatacaactactaatagtactataattaccacgtccgtggcacgggtataaaatatgactacatatggttagcgtccgcacacggctggctatccactttatacattacagtaaac

SEQ ID NO: 160272 - DNA, 428 bp, Glycine max
aactcaagcttgactacgcgagtctattctagccttagtttcactgtatttattagtatattcgattaagaatgagaaatcccaaagagaaaacgtccgattgattttccgctttattttactaaacaaaagatgttttttgattattatattatttttcatctctttttgttttccaacgtggttacggcacgaccgaacggtcggaattcattttaaccgaagtttacggatcatacaattcaaacgttcggtggaaatctattttatttttaagttaagcgagaaatgacttaagtaaaatggcttaagcacgtcaacagggggtatgaaacgtaaatgaaacgagaatagaaatacaccaaacacaatctggaccaccaccggtacatagaatgaatcgaaaagctcggctcgaggtacttacc

SEQ ID NO: 160273 - DNA, 352 bp, Glycine max
  unsure (1)..(352): unsure at all n locations
tttttgttcggcgttgncaaaccatttacaatgtaggtttgctagggtttctcgtgccagctcaaccgcggctgtgtctcggccgacattggtatgttcccatgccctcggtcaagacaacatcacaccccatcgaaaagataacaacaacattaatcaccgatatcgactcggaacaaatgctggctgacgtccgccaggaaagatgaccgatcgaggtccaaaaataaaagaatcaccggatgacgccgatcgagcatctcctaatcgacatcatccaaatcttattcccggatcggatacaacaaacacatacctgacactagtggctatgtcctcccgactcgaattt

SEQ ID NO: 160274 - DNA, 306 bp, Glycine max
acgcatgatatcatcgctcctcaataccttactggaaatgctctaaccaacttcaccttctataatctcacaacatctatctaagaccaatataatcacaatgataatcatctcacttcacacattcttcgagcgacaagatcattgctcattaacctcttttatttcacatctgcgttaactatagaccattgcataatatatagcgtccactactctgatacagaacgaaacgcctacttgcggaatacaccaggccatatggagcacactaactactaacacggcattatttccttaagagct

SEQ ID NO: 160275 - DNA, 378 bp, Glycine max
  unsure (1)..(378): unsure at all n locations
ccgcttcagtatgatgtccttgagagtctcataccattccattactgctgttaacatatatccatcactcctaatccttttatataaatcatcatcggtcttcttcgtataatcttttgccatgtccacagctataggaatctatcacattgcagcgatttacaaaggaagaaacagaatcgtncattcaattatgatacacattttgccattgcgaaccagtcatataacacaccttacttgcaagcaagaatggaggccactgaatgacacaaacatgagtggaactgtatggaactaacagaaaatctctatccctgnaaaatcagtagcgaagagatatcatcagaagcttgaaatccacccatctaataatgc

SEQ ID NO: 160276 - DNA, 253 bp, Glycine max
ctacaaaactaagcttgcgttctttccattgctatcaggctcaagcattttggtttcatccacatcaactacctaaaatcatgattccctctctctttattcccatgcaaccccgcccatcgaatgcaaaacacaaaaacaacgtcacacaatcggaaaagacaaaaccctcttccaccaactcctacactcctatcatataccatagccttcgcatcccgccaaccggtaccattaacgctactctttttat

SEQ ID NO: 160277 - DNA, 248 bp, Glycine max
  unsure (1)..(248): unsure at all n locations
accttatatataaccactgcagcatgaagtatgaatcgcgccgtatatttttcattcnaactctttctcactgttttttcaaaaatgcgccaccaattaatttacaactcaccgacccaaaccagaatcacgactctcaacttattagcacaatactctaaccaatcgacttaatacgtccattatattataaaataaataatgttatacataacactaaactctctaatgtatatttaatgcgcatg

SEQ ID NO: 160278 - DNA, 464 bp, Glycine max
  unsure (1)..(464): unsure at all n locations
nttattagactgatcgtgtgtcatgagatattggcgatttccatcaaatcgcaattaatactaagagatattatatattggttctatgattcacatattatacaaagactgaccgatccacgtggtccaacaatgtgttgactgcttatcacatttctctgatttggggcatttcatcaccaaattcgtacgcattacatatgccaaaattgatctaacgttagctgtcaccatctttagctacgggccacggcacggtcacggttcatcccatgttcttgctagctagtttttctttttggttgaattgtacttgctcgttgctaggtccttgcttcataataatttatcaacttaattataagaaaaaaatacttcttattaacatatctctttcataaatgatccatcaatctttaattaactgaaaatacacaattaataagtaagtttacagtgttcgc

SEQ ID NO: 160279 - DNA, 285 bp, Glycine max
ctctagtggctggctctcgctgcttttttcttttctgacatggcgctggattctggtgtggtcttgggcattccaaaatgttcattctggaacatacctcgacttctacaacacgctttctacataatataaaaaatcattcttgaatacctatttcagataacaaatgcaatatcttacacactcgatcacaactctaattggttgcctcacgtgcatggaacgcgggtgtgctgtcatcgaacagtgataacaaatgggacgtatacttttttccaacaaata

SEQ ID NO: 160280 - DNA, 451 bp, Glycine max
  unsure (1)..(451): unsure at all n locations
ctatgatgcactagacatcacaatgaaatgtgataaatgtacgtgtataaagaaagagacatctttgtaagccggctactcttactcacaaaggttaccaatgtctaccatctgattgcaaaatttatctcacaggatgtaccgtttaatgaatcacaaattgactattgtaccctattttcttcaaaccctaacactattatagctgaccaatcaaatccaactcctctcacaactttaatagaaatgggacttcgattttacggtaattctctatgaagctcagaaacacaagtcagggttgtcgacatatattacctngtttacgaagtgagtacggctgcgcgcgtgcaaccacttctgatgccttcgaacctaataacgataaacaccaacctacggctcacggacacagtgtgggtgaggttcacggacatgcacaatgtaaaaa

SEQ ID NO: 160281 - DNA, 428 bp, Glycine max
actctcttacttttgtgtgaaatatgatgaaagacaacctcgtcaacaacaccaatgatgtctaaaaaatcaagtaaaaatcagtaacggaaaacaaacacccacaaatactggtgctgaaattagaaatgtaaatctagctgtgcttacctactaataggtcaaactgtaattggccaacaatgatatccgacaaatctacaaatctatacttttttaaaggaaggccatctaagccatactgtctgacaaccgtaactacaataaatgtcaatttatatggatgatcacaaactctgtactgtccatcattcttggtgactctaaaactgtgcatcacataactacaacctttcttcacatcattcccatcctttaactggtcttgttacaaccactggatctgatatcctatgaatatacaaaat

SEQ ID NO: 160282 - DNA, 296 bp, Glycine max
cactcactggtgaatagagtgtcatgaattaatgcactgttttatggcctacagatgaaaccttgcaatgagacacgacgagcgtctgagagggtgaccaccacccatgcatgttctgcggcgctctttcatgtatcaataccgagctcctgctcttgtgaggagatgtgaatcatcatgcgtaacggatgacttgaccgacagctcaggttgcttcgccaaaaaaattgtccaccagtggagtgttattgctaggaatctgtaggcctttatgcatcaccgcatgcatacactaa

SEQ ID NO: 160283 - DNA, 360 bp, Glycine max
atcttaagtcacctgacgcatgcagcttctccccatttttatatatatgggtagaagccaaccacaaaacggctcagcccctttggcacttctttctctttccaattcgcttacgaaaatcgttttcgtgaacaaaattcacgccgaggcgcttccgtaacgtttccgagagtgatttcgcgaacgttttccaccgctcttcgacgctcttcattcattcttcatccttcttcagtcttcaacgggtcagtacctcaaaccccgcttttaatttattctatgtacgcgcggtcggccacatttcggcttatgtatctctattctcgtctcattcactttctatacccccttttgacgtgc

SEQ ID NO: 160284 - DNA, 132 bp, Glycine max
  unsure (1)..(132): unsure at all n locations
ttgagccanaatcctaactcaccataaaccttgacctattgtgagaatgtccatccttaccctccgaagcaaaacaaaagagaaggaaaatttccaactcccgaaaaaaaaagagaacgaaaatttccacat

SEQ ID NO: 160285 - DNA, 312 bp, Glycine max
catgcaagcttggaccgcatgggaatattgtttgtattccacctcatctaatggctatactcacatctttgcgctggattatggggacaccttcttcctgtagccaagatcacttctgttctactatttcatgctatggctatcattaccattggccgcttcaccagttggatatcaaaaatgtcttctcgcatggtaagatgcccctgtgcatcaaatgattgattgttccaattcgcatccaaccgaatacgcccattgacaacaaaattacggatttcacctgtttgcacaatactggaattaaatgtc

SEQ ID NO: 160286 - DNA, 449 bp, Glycine max
  unsure (1)..(449): unsure at all n locations
tgccttgcccnttgatatatttgagggacttatggtttctatgaatgacaaattccttgcgataaacgtagcgctgccatattttcaaagctcgtactaacgcatacaactccttatcataagttgaatacttaagggtacgaccacttaacttttcactaaaataagcaattggatgaccttcttgcatcaacacaaccccaatcccaacatttgaagcatcacactcaatttccaaagatttttgaaagtttggcaacgcaagtatgggggcattagttagattttccttaacaacattgaaagcttcttcttgtttctctccccatttgaaaccaacatttttcttgagcacttcattgagaggtgctgccaatgtgctaaaatccttcacaaatcgtctataaaaatttgttaaaccatgaaaactccttacctccgtcacggac

SEQ ID NO: 160287 - DNA, 350 bp, Glycine max
agcttataatatatcgaggttctctaaattgaacaaccgaagctcttgagaaattcaaatggtcataactattaactccgaggtcaattcatgcgcatcacatatagagacgctaaaaaatgaacaacggacgctctccagaagttaaaatggtcataagctttcacactgatgcccgattcacgcttatattatatcgagacgctcaaaattaaacatccaaagctctccacatattcaaatggtcataacttttcactcggatgtcccgattaggcgcatcacatatacagacgctcgaaaatgaacaacggaagctcctgacaaattcacatggttataacttctta

SEQ ID NO: 160288 - DNA, 448 bp, Glycine max
tatgcgcatattcccctacgaacgttcacttgcacaagttatcctattaactaagacaaatgcacccatatacaatcaacgtagcttcattacctacattatttacatgtacttccaacgcgtatttgttatttacatcacacacgcctccttggctaaatttacatacatgcatactcaaagcatttcggggtacccaaaattgcacatgcgctcatcttggtatttctaatacctatacatataaaaacttcatgatgaatcttgactacctacgcaataaggtgctacatttcatgctttcttttttcaagtttttgctacctaaagccacatgaaaattcaagcatattctcctttgctgacctaaaatgtattccaactagaacgcatatattttgttgtaatatgtttccttcacataacatgcaacacatctatatatatt

SEQ ID NO: 160289 - DNA, 380 bp, Glycine max
agcctcttaagaaacgtcgtatttgtgttcaatacacaatgcctggtacaccacaacctactggtatattatacaggcgtaacacaactctaatggatatgcttacgagtctgcccttacttgtatctttgcgaatgtatgccttcaaaactaccatgtatttattgaatacggttcctcacaaaatagtttcaaagacaccttttgaactgcggaccaatacgacacctcatataacgcacctgcatgtttgacgttgctaaacacaaataacgattcctactccgcaacaaagacaatttgatgcaacaacacatcgcgaatatttcatatgttatctacaacagtacaggggcatatgctttattgcgctcatcata

SEQ ID NO: 160290 - DNA, 407 bp, Glycine max
  unsure (1)..(407): unsure at all n locations
gtattaggaactataaaactcagcttcctaatcttcatggactgatgctcttatgatggttgtgtatatattaaactgcgttcccaccaaggcaatctcaaagacacctttcgagttattcaagggttggaaaccaagttgcgacatatacgcgtttggggatgcccgtctaaagtaagaatttatatccacacgagaagaaactagaccttacgactattactgggcattccattggatatgctaaaaggtctaaagggtatacgttctattgtccatcccacaacactaggattgtggactcacggaatgcaaagcttnttgaacatgatctgatcagtgcgagtaatcaatctcacaacatttgttctaatagggatcactatgaacctgaaccttctgggaca

SEQ ID NO: 160291 - DNA, 467 bp, Glycine max
actaagcttacgtaggaaacttctcattacgatgaacattcttttatacttgcttaagataacaaatattgagagagaatgtattcaaggtaagaaactatgtacaaaaaaactgtcaagatcagtctacgtctatgtcagtatcatcttcaagggactaaaacatattcaagcgagaaacggtatctaagaacacatcttctccgaaggtattgtgagaccacccattggatggtcatacccgaattctttctcagcttgactcaacaaatcttgaaatgaaagttggttcaagtatgatatggggatcacgaaccgctttattttctctccaacatagactgcaagatatccctttggtacatccactgattctgaagatgctctgtttgcagcacatgatgcctctcttacttcaggtagacgaaatcccatcgttgtatgtgctgagacttgcaaagagaatt

SEQ ID NO: 160292 - DNA, 291 bp, Glycine max
gaatgcattaaattcttgtaataacaaacacaagctccatgtacatttgttgcaatctcatcttctcagttctctgtcactaaatgcaaacctatattcatactgtgtcacactttccattcatgcgtttctcagacattttctctcccacaccgtaaagttcacaccttctcccctctacattcatcattttccctctctcatgtttggcaatgcatcattttctcttctgtgttaaaaaaagaccacactcttattttttgcgctaaaccacccgctgatcaacaacag

SEQ ID NO: 160293 - DNA, 397 bp, Glycine max
  unsure (1)..(397): unsure at all n locations
gaatactcacgcttcatcaactctcaagccatttcactgagacatcgagttttgttagctatatcatcaaagncctggcgcaagcggaacgtaacactgccaacaatgaggatctttacctgcaattatgtatttaaaaacagatcactatgaattacttaagatgtaacacaaccacagcgttaaaagcaaaaggaaagacagtcaacgcatgagtactgccattgtctacaatccaatacaatgtatgacgtcaacgaccatcttcaatatgtttgctggaaaataaaaatcaaatcaaatactatacctacatccttattctccgtgatgaatctgtcccagcatttatccaagccatctgctcagtgtagctgcacaacgaacatagaatata

SEQ ID NO: 160294 - DNA, 159 bp, Glycine max
actaagcttaacgcgaacaggtctatcgcctcgcgcaatatccgttttattgtatttcgtcgacaaacaataacatttgtgtgttcttgacgttttgtgtcgaagctttccacattgatccacgttctgatgttgtctacttattctcaattcctacca

SEQ ID NO: 160295 - DNA, 370 bp, Glycine max
  unsure (1)..(370): unsure at all n locations
aatctacgatctctatcacacactatgntanaagcgaccaccgctagcctacctatctcactgacctacaacctactcaacttatcctaagaatatttgatgttaatcgcgatcaactgaccacatctcgtccacctgtctacaataacccacatggacattaaacctttgcgggtcctacgtaaccccaccaccaccccatggagatgctatctcacttccactcggctatctctaaacgtngnaactccgctgaacgcttctgtgtctatcttactttctgacacactccgatgcaggacaactattatttcttcttacacccggcaccaaacattactacgtctacatcatttcccctccaggcgat

SEQ ID NO: 160296 - DNA, 410 bp, Glycine max
  unsure (1)..(410): unsure at all n locations
tttcctcgntctctgccagtgtcagtttgttctccttttatttcactatagatggcatcaaacatctctttagtttaacaatttcacgatatccttcaccttcctctgtagaaattcgagcaaattccctaagtcttgctcccattttttcttctacaatgagaaacttattaatttgctctttctttagagccaaagcttcagtctctaattgcactcgagccaggacaaattgcaattttttgtacttgacatcaatgcttgactgcatctctttaaatccagagacaattttatttatcttattttctacagcttctaaattagagccattgtctactatctccatttctctgcttaactaacagaagaagttgctcgtgtgacaccctctacctcgcacctatatg

SEQ ID NO: 160297 - DNA, 492 bp, Glycine max
  unsure (1)..(492): unsure at all n locations
tcgcaccgtgatctctgagctcactgccgcatgcaagcttntatataagctgacaccgatttattattaaacaccagttgagttttattcagaaaattagagtttatctcttttatcttagcgagagcgactctcctaaattcttgagtgattcaacaacaccctggctgtatcaaacgactttcacaacctttgtgtgctcgcctcgctggaaagagtgattctttccttcctatcatctccacccttgttctttcaaaccacacttccagaaaatccacctctgcccaaaattatctcgtgaccataactcccattttacacactcaaattaagtgattcttgagcctaaattgaatttcaaaacgagacctttcacctcgttctggaatcacctcatttggagccctgcaccttccgctattgccatttctatatttctgtccagccaccacttaacccacgttttacactccattcattcattttatg

SEQ ID NO: 160298 - DNA, 449 bp, Glycine max
  unsure (1)..(449): unsure at all n locations
ntgatgcaacatatggagaggttaatgaattaacgagatgatgcgctccatgagaggttggatcacatggagaatagagatcataatgaagaacaaaggaggagaagaggggaattgagcatcaaattgatctcattccgggagcttctttgcccaataggccagcctatagaagtaatccacaagaaaccaaagagattcaaagacaagtggatgaactcattagcaaaggttgggtaagagatagtatgagtccttgtgctgtcccagtgattctggtccctaaaaaggatgggacatggcgcatgtgttccgattgtagagcccttaataacatcaccattaaatataggcatcctatacctacgcttgatgattngcttgatgaattgcatggtgcatgttacttctctaanatcgaattaaaaagcggataccatcaattacga

SEQ ID NO: 160299 - DNA, 370 bp, Glycine max
ggccgcccggcgatggtgcacaataagttctccacatccacaaatcgcccataaacccaccattccctgttgcccacctccaactgagctcatgtactcccacgtaccccatatccttgtttctctcaacacccgcgtcccatcaatcctcccaagcttccccaacatccaagtaatacaaaattcaaacagcacaagctatccacgccaaccaaaacagggcaaaggcacaaaactctgcccaaaataccaaccaaaatcacagctcttctcacttaaagaccccagtaacaattcctccgttcagttcgctaaccgtggatcgactcaacatttactggaagcctctacacataacctacatttgacc

SEQ ID NO: 160300 - DNA, 200 bp, Glycine max
  unsure (1)..(200): unsure at all n locations
tgccacccacctcgcccaggcgagcaaggttgcttccttcanaagcaacaaccttctggaggaatcttctggaggcgccaagtgggcctggttgctatttgcaccccaatttttaactaatacaacccctgcctttttttgggggattctttttccgtaaagttacggaaacttacgaatttcgaaacgatattggtttc

SEQ ID NO: 160301 - DNA, 398 bp, Glycine max
  unsure (1)..(398): unsure at all n locations
cgtccccgatcttaagtgactgcggctgaagctctccccaatttcttaaatatgggagaagtgaagtgaataacggctcagccccttaggcacttctctctctttcgaatttgcttggaaaaattgcttccgtgaagaaaatacaagccgaggcgcttccgaatcgttttcgtaacgtttccgtgaggaattttgcgaacgtttcgaccgttcgccgacgttcttcattccntcttcatcgttcttcgatccttaacgggtaagtacctccaaccccgcttttcgattattctatgctacccgggcggcccacattgtgtttcgcgtatttttattcttctttcatttactttntatacacccttttgacgtgcttaaagccatttatttaagtcatt

SEQ ID NO: 160302 - DNA, 338 bp, Glycine max
  unsure (1)..(338): unsure at all n locations
tctcaggaggtgagcttagttatgagatgggtgtgtgtaactaanctctagcttctcaaggaagttttctcaaagaacattctcacggaagtcttctcaaggaagctacctagtctataaatagaagcatgtgtaacacttgttgtaactctgatgaatgagagtcttgtgagacatactctaaagcttcacttctcctcctcttttattccttcaatttcgtgttcccccctatctctttctcntcctctttnttttcctccattgaagcatccttccaagcttcttattcaacgctcatcttggtggtgaagcttcttcttccatggctattccct

SEQ ID NO: 160303 - DNA, 339 bp, Glycine max
  unsure (1)..(339): unsure at all n locations
cacagtccacntcgccgcctgcacgcttatgcaagagttctgctaattatatatctgacacattctacttccttattcactatcctttttcaccaattaaacatgttatatatctaacttatgaatagccatattactaacaaaatacaacgaacattaaatggctcaaagattaactgtcgtaattatgagacactatctaatgactctttttagggactaaactctgtcaacgactgaattgactgagtgttcattctcttattacggattaaactatgtcaactcaacccgttcgcaatacattaaaatataatgaaaaagctaaaattttcagct

SEQ ID NO: 160304 - DNA, 327 bp, Glycine max
atatataatgaccgaaagaacgcttctatatatgaaatattgtcctcatgatcaccatgaaggagtatacaacaatgatcactaccccaagaatcatcagcgtgtgctgtttcatgatgatccgtatcacaatcatagtacgaaagtaaaaatattgatgttacagtccatattgtgattgcaaacaatttttcaaaaatcatcgcgtatataatatatagtgatcgatcacgcttaagttaacaatgcctaattcggagctcccttcactcccatactaaaagatcaaggtacgcccgtctttcaatccatgcagacccatgactt

SEQ ID NO: 160305 - DNA, 436 bp, Glycine max
  unsure (1)..(436): unsure at all n locations
agcttccaccaagcggtaatcagagcacaagagcttcaagtaggcgctccctaaatctccattaattttttttctttaccttctcttgcattgttgtttcttcatttttctccacgtatctcctcacatgtcttgttctaaacgttgctaacatcattctttagaagtttccaccgattaaacttgctatagaaactagatttgattttctatggttcaaatttcttgctcttgttcttgaaccatgaatcgcgctgacttcacgttcctttgagttctgtcttgatattttttgcggctgaaacctacaccataaaattcttacaaaaatattacagcacaagaaaaccntacaaatctacagtgacttgctcacctattgtacgtttgtcatacaagtcatgtntaatcatgaaacttgtcacataacacttct

SEQ ID NO: 160306 - DNA, 414 bp, Glycine max
tagtgacatccgcgacttgatcttgagcgaagatgttctcaagagagattccgagaatcttccagtcatgtttccaattcaccattgaatactgaaggcaggggaaggactacccagaagggtcagaatggtcgaggcagatcaaagtcaagagggaaaggtcagagaaaatttcaaagtgaccttacttgttggaattgtgacaagagaggtcactttagcaatcagtgcaaggcaccaaagaagaacaagtcgcacaaaaacaagaagcgcgatgatgatgaatccgcaaatgcaccaactgatgaacttgatgatgcattaatctgcagtttggatacgtctcgtgattcatggatcactgactcacgtgcgtcgctccacactactccctctaagatttattgccaacta

SEQ ID NO: 160307 - DNA, 365 bp, Glycine max
  unsure (1)..(365): unsure at all n locations
gtcacctgcngcatgcaagcttgaaccggcacgtaggtgtgtacatcaccttacaagtcatgtcagacaaagtaatatcaaacatgatttctgattggctaaccgcataaaattctaccctttacctcacattatattnctcattcggaacactaatttaacttatattaagaggaaaaaaatcaaacctgtgaatacggaatccggggtacaattcacagaccatggcaccaaaactacaaaactggtacataccattggtgcagaggtatctaccagcacgagtgggggtttcatataacaaaacatgagctttagcaacgcccttcacatgcaccgcacccaaccagcgatacttctgcgtc

SEQ ID NO: 160308 - DNA, 469 bp, Glycine max
  unsure (1)..(469): unsure at all n locations
tgcctcctanatacggatgttgacttccctaccgattttttccncgttctctgttggcaaagaaagagggtttcgctcggaagaattgggacctctgaagcttaaaggggatcttgacatcaagcatctaggaaatgtaaaaagtgtaagggattctaaagaagccaatatgccaagtaagcaattgaataaattgcggttgtcatgggacaaaaatgaagactccgaattacacgaaaatgttgaggagattcttgaagtgcttcaacctgatacccaacagctttggagattagatgtggaagaatataaaggcacccatttcccanaatggatgtctagtccttctcttaagtatttaatccttttaaatctgttgaattgtgaaaactgtttcccacttccancactgcggaaactaccttctctaaagattctaggaataataaacaataatcatgtagaatac

SEQ ID NO: 160309 - DNA, 488 bp, Glycine max
  unsure (1)..(488): unsure at all n locations
tcttaagtcactgccgctgcagcttattaagacgcttctagcacactctatatatcttctcanagatctcaacggttagatcatgtacacgtgtcttttgaagtaccacaccaaatttcaacaagatccaacgtttaacagacgctgggcagcatttttaccgacgcagcttcatgtagttttctctacaagcttcattaacacgctctctccagaagcttcctcgtggcttctttgagaagctttctcaagaggcttctttgagaagttagatccttatctatccacacccctctattaactaaattaacttccttaaaaataattaccgatgacaataacgcaacaaataatcacacatcacacataattactactaatatatagatatatatatcagggtgttacatatattcacatatatacacatcattgaacggtattttccatgctacctatatctacacacatatatacataccattaac

SEQ ID NO: 160310 - DNA, 488 bp, Glycine max
  unsure (1)..(488): unsure at all n locations
acactacagacaactcaagcttctacttatgtggcagggcgggctcccttcaccttcttgtctccaattcgaactntgaccattattcttccttcaatgcttcttttcatgtctgcctgagtgggcttatagcctaaaccatacttcccacgatttccttgagtatttatcacgctagttatgccgccgttgttttttcctaaacccatcccgggttcaaaaccgttccccaacataactcgggccatcattaccgctgcatcgaacagacaaggttgcccaaagagggagtccacggaggaaatgctgaccacctcaaaagactggaaagcagtttctaacgattcttctgcggcttccacataaggcatggaggatgggcagcttaccaagatatcttcctcgcctgacacgatgaccaagtgccccttcactatgaatntcagcttttggtggagcgtagacggcacgactcccactgagtggat

SEQ ID NO: 160311 - DNA, 320 bp, Glycine max
atatatcatcacaaccctccccccgcgcctgatctgatactgcacccacacccccgagctgcgcagcgaacagggggggggtgtttttaaaccacccactctgataccgaccgtacactactcgcgcgatcggttcaccaaccatcactattccttgtttcccctacggagcaatattacagtcaacagttcaaaattcttgtctctgcatttcaaacaaataacaacgtttcggcacatattatctctccatcacttgaccgcaaggtcactaacttagactgcacattttactatcatgtcgcacgacattgctcaac

SEQ ID NO: 160312 - DNA, 368 bp, Glycine max
cttttcttgacaaatcatctatgatggtgagaaagtatgagcttcccccatgagttcttactctagatggctcttctaaatcagaatgcatatattcacaacgcctacatgaaacatgaataccagtaccacagcttattctatgtgatttaccaaccacacaatgatcacaaaattcaagtttatctagcttatcaccacctaacagattttgtttctcacgctcatgtaatccccttttactaacatgatctaatcttaaatgtcacagtttagttttatcactcaatgtattactagctactgatgcatgtctaataatagtggaaccttgaacaacaaaccacctcctacttttattattacct

SEQ ID NO: 160313 - DNA, 306 bp, Glycine max
  unsure (1)..(306): unsure at all n locations
taataatatctatagctcaattacgtccataatatttatagtcaagttgatcagtcgtaaaggaaagtctactttctttttttcacgcacgttaagcccaagctactcaactttagataaaaataataataaactattggaaaaaggacgatcttgcttaattgatactgatagactttcgttgngtatacaagacatttgaattgaaaaattctttcttccacaaaaagtctccttcccaatntctccatctttttttcacaaaaaagttnttttcatngcaaactttcgctccttaccaatctg

SEQ ID NO: 160314 - DNA, 360 bp, Glycine max
atcgcctcacctctcacacgagccggtacacaaccacgcggcatttacctgtgcgcgaaaacaacagcaagccttcgtcttgcctacagaaaaccttactgaggcacttgttctactctccctgactcttctaaaacttttgagctaaaacgtgacgccctcggagtggcagtcggagctgttttgtctcacggcgcgcaccctattgtttattataacgaaaaacttcatggcgccacccttaactaccccacctatgacaaagagctctatgccttaataagacgaatctgaacctcgcaacattatcttgttacaacgaacgcgctatccgtagtgatcatccatcacttaagttca

SEQ ID NO: 160315 - DNA, 435 bp, Glycine max
  unsure (1)..(435): unsure at all n locations
tgactcacaccaaacatgacaagcntaatatgctnttatattatctcttcacaaataactatcataaagcataaacctagtaaaactacccatcatatctcccaaagccccatacccacgaaaatcatgtgagaaagaagtctacccaaacctgaaatttcaaagtcccacacgtagagatgcgcttcacgactccgaaaatgccttcctttcacaatttggagcataaatggtgaccaaaggttggagctttgttgggcaacaatggtgggtgagaaaggaagaagaaagctacgcgagagagagggagaaagcttctgaattctctgagtgaggagagagaacatagcttttgggttttttttttaaaaaaaggcttntctctttctctattattttatcttctaaagcacttgcnccttgtcccattttgag

SEQ ID NO: 160316 - DNA, 417 bp, Glycine max
agcttcttcttggaattcaacgatctggtactatcactatatttaagcaggtatggattttatttcaaatatctagacgtacgtctatggtaaatacttttgagataaccaattaacttgcaccatttgattttgaaaccccaaaaagatttgacaatcactacttcataaacattcttgaagggaaaggcttgttacgttctgacaatgttcttatcaaccatgacttacatggaaagattacagagcacgtgtgggcttatgcctctaatgtaaaacttttgtttgcttcatttgctaaatctatgattaagatgggaaacatcaatgttcttacaacacatgagggggaaattacgacgaatcgtacgtttgtcaatgcttagttgttatgtactgcatatgggttgtaataat

SEQ ID NO: 160317 - DNA, 389 bp, Glycine max
  unsure (1)..(389): unsure at all n locations
ntgatgctagctcctacgggtccggatgtgtgtgatagtacttcgagtaagtggagtatcgctcccatggctcctaaaccacggcggtctccagaaactcgttaagagttgcagcatcaaacttaatcaacttgccctgtaccctgacctatcttggagatttatcttctgaatcaaacaggttagcatagaattccttgaccaaggccacatcaatgtgattatctggctgcctggtcaaggctctgctccatcgatgcctctcatgctcctgacaagactcatcatactatgtaatctgtagcttaacattcctctctgtgaggatgtttctggcatgcatgttctgctcgtacctctcccacgcgacctcagacacaaacgtggat

SEQ ID NO: 160318 - DNA, 366 bp, Glycine max
tctctcgaccggatcttaagtcactgaggatgcagcttcaaagcaagctttcataatatttaatgctataatccgacattcaactcaaatgttatggcggcttgactatatcaccgcattccttgttcaattttgagcatctaagtatactttgcgctcaacgagacatccaagtcaaaagttatggccgcttgaatttacctcgagattttgcgttcaatttcaagcgtcttgatctattatacgcggtaatcgaatatccgagttaaaagctatggccgcttgaagtctcctactgattctctattcaatttccagcgtctccatatatttaacgatgtaatcggacattcaagtcaaaagtta

SEQ ID NO: 160319 - DNA, 425 bp, Glycine max
  unsure (1)..(425): unsure at all n locations
ctttggagtagaaacatgggaccaactcattttatttcaaaaaggaagtcgtatctagtcaaggtctgagagaccatacaagtttcctaacgatttctaattatgtgggccattaagtctatcatatgctgacaatagccgagaagcccatgaatctcttccggggcggagtaggtgtctgccatcgccttggccttggctaacaatcggggaagttcttgactcccgttcaaggtaagagcaaaccgatccatccacatggttgcctcttggtgtaaagagtcgatcacccttcctctagcctctcntttcgcgtatacttgggcatattcgtccgcaatcctatgctcgtgggccgcggctagacctaactcttctcggtacttgccgatgatagctagcatgttggtctccgtctcgcataa

SEQ ID NO: 160320 - DNA, 402 bp, Glycine max
  unsure (1)..(402): unsure at all n locations
agcttgccgccctcttggtttgacaatatgttctgctgcagtttgtaataggtggttgactatcagattcctgatatttttattctattctatcttggcgttccattttacaagacctttctttttcccttggngtttataattatacgcacacgaaatccagatgctgtgatctgttggatatattccgaaaacaaggagtgtctatccatacacaacttacctacatcaatcaacacaaattgagccggcacccaattccggctcgatgagatcaaaactgacccattcacttcatatattaaccgaagaacaccaccttccttttatgttgataatgcgttcgaacaaccatgacgtatacactgtctctgaactttgttccgttctgcaccctatcac

SEQ ID NO: 160321 - DNA, 404 bp, Glycine max
  unsure (1)..(404): unsure at all n locations
ctntatgaacggatgcgactcttcacaattgagattatattccaacgttcagatacactagtaatcgattaccaatatattgcaatcgactacaccatttaaaaaacacttggaacgttgcaaattcagctaaaagcttttgaaatcaaactttgccactggtaatcgattacaggaaactggtaatcgattaccagagagtaaaaactctggtaacttacaaaattttgacaaaaactctttttaaaaacaaaattgtgatatgcttgttttttgaaaaatcttttcaatactctccttgtgaagacttattgatttcttctcttgaatcttgaattcatcttctattgaatcttgacaccacatctctcttgattattgaatcctcttgatttcttctcatg

SEQ ID NO: 160322 - DNA, 393 bp, Glycine max
  unsure (1)..(393): unsure at all n locations
ggcttggcgaccaccatcaacaaagtactttcggcacctactatatgttgacttgaccaacgctgttattggaatgctgcgacaatctttcaacaccttattcacacattctgataagttggttgtcatgtgaccatatcgtcgtccagatgtatcgtaagccatgctccatttttcctttgagattcgatcaatccatcttgctatggctggactcaattgacgaaatttttctaagttttgatcaaacacatgcttgcaacgagtgcacgctgcatcaacattgttatcatcaaaagttgtacatagacatgaaactcacattaaattaatgtatacaatacaccttacncaatttcttgaacatctctttttgttcccgtgctgaatttg

SEQ ID NO: 160323 - DNA, 375 bp, Glycine max
  unsure (1)..(375): unsure at all n locations
tagagcatctgacttatatgctncagcttgaggaggagtgttgaaattacacacattgtatggggagttgttccacacattgtatgggtagttgttccaacaaagaatatgtacctagattgtcacatattcatgtatctaggaattcacatgcatgtacatacgtactagaacttcattaatattctcgtcaatttcacattgtacttacttccttagtctatataaatatagatcacctgagtgagttaagcactcaagcatttcacaacctcttgtctcttcaataaagcactaggatttattctctttttatgctggaagagaagtgtcatcacttcttgatactcatctactattctcttattgtatctc

SEQ ID NO: 160324 - DNA, 361 bp, Glycine max
cccgcgatctctaagtcacctgacggctgcacgcttcttatccaaggcgattcttggtggtgaacctccttcttccttggcttattccctagcggatggtcactccactatcctcttctctttcgtcttacgctgcacctccgtggtgaacaatcgccattgaacgacctcattgaagctcaaagatccagtctccatataggctccacaagccagctttcatcagtaactcatctacacgctccggatggaacaaccgacgctctccagaaatgtgaatggtcttctcatttccatcaatgcacgattcggggacatactatatcgagaccctcgccattgaacaaccgaacctatctac

SEQ ID NO: 160325 - DNA, 352 bp, Glycine max
  unsure (1)..(352): unsure at all n locations
nttagttactaatcattcttattgtacatttggcccacactggttagaaggcccatgtctattcttatctttttgttcagctacactttacgtatgggttcttgctttgaatgaaaaaaactttcggcatttgataaaattcggtgagagtttctctccggcttccttgttgaaccaattatcacacttatcaacgtaatccttgtggcgtctacccacacttatcttccttcactagaagtggcgtctactgtgacttatcttccttcaccggaagtggcgtctaccctgacttatcttccttccacggaagtggcgtcattcaaatcttcctagcctgtatcacgtgatc

SEQ ID NO: 160326 - DNA, 430 bp, Glycine max
agctcgagcgtgaggcagagcccgggtctgagtttacttcgaaagacgaagcattcttatactaccaaatctacgcccaatccgtgggcttttccgccataatcaaagccagccgtcgatctcgaatctccggcaacttcattgacgccaaattcgcctgcacccgctacggcactccaccgaaccctcaaaaacccaagcccaaacgggcccgaacaagccccataactgattgcacggcctccatgcacgttaaaccaaccacccacggcacatggatcatctcttctttcatcaaacaccataaccaccacactaactcacataataatgcaagtccttcgaggaagcctaacattaacaacacgctgcatcatctggctttcgccgaacgagaccttcaatctctgcttgatactctcatgtctat

SEQ ID NO: 160327 - DNA, 385 bp, Glycine max
  unsure (1)..(385): unsure at all n locations
ngagttctgctattctattagtaatttatattctcctaaatnctaaattctggaaactttcaatagaccactaaattaaaacaaaataaaataatcatgtaaatctacttgtcaatgacgtttccaagctagctttatcaaaattacattcattgatatatactaagaatattagtaaagataggtcttatcaaaattattaatttctaataaattttaataactatacacagaatgctaaacagagcgtgttatacagaatgttaaaaagagtgtcttatcaactaactgtcattaacatctatattatttgaaatagttacacaccatatgaatattttacaaattttagatattcaaaaaactttcttaacatattttctac

SEQ ID NO: 160328 - DNA, 398 bp, Glycine max
  unsure (1)..(398): unsure at all n locations
gagaatcgtcatccttaccctccgaagccaaaaaaagaatacaaccggaatttcccatcaaacaaaaagagaacgacaatttccaatgaaagccaaaaaaagaaaagaacgaacattctccaatcaaacagtgcgagaaagcacacagaaaagaaaggaaattcccaatcacacaatgggagaaagctcaaaacgaagaagaagaacgaaagaaagctcctgatcacggatccaacgaaaaacacaagaaatgtgcagagaggtctttggaccggacaatatctgaacaatacagaattgtcaccgcatgaacaaaanagagcgaaacgaaaccaccacctacaatggtcttctccttttgatacacaccacatccgtgcctagcacttttcccccca

SEQ ID NO: 160329 - DNA, 375 bp, Glycine max
  unsure (1)..(375): unsure at all n locations
nttaactcggaggtccgattcaagcgcataatatatcgttacgctcttatttaaccaacggaagctctcgagaaatccaaatggtcataacttttaactccgaggtccgattcacgcgcataatatatcgagacgctcgaaattgaacaacggaagctctcgagaaattcaaatggtcataacttttcacaccgacgtctgattcaggcgcataatatatcgagaccctcaaaatttaacaccggaagctctcgagaaataccaatggtcataacttttcactgcgatgctcgattcaggcgcataatacatcgagacgctccaaattgaacaacggaagctcctcaaaaattcaaatggacataactcttcact

SEQ ID NO: 160330 - DNA, 317 bp, Glycine max
ccatcaacggtctatctcgatctcgatctgacaatttcctgcccgctcaaacaccaaacctactctggccagataactacccgtccagctctaaccacaactgccttccttcaccataagaacatcgtacaacggcaacaaactggcaccacaccatccttcttagctagaatttctactaatatacagggaataatcgcgaatataaagcttgctttccttactattcaacaacacatcacctgcacatgaaaatactctgcgcgtatagaacaaagctagagatattgaaaggccaacccccacataatgaaccg

SEQ ID NO: 160331 - DNA, 439 bp, Glycine max
  unsure (1)..(439): unsure at all n locations
agcttntcattcacaatacctataaggaacgagatgaaatttatttnttacctaaccgacaaaactctcacgaaatccaatatctctcaatgtattccctacaaactcccattttaatctattatatgtccttttcatatccactctgattatcatttatctttgcccatcctttttatttttcatagagcgaataatttcttgtgtaattataatattatctttcttttaacgtagagatatncttactttatcataatatattccttcttgaaatgacgtgaatgatgaagagttgtgggtttcatcactcacaattttatagtaaagctattgaccgcagacgtacacacatattatgaaatcgctaacttgattaactgaagtttcaatatctctttctatgtcgcattaatataaaatcgcacagtaccatgat

SEQ ID NO: 160332 - DNA, 429 bp, Glycine max
atgcaagctttgaaaacattctttcctgatcgctcagtcagtcgaaaataaacatatattatacatccgcatgcttgtaatatggacaaatgaattataccaaagccgttcatttacatgattaaaccagctcaatcatataatatgtcttgccattttaaacaattctaattaataactaccaacagaatgagtataactgatataatgtatattcgaaaaatacttgttaaacattaaatataacattttccattaatattaactctctaacgaaaattaaatacttctaaaaatgttaagacgctacatatttatgcttttatttgataatatttttttttactctcttaatctaaaattggttaggaaagtaaacattctcctaaaataagcggtggtttatatacgacatactttcgcactatc

SEQ ID NO: 160333 - DNA, 286 bp, Glycine max
taatgtagtctaggaggggccaaaaggtggctacaaatatgagactaatacgcacaattagtctaaatcctatccacaaccaatgactaaaccctgtgctaatattgctagaccattatggtaatgagtaacaaaatccgtctccaaattcctgagccatgtccacaatataaaaattgcatcatccaacactctgctagcattgaaagtgtcatgtgagaagatgatgttatttctgtgcctccaaatagtccatgtcaatgccatccaccaacacttccacctg

SEQ ID NO: 160334 - DNA, 408 bp, Glycine max
tcttaagtcgaccgccgcatgcaagctttgaaagctgagctcaccacgatatcagttgataacgagaacctgaaggtggcactcactacggttacgaaagaatgcgatgaaccaaaagatatccacatgactgtagctgaagcgctagagcgggaaaccgaacaacgccacaaaggaagagtggagcacaaacaagttatgacggcttttctacgtactagtaatgagctcaaacttacaaaggccgagagggacaaatcaacgatggaaagcctgatgttagacgataacttaaagagtcgtcagacgtcaaagagaagtttgaaagaatacttgagcacaacacacgaaagtatgttgatcatcatcgacccatataaagagaacgtgaacctagctgctagtcat

SEQ ID NO: 160335 - DNA, 367 bp, Glycine max
tgctaacccatggaagctcctaatatctcccacactttttgcggtgggccattcttggatggccttgattttctcagggtccacttggaccccatttctaccaactacaaaacctaagaaaactatattatctacacaaaaggtacacttctctatatttgcatagagggtgtttttcctaaggactgaaagaacttgcctgagatgtcctaagtgatcatctaggctcctactgtacactaaaatatcatcaaaataaacaactacaaatctacctatgaaatccctcaagacatgatgcataagcctcataaacgtgcttggtgcattagtgagctctaaaggcatcactagccattcatacaaa

SEQ ID NO: 160336 - DNA, 264 bp, Glycine max
cgcttctacaatcactagtatgggactcatgcgtatgctcgagtcgctccgctatatttcttcgttttgcgattaaaattgcgcctacacacgggtaagccgcgagaatcgacaatataattatatttgtgtcattataacactagacaatattatgatgtataactaattgagaacaaaaatgaatatggttaacaaaattatgattaacacatactaaaataactattatctaagaaactgttaattaacaaagtcataatg

SEQ ID NO: 160337 - DNA, 352 bp, Glycine max
agcttagaggctgcgatgagtatgttctttattggcttccagaactgacttaacgctcgcactaagctccttatatattgaattagaggacgagatttactctactgcatggcatgaactatcgttgacatttttaccactacttaatacctacgctgatctcccaaatgttaatcttctgaacttcattaagcaggagataattacacccaattcattggaagtgcaaaaaacaaatgatgatatcgacgtcgcgaccgggagaggatacatcatggcatagaatgttaatgccacacacatggcggcgctgttttattatcgtgcactacacgagaaagagacactcatg

SEQ ID NO: 160338 - DNA, 338 bp, Glycine max
cactctcacccctctcctgtacaagctttttttcttactgaacacacatggcctttatttcattgatggaccatatatctttatgagtgtaggagaaatcttacatggtccatattcatgcggaatggtgatcgaactgaactgcactacgaatgactcatacttatcaacctctagttacttaaggtgagctgagatatctcgcattatcatgatgtacacgcgctcacctttcacactggtgagccgaatagaatatgacatcatgatcaacgagactgctggagtcttatctgtagtgatgaactggttatctatggccataagcctatatcaga

SEQ ID NO: 160339 - DNA, 305 bp, Glycine max
gggctcgatgcattttgctctacggtacatttcttggcaaactatctccaacgttgtcttcgaggaatggcaccgaagaatctcgccttaaagacgctcactaacgacaacgcgcgctaacgaactagttctgctcctgagtatgacactcaccgctttaagagcgctgtacaccaatagcgcttcgaggccatccagggattggtcttttctccggagcgacgcgtccatctcaaggacgacgactatattgatttccacgacgaaatacggtcccggccgtggacattactggttactaccat

SEQ ID NO: 160340 - DNA, 173 bp, Glycine max
tgatgtgagacagcgtggaacagtcagtctttctacttttgtttgctgaccacagagtggtacctggagatatgtggcgagggtcacgagaccttgtggacctcacgtggggtgctattgcccaaaatcaagcttgacccatcctgacccaactcgggcatagttagtcagtg

SEQ ID NO: 160341 - DNA, 178 bp, Glycine max
ttttctaacccagaatcgttcgttaccgacgcttaatctaatttgaaacttttgatgttttgtcatgctaaccatctatgccaagatattgctcttgtaatggcctatacatcgattcacttacacaaactattcttgacgtatttatcgcgccacccttcttgctgactacatattg

SEQ ID NO: 160342 - DNA, 190 bp, Glycine max
gggggcctcccttatcctatctcccttggcctttcgttgcattccatggcgaaaaatccctctggacggacctcatcgaagctaaaagatccagcctccatagaagctcaccaagcaagctctcatcaagttatgctcgagatcttccgtggttcaatttcgggcgtctccatatgtgatgcgcttgaat

SEQ ID NO: 160343 - DNA, 416 bp, Glycine max
agcttatccttatggcccgtctctcgattttaccccccgcgccactccggaagatttaagccccgcccttacttttgaggggccactcccaccttatgaagactatccccggcaagacgatggggaagaagatacccatcttgcgcccctgctccacctcaaagatccatcctcgcatgaactaccccagccgaacatagtccgccatatcccggcctcactcacacccgtaaaagaatctattccctttgcggaagataacggaaagattgaaccccttgaagagaggttaagagcagtccaacgcctccgcaattacccattctcggatttggccagattatgtcttgtgcccaacatcctcatctctcccaagttcaaagtactatactctgatagtacaaacggacgacatg

SEQ ID NO: 160344 - DNA, 427 bp, Glycine max
tctcaaggaggtgagcctagttatgagatgtgtgtgtgtaactaatctctagcttctcacggaagttttctcaaagaagtttctaaaggaagttttcttaagaaagcttctcaaggaagctacctagtctataaatagaagcatgtgtaacacttgttgtaactttgatgaatgagagtcttgtgagacacaactcaaagttcaacttctctccctttttcttccttcaatttcgcgctcccccctctctctttctctccctctttcttttcctccattgaagcatccctctccaagcttttatccaacgctcatcttggcggtgaagcctctcttctcatggcttattccctagtggatggcacccgctcttacctcttctcctttgtcttccgctgcatcttcatggtggaaaatcaccattaaa

SEQ ID NO: 160345 - DNA, 311 bp, Glycine max
  unsure (1)..(311): unsure at all n locations
agctctgctaacgccgcggacaattatattatgcgcgacgtcattatcgtgtgcggatgatgaatgtactgatcaagtcccactacacctccagcgggttctaaagtgccaacgcgaaactgtgtttcgtacgtgccaaagtgaactaacatcgctggatctttctaagcctcaatctacacctcaaaagntcatctttcttttctcttctttctatttttctcctctttcccaattctggccccggaaaactccctcccctctttcgatcttttctttcccttcaagacccaatctctttctctccacct

SEQ ID NO: 160346 - DNA, 318 bp, Glycine max
  unsure (1)..(318): unsure at all n locations
tgttagttctctcgtgaatattcttcccttggttgagtttntgggcaggctgactctcgtgctccttgctgtattgattccctgcgtgattcctccagcttgagccttgtgtgaagttcctctcttggctgaatcctcgtgggccttgattacatcctgttgantcttgattgaatccagaccggacctctttggttgtaaccttggaatccatggcgatttggtatgcccatgtaagttaatttccttgaaggggctttttggaatggtccatggtccaaactctggttttcctcccatgtttggttccccctacct

SEQ ID NO: 160347 - DNA, 372 bp, Glycine max
gacaagtgcatcggatcacgcaagtagtataaaacggttagaaccgagtatcaaactctcggggaacttgtgttacttggtaaagctatattcatcgaataggcgtctagtattaaaagatatgtgtagactatgaacaggtatgtaaactaactattaaaaggaaaatcacgtgagttatgatgtgtaaagacaactagacaacacgttggtcttcctattaggtgcctgattatataaagatattctctacttaacaatgctcatgtgttcaatggcgtctcctgaaatgctaacactcgattcctcatgatagtctaacctaactctcgatctagcatcgtgctctgattcctcttgttggactaaact

SEQ ID NO: 160348 - DNA, 456 bp, Glycine max
  unsure (1)..(456): unsure at all n locations
ggcttgtggggcttctatggaggctggaacttgagcttcttgatgtcctttaatggtgattntccaccatggatatgcagcggaagacaaaggagaagaggtgagaggaggcgccatccactatggaataagccatggaagaaggagcttcaccaccaagatgagccttggataaaaagctgggaaggatgcttcaatggaggaaaagaaagaggaagagaaagagagaggggggagcacgaaattgaaggaagaaaaagggagagaagttgaactttgagttgtgtctcacaagactctcattcatcaaagttacaacaagtgttacacatgcttctatttatagactangtagcttccttgagaagatttcttgagaaaacttccttgagaaacttctttgagaaaacttgcttgagaagctagagcttagctacacacacccctctcataact

SEQ ID NO: 160349 - DNA, 305 bp, Glycine max
  unsure (1)..(305): unsure at all n locations
agagngagaggggaagagcgagagagtggagggagaaatgaaagggatctcaaaggaggtggagagtgtgtcacggacgaataagctatggatttcgtacgacacacgatagtcgtaattctgtaattaggggaacgacaacgcccacaattttatgtgtaaaaacatcgtcatttgtgttcctcctaattacagaattgccatcattggtcattctaagaaggctccacaaaaccgtcttatattgtgcgccatataataacttcattctccttaantacagaattggcatcacatgacattct

SEQ ID NO: 160350 - DNA, 410 bp, Glycine max
  unsure (1)..(410): unsure at all n locations
tctcccncaattttctataaatagggggagaagtgaagtgtttatttgttcagccccttangcacttctctctctttcgaatttgcttggaaaaattgtttccgtgaagaaaatccaagccgaggcgcttccgaaacgtttccgtaacgtttctgtgaggaatttcacgaaggtttcgaccgttcttcgacgttcttcattcgttcttcatcgttcttcgatcttcaacgggtaagtacctcgaaccaagcttttcgattcattctatgtacctgtggtggtccacattgtgtttcatgtatttttattctcgtttcatttactttctatacccccttttgatgtgcttaagccattntatttaagtcatttctcgcttaaacctaaaataaaataaatcttcaccgatc

SEQ ID NO: 160351 - DNA, 460 bp, Glycine max
  unsure (1)..(460): unsure at all n locations
agcttcactcgctaagctgccaacacttaagtgtaatntttttatagtcggngccgctaagcgcatccttcaaggagcttatcgcaaatccttgcggcacatgttcagcttggcatgcgctttcccgctaagccaattctgcagaatctaaaaattctgcaacttccactaagcggctccacatgtcgctaagcgatggtgttnttcttacaaaggccagctaagcggaccatgtctcgctaagaggccaatggtcttttcagttntatttttcagttataaaaaatttgaataactgtgtcctgatcaattgtttggntcctccatctacagatggcttctaggaagagaaacagcatttggacaatgcccacatctcagtatggcacaaggagattctcttcattatatgcctggactagatacactgattatgtcctgggaagacacattctacctg

SEQ ID NO: 160352 - DNA, 418 bp, Glycine max
  unsure (1)..(418): unsure at all n locations
ntaaaagtgtttacatactgaatatacatagtctaggtgaaacatattctctatgaatatgatactcggtcttatcgttgtatactatgtttgcaaatcggtacacttgttgaccacattctaacaggcgcgtcttccaaaaatgagaacacgcgagagtcgccaccaacatttattcgaggaaaatgttagaaaaaccaaaaaaagaggtttgcacaatttgaagataagaagttgggagttgtttacgcatgaggaagatattagcactccacgcgcccgttacaagggacggcagccaataatcaagtgtgcaacatgacttcaaaagttatctacttttccactttttatatctttttttttattggggtcgacaaggggatgccctttgcttcatgtatcctcaagtgcgatg

SEQ ID NO: 160353 - DNA, 442 bp, Glycine max
  unsure (1)..(442): unsure at all n locations
catgcaagacttaattggcgaggctgactngagaagatttaatangtttcttatatatatatatatatatatatatatatatatatatatatatatatggaggcgaattattcatgcttaattgctaactcctgtggatgagatatatacaacatcatgtactaataatctgtgtgcatatcaccccactcccatctcatttttaaagaatatagtatatatacacgtatactagctcattcaatatattnctaatcagcatcataaatatatatgtcttacattaagagaagcctacccccccccatatatccttgggcaataagacctaagatctaagatcgattgatttttcgaagaattaatatatagacgacggcataaaagtaaacatgaatttaatgtcagagatcaagcaattttctgaaaactcatcactgca

SEQ ID NO: 160354 - DNA, 462 bp, Glycine max
tgtaccatgttcaaattaagtccatatgtaacagctaaaccatcttggtcttcaaaatcacaaaaaagttataaaagagaaacaattatgttcaattccatattagattagcagattaaattttgatttgtaacagataggaataactcacctggatctatgaatccctgtggaatagatattaagaatattaaggaaaaggcaaatgtgatagaagacaacatatccaagcggaaacacaaccattccatggcaccagcaatattgaactttggccgagaatatccatcagtcagtttcatatttgtttcctgaaatcttgactgctgatcaaagcttctaatagttgaagtaccagaaattgtttcagcaaagtgttgaatgattggggacttgcagactccaactaagcgtgatagttctcgggctgatggaatataatatggctgcaatattataagc

SEQ ID NO: 160355 - DNA, 399 bp, Glycine max
  unsure (1)..(399): unsure at all n locations
agcttaccaaaccatgcccatatgtcattgattcatntctccgagcancttgggggcgcatgntttggcatgaatagcaagagaatgggggcaatgtggcatgccccattactccagaatgcaacataggcctaaggccatcccttacaaccccttaatttagtgaaaactagcatggattcacatgtgaattgcttcacgaatttcgcaaaatatgagcaactaaagcactaaaacacatcaagggagagccaaataaccaggggaaagtgcacttacttgtggggagtgaaataaagcgtgaaaagggaagcaaaaactcaacaatggaagcttgtgggctgctatctntgtagctcccgtgagccttggtgtttagaagtgaggggggagaagttt

SEQ ID NO: 160356 - DNA, 155 bp, Glycine max
  unsure (1)..(155): unsure at all n locations
tgtcaatgttgtgcatgggatatacgtccttgtggcacactttgttgatgatggngtcgtcagtgaacatgccccatttcccattggacttctttaccatgacaacattggccaaccaggtcgagtatttgacctctctgatgaactgggctttg

SEQ ID NO: 160357 - DNA, 168 bp, Glycine max
aaagaatcaaaaagagtaccaacatgccaacgactaaaacataggcagcacttattttactatctgaccccaccaaaacacacttccagatacattaatcatttgcgagcaacagtagaatcatcgtatatacctaaataagaatgtaagcaacaatttgcgactcac

SEQ ID NO: 160358 - DNA, 343 bp, Glycine max
  unsure (1)..(343): unsure at all n locations
ttctgctgtgtcacaacacgctgcttcttcacaataagcatacgagaggtagggtccacagtccagccttgctgcagtacatctaaattgtacaacaaaaaatgtcaataataataacagagagggaggaggaaacaaacaattgttggttattgctaaatatattgattaattatgatatagcagccaaattcaccatcaagaatcatgatcatctntgggcttcaagtacaaaatgtaatcaacatccaacttctaatgcttctangatagggaaatatactcacaatttgtagcatcatcctcgttcattaccagaaataaagcagtgtctttatgctta

SEQ ID NO: 160359 - DNA, 448 bp, Glycine max
  unsure (1)..(448): unsure at all n locations
tttaatccctcatgttttaattaagatattttgtttccacttttaaaagaattacaactttaatccttgtgtcaaatttcaaacattgatttatgtattttataaatgttgaccacatgtttgtttattatccatgtgataaatattttttaaaaattatttaattgttaacaaaatatatcaattaaaaaaaatagggggaataaaatcacttatttttttaaaagttaaggacaaaatatatcaattaaaaaataaggagactaaaataacatatttggaaaaataggaagaaaaaaagttatattttagcctattatttaatttgattatatattacatttaatgaatataacatttcaacatttaattgctatttaacttggctatatattgctatangcttaattattattttaacccttgaattggagaatgtgttttttat

SEQ ID NO: 160360 - DNA, 422 bp, Glycine max
tgaataagatcagtcggatgtgtggagccgatggccacctgtctggtttgtcacgcaaggaataccctgatctgacatatggctgtaccaaaacagaactggcaccaggagcgctaatgtgagcgacgctcttcaagctaaccgagccgccatagtattccaccgagaaacacgtgatgaaacagctcatctacaggacataactcgttacaaaagaaactaaatacagtggatcacttccatttgagcacttagttaactggagattacaagcatatctgagattggatcagtaactagatgtgactgtgtgagctatagcaggtgaaccaaatcaatagtagagccaggatatcaatccgatggcgcagtttactatggaagtcggaggctacgtattactatcagcatcactaaagaac

SEQ ID NO: 160361 - DNA, 468 bp, Glycine max
  unsure (1)..(468): unsure at all n locations
tatctatacatgacaactatggacttggtttggtgcttctatgtccggcttacgaaaagacaggttaactcatgagaggtctcattggaagtgactcgcattgtgtataaaatgaaaggtaaccagtttcctggtttggggaaaattggattggctatacaaatatttacaagctctgtactttcattacaaaaaataagcatactataggcagctagaatttgctgcctcactcttgattacccgggtattgtatgatccacaagatccacatttgtgatataaccagtggaagcgtgaagtgccctttctatcacagtcatggcagagtatatcctgcattgaattatgataatgagtaaaaaaaaaatacaagagttgaaaaatcactactgctagtgagctagctgttctttctattttatntcagttggttttgttggaaatcttatcttgatacgatgatga

SEQ ID NO: 160362 - DNA, 439 bp, Glycine max
  unsure (1)..(439): unsure at all n locations
agcttactagaatatgaagttttatatntattcaatnnnnnncnccacacctcttgttgatgttaacttgntgttattaaaggtgagtttgatcttctggaagaaaaaaaaatgaaagagaatttaaaaaaaaatatttgaattaaagtagagggaaggaaatttgaaatccagtcataatcttaaaatgttctctttcccctcttattttttcataaccaaacacatgctaattttttttattaacacaatattatcactataaaatcttattaataagattttggaattctggccaataaaaaatgaaatattcctaagaatatcacagatatacgttaataatatgatgaaatatgatatatatatagcctattgaattcttagacgaaaaatagtctatggtaaaactatatgaatgataaaaatagtaaatgat

SEQ ID NO: 160363 - DNA, 462 bp, Glycine max
  unsure (1)..(462): unsure at all n locations
ctaatcgacctatactaatgcttaattcatgctctatatattgcagccttataggctaatttactaaccctggattgaatagttattttgaaggaacatattgaataactactaagattagtttttttttttacagcactattaaggtttgttcagtggtgggagatttgaataatttacaaaatattttatgttaaaatctcattatctgtcattgtataccaaaaaactaatacattgagctaggactgctcaatccgtcaatttattaatggggtgaatgaatgtcaagatgatgaggctttgaaataaagcctctttacttttattattattattattattattatcacactaattgtcactgtaggactataattgctgtgtaaaanaataaccttttctataataaatattacatacataatataattataataatataaaagtaattgtgctgat

SEQ ID NO: 160364 - DNA, 345 bp, Glycine max
  unsure (1)..(345): unsure at all n locations
agcttgagatgatgatagcgtngaanggngatanctttctgctttacagcagaccacagagnggtacctggagatatgtcgcggcggtcatgagaccttggagacgtcatgtggggtgctattgcccaaaaccaagcttgaccaatcccgacccaacccgggcatagtcggtcagtgagaacctgtgatgtacctaagcaggcgagctcctggcagtcaacagataaaaggaaaacaacaccacatagcatggaggcttgtggtggctggccagctgtgaattatgtgtaatatgtggatggtggcctctcgtaatcgactaccaagggtgggtaatcgattaca

SEQ ID NO: 160365 - DNA, 265 bp, Glycine max
taccttactcgaccaatcccgacccttcccaggcttattatgtcagagagaacctttgatgtacctaaacaagcgagctcctggcagtcaacagataataggaacatagaccacaatgcatcgaagctagtggtggctggacagatgtgaaacttgattgatatgggagacatggtctatggaaatcgaataccaatgtgagggtaatcgattacgaggcttaaaaatgaaacacgaggctaagatgatctctggtaatcgatta

SEQ ID NO: 160366 - DNA, 370 bp, Glycine max
  unsure (1)..(370): unsure at all n locations
catgcaagcttgaaggtgtgtagcccaccatctntttttactnngtatgngtttactatcanngngataatctctntctctggtattgggggcgctacttgagttgccaagtctctccatctttgggcatattctttgaaagattcgtgcccccttttttcacactttctgtagttgcatcctatctggagccatatcagaattgcactgatgctgcccaatgaatgcaaccattatgtcttcccaagaatggactcgggaagggttcaagttagcgtaccatgtaacagctaccccaggaagaactttttggaagagatgatcagtagctcctcatctgtggcgtatgcccccatcctcncgacataca

SEQ ID NO: 160367 - DNA, 442 bp, Glycine max
  unsure (1)..(442): unsure at all n locations
nttcttctacattgattatgtatgatttgacatgaatggattctttaaaattatattgatatgctaaaataattgaaataagtaatgagttaccatgtatgtgttcataattgattnttgttacgtagatagatttagattattattatattttaagccgtgtatttggctatgtcttatgactttatgttagttgtgtgctttatgaacttggttatattatttatttgcacttagtagtttgtgttatgattttaaacttggttaccttattggtatatgactggtatttatggatatgatttagttatgtcttttgtatgattttacttttccacgcactttggctttntgatgttgccaaagggggagagaaaatgggtattttataaatcaagaaaaaattatttactgagtgttaaattaagcacaaattcaaaaa

SEQ ID NO: 160368 - DNA, 439 bp, Glycine max
  unsure (1)..(439): unsure at all n locations
cgggcgaaggtgcacaaccagtttttccacatccacaatgcgcgcataaacccaccatcccctgttgcccacctccaactgagctcacgtactcccacgtagcccatatcctcgtttctctcaacaccgggtccccatcagtcctcccaagcttccacaacatccaagcaaaacaacattcacacagcacaagctatcacagccaagcaaaacagagcaaaggcagaaaactctgccaaaacaccaaccaaaaatcacagctnttcccactcaaagaccccagtaacaattccttcgatcccaattcgtaaccgttggatcaactacaaaaatntactggaagtctatagtgcataagcctacattntgaccgttgtgatctactagataacatccagaactcattctacattactctnntcacaaccagcaaatacat

SEQ ID NO: 160369 - DNA, 484 bp, Glycine max
  unsure (1)..(484): unsure at all n locations
acttgcaccttgcttctctcacttgtacctccctcacccaagtgagccactaagtcgtgtaactcggacgagtcgtcatcgtactcctccacctccctctttactttctcctctggctaccatcaatccatcaccataagccacgcaacaccgccaccccttctcctgcccttacacgtgtccacagacgacacacataacagaaaaagacaaatgaacatcaacaacgcaaaactgtcacataacagaaaacacaaatgaacatcaaataaacaaaggagatcgagagagaggaaagcgaaatagaaaaaaaaatagacaggattgaaagatatggggaaaaagagggtctattgtttacgatgaaaccccaaatccgccgttgagtccatgtcggtaattgaagagttcaagaagcttctggtgctctctgatggggctctcctcntggttgaattcaaactctggaatcgtggcacaaaag

SEQ ID NO: 160370 - DNA, 395 bp, Glycine max
  unsure (1)..(395): unsure at all n locations
atgcaagctttcanatgggtaaaaggctcacattctctttcttcttcatatattcaaacctggccaaataaataataaagtcatctcgactcaaagaaagtcatataagtctcatacaattaatatagaacctatatcctaatgtcacatcctattagagcgtggtgttctcgtgtcctctagcatgaggttcttcatagtcatccacctattcatctgctcccccgaacacaaagttcaagatcatcacaggatccaaacacaaacagcaaagcgggagtgagttatcacattgctttctactagagagaaacaacactacatatattagccaaatacaattnacttagcatatctcacattatttcatcactttgtcattcatcaatcacacc

SEQ ID NO: 160371 - DNA, 337 bp, Glycine max
  unsure (1)..(337): unsure at all n locations
tgcattacggaccttaaaactaagctgaagcttctccaatggggttntcttggaggagaggaagtgaaatgaaaggttctcttttgtgagaagtttttgaatatgaaggtttaataatgggttttttacccttccacttctctctatcttccacttctactaagcacacctacctctttcataaatcaaaatcccatcccttaatggccaaacacaccaaaatcttaactatacacattaaacacatactcttggttccttgcttggttatggaatatcctctattaaatgcggtggaagaacataaaaatttaactctccataaatcaacacttta

SEQ ID NO: 160372 - DNA, 461 bp, Glycine max
  unsure (1)..(461): unsure at all n locations
agcttcatgatgatgaatcaagntgattgcatgtagttcgtcanatgacaaagcgacgacaaaaatctcacagaatgatttcaagattaagtccacaagaagaaatcaagaagattcaagaatcaagtgaagtttgatttcaagattcaagaatagattaattcaagattcaagagaagatatcaagaagacttcacaagggaagtattgataatttttttcaaaaaacaaacatagcacagttttgtttttttcaaaagagttttctcataattttctaagttaccagagtttttactctctagtaatcgattaccaatttcctataatcgantaccagtggcaaaggttgatttcaaaaagctttcaacttgaatttgcaacgtccaattgatttcanaatggtgtaatcgattacaagatattggtatcgataccagtgatctgaacgtgaatcaaat

SEQ ID NO: 160373 - DNA, 323 bp, Glycine max
tttccaaatattatgaactaccctatatcaagaatacagagtagaggcagattactctgcccaaaacacattcaaatatcacaactttccatactcaaataccccagtacattctctttgttctgattcgttaaccggtggatcgactcgaaaagtttactggaggttcctagtacataaatctacattgtcaccggtgggatcggctagaaaatgtctataacccaatatgtactacctttcccataaccaacaatgcacaagcattgttctgcacacatcaaaaatctgctgcacaattcaacaacatttttctgcataat

SEQ ID NO: 160374 - DNA, 445 bp, Glycine max
  unsure (1)..(445): unsure at all n locations
agcttcaggaaggaaagacatgccaatttatatatatctctatggatatagatacatagaaacaaacacaagatataaagaattaaaatattgataactatgtattgaaaatttaaaactaatggccattcctcttaaaatcagtagtagatgcatttactttacaaaactagtgcagaaaataaattcagtgaatacctgtcctttgacatctactagagtaattcttgtcagctcataaccttcacttgttatgcactaagcaaatganaagaagatgaagattgatcaagattacatatgtacaggataaccataaaaagaatgccataactactntaatgtgtctcaataaaaatgaaagtacttaaaatcttgcctatgtatgtgaataanacctcagtcaatantaattacagctacgttaaattgctttagttttcat

SEQ ID NO: 160375 - DNA, 482 bp, Glycine max
gaccttaaatactcagctttatcaaccacgaccaactgtccacgtcaacactagtactgttttatgatctggcccacataaagaaaaattccatagttacttgggggtagtggcgcgggagaaaatccctattgttcatgctacttggaaagatgtccccgaaactttaaaagttattgtatgggatgacattttggtaagtccactcaactggtaacgagtttacttttgtgtatatttaatgcctgtggaaatgtggtttatgcagttactgattgaaaagtatttattattttaagccaaatttgatattcctgaaggtttaactgcgaagaagaatgttatgtccacggttgcaacaagatggaggcaatttaagtcctccctaacctccagatatctatacactgacaaagacgatcaacaaaacattgatccatctgctaagtatggtttcgatcgagaaacatgggaagcatttt

SEQ ID NO: 160376 - DNA, 342 bp, Glycine max
  unsure (1)..(342): unsure at all n locations
gagccatttctagggtaaattgggtgttgaggagtcaaatattgattcggtggaactttaggcgtaaaaccagtttgagcaagtttagattaaggttatagacttgtgtgaggtgagagtctgctccaaatttaccccattctcattttcacttctcaaaccttgaaaatccactaaattgaggggttctagatacctatattttgagttgctttggtctgaagcttgtccttggtttatacatgatttatacatgatctatgacttgtangattcaatttgggcataatcggacgagggcaagtgtgatatcaatatcttcactatctatgcagaatttgc

SEQ ID NO: 160377 - DNA, 416 bp, Glycine max
  unsure (1)..(416): unsure at all n locations
ggggaggattgatggngacccggtgttgagagaaacattgatatgggctacgtgggagtacgtgagctcagttggaggtgggcaacaggggatggtaggtttatgcacgctgtgtggatgtggaaaaacttgttgtgcaccatcacccgaccgccacctagtaccacatgtgatgggtaccccataatcctacaagcttgagatgaggaagtgtagaacgatgaacttcctgcttttattgttgaccacagagtggtacctggagatatgtcgcgggggtcaggagaccttgtggacgtcatgtggtgtgctattgcccaaaaccaagcttgaccaatcccgacccaacccgggcatagtcggtcagtgagaacctgtgatgtacctaaacaggtgagctccttgcagtcaacaga

SEQ ID NO: 160378 - DNA, 413 bp, Glycine max
  unsure (1)..(413): unsure at all n locations
taagtcacctgaggcatcaagcttgctancatttatgttataagatttcacttgnttctatcatcgccaagtaccaagaagagttatgtctagccacggcccacgagcatagaatcgcggatgagtatgcccaagtgtatgcggaaaaagaggctagaggaagggtgatctactctttacaccaagaggcaaccatgtggatggatcggtttgctcttaccttgaacgggagtcaagaacttccccgattgttagccaaggccaatgcaatggcagacacctactccgcccccgaagagattcatgggcttctcggctattgtcagcatatgatagacttaatggcccacataattagaaatcgttaggaaacttgtatggtctctcataccttgactagatacgacttccct

SEQ ID NO: 160379 - DNA, 483 bp, Glycine max
aaaactaagcttatatggagccatgccaatggtatgtgaaaactattgttattagtgaactctatcaatggaagaaaactctcccaacttccctgttgctctaagacacacgccctcaaaaggtcctctatcgactgaatggtccattcagtttgaccattagtctgaggatggtaggctgaacttagtctaaacttggttcccaatgccctgttgaggctctcccaaaatctataggcctcaaagggttctcttgggttagacaaaactagcactggagcggtcatcaattgttccttaagggtttggaaactatgcttaccttgtgtatcccacacaatagcttatgactctcccactcaagaacgacttctatcttatagggatctacaggtttacccccttgagatatcacatgccctatgatactaactttctctaaccaaaactcacacttggacaagctagcataaagttgtcggc

SEQ ID NO: 160380 - DNA, 451 bp, Glycine max
  unsure (1)..(451): unsure at all n locations
agcttggagaacagcaagaaatgttatgtggttttgtttcattcccatttctaacatcatanaaaataactccaaggcatctttaacgtctccattcaatgcacaagcagtaatcatggttgtccaggagacgacagttctgttagccatggggtaaaaaagctccttagcatcattaaaacctccacacttggcatacatgtcaattagtgcgttacaaactacaacattatctttcaacccgttgttaatagagtaattggtcaatccatttccaagttcaagcgcccctgtctggccacaacctgaaatcaaagcaagcacagtaaccaaatctggtttctaccagcagcttcattgattaaacagggcactgctcactcatatatcttctctcatatgcactatcatacagccatgaacacagtcttgcaacatgcataacaaaatc

SEQ ID NO: 160381 - DNA, 433 bp, Glycine max
tgccctgtagaatgaacaaaagattgtaggcataacatattttatataacaaaatattgagcagaaatagtcagataaaaagaacaagttaaagcagaatctcacttctctctaactggtttcatgacctttgcataatgagaaacagcagctggatcttctgggtcaatggtgatcttctccttctttaatattcctatggcagtctcaaatttgttcttcacctccacaaaaatgttcttcagcatctctttttcccattcaatcaaagaatatgttgtcagatacagacagtgacatgaataaaaaaaattccattaaagatcaaaatgcatattgtaaaactatacaactgtataagagaactcacgatctcccttaatggcaggaggggcagactctttatcaaagtgacgaactggaatatcatgct

SEQ ID NO: 160382 - DNA, 463 bp, Glycine max
  unsure (1)..(463): unsure at all n locations
agctaggacgatntctttttttctttntaattttctcatagaaatcatgaatatttacgacagtaaaatatttaaaataaaaagttatagtaggatttacgactacggtgtctttatcttgtttcgtcacgaagccaacagaagagttaattatatattgtgcactgctcacacaatgttgaatccgcgagatgagcagcatgttcttaaacaatatcataattagcatattgtactattaactcaaaaatatttgtgtaacacatacaaacgacaatattgaaatttggaatgtcttttttgaaccccaatatttagcctaataaacttatatagcttatntaaatccatgtcaaaaacgttgtcatcggtgggatcctcatcacatgcttcagaatttccttaaaaatactcatttctccgacaataataagtggtgggaaaaaaatatcttatataatta

SEQ ID NO: 160383 - DNA, 469 bp, Glycine max
  unsure (1)..(469): unsure at all n locations
tgatttnactatttgggtttattgaatcttattaatgattattatagaacaatgaaaaaggtcatcttagcttgctgatggattgaaaagacatttactttgagacactgttaatatctgattgacgtgatcataattcaccgtgaataggcattttgtaaaatttgaaaaatgatattcagagaagatagttggagaagtgcatgtagataacattaaccctctatatatgtaaattattggccactgttaaaatagtaaaacaagaaactttagtaacactagatgaaatatcagttacacgttcgctatattattgattcaatatggctgtaagcatgttagagagttgtatgcgttaaatttcaaaatgtatatagagacagatgacagctaacagaattcctatctacacatgcacattcatgaatctgtaatagctagctaggtagataaccaataaataaaa

SEQ ID NO: 160384 - DNA, 476 bp, Glycine max
  unsure (1)..(476): unsure at all n locations
ccggatccttaagtcacctgcagctcaagctgtagatgattgaggtatccggattcttcatgggaacttcaggaggctggaccgactcataatcgatgattgtgctaccggtaacaagatggataattgcgtaaaagggattcccaaaggtcttgcaatggactagaatggtgttatgaagtgaaagatccccaaatccaagtaccttgtgaatagaagcaatacttgnggcagtgaaaatagtccttatgtaagtgccaatgtcaagagcagggtggtcatcaacactgnggacagcatgactagccatggtgagcatttcaggtgcattctcactgtatgcgatgaccttatatgttttctcatctaagaccaacaagcacccaaatggctgaataagcttgcctttctgcatctgatggaggtaagcagttgttgctgctctatcagactttttggtcatgctctcactgaca

SEQ ID NO: 160385 - DNA, 471 bp, Glycine max
  unsure (1)..(471): unsure at all n locations
tctagccatggcttaactgttgctagaacttgagctttctgtgatggaggttatagagcccttcaggtttctcctggttcctacgacgagaaagtattcagggtacgtactgcatcttcaattaataatattctttttaatacaatcatgtcaaagttttttttttcttaaatataaactcaatatggttattgagataaggtataaactaacgatactctgtaccaatgttacatgataaaaaaaaccctccatggttactgtttttctagaaaaattattacataattaaatattatatatcatgatgttattaaatctctacatgatacataattgaattttattaattgtttaatatacattaaaaaaattattatgtatcacgtaaagatcagtcataatcaacggcatttanaactgtaaaagtccttagtaatgtaacaatctatcgtaattgagcatcgaata

SEQ ID NO: 160386 - DNA, 390 bp, Glycine max
  unsure (1)..(390): unsure at all n locations
ctcaacctatatttgngagtcatgatgaaattgagatcttgacaaaagtatcgaattactcgagtaacataataataagtatggttttcacaagaatttgtgcaataattaaataattaatagtaaattagatattgacgcgtgcaatgcatagattaagaaatatgtaaattgtatgattagaattagaattatataaataaataaatcttgtctcgtaaatttatagaaatttgagtgaaaaaagttgttgctagaattggttactggttataaaaaggtttgcaaattatagtgggtggtgtggtggtgatacattgcaatgatatgaaagactaaagcaacttttgataggtanatcaaatggaattatatacataaggaattatg

SEQ ID NO: 160387 - DNA, 288 bp, Glycine max
gatagctgtcaaaagagcactaaatgcgtgcatccaacgcgcaatcttctacatgttggaaaaccacgctctttagcggccgtgaagaacactttaacaagaaaccacctgctgttttgcaaagcatgtccataacaacaagaggcatcatttaatactatgagaaattacaaatgtcggaacggcgtgacttgtctacgattgggacagatcctataagaatgacttgtaacataagacctgcataacaaatctcatacacataatattaaatgaagtcgtaaatgc

SEQ ID NO: 160388 - DNA, 336 bp, Glycine max
  unsure (1)..(336): unsure at all n locations
acctgaggcatgcaagcttcatgagatgttaagacctgaatgtattgcaacggtttaagtatcaagctatgtcaccagccagcatgctgcaacccatttccattctagaggtcgtttgggctgatatctctcttgattntataattggactaccttgatcacatggttttgagtttatcttggtggtggtggatcacttctcgaggtatgcctattntttgcctctcaaacacccttttacagccgagatagttgcaaagtctttcactagagatgtagccaaattgcatgggtttcccaattctattattagtgaaccccatctntttgagtaag

SEQ ID NO: 160389 - DNA, 472 bp, Glycine max
  unsure (1)..(472): unsure at all n locations
tacggaccttagatactaagcttgtatanaagggaggcttanatatatgttttattttttattttttcaagtttatatcttttagtctcccaaattaaaatatgtattttttaattgtttgaatttgcaaaattttttttagtccgtcttgagataaaaaaaatataacactatagtgttcataatgtatgataagtatttgatataaaatacaagagaaattaaatttaaattttgtgtgttttaaataacttgagtaataaagtatgtgagcgtgttatgaagtggttntgggtttgtcttggtatccttttggttgagtttccatangagtagagtgataaggaagagagtcatttctgcaacaattttgcttaagtgaggaggttcggtcacttaagcaagatcgatagcttaagagagtatatgggttctcacttaagtatgagtgtataaaaaggtggtcgattct

SEQ ID NO: 160390 - DNA, 435 bp, Glycine max
  unsure (1)..(435): unsure at all n locations
agctntaacctcatcgtccctcacagtctttatattnggtttccaatccaatccttgggttcggactctcagccacttatgatagccgccgatgatcccattactgcttcccctaagctctctgtcctttcttcacgccgcatcccatgccttgcgaactccttggagtaccctcgcgttgtggtcactaaaaccccgtgcgatgaaaggcgtgatgctttcgtctaatggcgctcctctcatggggtagccaagctgtcttatggcgagaacgggattataattaatacaaccccttgttcccatcaagggaacatttggacatccttcgcatgaagatagaatcttgattcttccttccttctagcgagggaaaccaataacagacgcccccccatgctagccaagagttggtcccaattcgccttttctttt

SEQ ID NO: 160391 - DNA, 412 bp, Glycine max
aacatgggaccagctcactttataccagattggacgccatatctagtcaacggctgagagaccatacaagtttactaacgatctctaattatgtgggccattaaggatatcatatgctgacaataaccgagaagcccatgaatctctgtcgtggcggagtaggtgtctgccatcgacttggccttggctaacaatcggggaagttcctgactaccattcaaggtgagagcaaaccgatccatccacatggttgcctcttggggtaaagaggcgatcacccttactctagcctgtgtttccgcgtatacttgggcatattcatccgcaatcctatgctcgtgggccgtggctagaccaaactattctttgcgatgatagctagcatgttggtctacgtctcgcataaacgctg

SEQ ID NO: 160392 - DNA, 254 bp, Glycine max
gactttgaacatgttacttgactcttatgatcagctctatacaaattacaattgcatgaatataaagtgagtcagagactcactcatatgctggaatcgaatcatcattcaagaccgaacagagtgcttgatatccattgggtaagcgacggccgaattacaaccattatatgaatttattacaatgattcgggtggcagctgttgtgggatggaatcgactcctaaacacatatgtggttctattcttgcata

SEQ ID NO: 160393 - DNA, 351 bp, Glycine max
  unsure (1)..(351): unsure at all n locations
tagaaatgtactcacgtactttaagaacagctagtgcgggttttgatcttttgtcatgtgtagtaatcgaagtgctctctgaccttcgatcgagcgatttgcaactgcctcagcataatcttgcgggagtattaatcacatttatcgtccgacagggcgcttgagccacatctggagaagccacatangcacggacactagtaatggagacccatccttcgattgctgcagatcatcgaatgcctgaccaagcgattcgtatagcaccgctaacatgatgcggccaaatacaaaattctgaccttaatgaatttgtaatgccattggaataaaccttgtagctacttgcaa

SEQ ID NO: 160394 - DNA, 396 bp, Glycine max
  unsure (1)..(396): unsure at all n locations
atcctctgagtcacctgctgcatgcaagcttctgacaacgacaagagaacgttgatgtggttggctgtcggattcgttntaagcggaggcatactatacaagagaaaccatgacatggttttgctccaatgcgtgaacgctaaggaagctggacgcatgctagaggagatctataagggctctntcggtacacatgctaacgggcacgccatggctaggaagatcctgagtgtgagctattattggctcaccatgaaaagcgattgttgcctccatgtaaggaagtgtcacaaattccagacgtttgtggacaatgtctatgctccgcccctgccattgaatgtattggccgcaccgtggccctttaccatgtggagaatagatgtgatcgtgatc

SEQ ID NO: 160395 - DNA, 400 bp, Glycine max
actcagctgaagaagcagatgccttgttaacctggaacccaactgctcatgaatcaaaaatctgcacctatcgccagactctgtggtctatgctcctctgccgaccaccacactgacctttgcccttttatgcaacaatctgaagcaattgaacaacctgaagcttatgctgcaaacatctacaacagacctcctcaacctcagcagcaaaatcagccacaacagaataattatgacctctccagcaataggtactatcccagatggaggaatcatcccaaccttagatggtcatatccttcacaatagcagcagcaacaacaacaaccttattgtctatatgttgctggcccaagcagaccatacgttcctccaccaatccagcatcaacaataacaat

SEQ ID NO: 160396 - DNA, 477 bp, Glycine max
  unsure (1)..(477): unsure at all n locations
tgcaagcttgcatgtctagtgattctagagagtgtattatccttgtttcagagagttttgagagatnttgttgtgtgaagatctgcagagaccagagcttgaagaggaagttgttttgagagcttgagatgagtttgtgagtggttgtgagatcctagaggtgaaggagacatcctcaccacttgtatttttgcanactttcatcttgttcttctccttgttgtaaaggaggcttcctggttatggaaagctaatatcctctattggatcttccttgtaggtacttgatgtaaatatcttattatctatttaatgatgttttgtgtgttctctgtgctatcnagttttcattctagtatgcctttaccttgatcacatagatgcatgctttgttagggtcattcaacagtggaaactgatctgattctgatgaccttgataagacaggactatagtatttgactatcacgaggaatc

SEQ ID NO: 160397 - DNA, 457 bp, Glycine max
  unsure (1)..(457): unsure at all n locations
ggtatgtggataacataacttattttggtacatgcaatgatatatttnttttaactaaatatttattagcatctaaatttgatatgaaagacatgggtgaagcaagggttaatttcggagttaaaattaaaaggaagggagatagtatattactatcctatgagcattatgttgagaaacttctcaagaagtataaatattatgactttaagtcagtgagtaccccttatgatgctaactctcaattaaagaaaaacatatgataactaattgctgaaactcaatatgcccaaatcattaagagcttattgcatttgatgaacttttctagatctgatattgcatacgcaacaggcagattgagtagatatacccatattccatatcagaaccatggggatgcacttgctatactcatgagatatctgggaggtaccatggattatgctattaatac

SEQ ID NO: 160398 - DNA, 332 bp, Glycine max
  unsure (1)..(332): unsure at all n locations
agcttgaacctcaacttaagattagaggttgtcagtttcacatatataaaatggttttgttctttgtaggttggtacacttggttcctctaccctaacacttcatttcaggagaaagaagaanaacttgatggtgatgcttcgttcaacaaatgttcttgctaccgctacagaattagcaccactagcatttccattatcagaaacagaaccttgagattctctccatgtctagcactgtccaaatttcttttgcctacgaggtgtttgattaaatgcttctgaagattntgaaggtatatactattggttgaagttcttcactatttcaaa

SEQ ID NO: 160399 - DNA, 468 bp, Glycine max
  unsure (1)..(468): unsure at all n locations
tctttctttgtgcctaanaacatgatatatgcattgtttgtgaatatgagtattgagtacttaccctccaagatatattttttctgcaaggatgaaggcacccatgatggctacgataatcatcatcaaagggctgaaagcagtaacgaaaacatgcctttttctgcatgacaatcccttaaacatagtaagtgatacctggtgatattattccctagttcaccaaagtttacgtccatttagattctcatatgatatggttcaacataaaatacatagaacaatagaataaaaattattgtataatccgagactagcacatgtctataatcttgactcctcatcaatataataatttatcggatagatcgtagatggatagtacaatagagagaaagtggatcacaacatatgctacagcaagaatgttcatgtcccagccaatggtcgaaacatatggtttgtgct

SEQ ID NO: 160400 - DNA, 443 bp, Glycine max
  unsure (1)..(443): unsure at all n locations
ttaagtcacctgcggcatcaagctatcacatctactgtttatagatttcttgggcaagacatgagaagcatcaagtatacgctactctcttcactanagcggtgatccatctccacacatattttatcaatagcaacatataaaatctctgcactgtaatgatgaagattagtgatagtccttccttctgctcttgaacgaccccgaactggtatttcgtcatccatatttggtaccagaatacttctagcaacacataatccttggacattcgcataaataatattccagccactctctcattgtgcccaaccgagctttgacaacatcaactaattgccatgcattcacaatattaagatcttttctttgcatatatatgaagctcgttgtgataccaaccacttaacattacctcaaataaagcaattaagctctcattt

SEQ ID NO: 160401 - DNA, 438 bp, Glycine max
ctgatctcaaattatgaaacgtatgacacacgcgtctattcctctttgttatatacgatcccctaacgtgattgtccatacctcaaatggatattcttttttgtatgaacgactcttacggcctgcaccttctcgatttgtaattcatcagcattgcacccctatgtcctttgcctatatcaatcaaccttgcgataagatgactatttctagtggccttcctcaatgtctactgtactaacgaaaccgctgctgcttaatccaattaactgccacgcttcgcccatcttgcactctaccaccttcaatcgacacactacttccctatcattccttcactatgactttaaccacctcctccactccctctttatctctacttatcctcatccgtctctcttatatatctatctctttccactctcacctccttttccc

SEQ ID NO: 160402 - DNA, 476 bp, Glycine max
  unsure (1)..(476): unsure at all n locations
agctnttagatagtcaataagtattaatcctatcattgngccatggcccagacgatcttgnttagctataattcagttaattgtatacctatgaagcatggccatggacatctctcctgtttgaagtgtcggacacatttctgacacctacacctccccaacacttgtctgacacatgtccaatacttatcattaagtgcccaattaaaaaagtatttttgtcaacttttggacacttatgctaacacttatatacaggtcaaacacttgagccaacacttctatatggatagacacaaatcaatattgttaaagaatattcattntttaatatgcagaanagtcagcttaaaatataatgaatattctatagcaatataattcctctcacattnttnntgtgcggttgtcatcatagaaacaaacttaanaagttggttatgaanggaatatcctttttatacatatacctcatt

SEQ ID NO: 160403 - DNA, 271 bp, Glycine max
tgattcgaggtacttacccgttgaagatcgaagatctatgattatcgaatgaagaacgtcgaagaacggtcgaatccttggcgatattcttcacggaaaacgctacggaaacgtttcggaagcgcctcggcttacattttcttcacggaaacaattgttcccatcatacttccaagaaagagaagtgcctatagtggccgaaccctctttcattgaactccctctcttatagctaactttatttaatagataacctttcggaatctttctg

SEQ ID NO: 160404 - DNA, 458 bp, Glycine max
  unsure (1)..(458): unsure at all n locations
agcttgaagaaattatgactccttccggttgctgangcagnaagatgggtttggttttcctcaaggtaagagtaaggtaatctataaaggtctaagactaattagttttcattgctatttctttgtcttcacagatatatgcacaaagtttttagattagcttgtcaatatcaggttcgtactgtagtgatggattntaggacctggattgcatgcactacaaaatataggagaagatcaaatgtaatgggaaataaaagaataaatagaacaaaataaataaagaataaaaaatttataaacaaaactatttggtttaacaaaattaaactagtcgagaattccgcaactagtccccgacaacggtgtcagaaatttgatgcttataatatgttaggctcgcataagggcaagtgtaccttatngcatagtaatactagacgtgaaagtcggatatc

SEQ ID NO: 160405 - DNA, 384 bp, Glycine max
tgaaggcaaactggatgcattgggtaacttgttatcccagctggccttgaatcacaaatctgtacctttcgcaagggtttgaggtttgtgctcctctgctgaccaccatacaaacctttgcccttctatgcaacaacctggagcaattgagcagcctgaagcttatgctgcaaatatttacaatagacctcctcaacctcagtagcataatcaaccacgacagaacaattatgacctctccagcaacagatacaaccctggatggaggaatcaccctaacctcagatggtccagccctcagcatcaacaacaagagcgtgctatttacttccaaatcgttgaggacaaacgaacttacattgcctcccgaatcaacaacaaagg

SEQ ID NO: 160406 - DNA, 437 bp, Glycine max
  unsure (1)..(437): unsure at all n locations
atctctaagncacctgaggcatgcaagcttctaaggaggtgaacttagntatgatttggtgnatttagcttagcnctagcttctcaaggaagttttctcaaagaagctctcaaggaagttttatcaagaaagcttctcaagaaagttaccttgtctataaatagaagcatgtgtaacacttgctgtaactntgatgaatgatagtcttatgagacacacttcaaagttccacttctctccctcttttattccttcaatttcgtgctccccccttctctctttctttccctccattaaagcatcctcttcatgcttcttatccaaggcacattcttggtgggaaacttctttttccttggcttattcccttggggatggtgcctcccctcttctcttcttctttgccttccgctgcatctncatggtggaaatcacca

SEQ ID NO: 160407 - DNA, 423 bp, Glycine max
  unsure (1)..(423): unsure at all n locations
ngagatgaggaagtgtagaagggtgaaacttcctgctnttattcgttgaccacatagtggtacctggagatatgttgcgagggtcaggagaccttgggaacgtcaggtggggtgctattgcccaaaaccaagcttgaccaatcccgacccaacccgagcatagtcagtcagtgagaacctgtgatgtacctaaacaggcgagctcctggcagtcaacagataaaaggaacaaagaccacaaagcaaggaggcttgtggtggctggccagctgtgaatcttgtgtgatatatgggttatggcctctgctaatcgattaccaagggtgggtaatcgattacaaggcttanaaatgaagacaggaggctaagatggtctctggtaatcgattaccaagggggtgtaatcgattaccaggcttgaaa

SEQ ID NO: 160408 - DNA, 453 bp, Glycine max
  unsure (1)..(453): unsure at all n locations
angctgcaagcttgttgtatcaggtgtgcaaagcaatttccataattatccaaggccatcaatncgntgtggatctttatgttattgcactgaggggagcaaatatcattntcggagtagaatggctcanaacattgggcccaatcactacagattattcggtccttactatgtttttcagttggcaaaatgaaccagtcggtcttaacagccaaaagggacccggcctattagaggccacccacgcccagatctgacacttgctccaaacagaacaagtcacaaccttcttccaccttcacttcacgagagtcccttcctttcctcttctccagacattcctttacccatggccgtncataagctcctatacacttaccagccaattttgcaaccgcccacattcttacccccgacacaattacattaaccttatattcatcttctacccaa

SEQ ID NO: 160409 - DNA, 363 bp, Glycine max
  unsure (1)..(363): unsure at all n locations
ngcctcatagaggtccaggaaggataaggtggccgaagggtctatttccgctcctgagtatgacagccaccgctttatgagcgctgtacaccattagcgcttcgaggccatcaagggatggtcgtttctccgggaacgacgtgtctatctcatagacgacaagtatactgatttccatgatgagatagggcgccggcggtggacatcactggttactcccatggccaagttcgatccagaaatagtccttgagttttatgccaatgcttggccaacagatgatggcgtgcgcgacatgagttcctgtgtaaggagtcagtggatcccgttcgatgcatatgctatcggccagctcttgcgata

SEQ ID NO: 160410 - DNA, 475 bp, Glycine max
  unsure (1)..(475): unsure at all n locations
caagcttgatgttgntagtcgtcatttggatgtctagagtgtcatcttgnnggantctgagaagaagatcaataaaatcttggtcctctaattcagctccatcttcttttgcaattntgttcttttcttgatgctctctgatgatgttttccaggaccttgtcaacctgcttgtgcaacttcttcaatctggtcatctttccagttaggaaatataagaatggaattgaaggaaagacatcagcaaggtcgaatcctcccccggattctacgatttttcggatcaaagacacaacaaactcatcttgctccttgtatatgccaccgaatgctaccctggaaatagaggcacatatcaatgagaaaattctactggtgagattgataggcgaaccancagattcgcgaatggagtcgatatactttgctcgctcgtcttctctaatggaagcaaaagactgtactcttttgtgctc

SEQ ID NO: 160411 - DNA, 468 bp, Glycine max
  unsure (1)..(468): unsure at all n locations
ngaagatagagtcatagatgcatgttatagtttgtaattgctttatgtatatattattgaactcatcacctcacgaacgaattctattaattattttagtacggttaattctttggacataaaacataataacatgcatttgaaggatcaaatcactataaagtaaaataaaggaggtaaataaggagaaattgtttttctttgaaggacataatgagaaattgttaagaaaataatcaaatactactgcccagttagatactttgacttggtgcccaacagcaattagagtgcaacgacaatttctattttgacttagtgcgcatgtgcaacagcaattatatagctttcaacggtcaaggttctcactaccacattaactattgctgcccaagtggcacttatatatctacaatagtattacacaatataaaaggagtaacgatgacatcctaatgaagtgaacat

SEQ ID NO: 160412 - DNA, 456 bp, Glycine max
  unsure (1)..(456): unsure at all n locations
aagtcacctgaggcatgcaagcttcaccaatcatcagcaatgggccaatttatagcaagatataacactattattntctggaaaaggaaaatatctacttttatatgttaagttatagcaccgcagtacatattattagtgtctattggtttaagtgataaaaaaaagtttattcctccttaataatgtctccttaaaaaaatctattaattaaactaattaccatcacttttcctcttttatttctctttttcttttccttctattttggtctttcattngataaatcaggtgttgaagttatattacaatttacaagtctattttttattatttattggtttaattattgattgacggctgagttgtaaactaacaaaaagaaaatgccattatggtccggngtgcatcattatacataaatagaaaaagtcattatggtcttaacatctattg

SEQ ID NO: 160413 - DNA, 477 bp, Glycine max
  unsure (1)..(477): unsure at all n locations
tcatgttatatatcctaataatgacaaaaaaatatggattctctctanatttttgaaangcngaagggaccatggacaacttttttggattaattatttaagcccttatagctgtaaaaactttaccttttagtttttatacttaaaacatcctattttagtggctacatatattatttttaattatttttagtccttacacataattgtaaatcgttttagcacaataaagactaaaagagattaaaaataatatatgtagagaccaaaatgagatattttcaagtgtaagacccaagaggtaaattttttttaaccataaaaaccagataaataattaaacatttgtccttgtctgacattttaaacaagtattgagccagaatacgtaataacgggctcaattttattagaatntaatggggcctaataagtgcaacataacgatccacatatttataaacaatatccacaaat

SEQ ID NO: 160414 - DNA, 405 bp, Glycine max
  unsure (1)..(405): unsure at all n locations
acactatgatactcagcttgttattgtgatacancatgataccgcattgttctttatcgacagtgccaacataagttatgtctaatattggcccaccaacgtatgaatgcgccgttaatgggctctagtatattcgtcaaatgacgctatacgaatggtgatccactcttttctcctggaggcaaccactgttgtgacggaccgggtggctcctgctgtgaacgggacccaatatccgacccgcttgctctccatagacaaggctatggcggacacctactccacacacgtagagaatcatgggcatattggctgttgtaatcgtataaatgacgtggtggaccacatgactcgacatcgataggatacttgagcggactataagaacttggatagacacaacta

SEQ ID NO: 160415 - DNA, 335 bp, Glycine max
  unsure (1)..(335): unsure at all n locations
agcttctaatataaagctgcatatttaatttatagtattactancaacaattaaacatatcagtaataacttattagatntaaattgagtcattcagtggatgagatgaaaggtattttactatattaaggtaaaaaaaataagcattgggtggtgtcaatcaataggccataagtttggtatttcttttatcttgcatccttaataagtaaatctgagcaaagtataatatctatatacaagtatgacaaataagctaaccatacagacacattcatcatggcagataaattgctatgatctagaagatagtggtgctagtatcacacaatacg

SEQ ID NO: 160416 - DNA, 478 bp, Glycine max
ttacgtgacctataaaactcagctagcattacaatttcttccatagactgtgatcccactgtttttttatacgagctggatttccaacccgcactatatttaatccaacatttgaaagcttttctaccatgttatcaacagctgcattagtaggtgctgtaacaagaaccctttcaccttgctgaacagcacatgctataagttgcttgagcaaaccagtcttgcctgtaccatgatggccttggataaccaatacaggcctctttttattcaaacccattgcaattgctctccactgagaatcatcaaaggtttcatttcctaatcttccatccaatgtttcttctgcccagtcagccaaatgatttttctcaagccatgcaacatcttccccatctccaaacagtgtagcaacaacagaaattgaaggattcttctttcgtaaaccattcttctgaagcagcattaaagcttcaca

SEQ ID NO: 160417 - DNA, 448 bp, Glycine max
  unsure (1)..(448): unsure at all n locations
taattttctttccaaccaatctgaaaatcaatacaattctgataaatggcctaaaaatagaaattcaacatcagaagaaactgtgaacatggatggtaaacgtccaacagagatcaatcagccttctaagattcttgttatgtatatactccttttggtctcgaatataagcaaaaaaataactaattaaagttggttagaataatttaattataccaatttcatttaaaagataaacccttttcataaattatccttccttggaacttgatatcaagaataaaagagtgtcattggaaacaaaacctcaattaaataaagggcattntaagaatggtctcattaaataagggaagttagttaagatntgcttatgttcgagaccaacacataatgcnttttttgcttatattgatgaccggagagagtataagggacaacattgagt

SEQ ID NO: 160418 - DNA, 455 bp, Glycine max
  unsure (1)..(455): unsure at all n locations
actttagaagcatgcagatngaggaaggagaggagcatcttttaatggggactctactcatgaggtattctatatttaaagattacatgatcactcaactagttgcaagaaattctcataaactacatgatattatatttttgttttatgcctacataaaaatagcctcagtgcattgttagttgtggtgtttgactgttaatttattttgttgtccttttgttgtagttgactgaacgaaatggagaagagcactacacagaggagcaggaggaacagaatggagaggaaggaagccaagatgaggcagttgtagtggatgcagattctacagatggtgcagtactcgttaatggtaacgaggctgacgaatagtgttgtacgaataatgatggagccccgtcagcctataagcaattggttgtggtggtgtgaaaatcaaaattctgtctctg

SEQ ID NO: 160419 - DNA, 460 bp, Glycine max
agcttctagccaaatggacttatcttgaattttttcctttgatagcccttttgagccttgtttccctttccttgttttgaagctcactacaagccttaagtgaaaaaccatgatattaccatatccttaaggaattttggagctttggaattgttttgggaataagtgtggggggtttttgtttcattggacaacttgtgttgttggctatgcttcatgaatgtatttgggccatacttgatgtacattgtatattggttaaatgttggacatgctgaatgaaatgttgtttctcaaaggctaatgatgtaaaaaaaaaacaaaataaatacaaaaaacaaatctaaataaataaaaattcgaaataagaaaaagatcagcaataaaggtgagtgaataatatcttatatggcacaagaatgatgaaactcttgggtctactcttcatggttaattttat

SEQ ID NO: 160420 - DNA, 450 bp, Glycine max
  unsure (1)..(450): unsure at all n locations
tcactgttntcagtattttctatcagagaactgatatccttatattgatggacttctttaagtttaatatgatctttggatagtttcttaaattcttttcacaagtttttgtaatcttttgaaagaatagaagaatttggaagtagtatatgataggcttgttttaatgattaaatgtcattgagatttaccttctttgttctaattctaattcttcaaaaattgaagttgtattaggaatcagacacaagtaggatttatcttgctcatgagacttttcctgtctttggacttgtaatgcttatagttgtccttgaacttctctagttctgccactctgacttaaagtgtttaggcttcttactttcatagcgtactacaaagcttttttctctgtctttcttttcattgaacaccttcttggagaagttcttgcatctggacccactc

SEQ ID NO: 160421 - DNA, 402 bp, Glycine max
  unsure (1)..(402): unsure at all n locations
agcttgagctggattgtactgtcattactcttttatctntgagagnngcattcgtcttattatggcattaattacaggcgtaaaccactttatattctgtaagcttagtgagttatacatttatttaaccttcaataaatcaaatcaaatactacttgacagagaaatctccagcagccgatgcatttattggggctaatggagacgtgccccaagaataatntttcaatattatgccccatgaaagatttctaagtatttattataatgatacccttaaaatgtgctggatctacgtaatatatagtcatttgtataatatctatgtatgtatactcccatgcattcgtagatatataaaagctgatagtggtatataaaacccacatggtgtgaatctca

SEQ ID NO: 160422 - DNA, 289 bp, Glycine max
atagaacatccacatcatgtccaacagggcgatatgatctacccggtattgacgtctttgtgtacactgatgctcccatgaatgaaccatctttaaccaatgacaataccattctttccatattggatatacgattaacctgctgaaaagctcgcttgctactatcctgatgatggaagtgatctcttgacctttgaaacaatggccgatgctgcgaggaatgctgatatatgggttcccttctgacgtaaacacaacatcgagcagacggatccatagtcctatttga

SEQ ID NO: 160423 - DNA, 353 bp, Glycine max
  unsure (1)..(353): unsure at all n locations
agcttctgatntatatgtcgagcttcacnatatactacgggacactatcggacatccgagtaaaaagttattgtcattttaatcttctcggagcttccgctttcaattacgagcggctcgatttattacgggactgaatcagacatccgaggaaaacgtctttgtcggtagaatttgctcacagcttttgttttcaatatcaagcgtctcgttatattgcgggacataatcggacatctgagtaaaatattattgtcgtttgaatctgctacgagcttctgttntaattactagagtctcgatattctactggacacaatcggacatcggaaatataagttttgtcggttgat

SEQ ID NO: 160424 - DNA, 424 bp, Glycine max
tgtagcatattcaaacaggaataactttgtactcggatgtcttattatgtcccgtaatatatcgagatgcttgaaattgaaaacggaagctcgtagcaaatgcaaaacacaataactttttactcggatgtccgattgtgtctcgtagtatatcgagacgctcgttattaaaaacataacctcgtagcaaattcaaacgaatataactatttactcgaatgtttgattgtgtcccatagtatatcgagacgctcgtaattgaaaacagaagctcttagaaaattgtaacgacaataactttttactcggatgtccgattgcgacccgtaatatatcgagacgctggacatggaaacataagctcttaggaaattctaaagacaacgactgtctactcggatgtacgattgtgtcccgtaatata

SEQ ID NO: 160425 - DNA, 486 bp, Glycine max
  unsure (1)..(486): unsure at all n locations
agcttctatagaaggttcgatcctaatttcttatcattgcctcacctctcaaggagctggagaagaagaatgtggcatttacttagggtgaaagacaagagcaagcctttactttgctcaaagaaaagcttactaaggcacctgttctagctcttcctgacttttctgaaacttttgagctagaatgtgatgcctctggagtgggagttggagttttattgttacaaggtgggcaccctattgcttattttagtgaaaaacttcatagtgccaccgtcaactgtggcgtccccaaaataatgactgggttaatagtaatgatttatataacacaaaccatgggaaantnttatttntatttntatttntntcttgtttttcccgttctttctcaattcaccatggagtcctgaatggccaggtcacaactctattcggagtcatttctttctgatcacagataacatctaaaatatgttgctcttt

SEQ ID NO: 160426 - DNA, 382 bp, Glycine max
atctcctaaaggaagaaggcagaaagaagatgccaatttacttcacttgctgagtattccaaggagtgaaaaaaaatgctaccaaatgattgaaaagcttgccttggaactaattcattctgccaggcaattacgacaatattttcaaagtcaccaggttatggtgaaaattgaccactccctgaagcaagtactcaaaaagctgagcctcatcggacgaatggtagcatggtcggtcgagctcttcgagtttggcttatgatttgaacctagaggcttcatcaaagggaagtttttggatgatttcctaatcaagctcccccttactaagggcatcagtgaaggctggtggacgctgtatgtggatgaagccttcaataat

SEQ ID NO: 160427 - DNA, 474 bp, Glycine max
  unsure (1)..(474): unsure at all n locations
agcttgcttctatgtccttttcattgctntttattgtagatttatccttgaaaaatacttttattacatttgttcgattctatttgatgatttacttgcttttaatcttttaattgtgctacattgaggacaatgtgttgtttaggtatgggaggagtgttctttggctttgctagttttggtggttttgataatcttgctagttgtgttaatttgttaattntgttagttttgttgggctcctagtttaatattttaagtcaattttgtttgcatgtacaactttgcatatttttctttgaattatatgatatgttcaagtaatgggtagttggtttgaaaataaaagtctcttgacattgtgtgattcgaaatccttggttttcctctacatgtcatgatagttntgaaagctcaatttggaagagataagtttacctttgtgagaatntggccactcatcatcataatctt

SEQ ID NO: 160428 - DNA, 454 bp, Glycine max
  unsure (1)..(454): unsure at all n locations
tgtangattatggtgtacccatcacatgtggtactangtgtctttctgtctatggtgcacaacaagttttacacatccacaatgcgcgcataatcccaccatcccctgttgcccacctccaactgagctcacgtactcccacgtatcccttatcctcgtttctctcaacaccgggtccccatcaatcctcccaagcttccacaacatccaagctgaacaacattcaaacagcacatgctatcacagccaagcaaaacagggcaaatgcagataactctgcccaaaacaccaaccaaatcacagcatttctcacttaaagaccccagtaacaattccttcgatccaattcgttaaccgttggatcgactgccaaatgtactgatagtctatagtacataagcctacattttgaccgttgggatctactagcatacatccagaactcattctgcac

SEQ ID NO: 160429 - DNA, 486 bp, Glycine max
  unsure (1)..(486): unsure at all n locations
gcttctataccaccgcatttctctccccctttggcaactttctatagccaaagntcggggtaatcaatacaagataatataatgaagtggacaaaatcaatcataagtcataaccaaacataagcgaaacataaatgagtcataaccaaaataattcaagcattcggaagtgaaaaatataatccaaacagtcataattcaaaaccacatagaatccaatcataaaagactaaagttcaaataccaaaagatacctaaagtgcagaaaatgatagcctaaagatcatagccaaatacacgacttacaagaaaagagaattataatctaaacactaagaagatggtggtggtggtggaagatcgaagctctgacgaatataacccacatcttcttcaagctgtgtgagacggatatccattcttgcnnaagcgatatccaaagaatcaaaatgttcaccaacataagtgcgaagaccccgtactatg

SEQ ID NO: 160430 - DNA, 469 bp, Glycine max
  unsure (1)..(469): unsure at all n locations
tgtgcatccaataccctgatgaggatgtcccatatgttcttttatctggactgatccatttgcttccaaactttcatggccttgcaggtgaagacccgcacaaacatctgaaagaatttcatattttctaaaccctttttgcaccattttaattactgattggtcttaattgtcaattaattaggcagttttattatttgggctcatttagctaatttgatgtttttaatctaatttcaggaattaatgaaacattgggcttaatccagattttggttgtggacttgaagagggcaaataaagcagcgcttaccttagttaatttctaattaagaaattgtgcaattctatgtggttcaatgtttatttcgttttgggccagagtattgtaatagggcctagtgactntgagtgactctgtttaaatagtaaccttgggattcgtgaatgctattctgtatgctattat

SEQ ID NO: 160431 - DNA, 412 bp, Glycine max
gtatctcacctatctatctcccagatgtcagagcgaagacttcttttatttaaaacatgaagatctaatccaagatgatggcttcgatgcatgggcataatgcaatcactctatgctacaatgaattatgaagacgtccctacctctgagagctactaaaaatgaacctctctcaagcgactacgccctaaaacggagcctatacaaccttcaatgtatatctaccaatgattaccctctttcaagcgccatacccctaaagatgatgcaaggatgaaacatataatacatttgttggcattgtaggcctgccaagccctaaccaatggggtccagcctgtcattgacacgagagactcttacactttaaggggctgatatggatggtaaaaacggatggacacaggatgaa

SEQ ID NO: 160432 - DNA, 520 bp, Glycine max
  unsure (1)..(520): unsure at all n locations
atcctcaagtcacctgcggcatgcaagcttctccctcttttccctataaataggggtgatgatnggtatatacaaaaatgttcaaccccacctggggtatccgaggggatcgcttgatatattagtaaaaaaataatcatttcccgtggaagaatnaatccaagcncgagtgcgccttctgtatactcgtcccgagacantttctgtaagccaaatccgtgaagattttccgccatccttcgttcgttcttcattgttcttcggtcttcaaccggtaagttcccgaaatcgaacttttcaattcattctatgtacccttggtggtccccacttgtttcgtgtacttttattttcatttcgtttactttccgcacccncttttgatggtatttagtcatttatttaagtcattctctcgcctaatcaaaaaataaaataaattntcatcgatcatttgaatggtaatatctggtaatttctggtaaaatgaaatcccgaccgtcggtcatgtcgtaaccac

SEQ ID NO: 160433 - DNA, 474 bp, Glycine max
  unsure (1)..(474): unsure at all n locations
gaatgcactttnttccaagaaaatttaatgtaaataattattgtttttcaatgttgcgtagggtattaattacatcaattcatataataataatgagttaatgacacattaaatatttcaagcatgcaaatacaatattcatggatattagatgcacataaatatctatttccaaagctttgtcaagaacaaatacaatcccaattgaacacggccacattacaattattctatagagacaagaagagtcccaataaggtaacaaaatttccaaaatacaatgtaagatttatattagttatcttgaccatcttttataatgatgcactcaagttaagaagaaaataattgttaatattagagcattagaacacacctcctccttagcaatgccaatagtgtctatatgagtcaaccacattataagaaatatatctattggagatgcatgattactaatgtaaatggccctct

SEQ ID NO: 160434 - DNA, 385 bp, Glycine max
  unsure (1)..(385): unsure at all n locations
taggagcataccaattatagaactaccgggaaatgattatgaatggctaaaacaattaccacactgaacactataaatgaaccatctaaagagaatagctaaatagaccaaatgatacataagtagactagattgaacacaccactggataaaagacagacggaacgatacaaacaatggtgttcgatcatatctttaatatcgccactccttcttcaacattattaaatgctaatataatgatattgccataattctcatcaatgcttcaaagtgttggaaaaaacatgacaacataacataaatcaaaacattataactatgctaatatatatatatttaaaaagatattcgcttacaccaatgnaaattttgtgaactatgt

SEQ ID NO: 160435 - DNA, 449 bp, Glycine max
gaatctatccttcctaatatggttcctacccagtccccctcattaagaactagctcctttcttcctctattgtctttaattgaatacacctttgcttggttctctatttggttcttaaccttctcatgcaacttctttacaaactcttacctaaattccccttctttattgtataaaagaagtgtcaagtgggaagggaatgaggtctaagggtgttaggggattgaacccataggcaacctcaaaaggggattgcttggtggttctatgagcccccttgttgtacgcaaattctacatgatgaagatactcatctcaagacttatggttgcctttcagaaaagcccttaatagggtggataaagacctatccactacctctgtttgccatattttgtggatgacatgtggtaaagaaaataagcttagttcctatcttatcccataag

SEQ ID NO: 160436 - DNA, 391 bp, Glycine max
  unsure (1)..(391): unsure at all n locations
taggatatggatccattctgcattcaatgaaactcttgacagatattgtactggctaaagttaaagtatgattcttatgagagtactaatatcattaataattcaatacacgatagaaggagattaataattnttggatattagtttacagaaagtgatggctataatcactggtagatccagaaattttctttaacctgagaaatagaataatctataatactttcataaataaatatattatgagctttataaaatacatattgtattaaacaagaggataacacctttatcatcttcttcgaatccctattaaccaccatagttagggacaacaccttctgtggcttgccgacgctcggcttcccgcaccgacgtaataaacattatc

SEQ ID NO: 160437 - DNA, 304 bp, Glycine max
agcttacttaggttcttctgagacagcacaccgctcttctttttgttagcctaataggtaccctgaatctttcaatgttctcattaaacgctgctgggccacgtatattcggtgcgtgttctgactataacccagccatatgcggatgttatgtaatgcaaatccatagcttttgagtcgctatgtcgatcttggaaaacgcgctttttcataacgcgatcgtccggatcaacctggcaaccgatgcacacgtattgaagcgctttgaatctcctcccttgaaccgtttcgaataacccatgaa

SEQ ID NO: 160438 - DNA, 432 bp, Glycine max
  unsure (1)..(432): unsure at all n locations
ggatccttaagtcacctgcangctgcaagcttcatatgtccctattgtgcaacgtgnttatggttcanagncaacctaagcatgatctagatggtcttcacggttttcccccatatgctaaggttgttggccctcaaagggaacaggaacagcgcggttagcgttctcgttgggcatgggcaccacattgggcggtgtgtagttggggggtaagctataggggtaagcattcctattatgccctatgtgtggaccgcctatgctgcctatcacttctcctccttgatccaccatgtacgagaatggctggttcgcttggtttatggcggatggatgggtatgatccgcctcggtggcgacgctggtggcgacaactgggactgtattgctttccatcattcgcttcctgcttaacatggcctccactatgga

SEQ ID NO: 160439 - DNA, 470 bp, Glycine max
tcatgcttaactatgtatggcaaaacttcattactgttgttcaagacatacaagtgagctggtaacaaatcttctacacttagagtgaccacatgcagtcctcttgaacccttaccacccactctgtcatcatgccgagactcatgaaggccaacaggtttagccttctcaatgtattctaaacaaaattcaatggcttcttctgcaatgtacctctcaacaatagatgcttctggacgatatagattctttgtatacccttttaagatcttcatgtatcgttcaaccaggtgcatccaccctagataaacaggaccacaacatttgatttctttgaccagatgcacaatcaagtgaatcatgatgtcaaagaaagcagggggaaaatacatctccaactggcatagtataattgcgggctcattgtccagctcatcaaacttgacagcatcaatgactttgctacatat

SEQ ID NO: 160440 - DNA, 454 bp, Glycine max
  unsure (1)..(454): unsure at all n locations
agcttgcatttctatggttctagagagtttattgtccaagttctagagagttntgagagattctgctgtgtgaagatctgcagagaccacagcttgaagcaggagccggtttgagagtttgagatgagtttgtgagtgattgtcagatcctggaggtgaaagagacatcctcaccacttgttttctatttttgatatccttcatcttgttcttctctttgttgtaaagaaggccccctggtatggaaagctaaatcctctgttggatcttccctttaagtacctaatgtaaatatattgttatctatttaatgatagtttgtgtgttctctatgctatctagctttcactccagtatatctttaccttgatcacgtacatgcatgctttgttgggtcattaataatggatactggctaacacttaagtcttgatagtcaggctagtatcgacta

SEQ ID NO: 160441 - DNA, 437 bp, Glycine max
  unsure (1)..(437): unsure at all n locations
tgttaaagaacttatganatatcaagaacaagcttgttctctcatcgttcgcgtgtatgatatccactcgacaaggtttgaagtagaggagaccttcaatcctataacgcaacatggcggacaaaagtgggcagttaacttgaatggccattattgtcaatgcggaaggtattctacgcttcactatccatgttcacacattattgcagcttgtggttacgtgagcatgaactactaccaatatatagatgttgtttacacaaatgagcacatcttaaaagcatactctgcacagtggtggcctcttgtgaatgaagcggcaattcctccttctgatgatgcatggacacttatccttgacgcaactattattcgtgcgaaaggtctgccaaaatcaacaaggataacgaatgagatggattggctggaaccatctg

SEQ ID NO: 160442 - DNA, 432 bp, Glycine max
  unsure (1)..(432): unsure at all n locations
ggatcttaagcaccgccgctgcagcttcggcctaggatatccgaaagtttcatcttgntccttctatgacggatttcacaagttgcaccatacccatcaaagagagaaacttccctttccaggctgaggtttttgattttatctgcaatacgccttagatgatattctccttggatttcctttgaaggtaatcaaaaggagcattgctaaccttgaatcccaacagactatagatttcctgaatacgtctgaagcatatcatccaagtttgattctatgaatctgaataaaaacgcatactgcaattacatttaagatcttcaattctcaagccgacaatctcattntacaatacgaatttgaatgaagattcacatgacaattgcactttgaacatcgatcttaggcattacatccctatattatagtatg

SEQ ID NO: 160443 - DNA, 437 bp, Glycine max
gttcctaattactcttataacgaaccctcagatacttattttcattttgacgaatcacttttctagatgaaagtaatattctgaaggttttaaaatggctctctttctctgtgtttgggcaggcattaatcataatttctgtgtccctccttgctgttgaaaaaatatcatatatatctgcattatattgtactggtgtgttggaagtgagacccaaatgtatgttgcttctatttaaatagccaattgctcttcccctctatcttcaccaatactttttgacttctttttttttaaagacctaagctgatggtgctgccctgtttatgaatgatcatattgttggttagaatcaactgtctgatagataaacacacactgcatgaaacttaataatagaaatctgcatagctaatataatattctttttccagtgt

SEQ ID NO: 160444 - DNA, 410 bp, Glycine max
agcttataatatatcgaggcgctctaaatttatcaacggaagctcttgagaaattcaaatggtcataacttttaactcggagttcaattcatgcgcatcacatatagagacgcttaaaaatgaacaacggaagctctccagaagttaaaatggtcataagttttcacactgatgtccgattcaggcttatattatatcgagacgctcaaaattaaacatcgaaagctctcgagatattcaaatggtcataacttttcactcggatgtccgattcaggcgcatcacatatacagacgctcgaaaatgaacaacggaagctcctgagaaaatcaaatggtcataacttttcacactgatgtccgattcaggcttataatatatcaagtcgctcgaaataaacatcggaagct

SEQ ID NO: 160445 - DNA, 446 bp, Glycine max
  unsure (1)..(446): unsure at all n locations
tatgcgcatatttccctacgaacgttcacttgcacaagactttctattaactaagaaaaatgcacccatatacaatcaaggtagcttcattacctaaattatttacatgtacttccaaggggtatttggtatttacatcacacacgcctccttggctaaatttacatacatgcatactcaaagcatttcggggtaccaaaaattgcacatgcgctcatcttggtatttctaatacctatacatataaaaacttcatgatgaatcttgactacctacgcaataaggtgctacatttcatgcttttttttttcaagtttttgctacctaaagccacatgaaaattcaagcatattttcctttgctgaactaaaatgtattcaaattagaagggatatattnttttgtaatatgttttcttcacataacatgcaacacatttatatata

SEQ ID NO: 160446 - DNA, 279 bp, Glycine max
  unsure (1)..(279): unsure at all n locations
agcttgtatagaagtttagaaatcaagtgattatcaattctataacatagggggagtatgaaatgagtgaacgcaatatatcatgcatatacattacttgtatcttgatttcaggaattaaattgtcatcatcaaaaagggggagattgtagaagcaaagactttgtctttgttgttttgattatgatcgtgatgatttgatgaaaatgcgcttctcanaggttaattcaagacaatgatccaagaatacaagatacaacatcagaagatctctagtat

SEQ ID NO: 160447 - DNA, 443 bp, Glycine max
  unsure (1)..(443): unsure at all n locations
tanggtatggttcactttatggtttccttgagcctcagtctatacacttcgtctaggacagacatcaagaatgtcaacattacattgaaacatgggttaaggaatcacaatgacaagtgtacttatgaccttacatgaatcagtaagtgaaattaatgttgtacagtggaaaaaaattgtgttataagtagctaattatagttgttcatcttcagggcacattgacaactagttgttttgtgtccacgggacaatattattgtttggttttgttctttgcataagaagcctgatgttaacatcaaggttgcagttaacaggttatttttcaaattataactcaattaatgtataccaattgtagcttgtcaacacaatcattattantttatatacgttaatgttattttgaaagctagtgcaatgaagacattaaccactac

SEQ ID NO: 160448 - DNA, 311 bp, Glycine max
  unsure (1)..(311): unsure at all n locations
agctttgtccagntagctgannntagtcattttaattacttaataactgataaatcaccgggtgcagagtggatagcattttgcaaagacaataatatccagctggtgtggtaatttaagcacacgttgtcaatattatttgttcctgcgccttgaaataaaatgatgataaagatgcggcaagtgaatntgccgcaattgctacctttttagcaaatccgatgcacctaatggaacaatatgatcaaattggcgcaagactggaccgcttgcctttggcccggtttcattatcgtatatttggtattata

SEQ ID NO: 160449 - DNA, 320 bp, Glycine max
  unsure (1)..(320): unsure at all n locations
tactcagcttatataccaaatatacgtatatgaaaccgggccaaatgctttctttccattcttgcgccaatttgatcatattgttccattangtgcctcggatttgctaaaaaggtagcaattgcggcaaattcacttgccgcatatttatcatcattntatttcaaggcgcaggaacaaataatattgacaacgtgtgcttaaattaccacaccagctggatattattgtctttgcaaaatgctatccactctgcacccggtgatttatcagttattatgtaattaatatgactaaaatcagctaactggacaaaagct

SEQ ID NO: 160450 - DNA, 397 bp, Glycine max
  unsure (1)..(397): unsure at all n locations
gaaaaaggtaaaatatttgaattatagtacgatgaataagtgcacattgggccaccaagtttgtaatggttttctctctactaaatcaatataaacgagttttgtctttgtattataggagttgttattctcaccctcacaattgcaacatatacaagggaaccatgagtntgctagatctattttttcacccaaacaataaacaacaaaagtatgattatgttatgttatccaaaacaaaatcatgatttcgtcatgttatacataatanaaatatgattcttttaggttcttttttaaaatctgattcttaaaagatattcgataacaacaaatgaatgtgtgatagttaatactgtaattattgagtgacatgtgaactagatcgatgttatat

SEQ ID NO: 160451 - DNA, 443 bp, Glycine max
  unsure (1)..(443): unsure at all n locations
tgtcacatacatatatttccatactttcattctcaagaattttcttatattctatganacaatcactaataatcacacccataagaatgtaatttaggtattaaatagtttataataattcagatatattatttaatgaattaaactagacttccttaagacaccaccacgtgacatctatttactaactaagaattttctataatataatattgattattgatataattgattggtattttaagtatatgatttgcccggcaaggttgaagggaagcttgatcattatagttgtgcctgagcaatattgtatttggaattgaacaacaggaagagtatgtactatattatacattatattattaattgaagtaatcttaggactttaaatctcaattatttatccttaaaaagattntaattgattatatataaacttatga

SEQ ID NO: 160452 - DNA, 476 bp, Glycine max
  unsure (1)..(476): unsure at all n locations
agcttcactactcctatgtattcttcccattctctaatctttctcctttctcattctctccatcctttattcatcttcataactcattcttctcatttgctcaccaagtttaatcatctccgccatgagccttgtggtttttggagatggtggagtagcatttccacttgtagaagccatacctacaagaaaagttagtgcataagtaaaaaatagaataggagctcaccactcaacttagtgttccactcaagttcactcatgtatcaccctttcaaggtttttcttttataatcgcactattgccttttaccactcttgcttcttttatgcagaaccttcaagctcaaaatcaagaagtattcaatatgagatatgtcacanatcacaactcaactcaaaaatccatgagaagaaatactcttagacaaaactaatggaatttaagacagacagaaatatgaaagtatactcaa

SEQ ID NO: 160453 - DNA, 454 bp, Glycine max
actaagcttacatcttcttctaattgaaacaactcctagagaattatgttatatggacaggtaaataactagtatcacacaactatgaatatgtcagcaactgcatactttctaccacaaactataacagcatgcatcaaattattataaggaaagcccgagctaacacctgtttctgaaaatttatatgataaatcaccaatatttgtttaccttctcaacttccttcacatttttacgaaactttctaccctttgaaccacttctttcttcctgatggagtgcctcagctgctttctttagttctctagcttttttacccagttcagtggcttcctacagtaaccatccagccacaccataaatatagtatggcatatcatataaccaaatacacgcataatcaaccatttaatatatctgcttcagtaacaatatagcaccttgatatact

SEQ ID NO: 160454 - DNA, 416 bp, Glycine max
  unsure (1)..(416): unsure at all n locations
ctgaagcagcaanatggaagtcttgctatataaagaaatatgaggagacagctaaacactggtataaacttttaaagaaaggttgccaggaaagagatgaagcaagagaccagcttcaattgataaggaatttccaagcatctactccagctgagacaagcagtactgttccacaagttgatcatcatgcatgcctccaatacaaaacaaagccatcattgaatagcaccaaggtatcatattcaagttccaaagtattctcanatcatccatgtgatttatccttgtcaagtctcctgccaaatgagaaacattcttccacaagaattgctgaaccaagcaacttgaccttaccaaagcaaccaaaccatatganagcagacatatgtgcttcaagagataataataataatatg

SEQ ID NO: 160455 - DNA, 480 bp, Glycine max
cggaccttaaatctaagcttgaccatctctccctcagaatcacgcaaggttagttaattcttattaatcgatcatcacttccttttgagtatcaatatgattggtcctttagtgatcattgccatgttccaatgaaacataccaagcgattcatgctggctcaaaggcttaaagcttcaaaaacttacgtaaaaactttgttcaacaaatattggtgctatgataatagttgtgccaatgatgccgcaacaagccataagaagaacgtgaaggatgatgctatgaaaaacaaaaacccatttgagttttttggccacaacaagcatcaaaggcaaagatcttgtgtggttaagaacaatgatgatatgcttgaagatggcttcattaatagcaataaaagggcatgcgagttgcaattgttaaattatagtaccacggcagagcatgaaaattctattaatagtgccatctctaattgta

SEQ ID NO: 160456 - DNA, 451 bp, Glycine max
  unsure (1)..(451): unsure at all n locations
agcttcagatgcagaacaactcttgatcatcttctatctgacaacgttatcaaagcaaccattttggttagatctttgcaatcacatatcacataatttcctgaatagctacaaatagatattatcaaagatcaattaactcctattgccttagatggctataacattttctctgttaaagactgttacgtgatacttgttggcagaggataaaagattcatagcatacttagaatttgacttcaaactaagtttaagtaaaatcttaaactaaaatctctgttataaatctaacatacatttaaataaacaagtatctgcagaatagcttaagtaaaatatatgtatgattcttgattgtcttttattaagatctcctgtatatacttaatacaaactaatcgcttgtcaattagagctgcagttgcaatattgtntggtatactcataa

SEQ ID NO: 160457 - DNA, 467 bp, Glycine max
  unsure (1)..(467): unsure at all n locations
tataccanagttgcttcaacaaanaatcttgtaaaagtgttttgtgtattcaactatntataagtagtttctagcctgttctcgaactcttggattttattccatatgattactgtaaattcatggtagccagagttgctcagcccttgttaaaaggtcatatataccccgcatgactaaagaaagtggtgttatttattgtgtttgatattagtgaaattcgatggaaagcacgagctataactgaaattgtacacgtttgatttcctcagactattttgtgcatactatttaatgtgaaacaaatacttgtagtatgtttggatagatgttttgaactcaagtcaaatccaaaagagacgcagaagctattctctcagtctcacttaactttggccagaagtggattggttgtttgaaaatgtagattataacatgcgtataatacatgtgtggatcctgttaat

SEQ ID NO: 160458 - DNA, 449 bp, Glycine max
  unsure (1)..(449): unsure at all n locations
atcctcttagtcacctgcggcatgcaagcttgtgctaataggttctattgatactattngtttctgaacttcttcctttacgacaaagtacttcaattccatatgcttaacacccttattgtacttgtcgttcttagagaaaatactgttgtggagttatatcaatacattttcaacggtctagcaatattgtcgacaattccaagccttataataaagttccacagccaattagtctgaattgttgcctcaaaacatgctacaaattcagcttccatagtagatgcaacaacaattgatgcatacagaattgtttccatttgtttntgttccatataatntctaggacattgtgcgagactaaatntgtttttttctaaattataatgggtgatgctgagcactnttcaatcctaaatctctctagtactttattgatatatgcttct

SEQ ID NO: 160459 - DNA, 493 bp, Glycine max
  unsure (1)..(493): unsure at all n locations
cggacacttaaaactcagcttgacaatgaatctctacaatgcagaaatgtgatttctttcttaaaatcaaatccttgcacaatttcaatttagatctatgatatgaacttgtttccacacaatctaaatccctaaaagctaggttgatcactcctaacatgcatctaagaatagaaataagatcacataacttagagaattgatcagaaaacaaagaattacatacttgaattttacttctatccctcaccagatggaaatttagctcaaataaaacctcaaaagatgaatcataatggaagaaatgagacaaagataaagagagaatttcgagattttatttatgtaaaataaaaaaatgaactaaaattcctttacaatgatgttacaagctcttatataagagctgggactgtattattgttttctaccacanaaagttntcattatagagagtatacaatttgctacaacaaatgtacaacatttacat

SEQ ID NO: 160460 - DNA, 480 bp, Glycine max
  unsure (1)..(480): unsure at all n locations
agcttcattaagaggcttcctcaagaagctttttcatggcttctttgagaaactctctcaagaggcttctttgagaagctaacgctttaactactaacacccttctaataactaaactcacctccttgaaaataattacagataaaataacacaacaaatataatcaaacatcaaacataattactaataatatatagatatatatatcagggtgttacaactctcctacctttttaaaaatttcgtcctcaaaatttaccttactcaaacaaggatggatgagcttctcgcatttgactctctagttcccacgtggcatcttctcctgatgcacctccctagatcaccttgaccaacggaatctctcttcctcttatgtgttttgttcgcctatcctcgatcctcaaaggcaatgtttcatatgtcaaattctnctttacttgtacatcatccacattctatcacatgggatggatcac

SEQ ID NO: 160461 - DNA, 451 bp, Glycine max
tctcagaatcagaaacagccacaacaacactctctgtttctttcttctgttccgcatcagcatcgatctcaccctcctccaactccccttcctctgtgtccacatccaccaccaccacatccttatgattcacagctacagaggccagtcgatgggagctgttgcggttactgttatcattggcatcagagtccacttccatcacaaaaatatcattcaaaggcttattctgcacggcctgtgcccaagcaagattatacaagcccgatgcatagccgcgacatatagtagggtactttgagtaaagatcatgaacagcccaaaccctagcatcacttccattgggcttattgttattatgtaacaacttaacatcttgcttattgaaatcctcggctgaaatctcttccaccgaagcagtatccgaaatctcaccctcttccacatgctc

SEQ ID NO: 160462 - DNA, 494 bp, Glycine max
  unsure (1)..(494): unsure at all n locations
cgaccgagtcctctgagtcacctgcggcatgcaagcttatgatgatgaatcttgttgattcatgtagttntgataatgacaaagacgatgacaaatagcccaccgtatgattccaagattgagtcaacaagttcaagatcaagtttaatttcaagtttcatgaagagaagatgaattcaagtttcaagagaagaaatcaagaagacttcacaaggaagtattgaaaagatttttcaaaaacaaacatagcacagttttgtttttcaaaagagtttttctcanaattttctaagttaccagagtttttactctctggtaatcgattaccagtttcctgtaatcgattaccagtggcaaagtttgatttcaaaagctttcaacagaatntgcaatgttccaattgatttcaaaatggtgtaatcgattacaagatattggtaatcgattaccagtgtatttgaacgctganattcanaatcaattgtgaagagtca

SEQ ID NO: 160463 - DNA, 472 bp, Glycine max
  unsure (1)..(472): unsure at all n locations
cgcacataatatataatagctgtttgatttaaaacacaagtgtttttatgtttaattgtatgtgttttaaataacttaaatataaaatatgtgtgatcaatgagatatttagattcgatttggtacctcctaaatgagaaccctgatatgacatcattttctattatttttctataaagttaatacgttgaattgattcatatatattctcttagcaataaggaatgcaaaaataataaaaaaatcacctagataaacaattgattaattagctaacaggggagtatagataggtctgagacaattttctgagggatcataatgattttccttatagatggaaaattcattntcaaggttgtattactccatcgttatgcaaagtagaaaatcaattatgataattgattntcttttaggcgcagagaaatntaatttatcaaccactcttaaactgtatgaaagtcaagta

SEQ ID NO: 160464 - DNA, 469 bp, Glycine max
  unsure (1)..(469): unsure at all n locations
agctgggtataacatcatacttttatgcttttgttagaaacatcaaacatgcgttagtaaaaacaaattgaacacttatataaaaaaatgcattggattcttagtataaaacttttttatatcaagtccattttatatacacgtttgttcttttacaacgtgtagtgatgtggaaaaattgtaagtgcccattaataatatcgttcttttttttacaggaccgtacatttggctaagtgaaatcacaattttagatataattaaaatggataaaataagatntgcaattgaaaattgattntagtaaaaatgaacattaagaattaattatagaagcaagaagacaanttataacgattataaatcanaatggcaaanacttggaggaatcagatntcacactatgacaanttataacgattaagcataanttaatttaaaatattaattaaaaatatgtttaaattat

SEQ ID NO: 160465 - DNA, 436 bp, Glycine max
  unsure (1)..(436): unsure at all n locations
nntccccaagtcctaaatgacattgtaaactaggattaactttctttatcccccaattaccactaaccccaaatttatcttttcaaaccctcaaaacctcacacttttccactcacatcactaccattctcacatttaaccctatgttaactctccccatcatctctaccagttttctaccaacaatttcatcccacaagcatcacataacatcgttataaaaccctaaaacagaatgggtaaatttggctcacatcaaacatgtcaagtttagcatgctttcaacaaattccttcacaaataactaccataaggcataaacttagtaaaactacccatcatatctcccaaaaacccaatacccacgaaattcatgtgagaagaagtccacccagacctgaaatttgtagtcccacaacgtagtggtgcgcttcac

SEQ ID NO: 160466 - DNA, 427 bp, Glycine max
  unsure (1)..(427): unsure at all n locations
atcctctaatcacctgangctgcaagctggcttaatatccgtgagggtgtccatatgttctcaagatnggactaatacatctgctgcccaagtttcatggtcttgcaggtgaagatcctcataagaatcttaatgggttctgtcataccctaatttcgtccggggacctttgcttgatgacatgcgacctttctttggtccttgtgaggtgcttggcacctatcattangaaatttgtgaaattccaggacatgccagaaaaccaataaaatattgatgcacaatccgtaagtttccgtgacacaccggatatcaaatggaagcatccgtgcttaattaagtgaaggttcgttacattccgtaagtcanaaatgggatgattatgtaatctgcangggtccgaacattacagaaagaaacaagtatc

SEQ ID NO: 160467 - DNA, 471 bp, Glycine max
  unsure (1)..(471): unsure at all n locations
tactcaagcttctgtccaagtttcttatgccagacccaatgatcttgtttgacttattttatgcaagattttgattagataactctcttagtctaatcttataaagatttccttttctcttagcagaataaagtaaagacacatttttgttctggatgatacattcatccttgttaaagaaaacatcatatccattgtcacataattgagttatgctcagtagattgtgtttgagccatttaaaaaataagaaattatcaataggaggatatggatgtatacctatcttacccactcttgttatttgcccttttttattccctatgaaagtgatggttccaccatgataaggagtcaaacattggaacatgcacctttctcctgtcacgtgccatgagcagccattatcctattattatgataagtgtttgcttcctgctatcaaggacatttgcattangaattatcttc

SEQ ID NO: 160468 - DNA, 403 bp, Glycine max
  unsure (1)..(403): unsure at all n locations
agcttacctgttatcaatgattatatcattttcacccatctttgtctaaactgtaattggattgaaccgtgagccttgaagtgtaattcctatttaccttgcttangttttaagagggcacattggtgtangacaatttcaccccaaatttgggggagtctgttagatggttaatgtttaaaggtaggaaacaacaacacacacaacaaattaataaataaaaagagaaaagagaagaaaagagttcanataagtgtgttgttggatcaagtggcctcaaaataattaagaaggggggtagaattaattattaatgtgtcttgactaattaaaatttatccttcttaatattactagattcaattaggctctactactaagntatgagaaagtaaagaacaaa

SEQ ID NO: 160469 - DNA, 418 bp, Glycine max
actgaaccaccttctaatctattcttgtccaaggtgacctttggtatcttagtttgactttatgatccccatgcctatcctatagcttgattttttttattattttgtatcacttagtaattctagtctcttagtagtttgtgacacattatctcagttgtttcaactaaatataagtttttttcaagtcaatataagttgcaattaggaaatctttgaataatgaaataaggtatcaactgtcaacatggttgagtggctgactaagtcagcttatgttacggaactatatagttatataatcgtgccactgctacaagtgtacaagtgttattcctaatgtccctgttgtgtggatgtttgtctacgttctatgggaaatggtgggacctgcacaagattaatatgcccgtggaca

SEQ ID NO: 160470 - DNA, 363 bp, Glycine max
  unsure (1)..(363): unsure at all n locations
gctttgagcaattcatatggncataactttattctctgtggtcctattcaagcgcataatatctcgagacgctcgaaattgaacaatggaagctcttgagcaattcaaatggtcataacttttaacttggaggtgcgattcaagcgcataatatatcgacatgctcgatattgaacaacggaagctctcgagaaancaaatggtcataactttacactcgggtgtccgattcaggcgcataatatctcgagacgctcgaaatngaacaatggaagctcttgagcaattcaaatggtcataacttttaacttggaggtgcgattcaggcgcataatatatcgagacgctagaattgaacaatgg

SEQ ID NO: 160471 - DNA, 397 bp, Glycine max
  unsure (1)..(397): unsure at all n locations
agccgtcacggagttgtccgactatgctcttgtgaggtggatcatgcttcaaatggagagagcacgaaatgtatatccaatggttgatacatggacggtgatgaaaaagatcatgacgaagcggtatgtgccggctacctactcaatggacttgaaactcaagctgcaaaatactaacccaaggcaacaagggggttgaggaatatttcaaggaaatggatgtgctcatgactcaagcatatattgaagaagatgaataagtaactatggctcgatttcttaatggtgtgactaatgatatccgcgatactgttgagctgcacgagtntgatgaaatggatgacttgcttcacaaagcattccaagtggagcaacaattaaaaaggaatggagcggc

SEQ ID NO: 160472 - DNA, 434 bp, Glycine max
agcttctagagaaagctacatgaagctgcctcattaaaatcactgcccagccatcgttaaccgttggagctctctcgaaattggtcagcaacttcaccagacacttgtccatgatctgaccgttgggatcgctaagaagatgtctagagtatgctagaatcttccgttcccgagagcatctcttatttaagcactccagccttagctttcatgtagcttatgaaaaacgtcatttcttcttctttctttcttccaaagccatttctaaagttccaagcactttttccatcacccacagccaccattagccaccacataccatcattgttctccattgaatacccacaccgagaggaacccttcaaccgaagtggaatcttccaacttggctggcggttccggtagagaacgaaaaccctaatctgacctttcga

SEQ ID NO: 160473 - DNA, 433 bp, Glycine max
  unsure (1)..(433): unsure at all n locations
aaacgttcaataactgctggtaatcgtttttctatatgtgtaatcgantacacagtgcaaattctgaattcaaattttaatagttgttgtaaatcatttttggccactggtaatcgattatcagagagtaaatctcttgaaaaagactttctaacttaaatttcttggtcaaaccttttgctacttcaattatgaattcccttcctatttaatatactcttcctaagactctagagactgtcttgatcatccatcttgaatatctttaatttctttgtcttgaataaagctttgagaagcatgtgatcctttggcatcatcaaatcattcagcttgattctttgtctacaattaattaagtattggtttatcaaagttttgtgatacgatccgcgcaaaagaagttgtgtgtttactctggttttaaaagtat

SEQ ID NO: 160474 - DNA, 498 bp, Glycine max
  unsure (1)..(498): unsure at all n locations
gagacacctgaggcatgcaagcttagccaataatgtggaagcatgcctgtatataatgttccgcttgaagataataaaacatggaaaactgtttaagaataaataaataggctccgacaaacaatgttaagatgcaacaatagtgtttcaaaattcaaagttcacaatgaatttctcatatacgattacaaggaaactatagttaaatatataaaaatccagttatatcggagaacatagcaaagcatatactacttcaaagttcaaagcattcaggataagggaaagagatttttacattattactacatgataggtgttatttacaaaagagcaatcacaatcagtgatgctntgagatcctttangtggctctggtgttaatcccaacattntgagaaaataaaatagttgtcttatgaatgagattgatacaaactagagtctgattggatacgaagcccgcatactcagtatgcgtcaggcctcagactcaat

SEQ ID NO: 160475 - DNA, 403 bp, Glycine max
  unsure (1)..(403): unsure at all n locations
ctaagcttacaaagggatagtgggggtccaactaacatacatgcctcttcttgtttgtgaggntgctgcaaggtgttgatgacatcattgaacaaaatgtgaacttgattaacaatttaccatgttgtccatctctagttcgggaaaataaaagaatttctactcttacaaattgtccaacatgtcactgcgaagaggattcctctaacgctgttgatgttgttcacgatccaatccatataatttgcaacgtataaatttgaatcatggtctagttgaagaaattgccacacctgacgagagtaatggcagtcacgaagtaagtgtaaaattatcttctgtacatgcatgcacctattacaagatgaatcaatacacaagtgtgcaaagacacgatactcat

SEQ ID NO: 160476 - DNA, 319 bp, Glycine max
  unsure (1)..(319): unsure at all n locations
ggatccttaagcacgcgctgcacttcgatatatagcttctanctcttcgncaagnatgactatgattctcctgattcggtgacagtatgaccattgattctcgaagcttcgtggcaatcgacgctgattatatgcgccgatgacttcgggaaagtatgacattgattgtcgagagctcgtgtaattgacgctgattatatgcgcgatagactcgggacagatgccttgatctcagagcttgtgtattcacgttaatattcggcgtatggcttcgggcagtatacattgatttgggttcgtgtattcagcttgtattatg

SEQ ID NO: 160477 - DNA, 480 bp, Glycine max
acactatgaatactcagcttctcgatatattatgtggctgaatcggacttccgtttgatttgttatgtaccattttatttcgcgtgagcttccgttgttcaatttcaagcttctcgatatattgtgtggctgaatcggactttcgtttgaaaagctatgaccatctgaatttcttgagagctttggttgctcaattgtgagcgtctcgatatattatgcacccgaatcggacttccgtgtgacaagttatgaccttttgaatttcatgagagcattcgttgttcaattccgagcatctcgatatattatgctcctgaatcaaacttccgggtgacatgttatgaccatcttgaatttgacgagagcattcgttgctcaatctcgagcttctcgattatcatgtgcctcaatctgactttcgtgtgacaagttatgaacatttgatttctcgaaccatatgttgtcaattgcacgcgtctc

SEQ ID NO: 160478 - DNA, 449 bp, Glycine max
  unsure (1)..(449): unsure at all n locations
agcttatcaagcacataagtatgtttgaatcctantnttgtgagannngagaagaacatgtgattaaaaatgaacattattcatatatcaaccaaagttcctcatcgaaaatgacattcattttaacaaaaaaaggatattgaatagaagtataaaataaaatgttagaccaagttaatataaaatgatagaacgctttaacatataagtgataaaaaaaattaaagagaaggttttccaagatactattggcactaattacatatatatgtatcagcttaatcatatcttggatcaattcctttttnttaataggcaacacaaatttattatagttgagagtgcanagagtatacttcaacccaatacatcaaaattgcaattcatatataccctgtgtatgcataattaatacatacanatataatcgaccanagctcaagttacat

SEQ ID NO: 160479 - DNA, 471 bp, Glycine max
  unsure (1)..(471): unsure at all n locations
acacttaaatctaagctgtatagccgatttaggttacaaatgtggattttttgtttaccaaccagtctgtgacaattgagaaccaattaatttgaagttacgtctaattaatgaaaaagccttatttatccgaaagactctattatatcaaatactcgatcaagaatggttaatgttgttaacaatctaagaaaaaaggatggctaagtaaccaatattaattttctataagaatctaaacatacgtacaagtaactcattttgttttatttacataaaaaagaaataaatataacataatttaccaattaaaatgattaacaagatgttaaatgaatcattactagaaatatataattcttagttgcgaagttatggacatttatngacaatgcaggtgggttcagtcaaattgaagaaaatagggtagtactgggcagagtacaatgaaagagtaggttatatcaatac

SEQ ID NO: 160480 - DNA, 449 bp, Glycine max
tatccagattctgttgtagatattcgtgaattacaaccggtcttcgtgaaagttttaattcagtggaaaaatctctctcccagtgaaaatagttgggaatctgtggctaaattacaagaggtttttctgacttatcaccttgaggacaaggtgagtcttttaggcgggggtattgataagcataagcataagccacacatcaccaaggtgtacacccgctaatacccaaatggtgcaaaccacccaacagttacaacccacccaaagggtgtaaactacccaatagttactattcacccaaagggtgcaaggtcaaaagatgtgaatcaaggagacataacccttgcgagcagtcaaaaccaaccgaaaggggacataacccttgcgagcaatcacaaccaaccgatagatatgaatcaaggtgacatgacccttgtgaacagtcacaa

SEQ ID NO: 160481 - DNA, 474 bp, Glycine max
  unsure (1)..(474): unsure at all n locations
agctttgaaatttaaattcanatttctaatatctgntacaaacaatttaaacttctggtaatcgattacatactgtgcataacgattacagccttttgaaatcaaattcgaaacttgtaaaacagttttggaaatcaattttgccactggtaatcgattaccagagagaaaatatcatatttttgaaatctcaaaaagcttttgtaaaatatcctttagccaaacctgtgcagcatcgattaaggaattctttctaagatcctaggaactaagtacattgttcttcttgaatttttggattcttgacttgaattgcactcatctttggcatcatcaaaacttcacatcatatatgcttctacaatctcccattttntgatgatgacaataatctgaaatcaagataaacaatatacanattgataatgcgtgctcacaacccttactccncttaagattggaattatgcctaag

SEQ ID NO: 160482 - DNA, 438 bp, Glycine max
  unsure (1)..(438): unsure at all n locations
gtggaaaattatttctatacaaaagttagtcgtatatatcgactaacattcctcaacaatttcttcaagtgcaactaaatcatcaactggttccagtgccagttcattatccagctattgtttaaatccctccaccttctaatcagctctactttcctccgcttggataaccattttgcttctagtcatcacaactntgcactcttctttaagaattttctctgtgtttgttgtaaagttgtttgatgatctttcagctaactgctttgcaagctgacccacctagacttctagattcttaattgctgactcggtgctcttttggttagacattgacacttgcatgaattgagctagagtctcttccagctntgtggttcgatcataaagacttggcatctgctgttatggccctgtagatgaaccaccctggtctat

SEQ ID NO: 160483 - DNA, 390 bp, Glycine max
ggatggtgcctcccctatcctcttgtactttgccttccgctgcatctccatggtgaacaatcaccattgaaggacctcattgaagctcaaagatccagcctccatagaagctccacaagcaagctttcatcaataactcatctagacgctcgaaatggaacatcggaagctctcgagaaatgggaatggtcataatatttcgctcacatgtacgattcggcgacataatatatcgagacgctcagaattgaacaaccgaagctatctagagattagaataggtctatcttctcacacagaagacagattcggggacataatatatcgagactctcgattattgacaacgtgacgctctcgagatatgcgaatggacatatatcttcacac

SEQ ID NO: 160484 - DNA, 400 bp, Glycine max
  unsure (1)..(400): unsure at all n locations
cccatgtatatttttatctttgtgttcagctacactgtaagtatgggtttttgttttgaatgaaaaaaacttttggcatttgataaaatttggtgagagtttctctccgggttccttgttgaaccaattatcagacttatcaaggtaatccttgtggcgtctacccatacttatcttccttcactacaagtggcgtctactgtgactcatcttccttcaccggaagtggcgtgtaccctgacttatcttccttcaacggaagtggcgtcatccaaatcttcttagactgtatcaagtgatcccttcctagtcagtgtcacatcataacgctacgttggcgataatcttttatttttcggcagaggaagatntctcgttattgtgttgcataaaataggta

SEQ ID NO: 160485 - DNA, 412 bp, Glycine max
  unsure (1)..(412): unsure at all n locations
agcttcanctataggtcttacagtgagtcgtctatggctttttntgatggnggcaatcaatctttacaaatatcacctggtctctacaatgaggctatgtttcatgtttagtccatgtccacatgtatttagctacatcaacgattaatctattttcattcctttgaatctgtagtagaatatgtcataacacaattcattggttaggttagaagaattaatacaagcgatacatatatatacatgttcgttgtgacatatatagttaattaaaattacattaatatccctttatggtagctgtagtaatgctctaattaactctatcgatatttagccacaaataataatgaatcacaaacgtatatgtaagagtttatggatgattaatcngttgtttaacttatgtgtc

SEQ ID NO: 160486 - DNA, 432 bp, Glycine max
  unsure (1)..(432): unsure at all n locations
gtaaaatcttcagctatggaacaactgaatagacaagagatgtttttttgtgggtaggaccacccatgggtcttaagatggtcagtgaactcctttctgattgggatactgcatcagttactgggttttctatgaactcaacttattgggaagtcactttgggagtaatatgcatgtgattctttgaaatatcaacttatcacaatactctcacttagccatgactctttactactctcctttattattgttatctatcgttctccaggactccgattaggattctatagctatctaagagtcatgtattgcaattactgctgtcggtgtggtcaaaaccaaaaccattgtataaattgggaagaggctatagagtcgacctatgggtngttaatagctgcgcattactactcacatcgggattaggctagc

SEQ ID NO: 160487 - DNA, 485 bp, Glycine max
  unsure (1)..(485): unsure at all n locations
atcctcagagtcacctgaagcatgcaagcttgtgcgcgctaagcatgagaagagacttctngtcattatccaccagatcagattaattgactgcaaaaggaatcatgtataaaggtgtgcagtaaagagagtaactttcatgataaggatggccgtaatcctatccttctcatcgtgtgccatgtgtctgctttacgtatcaaccttatcttaagtctacgcaaccttatcttgcttttagattctatgttatctttttttgtaataatcttatccttccttggataagactttgtatgtttgtgtttgtcctcctcctatataaagggggactagtctgtatgtttaggcacacagaattcaataatactctctttttactaaaatgactcttctctaaactccattntctctaanaatctgagttatataatgggtattatctgaaactnttaccagctagtatgctctacattcgcttcttc

SEQ ID NO: 160488 - DNA, 420 bp, Glycine max
  unsure (1)..(420): unsure at all n locations
ctagaatcntcgncaaaacacaaaggtaacaatattactaaaatcaattctttgaaaaatggtgcaattgatattcaatcatgcaaagattagtcatgtagtttgtctacacggtcataagtcaaggaaagtgataacattaattcctcttctatcaaagatggaaaacttgaaagtattttcagcagtttcagcaacatggttgtcaatataagatctggaaattctgaatacactaatgctaatggaacttgctcacatgtctcttattagccagatatatggattctccctcacaagttgaatatacattggactagctgaatctgtcaatggtatggcaatggactattcctctgtacgcgtcaggataatattccttataaccaacaatttgacagcgataatggctcccattac

SEQ ID NO: 160489 - DNA, 412 bp, Glycine max
  unsure (1)..(412): unsure at all n locations
ctacaagatagaacacaaaagcatgattgattagagaaatatccttatatgcatcaacttgtttggtagaaagacccaacacttttacctatcggtgtcaatcttacttacttgcacttttacaattttnttagcctagacttaggttaattatgttttaaaccatcaattatcaatgtttctttcagcaatgccctatttctgaatttaaccttgtctaatactagttccctgagttcgatactcaaattcatccattntaattataaatacttgacgatccggtgtgctttccagtgtttcatttctattgaatataattattgagaattggagaanaaggaaccatatggaanaataaacactgactcactnttacctctcatcttcactaaccactgaagctgtatgg

SEQ ID NO: 160490 - DNA, 476 bp, Glycine max
  unsure (1)..(476): unsure at all n locations
cactgacacttaaatactaagcttatggatgcttttanggtcaaccaaaccatacttctttctatttgagaaaacaaccttcatgaccgataaggcaaactactgctacaagcttatgtgcgctagattaaagttggatggcaccgatcttggaatatattgagtagtaacaatctagaagatcaaaaggaaagatgaaaattgcaaatgcaggttgcaaattttgtataacagacaacaatctttacaaaagtgaattcacttaactactcctgaaatgcttaagagtgatagaggaagaatatgtaatggctgaaatacatgaaggatattgtagccaacattctggacatagaaatttggaaagaaaaatactaagagtcggctagtattggttgaccattgaaattgacacaactaactatgagcgataatgtgatagatgccaaatatgtgctgacataccacatgcacca

SEQ ID NO: 160491 - DNA, 487 bp, Glycine max
  unsure (1)..(487): unsure at all n locations
agcacctgangctgcagcttatgatatgggtcccttgataatacactcttgttctaatgaatgaacacattcatcttctggtgttgttgttacgcttgtggagatggcaaaaagcttgtgctgtgtggtagcttcagttgtggtgttctcgagtccatatttggttgtctcaatcttggtaacttagttaatattttttgtgttctatttattctgttgntgataattaaattatttgttttaggtattataaagtttgtatgctatatttgttttaagtattaatattatttgttttaagtattctaagcttgtatgctattatttgtgttacatatatatggtaccttagtttggatgttaatattatttgttntaggtattctaagttatcattcacacatatnggacattagnttggattaaatttgtatatatatggggntaaattttctttgcatattaanttatgttattcacatatata

SEQ ID NO: 160492 - DNA, 445 bp, Glycine max
  unsure (1)..(445): unsure at all n locations
tcaactgtattgtgtaacaagaaaacaatatgctggtgggatttttctctgatgaagaaataaagttagcggnttgggagtgcggtagtgaaaaaagtctatgcccaaatggtatcaattgtaaattcatcaaacaattttggcagattctgaaacctgactttctccgcttccttgacaaattccatgctaatggaattttcccaaagggaggtaatgcatcatttattgcactaatacctaatgtgcccgatcctcatagcctcaacgaatatagacctatctcactaataggttgtgttttcaaaatagtggccaagctcttagcaaacagactaaagaggatactaccactcataattgatgaacgatagatcgctttcatagcttggagacagtggctgcactgtgtaatcatcattaatgaagcaatggaggaagctag

SEQ ID NO: 160493 - DNA, 432 bp, Glycine max
  unsure (1)..(432): unsure at all n locations
gctcatgatgtatctcaatgattcanatgtgtnttgaagatcacaacgatgacaagctatgatgatgaacacacagctcaagtgaatcagagaacatctcatgagaatcaagatctagatcaagattcatgaatcaagaattcaagactcaagaagaaagccttcaaaacagtatcaagattcacgactcatgatctcaagaatcaaagatcaagattgagaatcaagaatcaagactcatgatctcaagaatcaagatcaagattcaagaatcaagattcgagaatgaagaacagactcaatcaatataagtgttaaaaagggtctttcanacgttgaataacacacgagttcgtgacaatatctttaccaaagagcgtttactctctggtaatcgataccatattggtgaatcgataccagtagctaaag

SEQ ID NO: 160494 - DNA, 359 bp, Glycine max
  unsure (1)..(359): unsure at all n locations
tgaggtgcgtaacccaccatggacactagcatatttctttgtttgtgnctactatcattgtcattattttttcgtcattgaagtgccacttgagctgacatgttctccacctttgggcgtattctttgaaagatccgtgccccctctattgcacatattatgtatatgcgtactatccgaagccattgtaccgacactggctaacgaacgcaaccattaggtcctcccaggaatggactcacgaaggttccaagttagtgtaccaagtaacatgtgccccaataagactgtcttggaaggaatgtatgaacgattactcatcttctgcgtatgcgaccatcttgcgacaatacatcttt

SEQ ID NO: 160495 - DNA, 476 bp, Glycine max
  unsure (1)..(476): unsure at all n locations
ctcagctatgctgcaaacattataatagacctcctagcatctngtccttctcaacagaataattatgatctttcaagcaatagatacaatccacgttggaggaatcatccaaatctgagatggataagtcctccacaacaacaacagcctgtccctcatttccagaatgttgctggtccaagcaaccatatgttcctcctccaatacagcagcagtgacaacaaagacaaccaacatctaatgctcctcctcaaccttccttagaagagttagtgaggcaaatgaccatctagaatatgcaatttcaacaaaagacaatagcctccattcagagtctgacaaatcatataggacagatggctactcagatgaatcangctcagtcccaatattctgacaaattgccttcacaaactatgcagaatccaataaatgtgagtgccatcaccttgagggttggcaaccagattcaagcg

SEQ ID NO: 160496 - DNA, 411 bp, Glycine max
  unsure (1)..(411): unsure at all n locations
agcttggaggattatggggtacccgtcatatgtggtactaggtggcgatcgggagatggtgcaaatcaactctcgcacatccacaaatcaaacatgaacccaccatccccagttgcccaccttcaacagagctcacatacccccacgtagcccttatcctcgttcctctcagcaccgggtccccatcaacccctccaagcttccacaatatccaagcaattcaatatccaaacatcatgaactaccctaaaccaagataatagggcagaggaagaaaactctgcccaaaacacattccaataccacaactttccctactcanataccccagtaacattctctttggtccgggtcgttaaccggtggatcgactcgaaaaatntacttganggccctagtacataagtctac

SEQ ID NO: 160497 - DNA, 453 bp, Glycine max
acgtgaccttaaatactaagcttatcatcataccacttcctggtgctggaactacttcacttggtcttgatggggcctatgcaagttgaaagccttggaggaaagaggtatgcctatgttgttgtggatgatttctccagatttacctgggtcaactttatcagagagaaatcagacacctttgaagtattcaaagagttgagtctaagacttcaaagagaaaaagactgtgtcatcaagagaattatgagtgaccatggcagagagtttgaaaacagcaagtttactgaattctgcacatctgaaggcatcactcatgagttctctgcagccatcgcaccacaacaaaatggcatagttgataggataaacaggactttgcaagaagctgctatggtcatgcttcatgccaaagaacttacctataatttctgggctgaagccatgaacaca

SEQ ID NO: 160498 - DNA, 450 bp, Glycine max
  unsure (1)..(450): unsure at all n locations
agcttctgtttcaatttcgagcgtctcgatttttacggngctctatctgacatccgagttaaaagttattgtcgtttgattnttctaaaagcttcccttntcaattacgagcggcgcgatatattacgggacacaatcggacacccgagttataaggtattgtcgtttgaattttctcagagcttctggtttcaattacgagcgtctcgatatactacgggtctcaatcggacatcggagtaaaaagttattgtcgctggaattttgtcagagcttctgttttcaattacgagcggctcgatatattacgggacacaatcggacacccgagttaaagttattgtcgtttgattttctagagcttctgtttcaatacgagcgctccatatttacgggagtcaatcggacaccgagtaaaaattattgtcgttggatttctagagctcagtt

SEQ ID NO: 160499 - DNA, 466 bp, Glycine max
cgtaattgaaaactgaatctctgagcgaattcaaacttcctgttcttttaactcagatgtccgattgagccctgtaatatatcgagacgctcgaaattgataacgcaagctctaataaaagtcaaacgacaataactttatactcggatgtccgattgagccctataatatatcgagacgccctacattggaaaacaggaactttaagaaatggcaaacgacaataacttttgactcggatgtccaatagtgtcccgtaggatatcgaaacactcgcaattgaatacggaggcttttagatatatctaacgacaataacttttaactcggtggtctgatcgatccggtaatatttcaagatgctcgaaattgataacggaatgcttgataaaagtcaaacgacaataaatctgagcttggatgtacgattgtgtcccgaatgatatctagacactcgaaattgaaa

SEQ ID NO: 160500 - DNA, 456 bp, Glycine max
  unsure (1)..(456): unsure at all n locations
agcttttgtttcaatttcgatcgcctctttttttacgagactctatcggatatcggagttaaaagttattgtggttggcatttggtacgagcttctgttctcaattacaggcgtctcgatatattatgggactcaatcgaacttctgagtaaaaatttattgtattttgaatttccaacgagctttcgttttcaattacgagcgtctcgatatattatggaaatcaatcggacatccgagtaaaaatttattgtctcttgaatttgctacgagcttccgttttcaattacgagcgtctcgatatactacgggacacaatcggacatccgagtacacatttattgtcgtttgaatntgctaccaacttctgttttaattacgagcgtctnatatactacgagcacaatcgatatctgagaaaatttattgtcgttgaatttgtcagagcttctattt

SEQ ID NO: 160501 - DNA, 434 bp, Glycine max
acactataaaactcagctgcatttgaattgcaaagcccactccatattatgatttttcctgacatctaaacaaacaaataaacgttacaagacaattatagttgctgtttgaatacctcacccactcaagtgtatcacacaattatggcttttctctaatgaaacactcttgccttttaccactctaattccccttgagttcttatgcaattcaagagattatggccacatcaaagaacaattcaccaatatgtgtaaggtaaggctagagagacaaggaaaaggttaaccaagaaataggctaacaatgtctttatgcacaaatgaaggaaataaaattcagaatttaggaattcaagtaacaatccttcatgcaaccaatatattaccttaaagagatggtttttaaagttcttcaagcatgaaccattcag

SEQ ID NO: 160502 - DNA, 450 bp, Glycine max
  unsure (1)..(450): unsure at all n locations
agctntatatagacttcanagnttctattcattgagagatctcaaccagtcggtgtctaatagcttgggcgctntacacaaggtcgttactatgcagagagagagtgtcagaaccacaaacactttctgcagcatatattcagagaagtacaacttgccaatgtcgtcttttgctcatagatgactntcattgtaccaatcgaatataacgttaacgacataagacaaaaaaaaaaattaagaatgtcaagacaagacaatttgaatcttcccttttgtgggctatggcatgaactgtttactaaacctatggatgttactttctgatgattacttttagtacttgaggatcgagtaactgttccatttcctttgtactatgagccaagtgttgaagcaactatcttcttangactggacgttgaggcagtatcatccaataattgatac

SEQ ID NO: 160503 - DNA, 433 bp, Glycine max
tgaatcacattgtcaaatgacttccttaatggaatgttctttgtagggatgaccttagacattgaaagctgtgatcacactgaatacctcaatataactgcccatgcaacccgtatccaagttgctagccaaagaaacttgagaaaataaaaatagaagatttaatttgctgaatggttggcgaagaatcatggaagtgaagacgattcctacaatgcttgacactaacaataacaaaaatgatagcagtaaatctcactgtcttgagttgggcattacatctcctatgaaagagaaccataagagagtgaaaggtcgaccaatccaaggaacatctcagcaagtaagagaacccatttctgataataaccacaaccttgcagcggaggatgatatgctccagaagtttagcatcttcatgcaaagactgaca

SEQ ID NO: 160504 - DNA, 453 bp, Glycine max
  unsure (1)..(453): unsure at all n locations
agctgctgattacttttctaatggtactgtagtatataaacttgatgcttattctaagaacacttcaaatgctaatgctgtgcgtggagtttttgtagccagtgcgttatataaagggtggacggagatagtgctcaaaaacaatttagacatcattgatacttggcatttggatggatacagcttctttgttgtcgggtaagtgtaacatacaaatactgcattaagtctattctaatgcaagtggttgttaagtaaattgcttttcttaacatgtgtcactatacaacctgatcatgtaaaacttatacaagtaaggcaacacatcaagtattacaaaattttctatagatatatngacatattattatgatcttgaattctttgtcagctcagcatcattatattttcgtcggatatgaaacntctctggctggtaaataaatggttatg

SEQ ID NO: 160505 - DNA, 454 bp, Glycine max
gtgtcactctggatctttcttataatcagatgtcatgtacttttcaatatccattggaaattgtagtaacttagagaatctgtatttggaaaggaatcaattagagggagttattcctgagagtctaaataatctcaaaaatcttcaagagttatatctcaattataataaccttggaggtactgttcaattgggatctggatattgcacaaagttgtctattttgagtatttcttacaataactttagtgggggtataccatcaagcttggggaattgtagtggtctaatagagttttatgcttcatggaataacttatttggcactataccatcaaccttcggcctcctgcccaacctttctatgttattcattccggagaacctattgtcagggaaaatacctgcacagattggtaattgaaatcactgaatgagttgagttgaattcaat

SEQ ID NO: 160506 - DNA, 430 bp, Glycine max
  unsure (1)..(430): unsure at all n locations
agtgaggacaaaattgatgagagtaacctttccagccatagataaaattttctggttccatttagacagcttctcttcatatttcctgatcagcggttcccacaccaagctgctggtggactttgccccaatgggaatgcccagataatagaaaggaatctccatatgtctacagttaaaaaattctgctgcctcatgaatccagttgacctcaactccaaagatcccaacttgactttttgcaaagttaatcttcaatccagatgccaattcanaacccctcagcatagccttcaaagcaataacattatcccacgaagcatgccccacaaatattgtgtcatctgcatattgcagaatattaacctgcttattntgcttccctacctgaaaactngtatacagaatattatctatcgcaaccctcatc

SEQ ID NO: 160507 - DNA, 376 bp, Glycine max
acccgagtagtcaaagagaagttcaagtccatagccatcaaagtctgaaaagagtatgatgaactaagggacgtcaatatggccaccgctgaatccttggaacgagaaaccaataatgcccgataggaagaacacgtgccagcaaagttttgaggggctttatatggcagcaatagtaagctcaagctccgaagaggtgaaaggaatcatcacgggtcaaaggcatgatcttgaaggacgagctaaaggcttaccttatgtcgaaaagaaatttgtcccaacagttaagcgagactgaagggaatatgtgggccgtcatcgatgatttgccaaaaaggtaaaaggaaaaaaaagccccctcttttaaaaaaaaaaa

SEQ ID NO: 160508 - DNA, 446 bp, Glycine max
  unsure (1)..(446): unsure at all n locations
gctgcagcttacggaatgaatgagcagcagcttanatttttcttccggagaggggggcgctttttataattttttattaaagggcaaaattgtccattcataaaagttgctgggtgcaccaacaatattgctgggtgcacctatcatctcccaccagcaatgcacacaccaacaatacatctaacaaatntttgaatggacaaaattacccatgttcatccgaaagaaggttgttattgaaaaatatttttaaaaaaattaatgggccaagactcgaatccaagattctggtgttattatgacaatgctctaactaattaagctaataaatcaattacattaaaaaataaataatattagtatacataaattattactatacataattatcactaacatttctaatgcatatntaatgcacatgtaaatntgaataactaatattg

SEQ ID NO: 160509 - DNA, 441 bp, Glycine max
  unsure (1)..(441): unsure at all n locations
ccttgcgcttgattgattcatcccttgcacccatcttgttctgtaagtatgattggttgattgaaccttgagtctgtatagtttatctccttctaccttgtcttaggttgtaggagagcatcattcataaaagggaaatttggttcaaagcaaatttgcccaattttggggggaattatggggtgaaagcttgtaatggtaagaaaagagcaacgcacacagtcatctaatacggaacaagtattaaaaaaaacaaaaaaatattaaataacataacatatcataacaaaaactataagcataaaattaaagtgtgtgtgttgctatttaagaaaaaagaaaagctaagtgtggaaaggcaagtaatagaagctgggaatttataaaaaaaaaaaagggggaaaaaaaaaanntnaaatagggggggggggggggttgatc

SEQ ID NO: 160510 - DNA, 228 bp, Glycine max
gtctcccttttcatcattggggggaccacctgggcccgcaaatcccttcaacttttaagggtgttctttgaaaaaatctgccccctttttgcacatgttatggtagtgcattcctattcaaaccatatcaaaaatgtactgatactgcctaacaaaggccaccattatgtcctttccagaatggactccggaagggtccaagttagtgtaccaagtaacagctacccc

SEQ ID NO: 160511 - DNA, 436 bp, Glycine max
tgaaggtgtgttacccacccattttccatataagggttgtggttggtggcgaaattgatgcccctccagaatattttgcaggggtatatcaccaactgcttgcccttcattggcatatccgatgcaaggctcgaagttggctacattgcggtggggaatttcatgtgtctcccccgtggtttaagagacatacgcatgatcagtttgaggttgttggctttcaatgaatatgggagcgaaattattgacatcctcactgggagtgtatgccacattgggtggtatatagtttggaggcaagtcaagtcatatggtgggaaggcatgcttgtttttgcactaaaagcccccccccccccccacgtgattttctaaacttatatttttggggaacaacccttttttttgccccccactaatttttataaaaccccccc

SEQ ID NO: 160512 - DNA, 418 bp, Glycine max
  unsure (1)..(418): unsure at all n locations
cgatgtgttatcttttctcaccccaaatttgcaaggggacaccatagcacatgatccatgctagtctattgtttgaaactctatattgtttggaatatcgaaaaaaaccccttcatcctcttattcactcatttgtttagctttctctagaaccaaacctctaattaaaactaggtcatctgtcagatagttgacacacatatccccacttacctccaacacaattgctacccttagcttatcaaacatcttaggatcattcagtgtatccaccagactattaaacaaacactccttcttctccatgtgcacaactacccctattcgctttggcaccctttgcttacttgcccnctccaatttttntttgtgacattggcttgcatcttaccatacctncccttccactgttggtata

SEQ ID NO: 160513 - DNA, 186 bp, Glycine max
aatggacttaccttgaatgaattcctttgatttctctctttgagcctatgttcccctttctttgtattgaatctcattacaagccttaactgataaaccatgatatcaccttacccttaatgaattttggagctttggaattgttttgggaataagtgtgtgtgtgggggggggggggttatttat

SEQ ID NO: 160514 - DNA, 458 bp, Glycine max
  unsure (1)..(458): unsure at all n locations
agctngcttctacatagggcaccaaaagtctttatgttggatatgttgnngcagttcaatgtttagtttttggtgaacaagttcaagcaattgtgtaaaagttatggccttgttgaccatgaaagtttttgtattgttactaacaaaggtgatgccctcattagtatagcaaatttggtcgtattagtaaacacaaacatatgtagttaggtgacacattgtggtagggattgagatgaaaatttgaaattgttacaaatgtctttagctatagtggtatttatagaatttggttatagttgggtgagtcactagttaactgtgcatttagatgaacgggtaaatgaacacttaagcatatttgcaagggtgcataatgtgcaaattgcagagtgttggtgagacatttaatttcttagagacgtgtgcaaattgcagagtgttgccaatttggactg

SEQ ID NO: 160515 - DNA, 416 bp, Glycine max
  unsure (1)..(416): unsure at all n locations
aaacttcctattttaatcgattacgccatgatttaatctattactgcttttcatgtntgtgatgttttgttgaaaacttgtagttttaatccattaccccatgttgtaatcgattaccattttcgtgtttggggtgtttctgtttaaaagtttcttttttaatcgattacatatctatttaatcaattacgtgtctatatgtttgaatgtactatggatttcattctgatttaatcgattacaacaacctcagtgggagtttatctggcatatttaatcgattatggttgtggtttaatcggttacttatagcaacttctggttttaagtgaaaacgacggtcaatttaatcgattactatgtaatttttaaattgccggagaatttttttaaaccccttttcttttgggtgtttt

SEQ ID NO: 160516 - DNA, 409 bp, Glycine max
  unsure (1)..(409): unsure at all n locations
acactggtaatgggtctactatcattgttatcatctctctctccatcattaggggtgctacttgagcttccaaatccttccacctttaggtgtattctttgaaagattcatgctccttcttacacatgttctataactgcattatatccggagccatatcagaattgtactgatactgcctatgaagccaactattaggtccttccaagaatggacttgggaaggttccatattattatacaaggtgacgactaccctagtaagactttcttggaagaaatgcatcaacaatntttcatttttcgagtatgcccncattttcttgntgtacatcttcaggtgattcttggagcaagtagtccccttgtacttatcgaaatctggcaccttanacttcagagggataacg

SEQ ID NO: 160517 - DNA, 443 bp, Glycine max
ctaagctttatatgtgaagtcatgtgcagccatctccctaatatttctctcacgaggtggagattgagccatgttctcagtatgaaaattagcagccgaatgctcaaaattagaatgttcagaatcaccagcaatagaatgctcaaaatgcatagaatgatcaggatgaacactatgcctaactaatctatgaaaggttttatcttctatttcaggatcaaagggttgtaaatcacctggattgcccctagtcatgcactatatgcagcaaatcatgtatttctcaaacaagcaccaaagggggtaaaactacaactatactcaaacaatatccaaatgagctgaaaatgtatgagatacaccctaaaatcatggaaaaggattttatggccccaaccccaaaaaaaaaaaaaaaaaaaattttttttttttgtttttttttc

SEQ ID NO: 160518 - DNA, 162 bp, Glycine max
  unsure (1)..(162): unsure at all n locations
gagcttctcattcttgattcngactaatacaacatctataagatttcatcctcctttctttgtgtaagcgtgtcacaatgtggtttttgatgcgggcttgtggctctaagtgatcggtgaaatccactttgtttaattgcgatggttcggaaaaaaaatcat

SEQ ID NO: 160519 - DNA, 396 bp, Glycine max
  unsure (1)..(396): unsure at all n locations
tggttctttaaagtttacacttgccatgaaggttaccctaccaagttataaatttctaaagaatgtcatccatacaggcctaatttgtataaacaaactttcaaacaccaaaggaacacaagtggccacatctaatgaccaaattatatattaactatctcagttttaagcagtgttatcaatggcggatggaggaacacaggggaaggccgaaattctgccatataaacacgccaatgcaccttgtggcaggcctcccttcacaaatttcctatggcggttggcaaaaaatatgtcatgccttttcagcatggcggtgcacatgtgnacgattataattttttttttnaaaaaaccccacaaataaacccccccataccctccccccgttttttt

SEQ ID NO: 160520 - DNA, 444 bp, Glycine max
gcttgtttcaatctgaaattcccatatttatatgattatatttacgcattccacttttttttttatttataaaaaaaatactttcctgccatttcagcacaggaaggaagtagattcattccctttatgttgatggaaaaagggatattttataaagaaatccacgtcactctcactcccttgcctctctctatacatatctaactttatcttttgcatttgaactggtccatataccggaacaaatttaatcatgtttcataattgtatatcaaaagaacaccataaccttttgacaaagccaattctcataaagaaaaaatatacatataaaaatatacttatgatacgtgtctctgtgtctttgtctttaacttgagtgactaagccgaacaagaacttctttgacaaaatagtatagttaattcgtcttactgtgacaca

SEQ ID NO: 160521 - DNA, 420 bp, Glycine max
ttttttgcctagaattgtacttggagtgcatgaagtatcagataaagtatgcagaattcccttttatagatgtcaggtcataagtggcatgctaagtgcaaacttttaaagactccagaagctccaggggcttccacactaagcgtggttcttcaaacaagtataggcttccatgtggttccttgctaagcgtggaatgagagtgtactaaacatggaataggccgaggtcaaatcttctctcagaaactctctggcatcattgtgctaacgtgaatcacttttgcactgacacggctccaaactcttcacctcttcaaaacttcacttcctttcttcatattttcctacaaacgaagaccaaaacttatacgaaatgttttttttaaaatttgccctttaaaaaaaaatttttaaaaag

SEQ ID NO: 160522 - DNA, 361 bp, Glycine max
cgagatgaggaagtgttgaatggtgaaacttcctgcttttattgttgaccacagagtggtacctggagatatgtcgcgggggtcaggagaccttggggacgtcaggtggggtgctattgcccaaaaccaagcttgaccaatcccgacccaacccgggcatagtcggtcagtgagaacctgtgatgtacctaagcatgcgagctcctggcagtcaacagattaaatgaacaaagaccacaaagcaaggaggcttgtggtggctggccagctctgaattttgtgtgatatgtggattatggcctctggtaatcgattaccaagggtgggtaatcaattacaaggcttaaaaatgaagacaggg

SEQ ID NO: 160523 - DNA, 394 bp, Glycine max
  unsure (1)..(394): unsure at all n locations
ggaacacagtccaaccacaacttcacctatttaatatttatcgtggtaaccaatgtttactttttaagatcttacatagcatttaaggatgcaacttatagacaacagtagagagttgaatccttggcccatgataggcaaccatcgatgatttaacacaaaggaccaaataaacttcacagaaaataattcctgatcattacaatttctaaaggtacaataataattaataagttgtaccattcccagtccccaccatgagcgaattggaacaacagaggactttttttcttccttttttcatggtgtccgataacaacgttgctatttatgcttntactccacttattatgtggaggtggngtatncaatcgctcagatttccctacaaaag

SEQ ID NO: 160524 - DNA, 451 bp, Glycine max
tactacgcttccagcagtcttcattaaatgcaaacacaacatccttgttcagtaaattactgagtggtttggcaatttttgaaaagtattttatgaatcgcctataaaatccagcatgtcctaaaaagcttctcactcccttaatgtttattggaggagggagtttctcaatgacatcaatctttgctttatctacctcaattcccctcacagaaattttatgccccaacacaatgccttcttgaaccataaaatgacatttctcccagttaagcaccaagttggactcatcacatctctacaacaccctttccaaattcgatagatagcaatcaaaagatgagccaaaaatagagaaatcattcataataaacttcgaatacttctttttccttttccccccaaacccccccaaaattttttatatttttttctccccccgggaaaagat

SEQ ID NO: 160525 - DNA, 438 bp, Glycine max
  unsure (1)..(438): unsure at all n locations
agctngccgccacggagttntcttactatgctcttgngtggnggaacaagctacaaaaggagagagcaagaaatgaagagccaatggttgatacatggacggagatgaaaaagatcatgaggaagcggtatgtgccggctagttactcaagggacttgaaattcaagctccaaaaactaacccaaggcaacaagggggttgaggagtatttcaaggaaatggatgtgctcatgattcaagcaaatattgaagaagatgaggaggtaactatggctcgatttcttaatggtttgactaatgatatccgtgatattgttgagctgcaggagtttgttgaaatggatgatttgcttcacaaagcaatccaagtggagcaacaattaaaaaggaagggagtggcttagaagaagtttaccaactttggttcttctagttgga

SEQ ID NO: 160526 - DNA, 340 bp, Glycine max
ctcaagagacttccgtgttcaatttcgagcttctcgatatgtgatttgcctgaatcggacatccgtgtgaaaagttatactagttgaatttcgcaagagcttccgttgttcaattttgagcgtctcgatatgtgatttgcctgaatcggacatccgtgtgaaaagttataccagttgaatttctcaagaacattcgttgttcaatttcgagcttcttgacatattatgtgcccgaaacggacatccgcgtgaaaatttatgaccatttgaatttgcgagaagttccgatgttttatttctagcgcgtcgatatattattatgcctgaaatttaagggggg

SEQ ID NO: 160527 - DNA, 385 bp, Glycine max
  unsure (1)..(385): unsure at all n locations
agcttgtgcaaatcaaatcactcctacatctcatctctagcatgcatttttctttctttacccactcctcacgtttggttttttagggaaaacaccataactaaacgcgccgcaagggatccctatcgcaccagatccaaatctataacgatgggtgatcaagaggagacacaggaacagatgaaagccgacatgtcggctctgaaagaacaaatggcctccatgatggaggccatgttaggtatgaagcagctcatggagaagaacgcggccactgccgccgctgtcagttcggctgccgaagcaaacccgactctcttggcaactacgcaccatcctccctcaaacatantangacggggaagggacgcactggggcacgatg

SEQ ID NO: 160528 - DNA, 429 bp, Glycine max
tgccacgacgattactgtgagtcgcgatgcatccactgtgtccacgccaatgctggaccttccatgtaaaaggaagttatggtgaggcgtttctgttctggtgtcgtgtgatactcaaagaattgagtgatcttaaagatccatcccgttgcatcagagccatcaaagcatgacacatccagtttcattcgataaactgtcgattgcattgccggaattgagcttgcaactgctgcctgagcttgatttataacctgaaaattcatttccagattcgcaatgcgtgtgatgaggtcctccattgttgtgttgagcgaagcttgcgatgccatcaaggagttgtgtgaagttgcgagcttatcgatgggcggttttccccttttccctttaaaaaaggggggccccaaaatttttttttttttcccccga

SEQ ID NO: 160529 - DNA, 164 bp, Glycine max
aatggtagaacatcagatcaagaagatgggagagttcgttcagggcagattagttatcagacaaatcttgactagatcagaataaaagaccatgaatagtctgaagtttcaacattggagactgattttccacactttacaaaagtttcttgggatgatccgtt

SEQ ID NO: 160530 - DNA, 355 bp, Glycine max
  unsure (1)..(355): unsure at all n locations
cagcatacaacacaaaagcgtgattgattatagaaacatctttatatacatcagctggtgtggtagaaagacccaacatctttacctacgactgtcaatattacttgcatctttaatattttcagcctagaattagattaattatgttccaaatcatcaattatcaatgtttctttcaacaatgccttattcatgaatttaaccttgtcttagactagttccctgagttcgatactcgaattaacccattttaatttgaaatacttgatgatcacgtgcgtgttccggcacaccggatttcccttgaacatatgtgtatgtatgaaaaaaagntggggggggggaacgcccccca

SEQ ID NO: 160531 - DNA, 403 bp, Glycine max
tcatcttggttgtgattctccttcttccatggcttattccctagtggatggcgcctcctctcacctcttctcctttgtcttccgctgcatctccatggtggaaaatcaccattaaaggacctcattgaagctcaaagatccagcctccatagaagccccacaagcaagcttccatcaacagggttcctccccttttgcatgccctacttcggagcagtttggggctgaggtcgcatggcctaaagactggcccgatgcccaagcaggggaagagcctgcatgatcccccggtgaggcagatgagtcccatatggatgaagagatgactgaactgctcggtttcttgggagggagcggagccacgtgaccaaggtcaccgtacttttgttattaacattactat

SEQ ID NO: 160532 - DNA, 378 bp, Glycine max
ttccgctccggagtatgatagtcaccgctttatgagtgttgtacaccatcatcgcttctaggccatcaagggatggtcgtttctccgggagcgacgcgtccatctcatggacgacgagtatgctgatttccaggaggaaatatggcgccggcggtgggcatcactggttactcccatggccaagtttgatccataaatagtccttgagttttatgccaatgcttggccaacatatgatggcgtgcgtgacatgagatcctgtgtaaggggtcagtggatcccgtttgatgccgacgctatcggccaactcctatgatatccgttggttgttgggaaaaaggaaaaaggggggggcccccccccaaaaaggggggggta

SEQ ID NO: 160533 - DNA, 362 bp, Glycine max
ctagtggatggtgccttccctcttcttttctcctttggccttcgctgcatttttatggtgaaaaatcaccattgaaagacctcattgaagctcaaagatccagctttcatataagctccacaagcaagcttccataataagtccaacagggccctggggtttccaactttggttatgggcctttgtagtcctacaaggtagctgtttcccccggcaaggtcacgtcatcatgacatacgtaagtatgcacatcgctcaactgatttcttatgtcatctattgtttgcagggatcgcgcccgcaagacacccagtggacccgaagaagtccaacacggtcttggagttgcctaactttaatta

SEQ ID NO: 160534 - DNA, 331 bp, Glycine max
gcactcctacgcttgaccttccgtgttcaaggataatatggtgaggcggtccatgctcgcgccgttggatactatctggatcgattaacgtgcataatcggttcatgggcttccaagcctttatagcttacagatgagctgaatccgagcgcctgatgacctgatttggtgcgctgagcttacctgtgctgtcatatctttatggattacctctagatctcttccactaattggcgtgcttatcaaatgctcactaatccgtcaacagatcgactcatcgaaaacgtgaaaagaacactgttgacattcttgcttattaaacgggaaaaac

SEQ ID NO: 160535 - DNA, 442 bp, Glycine max
gctgtagcttataagcttatcaacttgtttttaccaaacattgcctacaagctaaaaaattagatggtagttgagagttgaaagttatcgagctagcttattgaactataagtttttgataaaattatatattatagtagcaaataaatataaaataataaaaatgaacatgttataagatatttttgtataaattttaattttattttatgcatggttaaatataaattttgacgtataatttttttttggttcatggagggtctaaaaggccaaactaattaatggcctctaaaaaatgaaacatgagcaacatctgcaagaagaggaatttgattccaagcatgccaggagtaaaaaatttgaactccttcaaacacctcgaggccatacttcgaaagtttgtcaagcacttgattggcctctgtaaaaatgtcagcac

SEQ ID NO: 160536 - DNA, 439 bp, Glycine max
  unsure (1)..(439): unsure at all n locations
tggactgtgctatgagagaaaacaaatgaccaaagtgttctcttatccatttctagggcaaaattgggtgttgaggagtcaaattttgattcggtagaaatttatgtgtaaatccagtttgagcaagtttagatcaatgttatagacttgtgtgaggtgagagtttgctccaaatttacctcattctcaatttcacttttcaaaccttgaaaatccattaaaatgaggggttttggacacctagattttgtgttgctgtggtttgaagcttgactttggtttaaacatgattgatacatgatttgggacttgtaggatttgatttgggcaagattggatgaagggaagtgtggttttcgaaatatgctcttnntgtgcaagnaaattttttttttttggggcccccttttggtggttttttataaaaaaaaattgtgat

SEQ ID NO: 160537 - DNA, 429 bp, Glycine max
  unsure (1)..(429): unsure at all n locations
agctacctagtctataaatagaagcatgtgtaacacttgttgtaactttgatgaatgagagtcttgtgagacacaactcaaagttcaacttctctccctttttcttccttcaatttcgtgctccccctccctctttctctccctctttcttttcctccattgaagcatcctttccaagcttcttatccaaggctcatcttggtggtgaagctccttcttccatggcttattccctagtggatggcgcctcctctcacctattctcctttgtcttccgctgcatctccatggtggaaaatcaccattaaaggacctcattgaagctcaaagatccagcctccatagaagccncacaagcaagcttccatcaccaatgcgttgtgagtaagagagatgatcttncgggatcttgtgcctgtaaaatgcatt

SEQ ID NO: 160538 - DNA, 415 bp, Glycine max
  unsure (1)..(415): unsure at all n locations
cttgtagcttcaatgcaaggaaacatgcttatggctaggaatccaaaattnggttttagaattagaaaaacatgaaaattaggatttgcttgtgagagtttttgctcgaatttgggctgccccatgtttgatactttacatagaggtagcgtggaaaacaccttgcaatagtgtgtatacataggtaaatataaggagcatgaaattcctagcaaagtatgagtaattgttttcttaaatgaatgtatgatagtgtggaatgccctttttgaatgcaaatatgtgcaggatgtaattagctttccaatatgcatataaataaataggagtgaaacaacaaaaatttgtatggtgtacttcanaatgtaatttggttttataaaaaaatttttaaaaaggtttttttttttttttg

SEQ ID NO: 160539 - DNA, 461 bp, Glycine max
  unsure (1)..(461): unsure at all n locations
ctgcaagctntcaatgcttcanagaatgtatttctctgattgaaaaacaaattgaaaggaaagttaaaagacttagaactgataatggcttggagttttgctcaacataatttaacaaattctacagagatgaagggattgctagacaacttactgttaggaacactcctcagcaaaatggagttgttgaacgaatgaacagaacacttttggaaagaacaagatgcctattgtctaatgttggcctcaaaagaagtttttggggagaagctatcaatacaacttgctttctgatcaatagaacatcctgtactgctgtaggacttaaaactcctattgaaatctagaatggcaaaacaacaaactactcanacctaagagtatttggctgcaatgcttattatcatgtcaattaaggaaagctggtacctacatcaagaaagggtctgttcatgggttat

SEQ ID NO: 160540 - DNA, 436 bp, Glycine max
  unsure (1)..(436): unsure at all n locations
ntgaatgtgcgtagcccaccattgtccatagtttatttctggtaatgtgtctactatcattgtcatcgtttttttgtcattgaggtgccactttgagctgccaagttctccacctttgggcgtattctttgaaagatttatgccccctttttgcacatgttctgtatttgcatcctatccgaagacattatactgacactgcctaacgaaggcaaccactatgtccttccaagaatggactcgggaaggttccaagttagtgtaccaggtaacagctacccagtaagactctcttggaaggaatgtatcagtaattccttatcttttgcgcatgcccccatcttccgataatacatattttaaatgacttctttgggngggcccaaaaaaggggtttttaaatggattttttcacacccccccacccccccccccc

SEQ ID NO: 160541 - DNA, 433 bp, Glycine max
  unsure (1)..(433): unsure at all n locations
ccacctgangctgcagcttgaaaaacaacttccctgttgtattattatcatccacagctaccacattggaagtacctgttagatactgtgggatacttggtgatttatgcccaaaggtcacttcaaatggggaaacaccagtagctgaatgattgaagtgttgtaggaccatttggcccacatcaagaacttgccctatgaagttggtttggtgtgcacggaggctcgcaagtactgttcaatgactcttttcaggacttcaatctgtccatctgattggggtggtaagtcgaacttatccgcaactttattccacttaaaatgaaacatcgttgccagagcctgctaacaaataanaggtctctatcttatacaagactctgaggcattccatgatacttccaaacaatttncatgaagagtaatgtagtag

SEQ ID NO: 160542 - DNA, 424 bp, Glycine max
  unsure (1)..(424): unsure at all n locations
tatcatgacaagaagctgctaaagaaggactttatgtcttgatcatcaagtgttgctgttcaactcaaggttgaagtttgttctaggtaagctaaagtctaaatggtctagacctttcaccatcaatgaagtcaaaccacttggagcagtggaattatctgatcctcagtcagaaactccagatagaacatggatagtaaatggtcagaggttgaagctataccatggtgggagcattgagaggtaaaccaccatctgtagttacaagacccttgaggtaatatgcgtcaagctagtgacgttaaagaagctcttactgggaggcaacctagctctttttattttattttcttaatcattgcatatancttagggtgtttttaaaaaaaccactttttttggggctttctcttttcttgggggg

SEQ ID NO: 160543 - DNA, 332 bp, Glycine max
acaacggcgaacacactttttagtagaaattctaagacggtcagacaaagttgaagagaaacaaaatcataaggggggtttgagggagtcattgaattcaaacctttgaaagaatcgacgaccatggactacgatgaatggaagaaacacataaaaaggttacgcgcgcgcgactgagaagaagctacttaattattagtgattccaggaataatgagtgagcttattcaaacacagtcatggcgaataaaccatgtttgttctaccaatactactacgataggctttgtcaacctatcgtggccctccttaaactcactattgaagatggt

SEQ ID NO: 160544 - DNA, 424 bp, Glycine max
  unsure (1)..(424): unsure at all n locations
cggtgcatatgatttatatgctccagcttgatgtggtttgnttaatgtngaatatttcttttgtattttagctttgtttggtagcttaatctgtaagccttattcagaatgcagcagtgagatgtcactgtcatctctcctctctctttttttgtatcctatatatatgtaacattttgaatctaataaagctgtgagagaaagtgaggttttgactcctcctcaccttcatttcaagtgaaattgaagagtnttcatcaaggaatagggttctacctattctagtgatctcaaatgataattgaatggattagatgtaatcaaagaataatgagattggattaagtgaaggtagaaggataccaattgccctaaaaccaccaaaaccacttttttaaaaaaaatttttccaccacaaaatttt

SEQ ID NO: 160545 - DNA, 419 bp, Glycine max
tgtatgctatagactcctcgagtatagagtgtttcctctctttttattacatttatgtacatcaataataattataataatgtgtttatttctagacaaggactaaaatcctgttataaatccattaggatcaactaatggtggaagtccggagtagatacatgataatctagctttgatctcaaatgtgacctttgtaaaaaaaataatctggttatttttattgaacatggggagtgattatattatattatattgtattcattaaaaaaaactgagatgaaatgtcattctttacttatccatggcacatatgatatcagtatcaaccaccaaaggatgaatgggacatgataaacttgacatcttttgtgaaattggggggggaaaggaaaaaaaaaaaaagggggtttttcccc

SEQ ID NO: 160546 - DNA, 432 bp, Glycine max
gcaagcttcctgaacaagtagggtgcttttattatatgtagctcggttgcacctgcagattgaagctgcgagacttgctgcctcatccaaaggatatcatcctgtgcgtttgcttttggtcactgattgcttcccaaccccaaatctctttacttgcaaggaacttatacagcgtgaagggaatacctggctttatgaacccaacctgaatacacttagagagaagctgcagctgcccattggttcatgtgaactgacagttcctttgaaagctaaaggtctggttcaaatgaactcgtgtttctatgctatgctttcattttgtccttgctccttgttctttctccttcccccaaaatcttgtttccatcttgttctgtaagcaacattcagttttagtttcaaaatgtaagtgccaccacatttcttcta

SEQ ID NO: 160547 - DNA, 372 bp, Glycine max
  unsure (1)..(372): unsure at all n locations
ctcagctggaatgactaggaaagcaatctggaaatggttttccttctctntctgggcttggtcaagtccacaggggcatcgtcgatgtgtgacgtgtccttatacccattcttgaacgggttcaacttgctcagtttcttggacatggacgagaagaacgtgggctttttagtgggcccaatattctccctcccagacgacgacgttccgtgaacattcttctgcaaatcggaaatgaacattttcatcttcatcagctccgaccgcagctcctcgttctccctcaccaatgacacgtcagcttgcagctgttttttctccgccgccgccaccacagcttgcttgtccgccgccgtaccgttccttatttgt

SEQ ID NO: 160548 - DNA, 439 bp, Glycine max
  unsure (1)..(439): unsure at all n locations
agcttcatactcttgctgcatggctaattatccaattggatttgttaaggcttgcttaacagatttgggttcacaatgagccaacagaagaatgggggttaactcttggtaaatgaatgtcgaacttagatctggtttgcatgggatggatattgggtggtctgttaggtgtagtgggagacttatcagtgggaacagtagtggatggttgagactgttcagtgggaacaatagtggatggttgaggtgtatgggatcctggagtggaaagatcaacatttgactgatctgtttgtgcagtatgggaaggctgaatanactcaaaattagtttgaggattatttgaggtatgttgtgggatatttgagggttgtataataggaataagaggaaagtaatgctgagttaaggaagagtatactaactagaaagagaggac

SEQ ID NO: 160549 - DNA, 398 bp, Glycine max
ctttatgaatccattcagaaatgcactcttgacatccatcttatatagtttgatgtctttttatgttgcataagtgataaaccacttcttgagtgatattttattattttttgtgccatttacatgcattttcttgctagaactcagatttggacactagttttgtattgcaaaagtacaaccactcaattgagagaaagagttaaaaattgtatgattttatgaagatttgaagagtctgtagttgatcacggtcgtggtacacttaccaccgccatggttagcaacacgatcactatatgatgataacaaccctccaaaataatgtcaattcatttctttataaccaaaaaaattttttgggggcccccttttaaaaattttcgggggaaaatttg

SEQ ID NO: 160550 - DNA, 396 bp, Glycine max
  unsure (1)..(396): unsure at all n locations
cacagtgcctataggtataactaacttaccaaagcactatttggctttccaagcattactctagtacaaacatgcaacactaaggcgtgagtcctattttaggacgaccttaagaactctggatgtagcctaaaataggaaacacatattcagagcccaaaatctagctttaacatgttatcttacgaggattcaatagctacctcattcacaccatntgtgcaatcaaccatcatgcgtgcatacgacatcatattcttgtagcttccattcaatcacttgatactcaattaaaagcctctaaatcatggatttaagtcaagaacaaattcatgtaatcactacgaggcaactacaataatcaatatctctaggagctacaatcttacatttgtt

SEQ ID NO: 160551 - DNA, 409 bp, Glycine max
  unsure (1)..(409): unsure at all n locations
acacttaaaactcaagctgtgtgcttcgaacggggaatacacctttctatctttttgtggtacaagatctctctgtgaatctcattttcccaaaacatggtcattattactaatcctgatttcccagcattgttgctctactatctctggtcaattacttctactttattttgctttgcacacacttaattgttcgaattcattgtttttcaattgaaccttctcttatcactttntttatctggatggtattgatattgaagctcattttggtcccaatcctgttatagggttttagtgtttgaaaattgagatgatacttggtttattttcgatgaaacaatttcccaagggcatagggtcttgataaaattatgtcctagtggaaagggcgggaaaaaaataaaaa

SEQ ID NO: 160552 - DNA, 293 bp, Glycine max
ttaaggaaaaacaccataaactaacgcgccacatggcattcctatcgcaccaaatccatatctagaacgatgggtgatcaagacgagacacaggaatagatgaaaaccgacatgacggctctgatagaacaaatggcctccatgatggatgccatgcttagtatgaaacagctcatagagaagaacgcggtcaccgctgccgcatgtcagttctgctgccgaaacatacccgactatctaggctactgcgcaccatcctcccttaaacatatataagaaagagaaatggacac

SEQ ID NO: 160553 - DNA, 468 bp, Glycine max
  unsure (1)..(468): unsure at all n locations
gcaagctngactactttggactgaacatattctcttatgaaatgatgatcaatgttaatgtgcttggattgttcatgatgagcagggtttgaagcaagacttatagtgtaacaccctctacccctcacatatatattaataaaggaataaaaattcaaatattaattaaaaatatttttaaaacattttaaaatacaagcctttcaaatgggtaaaagactcacattcactttcttctacatcatattcaaacttgtccaaataaataataaagtcatctcggctcaaagaaggtcatctaagtttcatacaattaatatagaacctatatcctaatgtcacatcttatcagagcgtggtgttcccgtgttctctagcatgaggttcttcatagtcatccacctattcatctgctcccncaaacacanagttcaagatcatcacaggatccaaacacaaacaacaaag

SEQ ID NO: 160554 - DNA, 470 bp, Glycine max
  unsure (1)..(470): unsure at all n locations
acgtacactattaatactaagcttcctgaccactgtaacatccataacaccaaccatggttatcttcataacaaacttttgaaatccaactttaccaccccaaaaagccaatctatacaattgaatctagatctacattagtaaaaaagatggagtaatcaatatgaaattgactattaccaatcatgtccaataacaaagagggcccataacatggttccctgagcagcccaatatagatgccaaacaacccaattgttgagataagctgcagcaacagccaacccaaaaaccacaatgacatctctaacaacataactcatggacttccaagggtccttcacccaacagtgtttatgaatggaagctctaatatctgccaatttgaagggtgnngtggtgcaaacctttaaaagtgggtggggtttttcccaaaacaaaaaaaaaaaatttctttgttttctggtatt

SEQ ID NO: 160555 - DNA, 307 bp, Glycine max
ctatatctcataatgcccctgtttaactcccctgataggaggcattatgtactctaattgcctatacttctgttctattagctattggtcaatcaaactccggattgttatttcgctaattccctatacttctatatcctacattggtccctaaaagagcatacacactgtgttgtacgaagaaagataggaagaatcatctcgttgaggtaataatatatgattatgaagttaaagataaaatagtgaaagacatatcacgatcgttggttgttggcgcttatatatatggaacatgatacgcatg

SEQ ID NO: 160556 - DNA, 265 bp, Glycine max
gagaatttgccttatttcaaaatctaaatttttaacaagctttatattgactctttgttattgctgtagaattttatctttcaattatgttaggtaactaatgaaatctcaatcaatctaataagagatacgatattttacgaatttttaaattagttataatcctatgtatatgcgttttattttatggatttcaatgataattttcttcttaaattgtaatctcaatttcttgtcaagttaccaaattctttccactaaagat

SEQ ID NO: 160557 - DNA, 369 bp, Glycine max
taaaaaaatgccccatggccggtggaaaatatcaggtggggcgtattaactaccgatgcttgctactggtctttctattccacccctgaataatacttggacgatgtctatttggaaatgtccgatcggagtcatccggtcatgcttctttttgagacctcgatctgtcatcttttcctggccgacgtcggctggcatttttttcgatcaatatcggtgaatcatgccttttgccaaggtgggctaacgtcttcgtggctgatgaaatgagagcatgccagtgtcggccgaaacacaatctcgcacgaaaaccctagccgacctacattgtaaattttgtaggtcataccgaacaacaaagaatattat

SEQ ID NO: 160558 - DNA, 384 bp, Glycine max
tactatagctttgagctaattcaaacgacaataactgtgtactcggatgtctgttgagtcccgtaatatatcaagacgatcgaaattgaattctgaagctctaagctaattcatactacaataactttttgctcggatgtctgattgagtcccgtaatatattgagacgctcgaaattgaatggtgaagctcagagctaattcaaacgacaataacgttttactcggatgtctgattgagtcccgtaatatatcgagacgatcgaaattgaatgttgaagctctgagctaattcaaacgacaataatgttttgctcggatgtctgattgagtccccgaatacatcgagacgctcgaaaatgaatgttgaagctcgtaggttatt

SEQ ID NO: 160559 - DNA, 447 bp, Glycine max
  unsure (1)..(447): unsure at all n locations
agctgtgaatatagttacaaatttttttttttattattaagtttgggaaagcttatcaaatttgttgaaacaaaaacctgttgtaccatcacaaagccaagattctatagatctatgtcctgctgatagaaaaaaaaaagatgttggatggtagtaataacatataagtcaatgttatattactcatggtgatgatatcatcgcctgccaccagatggcagatgttggtgttggaatatatatgtagaaagggtgccaagcaatgatggcattagattttgctttctagtttgtatagttttcttttaatacctttggccgacttccgcttatttattcaatattggtaagtgttaatttcttgatttccttgtagtttttntagatgcccaaatgtaacatcccattttttgaaaataaattaaaagaatttatttanaatagagt

SEQ ID NO: 160560 - DNA, 405 bp, Glycine max
ctgaccactggctcgcccatgctatcctttgtctcacctgtgcccccaaatagcttaagggtgaagtagtcagctcgcctatgtgagcaaggttacttcatgttgaagtaacagctcgcctgtgcgagctgcatatcaacctagtcccctcatttcctataaataggcgtgatgggggctaaagaaagagtttagctttcaaacattgaaaggacttagtggaatttgaagagaagaaaaagatagaaaagaaaaacgaggtcgaggcgctaccaaattttgatcgtaatcgacttctacatcgttcttcgtttggtgttcttcgttcgtcgtctagttagtatttattttaaagcatttggatgcaaatcccaaatggtgcccaaaaccccccccccccttttt

SEQ ID NO: 160561 - DNA, 363 bp, Glycine max
  unsure (1)..(363): unsure at all n locations
agagcccggntagtcttagataagttcaagtccatagccatcaaagtctgaagagagtatgatgaactaagggacgtcaatatggccaccgatgaagccttggaatgagaaaccaagaaggcccgaaaggaagaacacgaccaaagcaaagtttcgaggggctttatatggcagcaatagtgagctcaagctccgaagaggtgaaaggaatcatcacgggtcaaaggcatgatcttgaaggacgagctaaaggcttgccttatgtcgaaaagaaatttgtcccaacagttaagcgagactgaagggaatatgtgggccatcatcgatgagtgcaaagagaagctaaatctattggcgactcac

SEQ ID NO: 160562 - DNA, 438 bp, Glycine max
tatgcgcatatttccctacgaatgttcacttgcacattacatcctattaactaagaaaaatgcacccatatacaatcaaggtagcttcattacctagattatttacatgtacttccaaggtgtatttgttatttacatcacacacgcctccttggctaaatttacatacatgcatactcaaagcatttcggggtaccaaaaattgcacacgcgctcatcttggtatttctaatacctatacatatacgaacttcatgatgaatcttgactacctacgcaataaggtgctacctttcatgctttttttttcaagtttttgctacctaaagccacatgcaaattcaagcatattttcctttgctgactcaaaatttgtattttttccaaaaaaaaaatttttttaaaaaggcgaaaaaaaaagaaggggggggatatatt

SEQ ID NO: 160563 - DNA, 394 bp, Glycine max
  unsure (1)..(394): unsure at all n locations
tatgcattcgttatctcatgctagctatcatcgccaagtaccaagaagagttatgtctagccgccgcccacgagcatatgattgcggatgaatatgcccaagtatacgcggaanaagaggctagaggaagggtgatcgactctttacaccaagaggcaaccatgtggatggatcggtttgctcttaccttgaacggggagtaaaaacttcccccattgttagccagggccaacgcgatggcagacacctactccgcccncgaagagattcatgggcttctcggctattgtcagcatatgatagacttaatggcccacataattagaaatcgttaggaaactcgtatggtctctaagaccttgactagatacgacttcctttttgaaaataaatg

SEQ ID NO: 160564 - DNA, 435 bp, Glycine max
  unsure (1)..(435): unsure at all n locations
gacactattaaactcagctttgagatattaaatggtcttaactnttcacactgatgtccgattcaggcttataatatatcgatacgctcgaaattaaacatcgtaaactctcgagaaattcaaatggtcataacttttcatacggatgttcgattcgggagcctaagatgtcgagaggctcaaaattgaacaatggaagctcttgagaatttcaaatggtaataacatttcacacaaatgtccgattcaggcttataatatatcgatacgctcgaaattaaacatcggaaactctcgagaaattcaaatggtcataacttttcacacggatgtccgattcgagcgcataatatgtcgagaggctcgaaattgaacaacgaaagcttcttgaagaataatattttttttccacaaaaaaaaaaaatttgggggggg

SEQ ID NO: 160565 - DNA, 356 bp, Glycine max
  unsure (1)..(356): unsure at all n locations
taattaaaaaatatattttctgctatgaataatcttttggtgaatgttcatatcttccgttatctttttttgtttatctctatttgcattaatttttataactctctcattaccttttgtatctataaatatattactcatctttaaatgaaaatacacaattctcattctttctaaactctccttttctctatattttttttctctattattctcctcccattacattatatttaaaagttatcaacaccatcgtcttttattcatgtagcatattttttcattaacatctccacttgttagaaaaaaccttgtagacaattttatcaaaaaaggtaatattcttcanattcatg

SEQ ID NO: 160566 - DNA, 440 bp, Glycine max
  unsure (1)..(440): unsure at all n locations
tcgtccccaattntctataaatagggggagaagtgtatgtcttaaaggttcagccccttaggcacttctctctctttcgaatttgcttaagaaaattgtttccgtgaagaaaatccaatccgatgcacttccgtaacgtttctgtaacgtttccatgagtgatttcgcgaatgttttcgaccgttcttcgacgttcttcatcgttcttcattcttcaacgggtaagtaccgcataccaagcttttcaattcattctatgtacccgtggtggtccacatttggttgcatgtatttgtgttctcgttttatttacctttttatacccccttttgacgtgcttaagccatttatttaagtcatttctcgctttaaccctaaataaaaaaaaatttaaaaaaaaaaaaaaattttttataaaaaaaaaaaaaaattgtcaccgt

SEQ ID NO: 160567 - DNA, 413 bp, Glycine max
  unsure (1)..(413): unsure at all n locations
tcgattaccatatatgtgtaatcgattacaccgtgcaaatnttgaattcaaattttaataactgttgtaaatcaattttggccactggtaatcgattacatcctctggtaatcgattaccagagagtaaatttgttggaaaaaaaactttttaacttaaatttcttggccaaaccttttgctacttcaattggaattccattcctatataatataccttttctaagactctagagattgtcttgatcatccatcttgaatatctttaatttctttgtcttgaataaagctttgagacgcatgtgaacctttggcatcatcaaaacattcagcttgatcatttgtctacaagaaatagccactacaatctcttgatntatatgggttacagaaaagtcacaccctattagcatc

SEQ ID NO: 160568 - DNA, 414 bp, Glycine max
cgctcttgactcctgattctttagaacttgcttaactcttgattccttgacatcatcaaaataatcttggaagtcattgcttccacagtctcccctttgttgatgatgacaatcctgaaatcaagagaatacatataagttttgttctaccgttcactcatctctttctccccctttctttttgaattcatgcttaattttaaaacattgaaaatataatatcttgatttctaaaatacccatttttctctccccctttggcaacatcaaaaaggccaaagtgcgtaaaacatgaagaatttaaaacatacacaaaacataatttgtaaaacaaacataaatgattgtaaaacatacataaagcataatttgaattaaaaaccccaaaaaaaaattttttggtgaaaaaaaaaa

SEQ ID NO: 160569 - DNA, 440 bp, Glycine max
  unsure (1)..(440): unsure at all n locations
agctttagcactaacatattttatatgatttaagttttgatttctactgataatatcatcacttatgtgagtgcaaatacaccagtacaagatacttctgacagtataaaattgttaaaaacttctttcacaacagaaaaaattagagaaattgcgatgtgttcaaacttattatattctcagctacttctgatatgtcttgatatatagatagtttaacagattcaccgaaagaggctgatatttctcattntttgcattataggcttatttaataatcttgataagctattcatattctaggattatgattgtatcattaccaccttgatccagaatcaactaatgcaatcattggcattatttcaaataaaccatccgcgtatcaatatatgccagagganattgagaatgacatanggttaagtagattgtgattc

SEQ ID NO: 160570 - DNA, 379 bp, Glycine max
caccatcatatgcaaaatctgtcccagtcaattcagaatcatacgtttcatgcaccctgtccagaagcttcctccctacacccttaccctccacaggtcgtgcatcatcattaaaaagagcaacctgcttaaacataaacattgaataaatgattccaagttgaacagagacccgagataaataatgctggtgaaaatgaaagcacatacactatactgatataaatgcccatcagtgtttgcaacgttcactctgtagtgattggtgagaagttgcagcttcgtcccttttgaaacaatgccacgcctggctattggaaaccttgaaagcactttttttttttttttcatttttttcccttttttcccccccccgggg

SEQ ID NO: 160571 - DNA, 399 bp, Glycine max
  unsure (1)..(399): unsure at all n locations
agcttggaattaattcattggtatttatcatgtgattaagtctctgatagttaattttttctttttgaaattgccttgtgccttatttctctctttatgaatttttgcgaattcatctataagttgagagacatgatgagtttttcattgctccgtgtttgggaatcacaatgactgataacaattgccaatttctgatcttcaaatgcagataatttgtcttttttttaatttctagaaaattttgttgcagtagagaaatttgtgtgttaatggctctggttttctgctttntgtcaaagtattggtattcttcttaatgtgagtgtagaatttatcatgcatgagaatcgttgctatatatattctttgcaatctcaacttttcatttctgtagat

SEQ ID NO: 160572 - DNA, 408 bp, Glycine max
tcgccaacctccatatttggaatgcaactctctatcctatagttctccctaatggtgaaatagatcccacttctactatcccaggatagcctgattgaatttggtcaagtctctaattcctaagccgcctttttgttttgatagagatgttgtctctcatctcacacaagtaattttatggctatccatgtctccaccccataataaccttctttgtagtgtgactagcttgtgtaccacctttggaatcctcagtattgactttatcagagtcaccctgccctcaaatgataatggcttttgtttccactttgctaatctactctcccattttgtaactataggttcccaagtggcacaacagattttgtgggtttttttttgggccccccccccccctcctaaaaa

SEQ ID NO: 160573 - DNA, 428 bp, Glycine max
  unsure (1)..(428): unsure at all n locations
ctgtaacgacaatatctttttactcggatgtccgattttgtcctgtagtatatcgagatgctcgaaatttagaatagaagctctgaacaaactgtaacgacaataactttttactcggatgtccgattgtgtcccgtagtgtatcgagacggtcgaaatttagaaaagaagctctgagcaaaatcaaacgacaataaatttttattcggatgtccgattgtgtcccgtagtgtatcgagacgctcgaaatttagaaaagaagctctgagcaaaatcaaacggcaataaattttatttcggatgtccgattgtgtcccgtagtgtatcgagacgctcgaaattcagaaaagaagctctgagcaaaattaaacgacaantaaatttatttcggatgtccgattgtgtcccgtactgtatcgagacgctcg

SEQ ID NO: 160574 - DNA, 434 bp, Glycine max
actaagctgggaagttgatttgcagttcgctgagccatcctcttctggaagagcgcataatccactgggcgcaacatgattggctgagcgcatagaagaatctggaaaaagatgacctgtacaggtgcgttgagcgagagtcaaacttgctaagcgcaccgcttgcacctccaggctgagcggagaagaggcgcgctaagccaaatgtcacttaatttggctaagcgaaccagaatgtggctgagcgaacgaccaaaaatcagcaacactatttaaagtctgaaatcagaaatggaagagagttctcaatttttggtgttttctctgttcttggaagcattcatctgagtggctgagtggtggagagaacttctggtggtgaaagaaattatacctttttggtgaaaagaggggggggggggaaaaaacccccc

SEQ ID NO: 160575 - DNA, 454 bp, Glycine max
gctgcagcagagtttgaattttcgcatttttttttccatataaaactgggctgttccacagatagggaaaatgaacgcattgaaaatcataaatgataaaatacaaaaattaagaataaaaaaatcagtacaacactattaacagtttaaaaccaggtaaatagataaataaccattgcaagatgacaaaaagaagatgtgtcataaccacaataacaacaataaaagcctgttcccactaaaaatgtgtcataaccatgtaaactaaaattacgcagttttcaaaaaatatcttctgccacatgtacattgaaaaaaaaaaacaaaggtacggttgggtttccattatccatcagttgagacatacacatttgaatgcatctaacttttaagtatgtatgcattgtgcacacatacataaatggtatgcattaacaccatttatgagcgtgac

SEQ ID NO: 160576 - DNA, 425 bp, Glycine max
tgtgagatcgccgatctggcggtcacctctacttttttttatgtggagacttgttgggtttgttgggctccattcctatatggagttaacgtccatacgataatgtccattttttctcacttatttaagtacagagaggtcagattatggagagaacaagactcatttgtgaggggaaaatagttacaaaacattgagagagaaaggagaaggaaaattattatgaattttgcacacccaccaaagagtgtttttcatattgcaattgcagattcttttaccattggatcatactgctttttggacaccatgttctatacacgtgatacatcatattggctagatgaattgttaaaattgatatctgtgaaagggtaaggtgaaaataataaaaagaaattgtttaatttttatttttttattcc

SEQ ID NO: 160577 - DNA, 249 bp, Glycine max
tccctaagaccacctgttctctaaacacattcatacaataccctttctgatcttattaaattatctgggaaaaatattgcgatattaacaatttctcatagctgcactcatgttactccgagataaataagaatgtcatctaacgaggttattattgatcatgaaattcctatatctgacccctgttggattcattatagcctgtttacatcaaataattatcatgaattttaaaaaacacctgccgaa

SEQ ID NO: 160578 - DNA, 374 bp, Glycine max
cacaaatatagtactaaaaaaacaaaagggaccattacaaaggtagtacgaaaaaacttctaaatttttcttattttgtggtctgcataatatttgtatatgtaggtttttaattttcctgaatatcacgtgaatctaaccagcaatacctatggcaaaaaaaaaaagttggactgtgattatattcatagacagcaccaactcaatctgtgaaacacatacagtgaagtggcaatcgtcctttcttgatcatctggcgcacatggccacatatatataaccaaagttgttttctcacaagttgatggcatggttgtgtgggacctataaccaccactcttttcctttttgatgaccactcttgttgctactac

SEQ ID NO: 160579 - DNA, 401 bp, Glycine max
tgagggtaagctggtgccagagcttgttctggtatatatcctccagcgaattgtaccaatcggagagctcatgatgcgcgttgcgcatcgattccaagtattgcagagcagccatggcattaagaaaaaaaaactcgatagcactgcgtcccctcttctatttttttttataccctaatttctttttttctttattcttttgaataaccttcctttatttattatagtttatgggttttgtttgtttgctttcctctcgcagaaacccattgagctagagtctggtttgcttgggcttaacttggcctatcaaaacccatctataaaaaaataagttatgattcatactgtatgtaatattgaaattgattttattacaaaaaaaattttcccttttaaag

SEQ ID NO: 160580 - DNA, 368 bp, Glycine max
gtgaccatggcatgagttttaaaaaaaaaataatcatctatcatctatcatctatctttcaatctatctttcaatatcttctttcatctctttctatagaattttctgagtcatttctcgtcatctttctaaaagtttttgataagaaaagttctttgttaaaaaacttgtgctattcatattttcattctcttctccctttgccaaaagaacaaaggactaactgcctgaattcttttatgtctctcttctcccttacaaaggattcaaagaactaaccgcctgagaattcttttgattctttcctttccccttagcaaaagatttcaaaggactaaccgcctgagatatcttttgtttccccttta

SEQ ID NO: 160581 - DNA, 447 bp, Glycine max
  unsure (1)..(447): unsure at all n locations
ctaagctttatattgattanacaattccaatgtcaggataattattaaagagaatgaaaataattttttaaatagtgtgtcaagaaaactaaaataccttttcaaaaaaactctaagtagtgtttcaagaacaacaaaagctgttaaaaaaattatttattaaacagtcaaacaaactcttcagatagtaaaaaaaaatttaaaaactagttgaaatgtcttgtcaaacataacttaaatcttgatgttagacccatctccattgatcgtgtaactattttatttgttgcanatattttcttgaatacccacataattttgttagaattgttatcccttataaagttccaatttcttttaattgtttcaactaaaatcgcaaataagagggtgtaattttaaaaaattttgaaggggggaaaaaaaaattttttttttgggtgacaa

SEQ ID NO: 160582 - DNA, 426 bp, Glycine max
agcttccatattagtgtaccatactacttgttctccggccaggctatcctgaaagaagtgtatcaacagcttttcatctttagaatgggcgcccatcttacggcagtacattttgagatggtttttgggacaagtcgtccctttatacttgtcgaagtccggcactttgaacttcgggggaataaaaacatcgggtactaagcaaagatccgtcatgtctgcaaacgggtagtccccaaatccttccacagccctcaatctttcctcaaggagatcgagcttcctcctttcttcagttgccgggggcggcccttccatggacaaaactattggcgatgctgcgatgttgggttgaagcaacgtgcctggtgccggccctttcgggatcgggggatagaactcgacatccctccgagcataatcttg

SEQ ID NO: 160583 - DNA, 411 bp, Glycine max
catgatggatacatggttttgttcttataggatctgattcgggcaagaatggatgacgggaagtgtggttttcaaaatctgcactttgtgcataatcttgctgtgaaattgtgcaacataattttgcacaagtgcagaaaaatgctatgcatttgctggttggggaaagagcactgcacaatgagttctggatgtttgctagtagatcccaacggtcaagatgtatgcttatgtactatagacttccagtaaaattttggagtcaacccaacggctaacgaattggatcgaaggaattgttactggggtctttaagtgagaaaagctgtgatttcggttggtgttttggcaagagattataatttgggaaacccccttttttttttggggccccttttttccacccatttt

SEQ ID NO: 160584 - DNA, 409 bp, Glycine max
  unsure (1)..(409): unsure at all n locations
agcttcttcagctgcgccaccactgccatgtctttctccctcaagctctgtgggtcccacgtgcagtgtgctttctgcaagctcacgtacgcactcttcattgccgataccgcttcgaacacctcctccattaacgccctcatctgcttcaatttcttttcctctcttgaaattaccttcaaacccatcaccatcttttcttcaccgtaataaccttgttcgtcttggggtttgtttccaaatgagtcgctgtggtattcctcctccctatcgtcggcgaatgagtggaggaagcaggaggtggtgaccctttggatcagatcggagaaattcgaaacctttctggtcattgctacgtgtttgtgcgtgcgagagagaaagagaggaagcanaagaataagtaagaaag

SEQ ID NO: 160585 - DNA, 391 bp, Glycine max
  unsure (1)..(391): unsure at all n locations
tgttatcaaggtacatgaactgtgctagtagatgtcattttcatgcaacgaaaagagttcttaagatatgttaagggcacaattgattntggaataagataccattaggttaaaaacttcagacttcttggttattctgatagtgattgggttagatgtgttgatgatatgagaagtacttcaagttatctttttagctttggttctgaaattttttcatggtattcaaagaaacaggaagttatagctcaatccatggcagaagcataatatgtagctacaactgctgttataaatcaagctctctagatcagaaagcttatgacaaatttgcatatggaacgacaagacagtacgtaggatattttgtgtgattaaaattnccgaaaaa

SEQ ID NO: 160586 - DNA, 413 bp, Glycine max
  unsure (1)..(413): unsure at all n locations
ctgcagctgtaaagtactgccatctgtatgaaaccatcatttggctttggaaataatacaatctctttggcaattttttgttggaataattgaaaaaaagacctggccaacttggatgctcctggactttcggttatgtcttcaactgcaccaaagacattgttcaataggttatatgaatatcatggccattgttgtaaacctaacactatgcagccagatgcatgttctcatattctttaactctcttccctcccccttttctccttttatcagatttgcaaaaagattaanacattattttcctttgttgaggattcctcatcctcctgctacgccttttatttagcaaatattgttacttaaccttacataanatgataaaatggaagattgcccaacagccagaaata

SEQ ID NO: 160587 - DNA, 435 bp, Glycine max
tcatgatgatgaaccaagcaattgtgatgatgcctatagcccaagtgattgattcaagattgattcaagacttcaagatcaagcatcaagaatccaatccaagattcaagagaagaaatcaagaagcaacaagtcaagacttcatataggataagtattaaaagaatttttcacaaaccaaatagcacaattttgttttacaaaagaattttttcaaattttctaagttaccagagtgattactctctagtaatcgattaccaattatcagtaatcgattaccagtgaccagtttggttttcaaaatattgtcaaatgggttgcaacattccaaaatgattttcaaatagtataatcgattacactatatttagtatatttccggggaaaatttttaaacccccaaaaaaagggggttttggggggggaaaattg

SEQ ID NO: 160588 - DNA, 375 bp, Glycine max
  unsure (1)..(375): unsure at all n locations
catcatccatatctgtgtaaaagtggtcatgttggtgcgcatgatccgcactcttctctttgcagtgacacaggtgaaatcttgccccggtatgcatagtagttgtgtgatagccaccccctctgggtgtgctcggatagttggtcgccctctaatatcagggggtggcccaggaactgataatagaaaactactancccctcacccgggagcgcacgcctcgattgagcattaagggcagaggaccttaaattctcttaaggtgtggatatggagcccactgaaagtgaggatgcgtacccctctaaaggcgagggcgtgtagccctctgatgcaatgacgtgctccctctgaagtgaggacgtgcatcttctg

SEQ ID NO: 160589 - DNA, 430 bp, Glycine max
  unsure (1)..(430): unsure at all n locations
gtcatgctgctcaattgctcgagggtgctgcattttagtgcattngtctgtatggcggtcagcagacgagcacaaaccacagacccttgcgacaggttcaaatttctgattcaaggccatctgggttaccaagttgaccaacgcatccagttngccttcaagcttcttaatttcagatgatgcagatgggtttgtagctacctcatgcactcctctaatgactatggcatcatttctggcgctaaactgttgggagttggaagccatcttctcaattaaatttctggcttcaacaagagtcatgtctccaatggctccaccaatggcagcatctatcatacttctctccattttactgaagtccttcataaataattaattttgggggggggaaaggggaaaaaaagggtgaaaaaaaaaaaaaaaaccc

SEQ ID NO: 160590 - DNA, 449 bp, Glycine max
  unsure (1)..(449): unsure at all n locations
agctntccttggccttntaagtattntattgactcgngatcactatggatgacaaactctntgggtaataagtaatgctgccaagtttggaaagctctaaccaaagcatacaattccttatcataagttgaatagttaagggcagcggctcctaacttttcactaaaataagctatcggatgtccctcttgcaacaaaacagccccaatacccacatttgacgcatcacactcaatttcaaatgattntgcaaaattaggcatagcaagaatgggtgcattagttaacctatgtttgagggcagcaaaggcctcttcttgtttcttaccccattttgaaacccacattcttcttaacaatttcagttagaggtgcagccaatgtactaaaatccttaacaaatttcctatagaaactngctaaaccatgaaatcccctcacctcactca

SEQ ID NO: 160591 - DNA, 422 bp, Glycine max
  unsure (1)..(422): unsure at all n locations
cattcgtgaactattatactaagcttggctaattatgctaaactttcgtaagctacttgttctgagtctagtcttacatgagggatctgcggacganactcagtttaagttatacatgttctcttaataatgcttcgattttgaacttaattcaggctaacattagttccctgtgttcgatactcggattcatccgttttaattttaaatacttgacgatccggtgcgctttctggtaaacccccattgaaatttccttgagacataaatgaacaaaaagtaactgcaatagggaacaatcatcctaccacaaaatccatggaaatactatcccacttccactagggtatctctaaaggttgtaacttccctgaaggtctctaatgttgctaattcctttttaaaatttccccccctttttt

SEQ ID NO: 160592 - DNA, 400 bp, Glycine max
  unsure (1)..(400): unsure at all n locations
agctntaagagaaaccatataaactaatgtagttcctaaacaaaaatcaattgaggaagcttcgccaagtatccccattgaaaaacctttattcaaacctttcaaagttagtgagaaggctaaacgaaaaattaaggaacttagaaaaactaaatccttaactgaaggcgtaggtgacaatcatagtgaattactaaacaagatcggtagtttacttaaggtcattccaaatactccccaagcctcggaaaatacttcccaaatggtaacaagaagtacctccaaattaattaatgttattaatgaagatagtgactaaaactcagataccacaactgagatagggtcaatgtcagaaaagaatataaatccaattaattccaaacactggaaaacaccc

SEQ ID NO: 160593 - DNA, 398 bp, Glycine max
  unsure (1)..(398): unsure at all n locations
tgagtttaaatganagcctatataaagaccataaatcactgtagtattgaatatgctcttttatatttgtagctgatgtatacatgcatagataaaataaaaatccatatttgcagataattgcttaaacaacacccttgatgtttaaatgttttaatggatgtagcttttacttttaaaatttatctcaacttcctctccagtcatcaatattttatttcaccattagctgcattgcttccatttctgatatcacacgagtgtgtatccccttttagttttcaaacgaaaacaagttaatgcagtttatcaatttttgacaactttcaaaatttctaaaattggccaaaaaaaaaatttaaaatttttaaaaatttgtgggggggtgtttaaaaaaa

SEQ ID NO: 160594 - DNA, 387 bp, Glycine max
aaaaaatataatagcaaatggatattgtcttgccatatccttcatcagctacagttgcaaaagaatccacagatttgcatctcttaaccacaagaccatactcatttcaaagcaccatactcattcacaaaagtgtaaattgaaatgactcactgagcatcaagaactatacttattcattatgacttctgaaggtgaaaagcatactaaagtaccagatcaaagactatcaactgcctcttaaaaccatacacatcagcgtgtcatccccctcttttctcccttctggttgctctaattacaccttagagcactagctatgtccaatgcaggccatatcaatggagtggattttccaccaacaaactgctgcttaaaacaattaat

SEQ ID NO: 160595 - DNA, 458 bp, Glycine max
tactatagcttataacctcgtgatgtccttcttgcttatgtcaccccctcttttatttatatttctctagctcaaggagtgcttgccaccctttgtaaatcgaaagagacataaatcattcccttggttggaacgatccatcatcgctatatgctaactatcaatatgaaaaactttattgtaatttatttcaaactcttcaattacatgattaatgaatgccaatcgtgaaaaactaaaactgacaatttctagatgaattgcctaaatgtaaaacgatcgaaataataaaatcatgtgcctcatgatagttctacatgttatcataagatgcattaccagaacaactcaacgtgaagttacacactcaacatgcatacatgtggtgataatttgaatttataattttaaaacccccaaataaaaaaccccgctttttttaccccccctaaaaaaat

SEQ ID NO: 160596 - DNA, 383 bp, Glycine max
taccaagtatgccatacaaggatgatttactttgtgaggcatgtcaaaagggaaaacaaatcaaaaactcttttcaagtaaaaacattatttccacctcaacacatctaaagttgttacatcttgatatgtttggtctaactagaacaacatccataagtggaaagaagtatgaacttgtcatagtggacgactactctagatgttgaattagagtgtttgaagatttgaagactagtcttaagatcttttggttttaataattttgcaatgccaaacatatttctaaagttatggaatttgtatcggatgttcttagacttatcatgttgagtgtttaggctttgtggttatcaaacatgaaaagatataaaaagttctatg

SEQ ID NO: 160597 - DNA, 420 bp, Glycine max
  unsure (1)..(420): unsure at all n locations
tctcaggaggtgagcttanttatgagaggggtgtgtgtttcttatctctancttctcaaggaagtgttctcaaagaagcttctcaaggaagttttctcaagaaagcttctcaaggaagttttctcaagaaagcttctcaaggaagctacctagtctataaatagaagcatgtgtaacacttgttgtaactttgatgaatgagagtcttgtgagacacaactcaaagttcaacttctctccctttttcttccttcaatttcgtgctcccccctctctctttctctccctctttctgttcctccattgaagcattctctccaagtttcttatccaaggctcatcttggtggtgaagctccttcttccatggatttatttccccctttaaaaatttgggggggaaaattttgggtggggggcc

SEQ ID NO: 160598 - DNA, 244 bp, Glycine max
taaaggaaccatatatacagacctagtcactgtagtatagtatatacgctacatacatggagatgatgttaacaagcttgcatgcaatagatgagcatatttgcgcatatgtggagtaaacaacacgataagatgtcacaatgcactaatggatggagcttgtacactttaaattgacctcgacttcatctaaagtcatggatattttatctcaacactaactgcatcgatggcatctatgata

SEQ ID NO: 160599 - DNA, 360 bp, Glycine max
  unsure (1)..(360): unsure at all n locations
cttcttctggcttcaattcttcagtgggttttccttctgtgtccagcatcttgggatgttcccagcctttgatgacagctttccaggttctgctatccagtgatttgaagaaggccaccattcttgctttccagtattcatagttgcttccatcaagaattggtggtctgttcactggtccgccttctttctccatgttcatcagaatttatctccctagatctcactcagtgatttcgagtgcctgctctgataccaattgaaattctgataccagnggacagatgtcgtaccggatgtcacgacatcacgcttcagaacatgcagataatatgtgtccgtatgaacagattacacagt

SEQ ID NO: 160600 - DNA, 415 bp, Glycine max
tttcacatacaacattcaagatacccttctatttcctccactatgcttgaatcccatggtttatagctctatttattaatacaaacatgaaagcatatcttaataaaacagagttgcatgaacagtatctgatccgcaagagagagagagttgcacgaacacttctagacccgtgagaaaaagtattgcgtcaacgattctagatctacgagaaagagaatataagcattttggacacaaaactatattagagtgtgaaattacattgagaatagaaaaaaacgctgtgaagaaccctaaaccaaaaatgagagttggagtttgggtgctggtattttggcatatcaaagggagttgtaaattttttttttgtaaaaaaaaaatttaaagaaattttttaaaaaaaaattttttt

SEQ ID NO: 160601 - DNA, 448 bp, Glycine max
  unsure (1)..(448): unsure at all n locations
ctgcaagcttagccaaatctgactttctttttcctgacccaggtgagaatgtaatccttaccctcggaagcaaaatagaatagaagggaaatttccaatcaaagaaaagagaaggaaaatttccagtgaaagagaaaaaagaaaagaaaggatattcccaatcaaagaatgggagaaagaaaaaagaaaagaaagaaaattcccaaccaaagaatgggagaaagtaaaaaaaggaaggaagctcctggtcaaagaaaccaaataaaatgtgcagagaggtctttggaccacacaatatctgaacagtacagaattgtcaccaaatgaacaataaggaaggaaaggaaaccacgaccttaaatggtcttctcnctttaattaccaaccaaaatcccgtgcgctagcgaccttttttctcgcccccacttaacataaaaaaaaaaaaaaa

SEQ ID NO: 160602 - DNA, 414 bp, Glycine max
cgactcacaccaaacatggcaagttcaacacactttcttctatctcttcacaaataactatcacaaagcataaaccaagtaaaactacccaccatatctcccatagccccatacccacgaaaatttatgtgagaagaagtctacccaaacctgaaatttcgaagtcccacacgtagagatgcgcttcacgactccgaaaatgccttcctttcgcgatttggagcagaaatggctaccaaaggttggagctttgttggagcttcaatggtggaggaagaagaagagaatggcaacgtgagagagagaggaaagagttttctgaaattttggggctgagtgacgagagaaagtgttgctttttggtttaaaaaaggggctttttttttttacattttaccttttattttttttttt

SEQ ID NO: 160603 - DNA, 345 bp, Glycine max
gactacaccgctcctgagtatgacattcaccgttttacgagcgcggtacaccagcagcgcttcgaggccatcaagggatggtcgtttctccgggagtgacgcgtccagctcatggacgacgagtatactgatttccaggacgaaatatgccaccggcggtggacattactggttactcccatggccgagctcaatccagaaatagtcctttgattttatgccaatgcttggccaacagaggaaggcgtgcgtgacatgaagtcctgtgtaaggggtcagtggatcccgttcgatgcatatgctatcggtcagctcctgtgatatccgttagtgctggaagagggc

SEQ ID NO: 160604 - DNA, 453 bp, Glycine max
  unsure (1)..(453): unsure at all n locations
ctatantatactctatcttagcatatggacccgtgtgtagcccagttgcatcatatcttgcgtactactcatcacctctatcatatgtaataattgtcacattaatgtctaactgcccttctacttcatgtgaggtaattgctaaggcatccattgtctacgatatctcgggcagtaagttgacataaccgtaacgtgaataatcatcaataatggtgataaagtatcattcctttccgaaagaactaacatcaaaaggtccacaaatattagtatgcacaatttcaagaagttgagtgcttcttgtagctactttctttgtatgttttgcttgatttcccttaatacaatccacacaaatatttagattcgtaaaatctagataagggaaggaaaattttttttcaaaaatttttttttcaacctttgttttttttaaaaaaaatcaatctt

SEQ ID NO: 160605 - DNA, 407 bp, Glycine max
  unsure (1)..(407): unsure at all n locations
tatcctggaatttgctttattgcctccagcagaggtatgtgtacctctacttttctaaatgtttccaagatctccttctcggcctcttccatttttttgttggaaatttctcttggagggaatggaagaaggatatgctgcttctctttaaattcacctgcatagaaattgttaggtaacttactctttaaatttttgtcatcatctttttctggagtaaagtgaggttgggcaggttcatctgcggatgaagaagatgttgctggttgaggtccttgacactgctttcccgacctcaatgtaatggcactcaccattttgggattctggacagattgagaaggtaatctgtcagaattctgggactgtngttgatttaactgtgtagcccattgccccatctgatt

SEQ ID NO: 160606 - DNA, 434 bp, Glycine max
cgggttatattagtctaaacttacaagggatcattgtttcgtactttaagcttcagcatataacagaagaacatgattaattagagaaatatcttcatatgcatcaactcgtttgttagaaagacccaacgctttttacctattgctgtcaactttttaattacttgcatttactgctttttaacatagcatctagtttactttggtttatattctcaattatcaatgtttgttgacacaatgtgtgacaccctctaccctcacaaataatgaataaaaggaaatatcattcggaattttatgttttttaaaacacattgactttaaattgatttcaaaagataaagggttcgcattcacttaatgaaaaacatttaggttgatagagaaaaaaaaatattttttgtgggggtgttttttttcccccccccccc

SEQ ID NO: 160607 - DNA, 435 bp, Glycine max
  unsure (1)..(435): unsure at all n locations
catgcaagcttatagaacaaattgcctttnnctttttcaatatgcatgtgaaataggaagcatctacaagaattaagcccaagctattgtgccaaccaataatggggcaaaacacaccaaatgattatgatgatagatggctcataattctcacaaaggtgaacttatcactctcaaattgagctttcaaaactatcatgacatgtaaaggaaaaacaaggatttctagtcacaaaatgtcaagagacttttattttcagaacaattacccattacttgaacatattctataattcaaagacaaacatgctaatttaatgcagcaaaactaacaaaattaaactataacccaacaaaactaactaaattaaactaattaacacaactaacaaaaccaaaaccaaagaacactctccccccatacttaaacaacac

SEQ ID NO: 160608 - DNA, 369 bp, Glycine max
gtgatgatatggtcttcaccgacaaaaggatcaaagtttgtctgaaaaaaaggaaaatttagtcatcctgcttggacgaatgagaaaactggggcaaattaagagggtgagaatgagggacaagcccatgctgtgactgccattcctatacagccaagtttcccaccaacccaacaatgtcattactcatccaataacaaaccttctccttacccaccgcccagttatccacaaatgccatccctaaaatcaaccacaaatcctacctaccgcacttccaatgacaaacaccacctttagcacaaaccagatacatcaaccaagatatgaattttgcagcgagaaagcctgtagaattcaccccaattc

SEQ ID NO: 160609 - DNA, 456 bp, Glycine max
  unsure (1)..(456): unsure at all n locations
agcttgtaagagaatagcaactcggaatctttattcaaattgaataanaagggatgtagagttggcgatcttgtatggagaatgagaggagaagcacagaaggaccatgctagaggaaaaattactccaaactgggaaggaccctttagaatcactgcaaaaatgcaaaatagagcataccgacttaaaaagcttgttggaaaggaaattccgaggacctggaaagcaacacacttgaacgatatgtaacatccaaaaaattcaattatagtaattttgaggtattactattagaaataatagtaatgatagcttagcaaggaagttattaaattaatggagttataatagattaggaataaagaacaaatgaggaanaaaaactcattcttagtatgaattagagaaagtcaacanaagtcaacaacgtcaaccatagactactagagtcaatgg

SEQ ID NO: 160610 - DNA, 87 bp, Glycine max
cgaatgttcgcacactccacttgtggaaccttcacccgaccatcacacctgactatacttatcatacacctctttggacataggatg

SEQ ID NO: 160611 - DNA, 427 bp, Glycine max
  unsure (1)..(427): unsure at all n locations
gcttgagcaaattctaacaactgcatctttntactcagatgtatgatttagttcggtaatatatcgagacgctcgtaattgaaatcggaagctcgtagcaaatgcaaaccgcaataactattaactcggatgtccgattgtgtcccataatatatcgacactctcgaaattctgaaccgaagctttgagcaaattcaaatgagaataacttttaactcgaatgtcggattgagtctcgtaatatatctacatgctcgaaattgaaaacataagctcttagcaaattctgacggcaataactttgtactcagatgttcgattgagtcccgtaatatatcgatacgctcgtaattgaaaatggaagctcgtagcaaataaaacgacaattacattaacttgaacgtctgatcgagtcctgtaatatagc

SEQ ID NO: 160612 - DNA, 442 bp, Glycine max
  unsure (1)..(442): unsure at all n locations
atgttctcaatntcaagcgtcttgatatattacatgactcaaccggacattcgacttanaagttaatgtcgtttgaatttgctacgagcttccgttttcaattacgagcgtctagatatattacgggactcaatcagacatccgtgtaaaaagttattgtcgttatgaatttgctcagagcttccgtcttcaattacgagcgtcttgatatattacgggtttcatttggacatccgacttataagctattgtggtttgcatttggtcagagcttctgttctaaatttcgagcgtgtcgatatactacgggtcacaatcggacatccgaacaaaaagttattgtcctttgaatattgctcagaagctttttgggtttatttttaaacaaaaaatatttttttattttttgtggggggaaaaaaaagcctccctcctctggatt

SEQ ID NO: 160613 - DNA, 430 bp, Glycine max
  unsure (1)..(430): unsure at all n locations
agcttcttatccaggcactctcttggttgtgaagcctctccttccatggcttattctctagtggatggcgcctcctctcacctcttctcctttatctttcactgaaactccatggctgaaaatcaccattgaaggaccttagtgaaactcaaagatctagccttcattgaagcttctcaagcaagcttccatcaagtggtatcagagcacaagagcttcaagtatgtgctccttaaaccgccaattttcagctttaccttctcctccattgtgttttcttcattgttctccatgtatctcctcacatgtcttgtgctgaatgttgttaacatgaatttttataatttccaccaattaaacttgctatataagctgatttgattctttatggtcnaattcttgttcttgttctgaaccatgaattgtgttg

SEQ ID NO: 160614 - DNA, 359 bp, Glycine max
  unsure (1)..(359): unsure at all n locations
ctttggggaactccatgttcagatctgtatattctgtgcacattcgtcatttcttggtggctttttttatcatgacaacattgctgagccaggtggaatacttgactcctccgatgaagttagcattggggagtttgtccacttcttttctaatagttttacgttgttcctcttctatcttccttttcttctgcgatatcganttgacctgtggacagatggcaagcttgtggcagataatgctaagttgaattcttggcatgtcaaatggatgccaagcgaacaagtttgtgtttctatattagggacaattttaaaggggggcccaaaaaaaaaaaaggttccccccgggttctccc

SEQ ID NO: 160615 - DNA, 441 bp, Glycine max
  unsure (1)..(441): unsure at all n locations
catggtgaatcaagagtgattcatagatgtttgatgatacaaaagagatgacaaaggttatgacaaaaagcttaaaggtcaatcaaagaatgagttgaagatattcaagatagaatcaaaaataattcaagattcaagaggaaagttgatttcaaaaatcaagaatcaagattcaagagatcaagatttcaagaattcatgattcaagagatcaagattcaagactcaagattcaagaatcaagagaaggcttaatcaagataagtatgaaaagttttttctcaaaaattgagtagcacatggatttttctcaaaacatgtntaccaaagagtttttactctctggtaatcgattaccagattgttgaatcgataccagtagcaaaatggatttgaaaggttttcaaatgaattacaacgttccaattgatttaaaaagct

SEQ ID NO: 160616 - DNA, 440 bp, Glycine max
tctcgcatccgcacatggaaagacttgattactgccttcattatgcaatatgagtattatatcgacatggctcccgacagaacccatctgctgaatatgatcatgcaagagcacaagtctattaaagaatatgcccaacggtggagagatttggcagcgcaagtggcccctcctatggtcgagagggagatgatcacgatgatagtagatacattgccagtgttcttctatgagaagtaggtgggttatatgcccgctagctttgcggatttagtgttcgcgggagagagaattgaagtaggcttgaagagagggaagtttgattatgtctttcccaccgacattagaaataggaggattggaacagctggagcataagtaaaggtaaaaaaaaaaggggggaaaaatgggggggggggggttttttgggtttcacccac

SEQ ID NO: 160617 - DNA, 392 bp, Glycine max
  unsure (1)..(392): unsure at all n locations
aatctccatggattcaacttancagggtggggaagtaagattggaatttcattaataacccaaatactacaatttctaaaattctcaaagctaaatatttttcaaatatttgatacttggatgccaaactaaggcataaaccaagctatgcatggcatagtatttttgcttcacatatattggtcaaggatgatattttgtggagaattgatgatagttccatcaatatttggagccaaccttgggtgcaagcatcagcaagctcatatatcacttcatctaccccgctcggccttgaggatcttaaagtcagtccactcatcaaccaccaacaacaatgttggcatcaagttgtggtacaacaaatttccaatgacaatgactagagaaat

SEQ ID NO: 160618 - DNA, 444 bp, Glycine max
ctgtccgatgcagcagtaatgatggcccgagttatgttgtggaacggttatgaacccggaatgggtttatgcaaatacaacggcggcataactagcctgataagtgccaaaggaaatcgtgggaagtatggtttaagctataagcccactcaggcagatataaagagaagcatcgcgggaaggaagagcggtagtcaaagcttgcggttgagacaagatagtgaatgaagcccaccctgccacataagtagaagctttataagcgcgggtctgggggacgaaggtcaagtggtcgcgatatacgaagatgacgttccgagtacattggatgtggtacgaccatgccctcctgattttcaacttgggaaattgggcgtaaaatctgggggggaaaaagggggaaaaaaaaaaacacggggggttccccccccccccccgaatttt

SEQ ID NO: 160619 - DNA, 329 bp, Glycine max
ctgcagcttctcgggctttttgaaagtttcttttatgcttctttgagaagctacattcttatttattcacccctttattaactaaattaactttcttaataataattaccgatgaaaataacgcatcaaataatcaaacatcaaacataattactaataatatatagaattatatatcagggtgttacacatcatatattgagacgctcgaaattgaacaatggaagctctcgaaaaattaaaattgtcataaattttcacacggatgttcgatcacgcacatcatatatcgatacgctcgaaataaaaaaacggaacctctcgagaaa

SEQ ID NO: 160620 - DNA, 365 bp, Glycine max
actaagcttctatccaggcaattctgggtggtgaagctcactttttcttgtcttattccctagcggatggtgcctcccctatgctattctcctttgacatccgctgcatctccatggtgaaaaatcaccatggaaggacctcattgaagctcacagatccagcctccatagatactccacaatcaagcttccatcaagtggtaatcaaagcacaacagcttctattatgtgctccttaaacctccattaattatttttctttaccttctcttccattgttgtgacttcatgattctccatgtatctgctcacatgtattggtctaaatgttgttaacatgattctttagagcttacaccaattaa

SEQ ID NO: 160621 - DNA, 360 bp, Glycine max
  unsure (1)..(360): unsure at all n locations
ctgcagctcatcatagttaaggttntacttcattctccaatgcatacgatgcaaggtctttgaatgatgatttggttttaactcctttagtttgatctccaatgattcaatcttgaggataataatgaacaaattttcaatccttcgtctgcgatggttgatttaatggttctttagtctgaagaaggtctttattagattgtttgactttatctattttagatacttcacatagacctatctgcataatcatcctcaagatctgatagcttcctatcaaatgttagttcatcattaaaagcgtgattcttactgcttatgcccaaaagtgcttaagaagtgagttctcatatagcatga

SEQ ID NO: 160622 - DNA, 443 bp, Glycine max
tcttatccaaggctcatcttggtggtgaagctccttcttccatggcttattccctagtggatggcgcctcctctcacctattctcctttgtcttccgctgcatctccatggtggaaaatcaccattaaaggaccttattgaagctcaaagatccagcctccatagaagcccccacaagcaagcttccatcaagtggtatcggagcacaagagcttcaagtatgtgctccttaaacctccattaattttttgctttaccttctcttccattgttgtttcttcattttctctccatgtatctcctcacatgtcttgtgctaaatgttgttaacatgattctttagagtttccacctattaaacttgctatagaaggggtagattttttttggggaaaattttttttttttttccccctttttaaaattttgtggggggtcaaatt

SEQ ID NO: 160623 - DNA, 448 bp, Glycine max
  unsure (1)..(448): unsure at all n locations
agctanctgaattcagatcgaattaatttattttttctaaccttggccagcttagcagacctaatcagcctcagatgcaagggttgggcgctaagtgcttgagactcactgcttattgcatgaacagagatgcgcttagcatgaggcttgcgcttatcgaaaggactattttttttttcagaaaatattttcttgttatttttcagtcctttttccttgaagttgaaacccttatgttaagcattcaaagataggctgatatactcctatctacagattatatagcaagttccaaatgatttaaatgcataaaaaacaaagataacagaaattaaaactgggttgcctcccaggaagcgcttctataacgacattagcttgacgttnttacctcactgggtgatcttatgttttggttcctactatcagaacctcttgacctccttca

SEQ ID NO: 160624 - DNA, 434 bp, Glycine max
  unsure (1)..(434): unsure at all n locations
cttctattgatgtggcatggagacgcactgtgtggcttgctgtcttcttccggggcctttgccttcgttcttcctttatgagatatttttccttatgtcaacttgcataggtttatatcctaacccaaacttcccgcggtttcctctggtgcttaccatgctagttctaccatcgttgttcttgcccaaacccattccgggcttgtatccgtaccccaacatcaccctggccaccatcattgccgtatcatacatgcgatgctgcccagagagggaatctaatgatgcaatgcttactacctcaaaagattggaaagccgtttccaacgactccttcgtggcttgcacatatggcataaaggaaggggcaacttaancaaagaaaaggtttacatttttttggggggcgaaaacacaaaaaacacccccccccc

SEQ ID NO: 160625 - DNA, 415 bp, Glycine max
  unsure (1)..(415): unsure at all n locations
gctgaatgtaacggaagttctattaaaatttaaacgacaataacgttggactcggatgtccgatatagnnatcgaatatatcgagacgctcgtaattgaaaacagaagctctgagcaaatttaaacgacaataacttttgactcggatgtccgattgtgtcccatatgatatcgagacgctcgtaattgaaaacggaagctctgagaaaaatcaaatgacaataacttttaactcggatgtccgattgagccttgtaatatatcgagacgctcgaaattgtaaacggaagctctaagaaaagtcaaacgacaataacttttgactcggatgtgcgattgagtctcgtaatatattgagacgctcgtaatttgaaactgaagctctgagcaaattcaacgaccattacttttgact

SEQ ID NO: 160626 - DNA, 356 bp, Glycine max
tactcacgcttctgttttcaatttcgagctactccatatattacttggctcaattggacatccgagttaagagttattgtcgattgattgttctcatagcttccgttttcaattacgagcctctcgatatcctatgagacacaatcggagaaccgattcaaaatttattgtcgtttgaatttgctcaaagcttcagttttcaattacgagcgtctttatatattacaggactcaatcagacatccgaattgaatgttattgtcatttgacttttcatagagcttccgttttcaatttcgagcgtctcgatatattaaagggctcaatcggacattcgagtgaaaagttatttgcgt

SEQ ID NO: 160627 - DNA, 368 bp, Glycine max
  unsure (1)..(368): unsure at all n locations
tgcagcctattaattttattattttgttgtgaaatccttcgctataaccgctntacatatattacagtatgatttacaggttttttcaagttgtattaatattagtctaattaaaattagttctctaaattaagtaaacctatttcaaaatgagaaatttgtatgtaaaaatattcacaaaatagtttaatttactttctttgtagctagcattatattacatataaattttccttatatgtaattcaatatattaaatgattataagaattctggacttataaatgattaattgtacatatgatatagttgtgcattattatgataagttgtaacaataataattgacacacgtgataatgatttat

SEQ ID NO: 160628 - DNA, 263 bp, Glycine max
actgcgcccccaaattgcgcatgtagaagagataattttccgggctctcgtgtccgtaaaatgcattcatatcatgcatcgcataagcatctcttcataacatcataatggacatatcctgcatttgtccgttatcatattccggcctcacattttgcatgagtcatggcatcatcatgcatatgcgttcaacaaactttttgatctacaaaaatgcataccatttgttttcatgtgtgttcattccttgcgtttttacttat

SEQ ID NO: 160629 - DNA, 449 bp, Glycine max
  unsure (1)..(449): unsure at all n locations
gcttttctgttatgtcttgcatatttttttttgttcaaaaagtcatatttaatcatcaaaatcacttgatgctntgcaacacgtaagatatatttgttactactgattgttagtttatatgttaattaccgcaaccaacttgactcgacacacacggtggattaagcacatgtcgaatattatttgaataataatcctaattntaaaaaacatatataatatttaaatttatgtgtcaaaaatattctaaattatatataattataatattttttagtgaaactatatgattgtaatataattatatatataatatgtatggattgcaatctgagaatttaaatttggataaaattcattntgcagactcaggttgcaaaatcaactctcctcttgcttgcatttcagattgaattacaaagttaaattacaataaaacttagtttaag

SEQ ID NO: 160630 - DNA, 442 bp, Glycine max
  unsure (1)..(442): unsure at all n locations
tatcgattataatgaactatgaacacatactntgtctttttaaaaaaatagacagaattccttttgtaatctcaacatctcaaagataacaaacatttgtcaacacgatagatgttaccaagatttatcaaacaaagtcccatcattcaaatatcataattgccatgagttctcaaaatgaagatatccaactataacattttaagcctaatgaattgtatgtaacgggaaaaaaattacttttttccttattggtgcattatgcgaaagttgaatattcatttaagataatttttaattgtttatttaacggttcataagcaagttatttttaataatttttagtattttttaaatgttacttcaagtaaacaatgtttttttgtttaaaaaaaaaaaaaaaaaaagggggcccccctttttaaaaaaaaaaattttagat

SEQ ID NO: 160631 - DNA, 427 bp, Glycine max
  unsure (1)..(427): unsure at all n locations
aatggaggaattcatgatcacacaagaatatatagaaaacaagtgtngttgttggttctgcatataaatcatcaaacttctattatttatactgctgccctgcctgtttttttcttcactntcattattttntacctcttttattattgcgccaaatactaaaatattcttccattctttttttacgctggcctctttaaattatcgatttaattatccaattctcccgaattaattcttagaatacgaatttttttgtatttactgtatctatctccctttntaaaattcctatatacactaaattcttttaggtacagcttttttttacaaaaataaataagaattattntattntaatttactctataatactgcttaaatgaagattnggtgtcattaaacttcaaaatttaactattattta

SEQ ID NO: 160632 - DNA, 440 bp, Glycine max
  unsure (1)..(440): unsure at all n locations
tgaatgagtttcatgcatcatggaacaatttcactttattagtgggtcccaattggcttcctaattttcagcttacctctttggatgtgagatcctggcagtaaggtgccaattttccatcatggattcagtcacaaaacaaacttcaagatgttggactgtctaatacggggattttagattctattctcatacggatgtgataagcactttctcaggttttgtatttaaacctctcttacaatcatatccatggtgagcttgngactacattaaagaatccattatctatccatactattgatctaagctcaaatcacttatgtggtaaattatcctatctttcaagtgatgtgtttcggttagatcttttcaaaggccaaaaatatttttccaaaattttttttttccccttttttaccctttttgtgggaatcatg

SEQ ID NO: 160633 - DNA, 408 bp, Glycine max
  unsure (1)..(408): unsure at all n locations
gatccttaatcacctgcggctgcagcttatgatgtgaacaactttttgtgttgccacaagcccagatcattgatgcgcgattgattcacgactccgagatccagcatcatgaagctaagtcaagattctagagtcatgagaagaaatcaagaggctgtcatgtccgacttgctataggataagtattagcagatattttctaagaccgaatagcacagttgtgttttacaaaagagttttctcaaattctctaagctaccggagcatatactttctggatatcaattaccagctggctataatcaattaccagtgaccagtttggttttcaaagttattgcagatgatttgcacacntccacaatgattttcgagatatgtaatcgattacacaatattattaatcga

SEQ ID NO: 160634 - DNA, 299 bp, Glycine max
tttatgaggcccaacttacatcgtgggcagtgtgatatcgtatccgaaaagctgacatgcttgcagactcaaaagttcagaaagataagaaagattgttatataagccattacaaaactgttagttcacttatacggtgttctgagattgaaagcaaatcgaaactgtatgcaaacatctattgctgttttgctttttctttaaaacaaaaaagatgtggtttaaaaacagtttttaaatgttcactcaaacagatttttttttaaaaaggggggtaatatagattataaaaaaaattt

SEQ ID NO: 160635 - DNA, 342 bp, Glycine max
aacacatgtttttaaacattaaagattagtttccgaaaaaaatgaacaggagggtgtaaaaacaagtgcaaatagaatccccaaataagctcaatagcataaatacagtaataaaagtccactgcgccatatgccctaatttaaagcccaatcactaaaacaattgtcgccgccgccgccgcacgaaattagggtttaccgttccactcgatcatctataaaatgcaaggcaccagtagtgtcagtcgcatcttcgtttgtggcgtcttcaaattaaggatagggttagggttttttttgttgaaataaaataactattatgcttcttgctttgtgtgtgtg

SEQ ID NO: 160636 - DNA, 298 bp, Glycine max
ctgaactacgtaactcaaccaatgaccatgtaccttcgcaacgtaaagcatcatactcaatctgcatatcttgtttccacgcataactagagagtgctgttttgacattcttaagttcaacgtgtgctgacatcaaacagggaatgagtattgacttcagtatgcctgatatgagactagtgcacatggcgtgcaggttatacactatcagcgctggccgtggtccataatcctcaaaaatgtaagctacaaccgtggatgtgtgatcttgatacgttttataggataagaggaaaat

SEQ ID NO: 160637 - DNA, 446 bp, Glycine max
gccgcttgcagctaacctacatggtcttgtggacttaactgaccagaaccgcattaagagcaacatacaaaaaactaggttaccatatcccgatccctcgtgataatatgataaactagccctgtcctatcaagttctaagaatcagaccagtttccactggtgaatgatcctacaaggcatgcatctgcgtgatcaggcaaaagcacactgaaatgacgtactaatagcatagaaaacacataaaacatcattaaatagatatacaagtatttacatcaagtacctacaaggaagaaccaacaaaggatttagctctctatatctgagaagcttcctttacaataaagagaagagaaaaatgaaggattgaagaaatgcaagtagtgggatgtctcctccacctctagaacctcacaatcactcatagattcatctcatgctctc

SEQ ID NO: 160638 - DNA, 425 bp, Glycine max
tcgctctgaaattacattgatgtttatgggaagaggttgtattctattttcgttttaagagtagtgtgccactggtaaaactaactttccaaatgtctgccttcgcatgaaatggccccgaggaagcttgcctcatatatgtccatgaatgacaatgcatccgaatgaactatttccgctccggagtatgatagtcaccgctttatgagtgctgtacaccatcagcgcttcgaggccatcaatggatggtcgtttctccgggagcgacgcgtccatctcatggacgacgagtatactgatttccatgaggaaatatggcgccggcggtgggcatcactgtttactcccatggccaattttgatccatatataattccttttggaaggattttttttttaaaaatttggggggaccccccccacaa

SEQ ID NO: 160639 - DNA, 375 bp, Glycine max
aaaaaacagttagttagtctctgaaaccattgacaacaatctgaaatggccaattatgggaaaagaatgatatacgatagtggattgcggcttacaattggttcattgactgagagagaaaaagtgtgtgtgggtggcaatataatggaacggctatgaatgcgattgaccattgtgatggtgttgagattcctgaaccatgcaactcaaggaataacaggttcgtacgttgcaatgaagattgcttcctacttttcttctgcaaggctcagtaaacactagatgtcatgattattaacaactatttttttgggaagaatttgtttaaagcgtaaaaatgttttgggggatcgcattttctcaccccccccttgt

SEQ ID NO: 160640 - DNA, 305 bp, Glycine max
  unsure (1)..(305): unsure at all n locations
cacgctgtcaaatcatcatacccagccaaattaattgccgaccaatatttagttttggcgaaatcgattattttttctccctcaacacccaatgaggagagatatatatgctcccaacttatttntagactccaaataagacaacaaccattcttcaaaagctgcagaaacaggtgaacccaatgtgagagttcaagataagtaatgtgctcattaagctctgaaccttctattttagcataagtgtgggctctagccattgaatcaaccaattgagcaatcggaatacccgataaaacaagaaa

SEQ ID NO: 160641 - DNA, 423 bp, Glycine max
  unsure (1)..(423): unsure at all n locations
tcagttaaatcaattataattagtgaaatgttagattctattgtcttaaatctagtgtctgtgtccagaatcagtgattatgtgttattctaatgagctggttagcatggcactatcaatggtggcagaagacaagcaaattaaccgtgttcttgatgaattatttgcaaaggatgtatcaatgggttgaacttattattattgattgccttattctgaagaaatttctatggtaaaattacctataggttgacttatggcangggaacgaaatgtgttcgaaagcatcataagttgttttatttgtacaggaagaagtggtggtctatgatattatgattaagggtcggaccaaaaacgataattgttttnnggttttttgganaccctcttgggggggcccttttttttataaaacccccc

SEQ ID NO: 160642 - DNA, 299 bp, Glycine max
attcctttttataaaacaattactgggatggttaaatataacaagacttaccctcttcatggattacttaaaattgaaaagttctataaaacacattctacaatgtgatgttttaacttacctctcttaaactaaaatacttaatcatatcaccttagtagaccttgcttcttgtactcacttgttttacatattgcatatatcaaccttttactatacgctttctaatcttatgcaataagcttaatagggttttttaaataggaaaccgcccttttttacttggaaaaacaagcttt

SEQ ID NO: 160643 - DNA, 440 bp, Glycine max
  unsure (1)..(440): unsure at all n locations
agcttctatagaggctggatcntttagcttcaatgaggtcctttaatggtggttttccaccatggagatgcagcggaagacaaatgagaagaggtgagaggaggcgccatccactaaggaataagccatggaagaaggagcttcaccaccaagatgagcgttggataaaaagcttggagaggaggcttcaatggaggaaaagaaagagggagagaaagagagaggggggagcacgaaattgaaggaagaaaaacggagaaaagtttaactttgagttgtgtctcacaagactctcattcatcaaagttacaacaagtgttacacttgtttctatttatagactangtagcttccttgagaagctttcttgagaaaactcttcttgagaagcttctttgagaaaacttccttgagaaactagagcttatctacacacaccc

SEQ ID NO: 160644 - DNA, 447 bp, Glycine max
tctgcatgtctagagagttctgagagagaaaggtccttgtttgacagtgtttgacagattttgttgtgtgaagaggaagctgttctaatgatcttgagatgagtttgtgagtgattgtgaggtcttacaggtggaggagacatccccactacttatatttctacaatctttcatctttctcttctctttgttgtaaaggaagcttcccagttatggaaagctaaatcctctgttcgatcttacttgtaggtacttgatgtaaatttctttttatctatctaatgatgttttgtgtgttctatgtgctatcagtatttcattctagtatggttttaccttgatcacgtatatgcatgctttgggtagggtcatttcaaaaaccaaaaggtgttggggggggaagaaaaaataaacaaattttttctttggggcgcccccctgattttt

SEQ ID NO: 160645 - DNA, 350 bp, Glycine max
  unsure (1)..(350): unsure at all n locations
tttacatgctntcaacaaatttcttcacggataactatcatgaagcagaaacctagcaaaactacccatcatatctnccaaaacccaatacccacgaaaatcaagtgagaaagaagtctacccacacctgaaatttcggagtcccacacgcagagatgcgcttcccgactccaaaaatgccttcctttcgcgatttcgagcagaaatggctaccaaaggttgtagctttgttggagcttcaatggtggaggaagaagaagagaatggcaacgtgagagtgagggagagaggcttctgaaattttggggctgagtaaggagagagagtgttgctttttggtttaaaaaaac

SEQ ID NO: 160646 - DNA, 418 bp, Glycine max
  unsure (1)..(418): unsure at all n locations
ggtaagatatgagtgctagttgtatattattgttgaattttgggcttattctttctgagcagcctctctgctttattggttacactgcttgtttatagatttgtgtaggcagaaattgtcctctgatcttgatgtgatagttaaaaacttgagattggaattcagtgaacttcattcatagcacaattctttatctagtgagttccaaattcagagagatctttatgccataaataaagctgaccttgaaagattaaaaggtaaattgtctctactgtgtcatttaatccctactgtgaactatgaaatcttgacgttacttgtttcaaccatgaaattctgtgttataatcatatagaatttttnttaaggaaatttgggcccccttttttggggggttttttataaaaaaaaaaac

SEQ ID NO: 160647 - DNA, 353 bp, Glycine max
  unsure (1)..(353): unsure at all n locations
atctttggatttgacgacgccactattatatttgggactcagagagagagaaatagatggcgcactcatgcaacaccattcattgctcctgaccagaccacgcctcttctggatctcaacatagcggaaattcatggagaccttccaatagatatatccaaccattatgttgccctatcagtcttatgatatatctcacctcgctcttgacattggaggtataacaacaatttcagaatataagtgggcttttcgctcctttcgctttattaatattgcttggtggcggancaaacaccggctgcaccttctttttctgtcaatgctactacgactaggcctgatgagaccat

SEQ ID NO: 160648 - DNA, 420 bp, Glycine max
  unsure (1)..(420): unsure at all n locations
ttcatgtgaatcctgcggttcctttcgttagtttngcgatcaagtcttggtgaaccactagtactagtgtttggtattttcatcttttcaatattacaaatgcaagtatatgctatatagtgcttgaaccactatggtttggttgaaggtggtgatatatatggagtgagatgaagatgattgaaaaactaagagatacacgtttatatatatacaatggaacgggccatggctgagtgtgtatgaaaatgtgagcaatacaaatcattgatagtgtcgctgataaacgttgagttgcactgtgcgccccacactgttaaatgacatctaagcccatgatatttattggatggtgtaaacgggaataaaaaaacttttggggggaaaaccaccccccccccccccccaaatttataaaaa

SEQ ID NO: 160649 - DNA, 444 bp, Glycine max
agcttgatgtgagaaagcgttgtatagtctgtcttcctacttttgtttgtttaccacagagtggtacctggagatatgtcgcgggggtcaggagaccttggggacatcaggtggggtgctattgcccaaaactaggcttgaccaatcctgacccaacccgggcatattcagtcagtgagaacctgtgatgtacctaaacaggcgagctcctgacagtcaatcaataaaagaacaaagaccacaaagcaaggaggcttgtgtggtggctggccagctatggatcttgagtgatatctggaatttggcctctgataattgattaccaagggtgtgtaatcgattacaacgattaaaaatggagataggaagttaagatggcctctgttaatcgattaccaaggggtgttatcgattacaacgcttataaatgaagaccagatgttg

SEQ ID NO: 160650 - DNA, 366 bp, Glycine max
tactcagctgataaaaattgaagatatatgagtcgttccttaaaggcctatagaatactaatggtgaagcctattgaggtttttttttttaattctttataaagaatacttggtagagcctacaaaggcttagagaatactaaggttaagcctagataggcttttcaaaataatactcatggagcttgcaaatacttagagaatattggttgtatgagcctgtggctaaccgatcattgtgcagagcacaatactaccaagagaaatgacaaaggaagtgatccacggtcacaactctgtagcaactcggctccacttttcctcctcttctttttcttttacgtttttcaagcatgctggatcttt

SEQ ID NO: 160651 - DNA, 445 bp, Glycine max
  unsure (1)..(445): unsure at all n locations
gcttataagaacaaaattgcctcaattattttcaaatatgcatgtgaattaggaagcatcaacaagaatcaagccaaggctattgtgcaagcaatcaatggggcataacacaccaattgattatgatgatggatggctcaaattctcacaaaggtaaactcatcactttcaaattgagctttcaaaactatcatgacatgtagaggagaatcaaggatttcaagtcacagaatgtcaagaacttttattttcaaaacaactacccatttcttgaacatatcctataattcaaagaaaaacatgcaaagtcatacatgcacacaaaattgacccaaaatattaaactaaaaatccgacgaaactaacaacattaacaaattaacacaactaacaaattaacaaaaccaacaaaactagcaaaaccaaagaacactcccncccatac

SEQ ID NO: 160652 - DNA, 432 bp, Glycine max
ctaagcttcttagttcgccacaatcccaatgtcatatgtggacctattattgtcactaatcgctaaccagttggcagtggtgacccctgtaatgatttactagtctcccttcccaaagtggtacaaccccaacgcgacctgcgtgtatcatatgggaacttcggggcatttggtcgagcaatgcatggcccttaatcacaatgtccatagcttgatcgatgcgggatggttgacgttccaagaagacgggccaaatgtgaatatgaaccttcttgccaaccatggaggtttggatgtaaatgcaattgatgcgtgtaaactgcaaaagcctaagcatttaaaggatgtaatgacctctaagaagtttattttttgaaaggaccccctttttttgggcccccataaatgggttaaaaaaaaaagggggccccc

SEQ ID NO: 160653 - DNA, 473 bp, Glycine max
  unsure (1)..(473): unsure at all n locations
ggatcttaagtcaccgcggctgcagcttgtagttntaaaaattatgaatttaatgcaccanattaatttattggatgtaaaatttactaaaaaaatatataaaaaaataggtaacaaaggcaattaatcctttatttaataataacaatagattttttaataacatatatagcttttattatttaacgtgcgtagcttttatctaaaaaacttgtataacttttatttaatataatctaatacatggaaattagttatgtttttatttttttcaaaatttatttcgtattagaaaaaatattttgcaaaaaaagtaatacaaatgtttttttttgtaatcttatatcaatgcaagataaaaaaaaatatttgttttatacaaaatatnntaatttttacaattatcactgtacatgtattattaattctctagaatacnatatatanaaaattacatagtaataagacattag

SEQ ID NO: 160654 - DNA, 382 bp, Glycine max
  unsure (1)..(382): unsure at all n locations
ctcctgcatttcttctttttcttgtcatttttctttctttacccactcctcacgtttggttttttatggaaaaacaccataactaaacgcgcctcaaggcatccctatctcaccagatccaaatctataacgatgggtgatcaagatgagacacatgaacagatgaaagccgacatgtcggctctgaaagaacagatggcttccatgatggaggccatgttaggaatgacgcagctcattgagaaaaacatggccaccgctgccgctgtcagttctgctgccgaatcaaacccaactctcttggttaccgaacgccatccttcctcatacatattatgtgcggggaatgaaacacgtcnttaataggggggggcccaaattt

SEQ ID NO: 160655 - DNA, 398 bp, Glycine max
caaccgctctctcgccctcgccaggtctttgattcttggttcctctctttccttatttcatgccaccacaccaatcgtattctgttcttttccttcgtatttcttattttggttttctttctctgttattctacttgctcaatcctctttgtgtctttaatttaggttttacaacgtttttttctccttctgtatgcggctataattcgagaagttttgtttaatgaacaggtgctgagtggctttaattgtaaatcttggcgctccatgtgtgaacctttgttgggtggtttaggctcacacttgctttgtttgcagatttgattggatcggcttcctgcatacttggtactcgggaattggaccaaaaacagttctcgaaatcttgcttgtttcta

SEQ ID NO: 160656 - DNA, 421 bp, Glycine max
  unsure (1)..(421): unsure at all n locations
tctaaattctaatgggaaaattccattacttggatttgtttctttctaacaaataanaaagattattttctaattgggtgttaattaggggattttctttatgttgtcttatttataaaattactagacatttctgataattaagaaataattaatagctgatgataaatttgctggcgaagtgggattaatgccatgatgacatgcagttggataataaagcatatcaagtcaagttggttgtttcatcttgaaatgtcgctgctgctctgtccaagagcgaataggattacagatgatagtatgattcaatgcttgaagttatgaatattaatatgcagctgtagattttgaggaagttgaagtctttgtttaattggggaaaaaatttaaaggggttgtttgtttataaaattttttt

SEQ ID NO: 160657 - DNA, 419 bp, Glycine max
atgtatcctcttcttatttataaaagctgccattttgtttattaacaaaatcaatttgttttctttctcagtcgatttatttattataattcacatattttttaaccattgcactcatggtgagactcgatgtatccccacaattcggtcattcggattcaagacttaggtcatctccaatgaaagatgcctcatgagtttttttttaaaaatattattgttggagtaagtctaattggcattgccgggatttaagttttaacatgggtatcttacaagcaggtatcttaagctttgatcattggagatgtcctactcacattgaaataaaactcaaattctttttttatttcttataaactcaacatattgtttattaaaaaaccctgttgggaatatttttttttttaaacccccca

SEQ ID NO: 160658 - DNA, 362 bp, Glycine max
acctcagcagcaaaatcaaccacagcagaacaattatgacctttccagcaacagatacaaccctggatggaggaatcaccctaacctcagatggtctaaccctcaacaacaacagcagcctgctccttccttccaaaatgctgctggcccaagcagaccatacattcctccaccaatccaacaacagcaacaaccccagaaacagccaacagttgaggcccctccacaaccttccctcgaagaacttgtgaggcaaatgactatgcagaacatgcagtttcagcaagagaccagagcctccattcagagcttaaccaatcagatgggacaattggctacccaattgaatcaacaatagtccc

SEQ ID NO: 160659 - DNA, 418 bp, Glycine max
  unsure (1)..(418): unsure at all n locations
tatgcatgtgaattangacgcatcatcaagaatcaagcctatgctattgtgcaagcaatcaatggggcaaaacacaccaaatgattataatgatggatggctcaaattctcacaaaggtaaaatcatcactttcaaattgagctttcaaaactatcatgacatgtagagaagaatcaaggatttcaagtcacaaaatgtcaagaacttttattttcaaaacaattacccatttcttgaacatatcctataattcaaagaataacatgcaaagtcgtacgtgcacacaaaattgaacccatatattaaactgaaaatccgacgaaactatacaacatttacaaaattgtaacaaacacaaaaatcacctctttttttaaaccccacaacaaaaaaaaaattttgtttttctttacaaaa

SEQ ID NO: 160660 - DNA, 400 bp, Glycine max
agcttccatacatagacgtgtctttgttttatcctcgtgatgctgaaaaacaaaaacattatggctatgcaacataacctgaggagttagaggattaaaaccatacactgcttcaaaaggagaacaattagtggtgctatgaacagctctattgtgctcaaattcctcatgggagagaactgcttcccaagtttctaagtgcttcctcataactgttctatgcaaagatgccaaagacctattaacaacgtccgtctgcgcatcggtgtgtgggtgacaagtggcttaacataagattttagtgcccatcttgctccacaaagttctcctatgttgttttatgaagctagacgccgtatcactaacactgcttcttggcagaccatggagtcctacaatc

SEQ ID NO: 160661 - DNA, 251 bp, Glycine max
attttttttataccaccctaaaaaggaatgcccgagaactaagaactcgatgtccattaatgaactggcgtatactaacatgattattaataacattattaacaaggcttatccagaggagtctattggttcgcaaaatttttactgcactatgcattaacatcttaaagtgtgaagtatacaatttatttgattctgggaagtacggttggtgaagaagtatgataattttacaactgaggcactgtgct

SEQ ID NO: 160662 - DNA, 439 bp, Glycine max
tgtatgatctgcgtgcacggagggatcaacgtgctgtgctgtcataatcaaccgtgctaatcaggcccctgtctaatgcgtaatctgcatatgcctggcactgaatgttacgattgtctaacccattgccaatatcaaaaccctgcctatatatgggatcaacggaatcaatacactgataaataataacaatctacctttcatatgctatactaacagctatgagacagcaaagaccttcacattcatatgaattccttctttggctttgtctacttggtgaacactgcatgcaataactggaatgtatcgtacagaatatgactctccatctatataaaaatcattcttactgagcatgaaggtgactaacttgtaaaaaaaaaaaaaagtggggaacaacccccttttgggggctctttcccccccccatattgta

SEQ ID NO: 160663 - DNA, 338 bp, Glycine max
cctgactctgaagatatctgcagttgatcaattctgtggtgatgtctacaatacatctctcccatgatgaaacgcgcttggacctgattgttcttccctccttttcaacaacataagactgcttactcctgtcctttatgcgtgcggaccgagaacaacatccagcccttcttcgtttctgctactgcttctacccgagaatgcaccagcagagctgcccctcataatcttctgtcagaagatattgagcctgtgactgggtcctcatacagcattgccaaacagcaagactcatcttatgtcaacaaatgattggacgtatgctacccgttgcatca

SEQ ID NO: 160664 - DNA, 429 bp, Glycine max
  unsure (1)..(429): unsure at all n locations
tctgngagactgtgaaaccacttgaggagtgcctgtatttggatatgatgaagatgggaaccgtgtatatgatccaatcaaatgagaggcgtgccctcgctgcgggaatatacttgatattgatgagacactatgctccttgtgatttgccccattcccttgattggtacatgatatcatatacctaatcactgtattgtggcaaatgctaccaaaagcttgtatcgcaaaaggaagatacatatatgcttacattataacactcacgcgacttgtccctgctacgaatttattgtatacatgatctacttccaatttcatatactgaatctttagtacatgaagcctcaattttaatataacataatcattattttttgtgtgagaaaaacccaattggtgggggggccccctcttttttttttgggg

SEQ ID NO: 160665 - DNA, 326 bp, Glycine max
gcttgcttgacaatgtgaatgatgcgttatggttaaatatgtatatgtatctattcatgtatttctatgtcgtttagtgaatggatatcgcgaataattgaccaccattttcataatcaaattaattgagctttcacttaaaatcgaaatgtcgcatttagagttagtgatatcatagtaatgtggtgggtcgttagacaaatagtcaaaattattaaactaaatagctgggataagtaagaagagattggggtacttttatggcttctgattctaagagaaaaaaataagttatcgcaaaatagagatttaagtgatattaaaag

SEQ ID NO: 160666 - DNA, 429 bp, Glycine max
  unsure (1)..(429): unsure at all n locations
tctacctccggaatgttctccagtggaatatctttccttttatagattccatctgttctttgacagttaacacacctctgaacatattcataagcatccttgcataatgtaggccaatagaaatcagattggaggaccttgccagtaatcctctcttcattgtaatggcctccataaggtgaattatggcaatgccataatatgctttttgcctccccctgagttatacatctcctcaagagattatctgctccaatcttaaaaagataaggattatcccacacaaagtaattagagtccctgagaaacttctttttctggtgccaagtgagatcatcaagaagtgcaccagctgctttgaaatttganattngtaataaccaaaaaaaaaaacccccccaatttttgtggggggtgcccccccccccc

SEQ ID NO: 160667 - DNA, 103 bp, Glycine max
gatcaatcatcatgcctataaggtggacctcccaatagagcatggaaacagcaccacctctaatacttatgatttagttacttccgccgtgtaactgatataa

SEQ ID NO: 160668 - DNA, 416 bp, Glycine max
  unsure (1)..(416): unsure at all n locations
taaagtgcctctatttccatgacttgctcaagggaaatcctatgatcaagtaagtttttcttcatgctctgaggtccttcatattttggtcacacaaagaatactattcattacttctatttctcctactatggctttgcttgtgatgcaattcctaaatatgaagcatgttaacaagtatcctatgtagagataataatagagttgatgtgggattgaattaaaacttcatacaaaggatgacttgcaataatcttctttaacacctcttcactntgtttgatctctacatgacttcccttgtccccctttctccttgatccattttctccaatttgtctaccttccatatctatctagctagctttattatcttttgcaccaatngaatcatacaaagttcgacaaaaaaatat

SEQ ID NO: 160669 - DNA, 428 bp, Glycine max
cacactatatacactcaaattcccataagctggaaagtcattaatggtgcaaaatatcatcgcatgcaacctataagtctcaccctgatttgcatcatacacatcaaccccgtctacctaaaacttacgcatgtcttcaatcaaaggagtaaggtacatatcaatatcgcttcctggctgtcttggacgtgatatcatcatagacaacataatgtatttgcgcttcatgcataacgaaggatgaaggttgtaaatcattatcaacacaggccatgaaatgtgattagtggacaagttaccaaatggattcatgccatccgaagaaagaccaagtcgaaagtttcttggttcggcttcccaaattttccaaaataggggaaattttaaaccccacaaaaaaggggtttttttggagaaaaataattgtt

SEQ ID NO: 160670 - DNA, 370 bp, Glycine max
  unsure (1)..(370): unsure at all n locations
gcttganacaacccaatattctttgtctctctatgncactagtggctctaaacaaataaaaagacttgaagtttgtttgcttgttgactgaatcttaatcgtcttataaatggatatgatctctaaactcttagtcttttctcttaagatgctctaagtgttntgagagcttttcaattttacaaaaatatacataaagctttttataaaaataattcaaatgttagtgcgaaggtttttccatttcttcaaagcttctagtattcaaagaccttcttcttcaagtgtttgttgtctctaagcgaatagaattcttcacttgagctttgtcgcaagctacccttttgcgggcgagcgaggcaaggctcac

SEQ ID NO: 160671 - DNA, 401 bp, Glycine max
  unsure (1)..(401): unsure at all n locations
gttaaatgtgaattaacatattcaatatctgctggtaatccattatcatccaagtgtcatcgattacacattgtaaaatttgaattcaaattgttaatgactgttgtaaatattatcaactgttggtaatcgattacaatgctcatgtaatcgattacatgctttcaaaagtattcaaaatcattttataagcattctatgaagtgttttggccactggtaatcgattaccagaggatgtaatcgattaccagagagtaaatctcttgtaaaatcattttagcttatattcagtggccaaacctcttgttgttactacttggaattcccttcctaaatctctaaagattatcttgatcatatatgcttaaaaattntttttnacctttattggggggggga

SEQ ID NO: 160672 - DNA, 432 bp, Glycine max
ctgcagcttttgagagaaatatgtgacttctatttatttaaaaaggaagtcatgtctaatcaaggtcggaaggaccatacaagtttcctaacgatttctaattatgtgggccattaagtctatcatatgctgacaatagccgagaagcccatgaatctcttcgggggcggagtaagtgtctgccatcgtcttggccttggctaacaatcggggaagttcttgactcccgttcaaggtaagagcaaaccgatccatccacatggttgcctcttggtgtaaagagtcgatcacccttcctctagcctctttttccgcatatacttgagcatactcatccgcgattctatgctcgtgggccgtggctagacctaactcttcttcgtacttggcgatgatagctaacatgttggtctccgtctcgcatagacgctg

SEQ ID NO: 160673 - DNA, 382 bp, Glycine max
agcctctcgtattctctgcaacttttaacaacgcaggggaatgcatatatcaaaggtatccaagttacatacataatatggttcactttgtcttgtaaatgaggtatttgaaacacgtaatgatggttaacattgtttcttaagtggttatgttaatagttaacctaaccatgtccttctgcttgagcttgagtatttgagaatgaaaagaaaaatgcatttaaccatatgttagaatcattggaacatttttcaagatactattttcgacgatcattcttctgaatattggttacattattgtaggattcataacttttatttgggggggaaaaaaaaaaaaattttatattttttgtggaaaaataattttttttttttc

SEQ ID NO: 160674 - DNA, 399 bp, Glycine max
ctctttagaatatgggacaagcaacaaagggagttgtatcatttaacttatttgcacctcatttttttggtgaaagtttcacgactgatatccatatttcttgttaaaaaaaaataattcatcacactttaagtcggtggtggatccaaaaaatctttgtagtttaattattagttctttattttttttaacaatttttaatattttattaatttttcattagtgtttttagtctctttaaattttttttattcactttcagccgtttgtgtatttttattacctgaaattaattattattttatccatcgctagtccttcatttattttatatttagaactaattctgaataataaaaataattgagggataaatctttttaaagaaaataaatataa

SEQ ID NO: 160675 - DNA, 368 bp, Glycine max
aacgcgtctctctctgtatattcaccttctttctcctttctttcctaaccagcgcataacagcatccaatctattctttgagatattgaattaataacgatcgtatgattgtctacatacaaatggtttaactgtaagagcttactacatatgtaatagtgataaatttagtagcttatctacgagttgagaatgactaacatttattcatcaatttatggagaagttcgtaaatatgtaaatagatttagttaagaaaataatatctctttctatacttatgtcggcaatatcttgtaatattaaaatatatctttatatggctgaatttattcattacaactagccctatacacttacgattatat

SEQ ID NO: 160676 - DNA, 418 bp, Glycine max
  unsure (1)..(418): unsure at all n locations
atgctggcatggatttatattnctgtancaagaccacctgctgaaggacggngaaggaatcaattgcttccacgttattggcctaggattactgatcaagagttgcaacaaatatcaggagagtatccaacattgtaatctgtcctataaattattatgaatcactgacaggatacttactggttgatacacttattattattttgatagctaatctttaccttagtatttccttaaccatgattcatgatatgttcaagttcaaattctacaatcgtgccactctttgaaaagatgcttagtgcaagtgatgctggtcgaattggtcgctttggtttaccanaagcatgtgctgaaagaatttatcttaactcatctgttgaactggcatttactggtgtcattttatattaactaa

SEQ ID NO: 160677 - DNA, 378 bp, Glycine max
  unsure (1)..(378): unsure at all n locations
agttcactgcttcaagtagtacacaatattcttccgatggagaacatattgtcaaanagttactatcaagccaagaagatattgtgtccaatgggtatgaagtatcacaagattcatgcttgccctaatgattacatactgtacaaacatgagtttcatgaaatgcacaaatgtcctaggtatggggtatcacggtacaaagtgaaggatgatgacgagtgtagtagtaacgaaaactcaaagaatgggcccccagtgaaggtgttgtggtatcttcccattattccaagggtaagtgtctgtttgctaatggagacgatgcaaaagaccttacatggcatgtaaatgggagaaactgcgatggaatgctctgtcatc

SEQ ID NO: 160678 - DNA, 434 bp, Glycine max
  unsure (1)..(434): unsure at all n locations
gctttgacgactacaccgcttcttctcatggatagcccctggnaggtatagtgatctaatgttgntttggccattacattcaatgcggaacaagtgtccacaagtatatatgacaaagcatcagacttgtagttcactgatatgtgtaacgccagattgtggtttcttccctcctcaagaagctcttcatcgctgaaacttaaattattgcatgcagtaatgtttcctactatactgtccagctgattaacagtcacgtccttttccacaaaagcttggtctaacaccttcattagagcctcacggtgtgcttctgagttcaacagcaaagacaaaatagatatttcggagggagattgcagcagctggtctaccactttatactcgctcttctggatcagttgcagaatttcatcatgatctgcattcttgcc

SEQ ID NO: 160679 - DNA, 343 bp, Glycine max
agcttgttccacctaaatagcataggttcttcattggtaatcagcctaggctatggttgctaagacacccaagtttggaccaagtagtaaatgggtgaccaaagagttaactacaattccaattcttcattaccagtcaactaaactattgttttcttcgatagaccaaaatcattttatatgttggataaaactgttggtcacaagttgattctctccagcaagatgaactacaataaggaaaacaaactttctcaccaagccactaggagagaagccaatcattgccaagcaagttgcaagggatgtttcattcttccctctactcccactatttgcaaaa

SEQ ID NO: 160680 - DNA, 442 bp, Glycine max
  unsure (1)..(442): unsure at all n locations
tcatagaataataaagggtctgaatgacaaataaaaggccataagctgaattaatctgttcattcttagacaacaaanaaaggtacatgaaccttacaattccaccatttgtgtttcttccccccttccaatcctacattggatctcatgacaaccttgtgacatcttacatgacattcgcaccatgtttcagaatataatgcttcagctggaatagccataaactgtgataataccaaagattccatataaatactagaatagccatttgaagatccctcgtcaggatacttcgaattcgaagtggaaaatctcacattttccagatcagctcgtggctttctccaaaccctttcatcttacttctctctcattcggccaattagagaatttggacccattctcacaaccaaattgagacttgggagggttctcctgttct

SEQ ID NO: 160681 - DNA, 434 bp, Glycine max
agcttcacagaagaacaagcttacgacaaatcagctttagatactgtattcgataaactgagtgagagtgagagagaaaatgaaaaagataaaactgatattattgctcaaaaagaaaaaactcaacgagttagacacaacagaggtatttaaagagttctgacttgagaaactaaccacaacttactctaactacctctaactaacttctaacagaatgtaaactaactctaactaacttctaacagaatgtaactacttgggtgcagttaagtgaaaactaacagcccttacaacatatacactgctgtctaataccagatgggtgcagttagcaagagctaacagcccttacaattatgaaacaaaactggttacacagttatgtatttacatactccaatattaggaattatgattcccaggattcatga

SEQ ID NO: 160682 - DNA, 422 bp, Glycine max
  unsure (1)..(422): unsure at all n locations
ttcctacttagttntaaatcaatagcattcctaggaactctttattgatattactgattaagctagaatagttatatgccgactgatctacgtgctcagtagtgcaagaattgatgtttgattataattaaaaatttaactaatgtgtaattagtataataacaacattaatgctcttgtttatttctagtgatattgcgattatgatattttggggtgataaccataaagaagataagttaccaacttaaatagtatagagcatgtacaatataactgactttgcattgtgtgggtaaaatgatattgtgatggaaagctatgacagcataatacaaggaaccagtctttgtttcaagatttattgaattatatcaattgaccttatcgatgattattgcaatatcgtgccctgaccattc

SEQ ID NO: 160683 - DNA, 401 bp, Glycine max
gcttcagcacttctatagttttaaggctttccatcagctctgataaatctgccatatactcagccggtattaggcctcatgagctttctcatattcagcagcttactggatttagcttgggtgacttccctttcagatacttgggtgttccccttttatcatctagattaaatgtatgtcattatgctcccttgctttccaagattattggcctgattcagggatggaggaaaaagtctttatcttatgcaggtaagttagagtttatcaaagcggttattcaaggaattgtgaatttctggatggggatttttcctttgccgcaatctgttctggaccggataaatgcttcgtgccgtaattttctgtggggcaaaacggatattggcaaaacaagccct

SEQ ID NO: 160684 - DNA, 438 bp, Glycine max
agcttagacttacgaagactttctgacaatgctagtaatcaagcacctagtcatatttgccgaacatcctcagacctacagtcaggcagaggcagctaacagagtcatcctttgggccctgcatgctagactcgacatgtctaagggtctatggaaagagaagctcgccagtatactcttgacctaccactgttcaccccagacagcaaccaatgaaacacattaccgactcatatagcacacatgccatgatccccgtggatgtcagggaaccctcgacaaggagactactattccagcaacaacaaaatgaagaaactataagggtagaaccctatgatcttttcaaagttttcttatcaagataagaacatccatagccatatctccaaggcttttataacccaaggaacaccctcggtgagccctctttctagt

SEQ ID NO: 160685 - DNA, 440 bp, Glycine max
agcttggtgcatgaatggagaatatgacaaactcctcaaagcggaagacaatgaatagcagagaatatggacaatagggagaatagggaacgaagaagaagcaaggaagaagaagcaacaacgaaggagagaagcataaacgtcaatgaacaatgactcgtaaggacgagtcacttgcatttatttatagagaaaaggtgaagggcattttagccctttcaccttggatgctcattgtcctagcaaaaatgtttggtgcccaaagcaacaccccaaaacaagaccaacaacatttaacaccaaattaaatgcaccatgtacgaaacacacatgaccaacaacacccaacaccaaattaaatgcaccaacataaaccatgttcatgggtgttaccctcctcacacaccaaatcctagaaaagaaaccagtgttcctaatat

SEQ ID NO: 160686 - DNA, 305 bp, Glycine max
acccaccccgaacaaccgggagaaagaaaaacccttagcttttggacagagaagcatcccgggaagaccaacacagccacccaaccacccaaaacaaaataatggacccaaaaatagaaggaccggaacacaaatgctgattaaaggagcaaaaaagatcgacccaaaaaaacccaatcaaaaaaaaaggcaaaggagccggaaaccaaatgacaaagcaactcaaaaacgcaggcaccaaaaggaacaaaaaccacgaacaaggacgggccaccacggaagaacaaaaacgacggaacacaaac

SEQ ID NO: 160687 - DNA, 364 bp, Glycine max
tgagatgatgaagcgctgcaaggtgaaactttctgctcttattgttgaccacaaagtggtacctggagatatgtcccgggggtcaagagaccttggggacgtcaggtggggtgctattgcccaaaaccaagcttgaccaattccgacccaacccgggcatagtctgtcagtgagaacctgtgatgtacctaagcaggcgagctcctggcagtcaacagataaaaggaacaaagaccacaaagcaaggaggcttgtgggggctggccagctctgaattttgtgtgatatgtggattatggcctctggtaatctattaccaaggcggggttatcaattacatggcttacaaatgaagacaggagac

SEQ ID NO: 160688 - DNA, 325 bp, Glycine max
catgtggagactatcggtaagaagaataactcaaactcatgccagcagttgcttgtagctgacacttccccagaataaattgactgcttggtagttttgttaaatagcatactgatcttggatctcttgcattaacttttatcaatagagacaacatgtacattttggtgatcaatcacatcttttgattgtaggctgctgatatatgtgtaagagctgatacttccttaaactttgttattgaaaaaatgactttctttctattcaggttgaaatgtgtggactgatgaacaatgaatctgttttattatggtaaagttttttt

SEQ ID NO: 160689 - DNA, 434 bp, Glycine max
  unsure (1)..(434): unsure at all n locations
agctgggntcgttgtacttacccgttgaatatcgaagaacgatgaagaacgaatgaagaacgtcgaagaacgatcgaaacctttgcgaaattccttacggaaacgttacggaaacgtttcggaagcgcctcggcttggattttcttcacggaaacaatttttccaagcaaattcgaaagagagagaagtgcctaaggggctgcacccttttccacttcacttcctcccctatttatagcaaaataggggaaatgcttgccgcccagctcacccaggcgagcagggttgcttcctccagaagcaacagccttctggagggcccaagtgggcctggttgctatttgcacccccatttttactaagtacacccccctctgctttttttggtgattcttttttcgtaaaggtacgaaaacttacgaatttcgtaacga

SEQ ID NO: 160690 - DNA, 418 bp, Glycine max
tcctctgtgccattcctgcgaaggctatcatttgaaatgtttgtttacaagaaatatcacaatcattacaaacaagggcctaacaacacttctcatggcacgagtgtcaacatgcactttataaaataatcatattggggtcgtgctattttatgacacatacgtatttgcacacataaaaattttgtgtgaagcattttacaatacctatccatgtacatatttttttgacaaaccttttcacgctacttcctatatatatacacacattctttggaaggcttcttttgttacctactcacagatacacatattgtgaataacactattacgctacccattcaacactttcgtaggcacttcatgctatatatattcatattatgcacagcactttcatgctatatatattcatatt

SEQ ID NO: 160691 - DNA, 437 bp, Glycine max
agcttgtgacccttatgagtcattttagtctaagataaagctaacttggaaaaaccttctatgaatctccggtagtatcctgccaaacccagaaaactccttatctcaaaataaaaatatacgactctcccactcaagaatggcttctatcttagatggatctacagttatgcccccttgagacatcacatgccctaggaaactaactatctctaaccaaaactcacacttggacaacttagcataaagttgtcggtccctaagggtatgcaacacaatcctcaaatgttcttcatgtgcctctctagtcttggagtataccaaaatatcatctatgaataccaccacataaccatcaagggaagggtgaaagactctattcatgtagtccataaacacacctgcagcattagtcacaccacatggcatgacttgat

SEQ ID NO: 160692 - DNA, 426 bp, Glycine max
caactgggtgtaagcctgaccctattactttctctgtgttggggaagatgtttggggaggctggggactatgatggcattaggtacgtgtttcaggagatggagtctgttggggtgcagcctaatttggttgtgtacaataccttgttggaggcaatgggaaaggctgggaagccggggtttgcgaggggcctgtttgaggaaatgatcgagtcagggattgtgccgaatgagaagactctgactgcggttattaagatatacggcaaggccaggtggtcgcgagatgcgttggagctgtggcagcggatgaaggaaaatggctggcctatggattttatcttgtataatactttgttgaatatgtgtgcggatgttggactggtggaggaagccgaaactttgttcagggacatgaagcagtctg

SEQ ID NO: 160693 - DNA, 377 bp, Glycine max
  unsure (1)..(377): unsure at all n locations
tctntgagannacttccttgagaagctagagcttagctctcacacccctctaataactaagctcatctccttgagaagattcctaaagaagctagagcttagctacacgcacctctctaataactaagcttacctctttaagatgagaagctagagcttagctacacacctcttataatagctaagctcaccccatgccaaaatacatgaaaatacaaaaatgtccctactacaaagactactcaaaatgccctgaaatacaaggctaaaatcctatattactagaatggccaaaatacaagcccaaaaaaaaggaagaacctattctaatatttacaaagaagagtggatctaaccttgggccatgtgctcaaaaa

SEQ ID NO: 160694 - DNA, 420 bp, Glycine max
aagcccttttacaccatttataataagaatggagccattggatcaccttgccttagtcttctttatggagagaattcctccattgaattccatttaccaatacgaatactgaagcagactctaaacaccctttaatccaacatatccatttcccacaaaagctaaggtgagctaacatgtaatataggaattctcaactcatcgtatcataagctttctcaaaatccaccttgaagatcaaacaagatttcctttttattcatgcctcatccaccgtttcattagctattagccctcggtcaagcatatttcccccccccccccctccccacaaacacatattgcctttcatctggtatctttcctatgacaactgaaaatcttctcgctagcccttggaaattacccaatatatacatc

SEQ ID NO: 160695 - DNA, 297 bp, Glycine max
atctggatggagccttcccttgattcttgaatctggaatcttgaatctggataattttggatcctggattctggaattgttcttgactcaatcttgaagtcattctctggggctttttgcatcatctttgtatcatcaaaaccttttgaatcaattgggaatcatcatcatgaatcacatctgattcatgactcaatcttgatccaatcatgaagcttgcttttccaagattgagaatttttctaattgtgcactcttttgttagagttcaagctgacaaaaaatatttattaagag

SEQ ID NO: 160696 - DNA, 427 bp, Glycine max
  unsure (1)..(427): unsure at all n locations
atcccaggggagctacttgctgaaataggtgtattgggattgcttaaagcatcctcttgcaatatatctgctattctagatagtatgctgaaggctaaacttccaagaactcttgagtatgcttccaaaatagaatgtccaatatcctacaaaagtagagagaaagaaattaatactacagctaaatgattgccttaaatttcacaacttcattaaggagaaacttgtggcaccaaaaacttagatatcagncgttttcttttctatttatctaatttatttttaagtagaaataagttaatttaacatggaattttcagtttgagggggcaagaagaaatatatataaattactactaggaaactcaccttgccatattgaactttcgcagcatccagaaatgtttgaggaaggttaggatatctg

SEQ ID NO: 160697 - DNA, 457 bp, Glycine max
  unsure (1)..(457): unsure at all n locations
tngataacaaaatanaatcaaaacaagataaaataggacataaattagggttcaaacacaatcaaatgacaatttatcaactatcccacacttgagcattgtttgtcttttagaaattattctaaattaaagacttacacagttttctatgaaatcaagaaatcttttatatagaacccctaagttattatgaacagaagataaagaaccatcgtgaacaaataaccacaatcacaagacatgttccatggaattccatttgttggaccttgtgacctcaataatcttaagagggataggcttagaatgcagaagaagcagtaacaatcaatttaataatgttctttaaacatgcaaggcaaaattgattgcaataaaataagtgagataagggaagagaaaatgccaacacaattntatactggttcggcaaattctgtgcctacgtncagtactc

SEQ ID NO: 160698 - DNA, 448 bp, Glycine max
  unsure (1)..(448): unsure at all n locations
agctngtgaaatcaatggaatccaagattccatttgacacttttcgttcaattctattcttagaaatatgacctaagcgtttgtgccataatgctcctgagtttgtattatcaattctacgcttagtaccacacaattctgcattaaaggatttaccataggaagctacagtatcaagtaaatatagattatcattaaccacgagtgaaccagttccaacaatatatgaattaaaagacatcttgaacacgttgtttccaaatgaacacaaataacccaatttgtccaaataagaaactgaaaccaaatttcatctaaatgacggtacaacaaaagtgtctttcaaatccaaataaaaatcagtacataataataatctaaagtgccatatagcttccaacttctaccaattaccatctccaacatagattcatctttcaaaattaat

SEQ ID NO: 160699 - DNA, 427 bp, Glycine max
  unsure (1)..(427): unsure at all n locations
tccttaagaagctagaccttagctacacacacccctctaataactaagctcacccccatgctaaaatacatgtaaatacaaaaaagtccctactacaaagactactcaaaatgtcttgaaatacaaggctaaaaccttatactactagaatgaccaaaatacaaggcccaaaagaaggaaaacctattctaatatttacatagataagtggacccaacgttggcccatgggctcaaaaatctaccctaaagtttatgagaatcctaaggccttcttcaatagctctggcccaatcttcttggaatcttctatccaatgcccttngggggtaggattgcatccaaaagtcccttcgcaaactcaattgtaccaatcctctacaggttcttcatatcctggataaaacatttatcattcatgaaagtca

SEQ ID NO: 160700 - DNA, 418 bp, Glycine max
  unsure (1)..(418): unsure at all n locations
agctntgatgattgtgtctccttcacccacaacagttaacacctgcaactttgttacaatgctcaccatatttacaagattctaaaactaagaaaaaatctagacaaaccattttagatgttacataatactaaaaatagaataaagaaaattaagtgactgcatgcgaaagatttaaggataaataaagactaaatacaacttgctgaaacaaaacttgcaataaataagaatgtaataatattataacatactcttaacagcatgaaacacacacacacagttcacaaaaattgagaagccaacaacttataataaacatgcgaacttattatatcaaataaatctgcatcacaagatctagtctgctgtaatggaccatcttttagctggaaggtcatatcatcctgctgaaact

SEQ ID NO: 160701 - DNA, 399 bp, Glycine max
  unsure (1)..(399): unsure at all n locations
tgggaaaaggctcacattcactatcttatacatcatattcaaacttgtccaaataaataataaagtcatctccactcacagaaagtcatataagtctcataccattaatatagaacctatatcttaatgtcacatcctatcatagcgtggtgttgccgtgtcctctaacatgaggttcttcatagncatacacctattcatctgctcccctgaacacaaagtttaagatcatcacaggatccaaacacaaacagcataccgggagtgaggtatcacattgctaactactagagagaaaccacacagcatatagtagcccaatacaatttacttagcatatctcacaatatttcatcactgtggcattcatcaaacacacctttcatncatgcatcacac

SEQ ID NO: 160702 - DNA, 445 bp, Glycine max
  unsure (1)..(445): unsure at all n locations
catgcaagcttggagaggatgcttttttggtgattataaagagggagagaaagagggaggggggagcaccaaattgaaggaagaaaaagggagagaagttgaactttgagttgtgtctcacaagactctcattcatcaaagttacaacaagtgttacacatgcttttatttatagactaggtaagtttcttgagaagctttttttaaaaaacttccttgagaagctagagcttagctacacacacccctctcataactaagctcacctccttgagaagcttccttaagaagattcctaaagaagctagagcttagctacacacacctctctaatagctaagctcacccccatgacaaanaaaaacatgataatacaaaanaaaagtccttactacaaagactactcaaaatgccccgaaatacaaggctaaaaccatatactact

SEQ ID NO: 160703 - DNA, 353 bp, Glycine max
  unsure (1)..(353): unsure at all n locations
tgatggcacgctaagcctcacatctcatgttaatcacatattgcaaaanaatntggggtgcagaaagcgctaagcgcagcctgctgcgctaagccccagatgccctttggaatgtgcaacttcaagttgggcttagcacaatgctaggctaaacgcttgggtttttaaactcaagcgtcacgtgggcacgttaagcgtagctctacgctaagtgcgccatacaaatttcaattnttaaaaatcaaaggttgagacactttgggtgctacctttacaccctagcctctgcaccttcctaaccctgagattgtgtgcttcccttttgcgtgcttctactaatttgtctgcattct

SEQ ID NO: 160704 - DNA, 435 bp, Glycine max
  unsure (1)..(435): unsure at all n locations
agcttccacataacaggttggtgcaacaatcttttgtatctgtgaatataatgcatctnggggttggtcacgataatattaaaaaatatgcattctgagatttttaaaacatgatatattggtggtggaattagcagcagagagtttttctgatatgctacattcttaatctggtaggcaagtaatttacgagtgatgcttttgggaatggttgatgatccacgtgttgtgctcatcaagcttgcagatcgtcttcacaacatgagaacaatgtacttactatgagcttcttaaattnttttccttttacacccaattattgttggtcttccttattctccctgttttggccctttaattcagatctgttattctttgaagatgagggaaaaattattctattcttacaggtttctcaatccttcatggtttttg

SEQ ID NO: 160705 - DNA, 396 bp, Glycine max
  unsure (1)..(396): unsure at all n locations
tccctcgcacattgtcagcgtgataaggacacggtttgtcttgtttcacttcaatccctgagcgaaaagggcgaaataaataaaccaaagaagagttcaaaatctatgattatcaatgagaaaaatgataaacacgtaggttcagcagctaaaacgcaacgcaaattacagaatgatatagtagcaggtattaaagaaacaactgaatcacttcaatgcttctaaagctatatcgaacagaactaatgactggaaggagaatgaagatgactaaccncagaaacccattgcgaaatgaaatgaaatgaatccacgtcactcgtcagggtttcaacggttctattaaccctaatagtgaatgccgtgtacagactaaccctagctagtacacggatt

SEQ ID NO: 160706 - DNA, 438 bp, Glycine max
  unsure (1)..(438): unsure at all n locations
agcttcgccctcagatccctcttggtggactaggcttaatttagacatccctcctaggtttagactaacttaaactaagcttcgtcctaagatccctcttgttggactagactcagcttaaatagcttacgaaagtttagactaatttaacctaagctttgtccttagatccctcttgttggactagacttagatcaaacaacattattgtaacaacatacttaaaaccaaaacttaatccgcaaatccctcatttaaaactaagtttcagtcctgtttcaatcaagttctaaggcaacaatacatttcccaatgctaaagtcacctaactatacacacaaatgggtgatcagaccaagaacatacaaaatttaagtactgaaagaagcattgaacacangaaacacaatcaattagatataaaagtaatacatcatc

SEQ ID NO: 160707 - DNA, 450 bp, Glycine max
  unsure (1)..(450): unsure at all n locations
tgtgaaattcttaagggaaatgggtccaagctttgttntgagaatgagacaattgctaaagaaaaatctactcttttgggaaacttttgggagttggaaaacaaattgataggtctacaaaatgatataaaggagctaattgaacttcatgatcatcaaagtaaagaaagatatgatctatggagagaatgtgcacaagtacatttagattatgaggacctttaagtaagtaaacataatttttcagtagaaagtgaagaacataatctttatcttatgtgcaagatttcaccaagtacttatggaagtccatctaactacaaccaaatgtatgtttagctatctaattgggacatctaatattggtctattgttcaaaagaagggaagaatttgggctcacaagtttgtgtgatgctgactatgctcgagataaggtgaaaggaaagca

SEQ ID NO: 160708 - DNA, 436 bp, Glycine max
  unsure (1)..(436): unsure at all n locations
agcttggttgaaatgccatgttggatgagttatacatacccattctgttttagggtttttgtgatgatgtttgtgatgtttatatgctgaaattactcatggaaaactgttagagatgaaaggtagagttaacctagggttagaaagtgagaatgtgatgttatgagtggaaaaagagtgaggctttgagggttggaaggttaagtctgaattctgtggtaaatggaggttaaagtgagttaatcctagcttgaaatgtcatttaggacttatgagaaagcttggactgtgctagagagaaaaacaaatgaccaaagtgaacaaagagccatttctagggcaaatttgggtgttgaagagtcaaattttgattcggtgagatttaggtgtaaatccagtttgaacaagtctaaatagatgntatggactggtgtga

SEQ ID NO: 160709 - DNA, 420 bp, Glycine max
ttgagaagctttctcaagaggcttctttgagaagctagatccttatctattcacacccctctattaactaaattaacctccttaaaaataattacggatgaaaataatgcaacaaataatcaaacatcaaacataattactaataatatatagatatatatatatatcagggtgttacagctttaattcatccatggtcattgtacttgatggtgcccatgtttcatatgttggatgttgtgtatgttcatagggggggtgcattgaccttgtcggatgtccctagtgggggaacatagagtggttaaagagtttaaacatctttgaggcgatgttttggatctttaatacatccatggtctttgcacttgatggtgctcatgtttcatacgttggatgttgtgtatgttcgttgggggt

SEQ ID NO: 160710 - DNA, 405 bp, Glycine max
  unsure (1)..(405): unsure at all n locations
agcttgttgaatttctatttcgcaggagatgtgtagtctatctttcttttctttattcctttggaaatatttactttcattggttggtctcagcatgcaaagtggaaccaacatttgaggaataactcaagtattgttaaaggatatcaaatcataaagaaaaatatgatactataacgatggaacctacctacaaatataatacacctatggctactaaaccctatagcccaaaatctagcaaacttcctctctctgtttgctctggacagagataaccaccactttcacgtgaatcattgaaggctgtttgttggaaattgacttcacatnagtggattcatcttcctaagtggttccttcttggtctttaccttccactttaccatccatttagtataagca

SEQ ID NO: 160711 - DNA, 419 bp, Glycine max
  unsure (1)..(419): unsure at all n locations
ntccacattgaattcagcacctaatgtcatattagatgggaattgggtatcttaacataagagatttcagatggactttaatcctaatcccacagccgaccttttcacgagatctctacttaaccctttggttaaatgatcggccaaattatgctgagttctcacaaactccactgatatcacaccatgcatgattaactcccgaaccatgttgtgtctaacacccaagtgtctagacttcccattatacacttgactatatgccttagccaaagttgcctgactatcacacctgatagacatgggaggtataggtttgggccacaatggaatctcatagatcagatttcttagccactcagcttctttaccagctgctgctaaagctacaaantcagaatccattgttgaatttgtaa

SEQ ID NO: 160712 - DNA, 411 bp, Glycine max
  unsure (1)..(411): unsure at all n locations
agcttagccctagaggggatggaccttttttgttntggagagaatcaataacaatgcctataggttggacctcccagaagagtatggagtcagcaccacttttaacatttctcatttaattccttttgcaggtggagctgatattgaaaaggaggaactaactaatttgaggtcaaatcctcttaaggggaagggaatgatgcaatcctccctaggaagggaccagtcactagagccatgagcaagaggctccaagaggattgggctagagctgctgaagaaggccctaggattctcatgaacctcagggtagatntctgagcccatgggccaaggttgggtccaattatctttgtaaatattagactaggatgtcattatatttgatcctttgatttagggctccataat

SEQ ID NO: 160713 - DNA, 404 bp, Glycine max
  unsure (1)..(404): unsure at all n locations
cggacctataaaactcagcttgaggattatggngtacccatcacatgtggaactatgtggcggtcgggcgatggtgcaaaacgagttctccacatccacaaatcacgtacaaacccaccatcccttgttgcccacctccaactgagctcacgtactcccacgtagcccttatcctcgttcctctcaacgccaagtccccatcaatccttccaagcttccacaacatccaggtaattccacatccaatcatcatggactaacaaaaccaagcaaaacagggcaaaggcagaaaactctgcccacaacacaactcaaaatcatagcttttcacatacaaataccccagtaacatgttcttcgttcccattacgtgaccgctggattgactcaacaaatttactgga

SEQ ID NO: 160714 - DNA, 414 bp, Glycine max
  unsure (1)..(414): unsure at all n locations
agctngctcaatgttgattgttgttgttaatatcttgngngggtggagggagcagtttgtgtcctatatggatgttagttcaaggtggtgaattgttgggctatgactcatatggaagattattctgttattttttctgttttgtcctctttctatataaggcaaggatgccctgtattttctagacagaggataagcttccacttgtatactacaaccataataaaaaagctttctgtttttccctcccatggatgtagcattgatcaaggtgaaccacataattttgggtgttctttctctcctttcttctctttcaattctgctacaattttgtgtgtatgacatttatggtctattgcattttctgctactttcttgtttggtcttcatcacttccataacacttataat

SEQ ID NO: 160715 - DNA, 372 bp, Glycine max
  unsure (1)..(372): unsure at all n locations
tcactgattatccatctcatagttatcattggtgccctaccttgcataccttatctccttttctgtacttggnttgtcttttttcatgatttgaaacctgaataggagtgaaccaatctgtaaatgaatggcaaattggtactcatgaaccaatttgttgttctgtgggtagccaaaaattatgttactctctgaaacaaaaaaaattatatgctgggtgtttcttgtaaaaattctatgcaggcttatcgattcagtttttctcttggtggcagttatcactcatggtagtcaatagcatgctatagcggcactatagtagagtggaacatacctggaccactattggattctgataacggagttggtttc

SEQ ID NO: 160716 - DNA, 449 bp, Glycine max
  unsure (1)..(449): unsure at all n locations
agcttgccttgcccctngatatattngagggactcatggtcactatgaatgacaaattccttgggataaaggtagtgttgccatgttttcaaagcccgtactaaggcatacaactccttatcataagttgaatagttaagggtaggaccacttaacttttcactaaaataagcaattggatggccttcttgcatcaacacagccccaatcccaacatttgaagcatcacactcaatttcaaaagatttttgaaagtttggcaacgcaagtatgggggcattagttagcttttgcttaagaacattgaaagcttcttcttgtttctctccccatttgaaaccaacatttttcttgagcacttcattgagaggtgctgccaatgtgctaaaatccttcacaaatcgtctataaaaacttgctaagcatgaaaactcctcacctcggtcaca

SEQ ID NO: 160717 - DNA, 446 bp, Glycine max
  unsure (1)..(446): unsure at all n locations
tgtcccaaaaatcagtccggtccagtatacgaccgatgtgggctattgttttctgtgcaanccctgaataatcttttgatgatgacgactaggaactgttcggttggcttcatccggtgatgctttttggtatacctcgactggtaatctttcttggccgatgtggcatacgattattttcgatcaatgtttgtaatggagtcttctttctgttgaggtgggtatattttcttttgcctattcaattaccgcagtccaatgtcacccgaaatgaacgtccgttgagtgtgctctatataccatangcgaacttgaccaaaactttttgagcgacaatgaatagaaaacatcctccatggtctggaaaaattattggcctgcgcttattgaaaaaaatacattgcctatgtctgctgaaacaaacatcatttgcacgatttcgggag

SEQ ID NO: 160718 - DNA, 392 bp, Glycine max
acttcaaactaagctggctaaattccgaaaatagcttttatgattatatcttatattatccagcaaaaggggggttatttagagcaggttcaatggacaatggagatggaatagccgtcggttggttaggacatcctgtctttagagataaagaggggcatgaactctctgtacgtcgtatgcctactttttttgaaacatttccggttgttttggtagatggggatggaattgttagggccgatgttccttttcgaagggcagaatctaaatatagtgtggaacaagtaggtgtaattgttgagttctatggtggcgagcttaatggagtcagttatagcgatcccgctactgtgaaaaaatatgcttgacgtgctcaattgggtgaaatt

SEQ ID NO: 160719 - DNA, 381 bp, Glycine max
  unsure (1)..(381): unsure at all n locations
ctcagtatgaaaattaatagccgaatgctcaaaattagcatattcagaatcaccagcaacagaatactcagaatgctcaaaatgcacagaatgatcaggatgcacactatgcctaactaaatcacctgaattacccctagttatgcactatatgcagcaaataatgtgtttttcaaacaagcaccaggggagggttaaaactacaactatagtcaaacgatatccaaatgaactgaaattttgtgagcaacaccctaaaatcatgaaaatatagcacanaaaatttcagacaaaaattcaaagtctaactatgaaaaccgcctaaggaaagtttagaanaataagacaataatactaaataaaacatagtatacggataat

SEQ ID NO: 160720 - DNA, 439 bp, Glycine max
  unsure (1)..(439): unsure at all n locations
ntctagactttcattggtgtattttgatctcctcttggttctctaaattgtgggaatgtgctcaaatatatggggcaattttggtttggtttcttgcttgattagggtgaattatgggtttgtatgggatggccctatgcctataatgcattttgaaacaatgggacatgccacattgtccccgttctcttgctattgttacctaaacgcgcgcccaccaagtgttcggtgaaatgcctcaatggcattagcgcgtgacttttgtaaggaaacaacccatggggcattttggtttgtacatattatcttttttnttgggacatgtattcattcccgaaaaaggctatagtaattgccccacatatattccacgcctaggaaccgatagttttatgctaaagaacacaagaggaggtgcatgttgggtaaagttattctt

SEQ ID NO: 160721 - DNA, 440 bp, Glycine max
  unsure (1)..(440): unsure at all n locations
aaatctttntgatccttcgacttgttgtgtattcctcttatagagaatntaactcattcactatagtagtgaatcttgtgagcatctcctctatggattcatgttctttcattttaagcatttcaaacttatgagttaaaatattgacctcaattgtaccctcatatgttgttctgagtgtgttccaaatttcctgagcagtctcaaattctcctattctgtcatattcaggtttacttgaggcacatgacaaaaagaactttgctctagagtttaggagaactcttgctttctcatttgaggttcattcttctttaggtttgtctatttcaactccagcttgatttctttctggtggtttgtaaggaccaatctctatgatgtcccatagatcaacatcttgagatactaggaacaacttcattcttcctttctaatag

SEQ ID NO: 160722 - DNA, 463 bp, Glycine max
  unsure (1)..(463): unsure at all n locations
gtgccttaaaactcagcttcttgaaggctggatcttngagcttcaatgaggtcctttaatggtggttttccaccatggagatgcagcggaagacaaaggagaagaggtgagaggaggcgccatccattaaggaataagccatggaagaaggagcttcaccaccaagatgagccttggataaaaaacttggagaggatgcttcaatggaggaaaagaaagagggggagaaagagagaggggggagcacgaaattgaaggaagaaaaagggagagnaagtgaactttgagttgtgtctcacaagactctcattcatcagaggtacaacaagtgttacacatgtttctatttatagactatgtagcttccttgagaagctttcttgagaaaaactccttgagaagcttctttgagacaacttacttgagaagctagagcttatctacacacacccctctaataact

SEQ ID NO: 160723 - DNA, 389 bp, Glycine max
  unsure (1)..(389): unsure at all n locations
agcttctgagcganatggtgtgaatgaaggttatgaaaataaaaatgtttaaaagaaggaaagtgntttagttatcctcactttttgaattttttattgcagcgagttgttaattcaccacaataattttggtacatctgatccaatgaactaaagtccacattcattgcagcgattcgacactttgctttggtgaaaatacgtgcatcaatctaatcaaactagatgtgacctgattggccaaatgtatttcataccattgacgaaaataggtagaagtacttatctcaaatatcacttatttaaatcctacatatttatatctatgtcggttgttttatcttttttaatattattatgctttccattacaaggctcttgctgtgctg

SEQ ID NO: 160724 - DNA, 358 bp, Glycine max
  unsure (1)..(358): unsure at all n locations
gcttgaagctagttggatgagtnttatatataaaaaaaattatttaaagttctcttcttgacttcgctattgtccagtcaagttcgagtgttaattattggtctggttgtagtcgaatatgagagcgatgtcctctttggctaagtttttttaacttagtcattaagggaattgaatagttagtgatgagtccaaatggttaagaatttagagcgacatcttatcaattgttatggtcatttagacacatttaaagctttcacacatcttcaagaaaggcatgatgattgtgtcctttgaaattcaaaacatcattgggatacccaagggttttgtctatttccagtcgttgatctat

SEQ ID NO: 160725 - DNA, 276 bp, Glycine max
cgaaggagcacaacaagattttcacatccactatgcgcgcataaacccaacattctctgttgcccaacatcaacagaaactcacgtactcccacgatacccatatcctaatatctttaacaccgggttcttatcaatcctctcaagactccacaacatccaagcaaaacaacattcacacagctaaagctatcaccgctaagcaaaacaaatctaggcataaaactctgtcagaacaccaaccataaagtacagctttttccactcaaagacccca

SEQ ID NO: 160726 - DNA, 400 bp, Glycine max
  unsure (1)..(400): unsure at all n locations
agctngccacccagttcacctatgcgagctttgctcttccaggcgagcaaggttgcttcctccagaagcaacagccttctggagggcccaagtgggcctggttgctatttgcaccccctttttactaaatgcacccccttcttttgtttttggtaattctttttccggaacgttacgaaactttacgaatttcgtaacgatgcttatttttcttccgcaaggttacgaatccttacggattatgtatttactcttgtttagctctccaagaagttacgaaaacttacggattgcgcaaaaacacctctttttgatttccgtcacattacggaatttcacggattgcgcaagcctgctttcttttgatttctgacacgtcttgggacttcattcattgtgc

SEQ ID NO: 160727 - DNA, 460 bp, Glycine max
  unsure (1)..(460): unsure at all n locations
actaagcttagacaacttgttgtaattgattacaacttatagtntttgtcttcgaagaaatanttctaacttagagaaaattttcttcacacaaaccatgatgatgcacaatgcaaaacagatatcaaatgtactaagatgcatcaatcaaggtaacaaccaatacaaatgccactcgaaggaattgggcatgtaaaagccaaaacttcttcaagcttttccttgagcttcaagctttagccttggggtgttcaccatgttgctccccctatctctaacaattaccatttgattcacaatttgatgatggtacatatgaagatttgggtgtagttcaatttgtctcttcaaagttaagaacacacatcaaaatngagtgactatccttcttggatggttcttgtacgatgttcgaataatataatggataacgtggattttgtatggaaatggatgtttt

SEQ ID NO: 160728 - DNA, 440 bp, Glycine max
  unsure (1)..(440): unsure at all n locations
agcttcaacaccattaagggtaaagactcttctagtggccttcggatgtctagtttggtcattcacacccccaccattttgctctttcttgagttgtgaacaatccctttgagtatgccccttttgtccataattaaaatagatcatatctttatctggacaatttgaggagatgtgcactggcttcctacatctgtaacaaatgatatgagtggggaaagtattgggtttgctaccactaccacctacaaatcccttagcaacagtcctctgattgtcatggcgattaccatattgcttaggaggggtcgagcatggttttccctgatgttgagggccattctttntgttcctcattggacctgtactcctataataggttgccctggcttgggagtcttcatcccaaatcctactcatgttaacccaaagtgggaact

SEQ ID NO: 160729 - DNA, 413 bp, Glycine max
  unsure (1)..(413): unsure at all n locations
tgatgaaccttccttgatacctgncttgcttgctagcatatttcattngngnngcttaatgaacatgttccttctttgaaatactacatatccttgtgaaaggttgtgggttgaagcatttctatttatctctattcatgcgattgaatcattcaaaacaaacacaattttgggtaaccactatgatttctgtcacttgaggacaagtaaactgttatttctttgcttgaggacaagcaaaactataaatttggaggaagttgttagttgttattcatgagtcagtttgatatttaatatttgcaaggaattagcgttttaccttccaattatggttacttttgtacgaatagaacatatctttctttattgtgtgattatatagaggaataacttcattnttttgaattaat

SEQ ID NO: 160730 - DNA, 429 bp, Glycine max
agcttcctctgccgtaaaaaagatattatctgcctattgtctgtaaaaaattgcgcaatgtcggctgataaatatccgtcggggctatttaactaccgatgtcggctattgttttttctattccacccctgaattatatatggatgatgcctattaggaaatgttcggtctgggtcatccggtcatgctttttttgaggcctcgatctgtcgtctttcctagccggccgacgtcggctagcatttttttcgatcaatatctgtgtgaatcatgttcttttttgccaagagggcttatgtgtttgtggccgaacaaatgagaacatgccaatgacgggccgaacacaattcccgtctaaaaacctactctccctcattgtattattttaggaattcgagcgaaaaactttgctaccatggaaaaaatatc

SEQ ID NO: 160731 - DNA, 445 bp, Glycine max
  unsure (1)..(445): unsure at all n locations
agcttgttaccccatgttgatattgcttactatagagctgttcatagcaccactaattgttctccttttgaagntgtttatggttttaacccactaactcctcttgatcttttgcctatgcctaatgtttctgtttttaagcataaagaaggtcaagcaaaggcggactatgtgaagaagcttcatgagagagtcaaagatcaaattgagaggaaaaataaaagctatgctaaacaagccaacaaagggagaaagaaggttgtcttcgaacccggagattgggtttgggtgcacatgagaaaagaaaggtttccggaacaaaggaaatcaaagcttcaaccaaggggagatggaccatttcaagtgcttgaaagaatcaatgacnatgcttacaaagttgagctgcccggtgagtataatgttagttccaccttcaatgtctctg

SEQ ID NO: 160732 - DNA, 344 bp, Glycine max
tctacttatgtggcagggcgggctctcttcactatcttgtcttcaatgcgagctctgaccactggtcttccttcccgcgatgcttcttttcatgtccgcctgagtgggcttatagcctaaaccatacttcccacgatttccttgggtttttatcaggctagttatgccgccattgtctttgcctaaacccatcccgggttcataaccgttccccaacataactcgggccatcattaccgccgcatcggacagacaaggttgcccaaagagggagtccacggaggaaatgctgaccacctcaaaagactggaaagcggtttctaacgattcttccgcggcttcca

SEQ ID NO: 160733 - DNA, 428 bp, Glycine max
agcttctacataattggagagttctagagatagaaaggtccaagatccagagagtttgagagattttgttgtgtgaagatctgcagagaccagagctggaagaggaagccgtcctgagagcttgagatgagtttgtgagtgattgtgaagtcctagaggtggaggagacacccctactacttgtatttctgcaatctttcatccttttcttctctttgttgtaaaggaagcttcccagttatggaaagctaaatcctctgttggatcttccttgtaggtacttgatgtaaatatctttttttatctatttaatgatgttttgtgtgttcactgtgctatcagatcttcattctaccatgcttttgccttaatcatgtagatgcatgtgcttttaggatcattcaatagtggaaactagtctgattctt

SEQ ID NO: 160734 - DNA, 357 bp, Glycine max
  unsure (1)..(357): unsure at all n locations
ntacatgtctcatgacacctaagcacatttagtggagatatctggacttgatcttggattaatgggctgaaccataactaaaattcactaatcataattagtgaaattntggctccaaaatttggatccacaaattcaatttcaaatccaagtgaaatttgaatagaaattcaaatttccctccaattttgtgtgacacttacgctataaatagaggtcatgtgtgtgcatttttttggaactttgatcatttgaaaattaaacttcagatttcagagctcttttatagcacagaatttcgggctcttctcttcctcgtccttcattcatctccttctttcttcaagctcctattca

SEQ ID NO: 160735 - DNA, 318 bp, Glycine max
  unsure (1)..(318): unsure at all n locations
cgacttgaacgcaacatgtgcatatcatggaggagccctgcggcatttcattgagcactgtatgaccttgaagcataaggtgcaaagtccaattgatgcgggctggctgaanattgaggagaatcgcatatgagttccgacatttgacaagcgacaccacacatggggcaattttgaaagctgttgttagatgtctctaatgactcatcaagaatttcaagtttataaaccacatatacaatgcctaataaaatggattaatctgacatctttgtccctcatcccttctgaattacatcttttctttcactggaatgt

SEQ ID NO: 160736 - DNA, 453 bp, Glycine max
  unsure (1)..(453): unsure at all n locations
caagcttagaanattaaccttctaagtcgggtggattgtctactcctttnttatgtagcctccgaaggagcatctgaatgcagaggggaccttgggagttttgccatgactctgtgcaaattaaacaaatttagaaaaagaaaaagcaattacaaacaacacatacatatggaattgttaatatccacattaaaaatttttattacaattaaggaaataaacctaaatacattaatttgttataccgcagttacgtaggaaaattctaccataaaccttcatcatgatcattacgatttgcatgtacatcatcctcctcatgttcttcattaatgggaggcatttgtggggaaaaagcaggcatctcaataatatcaggtgttgaagcatcattttggtgactgaaaccaatnggtcttccttgtgaccaactggccatcttgagtcacaccg

SEQ ID NO: 160737 - DNA, 479 bp, Glycine max
  unsure (1)..(479): unsure at all n locations
actcagcttctcacatgtcctttnttctttattattatacttgagtctttattttattatgaaatctcattttgccactaggtccctggttaaataattgttaatactataactgatgaattttgctttgttggagcttttatataattagcagaaatctaagtttctggcctttataaaacctatacagtattatttcctatacaacattatatttctgaacgtcactaaacttctataagagaatacaatgagaacaacaaaaaccttatcccactaggtgtatctttagcatatgatatcataggcagagntacttggtatcttgttgctaacaattataatagccttgtctgttaattgtcattctgntgaaaggcttgttatgttccattttctaaagattaaggatgaaaatcaattagacaccacgatcataatggccaaatgcagtatatccttcaaatcttcatatagtc

SEQ ID NO: 160738 - DNA, 379 bp, Glycine max
ttatagatcatataggaaaaacttatgaataaacatctgaatttaaaactaagcattgacgtcaaagttcacatatctacggaagcttatgtatataatactttaactaaattttaaaagaatccgcaagagagaactcaagatattgaatgcatcatgtttgaccaaaacattaacaagataatgcagaataatgcttcaaagtgcacttcatgctttccgtttcacccactccatgtctttgaagcattaaagctaacattgtacattaaacttcaaaaaactttttaactatcatggactgtaccttaagtattcaatcatgtcagctacaaataagtcaccacacattccctcattatatttcaaataataatat

SEQ ID NO: 160739 - DNA, 398 bp, Glycine max
aactcaagctctaactgcactcgaatcacacactatagcagagtttgatgtcaaactctcatacttaacactagacgatggtgcattcttcaagctatgaaagattctccactctttctgtttttgtcagtttaagctttaaagtttaaatggagctggattgaaatgatgctatgcacagctaggagcctaagagcaatgatggagtgcgcccaagaaagaacaacggccactttccaatatattttcattctagctattttgagagagattgtgtttgttaagatgaattaaaaaagaatgaaactgaaagtgtgatggatgaaaagagataaagaagattatgataaagaactctgaattggtttgtatatatgaaagtacagtataaaagatgt

SEQ ID NO: 160740 - DNA, 449 bp, Glycine max
  unsure (1)..(449): unsure at all n locations
gcttctatatangttgaacccttttatcattatgacaagttgagttttattcagaanaattagagtttatctcttttatcttagtgagagtgattctcctaagttcttgagtgattcaagaataccctggctatatcaaaggtctttcacatcctttgtgtgttgcccttgccggaaagagtgattctttccttccatcatttcatcttcaaccttgttctttcaaaccacaattccagaaaatccacttctgcccaaaattatctcatggccataactcccattttacgtgctcaaattaagtgattcctgagcctaaattgaatttcaaaacgagatctttcacctcgttttagaatcacctcatttggagccctgtagcttgagttatttccatttctatatttctgtccagccaccacttaacctacgttttatcatctcattct

SEQ ID NO: 160741 - DNA, 408 bp, Glycine max
  unsure (1)..(408): unsure at all n locations
agctggggaaaaaatggcacattacatagnaacactgcttaataaattattgaaattggacaatatataactaaagacattattggaaatcctatatttagcctgtttagtttggtggttgatgaacaagatccacatcaattatgaagcaagaaaaactagcttctacattggctctaaaatttttactcggaaattttactgtacgcacatctaagatgtgtaaacaaacatgcagaatgatgacatgtttcatttatttgcttacaatcaaataataaattaaatttcatcatcacaaatatatcatcaccattaaactttntaagaatttcaattctgcagagaattctgctactgtaatgaagcatcatcaagtatgcttaccaaagtaaatcctctttgaca

SEQ ID NO: 160742 - DNA, 447 bp, Glycine max
  unsure (1)..(447): unsure at all n locations
agcttaaaaaagttgagggactaaaatcttattccttttatctttaggccttttcacttatatattagaaactagagtgatgtgaccctaccatgcaacagaaaacattttttaaaaaaatatttttataaaataaattttaaatatatatttttaaggttttctagtaagaattatttataattnttacttggttattctaatcatttatttattagttattgttttctattgttaatgatcgttatatagtagacttgaaaagtatacaatgggaaatatgataattaattatatgctaagtaggctagtaatttatataattgttgaaatcaatattacaaacaatctaaacttagatttgatgactataataaaaaatcaaaataaaatatttaccaaattacatgttcaattatgtatttttaaattaaaacttaaattcaa

SEQ ID NO: 160743 - DNA, 457 bp, Glycine max
tatataaagcctaaagatgttcgtgttcatgtcgtcgaatcacaagagttttatctgagacgaagatgagaaaaatggtgtaacgctatcagtttactagacgaaggaaacttgagcgaatatagtgaatcttaactttgctacgctagcaagattcattgtatttgaggtaaacactgttggatcaagtggcctcataataattaagaaggggggttgaattaattattaacgcgtcttgactaattaaaaatttatccttcttaatgttactagattcaattaggctttactactaagttatgagaaagttaagaacagaaacaataacttagacaagcggaaataaaaagtacacaacgtgaaagtaaagagtgtagggaagaagaaagcaaacacaagacttatactggttcggtcacaacccgtgcctacgtctagtccccaagcaaccatc

SEQ ID NO: 160744 - DNA, 432 bp, Glycine max
  unsure (1)..(432): unsure at all n locations
ttaagtcacctgcggcatgcacgcttctagatctatttcattccagngtgaattcaccgagggtcttacatgcctatcaattnttatatggntagtcttcgaaccacatcatactttgagagaggtatgctctgatacccacaaacctactcacacataatgtctggttgctcttaggattgttggttgttcccataaattaatataagactttctggtatgttttgtccacacttactaaaaaaacttctcagaaggtcacccatcccataattactttaagctaaccatgtttgactatagagttcttaagggatggattaccgaaaaatatattcatctcgttagtataggtaatactaattaatttctaagttatcctcaatcgtgcagnttcatacttacaccatctttagatctctcttattctga

SEQ ID NO: 160745 - DNA, 325 bp, Glycine max
  unsure (1)..(325): unsure at all n locations
tatctcgctgcatacactntctatttttaaaacacattattttgatttattcaaaaccaaaaggatgaaattaggagcgcacacgccagaaacttacttgttggtggcttacttaacaaggttggaaaagacaatgcccaggctgatattcaactggaaaccctgacgtatttcgcaatgtgcgatctatgaaagaaaaaatggcacgaactgttgtgacaaaaanaataaagcaacaaacatgagtgagtttcaagaaccactcgctattacacaacattgaacactattttcatatataaaataaacacacacctgcctatac

SEQ ID NO: 160746 - DNA, 344 bp, Glycine max
  unsure (1)..(344): unsure at all n locations
ccactcaaatcatacaatggctcattcaaatcataggcagacactcactacatacaaaaaaatccactgcatatcaatttcaaccagttcactgtncaaacaagctgttatacaaacaaccaactcaaaggactgacacctacataactgaaattcaaagaactgaaacagaaacactgaaatttaaatgactgaacataaatcataaaataactcagaatactaaaatgttcaaaatgcactaatttaaatgacctgctcttgtggatgctcctacgcatgctcattgagatccagcaccggagcagctggagaatcctaaaggataggctgctctagctcaa

SEQ ID NO: 160747 - DNA, 454 bp, Glycine max
  unsure (1)..(454): unsure at all n locations
ntatggctatgcaaacactaaggcttaggtgttggttctctcttcagatcgaactatggtttcaaggattgttcctttatcaaatcatgcgaatatctgaatccattttggcattcgagaaattctttcattatgctcaccctttagtttcacattcattatttttcaaaaacctttctatgttttgatccgtgaattttccaaagaaaactgccgggcattgtntttcaaaaatgcgtcggctttttagatatctttcttgttgtttttctttttagaaagaatatgtaatctgaggaacaaaaggtgtgtaaatgaaaacaatacacaaggccctattttttttacatagtttttttttcgattgggcaaccatatcacgcacacgtcgacatacacttgagcagcaagttttcatatgggttaacaaaaactgaaccatacataagacagt

SEQ ID NO: 160748 - DNA, 441 bp, Glycine max
  unsure (1)..(441): unsure at all n locations
agcttgtgaaatcaatggaatccaagattttacttgacacaagtcgntcaattctgttcttagaaatgtgacctaagcgcttatgccataatgcttctgagtttgtattatcaattctacgcttagtaccacgcaattctgcattaaaggattcaccagaggaagctatagtatcaagtaaatatacattatcattaaccaagagtgaaccagttccaacaatatatgaattaaaagacaacctgaacacattgtttccaaatgaacacaaataacccaatttgtccaaataagaaactgaaaccaaattctttctaaatgacggtacaacaaaagtgtctttctaatccaaataaaaaccagtacataataataatctaaagtgccctatagcttccactttctaccgattaccatctccaacatagatccgtctttcaa

SEQ ID NO: 160749 - DNA, 466 bp, Glycine max
  unsure (1)..(466): unsure at all n locations
tggcatttggaatgcgaaagccncactccatcattaggattagtacctgacatctcaaacaaacaaatcaaacgtaacaagacaattatagttgttgtttgaatacctcacccactcaagtgtatcacacaattatggcttttctctaatgaaacactcttgccttttaccactctaattccccttgagttcttaggcaattcaagagattatggccacaacaaagaacaattcaccaatatgtgtcaggtaaggctagagagacaaggaaaaggttaaccaagaaaaaggctaacaatgtttttaggcacaaatgaaggaaataaaattcagaatttaggaattcaagtaacaatccttcatgcaaccaatatattaccttanagagattnttttaaagtcttcaagcatgaccattcagcccaattnntttttttaatntgctatacgacatctgctttttttt

SEQ ID NO: 160750 - DNA, 443 bp, Glycine max
  unsure (1)..(443): unsure at all n locations
agcttctatataaactgaactcatttatatttatcacaagntgagntttattcagaaaattagagtttatctcttttatcttagtgagagtgattctcctaaattcttgagtgattcaagaacaccttggctgtatcaaaggactttcacaacctttgtgtgttgccctcgctggaaagagtgattctttccttcctttcatcttcacccttgttctttcaaaccacaattccagaaaatccacctctgcccagaattatctcgtggccataactcccattttacgcactcaaattaagtgattcttgagcctaaattgaatttcaaaatgagagcttccacctcgttttggaatcacctcatttggagcccggtagcttcccgtattgccatttctatatttctgtccagccaccacttaacctacgttntaccatcccatt

SEQ ID NO: 160751 - DNA, 358 bp, Glycine max
  unsure (1)..(358): unsure at all n locations
tgaatcggacatccgtgtgaaaagntatgaccatttgattttctcaagcgcttccggtgttcaatttcgagcctctcgacatattatgcgcccgaatcggacatccgtgtgagaagttatgactatttgaatttcccgagagtttccgacgtttaatttcgagcgtatcgatatattataagcctgaatcggacatctgtgtgaaaagttatgaaccatttaatttctcatgaagcttcattgttcaatttcgagcctctcgacatcttatgcgatcgaatcggacattcgtgtgaaaaagtatgaccattttaatttctcgagaggttccgatggttaatttcgagcggatcgatat

SEQ ID NO: 160752 - DNA, 92 bp, Glycine max
aagaagaaacaaaaactactacaaaagaaaaaaaccgaaattataagaaacctaagaacgcaacaaacaatttaaaaaaacaaaacccaaaa

SEQ ID NO: 160753 - DNA, 447 bp, Glycine max
  unsure (1)..(447): unsure at all n locations
agctngaagaggatgctttaatggaggaaatgaaagagagaaggggggagcacgaaattgaaggaataaaagaaggagagaagtggaactttgaagtgtgtctcataaaactttcattcatcaaagttacaacaagtgttacacatgtttctatttatagactaggtagcttccttgagaagctttcttgagaaaacttccttgagaagcttctttgagaaaacttccttgagaagctagaacttagctacacacacccctctaataactaagctcacctccttgagaagattcctgaagaagctagagcttagctacacacaccccctacaataactaagttcacccctatgccaaaatatatgaaaatataaaaaaagtccctactataaagactactcaaaatgcccttaaatacaaggctaaaaccctatactactagaatgg

SEQ ID NO: 160754 - DNA, 387 bp, Glycine max
  unsure (1)..(387): unsure at all n locations
ctccatcacaattaatatagagagaatacttatcttggactagtagaanttgggtagaaactacttaaagaattaatcattggtataaatcatatttgaaaattatactacactaagatttttgtttctaacattctaatagaactagattagaaaagatagaaagaatgaaaaaacttattaattacagaaccttaaattcccaatagataccaatgcaatatttcttctaggcaagggcagaaagaatcaagtgataactaggtgtcaagagacctcaactctccaaaacctccaataggttgtgtctctctaggatgttacaacctcacctttaactaactaaccattactatattctattacaatgagacatattttgttaca

SEQ ID NO: 160755 - DNA, 435 bp, Glycine max
  unsure (1)..(435): unsure at all n locations
agcttgggaagtttatctattttgtaagcagataanagaagggttccacatacaatacggaaagatagacatgttattgagggcttttgtgcaaatacaaggaaaaatgcaattaccatcttgctcctcttagcctcttcatcgctgtcattaccatcatcaccaatagctntcctggaaaagtacatggcatttttaaatgtcagtacatcaataacaatatgcatatcaggagagtgaaacaacaaaacaaacagatactggacttcaaaccttctttttgtaatgacccgatcatcaggaccagcctcagcatggccatggccatggccgtagtcaggaaccctgctaacaacgtccctcagaaagtcaaagacattatagctttgtacacaatgttntctgcaatntacattctccacttggtagacttga

SEQ ID NO: 160756 - DNA, 430 bp, Glycine max
  unsure (1)..(430): unsure at all n locations
ttacaacagattntagtaatgacccactaacctagaatttatataacttaatgccattaacctagggaattaaaaaaaacttaatggctgagtgtaactgaaattgtggcaaccaaaagtcacccccaatagccaacaagtcagccaccatttggtctcccaaaaggctgatgcctaggttgccaattgggcccttattacaacttgaactaaacctaactaaagcccttttagttgattaacccaaaacatatttttggtcagccaactttacaaggattgggccattatttagacagactaaacactctaaaattgaaacaaagtggtgtcatttagtcctccttcatttgggccatgatacaactcacaaccttggacttttctccttgaaactcgngctcgtattcaatagtatggacagacttgt

SEQ ID NO: 160757 - DNA, 119 bp, Glycine max
agcttctaaactttatacaagaatgaatctctgataccacttgttagacaagtggccttatatatcttatcacagcgggtcgcaatatgactgcctggattatacttcgactctgactt

SEQ ID NO: 160758 - DNA, 382 bp, Glycine max
ctgatgatatggtcttcaccgacgaaaggatcatagtggtgtctaaaaagaggcaaatctgatcatcatgctttgataaatgccaaaaaaaactagggcaaatgaagaacaccacctttagcacaaacctaaatcaaccacaaagtctgtctaccgcactttcaatgacgaacaccacctttagcacaaaccaaaaacaccaaccaagaaatgaattttgcagtgagaaagcctgtagaattcaccccaattccagtgtcctatgctgacttgctcctatatctacttgataattcaatggtagccataaccctagccaaggttcattaacctccatttcttcgagaatacgactcgaacgcaacgtgtgcttgtcacggag

SEQ ID NO: 160759 - DNA, 440 bp, Glycine max
  unsure (1)..(440): unsure at all n locations
caagctttacagnagaatttagtaatgacccattaactctttaattaaaataacttaatgccagtaacctatggaattaaaaaaacttaatggctgagtgtaactgaaattgtggcaaccaaaagtcacccccaacagccaacaagtcagccaccatttggtctcccaaaaggctgatgcctaggttgccaattgggcccttattacaacttgaactaaacctaactaaagcccttttagttgattaacccaaaacatatttttggtcagccaactttacaaggattgggccattatttagacaaactaaacactctaaaattgaaacaaagtggtgtcatttagtcctcctccatttgggccatgatacaactcacaaccttggacttttctccttgaaacttgggcttgtattcaaacagtatggacaacacttgttg

SEQ ID NO: 160760 - DNA, 476 bp, Glycine max
  unsure (1)..(476): unsure at all n locations
acaacatccaagcaaaacaacattcaaacagcacaagctatcacagtctttcaaaacagggcaaaggcagaaaactctgctcaacacactaaccaaaatcacagcttttctcacttaaagaccccagtaacatttccttcgatccaattcgttaaccgttggatcgactccaaaattttactggaagtctatagtgaataagcctacattgtgaccgttgggatctactagcaaacatccagaactcattctgcactactctttccacagccaaccacacacaagcatttttctgcacaagccaaaatcctgctgcacctattttgacagcaaaattctgcataagtgcagatttcgaagatcacacttccnctcatccaatcttgctcaaatcaaatcctacaagtcccaaatcatgtatcaaacatgtctaaaccaaagccaagcttcaaaccacagcaacacagaatctaagt

SEQ ID NO: 160761 - DNA, 392 bp, Glycine max
  unsure (1)..(392): unsure at all n locations
taaacnggttgaagaggcaacattcctactttggtcttggcttacgagttttgagaaagatttcacagtccattttaatcaatggtcaagtagctttacacaaagttttatgtatcatcagaggattgcatagttacgagcctaatacatgtaaatttcatatgcaaactgtatccatagattggttccctttcagaatatgaatgtctgattgtggaaccatttgtatggcacttttatgtattatcagtacctctggtactccattctatatctataatactatctttgctgataaaaaaaacagtctgcttcaagtatgggcatattgctatgaattgttatcattgatttgatcaagcctatcaacctacaatgcctcagtctttcca

SEQ ID NO: 160762 - DNA, 437 bp, Glycine max
  unsure (1)..(437): unsure at all n locations
cactctaatagagagggngattaaaaactttatatttccacacagagattaggctttagtttctctcactagaatccttcaacttgtattcaagatgctcttcaaacatgtcttaaagctctatggaagaccattgaaatgggctctacccaactgaaaaacttctggaacaagtagacaaacatgacaactatcatgaaatgacagctcgcaaaacattctaagaaagacattctgaggaacattttttataatatttttgaagcatctttagaatagtcattctgatgtttgctgagaaagaatttatacttgtagtagattcttttgatgaatatcaactaatatgcctttctaaagtaatgcagcttcatcaatcataacacatcttcacagcacaaagcattatgaagaaaattgcttcataaatactgagt

SEQ ID NO: 160763 - DNA, 440 bp, Glycine max
agcttttgtgtgggacacccagcgtgagcatatttttcatacccttatagaaagattgacgaccgctccagtgttagttttgcctaacccaagagaaccctttgaggtgtattgtgatgcatcaaagatgggtttaggaggagtattgatgcaaaaaggccaagtagtggcctatgcttttagacaactcaagactcatgagaggaattatcccactcacgacctggagttagctgctgcagtttttgcccttaagatgtggaggcattacctgtttggctccaagtttgaggtgtttagtgatcataagagccttaagtacttgtttagtcagaaagagctaaaacatgcgtcaaaggagatggttagagtttcttaaagattatgatattgagcttagttaccatcccgacaaggctaatgtgtgggctgatgccttg

SEQ ID NO: 160764 - DNA, 483 bp, Glycine max
  unsure (1)..(483): unsure at all n locations
gcttatctttactagctagcagtatagtaagcaannaaaaacttatcttttactttctgatcatgattgtatgtgttgaggagctttcatgattggagatctaacattgatagccaaatttaataagtacatcatttgctctttcataaaagagaattctttcactacaagaaaaatgacatatgcctacggaggcttttgcctacacacataaattagtgtaggtaaaagtaaaaaaatacgtatacctatagttgtttgtcataggtaaaacttaaaaatatatacttactattatttggtgtaggtaaaagtcaaaataacttctacttacaaatgcttagtgttggtaaaatttcaaaacacttatacctacaattacttggtgttggaaaatcctataaaactatacctacggtccattggtgtcactacaagaaanataacctatgcttacaaacgctnntttcctacagacatgaa

SEQ ID NO: 160765 - DNA, 454 bp, Glycine max
  unsure (1)..(454): unsure at all n locations
agcttatccaatccaccctcanattcaaacgaataaaagttgtatgcaaactataaaagcaacatctaaacggctgaagaggagtatcggtagcagcaaacaaggccccgtatacatataccttttcagaccaagaatgttgacaagagaatcaaaaccgaacaattccagtttagattcctgctgccgggatccattaggtttctgttcatgagaaaggttctcttctttagcatccgaactcccattcacactcgtatttacttttctgccaacacaaccacaagtaaaaaaaaaaaactcagaataaacccaatcataacaacaacatcgtcaactcatcacaatgaactagctttattatttctatcacaaaaacacacaatcgcactctcacacaaaatcaactcatcacaagtgactagctttgattcctttatctcacaatcgcatt

SEQ ID NO: 160766 - DNA, 301 bp, Glycine max
cttaaactcgctgttaggacgggcattagttttttagtttgtattgattgtatgcgtagggacggggatttaatggatttgctttgtggataatgtttctagctttcgttgttatttgccgttggcacctaggagttagggctaggtagggctaatttttttataaatgagcagattgcttgagaattgattttgcagaacaataaagccttttttcttatataattatcctggatttttattaacagggaccaaagcaggtgatttgagtgtaaagaagggggatgtaacactaagtaat

SEQ ID NO: 160767 - DNA, 434 bp, Glycine max
  unsure (1)..(434): unsure at all n locations
agctntagagcttacaaatgaaagaaaattatttcatgactatctatgataaaatcacaagctttcaagtctctcagcacaatttacgtaaaataaagcattattttccacagttcatgttaacattaaaaattataagccatatacagaaagaacaacaacacttttcacgccaacttatatgtcacaaggttttaaaaatatgtctgcaactgcgatttcagctgcaacaaatgagctggaattgtctgcaatttcccgcaatataaaggaaagtgacaaaaccgtggccgcaatttaaaaccttgatgtcaaccatccagtcaactaatcaagatacacaccaaaaatacctgagaagaaccagaatcatctggtgatgaggctntagcacgacttcttcttccatctagcacagcatggacatttacata

SEQ ID NO: 160768 - DNA, 381 bp, Glycine max
  unsure (1)..(381): unsure at all n locations
ctcaagctgaggagaaaaaaccgtcatgatcttcagggggatgtttttatgtttatgacacagnctcctagtctttcttggattatatgctgcaacgattgggcttttgtctcaaatggagaaagaggatctcagcttgcctccattcagcaaccatatctattcttgttaatggcagccctacaaaggagtttgctccaactagaggtttgagacaaggggaccctttaacccctttgctctttaacataaatggagaaggcgtcacacgtttgatgagggaagcagttcataaaaatctatacagaagctacatgtgtggaaagagaaaagaacccactaacattctgcagtaagaaaatgatactgtttttgtgggtg

SEQ ID NO: 160769 - DNA, 391 bp, Glycine max
  unsure (1)..(391): unsure at all n locations
cctgaaaccctctatttaaatttgacaggctcatgtctcccttcctgaaaatccactaaaaactgcctaacccccctgctgttactccataatntattctgcaataactgcttaaggcagttacatatggtcctaaatcactacacattcagttacgattaaccctttgtgcctaactagggtttcgaaacatcacaacaaagacagaccattgaacaatggattttcatcattaacatacaacagagacacaccttcgatggaagcgcagacacgaactccacaaacgcgaactcgacaatgtggttgctgtcacgaaagcgcagcccagtttgcgacaaacacgaactcaggcagaaggagaaacaacaataaagccctgtgttaaaac

SEQ ID NO: 160770 - DNA, 482 bp, Glycine max
  unsure (1)..(482): unsure at all n locations
gaaactaaccttataaaacacattgccttaatcatttccaaatatgcatttttattangacgcatcaacaagaatcaagccaaggctattgtgcaagcaatcaatggggcaaaacacaccaaatgattataatgatggatggctcaaattctcacaaaggtaaaatcatcacttttaaattgagctttcaaaactatcatgacatgtagagaagaatcaaggatttcaagtcacaaaatgtcaagaacttttattttcaaaacaattacccatttcttgaacatatcctgtaattcaaagaaaaacatgcaaagtcgtacgtgcacatgaaattgacccaaaatattaaactgagaatccgacgaaactaacaacattaacaaattaacacaactaacaaattaacaaaaccaacaaaactagaanaaccaaagaacactccctcccatacttaaacaacacattgtcctcaatgtagcaca

SEQ ID NO: 160771 - DNA, 396 bp, Glycine max
agcttataatatatcgatacgctcgaaatttatcatcggaaactctcggaaaattcaaatagtcataacttttcacaaggatatccgattcgggtgcataatatgtcgagaagctcgaaattgaacaacggaagatcttgagaaattcaaatcgtcataacttttcacacggatgtccgattcaagcttataatatatcgatacgctcgaaattaaacatcggaaactatcgcgaaattcaaatggtcataacttttcacacggatatccgattcgggcacataatatgtcgagaggctcgaaattgaacaacggaagctcttgagaaattcaaatggtcataaattttcacacggaggtccgattcaggcttataatatatcgatacgctcgaaa

SEQ ID NO: 160772 - DNA, 433 bp, Glycine max
tctacttatgtggcagggcgggcttccttcactttcttgtcttcaacgcgagctctgaccactgtccttccttcccgcgatgcttcttttcatgtccgcctgagtgggcttatagcctaaaccatacttcccacgatttccttgggtttttatcaggctagttatgccgccattgtctttgcctaaacccatcccgggttcataaccgttccccaacataactcgggccatcattaccgccgcatcggacagacaaggttgcccaaagagggagtccacggaggaaatgctgaccacctcaaaagactggaaagcggtttctaacgattcttctgcggcttccacataaggcatggaggatgggcagcttaccaagatatcttcctcgcctgacacgatgaccaagtgcccctccactacgaacttcagcttt

SEQ ID NO: 160773 - DNA, 440 bp, Glycine max
agcttgtgataaccattcctttcggtgaagtcctctaacagatgcagatgtacaccaagtttgtgaaagacctcctaagaaaggaaatgatattaataatgaaaatattgtggtagaacaaaattgcagttatattatttagaaaattctaccacaaatattctaggatcttggaagtgtgactattccatgctccatcaagacggtgtctgtaggaaagactctcattgatttgggggcaagcattaacttgatgccaatatcgatgtgccgaaggattaggaatctgaagatagttcccaccaggataactttccaattagcatatcattctatcacaaagccatatggtgtggttgaagatgtcctggtaaaggtcaagcaattcaccttcctgtagattttgtcatcatggatatagaggaggattcttatgtacc

SEQ ID NO: 160774 - DNA, 435 bp, Glycine max
tattgcatccttgtgtcattcccaaacacatgaatgtgattggaaaaaaaagggaacaccactcatttccttaaattttctatttgatctctttaaggtaaaaatttataacccattgtattagttgagtattatatagcattgtttagttatgggttgtgtgaagagggttagaaaactaagtattaaggattattatggtttcctcaaaaccctaggtttgctaaattaggagattttgtctaatctcttattctcttattttaaatgcttagatcctatggaaaatatggtggttgatcctcccaacagcattggaaggcattgattgcattcttttgtgtgagtagctaatctacttagcagcattttttttaagttcttgtgggagaagcaagtaacttcacaaattattcttttgtgaatcttgaaatt

SEQ ID NO: 160775 - DNA, 443 bp, Glycine max
agcttgtctttttagggtatacgaaagatggcccatgaaattcaaaaatttaatgactgcccacacgtactgtctcgtggggggtatgaactgcttgacaagaaacttatggaggagaagagcaagcgtggacatgaggaacattcgtgtactgaaagcccaacactcaatgtcgacccaccatccccagttgcaagacacttgaagtggaagatcgcctgcactaagcggcatggccaaatgacgcctgaagtggcacaagaaattgcagacaaaattgtgagttcatatatttttttggttactgtcattggcaaataattgttagcaaacctagtcaaatttattttattcaaattcaacaattgtatatccatgcaagattcattacaggaacaagcaacacatgggagttttgttccgcatgggcgacaggacatact

SEQ ID NO: 160776 - DNA, 391 bp, Glycine max
  unsure (1)..(391): unsure at all n locations
ctgagggtgcgtagcccaccatcttttcatagtagagttctcgatttgtgtctaccatcacgactatcgtctccctttttgcacatgttctgtagttgcatcctatccggaaccatgtcaaaatagtactgatactgcctaacnaaaggcaccattaggcccttccaagtatggactccgnaaggttccaagttagtgtaccagttaacagctaccccagtaagactttcttggaagaaatgtattagcaattcctcatctttgcgtatgcccttatcttccgacaatacatctttggatggttcttggggcaagtagtccccttgtacttgtcaaagtccagcaccttgaacttgggaggggtgatgatattgtgtattgggaacaactc

SEQ ID NO: 160777 - DNA, 446 bp, Glycine max
agcttcttcactgccacttgtctgccatctgaaaacactcccttgtacactgttccaaaccctccttttcctataactctgtcctctgagaagctgctagttgctttcagaatgtcggcatgtgtgaaaactgtcttgttcagacggataaccttaactgtgtcagacatccatgatgaggatccggagctgctggaatcatgccattgttttgtatccctcaagaggtatcttggttcctctgaagggcttttcaccgatacacagactaggatcgtaagaagcccgaatactgcaaaaaccagtgttataactatacacaccaaaaacacagacagtcttgtggactttttatgctctttgggagaggtggtgtttgtatgattggtaacgttatcgataaactcgggaaggatcaaaagggggttgcctaaatatgaattttg

SEQ ID NO: 160778 - DNA, 408 bp, Glycine max
acgcgacctataaaactcagctaagggcccagctcatatcttcacagggccttacatatgtgaactagttcacctgtgtcagttcctctcttggccttgcagtcatagaagggaggagcatggaaacacggctccattgacatggcacgtcgacagggaggatctggggctgttcgattctcaagtttgtacagaatccacggttgtaaacctccaagcccctgagccacatacccaaaagtagaccatgagctagtaaccaacacatcagttaagcttaagagatacatttctgcccaagcttttttggtgtgcatctgcttctgtgtttgttgatatccttcgtggctcggctggtaaacgccaaccacttcttccgtcaccgtaggatatttccaatacatgtct

SEQ ID NO: 160779 - DNA, 433 bp, Glycine max
  unsure (1)..(433): unsure at all n locations
agcttcaagaaaaagatggcctcaacaaattctttatttccagaagggaattctatcaatagacctccaatctttaatggagagggttaccactactggaaaacccgaatgcaaatttttattgaggcaatagatctaaatatttgggaagccatagaaatagggccttatatacccaccacagtagaaagagtttcaatagatggtagttcatcaagtgaaagcataaccatagaaaaacctagagatagatggtctaaagaggatagaaaacgagtacaatacaacttaaaagccaaaaacataataacatctgccctgngaatggataaatatttcagggtttcaaattgtaagagtgctaaggaaatgtgggatactcttcgattaacacatgaaggaactacagatgttaaaagatctaggataaatg

SEQ ID NO: 160780 - DNA, 409 bp, Glycine max
  unsure (1)..(409): unsure at all n locations
ggcatgatttacattctccccctttctcaagcaaattcttatattttcttgacatcatcaaaatcttcatgatttacagctataagtctaggtatacccaccccaaaacacagaaaagtggtaaacctaagactcatagcagttacctatatccaaacctctattgtacaaaaaaagtattgttggatgtcagagggcctcctagctggaaccctctaaagaatcacatgaggagtcctccttcattggctttggtgtcctcattactatgtcctcttcatccataaactagttgtcctccatagatggatcatcctcttacatggacgggtccttctcttgggatatatccttctcggaattctctntntcatcatcagactaaaggttaaccatatccaccactgat

SEQ ID NO: 160781 - DNA, 466 bp, Glycine max
  unsure (1)..(466): unsure at all n locations
ngcctgtccgatgcagcagtaatgatggcccgagttatgttggtgaacggntacgaacccggaatgggtttaggcaaagacaacggcggcattgttagacaagtggcctcagatatcttaagaagggggggttgaattaagatattccaaactgtttcccctaattaaaaatctatttcactttttactcaagttatgaattcccttaatgacaatcttcttaaatattaattcaaatgaagcaacttgaatatgaatataaagcaataataaataaaggagattaagggaagagaaaatgcaaactcagttttatactggttcggccacacccttgtgcctacgtccagtccccaagcaacccgcttgagagttccactatcttgtaaattccttttacaagttctaaacacacaaggacaatccttcctttgtgttagagatctttaaacaagagactacagtc

SEQ ID NO: 160782 - DNA, 446 bp, Glycine max
gcttattaattagtgcgggcacattcaaaaccgtcgccgtggttctttttttttagggtggcacaaactctttgactaggtcaccaatgttgaagttacggaccttacggtgcaacttggtatcacacactcatgatctcggcggcaactatcacgttttcacgtcaaagttcttacacagctatagttgcaacgacacaaagaacatgtgcatttccatagcttagaagtcgatgttgcaagagataatataaacaacaaaactaagattaagatgaacgacgtaaaaataaagaacgttaactgtgagatccataacttacctgtcatgttagaattaatattttattaacccttgaactggaaagtatgctatgaagtctatctctggccaattggagcactcgaaagttctggtcaaataacgtttaattgattattcccct

SEQ ID NO: 160783 - DNA, 489 bp, Glycine max
  unsure (1)..(489): unsure at all n locations
actcagcttgcattctacagaagntacaaacattgggttataaatatataactattaaacttggatacagntcaaaacaggccaattaatcttaaccaatacgatcgtatgtttttattcaagagaatggaggaaaaacaaagcaaagagaagtagaatagaagagacaccaagacatgtcattgacttcttggagctttctctttaatcataagaggaacccaggagtcattgcccctcatatattatatccccaagatagtttggtgcaccattaaatttaaaactgggggtgaaaaattatgggaatgacccctaaattttcactcttggtttatcaggatgtaccaaactgtagcccacaaaacaaatcacaaatcctgacagttgtattctcaacgaaagcaaacaattctctacaatgactacatcgaccattagaacgaanaagaaagcactatntaaacctaatacacttgttcatataca

SEQ ID NO: 160784 - DNA, 388 bp, Glycine max
aatctaggtatcccaaacccctcaatttaatggattttcaaagtttggagaagtgaaattgagaatgggggtaatttggagccaactctcacctcacacaagtctataacaatcatttaaaccttttcaaactggatttacacctaaaattccaccgaaccaaaattgactccctcacacccaattttaccctaaaaatggctctttgttcactttggtcatttgtttttctctctagcacagcccaaactttctcataagtcctaaatgaaatttcaagctaggattaactcactttaacctccaaataccactaaatccagatttggccttccaactctcaaaacctcactctttttccactcataacaccatattctcactttct

SEQ ID NO: 160785 - DNA, 432 bp, Glycine max
  unsure (1)..(432): unsure at all n locations
tatcaataaagacaagttgagttttattcagaanattagagtttatctcttttatcttagtgagagtgattctcctaaattcttgagtgattcaagaacaccctggctgtatcaaaggactttcacaacctttgtgtggtgccctcgctggaaagagngattctttccttcctttcatcttcacccttgttctttcaaaccacaattccagaaaatccacctctgcccagaattatctcgtggccataactcccattttacgcactcaaattaagtgattcttgagcctaaattgactttcaaaacgagacctttcacctcgttntggaatcacctcatttggagccctgtagcttcagntattgccatttctatatttctgtccagccaccacttaacctacnatttaccatcccattcatccattttatg

SEQ ID NO: 160786 - DNA, 323 bp, Glycine max
acttgactgacttaacacgagcttcacttgtgtgacaacaattattatatttatagaaattatctgtcatattaattgttgttggaactattacattggtatgaataaataaaaaatttaaaagctaaataatgatacgttcgttataaagtgtgaaccggggtccaaacaaaaaaagaaacatcgatcaacgattaattgtcatgaactggtcactcaccaaaaaaaggatctattaaactattgtttatatcattgatatcaggggagtggtacctaatgcttttaagattaccaacattatagtaaaacatttaaatgat

SEQ ID NO: 160787 - DNA, 443 bp, Glycine max
  unsure (1)..(443): unsure at all n locations
attcattaaaggacagtacatttgttttatgttttgctgnnttacaaaaagagctaaaactactctggtgcacttcgtctacatatacctcaacattactatgcttaataaaaattggggatcttagtaaaacataaagcactttctcaaatattaagatcaaataacattcagcgtattcaagagatgcagcccaaataaataatgagaacattaaaaaactgaattacctcacttaaaatgagaacccctttcttggatgctcgacacgcaacaaattcatagctgacaagattcattccatcccttatagatgtaacaagtgctacatctaaattcgatgtgagtcagactagtatgatacatatcatgggtgctgaatacttagctcaataaaactacttaagatgggatttataatataatataaagaagatatgctg

SEQ ID NO: 160788 - DNA, 455 bp, Glycine max
  unsure (1)..(455): unsure at all n locations
agctntctcatagccatttcctgaggggactaacatttggaaagttagtttacaagaaaatgcttattttaaagcaaaaacggcatgctaatctttccgatttagatcaaacttgtgaacacatttccttaatgtaaaacatttatgaacgtgcatatgcgtaaaatatcctactatttatatcaacatacaaggatattcaaaacattctagttaccacacacacacacacacacacacacagatatatatatatatatatatattttaaaagaatacatatacgcatgctcaaggtattgtgtcaaaattacacatgttcatatcctaagtattttgctaccacaaactacctacgcacattgggagtattttattaacatatacatttttgttgggtcatatttggttatatatgcacattggagagccaaactcatgtcatgcacacactt

SEQ ID NO: 160789 - DNA, 490 bp, Glycine max
  unsure (1)..(490): unsure at all n locations
ccttcaaactcagctaatgatcgttatgagtaantggtgtatgtgatgcttaatcacataatgaatgccttatgttgaatttcgcttagtaatttaatttagggttggattaagtggttaaactgataaaggataaactctcgtaatctacgataagagacttgcttgtgaatcaaggggaagcaacgtgttttaattctgatattttctaattcacatatattcgctgtttaatttacaaaagcaaacaaccccccccaccccccccatcgttactgttactgttactgcaagtatattatgaacatttggcttgtcactgctctgtgggaaacgacctacgatcacttcctagntactacattttaatggttatttgaatcgggtacggcctcgatcaatagacttgatgacccatataattaggaatcgctaagacgtttgtatatcactcacatcttgaatagttataactttcagaataaaatga

SEQ ID NO: 160790 - DNA, 423 bp, Glycine max
  unsure (1)..(423): unsure at all n locations
agctnggagtggngaaccacctgattattcaggattaattgtgtttggatcattggcctttgctcgtgttaaacaaggaaagctggatgcaagggctgtaaagtgtgtgttcattggctatcctgaaggagttaaagggtacaagctgtggaaattggaaccgggtgagacaagatgcatcatcaacagggatgtaacctttgatgagagcaggatgacaatgctaaataaggagcagaaggataatagctcaagtggtgagagtaccaattttgaggtagagcattctgagattttagatcatggcagtggagatgctattgatctcactgatcaaggagaagctggagataatgaagagttggctactcaacatgacttgtccaattatcaattgactagagatagagaaaaaaggatgat

SEQ ID NO: 160791 - DNA, 440 bp, Glycine max
tccatcaataatgtagcttttaaaatcactaagtttcaactatgcatcatgataatcgagtatatgctattatagtcgactatatcgacctttgaattccagaattgggaacaacttgcaaatagtcaattgtcttaagtatctaatcgactatttggttctgtagaagtttttgctttcgcaaatagtcgattaaatggtaatataattggctatatgttctttagaaaagccaagtgatgcgaagaataatctagtcaattatctttatggcataatcaactattttagttctgaggctataaaaatgaggttttttttaaaggatttcaatgtgacaccatttttgtctcatttttcattatgtctcattgagagagattctaacaacctcagagtgtcatcaccaccttgatccttgactggaaacatcatatgta

SEQ ID NO: 160792 - DNA, 391 bp, Glycine max
  unsure (1)..(391): unsure at all n locations
tttgcttttagcaaattattcctgttttctcagattccaactacgctgaaagtggaaaaggcttgcaatccattccttcgcacatggagcatagaaatccggcaaaaactaaatattgcagccacggcagatgatgcaaaagccctgtgtgttatccggcaagcaaaggataatttttagaattttttaattaaaatttaaaattctaaagatacttattctgtatagattaggttaatgaatccatcaaatggaataatatttacttggcgatatcgtaatataatttttcaattntctctgggttcatttgagatgtaaattagatttcagttttgttggcctgatgggagtcanaatcatgatggtgcgtggaagaagctcatcactc

SEQ ID NO: 160793 - DNA, 421 bp, Glycine max
  unsure (1)..(421): unsure at all n locations
tcctaacaataatattgcacacatttacacaatatcttccacctgtaatntttaccatcctctttctctcgcgtcaatcacgctgaaaagcaaaaactcaaaagtaactagcaaatattattattgtcctattaaatttcgagtggaacagttaacatcacacgagttaaaaaccaacaaacaagtgaaccttctgttgatttgtttgtaaaacgcagtcagccaaaatataaagacagaatattcaagagcacattggcccaaaaaaaaaaacagatattatggaaaaagagcaagaaggttaaaaaagaaaaatgaaaaaaaaaaaatacaatgaagtaaccacttgcacagttgcactgtttgataataaaataatactaattactatatgtttatcttatacgtaaaatttgacctc

SEQ ID NO: 160794 - DNA, 434 bp, Glycine max
agcttgtggcccacgtatgtgtgggactgttaccactatgttacgataatgtgaaaatgtcatggatgtattgcatgtcttattcatcatatcatgttgtgtgttctgagggatgttgttgagctaacaaggggggcatgaatgagttgaagtgtggtttttcctttgaaagtgattcagtttggaatctctctctgactcatgtcaatcccatgagttgcagtatcattgcaagaaaggataatcctaacgtaccaccaatagtcacatctcaatgaaaatatgttgttgggcttcccatggtgtggaaatttggcaattgcatgttctcatggacttctttcaagaagtatttcattggtacaatatgcatatagagtcttaagtggaatctgcatcataatgcatgtatgtatatgagaatggtaatgatt

SEQ ID NO: 160795 - DNA, 440 bp, Glycine max
taagagaattcaacaaaattaggggggtaaggtaaccttctctctggatctcttctgaactcttcctggatactcttttccttgtaccttcccaaattccctttctccaccttctcatgtatcctctctgcaaggttttaggaacaattgaagactatacagaacagagcaaggcatcactcatagttcctgttttcaatttgaatttcttctctaagacacaatctgagcaatctatttttactgtaaaaattgttgaaaattcaatacaaattttatgttctacatttcattggtgctttcattgtcatcaatggctgacactagcctcacaacgttgcaagaccaaattactacacttacgagctggatgaatgatcaaattgaatgagatcagattcaacgtgatctccaggtttcagtttagaaatcgcagcaag

SEQ ID NO: 160796 - DNA, 441 bp, Glycine max
agctttttgtacgacaccttgtacgcaaattaactgttaatcctctcttgaatcaaataaatttttattgatggatcttctctgatcatgcctttcaataacataacaaaatttaaatgacaattaacaaaaaatgaacataatttgaacataaaatacgtacctactgcacaagtggcaattaaatctgaatcaagtttctcgtgatcttgtgtcatggtcatattcagacatgtgtgtggttcaccccattgtgtgactttccatgtatctatttttttagataaaattgtcctcatatagaaagggcagggacactttgcatttttattcaagcaacaaaccacatacttgttcgttttgctttcaacaactttgaaacattgatgcaccttcataacataattgttgactgcatttttaccgcatcttactataaat

SEQ ID NO: 160797 - DNA, 470 bp, Glycine max
tacctcgaacacaacaacgacaatgccgactagattgtacctcatgtgaaatgtacctcagcagaccacaaacaccacgtactaccagtcaaatgtacctcaggtgaccaccaattcgccaatccttgcaccacaaaccaaaaaagctccttagcttaaccaagggttccagaaacagacctagcacgaaagggagaacaacagccttcgatagaacaacacaggtagatgaagcgtacctgtcacggtcttcagtgcaatggagaacaacagccttcgatgtttacagtgcaatggagaagagagcgcgaaagggttcacagaaaagaagaaagcgagagaggctatggtaaacggagaagaaaggagcgtgactgaaataggtcatttcacatacaatttaaaatgtaagtttaacatcggttttcaataaaacaccgatgttaacaaattgatgtcaatgttaacat

SEQ ID NO: 160798 - DNA, 440 bp, Glycine max
  unsure (1)..(440): unsure at all n locations
agcttaataacaaccactcatgagtaanagaatatcgactaaagctaatattaagtggaggttgaagaatttttttcccctaaggagaataaggtgggcttacaacaaagagcatatgcaaacaatggttgacctattgatgtttcattattttctcctatatcttaacccttttttgtcaccattttaattactgattaaccttaattgtcaaattaattatgcagttttatcatttgggcctacttgactaattttgtgtttttaatttaatttcaggagaattataagcaattggtcttgaatccggaattgggcttggacttgaagagagcaaacaantttattttatcaaatcttatcttatccagattttatctagaatntatttcatccaatcttatcttatcttgcctagaatttattttattctcgttatg

SEQ ID NO: 160799 - DNA, 431 bp, Glycine max
  unsure (1)..(431): unsure at all n locations
ggacctataaaactcagcttaaatgtatgcaagnttggtaaagatcatcaaatacttccttagtangaaaaatagcaaaggaatcaaggaatgacactttccgttatatgttgtgtagtacccatgtagaaaatgtatccatattagaaaaacactctagaggactatttgaatgctcctatatgcatttaacactgcttctggtgtctaaaagtttatactaatataagaggacatatcccacgacttcgacaattgtagcatttcactatatccacaaacacaatggctcatacttattttaaatttagataaaccaattctcccttctaatgtaacatttgtgtccatggtgaatagataactagggaaaaacagtcacttcgtgcctaattgcttttccatatagantntaaataaaaagaaagata

SEQ ID NO: 160800 - DNA, 325 bp, Glycine max
  unsure (1)..(325): unsure at all n locations
gctttgacctatccgacaggcgagcacgcatttccaaccccatttgtatgacaagcttgtcataatcatcaggtttatcctgccagaaattgaaagctaaatataggatgttcttataataagacgaagttatcaggccaagagaaacccgcatggataaatagtacctgcacagaattatccattgtccgagtaacagacatgggcgccttattactttgatcatttgaaataccttnggaaccagagccttcaaagcattcatattgttgggttcagtcaaaaataacaaggcttcagactgaaccaatgaagtgaaatcctt

SEQ ID NO: 160801 - DNA, 329 bp, Glycine max
  unsure (1)..(329): unsure at all n locations
ggangcgagaacgacagatagggagctcctaacatgtgttctttatcatatattaccctaggacgattgtccgggtaggcatcctcaatctgtcacagcattcattaaacaagcttagagcacgtgctctggaaatatctggaggatgaagaagaaagtggagatcactcacgacactactgaattgtattcatacttctatcggatgaattactgagtgaagatacgtggcatgaaatcctacgaatcaagaagtcaattaatctccgtttccaaatcgtgaagagactaataatactagtgtagattaacattatatgtgctgtcag

SEQ ID NO: 160802 - DNA, 428 bp, Glycine max
  unsure (1)..(428): unsure at all n locations
agcttgcaaagaacagcaatagttaaattctcctcaaagaaaacagagccaattgacagaaacaagcatccccacaattgtctctcatcaattgaacccagccaacgcataatagaatcaccacaatctgaaaggaatttcccaaaaacaagaagaataaacaaacagcaaaaacgtgttcaggtaaatttttttgattntttttagattcttccttcgaatgggtataaaaatagggaattgattagaacctgtgacgagaacagaacagaaatgaggcagcggcgagactcagtcagtgattgtgttgtgcgtctccagcaagatatggtccgtcagattgaatgcatctaanaattgaagttaaaacttataataaaaataacactttgagtttaaaaaacaaagtaagatagcaaattgatgat

SEQ ID NO: 160803 - DNA, 464 bp, Glycine max
tgtcatcgtgaggcatcaggggctatgtaagttaatagttgtgtgtagaactaatacaattgcattggtaatgaatatcatatttacatgcatcgtaggccaattgggtttgtccggtcttggcatttctattaattgtctttctaaaactatttgatctagtaatagcaatttacttttgcaactattcctgtttttactatttgttctttacttgcaaattgaaaagtattcggtaaattgcaataaaatccctgtggaaacgatactcggacttctgaggtttactacttagagcgatttggtacacttgccaaagtctcaacaagtttttggcgccgttgccggagaatttattttcgcacttaattgccatactatatcagtttgtaagcccaactcttcttttcttggctattctattagaatctttccttctcttcattcttcttctccataatgac

SEQ ID NO: 160804 - DNA, 393 bp, Glycine max
agcttgatgcatcatgtggagaggtttatgaaacaacgagatgatgcgctccatgagaggttggatcaaatggagaatagagatcataatgaagaataaaggaggagaagagggaatgatggtgttcctagacaaaaccgaattgatggtattaaactcaacattcctccatttaaaggaaagaatgatccggaggcctacttggagtgggagatgaaaatagagcatgttttctcatgcgacaactatgaggaggaccaaaaggtgaagcttgccgccactgagatttccgactatgctcttgtgtggtggaacaagctacaaaaggagagagcaagaaatgaagagccaatggttgatacatggacgaagatgaaaatatcatgaggaagc

SEQ ID NO: 160805 - DNA, 455 bp, Glycine max
ctattacggacctataaaactcagcttgtaggcttttcgtgggaaatgatagtgagactcaacttggtttccaaccttgtgctataataattgcagcgagacccactatccacaatgagagaacaatttttgtttaaaaccttacatcttgtatgaaagatgttctctctttgggtttggattagtgtcacaacctacccttcggcgggagggcgaataggtcacaatatgtgggccaaggagtttgtctccaagggagaaaacaaatggagtcgccacccatgtttattcgaggaaaactgtagaataacgcagaaagacaagggatgagtattttgaaaatgacgggtcaggagttatttacacaccgggaaggtattatgacccacgcgtccgcacaggaacgacagccttatcaatgagaaaaacatgactccattacttatttccctttt

SEQ ID NO: 160806 - DNA, 379 bp, Glycine max
tttttattcattttttacattttaattatatgcttttgttgctacagctttgttttactatggggcaggtatatatacacctttgccaagcttatggatggacaaaagaaagtgactagataaagatttcaataggggataacttgaccctctctttgtttgaatataaattttgttttcaaaaattattttttcttttaattctttgcttaataaaaaaaaagtatattctattcatcaattatttaaattagccctgttgaaattttataaattcgacattaacaacttataacttatgaatattttgttatttaattgatgacgagaattttactacccttcaccatttatacattcattatagaaacatataaaa

SEQ ID NO: 160807 - DNA, 486 bp, Glycine max
  unsure (1)..(486): unsure at all n locations
actcagcttgaaaacagcctntcatttctctcctgcaacctagcatttttttaatggaaaatattaaaatccactccctaaatttgcaaatcaaattgcaaattaataaaattctccgaagacatgattttatggtaaagatgaaattccaagttcaagagaaaatttatggaagcaaacaattcttctgagatgtctatgaaaaatgttttggagtcattattcaagcttatatcttatgcacttgcaattttgtcatactgcattctacaaatatttcagntctatactatagcaaaagggtctggccaacaactaatggcgtgtttggaattgcctttgaatgccaatccaataaaagaaggattggtgttcaacatgcattggaatggaagaatgctncagagcacacccacactaaggagtgacataaggacgatggnntaagaacatgtaatgcaccttattaaatgtttctagtaattt

SEQ ID NO: 160808 - DNA, 394 bp, Glycine max
  unsure (1)..(394): unsure at all n locations
agcttcttattcaaggctcatcttggnggtgaagctccttctttcatggcttattccctagnggatggcgcctcctctcacctcttcttctttgtcttccactgcatctccatggtggaaaatcaccattaaagaacctcattgaagctcaaagatccagcctccatagatgccccacaagcaagcttccatcaggacgtgtaatcctctgaaggtgagggcatgtagccctctgaaggcaaggatgtgtagtcctctaaaggcgagggcgtgtagccctttaaaggtgagggcgtgtagccctccgaaggtgagggcgtgtagccctctgaaggcaagggcatgtagccctctaaaggtgagggcgtgcaaccctctgaaggcgagggcgtgc

SEQ ID NO: 160809 - DNA, 469 bp, Glycine max
  unsure (1)..(469): unsure at all n locations
ntaaccaagagttntcgtagaaattaaaacttcctatattttgcaaattgggaaaacttgctttcctcagcaaaaatagaagcttatatcattttttttaaaaaaaaaacagaaaggtaagcacatattgaataggcaaaaaaaataaaaaagtggctaaagggaataataaatttgaaaataataatgctctatgaaaatcagtttgtgaaaagtggtcttcagatattgatcatgcatctaatgcatatcaaatatcatattactatcttatacccagaaaataacttcatgaagcctagtctgttgttttggtgattttttatattgaattgaaaaatagacttcctgactaataagtttacactcttcgatcaaacagtttgttactttgtaatttcccatttaaatctcagaanataatattagcttgcatgcaagagtaccccaacaaacaatcctatccata

SEQ ID NO: 160810 - DNA, 453 bp, Glycine max
  unsure (1)..(453): unsure at all n locations
tgcaagctntaacctcatcgtccctcacagnctttatagttgggagccaatccaatccttgggttcggactctcagccacttatgatagccgctgatgatcccattactgcttcccctaagctctctgtcctttcttcacgccgcatcccatgccttgcgaactccttggagtaccctcgcgttgtggtcactaaaaccccgtgcgatgaaaggcgtgatgctttcgtctaatggcgctcctctcatggggtagccaagctgtcttatggtgagaacgggattataattaatacaaccccttgttcccaatcagggagacattggacatccttcgcatgaagatagaatcctgattcttccttccttctagcgagggaaccaattaacagacgcccccccattctagccaagagttggtcccaattcgcctttcctttgtcgacgcacgagcg

SEQ ID NO: 160811 - DNA, 417 bp, Glycine max
  unsure (1)..(417): unsure at all n locations
aactcagcttttatccaggcaattcttggtggtgaagctccttcttccttggcttattctctattggatggtgcctcccctatcctcttcttctttgccttccgctgcatctncatggtgaaaaatcaccattgaaggacctcattgaagctcaaagatccagcctccataaaagctccacaaacaagcttccatcacaatcatacttgactcgaactttgggattttggttcaatttagtcctggacaagcattttgtcatttccccaaatgcttctgtttctattgaattcattcaaggacaagcatttcgttagaagacaatcccaaaacgaaaaatggggtcttgtccttttgttcactgcaattactaattggattctatattgagatttgttcaataaccatccactaact

SEQ ID NO: 160812 - DNA, 448 bp, Glycine max
agcttgacccactgtcgaggtcctccatgtcttgttccctctctgagcgtcgtcttcttcctccatgccgagagtttgtgttctgtgatcgtggtgctcgttggttttgagtagcccaggcattttgagggtggtgttctccatccgtgtcagcattgtcgaggtaagcagttgttcgtcttcgattgccgacatttttatttaatccgtaaacgttttttaagtgatccgtaaaaactagttagcataagtgaagattacaaatcaagttgatctgtaagatgtttgatgaaacttacaaatcaacttaatccgtaagatgattgatgaaacttacagatcaagttgatccgtaagtttcatatttaatttttaaaattgggaaatatttaaataatagcgagttttttttaaattacgatttagggttagtctataatactttgaa

SEQ ID NO: 160813 - DNA, 470 bp, Glycine max
  unsure (1)..(470): unsure at all n locations
actcaagcttaacctttcatagctagttagttntaacaaatgaattatataaaatataagtagtattgaatactgatgaattattgttgctaattagtaattagttatgaagtgtgatatttgataagcacaatgtttccttttcatttttttttctttttgagaggagctcaatgtttcttagattataagctccccgaagtttcgccctcttgactcatctttcctctagtaactctcatcaactcccaatgaaagttgagtctcaactggaaaaagtaaacaaaatttgggcaaatttccccatttagtctccttttgcaaacttattccccaaatggggccgctttgaaagaatattcgccatggtgctgttttgtacgtggtctgcatggantttgcatggaaaacgcaagcttcaatggcgagtttgtgagcacaggacacgtggatggcaaaccgctgctact

SEQ ID NO: 160814 - DNA, 408 bp, Glycine max
  unsure (1)..(408): unsure at all n locations
attctttcgttntctgatttaaaaattgttagcttttcattttgacatcacaagatatcaaatcagcccctttcattgcattcactgttccacggaacaagaaaaaaaaataaaaaaagtggaatcgccagccatgctagcgagacctcctttgttgctatttcgccagccatggtagcgagaccatgcctgctctttctgacactagcagctgttttgccaatgctgctggcgaaacaccctccacgtcaactggtatgtcgctaatgcgagtgacgacttatctttatcgccaatacaaatggtgggatgcatgtaaaaataaacccgttcgtaaatagtttaggaagagaccctatntgataaattgtttggaaaaagaaccttgttaggtcaatttgccctata

SEQ ID NO: 160815 - DNA, 405 bp, Glycine max
  unsure (1)..(405): unsure at all n locations
ntataagcgcgggtctgtgggacgaaggtcaagtggtcgcgatgtactttgatgatgttccgagtacattggatttggtacgaccatgccctcctgatttctagctgggaaattggcgagtggaggaacgccccgacatttacgcaacgagcataatgtaaacctttacggtttttaaagctctatagttgggcctaggctttagagtttttcttttgttaaggctttgtgtcttttgtttttgaatttataatacaaggatctttcttcatctattcctacgtctctacccattctcatccatttgcatgtttacttctttatttctaaaacgacagatccgatgacgagtcccccgaaggtactaatacctgggacgcacctatcaacttcgagcaagaagcg

SEQ ID NO: 160816 - DNA, 441 bp, Glycine max
  unsure (1)..(441): unsure at all n locations
agcttaacaacgntagaaatcaagtgatcattttattccgaaatatagggggagtaaacgcacattntatctatatacaattgtttgttgcttgcttgaatcttgatttcaggtattgtattgtcatcatcaaaaagggggagattgtagatgcaattgcctttgatgttttgatgatgatcatgatgatatgatgcaattgatgtaaatgggcttttcaagattaaattcaagacaatacttcaagattacaagtcacaacatcaagatgatcactagtatattaggaagggaattcctaattgaattagcaaaaggtttggccaagtaatttaaattaaaaagtgtttttcaaagaatttattctctggtaatcgattaccagaggatgtaatcgattaccagtggccaaatatgntttataacagctactaaaatttg

SEQ ID NO: 160817 - DNA, 405 bp, Glycine max
cttgaatgacagttacgacgatgacttttgttttgcgatgtatgcaaaagctaactcgaggggtgtaacgcccttcattacaataacaccccgtgaaaaatatacaagaaatataaaatttcatacttcataatagtctaaaaataccttagatatgataaataaagtcgaataaatgagtgcttatataaataaaacaatatcctcaaatttgggtatctaaactaaacaaatgctagcaatgtaaagaaagtaaccacatccaacatcttattctgaagtattaaccaaataaagtaaatgtaactaaagaaagctaagtcttcaagtatcctcagcatcttcttccttatgctctgaaaacaatacttttaatgagatgataattctagcgaataaaacaag

SEQ ID NO: 160818 - DNA, 445 bp, Glycine max
  unsure (1)..(445): unsure at all n locations
ttaagcgacgcggctgcagcttaaagtaagagcttgctttttatttataatngcgaagatcttaaattaaaaagtgaagccatgtctttagcaactcatgaacttgaagattttgaatttttattaggaatgaatatttggtatgatattttgtttgctgtcaattctgttagcaagattctacaatcaaaagatatgcatatagatgttgctatagatcatttaaaaggtcttatcacttatttaaaacattatagggaaaacgggtttgcattggctttagaatccacagaaaaacagtggaaaattttgcaagataatgtatctaaattttctgttaaatcattatctcaaactcattgggaaagtagaatagaaagtgtcaaagctattaagtttcaagcttcaaagggaagagatgctttgactgaattatcaataaatt

SEQ ID NO: 160819 - DNA, 477 bp, Glycine max
ggtcccttacgagatattaattttagggtttttacatattttttgggggcgaacttcaaccattagagcttattataattttattaccaattttatcatgatgtatcacttggtagtctagtctagtctaaaacattttagttatttaattcaataatcaatataaatgttatgattgaggtcatcatttacatagcaaattatactaaaatagacacattttacagtcttctttttatctttcaactcttaacttcagacaggtaagcatttttttatgccttccctattcaaacaccctagtgccttatggatacctttcacttttacttgatctccatcttatgaaataagaaaggaagtttcacttatgcctaccaatttccacacccaaatgtacatattactacttgccaccagtcagcagtatccaattgtgcatacaatcacacgatatacaatgggaagaatacaagc

SEQ ID NO: 160820 - DNA, 441 bp, Glycine max
  unsure (1)..(441): unsure at all n locations
agcttnctcagaacctatatcataataatattaataacaataataataataataataaaaaaaaaatagtacaaaaaccttggtatcaataataataacattagatagcaagataagaacaagtaaagcaaaaatagacaggcctgggcaaaaatttctttagcaccaaactatttgccaatagcggggcagtcaagtcattacttgaaaatagggttttaacatcagttattaaggactgtcaacattaaccaatgttgaaagtatcgacgttaaaagtaatatcgttaacatacaaaatcaatgttaacataaaaatgacaacatcagtttttcacaaaaccgatgtttcacagtaagaattattaaaaaaaaagtcatatatatcttcatatcaacatcggtttttagcaaaaccgatgttaatatatacatgcaaca

SEQ ID NO: 160821 - DNA, 420 bp, Glycine max
  unsure (1)..(420): unsure at all n locations
tcttgcgcagccgctcttggtgctcacaatatcccaaaaacaaatccctcttattactagctattntaaattctttagttcctgaatggacaaccttcaaaatggtgctcgttcccctctttgttttctgcaaaaaagaaaatcaatatctaagaaaacatggatgaaatcctaaggatgccatgtacatgtgtatttctgaagatatagtatttatattccatcaagcatacattgactgttgattacatgtaatagactttttataacatggttgccccaaatcacaattaataagcacaactaccaatctttcggagacctttggttaatttgtcttgtctccttctgtggaggggttgtgtgtaataatattatacttttgccttccaaaaaaacttatgactgagtctcttttca

SEQ ID NO: 160822 - DNA, 396 bp, Glycine max
  unsure (1)..(396): unsure at all n locations
agctngaagtgagaaagcgtggaagagtctattcttctactttnngttggtgaccacagagtggtacctggagatatgtcgcggngtcaagagaccttggggacgtcaggtggggtgctattgcccaaaaccaagcttgactaatcccgacccaacccgggcataatcagtcagtgagaacttgtgacgtacctaaaccggcgagctcttggcagtcaaccaataaaagaacaaagtccacgaagcaaggaggcttgtgtggtggctggccagctatgtatcttgggtggtatctggaaattagcctctggtaatcgattaccatttgtgggaaatcgattacaggggttaaaaatggagacaggatgctaaatggcccctggtaatcgattacca

SEQ ID NO: 160823 - DNA, 486 bp, Glycine max
  unsure (1)..(486): unsure at all n locations
tatgaaactcagctatgctgcnatattacaatagacctcctcaacctcagtagcaaaatcaaccacagcagaacaattatgacctttccagcaacagatacaaccctggatggaggaatcaccctaacctcagatggtctagctctcagcaacaacagcaacctgctccttccttccaaaatgctgctggcccaagcagaccatacattcctccaccaatccaacaacagcaacaaccccagaaacagccaacagttgaggcccctccacaaccttccctcgaagaacttgtgaggcaaatgactatgcagaacatgcagtttcagcaagagaccagagcctccattcagagcttaaccaatcagatgggacaattggctacccaattgaatcaacaacagtcccagaattctgacaagctgccttctcaagctgtccaaaaatcccaaaatgtcagtgccatttcattgatgtcgggaaagcaat

SEQ ID NO: 160824 - DNA, 250 bp, Glycine max
agcttggccttgtttctacatctctatattgttgtgccattaacgatcctccagtcgttctgttacacggcttggagctcgtataactatgtacacacacaccttggtatgccttaagtacggcgatttctcatagcagagaactgaacgcgtatatctaacgatgcaatacatatgcagccttttgacatgtgcagtagtagtgacacgctaggcccatgaaaagatttaccttgagatctacatttga

SEQ ID NO: 160825 - DNA, 271 bp, Glycine max
  unsure (1)..(271): unsure at all n locations
tgcagcgcgtgctaagagagcgggcgcattcactgaactttttttttccgccgcttctttcagaataagcatcaatgtttcctgtacagcactggaaatcatcattttttgtattatgctaattacagaatgcgaacatgttactttcgtcactaatctcttcaaaacaacagtaaagtgcggaccttccgccatntattagccacaattgactatgcaaccggcttaaattttgctgctactaaagacactctgcaagccattagtgcaa

SEQ ID NO: 160826 - DNA, 369 bp, Glycine max
  unsure (1)..(369): unsure at all n locations
agcttgagatgaggaagngttgaatggtgttacttcctgcttttattgctgaccacagagtggtacctggagatatgtcgcgggggtcaggagacctttgggacgtcaggtggggtgctattgcccaaaaccaagcttgaccaatcccgacccaacccgggcatagtcggtcagtgagaacctgtgatgtacctaaacaaacgagctcttggcggtcaacaattaaagggaccaaaaaccccaaggcagggaggctggtggtggctgcccacctgtgaattttgtgtgatatgtggagtatggcctctggtaatcgattaccaagggtgggtaatcgattacaaggcttaaaaatgaagacaggaggct

SEQ ID NO: 160827 - DNA, 328 bp, Glycine max
gcgtcgctattattagatcctcgaatcggagatccgagtgatatgttatgaccattcgaatttctcgagagcttccgttgatcaatttcgagcgtctagatctattatgtgcccgaatcggacatccgtgtgaaatgttatgaccattccaatttctcgagagcttccgttgttcaatttggagcgttcagatgagttatgtgcccgaatcgaacattcgcgtgaaatgtaatgaccattctaatttctcgagagcttccgatgatcagattggagcgtcttgatatattatatgcccgaatcgaacattcatgtgaaatgttatgac

SEQ ID NO: 160828 - DNA, 241 bp, Glycine max
tgaaggagaactcgatgccttggtcaactctagtaactctatttgccatgaattagaaatctacacctgttgcaagactttgtggtctatgctcttctgcagatctttgttctactttccagcaatctgcagtcactgagcaccctgaagcttatgctgcaaacatttatactagacctccacagcagcagaaccaccaacagccgactacttatgacctttcccgcacagatacaatcca

SEQ ID NO: 160829 - DNA, 412 bp, Glycine max
gctttcctctgttggtctgtagggtttactatcgttagaaagtatgagaagggagcggagcctccatttcattgtttgcgtgcgatgagaattatccctccatagacattattatgcaaatcacaatggtggagatgtgcaaaatgaattttgaagctggtgtaaaaatatcacgacgatccaacggttaacgagcccgagatcatagttttactgggacaagtttgaatgtatgcgggaaaattagagctatgtgcgagggacatttctctcaccatatacaatatttcgcaaatcccaacggtggggatgtgcaaaaatgagttccaaacttgatgttcaaattttatgataatccaacagttaacgagtttgagattgtagttttactagcacaagttcgaatgtatgc

SEQ ID NO: 160830 - DNA, 456 bp, Glycine max
  unsure (1)..(456): unsure at all n locations
tactgcacagtgaagagtaatanagataattcatttctatcttagttcttatacttgggttcatctatctattgaaatttacaactgtctaattttttgaatcttaaattaatacaccaatttgttaaaaaaaagcccattaccaaattcttaattaaaactaccatttttttaattttaataaaaaaattgaccaaattgttaacctgctcattntgttttaattttaaaatctcaaccaatttgttaattaatttaaactatctatttttctatttttaaaaatctacttattttttttagttaaaagactcttttctgacaaatttaaaacttactattctgtttattaagtttccaattaattttctccctcttcttcttagcttgtgtaaacaggctaatattaaaccaattttgaactacctagntttctcttcttattctgcatatata

SEQ ID NO: 160831 - DNA, 486 bp, Glycine max
  unsure (1)..(486): unsure at all n locations
cttgatgcaacacttggagaggttaatgaaacaacgagatgatgcactccatgagaggttggatcaaatggagaatagagatcataatgaagaagaaaggaggagaagagggaatgatggtgttcctagacaaaaccgaattgatggtattaaactcaacattcctccatttaaaggaaagaatgatccggaggcctacttggagtgggagatgaaaatagagcatgtattctcatgcaacaactatgaggaggacaaaaaggtgaagcttgccgccacggaattttccgactatgcccttgtgtggtggaacaagctacaaaaggagagagcaagatatgaagagccaatggttgatacatggacggagatgaaaaagatcatgaggaagcgatatgtgccggctagttactcaagggacttgaaattcacgctccaaanactaacccaaggcaacaagggggttgaggagtatttcaaggaaat

SEQ ID NO: 160832 - DNA, 453 bp, Glycine max
  unsure (1)..(453): unsure at all n locations
agcttgcattttaaagcttgcattctaatatcatgcttcatgcgttgtgaaatttggcatcctagtagaaaggctcctggtaatgaaaatttagaacccttgtaggctaagagatttatgatgcggcagggaatggtgaacggtaattgagtattgaaacctaagctgggtaattgagttttgaataataatcctgaccacaaaaaagttttgaataaggatgagtacaaaccttagttaactgctaaatacggatgatgaatgcccggtactaactcttaccctaccctctgtttgaatgcatagaaaatgaggggagacaaagtatttgaaattgcttttcttgaagtcaacttatcgttctatctttatccccttttatcttctcttaacataaacaanagaagatgcaattttgtctgaatctcttctattattctctcttgctctctc

SEQ ID NO: 160833 - DNA, 226 bp, Glycine max
tacagacttccgcagcccgaagcttcgtgctacaatgagagcattgaaactgatacttccatcatgctgtcgatcaggaaataggaagaatttgcttgaaccgctgaatggagaacatcttctagctttggttgatgcacgtttacgcatgaatctgcgacctaattatctgacggtgaaaaaagtgttcttcacaattagagacttatcagatagatggtataca

SEQ ID NO: 160834 - DNA, 451 bp, Glycine max
  unsure (1)..(451): unsure at all n locations
agcttatgctgcanatatttacaatagacctcctcaacctcagcagcaaaatcaaccacagcagaacaattatgacctttccagcaacagatacaaccctggatggaggaatcaccctaacctcagatggtctagccctcagcaacaacagcagcctgctccttccttccaaaatgctgctggcccaagcagaccatacattcctccaccaatccaacaacagcaacaaccccagaaacagccaacagttgaggcccctccacaaccttccctcgaagaacttgtgaggcaaatgactatgcagaacatgcagtttcagcaagagaccagagcctccattcagagcttaaccaatcagatgggacaattggctacccaattgaatcaacaatagtcccataattctgacaagctgccttctcaagctgtccaaaatcccaaaaatgtcact

SEQ ID NO: 160835 - DNA, 462 bp, Glycine max
tataagaacaaaattgccttaatcatttccaaatatgcatgtgaattatgacgcatcaacaagaatcaagccaaggctattgtgcaagcaatcaatggggcaaaacacaccaaatgattataatgatggatggctcaaattctcacaaaggtaaaatcatcactttcaaattgagctttcaaaactatcatgacatgtagagaagaatcaaggatttcaagtcacaaaatgtcaagaacttttattttcaaaacaattacccatttcttgaacatatcctataattcaaagaaaaacatgcaaagtcgtacgtgcacacaaaattgacccaaaatattaaactgaaaatccgacgaaacttacaacattaacaaattaacacaactaacaaattaacaaaaccaacaaaactagctaaacccaagaacactcctcccccctccccccatacttaaacaacac

SEQ ID NO: 160836 - DNA, 417 bp, Glycine max
agcttagtataactattaagggttattttgttaagtaaaacaaataaacaaaagaagttaagttacttaaaatgaaatgaagaaacaaagacatgaatgaacctaattatatatttttacgcatagtaagattattaattatttgtaataaataatttaaaatatatttaacatagttatataaaaaatttatacttacactgtactaaaattaaattctataacttgtttgtgtactgtttaattatcctatatatttctcttacccttcatcatacatattaattctttttcttccatgaaatcaaaccaaacaaaggaagggaagatttttttctttctatcatattcctggaatttattttctcattagttgtggcacctatttcagagactcttcatgttaaatcttgagct

SEQ ID NO: 160837 - DNA, 363 bp, Glycine max
ttatagatgctggagaggactaggactcgcgtactacacccaagcctgctctgctcgcttatcgtgggtgccagggtatgtgcttaccacaactctatttgtttatcaccagttcttgcttttgttctgaacgcgcgctgcgcgatgagtgggctattttctctaagcctgatgcccaaatccttcatcttatgctatgtcctgcatcctcttggcatcaaagcacttttcttgtattctaccgctatatataagaaaaacataactctttacaattaacataaataacaagtgaaacaattctcctggtatctcgtatagttttgtataaaaacaacactatttacagatttaataataccc

SEQ ID NO: 160838 - DNA, 355 bp, Glycine max
taaatgtatttgggcttggcgaccacgaacaacataatactttctgcacctactatatgttgacttgaccaacgctgctattggaatgctgcgacaatctttcaacaccttattcacacattctgataggttggttgtcatgtgaccatatcgtcgtccagatgtatcgtaagccatgctccatttttcctttgaaatgcgatcaatccatcttgctatggctggactcagttgacgaaatttttctaagttttgatcaaacacatgcttgcaaggagtgtacgctgcatcaaatttgttatcatgaaaagttgtacatagacatccaagtcaaattaaattaatgtataaaata

SEQ ID NO: 160839 - DNA, 441 bp, Glycine max
  unsure (1)..(441): unsure at all n locations
tgcaagcttgagggngcgnagcccaccatcttttcatagtatagtatcgataatgtgtctaccatcacgatcatcgtctccctttctatcattgggggtaccacttgggccgccagatccctccaccttttgggcgtgttctttgaatgatccgtccccctttttgcacatgttctgtagttgcatcctatccggaaccatatcaaaattgtactgatactgcctaacaaaggcaaccattaggtccttccaagaatggactcgggaaggttccaagttagtgtactaggtaacagctaccccagtaagactttcttggaaggaatgtatcagcaattcctcatcttttgcgtattcccccatcttctgacaatacatctttagatgggtcttgagacaagtagtccccttgtacttgtcaaagccagcaccttgaacttg

SEQ ID NO: 160840 - DNA, 428 bp, Glycine max
  unsure (1)..(428): unsure at all n locations
tcttagtctcagctgatgaagatgaattcgtggctacttcatgcactcctctaatgacaataacatcatttctggcactaaattgctgggagtttgaagccctcttctcaattaaatttctggcttcagtaggggtcatgtctcccagggctccaccactggcagcatctatcatacttctctccatgttactgagtccttcataaaaatattggagaagaagctgctcagaaatttggtgatgagggcaactagcacatagttttctaaatctctcccagtattcatataggctctcttcactgagttacctaatgcttgaaatatcctttctgatggtcgtggtcctagaagcagggaaatttttttctaagaatactctcttgaggtcatcccagctcgtgatggactnntggagcaggtaatat

SEQ ID NO: 160841 - DNA, 428 bp, Glycine max
agcttatattatattatatgtggcacaacagtgaagattagcaatggacattttcagcgttctgtgcctgatctggatcatcaacagtttcttctggtcacttgaaaaatgagcatgcctttctagaccatttggtcggcctgtggtatacatgcagtccagcactccagctattgtagatgatgtatttgactttttgatgactcttcaatctgaagaaggcagtaattttgcagagaagttgaatgatgtggtccttctcaatacaagaataatatgatgttttttcatcctcaccctgtggcatatattcactccatgtaatgatatgccaactctattatgtattgcattttcacctttagttgctatgtcgttttcacaaggtcacttacaagagacatgaaatcaacatgcattgcggtatt

SEQ ID NO: 160842 - DNA, 329 bp, Glycine max
gaccttaaaactaacttataccatctgggaaaggcatcttttagcttaatgttatggcccaagtggaggatgatgttattatggatggttaaactggcaagcccacaagggttggcccaccattgatcaatatggtaggacgaggtggataactcaacctgttctgaactattccgcttaaacagtccacttgttggggagaaataaaggggaggtgggttggcccaccaacccatcatatttatttggttttaataacacttatactatatactttataatatatgagaagtgaattaaaaacaaaacgttggcgttgggtttgtctt

SEQ ID NO: 160843 - DNA, 435 bp, Glycine max
  unsure (1)..(435): unsure at all n locations
agcttgaaatangcattgggcacctaatttgaatcttctatgctgnctttacatacataaaacagtcccaccatcccaattnttgcaaaccatattcatatatcattggggcatttcaccgagcacttggtgggcgcacgtttggacataaattgcaagagaatgggggcaatgtggcatgccccattgctttagaatacaacataggcctaaggccttctcattcaaatcctcaactcaagaaatcaagcataaaaacaaaccaaaactgccccacaaatataagcacgttctcacaatttagagcaccaaaagatgaagaaaatactccaatgggaagcaaaaaaactcaaggattgaatacttactttgtggagtgagtggaaacaccaaaatgaaagcaaaatgcaacccaaagtgacttgatggagaaaa

SEQ ID NO: 160844 - DNA, 415 bp, Glycine max
gctattacggacctatgaaactcagcttgggaggatgcttcatggaggaaaagaaagagggagagaaatagagaggggggagcacgaaattgaaggaagaaaaaagggagagaagttgaactttgagttgtgtctcacaagactctcattcatcaaagttacaacaagtgttacacatgcttctatttatagactaggtagcttccttgagaagctttcttgagaaaacttccttgagaagcttctttgagaaaacttccttgagaagttagagcttatctacatgcacccctctcataactaagctcacctccttgagaagcttccttaagaaaattcctaaagaagctagagcttagctacacatacctctctaatagctaagctcacccgcatgacaaaatacatgagaata

SEQ ID NO: 160845 - DNA, 391 bp, Glycine max
agctggagaggatgcttcaatggaggatataatagagggagagaaagagagaggagggagcacgatattgaaggaagaaaaacggagagaagtttaactttgagttgtgtctcacaagactctcattcatcaaagttacaacatgtgtcacacatgcttctatttatagactaggtagcttccttaagaagctttcttgagaaaacttccttgagaagcttctttgagataacttccttgggaagctagagcttatctacacacacccctctcataactaagctcacctacttgagaagatttctaaagaagctatagcttagctacacatggaagctagcttgtggagcttctatggaagctggatctttgagcttcaatgacggccttt

SEQ ID NO: 160846 - DNA, 225 bp, Glycine max
tgtgcgaatcacatcactcctacatttcatctctatcttgcattttctttctttacccactcctcacgttcggatttttagggaagaacaccctatctaaacgcgccgctggggatccctatcgcaccagaaccacatctagaacgatgggtgatcaagacgagacgcctgaacaaatgaaagccgacatgtctgctctgagaaaacaaatggtcttcatgatgg

SEQ ID NO: 160847 - DNA, 432 bp, Glycine max
agctttgaagttatgtaggtattgggcatttatatgttattgaagctctggcaagaggtttttcactagataagggactgcccacctcagaatttggccacgagtttacgactttggatcataagggactcccatcttttattaaagcaatggtctacgactccgctgcttgcttatgataggataagagagctcctttgttatttttgttctagcattaagagaaggatcacaagccctagtcccaagctaaacaacatatttattcatctgcaccaaaaagggattcatgagaaagctttttcactcttctttgggctctccttagtttggctagtcttggaagatgaattgcagcggaaaggagaatgaagagagagaggagatgccacttcaaggagaagatgagtctagaagaagctcaccaccata

SEQ ID NO: 160848 - DNA, 389 bp, Glycine max
tattaggaacttaaaactaagcttaactctttaactacacaaggctcttaatatttgaagagtatcattgtggaaccttcacccgacgaatacactgacaaaaacttatcttctccttcttggacaaagtatggcagactggcggcaaagaaattttcttcccatcagaccttggatgcaactgtgatcgcatacccatatcagctagatcttgatgggtattcaagccatccttcgtcttgccttgaatgttaaggagcgtcccaatcacactgtcacaaacatttttctccacatgcataacatcaatacaatgtctaacgtcaagatcacaccagtacgaaagatcaaagaaaatggacctcttcttccatatgcaactctgactt

SEQ ID NO: 160849 - DNA, 416 bp, Glycine max
agcttagtggattatgggacacccgtcatatgtggtactaggtggcgatcgggcgatggcgcaaatcaactctcccactttcacaaatcaaacattaacgtaccatcctcagttgcccaccttcaaattgagctcacgcactcccacgtagcccttatcctcgttcctctcaacaccgggtccccatcaacccctccaagcttccacaatatccaagcaattcaatttccagatatcatgaactaccctaaaccaagaaaatagggcagaggcagaaaactctgcccaaaacacattcacatattacagcttgtcttactcatatatgccagtaacattttcttcgttccgatttgttaactattggatcgacttacaaattttactggagggttctagtacataaagctacatct

SEQ ID NO: 160850 - DNA, 350 bp, Glycine max
  unsure (1)..(350): unsure at all n locations
tagccctagaggagacggaccttatcaggttntggagaggatcaatagcaatgcctatagttggacctcccagaagagtatagagtcagcaccacttttaacattgctgatttaattccttttgcaagtggagctaatattgaggaggaggaactaacaaatttgagggcgcacnctcttcaagggtgcgagggatgatgcaatcctccttactattggaccactcactatagccatgatcttgatgctccttgaggatcgtgctaaacctgtggaacaagccctatggttcttattaacccttgaggatattctaagcccatggtccaccgtgtgttccatcttctatg

SEQ ID NO: 160851 - DNA, 186 bp, Glycine max
gcctgagattgggcttgggagaggagttttgggtattcgctgacttttggtgtgaattgaatatcgtaagcttcgacgccggggttggaagactcgaatttcgagatggcgtattcgttctcgtcgaggaagacggtgcggccgtcgcagtggttgacggccgcccacaagacggactcgtgggtg

SEQ ID NO: 160852 - DNA, 405 bp, Glycine max
  unsure (1)..(405): unsure at all n locations
ctgttactntcctgcaccactcgaaagttctaaattgcagtcttcatctcacaatttggtcgcaatattgttgttgcggaaccgtctaccgtaacagcccacaatngcaatgcgaatttcaatcccatgaaatactcaacgtagccgaaacagaatatcagtattgctctacacttctattccactctnttttttttgtttgtntgttaaaagacaagtttagatctcaatattctattatagcttctaagtgtcaatgataaaaaatggtgtgaccgtctgagatgttccgagacactaaatttaaatgaatgaaaaattatactactcgcttaaccaaatgaacatccggtttaggagaatcgcgaaattctttttttgttatgtgcaaacatataataactt

SEQ ID NO: 160853 - DNA, 408 bp, Glycine max
ctgcagctttagatatttgaagagcagaatgtttagttattttttaacctttaaaaaagatactttattgcaatcttaaatcctctttttttccttttgcacaacaaacatgcctaaattaagcagattctccaattagactacttacccgcctaacaaagcactacccattattcaaagcattttattgttaagcagacaacaacacatgcccatacttattgacaatccaaagaatgcaataattatttataacaagcagaaggtcaaagtaaatccaatgatatggctttcttgcaaggagaagagggagtagtaactccttaaaaaggctatgtgataaacttctatcattaatcaagttgagagaggcgaagagaaaagagaagaagctcccaacatcatttg

SEQ ID NO: 160854 - DNA, 439 bp, Glycine max
  unsure (1)..(439): unsure at all n locations
tgtggtggtagaacaagaacggttggacatgaaagtgcagtctaaatatatgcaacaccaaggaatgataggaaaaggatagcaaagtgagggtttggccctcttgaagggtctctgtacaaagaaaaccctttctttctggtttgcattcagaaggatgaagtttcatgcaatcagaaggaactgcaccagggaaagtactggctacttcaaatatatgatatttaagtagttctacaattatgaactaaaaaaagttctaaattatagtaaccaatctagacaaaatttcaaactatagtaggtacttctggtaaatctttggcaagttgtaaatgcaaattatgtttttaccaaaagagaagtatactaatntaaatccacacgaagttatgaattagcgtattacaacacaccaggtcattattttactccatgt

SEQ ID NO: 160855 - DNA, 460 bp, Glycine max
  unsure (1)..(460): unsure at all n locations
agctntcaacaagttcctgtacaataatcatttatctgtataatactaacaaaaccacccatcatatctgccaaaaccccatacccacgaaatttaagagagaaagaagttcacccaaacctgaaatttcgaagtctcactcgtagccacgcacttcacgactccaaaaatgccctcctttcgcgatttggagcagaaatgatggccaaaggttgaagctttgtgtggagcttcaatggtgaatgagggagaagaaaatggcaacgtgagggagagagagagctgtctgaaaaaagtgtgggggctgagtgaagagagagaaaagctttctggtttttaaaataaaagggttctctctntntctattattttatgtgagcaatgccacatgtctncatttgagtggagcaagaaaggctcactttccctttgtgactgtgacccatactctgtcacaaaa

SEQ ID NO: 160856 - DNA, 438 bp, Glycine max
  unsure (1)..(438): unsure at all n locations
ntgatctgaaacctgttaatttctttgagagagatccaatccttatagtgcctcccaatttcgaagatgattaacctgtttgcaaggcccatgattcagtttgagattccatcaacggcttttagtctaactacgtgtatgctttatttatacatgtagcaaatgatgcccaaattcaactttaaataattagtgagggcaggggccaaactctaaccatcatgttaaaattgtagaacttgacttgaatcataaaaataataataataacaacgtacaatatatcatgttaatttgttaactttgaacaaggcttctgttttgtcatctcaaatataacagtggaaaatatttagtgaagaatgttaactcaagtcttttaagtgactaagatttaataataataaccttaattcgcattacaaaaatatgacacta

SEQ ID NO: 160857 - DNA, 482 bp, Glycine max
  unsure (1)..(482): unsure at all n locations
agctnganatataatgaaatattgagtggtatatttattttctgcactattgaactacttgaataaaagtataatactcaaagctataaaatgtgacaacaattaagataaaagcgttgggaagtttcctactgaaatttctcttgtcgtataaantttttttctctatttaacattattctagtgttcttacaccgagaaaatactcagaccatgattccttacatgaatgagcttaactcttttagctgttgttcttgattccttaacaaactcgctcttacagagttgcactaaacatacagtgtaaaatatagtagatcactgcactcccttactagacatacatatttctagcttgctttatcaagttctaaggttntaaagcattntccaatactaaaaagtctaactacacatacaaatgggtgatcaagccacaagcattgtaaataagcatagatagaagcanagaacaccct

SEQ ID NO: 160858 - DNA, 438 bp, Glycine max
  unsure (1)..(438): unsure at all n locations
ctttctgggtgctggagttngtgttttttatcttttatttgatgactatgttatcaggaagatagattctcacaaattaggtttaatgttttagcatttaaacaatttggatatgttttatgttattgtgagatgttcaagcagcttaaatacagcacatccacaaagttgttaaattaaagggactacagattagaagcttcagattaaggagagaaaatagccaaggatcatatccagtgtttgattttatcatgggatcaagaacattgcattctgctgaatgaatttataaatttaatcattattttttaaagaagctttgcattatgaatactttgtcaacttgtcctatgaggttntcagcatgagatcccaaaggaatgtggacttcgaaatctaatactatatcattgagtagcatatatgcatcaagat

SEQ ID NO: 160859 - DNA, 486 bp, Glycine max
  unsure (1)..(486): unsure at all n locations
tgaagctgaagcttcacagatatataagaaaaggcatttatgcttttgcacaatatcctcccaaacgtcaaatgctccgtctatatattcaaccttcccatcactggcacgtggagagaatctttcttcatggagcaatactgaagttatttgtcattcattctacacaatcagacaccacaaacattgtcatatattaagaaataacaaacctacctcaaactcaaacataggcacatcacacaacaacatgcaatgtcatttataacaatagagcatcgtatatgacaataataaaggatcataaacctccctaccaagcgcgaagacaatgcatatgacaccccttgaagatataaaactcccaatcataccaccaaaacaatgcatacgaaatgaacgcacaanaaccaccaacctaacaaagagcgcgaaccctcacaatcacgagaatgcaggggagggaagagcaaccacaaacagtta

SEQ ID NO: 160860 - DNA, 391 bp, Glycine max
  unsure (1)..(391): unsure at all n locations
caatctcaactgactacaccnacatggcaagtcaacatgctgtcaacttatttcttctccactgactaccatgaagcagacacctagctaaactacccatcatatctccctaagcccaatgcccgcgaaaagcaagtgataatgaaggctacccaaacctgaaattatgaagtcccacactgtgagatgctcttcacgactatgaaaatgccttcctttcccgagtcggagcacaaatggtgaccaaaggttggagctttgttgggcaacaatggtgggcgagaaacaaaggagaaagctacctgagagagggaagaaaagcttttgaaatctttctgctgagcgagcgaatggagagagttgcttctttggttaaaaaggcgtttcgctt

SEQ ID NO: 160861 - DNA, 368 bp, Glycine max
  unsure (1)..(368): unsure at all n locations
taatttttctaacttagaaaattttctcaaaataaaccatgatgatgcctgatgaaatacagatatcaaatgtactaagatgcacccaccaagaatacaaccaatacaaatgccacttcaaaaaggtgggcattgtaaagccaacccaaacttcttcagaacttcttcgagcttttccttgagcttcaagctttagccttggagtaggtcaccatgtngctcattgtcatggtccgcagtgtaccggatcgacaagtgtataaacagtaaaaccgagttctactctcgggaacttggttatctggcaactatttggtaataggtgatggtatacatatgatattgtatgacagtatgtaactattatg

SEQ ID NO: 160862 - DNA, 435 bp, Glycine max
  unsure (1)..(435): unsure at all n locations
ntgcaagatggcttcatcttcaagcttagttctctctcagtctatccacagccaanaacactanaaaaaaactcaactccccctcagaaatcgtgatttcatcttaaatagacaatcctgtcggtgggcgcgcacttagcggaagatgagctcgcttagcgcgcgttagtgacttctggcttagcgctagtcacactcgctcaacttggaggtgaagacaatgcgcttagcgagttgtgcttgttcagcacctctatacagctcatccttcttccaaaattgtccccgcgcttagccattagatggtgcgcttagcggatgacgcgcttagccaaatgatgagtggcttagtgagttcatgaaatctgcactccaccaatcttgccctatttacctgaaattgaagtggaatgatcattaaatacacaaaactgg

SEQ ID NO: 160863 - DNA, 472 bp, Glycine max
  unsure (1)..(472): unsure at all n locations
gcttctagccaaatggacttaccttgtatttattnctttgatagcccttntgagcccttgttcccttttcttgggttgaagctcactacaagccttaagtgaaaaaccatgatatcaccatatccttaaaggaatttggagctttggaattggtttgggaataagtgtagggggtttttgttacattggacaacttggtttgttggctatgcttcatgatgtattttgcgccatacttgatgtacattgtatattggttaaatgttggacatgctgaatgaaatgttgtttctcaaacgctatagagtaaaaaaaaaaaaatcgaaaaacaatattcgaaaaaagaaaaagaacagcactacagttgagtgaataagatcttaaatggcacaagaatgatgaaactcttggntctactcttcatgttaaaatntatctctacttcttttaatttcttattgttatgtttaat

SEQ ID NO: 160864 - DNA, 435 bp, Glycine max
  unsure (1)..(435): unsure at all n locations
tcctattcatcanagcagcataatcaaagttgcctcttctcagacccactttgatcctctcgccaacaaacactaaatctgcaaagcttgaaggcatgtaacccaccatcttctcatagtagaacaccggtaacgtgtccactatcgttgttatcatctccctttccatcattgggggcgctacttgagctgccaaatcccttcacctttgggcgtattctttgaaaaattcatgcttcctcttacacatgttctgtagttgcattctatctggagccatataagaattttactaatattgcctaatgaaggcaaccattacgtccttccaagaatggacccgggaaggttccagattagtataccaagtgacgatttccccagtaagactttcctggaagaaatgcatcaatcaattttcatttctcgcgtatg

SEQ ID NO: 160865 - DNA, 290 bp, Glycine max
  unsure (1)..(290): unsure at all n locations
gactcgcagcatgcagcnngaaggttggggaggcctttttttttttngccccacgnnccggcacgcnctatttgcgatatctaatcttttctttgcagacatacaacataaatattatcacacgatgctgaactaccaacatttccatataaaagttactcactaacatgacatccactaagaatatgtccttgccacctacctgtatggaagaccttccatagatcagcattcgattttcctgatttcggaatggactggaagaacgtgatataacatgaataacaaat

SEQ ID NO: 160866 - DNA, 423 bp, Glycine max
  unsure (1)..(423): unsure at all n locations
ctgcagctacctataataggcagactgtttgttctatccaatacccgccaaatcaccactgaccatctcatgcaaagccaaaccaccctggcatataaccacaccgctctcacccaagcccaaatgaccatgaacaacaagaatgattccattctggaatgattacctgctttgccagttaccctctctttatcaaaatctccacaaacacccacctttcccacactatcatgccttcacatgaagctggaggtaccacgcttcgatggccacgacctcatgggcaagatatttaaaatattccagttctttgactactacggcatacctaatcacgaatgacttatggtagctctctttngcatggaacgacctaccctctattgatatcaatggatgttgaggaatggttttctcgcgtct

SEQ ID NO: 160867 - DNA, 438 bp, Glycine max
  unsure (1)..(438): unsure at all n locations
acggacactatgatactcaagctgtagtatttattggtataattatgctgttccattaagcttttgatgtctttagaggttacttcctcgttgacatcttttgtcttgaatggaattgccatgacaggattattgttactgtctttgatatttggtggttgatattgtgttgtgggaggtaatatcgattggattaactgaccatccttcacttgccagttagttatgacatttgttgttggatcacctatgatgtcttgtttccaagggtaatctatatcctatctgatggcataaacatgaaaccaatcaaataagaagacgttcatttggactctttccacaaatgcgtagaactggtcttggacttgagtctgattgaccctcgtatgcaggaaaaccatcgncttgatgttattatcctggaatgaacatctt

SEQ ID NO: 160868 - DNA, 404 bp, Glycine max
agctcgaagacttagttacctttatatactatttttggtttgttattatttagaataatatgcctaatgtggttgattatgttatacctttagcgttagttacttttagatgctgttgttattgaggagacttgaagacttagttacctttagatacatttttcggttttagtattaagaataatatgtctaatgtggctgattatgttatactccggttttttaagatgctcatatttgagaataatattttatttatgtaaagacttgctttattgactttatttattatacgtgaggtatttttagactaatataatgttgagattttatatctctttaggatgacgtgttattttaatgaagggcgttacaactgttgtggctgtagattcaatatttta

SEQ ID NO: 160869 - DNA, 437 bp, Glycine max
  unsure (1)..(437): unsure at all n locations
ttggtcaatctaaggagtggtgtcttcatgctgcatattgatggttcctgagtggaaaatcctaatttggttaagcctgaaattctacagcatttgcaaagcagattcaaattaattgaagttatgtacgagcactgtagctnttacaaaaataagcactgcagcttatttaaggcacaaattctgcagcatctgcagtatgtgggtggaaaaagggtgggagtggaaatttaaatggagaagacacttgtttgacagagagcttgagatagcatattgtttccgtaatgatgttgctggcagctgtattcagattcacaaaaaaagatgactggagaactttgacaaggactttgccttcacctacagctattggtcgtctaacatagcatcgggatttgtcttggctgataaanaaaatgtgggtggaaaaataa

SEQ ID NO: 160870 - DNA, 294 bp, Glycine max
ttctgaaactttctgactggaaatcgattacatgtttatggtgatcgactacacagttatatttctgaagagtcacgactttccaaaggcttttctgaaatctttccactggtaatcgattacagaattcctggtaatcgattacacaattcaaaattcacagtagtccaacacttaagaaacgctatgttcacgatctctctggttatcaattactagtgtagaaagatattactctcgactgattaatctttgataaaagatttcagcgccaactattacaatcaaaatttc

SEQ ID NO: 160871 - DNA, 410 bp, Glycine max
  unsure (1)..(410): unsure at all n locations
ctataaaactcagctggtcaaacgtgcattgtgtgcaatatattntttcgttcaccacaacaaaatggtgtatcagataggcgtactagaaatctaatggatatggtcaggagtatgttaatcaattagactttacccgtatctttgtggatgtatgccttgaaaactgccatgtatttgttgaacacggttccttagaaagcagtttcaaagacactttttgaactgtggacaaatacgatacctattataacgcacctgcatgntttgtgttgccgacacaaataaggatntataatccgcaagaaagaaaattggatgcaataacaatcagtggatatttcattggttatccagacaaattaaaaggatatatgttctatttatctaatgatagtcatgagaattgt

SEQ ID NO: 160872 - DNA, 417 bp, Glycine max
  unsure (1)..(417): unsure at all n locations
agctntaactgaaacactaagtaagtttccatttcaattgcatgctagtcaacctttaccttcatctgttntgcacgttacaggttgcacactttatggtggagctcatgggttaggcttgtatattcccactaaagaaacaaatcatgaagttaattacatgggaaactagcctagaaaaaatttgaatgcaagtggattttctggatttcaacatggccaaccttaccagcagcataatcaatggagaactcaccctggtaataacttcaacaaagaccagggtggaccatctactaggccgccgcagcaacaagagcctagcttatatcagagaacaacacagctggaagaaactctcgcttagtttatgcaagtgtcattgtctaatgataagagcacagagacaaccatcaa

SEQ ID NO: 160873 - DNA, 356 bp, Glycine max
  unsure (1)..(356): unsure at all n locations
ggtccagtatagcaatactatgagtgtngtcactgtcttgtttggngactagctcatntggcatgggaccgactatttacttagctatttattcattcaaataaaacaagtcagaggaatagtggacggcactcctcagatgggaatggtggattactggacttatccccttgggcccctgtgtctctatataacactagccaggatctactgttattgcgtgcgtatgtgacttgtcttctgatcttgtctgctatacttgagccaacaaggatctcagctgaggtttcctgtgaggtggaaataatccaccacgggctcgacatccttgtcacatgaaaataaaaaatctcatg

SEQ ID NO: 160874 - DNA, 465 bp, Glycine max
  unsure (1)..(465): unsure at all n locations
agctnggaaggaaacaccactgtcgntgagatttatgtatctctntggaaaaataaaacctaatgtggagttcacaactgtctgactgcttgtctctcccaagaatgccatagttttttgtaagacttgggttgatactgatacttgtgctttcttacaaggttaggttgtgccatatatatagatgagttttaatatcagtgctgcattttttaaagattgaaaatacgcatgcacatgctttctgtatgtgttgtcaactacacgaatgacatgacatgctttagcttgcatcagatctgcatgtgtagtcatgctgtgcaaggtcctttcacgcgctttatgttaatgcagacaacaatttatcatacacgattttccacaatgtgtagtcaactcagacaatgatatatcatacatgctnttttagaattaagtaataattttgttgtggacgtaacaaat

SEQ ID NO: 160875 - DNA, 410 bp, Glycine max
  unsure (1)..(410): unsure at all n locations
ggctgccacggagttntccgactatgctcttgtgtggtggaacatgctacaaaaggagagagcaaganatgaagagccaatggttgatacatggacggagatgaaaaagatcatgaggaagcggtatgtgccggctagttactcaagggacttgaaattcaagctccaaaaactaacccaaggcaacaaggtggttgaggagtatttcaaggaaatggatgtgctcatgattcaagcaaatattgaagaagatgaggaggtaactatggctcgatttcttaatggtttgactaatgatatccgcgatattgttgagctgcaggagtttgttgaaatggatgatttgcttcacaaagcaatccaagtagagcaacaattaaaaaggaaaggagtggctaagaggagtttta

SEQ ID NO: 160876 - DNA, 412 bp, Glycine max
  unsure (1)..(412): unsure at all n locations
agcttcttatccaaggctcatcttggaggtgaatcntcttcttccatggcttattccctagaggatggcgcctcctctcacctcttctcctttgtcttccgctgcatctccatggtgtaaaatcaccattaaaggacctcattgaagctcaaagatccagcctccatagaagccccacaagcaagcttccatcacctctccaaaggcaagccttccgcaaagtgtacggaaagattctagatttgaccgcggtggaggtatttacggaagctgtcgtatccctcgcccaatactatgacaagccgttgaggtgtttcacgtttggggacttccaaatggtatcgactattgaagagtttgacgaaatatttggatgccctcttggagggagaaaatcgtatattntctccgg

SEQ ID NO: 160877 - DNA, 437 bp, Glycine max
  unsure (1)..(437): unsure at all n locations
tcctcggggccatttcttgcgagaacaaacatttagaagttatctttacaagataatgcttatcttaacgcanaaaatgtcatgctaatctctctgattttagaatgaactgacccctcacctagaaacagctgaaacacgtatgtgtggaatatcctactatttatatcaacatagaggccatccaacacattctaattgtcatacatatatgcatttgaaaagaacatacattctcacgcccaaggcattgcgtcaaaactcacacttaatttatatcctaaacatttgctatttacaaactacctacgtatgtttgaaatatatatcatacaaatttttattgcttcactcacatttattcatattggcaagctatttacattatgcacacacttgcattcaaaagggaattccgtgctatcatacattcattt

SEQ ID NO: 160878 - DNA, 465 bp, Glycine max
tgaggctgcaacttaaattaaactttctgaaaagcttttttatattttttgcttctgcgaaacgaaaaccaagcattgtaatcgattacaagtggaaaaatacctttttcagacgatgttaaaaaatcttaaaacctttttataatcaatttaaaaactatgttgtgaggccaaacctttgcaatcactaagagacttttttaacaaagatagactaagacttaacttctcttcttgatccttgctttcttgggcttgatttggactgaaataaaacttgtgttgcttttgtcttggcatcatcaaaaccttcatacacctacattcacattctttctctttttaatgatgacaaccaactaacatcatttactgaaaaaatattcttttgcgagaaatcactccccttaatttgcttcattgttagcaaaaaatttcagaaggttgccaaaaaatattacttgt

SEQ ID NO: 160879 - DNA, 441 bp, Glycine max
tctttgagacaacttccttgagaagctagagcgtagctactcactttctctttttaactaagctcacctccttgagaagcttccttaataagattccttaagaagctagagcttagctacacatacctctataatagctaagctcacctccttgagatgagaagctagagcttatctacacaccccctataatagctaagctcacccccatgacaaaaaacatgaaaataacaaaaaaaagttcttattacaaagacaactcataatgccccgaaatacaaggctaaaaccctatactactagaatggccaaaatacaaggcctagacgaacgaataacctattctaatatttacaaagataagcgggctcatacttagctcatgggctcgaaatctaccctaaggctcatgagagccctatggcctttccttggatctct

SEQ ID NO: 160880 - DNA, 381 bp, Glycine max
agcttatatgataatgtataagagcagatcatattattattataaatttattattatcattgtcttaatctatatatgaaagttaatcttgaaaacatataactcaggacgtggcctaatgaggaagatttcttataacatatataaagatttacgttggattctcacttattatatatataaaaaaaatcttaagaagatgataaatcgatgattccatttcaagaacaaataaatattcgatttatgagttcccacagtaaaataaatttcaaagctgctattcgcatcactggtaattgtcattgaacaataaagcgtataaataacattcgaatggctattcgatgtcggacccttgaatcaatttgtgggacctct

SEQ ID NO: 160881 - DNA, 441 bp, Glycine max
tattatgaatgaatagcctcgtgatgcagcctcaatgggactatttattttgaacaagagctgcaaaatgacagaaaagtagtaagccatataaagttaaattaggaattcagttaaaaggatggatcctggcaataatagtgcttgaacccaaaatgtcaatgagaacacaaacagacagttgtcaaaatggcttaagacattacaattttcaaagtaaaaacatttctaaatcagcaaccaaggccaaatatataaaactttaggaactaaaattggaacaaaactttaatcattaaatgtttttgttacaagaaagaactcttgtgatataagacagttaatgttttttcttctatttaaatcatatcataaataatacaagtaaagaagcagcctagcttatatacagctaagacgacacacaatacaaaatcaatc

SEQ ID NO: 160882 - DNA, 460 bp, Glycine max
  unsure (1)..(460): unsure at all n locations
agcttaaataaattctcaactaagaaatcactttctacaactttattatctctagtcaattcaaaagaatcgttgcgaaaatgaaaagacaaatagaatgtgtaagcctataaacaaaaacaaagtttctagaaaaagagagaatataaaaagtgtgtttgaataatagaaaccaaaattcaaaacaagtttaaaagtttcaacaacctcaacatgtgaactcatacgattnttcacatagatactctgttcacttctcattggattccacaggtttagagagccctacacattattaacaatgtgaagtatagatctcgcatcaatccttctttatatgtcccacattacagaaagacaattcatcgttgctccatccacttcattaggacagtctcgcacactccaagaacaccattgnctcttctccacttnctgtatatgagtactatatgagcac

SEQ ID NO: 160883 - DNA, 417 bp, Glycine max
  unsure (1)..(417): unsure at all n locations
nttaagtaagaaggacattaagatgataattgataatggattgtgtataggcaaatatcataagaaggggggttgaattgtgattttagagtttttaaagcctttntgtaatcaacaaagttttatgtctgaaacaaaacctttgtaaaaacatataatagattttcaaaaccatagtcaaacgttgaaaattacaatctacacttagtcttttctctcaatatgttcaaaatgtttctagagcttttgaattttacaagaataaacataaatctttntatagaaagaataaagaatgtttgtgtgcaaggttcgtgtccttgttcttcaaagcttctaagtattataacctttatcttcaagtgtgttgtctcacaacgagtagatttctttacttgttcttcatctgaatgcaca

SEQ ID NO: 160884 - DNA, 354 bp, Glycine max
  unsure (1)..(354): unsure at all n locations
cttcttcttttatcatgtctcgctaattaattccttctttgttggggttaagtcaatttgtatgtatcttacatggtttttgttgacacgaatgaactatttagcgtttctgtcctcaaatgagtgatgattatagggtgaaaatttaccttataataatcaatcgtttcaaggttcatatatatagatcgaggaccataactaatgcatgcaggttngttgaagtcccttataatataatgcatctagatgacattccgcggtgtatacatcctnccacatgctatccgaatggttacaattccgtcaccgcctgctatatatattaacgtacatggaataatcttttttaaa

SEQ ID NO: 160885 - DNA, 453 bp, Glycine max
  unsure (1)..(453): unsure at all n locations
agcttatattaattaaatataaagcaaatcattttgttattgcgattatattccaaagttgaaaatggaaatctttctatatggagaggggaaattcggtctcagagtttggagcaaactttctaagtaataatttcacggattcatatgaaagtactaataatttcacggagtaagacgtaagattggcaatcccaaaaagccatataattgactactaattactcatcatatagcttttgaattaagtttgcaaaatttattatgttgactagttaaggtgatgaaatctcgaactaactatagtgatagtactatctcgcttctccataattcacacagaccagcataaccaactctttgacggttgacttgagtttaaaagttctatatagaaaaaatggagattgaattttgtggcnaagaaaacattaaaacgcataacttcaataa

SEQ ID NO: 160886 - DNA, 438 bp, Glycine max
  unsure (1)..(438): unsure at all n locations
tatcaagattcaagaaaagacaattgccataataacttgcatttntttatttttatctgaatggttttgatccttggattattcaatcctctaatatattgcaagtttgcaacatacatcacactgtcatgcactcatgttcaactcagccctcaagtagattatttctacaattctaattgctcaataggagagaaacaagggatacttaacttcaaaatggcttctacataacagattatgataatttatttcattttcaggatgattgtgtttctttatttttagggatcctaatatcttgtcttgttaggaaccatgtcccgttctcagagattntatcttttatcttaagaaagctantttgttctcatattangactatagtattagtataaataggactgttgggttagtgtcttgtatcacatcataata

SEQ ID NO: 160887 - DNA, 434 bp, Glycine max
  unsure (1)..(434): unsure at all n locations
ctcagctttatgngaattcccttattccagacacacaagatgagttgtttgcccattctgngagagataatgaaaggaattatttaaattttctcttgaaaatgaaaaaaaaaaaacacaccgtgcaatcatgggttggttgttagaaaatcaatttcgggtgttagacacatctcaatctaatcggcagaaccatgtctatgttcaaatattaataattgttcgttattgggtcataatctttctttcaaccatcaattttgcacgaacttgaatggattgcttgtttttgttcacccaattgtttatgactttaggctcacgggtttctcaacacgataaacccaccataacaaagtgaatatactattatctgtctgcttttaatacggcgcctctactttgtaaccaaatgaatactactttagatattg

SEQ ID NO: 160888 - DNA, 429 bp, Glycine max
  unsure (1)..(429): unsure at all n locations
agcttaagaacaagtgaaggctagagtgttattttgttcagtatttactggctattcatgactgttgtaatttcatggcggcttgcagattctgctgatgttaacatatgacagcacctgttttgtatttcttggcttggtttggtcacttgtgactgcaaaaacttgtgatgaataaaattgttctccttttcaaaacatatgttaattaaactcatttcttatttcttgttaaaaaaaaaacattacatgtatttttaaattctatatcaaatcacacacttctaaaatatgagaaaagtctcatactgtaaggacactgtccaagagccctttgtctttttttatgcaattgcaaagctctacacnattttataaactaagactaattctcacaagaccaatgctaaattgaaacacagacacttg

SEQ ID NO: 160889 - DNA, 424 bp, Glycine max
  unsure (1)..(424): unsure at all n locations
cgcattagttctactagcanagttaaacatatatttaaaactttaatgcggngtgctaccaacaactaatataaatattatcaacataaattgttagtacctggaaatgaccattttgccctcatgtcactacaagaaaatcatgttttccgacggactacttcccacgaacaaaattgtcagaatgttttgatttttcaacggatattatcgaaggaattaattccgttggaaattttgaaaatactgacggatttgaccgatagacaattattctgtgggaacattaatatttccaacggattatacacatggaataaggatccatcgaaaaataaaatttctcgaaataaacgagctttaccctagccgtctgagtcattatggtgttttcgtattcttcttctcctccttccccatttgc

SEQ ID NO: 160890 - DNA, 480 bp, Glycine max
  unsure (1)..(480): unsure at all n locations
agctttatacaaaggaagaagaagaagatgttcttatatactcananatcaatgtggaaaagttgtttgtaaaggttgtaagtgtttttcaaatgcaaatcaaggtcttgcttttatagacttttcttgtctggtcaagagaaccattagaagagttataacctttacaaaaacttgaaaacctttggaagagttacaacttttgattttgcttagaaactatcactgataatcgattaccaaatcagtgtaatcgattacacaaagcttttttgtgaaaggatgtgactcttcacatttgaatttgaatctcaacgttcaaacatactggcaattgattaccaaatcattgtaatcgattacaacattttgaaatcaattggaacattgttaattcagttgaaagcattctgaacaccattttgctactggtaatctgatacaataatctcggaatccattaccagagagtacaaactc

SEQ ID NO: 160891 - DNA, 437 bp, Glycine max
  unsure (1)..(437): unsure at all n locations
ggcttgtacaatggttatttccagtttcctgaagatatctctttaatcttgccaaatgatgatcttttcctttcttggatggcaccacaggatatggtacttccacactctcttccacagcctttccacttctactcttctctgcaaccttatttttttcattttcattcttctcattttctgtttctatttctttttctctttctttttctttttcttggtcctccatctctttattctggaccattattttcttcccttttcctgattcatttttacccttcacatcatttttcttaacctcagcacctttcttttcacccctttgctccttgtctaccacattttcttcattctcagctgtcacaaaccttgtactcctggtcatcataaccttgcattcctccttacgattatnttccgtatgtgctccaaag

SEQ ID NO: 160892 - DNA, 455 bp, Glycine max
  unsure (1)..(455): unsure at all n locations
agctttcataagtgaaattatgtgcttccatttccctaagagtcctctctcaaggaggaggttgagccatgttctcagtatgaaaattaacagccgaatgctcaaaatcaaaatattcagaatcaccagcaataggatactcagaatgctcaaaatgctcaaaatgcatagaatgatcaggatgcacactatgcctaactaatctatgaaagattctatctatttcaggatcaaagggttgtaaatcacctggattgcccctagtcatgcactatatgcagcaaatcatgtatctctcaacaagcacctaacaaggggggtaaaactacagctatactcaaacgatatccaaatgagctgaaattgtgtgagcaacaccctactatcatganaagatagcacaacaaaattcaaaaaacacatcactaactatgacaactacctaagaaaagtta

SEQ ID NO: 160893 - DNA, 422 bp, Glycine max
  unsure (1)..(422): unsure at all n locations
tagatacacaaaagaaattccaatgatggtagcaagaacatattaggaaattgaaaatggaagaacaaagggaagaattctagtgaatgatcaagcaattattcgaatcataactagaataaagaaaaacaacaaaaggaatggtggaagcaataagggtgccaagaagaaattcaacaataaagggatccaatgctataactataaaaaatagggtcattttgctaacaagtgatggggtaagaaagtgccaataaaggaggatgaagctcaaatggcacaagatgagtgttatagttctaacgatgtattgttgatggcaactaccaattcaaaagactaaaattntgatctttggtatttggacataagatgctccaatcacatgactggccatagagagtggttcacgagtcttgatg

SEQ ID NO: 160894 - DNA, 398 bp, Glycine max
  unsure (1)..(398): unsure at all n locations
agctngattttatttnttaaaagataaggtacatttaagtatatatttaaaaaataactaanaatatttataatattatatagtggtaaataatatatattaaaattttctaagacattattattattattatatatagtcaaatagttaaaaattattcatatctattaaaatattataatttattattatttattaaaatagtgtcatatataataaaataatagaaattatttgtattatcattctcaccgttcattatctaattgatgggtttatgttttatatgaactctacttcaaaagggtgtaaatattcacctaacttctttcgagtatgctctctatcttcgctctcttcttcttgtcatcatataatatcatctctttccttcttta

SEQ ID NO: 160895 - DNA, 441 bp, Glycine max
  unsure (1)..(441): unsure at all n locations
ctcagcttgtatcgatacacaaatcttgtaatcgattaccagaggataatttcatatnataatttccaagagtcacatctgttcaaatgattttttaatggccatcaaatgtctatttatatgtgacttggaacacgaatttgcttagagttttttagaacaaaaaggtcttatcctctcaaaagaaaaatcatcttatccacttaaaaattccttggccaatacacttgcaattcaataaggaattattttagtgctcaattgttcaatctatctctttcaagagagatttctttttctcttcatcttatttctgaaaagggattaagagaccgagggtctcttgttgtatagcaatctaaacacaaaggagggtttgtccttgtgtgngttagaacttgtaaagggcttctgcaagatagtggaactctcaagcgggtt

SEQ ID NO: 160896 - DNA, 354 bp, Glycine max
  unsure (1)..(354): unsure at all n locations
gtcacctgcagcatgcaagcttgtgcttggtttatataaattcctaggtatcattatctactaggtgtgtcctactattacttgagaaacaaaggtgatcaaataacaagaagagaatttaaaaggtactaggttgcctcctagtagcgcttctttaacgtctagagctggacgcttgatggcttgtcagtcactgacccagtactttgcttaccttcggctctggacttggtcgcctattgctcggccatgggtcgtaagcaacgctctaacctttttgtggatgagctgaggtgaactctacaagtgatagcggngcgtctgttgcccgctgctggccatccccaggctact

SEQ ID NO: 160897 - DNA, 419 bp, Glycine max
tgaagaacatgcacaaagtgtgactatatgatgtgacaatggagtgtatcaagcaaatgctcacctccccctctaaactttaattggattgggcttctcccaattaaattaaatttatttccaaccacacacatcaaatattcacttaatacatgtgaaattacaaaactacccctaatacaaaaactagttaggtgccctaaaatacaagtgttgaaaaatcctacatttctagggtaccttacctatattatggagccctaaatacaaggccaaaaaaaataatgaaaccttaatctaatatgtacaaagataagttggctcatacttagcccacgggctcgaaatctaccctaaggctcatgagaaccctagggccttctcttgcatctctggcccaatcttcttggggtcttata

SEQ ID NO: 160898 - DNA, 364 bp, Glycine max
  unsure (1)..(364): unsure at all n locations
atatgacggctatagtaatgtaatggatgaacaggtgaatttttctcttacatgatatataatcttaataattatactgatgaactttccaaatatctatttgtagaatgatctagtgcatggatggggattggactttgctctcagaagatgtgtagaggtcagtaaattctatctatttattcttatcccttcctaccaatgagagtttgaatccttcttgtagcattggtgataggtgggtatgctttagttggtcatgtgtgcgttcaggcgccaagcttataagaagccatatgaatganaattaaatgatctttgtttttcgtcttgccttttgaacttatccaacacagtggtcctg

SEQ ID NO: 160899 - DNA, 427 bp, Glycine max
tctgaagaaccaatatcttcttttgaagattcagttgtgatgcttgaaattgcagatgcagaattaatctgtctaacaaaatgttatttttactacatgctacttacttcttggactagcaaataacagaaatgtttttgactttcgatacactaatcacaaaatgactattaattacacattcaaagtaattcctgccaataaaactatctattttgattgggaaaatcaaccaatatcacattttttgttacaaaatccatttgtgaagccacatagacacgaaaatgaagttggtgaggcaaacctttgcagtattaagcactacactcttgcagtctggtaagatgctcacagaccatgcacgcaagtgatatgaattgccactgaagtttactgttacatcagatttggtgcctacgttagc

SEQ ID NO: 160900 - DNA, 424 bp, Glycine max
  unsure (1)..(424): unsure at all n locations
agctntacagcagattgtagtaatgacccactatcctataattaanataacttaatgccattaacctagggaattaaaacaaacttaatggctgagtgtaactgaaattgtggcaaccaaaagtcacccccaacagccaacaagtcagccaccatttggtctcccaaaaggctgatgcctangttgccaattgggcccttattacaacttgaactaaagcccttttagttgattaacccaaaacatatttttggtcagccaactttacaaggaatgggccattatttagacaaacaaaacactctaaaattgaaataaagtggtgtcatttagtcctcctccatttgggccatgatacaactcacaaccttggactnttctccttgaaacttgngcttgtattcaaatagtatggacaacactt

SEQ ID NO: 160901 - DNA, 440 bp, Glycine max
  unsure (1)..(440): unsure at all n locations
ntgtgtaatggattacacctgattggtaatcgattaccagtgatatgttgtgaacaaaatcaaaagatgtaactcttccaatagttttcaagtttttctaaaagttataacttttccaaatggtttttaagtttttctaaaggttataactcttctaatggtcttttgactagacttgaagagtatataaaagcaagtctttgatttgcatttcatacattcattctctagacaacaaacttttgccaattgatttctgaatctctttgaactcattcttcttgttgttttaccaaaagctttctcaagttttctggttttccaaacctagaaaacaaaacttgtgctattcatctttttcattcctttctctctttgccaaaaagaattcgccaaggactaaccgcctgaattctttttgagtctctcttctcccattt

SEQ ID NO: 160902 - DNA, 462 bp, Glycine max
  unsure (1)..(462): unsure at all n locations
agcttgtgcaaatcanatcactcctgcatgtcttctctaccatgcattctttctttctttacccactcctcacgtttgtttttttagggaaaaacaccataactaaacgcgccacaaggcatccctatcacaccagatccaaatctagaacgatgggtgatcaagaggagatacagtgtcataccctaatttcgtccggggacctttgcttgatgacatgcgacctttctttggtccttgtgaggtgcttggaacccatcattaggcaatttgtgaaattccaggacatgccgganaaccaaaaaaaatattgatgcacaatccgtaagtttccgtgacacaccagaaatcaaatggaagcatcgttgcataattaagtgagattccgtaacattccgtanatcanaaaggggatgattatgtaatccgcanagttcgtaacattacggaaagaaaacaagt

SEQ ID NO: 160903 - DNA, 459 bp, Glycine max
  unsure (1)..(459): unsure at all n locations
acctataaaactcagcttaacatcagaccacttccagggtgctggaactacttcacatggatttgatggggcctatgcaggttgaaagccttggaggaaagaggtatgcctatgttgttgtggatgatttctccagatttacctgngtcaactttatcagagagaaatcagaaacctttgaagtattcaaagagttgagtctaagacttcaaagagaaaaggattgtgtcatcaagagaatcangagtgaccatggcagagaatttgaaaacagcaggttcactgaattctgcacatctgaaggcatcactcatgagttctctgcagccattacaccacaacagaatggcatagttgaaaggaaaaacaggactctgcaagaggctgctagggtcatgccttcatgccaaagaacttcctataatctctgggctgaagccatgaacacagcatgctaca

SEQ ID NO: 160904 - DNA, 473 bp, Glycine max
  unsure (1)..(473): unsure at all n locations
caagcttgaaggtgcgtagcccaccatctttttatagtagagtatcgataatgtgtctaccatcacgatcatcgtctccctttccatcattgggggtaccacctgngccgccagatccctccaccttttgggcgtgttctttgaaagatccgtccccctttttgcaaatgttctgtagttgcatcctatccgaaaccatatcaaaattgtactgatactgcctaacaaaggcaaccattatgtccttccaagaatggactcgggaagattccaagttagtgtaccaggtaacagctaccccagtaagactttcttggaaggaatgtattagcaattcctcatcntttgcgtattcccccatcttctgacaatacatctntagatggttcttgagacangtagtcctcttgtacttgtcaaggtccancaccttgaacttgggaggagtgatgatattggcgtctaagaacaac

SEQ ID NO: 160905 - DNA, 438 bp, Glycine max
  unsure (1)..(438): unsure at all n locations
ngcttgtggggcttctatggaggctagatctttgagctttatgatgtcctttaatggngattttccaccatggagatgcagcggaagacaaaggagaataggtgagaggaggcgccatccactagggaataagccttggaagaaggagcttcaccaccaagatgagccttggataagaagcttggagaggatgcttcaatggaggaaaagaaagaggaagagaaagagaaaggggggagcacgaaattgaaggaagaaaaagggagagaagttgaactttgagttgtgtctcacaagactctcattcatcaaagttacaacaagtgttacacatgcttctatttatagactaggtagctttcttaagaaaacttccttgagaagctcctttgagaaaacttccttgagaagctagagcttagctacacacactcatct

SEQ ID NO: 160906 - DNA, 410 bp, Glycine max
  unsure (1)..(410): unsure at all n locations
agctnntaaaattgaattaaaacgttcaatatctgctggtaatcgattaccatatatgtgtaatcgattacacagtgcaaattntgaattcaaattttaatagttgttgtaaatcattnttggccactggtaattgattacatcctctggtaatcgattaccaaagagtatatatcttgaaaaagactttntaacttaaatttcttggccaaaccttttgctacttcagttaggaattcccttcctatttaatataccctttctaaaactctagagactgtcttgatcatccatcttgaatatctttaatttctttgtcttgaatgaagctttaagaagcatgtgatcctttggcatcatcaaaacattcagcttgatctctgtctacaatgatcactatgaatgacaaa

SEQ ID NO: 160907 - DNA, 433 bp, Glycine max
  unsure (1)..(433): unsure at all n locations
ngagcaaaccacaaatttgagggatccaaaataaattacaatgcacatctttaatatgcagtatcatactaagttgagaaacaaaaattattaattacataaaaatgataaattatttgcagaattattacaaataaaaataaataaaatctttcaacatctacttgaacatgcatgtatactgttttaacttaagaaaaaattagtacgtaaatatatataatataattaatatatattatatattaatatagtattgcataaaatgtttgaacaagatagaaaaaaaaaacattatagtctcaagcattacatattttagaaggaaagagtgattatttttattaaaacataggttgcacagcaataacattaagatgaanaacgagaacaataacaatgctgaaaaagcggtggatcactgaattatatc

SEQ ID NO: 160908 - DNA, 439 bp, Glycine max
  unsure (1)..(439): unsure at all n locations
agcttcggatacaacgagatgtcatgctgtttctctaagccttcaactctcccaatgctaattccttggacacttaaaattaggtagctaaactatataaagcacttgtaatatgtcctcttgtgtttctcacatatagagcgagggttttttttttttttttgtgtgtgtgtgcaaataaactcacctctcatggtatctccacaaatggttttagttggtgggattctgtttccactttttattcaaaaagagttctataagaataaatatgatctttcttgtatacgttgaaatgatngcacatgaattttgattttctcgtccctacatgatattgatttcttcttatggatttaatataatgcactgtgtattttggttgttaaagttagagagtaacctaatcgaattgctccttcaatcacctttcacacca

SEQ ID NO: 160909 - DNA, 462 bp, Glycine max
  unsure (1)..(462): unsure at all n locations
agcttcttgtgtagccgctcttggtgctcatattatcccaaaaacaaatccctcttattactagctattttgaattctttagttcctgaatgtacaaccttcaaattggtgctcgttcccctctntgttttctgcaaaaaagaaaatcaatatcaaagaaagcacggatgaagtcctaaggatgccttgtacatgtgtatttctgaagatatagtatttatattccatcaagcatacattgattgttgattacatgtaatagactttttataacatggttgccccaaatcacaattaanaagcacaactactcaattttcggagtcncttggttaattnttcttgtctccttctggggaggagtcttggttaataatattatacttttgccttcgcaaaaaaacttatgactgatcctctgttcattaatcctactgtgtatgctattagataaaagatcat

SEQ ID NO: 160910 - DNA, 436 bp, Glycine max
  unsure (1)..(436): unsure at all n locations
tctcaaggaagctacctagtctataaatagaagcatgtgtttcacttgttgtaactntgatgaatgaaagtcttatgagacacacttcaaagttccacttctctccttcttttattccttcaatttcgtgctccccccttctctcttttttttcctccattaaagcatcatcttcaagcttcttatccaaggcacattcttggtggttaagctccttcttccatggcttattccctggggatggtgcctcccctctcctcttctcctttgcctttcgctgcatctccatggtggaaaatcaccattgaaggacctcattgaagcttaaagatccaacctccatagaagctccacaagcaagcttccatcaaaatcttcttctcatcaacctcttcatttcttcccaactatncaccaaggggtcttcatatcttgc

SEQ ID NO: 160911 - DNA, 389 bp, Glycine max
  unsure (1)..(389): unsure at all n locations
agctnngttacccgacgaggaatctgttttcttatatctatacaccgcaccactgatggttctcctgttgaagaagtntatggacataacccactaacttctctggaccatttgcatattcctaaaggtggtgtgtctaagcgtaaagaaagtcaatcaaatgcggactgtgtgaaaaagcttcatgagacagtcaaagatcaaattgagatgaaaaatgaaagctatgctcaacaagccaacacagggagaaagaatgttgtcttttaccgtgagattgagttaaggtgcacatcatacaagaaatgtctcctgaccacaggacatcaaagcttcaaccaaagtgaggatgaccattacaagtgcttgaaataaacaatgactatgct

SEQ ID NO: 160912 - DNA, 366 bp, Glycine max
tctacatatgtggcagggcgggctacacttcagtggtcttttttgtaatgcaagctctgacgactgctcttacttgctcatatggatcttcacatgcacgactgagagggcttatcgcctaaagcatacttcccacgatgacaccgagtggataatacgctaggtgatgccgcatggacattgtctaaacccagaacacaggtgaaaccgttccctaacataactctgccatgtggccgtcggatctgaccacaatgtagacaaagagggagatcctgggaaatgctgaccaccttaccactgaaagccgtctaacattcttcgggagacacctaacatggaggagggcagttacaagaatcttca

SEQ ID NO: 160913 - DNA, 444 bp, Glycine max
  unsure (1)..(444): unsure at all n locations
agcttatcatccttaccagcgttagttaaaatctttaatggaaattaagagcatgaaagtgtgttgataccattaactagtcaataggttcttgagcagcttgaggacatcaatactatanttggaaagacccaaaaaaaggaaaaaaagtaaaacttggatatggaagaagagggtgatattgtttgatcttccatacttgtccgatctagatgtcagacattgtatagatattatgcgtgtggagaaaaatgtgtaatagtgtcattggcacaattcttaacattctaagcaagacaaaggatggttgatgggtcattatattctcctatttcttaacccttcttgtaccattttattactgattaccttaattgcaaataattatgcatttacattgggctacctaaaattttggttgtattaactcagagaatataacat

SEQ ID NO: 160914 - DNA, 409 bp, Glycine max
  unsure (1)..(409): unsure at all n locations
ttcacaagagtcttcacaaataactatcatgaagcagataactaacaaaactatccatcatatcttccataaccccatacccacgaaaatcaaaggagaaagaagtccagccaaacctgaaatttcgaagtcccactcgtagacacgcatttcacgactccggaaatgccctcctctcgcgatgtggagcagaaatgatggctaaaggttggagctttgttgggcaacaatggtggatgaagaagagaagaagaaggctgcgtgagagagagggagagcttctgaatctttctgctttggctgagtgaggagagagaaaagctttttgggtttaaataaaagggggttctctttttttctctattatttatntaagcaatgccacatgtctccattcgagtggagcaag

SEQ ID NO: 160915 - DNA, 255 bp, Glycine max
  unsure (1)..(255): unsure at all n locations
agctngacaggttcaggtgcatgtgctgcttctggtagaggcacttcaatntgcttgctagacctcaaggcgatggcactcacatttttcagattttgcacagtttatgaaggcaatctgtcagaattttgggattgagcatggttcaactgaatagccatccgccccatctgatttgtcagactctgaatggatgctctcgtctcttgatgaaattgcatattaaggattgttatttgccttactaacttctct

SEQ ID NO: 160916 - DNA, 422 bp, Glycine max
  unsure (1)..(422): unsure at all n locations
ngtgcgattcaccccagatactggagtcatatgctatacatgctctgatatctactcgataatgcaatggtcgccataacctctgctaggtatcctccacctccatattctgaggatacgacttgaacgcaacatgtgcatatcatggaggagccctgcggcataccattgagcactgtatgaccttgaagcataaggtgcagagtccaattgatgcgggctggctgaaatttgaggagaatcgcatatgagtaccgacattgacaagcgacgccacacatggggcatatttgaaagctgctgttagatgtctctaatgactcattaagcatttcaagtttataaaccatatatacaatgtcttaataaatggatgaatctgacagttttgttcctcatccacttctgattacatctttgct

SEQ ID NO: 160917 - DNA, 446 bp, Glycine max
  unsure (1)..(446): unsure at all n locations
agcttattaaatataacacactaatttaatgtttataaaaaatacttcaagataaatctttattccaacctaacaaaataacttacaaaaaatatgtgatactacagaaatttcgaaaaccacctaacaaaataacttacaaaaaaaattgatatcacacaaattttcaaacccacaaaagcaaaaacgaaagcaactgctgcaagcgaaaacaggtgaaaagaatggtgaaggaggaggtgtatttaaacaccctaaaacgccaaccccatttgcgccatattctaccctaaaacgctaaccccatntgcgcttccagaccgaaagctgcctcactgctcctgcctgccaaagctgctcctggtctgccaaagctggtgttcttgctgcaaagagaacacgccagtttgactggtggccttactctcccatgcagaacgcgccag

SEQ ID NO: 160918 - DNA, 437 bp, Glycine max
  unsure (1)..(437): unsure at all n locations
ngacaaaccggtctgtttaactaacaataataataataactntattttatcaaatcttatcttatccagattttattccatctagattttatttcgtccaaattttatttcatctaatcttatcttatcttgtccatattttattttatttcgtttatgggcttagacttaaaataaatttgtaaactttggggctgaggacctaatccatacattttttaatattgtgctctttttattttcttttgatatactttgtgcttgttaacttgaattcaatatgattttgtttatcaattatttttggatttgtacattacttatacgaaattttataagtttctttttttagttagtatttcactaggttttaaaataattaattaatcaaaaacgtctttaagcaagtttttaaataggctcgtggatcaaatcag

SEQ ID NO: 160919 - DNA, 300 bp, Glycine max
  unsure (1)..(300): unsure at all n locations
agctngtatctttaggtcatactagtagaggattttctactgtgagggttcacgacaccacgaatattccaggagagcacactcagaattgtactatccatacaaaactaataaagggaggagcagatgagagccctactgaggtccaggatcaaagtatttggaccatttccatgtcttaaacatggttcttctccatcatggaggggagacgcaccatgttcctacccaggatggaaaacccgactttagcattgggttgggaatgctcgatcaccctcttaggggggtacgcctacg

SEQ ID NO: 160920 - DNA, 443 bp, Glycine max
  unsure (1)..(443): unsure at all n locations
cttcacctttggtcctcctcatagtcgttgcatgagagaacatgttctattttcatctcgntggttcattaacctctccaaatgttgcatcaaagcttgcatttggaattgcgaaagccccactccatcattaggattagtacctaacatctcaaacaaacaaatcaaatgtaacaagacaattatagttgttgtttgaatacctcacccactcaagtgtatcacacaattatggtttttctctaatgaaacactcttgccttttaccactctaattccccttgagttcttatgcaattcaagagattatggccacaacaaagaacaattcaccaatatgtgtaaggtaaggctagagagacaaggaaaaggttaaccaagataaaggctaacaatggttttaggaacaaatgaaggagataaaattcagaatttacgaattc

SEQ ID NO: 160921 - DNA, 470 bp, Glycine max
  unsure (1)..(470): unsure at all n locations
agcttatntagcgaccgtatataactaatttgttgactctatngtgtggtcactaaatgatgttcttttccttgcagtgaatgccaacaatatccttgagttttttttggcatggagaaatgcaatcttgaaacctccatggaaattctgagtctcactatttaattctttcttttagcattaggagcgaggctttgagtatgagccttgaaataggcaacaaattggtccttaagtaggcataacttctttgacacctgcatggttgcgaaagtcttggctccatctgaagagcttangaaatntctcacatgtgaacaattgcagcccatttatatcttgaattataggtatgaatacaacaacaatatccacataaccaaactcctctccacctaanagcttgcccttcaactcattcttatacgagataaagtacttagttagactgaagggacactcgacacact

SEQ ID NO: 160922 - DNA, 443 bp, Glycine max
  unsure (1)..(443): unsure at all n locations
tctattcanatttagctttgatgggatcccacatttccaacctcctcagatttgcaccaataggaattcccaagtagataaatgagaaagataatattctacaattcaagaatgatgaaaaacgttcaatatcttccctatccaccccaatacccctaaatctacttttgtgaaaattgactttcaatctagatacaagttcaaagcacctcaacacactttttacaacaaccacattgtccatgttgaactctccaacaaaaattgtgtcgtccacatattgcaacaagttcacctccacctccttagccttcactttgaaccctctatatatgtttnttcttattgccccccttattagcccacttaacccttccgctataatagaataaagaaaaggtgctagaggatcaccttgtcaaagccctctttgcatcatgaat

SEQ ID NO: 160923 - DNA, 428 bp, Glycine max
  unsure (1)..(428): unsure at all n locations
ctctgagtcacctgangcatgcaagcttacaagactcagaagtcatatgagacgctagttggttccctcaatggtgaaaactttggaggatatttgataaatctgaacgaaaatgatgaggctacaactaagggggagaatgccatgggagaaagatgagaagcttggttttgtgaaagtgaaaacggaaaaggttgtctctgctgccgagttgactcttgataacgtgctcgcttcaaagttgaggaatgaacttgatagaatgacaacgcggatcaagggttaacncagctagagctacacaagatgttgcggatcaactaaaaggacttgtaagagaaatgagctcgcatgactaaatctgatatcctctggcccgacatggtacaacacataaatcgttgcgctctgctcgccctttctcctca

SEQ ID NO: 160924 - DNA, 442 bp, Glycine max
  unsure (1)..(442): unsure at all n locations
ttacgcaatgataagggaaaattgaataattgatagttgttctgttttagttgatcaaactattgagagttgaatgaaatgttagtttcatcttaatgctttgactcttgagtaggaccttgtgggagagggaataagtcttccttatttagttaggaatgaaagattactttgaccaaacacaaactaaaagcaagtccttctacagagggaacaacaaaactataaaatgagttatttggtatattaggcaagagcaaaatactattaacatttttaattattaataatgtaaagaacagagcctaataggtttcaagaaccaaaaaaatgctagctntcaaggaaaagctaaaagatttgactgttttctttctattgtttcatttgtgtatcgtcccctgcttttcttctatttagaaaggcaaatcttacaacccac

SEQ ID NO: 160925 - DNA, 484 bp, Glycine max
  unsure (1)..(484): unsure at all n locations
agcttaataatgtaagtataaaataaaaatgtttataggcagccaatgcaatgaattacttttaaatcttggaaagtatattaaaaccagctattcacaaaatatagagtgggaataaatggaagcccattaacagtcatccatgcatacaagtaccatagcctacagcttcagagctaattcaagctcagttaaaacaacttagaatggtttaggattttcagactgcaaaaaattaatttcaactagttgataaagttaaatggataacatgtcccaataaatggaccacacttgatgtcagagcccatctacttcagaatatcaatcatgtaaatcttttttacctgcaaaaaaggtcgacgaagaagaagttcagcatatatacaacctgcagcccanacatcaactccaggaccatattgcttggcaccaaataataactcaggagctctataccaccgagccgaaacctattcacata

SEQ ID NO: 160926 - DNA, 424 bp, Glycine max
  unsure (1)..(424): unsure at all n locations
ntntgggattcacttatttagggtttggggactcacctgaatcagaacagacttcaagactcanaatacacttatagaaataattagattatttaccaacaaaatttttatatcaacagtaaaaatcaaactcatattcttttaagatatatcatatatttctaatcgactgaattaacctttattgttaagaacaaattatttataagttttgaattttcacattcagatataaaagagataaaagaaaatactgttatgatattttactttttgttggccagttattcctaaagaaatctaattcaaagttcctaaaaacatccacaagcttcaaaccaaaatgtcacattattaattnntctgttgaaaaatgcagtttagattgtcaaagccaatgataggtataaatacctatacgatg

SEQ ID NO: 160927 - DNA, 472 bp, Glycine max
  unsure (1)..(472): unsure at all n locations
agctngntgntgctatgatgtgatgtgttctatcttangaatgtatgcatgtgttgaattgattaagtgttggtgtagagctgataatcttatgttttggaaattgtcatcatgtgctatgcgcatagttgcgtgctaagcgtgtatgtattgttgcaagagacacacttggcgcatgatagctcgctaagcgcacataaactctcgctaagcgcaaaaagccgtgccgagcccaaaaatctctatgcatggagtcatctcaaattgggcttataacaagatagcctgctaagcaccccaaaactctctctaagtgtgaagcgtcgcgtgaagctcacaatcccctatgtctagaattatttcacattgngcttagagcacctaatacgcacagcccanattcctttctgttggagctccatgtttgngcttacgtgcgaagccacacttactgcatgctatgtgtactaac

SEQ ID NO: 160928 - DNA, 433 bp, Glycine max
  unsure (1)..(433): unsure at all n locations
tcanacttgcaacanaggagttgagcaggtaaaaaatattcttcttcaaactcttagaggtgactntgagcgtttgtttatgaaggagtccgagtcaatttctgattatttttctcgagtattggccgtagtcaatcaacttaaaagaaatgctgaagatcttgatgaggtgaaggtcatggaaaaaatacttcgaactttaaatccaagttttgacttcattgttaccaacattgaagaaaacaaggatttaaagaccatgactattgagcaactcatgggttccttacaatcatacgaagaaaaaaaagagagaaaaattaaacaaaaggaggctacggagcaactacaacaactcaacgtaaaggaagcaaactatgcaaattacaagagccaaagaggacgaggtcgcggccaagatcgtggacgtgga

SEQ ID NO: 160929 - DNA, 449 bp, Glycine max
  unsure (1)..(449): unsure at all n locations
agcttatcacatgagtctttatatcatatttttgtaaagtttactaaaataaactaatattttgatcagctntaacatggaccttactgagatgggctaaaaagagcttgtatgaaagttaaacataagtcatagtaagctcttccaaacatcaccttattcatatatgatgaaatttgtggtcacaatattaatttaacacttaacaataattgtgcaccaactcataaactgctatagacaaagcatactttntaaaataacgtttgaatgaggataggtctttaacaattaacaagttaagctggaagctattagaataagtgatagctttctntgtacattgtgcttcgctcatttcaaaatgatgatgttggattttcttaagtatattgcacataaatggagtttgcttggtagccatgtaaatccagtttggaatattacct

SEQ ID NO: 160930 - DNA, 435 bp, Glycine max
tgcacattgctgtttgatagaagaataagaagatggttatccttggtacttcgatattaaatgatacattgaagacaaggaatacccacctgaggcctctaacaacgacaagaggacgttacgatggttggcgaccgatttcctcctaagtggaaatatgttgtacaagaggaaccatgacatagtactactttggtgtgtggatgcaagagaggctgaacagatgctaatagaggtgcatgagggatcctttggtacacatgtcaatgggcatgccatggcccgtaagattctgatagcggggtattactggctcacaatggagaacgagtgttgcgttcatgtgaggaaatgccataagtgccaaaccttcactcacaatgttaatggagagcgattgttacgcttatgtgaggaaataccattgaacgtctt

SEQ ID NO: 160931 - DNA, 459 bp, Glycine max
  unsure (1)..(459): unsure at all n locations
agctagttatgagatcgtcggtttggtgttcattctccacatagttgcgaggaggagaattgttggattnttttaactcccttcctatgtggagtaaaggcccaaatgagaaggttcattntgtctcattcttttaagtggagagggatcatattaaatagagagaaagactcatttgagaggaaaaaataattacaaatcattgagagagaaaagagaggaaaaattattatgattttcacatacccaccaaagagcatttttcagattgcaattacgagttcattcaacttggatcggactgatttttagacaacaggttctacacacgtgataattcaaatggttcggttggatcgtcaaaaagatatatggagagagataagtcgttcgcattctctgtttatattgtggagtccatcttcttgttctattgaccaatcgagtgctatnttgatt

SEQ ID NO: 160932 - DNA, 437 bp, Glycine max
  unsure (1)..(437): unsure at all n locations
ntgtgtaatcgattacatggttntggtaatcgattaccatttgaataaaaatcaaaagatgtaactcttccaatggttttcaatttttctcaaggtcataactcttccaatggttttcttgaccagacatgaagagtctatagaagcaagaccttgacttgcattttaataagaattacttacaactctttcatatactcttttacaacctttgaatctctttgaacatcttcttgaacttcttcttcttcttcttcctttgccaaaagcattttgacttttttggtttccaaactttgttctttcatagaaaaaataagtgtgctattcatctttttcattctcttatccctttgccaaaaagaattcgccaaggactaaccgcctaaattctttntgtgtctctcttctcccttttctaaaagaacaaggactaa

SEQ ID NO: 160933 - DNA, 415 bp, Glycine max
  unsure (1)..(415): unsure at all n locations
agctngataacagcaaagcctcatctattatttttctcttttagtgatgcattgtcaccggtatttcctatcgccacaatgtattacttaagaggatgatatcactagaagctagtaaggttacatgaaaccacccttgggaattatcactcgaagtggacttttggatcctttccattagattcctaaactagggggcacatagaaaactcactctggcatgttctttgattgcatcatacatcccttcatggcatcgtaatgggcatatcattcttgcatttatcatgttcatgcattgcattttgcatgagtcattgcattatcatgcatcttcatttaacatgctttttgttctacaaattgcatacattctattttcattggtcgcatgttatgcatgatcctttgcatt

SEQ ID NO: 160934 - DNA, 455 bp, Glycine max
  unsure (1)..(455): unsure at all n locations
ctattacggacctatgaaactcagctggtaaaaagggatcttaaaaagaaataatatttatatttagggtccatgaaacatgaattgaaaaagaacttatggattctagagatgctggagggatgggcatttctagaaaatataagtcaactagacagctaaggaaatattcagcctgaagagctacatggcctattgcaatattaaacatttgtcttctatgattntttttaaaattcttttattagcattcagtgttagtatgtttttttaaaaggaaatgtcagaatgggccttcctgagaatccctgctttcctttnttttaatttcaaaacaaatatgcaactatactgaggctaagagattggtccataattaatcaaaatgttgcctatattccacaaatctttttctcatccacctcaagagctcaacagccctacatcttacaaag

SEQ ID NO: 160935 - DNA, 306 bp, Glycine max
agcttaaacattcaatgtcgagcgtctttttttttattttactcactcacacatcccagtaaaaagttattgtcgctcgaactggctcagaggctcaacattcaatttcgagcgtctctacatattacgggactcaatcagacatccggaggaaaaagctatcgtcgtatgaattggctcacagctttaacattcaatttcgagcggtttgatatattacgggactcaatcagacatccgactaacaagatactgccgctcgaatcggctaacgagccaacattcaatatcgagcgtcttgatata

SEQ ID NO: 160936 - DNA, 434 bp, Glycine max
  unsure (1)..(434): unsure at all n locations
ntaagccaattcatacgacaataactntntactcggatgtctgattgagtcccgtaatatatcgagacgcacaaagttgaatgtttaagctttaagccaattcatacgacaataactttttactcggatgtctgattgagtcccgtaatataacgaaacgctcgaaattgaatgtttaagctttgagccaattctaacgacaataactttntactcggatgtccgattgagtctcgtaatatatcgacacgctcgaaattgaatgttgaagctctaagcctattcaaacaacaataacgttttactcggatgtccgattgagtgacgtaatatatcgggacgctcgaaattgaatgttgaacctctgagccaactcaaacgacaataactgtntactcggatgtctgattgagtcccgtaatatatcgagacgc

SEQ ID NO: 160937 - DNA, 368 bp, Glycine max
agcttagccctaataacggtgcttatactaattgcagcttcaagatcaagcaacccttgtataactggacagcacacgttctcaactgggttccctattcccacatgcaccaatcctccaagcacattcaagcaaagccccaattttagggcatcaactgggcatgtcctttgtggaggagaaccaccaccaccgtgcggcggcgggtatggcggtgagactggtggagggtatatcaccaccggtggcggtaccaccggagggttgattatgattggcggtagcggaggcgacactttcggccggccttctccgtgatggagcggtcctttggggtaacgtggcgtattgcatcgcccacatgcata

SEQ ID NO: 160938 - DNA, 397 bp, Glycine max
  unsure (1)..(397): unsure at all n locations
tggactaanatgggtaaaagaatacattaactaatttgttactccaatttgtggagtttaagcattacacttgtaatttgtggcggtaaaaagtcatcaatggttgttaagtttgaacaaattttgaatatttttttggggcgttaaatcactataaattatacttagatccctataaatcgtgacgttagaaacgaagtcaactntgttagtactcagggactaaattcacctattttctttattcttgaatataaacaacaaaactttattattgtttcgtcttaaatataaacaaatctcaattatcgaaactgtatttaatgagagtattctcanaatatccttcatttaataagaccaaaaaatatttattgctccatatcaagttccaatg

SEQ ID NO: 160939 - DNA, 387 bp, Glycine max
  unsure (1)..(387): unsure at all n locations
agcttgtgcaaatcanatcactcctacattttatctctagcatgcattgtatgttggtctcctcctttgtcacgggaagccggaaagtccatatcaccttcttaattgtacacatggggcactgcgcccccaaatgcgcaagtaagaagagataatnttccgggctctcgcgtccgtaaaatgcattcatatcatgcatcgcataagcatctcttcataacatcataatggacatatcctgcatttgtccgttatcatattccagcctcacatcttgcatgagtcatggcatcatcatgcatatgccgtcaacatacttattgatctgcaaaattgcataccattcgtgttcatggtcgctcatccttgtctnttcctctacaaaac

SEQ ID NO: 160940 - DNA, 394 bp, Glycine max
  unsure (1)..(394): unsure at all n locations
tcggaagaaagtgatgaggtacaagccctattgcttagcttgaaagagcctgngtagtcgaagagaagttcaagtccatagccatcaaagtctgaaaagagtatgatgaactaagggatgtcaatatggccaccgatgaagccttggaatgagaaaccaagaaggcccgaaaggaagaacacgaccaaagcaaagttttgaggggctttatagggcagcaatagtgagctcaagctccgaagaggtgaaaggaatcatcacgggtcaaaggcatgatcttgaaggacgagctaaaggtttgccttatgtcgaacagaaatttgttccaacagttaagcgagactgaagggaatatgtgggccatcatctataagtgcaaagagaagctaaatct

SEQ ID NO: 160941 - DNA, 455 bp, Glycine max
  unsure (1)..(455): unsure at all n locations
agcttatacttgagaatcttcatgtctctaatatgatagatgcttcaccgaaacattgagagaaaaaacacagttgaaatttcacataaataaaaagttagaactaataaaaaaaacagtactgtattatttataagcaccatctccattgaaaagagaattttattcttattgaaattagtaatatattaagacgttgaatataaagattagaaaatgagtcaaaatgtatcaaaactcaaacaaaaaagggacaattggataaaccaatatagaagaggaaggaaaaggtgagtttgtttaaactttataaagtaattntaaaataagggaatgttaaaaaaaagttntttaaataagcagataagaattgctctcttgaaaanatagacaaagcaattttaagagtaatttagacaaacacatcagaaaaaatatgaaacttattattttat

SEQ ID NO: 160942 - DNA, 444 bp, Glycine max
  unsure (1)..(444): unsure at all n locations
tcctctaatcaacctacttattggactctntacaattcgtgtgttttggcttttagccaaagatagnttgtttgtgtagagcagtagttatcaagaatatgccaagtaagattgaacatattataatataataaaaaatacgcatgatatttatttaaaatagagaatatataatactttttaatttctataaaaaaatgtaaatgacaattatattttaaatcaattgaagtattagattacaaagataccgaaacatatctttagatggaaaatgcgagtcatttgaatgcattttaattgcaaatatggtagtaaattgcttcaagaaaataattctctcttccattntaagggaaaaaacatttgattaagaaaaaaagactgtaatcttgaaataatttaatgtacttttactgtgaaatattgtaatagagcatagag

SEQ ID NO: 160943 - DNA, 463 bp, Glycine max
  unsure (1)..(463): unsure at all n locations
agcttagagaagagaaggaccaatcaaagacttttcttgtgccactagangtggagaggatgaagggatcaacgccaaggatgtacgccatggtgaggaaagtcgcaaagctagagttgcaacatcgtcaaacgggcttgaaagccgtgacaacgggcctcanaatcgcacctcatacctccaaattgcatgacaaaatcacaatttcttctccccatttttggtttctctcctctctttntgttttctcccctcacaaaacccaaaactgccctatgccaccatgttctttctctgcatcacagacctacactctgcatgacagattngccttcttttgcgtcacagaataacctcccctcccctactggtgtcgcagagaaacccaacctctctcctctagcatcgcaaccaaacccttggtcgcccttaacatgttgtaaagaagaaaaaaaagcttaca

SEQ ID NO: 160944 - DNA, 432 bp, Glycine max
  unsure (1)..(432): unsure at all n locations
ngccgcccagcttgcccaggcgagctcagctcgcccaggcgtgcattgttgcttcctccagaagcaacagccttctggaggaatcttctggagggcccaagtgggcttggttgctatttgcacccccctgtttactaaatgcaccccctttctatttttttgtaattctttttccgtaacgttatgaaactttacgaatttcgtaacgatacttattttccttccgcaaggttacgaatccttacggattatgtatttaatctttnttagctttcgaagaagttacggaaactcacggattgcgcaaaaacacctcttttcgatttccgccacattacggaatttcacgaatcacgcaagcctgcttcctttcgatttctaagacgtctcgggacttcatttattgcatgtcatcaagtaataatccccgga

SEQ ID NO: 160945 - DNA, 440 bp, Glycine max
  unsure (1)..(440): unsure at all n locations
cntacatggttttattntgagaagcctacattcagattttgttcatctacgtgatcaagtccttgttggtgatcaagtttcgtcaatggactctctagttactagacttcttcgtgtgcccatgtgttgaaagatgaaaacttagttgaagtcatggaaacatcagccatggttgcacctcgtggaagaggaggaagtcgtaacaacagaggaggccacggtggaaggagttgacgtcctcaatgcacctagtgcaagaggatgggtcatactcaagaaaattgttactccttacatggctttcctgacaaggtagcacatgtatctaaatcagaaaaatgagagactaagttttcagatgaggagtaccaagaatatttgaagcttgaatctgaaaattccagcaaccaagctcaatccttctcggtaccatgtgtttc

SEQ ID NO: 160946 - DNA, 461 bp, Glycine max
  unsure (1)..(461): unsure at all n locations
agcttcaaaccttgngttgtacaagcttgngaatatgtttttcggtacaagccaaatctaacagataattgtaactctgttgaaatttagtgaaaacttaatgagttgtaaatatgtgaacatagttcagatggtagagataaaataacataaaatctttgtgtttatatcattttttcttcatctacttaactgacgtttgatttgtgattttctttttatacatcaaagccttgtttttgttggaaaaaaaaaactttttgtttgatcatgtttgtgtagagtctattttctaaaaacatatcattaaacgcaaactcattgganaaatcttgcaaaaaaattataaatcataatttagtttctttcttttgattttttcctttaaactctagccgctttgctaaattataatctanaaacacttgaattgaacttgacgttccttttggcactgtatg

SEQ ID NO: 160947 - DNA, 439 bp, Glycine max
  unsure (1)..(439): unsure at all n locations
ntgagtggcattgtatttccaatagttgccatgcatctcctttcattggtagaattggatggtcatacataccatcaagttcatataccctgatgctcatcataccaggccatccagtatctccatctcgagtttctgtatctggattaatatcaagaatggatgtatttgaagtctgcaatgctgtacatccccgcagcacagccaattcaaccatattcttccttttattataggaaaaccccatccttagcaacagcaagtaactcatcagaatacatgagcagaaagaattccaaaaatgaaataaatagtaatgagtaaatccttattttataccttanaacaggacatccacaagaaccaacccaccgaggaaagaaatctttaagaaatgggcgttcaagattcccaaccttggtagcaaaatgtcgaaact

SEQ ID NO: 160948 - DNA, 456 bp, Glycine max
agctacaagtatgtcttttgttggtgcttgtatattgacttttgatgtagataattagcatttacctgaattgcttggacaatttctgttacattgttaacattctttttctggctgttaagataatgacattcatgctatgaccctattggagaagatctcataccatttacatagtttcctcgtgcccctaaattttatactaacttattacttggctgtgagcctgtgacatgggatacatttcctgtttgtttgctttctgacagttggctataaatatctaactatgcttgatttagaggttaatatgacatacatgtttatttcatttgtatatttcctatttgcaaaatatccgcaaactatatcagatatcgtgcctttagtactatgcagtttgttatccatttctattaacccttgcctcattcttgctgtctgtgatatcctaca

SEQ ID NO: 160949 - DNA, 432 bp, Glycine max
  unsure (1)..(432): unsure at all n locations
tctatggctcttattcatctntacttgggctatctcagaccttntattttgttgtctaagattntgcatacacctcattcaaagtgaagtgtgtagcctctctccatcatttggccaatgcttagaagattttcttttacgctgggaactagtaagacatcatggatgagtcgcgtacctttatctgtctccaccatgacaatgcctttgccttttgattcaaccacacttccatttcccagtcgaactttgactttgacatttcccagtcgaactttgactttgacacttccactatccaagtaccagcttcctctcttttcttttattgagtcttgagtggcgtagaacgtacattattttttatcatgctcctctgcgatattagcttgatgtctanttttgttgcgacaatttttctctacatgcccg

SEQ ID NO: 160950 - DNA, 467 bp, Glycine max
  unsure (1)..(467): unsure at all n locations
agcttaataaagtgctgaatgatcgcatttttgtgtgtgcgcgtgcaantgcattgaatgagatgatgtgcaaagttgggaatcctacattctgttgtcttgattgaaatacacataaccaaaacacttgtgtgcttgagagaaacaatatacttgtgagaagtgaagcatgattgatgattgtcatacttgctaacctactttatctccaagtgagttctcgcttgcttctatcatgaaaactatgaaaaatgtgaacttgagaattggaaattgaagttgcttgaaaggtatgcaattgtctcagttattgtggttggttacattctgaacattgtcattgactcgacttattgaacgttagcttacttttgcttgacgacaagcatagcttttaatttgggggagtttgatatttttatgtatacataaatatgtataaatcactcacaatattgatttttcct

SEQ ID NO: 160951 - DNA, 407 bp, Glycine max
  unsure (1)..(407): unsure at all n locations
agctatcccagagaancgcttgatgcacgcacatacttaatttttttgcacgctcgangaaagctccttggccatgtaagaactgtcatccaaacattccctcagctgagatcaactctttgatcagtatatctgatgatgcagatgtggggtgatgcttaaggtaaattactggggtcatgccatcaacatcacatatatccaactttattgatgaagcagtgtgaatgttgccaatgatggccatgtgaagagttattcgcccatcaatgttcttgacactgatcatgttgcgcacatgaaagttcttcccactcacacatgtctttcaaatgttcaccccgtctgcccaactctttgactgcataagaattaaaaccagatacagccttgtggaggaaagtttc

SEQ ID NO: 160952 - DNA, 443 bp, Glycine max
  unsure (1)..(443): unsure at all n locations
caagcttttcctcatctaccacgttgcttttcttctccctttctcctccaccattgttgcccattaaagctccaaactttgctcatcatttctactccaaattgcaaagggaagccattttcggagtcgtgaagcgcacctctacgttgtgggacttcgaatttaaggtttgggtggacttcttctcacatgaatttcgtgggtattgggtttttgggagatatgatgggtagttctactaggtttatgccttatggtagttatttgtgaaagaatttgttaaaagcatgctaaacttgacatgtttgatgtgagtaaagctacccattctgttntaagcgtttatgatgatgctttgtgatgtttgtgtgctgaaattgttggtacaaaactggtagagttgatggggagagtaacctacggtaaatgtgaaatggagtgat

SEQ ID NO: 160953 - DNA, 462 bp, Glycine max
  unsure (1)..(462): unsure at all n locations
agcttatntatatgctcgtgaagccatatcttaccgccagtggttagttgctgctaaccctaactaactaaccaacctctaactacccttcccgcctaaagatcttatgatcagcttttacaaagaccaactcatcctaactggtaaacatcccagtgcttgggtaactgtttcactctcctcggacgtccccgttgcccggcttcattttctttgtttatatcagatactcagtggaatccctatgccgctatcattaataagatcaaggctttcatgaatggtgcctttctttcaatcatactctgagagagagggtaaccaatgtgcgaatcggctagctaagtatggcccttcctcgagtctgtccttgagtagatgggagaattgtccatcccagttaaggttatagtttctgcatggcagaaaagcaaggagtttaatttgctcgcctgtagtctt

SEQ ID NO: 160954 - DNA, 431 bp, Glycine max
  unsure (1)..(431): unsure at all n locations
tgtcaaagccttgtcaaaccttagcatgcgtagcatcttgtgtaccttatgattntntagatctacgtagatgacaaaatcttttgagcaacttcagaaaggacgtgcaagtatatgagacaatgaagtatgatgggtgagctaaagttcttcctaggacttcaaatcattcagaaagatgatggaattttcatccatcaagagaaatataaaaaggaccttctaataagaaggggttggtatacggaccaattaggcctatttaagcctcagcctatgaagcccccattttagatggaccggataagtctggtccacaaaataaatggactctntttaagttctatatttggcccacaaaagttcacaaacaaaaaaatcgatcttcagacctaaatattaatttgaaaaaaaatatatctttctataat

SEQ ID NO: 160955 - DNA, 476 bp, Glycine max
  unsure (1)..(476): unsure at all n locations
agcnttggagacgaagaagtaaaacatgacactatatggctggtttccaagtagtaaaggccttgtgattcatgttctatgccaatcagccagcttgtaccacagtcctgtataacaaaggaatcaacgtcaaatgttactgagcaatctaaggaacgagtcaactggcataaagaaattatgctataaggacaattaggaatatataaaacaaaatttacattcaaagagggagaaaaaggaacttgaccaattccttgagatgcgtctntggacccattggctaatgtaataaggtgaggagatagaggaaaacaaagaattataactagaaatgtgatacgaagcacttgaatcaactatccatggaccttgaccttccacanattgtgaaatgcangctgtcgtaacacttggtactgaagatgatcgagcttggctgctagaaattcagcacaggcacttctgatattctt

SEQ ID NO: 160956 - DNA, 438 bp, Glycine max
  unsure (1)..(438): unsure at all n locations
nttcctctnttcttctcgagcaatagcctctgtttttctttatctctatagctactgcacctaatgtgcaaatctgtgcgtggtgattttctagttcaagcttgatttgtgacatggtatcagagctcttcaaagagctctgctgcgcaatcaagagaagtttccgaagcaatttatcctttcttcacctctgttttgagtttcatctggctttgatattcgattatgacaatgagtgaaagagatacacacatcccagccatagacagcttcctttacttgcatccaagcgagaatcccgtggttntgcttgtatctccagttcttgattccacaaattatcactcatggagcagatcaatgatgactgctttgagtgccacaaataaacttgagtttgttgatggaggaacagctgagccattgaaaactgatcgg

SEQ ID NO: 160957 - DNA, 421 bp, Glycine max
  unsure (1)..(421): unsure at all n locations
agcttcttcactgccacttgtctgccatctgtatactctttcttgtacactgttccaaaccctccttttcctataactctgtcctctgagaagctgctagttgctttcagaatgtcggcatgtgtgaaaactgtcttgttcagacggataaccttaactgtgtcagacatccatgatgaggatccggagctgctggaatcatgccattgttttgtatccctcaagaggtatcttggttcctctgaagggcttttcaccgatacacagactatgatcgtaagaagcccgaatactgcaaaaaccagtgttataactatacacaccanaaacacagacagtcttgtggactctntatgctctttgggagaggtggtgttngtatgattggtaacgttatcgataaactcgggaaggatcaaaa

SEQ ID NO: 160958 - DNA, 457 bp, Glycine max
  unsure (1)..(457): unsure at all n locations
ctattacgcgacctatgaaactcagctaaggccncagctcatatcttcacagtgccttacatatggaacaagttcacctgtgtcagttcctctcttggccttgcagtcatagaagggaggagcatggaaacacggctccattgacatggcacgtcgacagggaggatctggggctgttcgattctcaggtttgtacagaatccacggttttaaacctccaagcccctgagccacatacccaaaagtagaccatgagctagtaaccaacacatcagttaagcttaagagatacatttctgcccaagctttttggttgtgcatctgcttctgtgtttgttgatatccttcgtggctcggctggtaaacgccaaccacttctcccgtcaccgtaggatattcccaatacatgtctctcaccttttcanaataaccacgagttaaggatgtcatcaatacc

SEQ ID NO: 160959 - DNA, 471 bp, Glycine max
  unsure (1)..(471): unsure at all n locations
agctagcttgaggagcttctatggatgctgtatctttgagcttcaatgaggtccttcaatggtgattcttcaccatggagatgcagcggaagacaaaggagaagaggtgagaggaggcgccatccattaaggaataagccatggaaaaaagagcttcaccaccaagatgggccttggataagaagcttggaaggatgtttcaatggaggaaaagaaagacggagagaaagagagaggggggagcacgaaattgaaggaagaaaaagggagagaagttgaactttgagttgtgtctcacaagactctcattcatcanagttaccacaagttctacacatgcttctatntatagactaagtagcttccttgagaagctctcttgagaannacttcttgagaagcttctttgagaaaacttccttgagaagctagagcttagctacacacacccctctcataactaagctcacc

SEQ ID NO: 160960 - DNA, 432 bp, Glycine max
  unsure (1)..(432): unsure at all n locations
ngcctgtccgatgcagcagtaatgatggcccgagttatgttggggaacggttacgaacccggaatgggtttaggcaaagacaacggcggcattgttagacaagtggcctcagatatcttaagaagggggggttgaattaagatattccaaactgtttcccctaattaaaaatctatttcactttttactcaagttatgaattcccttaatgacaatcttcttaaatattaattcaaatgaagcaacttgaatatgaatataaagcaataataaataaaggagattaagggaagagaaaatgcaaactcagttttatactggttcggccacacccttgtgcctacgtccagtccccaagcaacccgcttgagagttccactatcttgtaaattccttttacaagttctaaacacacaaggacaatccttcctt

SEQ ID NO: 160961 - DNA, 450 bp, Glycine max
  unsure (1)..(450): unsure at all n locations
agctntaagagaaaccattaaaactaaagtagttcctaaacaaaaatcaattgagggagcctcgccaagtgtccccatcgaaattgaaaaacctttattcaaacctttcaaggttagtgagaaggctaaacggaaaattagggaacttagaaaaactaaatccttaactgaaggcgtaggtgacaatcatagtgaattactaaacaagattggtagtttacttaaggtcattccagatactccccaagcctcggaaaatacttctaaaatactaacaagaagtacctccaaattaattaatgttattaatgaagatagtgaccaaaactcagataacacaactgagataggatcagtatcaaanaagagtataaatccaattaattccaaaaactggaaaacaccctcncaaatatattatcaacgtccaactgcccctgaccttctact

SEQ ID NO: 160962 - DNA, 447 bp, Glycine max
  unsure (1)..(447): unsure at all n locations
actaagcttgttgacatgcggaganttatgtcatcttgcgctctcacattatctgttatattgacgtttgagtcacgctgactggcggagatacccgagtggttatccgtataaactttcttttgctatctctaagactcaaagcatgatagcaagctgagtgggtaaacgcgcagatacatattctgcaccctttatcattcagaaacaaacaagatgagtgggtaaacacgcagatacatattctgctccctttatcattcaggaacaacaagctgagtgggtaaacgcgtagaaatagattttgcgccctttatcattcagatttcgcaagttgggtgataaacacgcagaaacaaattctgcgccctttgtaattcagcacaccttttcgccacccaggctcgatcgtgtccaacaaaatgcagagacaaattatggtcattc

SEQ ID NO: 160963 - DNA, 478 bp, Glycine max
  unsure (1)..(478): unsure at all n locations
tctgagtcacctgcggcatgcaagctnttaaatatagaaaaacggcctttctttattaacgagaaatgcaaccaaaaaacaagagcagatttattttacaaaaatcatttcaaattataaagttgatccttcaagaaaaagcaagaagaaaccaacctgtcaatcatgagcaagtgaacaccaactccatgaacttctttctccttctctaagcgacaatgcaatgtctgttgcagaacaaaaagaataagatacattaacaggagtaaaaataaacattgatactccaccacatgcactattatattagagaagcactacaatgtttcttggtgagaaattactntgaggaattatacatttatactgaaggattatgtcacaatacgtattggcatcaagaaatcattagtttaaagatcaaggtgtcttagtagtgtcaatattctcggccacttatgattcattacagcactca

SEQ ID NO: 160964 - DNA, 441 bp, Glycine max
  unsure (1)..(441): unsure at all n locations
ctttataaggattaaatcggatatatcaatgtgagaccaaacatgccctctcaaactcagcacaatgaaggtgttccaaagaggccgcaattaaagagacgaaattggggggaagggagtatacanatgattgcttatctatcaatcaacaatcaaatataatcctaatcaacagcaatctatcaactattaaagtgggacggggtcaccacaactaatgcagctttccaacacagcttaacatcaaactctntgaaaataaagatattttgtaccaaacaaataacattaactagagcatttgatgaacaattacagaaaagtgggggaagggagtatacatatgaatgtgtatctatcaatcaaccctcaattataatcctaatccacaacaatctatcaactagaatcaatgcctcaatcacctctaacattcaacac

SEQ ID NO: 160965 - DNA, 395 bp, Glycine max
agcttgtgcgaatctttcccttttgatcgagtgatctccagggtttatatataattcattagccaaggcaaagatgtttgggtttgtctttatagggtacccaaattgttgtccagcgagaagcgggttgtagctaattccgccacgcatacccaaaataggtacgttgggatattcaccacaacttacaataatctttccacatcactagctgcttggtaccaaacaatgtcagatgggtcaagagtcatgattcagcgaggccaagatagcttatcatcattggtcttgaaggctccggattgacgtaagtggaagtgaaaccactgatagagtgaaggtgcacatcaagaaatggttccactgccagcctgcgtaccgacatggatagaatg

SEQ ID NO: 160966 - DNA, 480 bp, Glycine max
agcttgcttgtgggacttctatggaggctgtatcttttagcttcaatgaggtcctttaatggtgattttccaccatggagatgcagcggaagacaaaggagaagaggtgagaggaggcgccatccactatggaataagccatggaagaaggagtttcaccaccaagataagccttggataagaagcttggagaggatgcttcaatggaggaaaagatagagggagagaaagagagaggggggagcacgaaattgaaggaagaaaaagggagagaagttgaactttgagttgtgtctcacaagactctcattcatcaaagttacaacaagtgttacacatgcttctatttatagactgcgtagctctcttgagaagctttcttgagaaaacttccttgagaagcttctttgagaaaacttccttgagaagctagagcttagctacataaacccttctaataactaagctcacctccttgag

SEQ ID NO: 160967 - DNA, 442 bp, Glycine max
  unsure (1)..(442): unsure at all n locations
gggttgaataatgatgatctgttgngtgccaaagtcaatgctatatttttaatccctagtgaattccgggctagctcagattagaattagagtccagacgaagatgtttgctctgaggaaactgaatcggctactattggggataaagaggtcagcaaaagaattacattcaacctacctatagtagaaatgaccaaacatcttaagcctttgtatgtcaaagctcaaataaatggcaaaacattggctagaatttttgtggatgagggtgttattcttaacatcatgcctctaaccactttaaagaaacttggtaaaaggtagggagatcttattcccacaaatatgaagatggctaatttcactagaggagtcattatagcattaggagttntggtagctgaaatcacagttggaccaaaaactatgtattcagtatttt

SEQ ID NO: 160968 - DNA, 476 bp, Glycine max
  unsure (1)..(476): unsure at all n locations
agctngtcaaacgcaaagtcagcccttggtgagcctcttttttgctatgtttcatctctataggcacttaaggtatgcatgatttacccattgacaatattttatattcctaatttttatcggagcagaaatacaagtctacaggaacatcaaaaacctaaagtccgcccttggtacaaaaagccaaggtctacctttgttattgaaacccaaagtccaaccttggtacaaaatcccaaggtccaccctgngtacggactcctacaaaacccatggtttccccttggttagctcacttcttaagaaccacgatgaccgcagtcaaaggtccaggttccacatgatgaactgccactagactagtcgacaagacctttaatcatgtgggaagtcacattaactcctcacaagcatcaaaggagaagctctacaaagcanaaagaagcatcatcacatgagtganaagacctttaatc

SEQ ID NO: 160969 - DNA, 442 bp, Glycine max
tcggaagaaagtgatgaggtacaagccctaaaggcagagcttgaattagcctatgtagtcgaagagaagttcaagtccatagccatcaaagtctgaaaagagtatgatgaactaagggacgtcaatatggccaccgctgaagccttggaacgagaaaccaagaaggcccgaaaggaagaacacatgccagcaaaagggcagcaatagtaagctcaagctccgaagaggtgaaaggaatcatcacgggtcaaaggcatgatcttgaaggacgagctaaaggcttaccttatgtcgaaaagaaatttgtcccaacagttaagcgagactgaagggaatatgtgggccgtcatcgatgagtgcaaagagaagctaaatctagcggcgactcacgagcaaaggctataggatgagtacgccaagatatcagcagaaagggaagcaa

SEQ ID NO: 160970 - DNA, 409 bp, Glycine max
  unsure (1)..(409): unsure at all n locations
agctntgattaaagctgacctcatcatattattctagccttctgccacaatattaaaaagtaaaggggctaaggggtccccttgcctcaaacctctagtgggaacaaattcctttgtggggttgtcatttattaagattgatatagtggctgattgaaaggtggtccgtggttctgcagggcaaaacagttggtgttaatgtagaagatgatgattcatacatggacacctatgttagtcctttgaccgctcaaatcatcgtaacgttgtcggagaagaagaagctgacgacgttcatgctaatcgaaatgatcatgatgaancgagaatgattaacatcgtctaatggtaatttctgcagagacagacgtcaccaaagctagtaagtgacagctacattcttctctga

SEQ ID NO: 160971 - DNA, 437 bp, Glycine max
  unsure (1)..(437): unsure at all n locations
ngcatgatttacatctccctctttctcaagcacattcttcttgatatcaaaatcttcatgatttacattctccccctttttgataatgacaaccacctgtaggttaggagcaacaacaaagaaaatatctatttgcatatagtttactcccccttggttttacaatgattgcttatatgagacaattgaagatttcatatttttcatatataaaaagttgtctcataaagcaatagataatttttcttactattttatcttttatctttctctccccctttgtcaacatcaaaaacaaatcatgaatagaaatgagaaagatgttaccacttgttgcaatgtatgagaatcaagtgataccaaaaggcattaaaacaatcattcaatattaatcaagcaaaaacatgtacaataacacatcaatcaaacacaatcaa

SEQ ID NO: 160972 - DNA, 153 bp, Glycine max
  unsure (1)..(153): unsure at all n locations
agcttgttcanagtgatcgaggccgtacccttttcatataacattaaaatgtagtaactaggaagtgatcctaggtcgtttcccaacgagcagtgacaagccaaatgttcataatatacttgcagtaacagtaacagtaacgatggggggggg

SEQ ID NO: 160973 - DNA, 435 bp, Glycine max
  unsure (1)..(435): unsure at all n locations
tcaggctgctcaattgctccaggttgctgcatggaatggcaaaggtctgtatggtggtcagcagaggagcacaaaccacaaagccttgcgacaggtacagatttctgattcaaggccagctgggttaccaagttgaccaacgcatccagtttgccttcaagcttcttagtttcagatgatgcagatgggtttgtagctacctcatgcactcctctaatgactatggcatcatttctggcactaaactgctgggagttggaggccatcttctcaattaaatttctggcttcaacaggagtcatgtctccaagggctccaccactggcagcatctatcatacttctctccatattactgagtccttcataaaaatattggagaagaagctgttctgaaatctgatggtggnggcaactggcacatagtttcttaaat

SEQ ID NO: 160974 - DNA, 470 bp, Glycine max
  unsure (1)..(470): unsure at all n locations
agctntatggattacacatgtacgatgtatctttcttaagtaattctatggttctaaatcttgtaccaagagccaagaatgttgtttccaaatattatgcatactactggtaaagtattaaaagtgacaatagccatgaaagaaaaatctaactctacaagagacttttccgataaccaaatagaatttacatctaaaaagctaacactacttaccctttttacctatctcaagtaatactaaaaatccaggtataagactcgtcttataggtgtatggnggagattgtgtaagaaaggtatgtgctaaaccacacattcttcaaaacaagtagtaaatgtataattagttcacaaacatgaaagatatatttacaaaacagtataaaacacaagacgtgaatagaatcacaagaaatacaataaaagctaatacacattaaatgagatanataaactgatatgtattaa

SEQ ID NO: 160975 - DNA, 413 bp, Glycine max
  unsure (1)..(413): unsure at all n locations
ngttgctctcttattcactgttttcgtctacatttctcttcttcactcatgttggcacacacgaacgcatccgcgaatttggtcagtgtttttttttctattcctagggcttttgcatttctttatttgcttctcgatccccgtgtggtggatttggatgcggttctcttccaagttgatacttcttatagtggattttcttttggatcttgatttgcagttttttttcttgagcttttttatacttttaatttggtaggacattttttcaaaaagattatggtggattcaaagtcaccggcgcaggagaaggttcttgatgtgttgatttcgtacgtgcgagctatcaatgtcaacgcctcaagttgaggatattgttgtntttgttcattgccttaggaatttgattgcat

SEQ ID NO: 160976 - DNA, 451 bp, Glycine max
  unsure (1)..(451): unsure at all n locations
agcctttgaaagaatagacgagagtggtattttatcatgatatgtctttntaagagattcaagatcatcgatatttacctcatcctctcgatctgatttanattcttcacaagttatgtttgccattagacatagattggcttcttcttcatcttcatcaaacaaagcgtcctccagatctttctaagtgctcataagacctttctattctttggccttttacagtttcttcttgtcttgcgatttctccaattctaggcattcagatatgaagtcgctagctttcttgcattcatagtacattatggagctttgttctttatctttctttatcttgagcactttttggaggagatcttccatctagatctgcgttttttacacatcttgagaatctctcataagatanaggcgagatcattntcattagattcttcctcacactcttcat

SEQ ID NO: 160977 - DNA, 439 bp, Glycine max
  unsure (1)..(439): unsure at all n locations
nggctcgtggtgtccggaagaagacgaaagcttggctctctgtgtcacggaggatcaacaggaatggaagaagataagaagcatcagtggtcttccgagaagaggagcgcgtttttaaatntttaacttanagggcaaaatggccattcactaaaattgctgggtgcaccagcaatattgctgggtgcacctagcatatcccctaacaaggtcaacctagggccttgatttgaggggcggtggtccatgactatgagtaacccaaaaattttaataaatacacaaatatatagtagaaaaatctatagaatttttattaatggattataattattgtttaattctatatttattgtattcaaattaatatatgatgtgattaaaaggtatcattatttggaggntagatattattcttctaaaggttctatacataaat

SEQ ID NO: 160978 - DNA, 462 bp, Glycine max
  unsure (1)..(462): unsure at all n locations
agcttctgtcactgtcccatgcagtgtctgtttccttggaaagcgagacatctaagctacttggtacttgcatgttgcatccctttgctgctaccggccatgtcattntgttcatgtgattatgcaagatgaaaatttgaaatcaagttaactattacttgttaacatgcatgcatgttgacagatcggtttggtttggattttgaaggaaaataaactctgaattaattgatttttgttggtttgatttcatttaaatttctgtattttttgtttggttaatttaaaccgaattaactcaatggaaaacagataataattcgatttggatcatcagatttgcagttaatttttttttaaacaaatcagctgttttaaaacaataacatagttntatctcgagagtgatagataacattgtcaacatatatgagtntaattcacttgcactgactaaatgat

SEQ ID NO: 160979 - DNA, 446 bp, Glycine max
gcttctaatcggtaagattgctttcatatcgggtcaatcatcatctttgattcaagtgtcgttgtatgtcgacaacaactacgatggtcaacctatagccgtctttgtaaattgagaagacaacgtcaatgtccacacaatgatatatacaacaattcaacaacgcactttattgtttacccgtcattgtttgggtgcatttcaacgttgtgtgtgtactcaacacccatcgttgttttagtgcatttcaacgtcggagtttacttgacacccgtcgttgtttgggtctatgttaacgtcgatggtttaaatacgtgtcgtaaaaatgggaagaatataacgacgggtggcttattgaccgtcattgaaagatatcttctgtgaacaaaatttgggttgaacctgtaaagcacaaatcataactacgaacaatcaactaacatttc

SEQ ID NO: 160980 - DNA, 419 bp, Glycine max
  unsure (1)..(419): unsure at all n locations
tcaccctagaattgagccagacaatgtaggacactatgacttttaacatccctccttgcctgccagaacaggcaatgcctactangataggtgattcatggagatggactataggctctgatagcatgttagattgcattttaaaactagttgtcattaagtgaagttggataacagtcatataagatgcaccctaggaattttcccttaattaacaaaccgtatgaattggagtaacagatcagttaaattataggctttgacttgttcatcaactatgttctgaagaaatgaatgtcttcaatagttatttagtttctttccacatctattttcggttccttccaattgttgcacactgtgacactgtgttgaggctgaattggatttatctataacaagtttggaagtcttacatt

SEQ ID NO: 160981 - DNA, 471 bp, Glycine max
  unsure (1)..(471): unsure at all n locations
agcttctgaggggacatcttgtcttgctttcttatctgacattcaccacagattctgccttcttctattttcagattgggaatgcctctaacagcacctttgtcaatgatattcttcatgcctcttaagtgcagatgtccaaatctttgatgccatattttgacttcatcttctttggaggatggacatgtggaggagtaactggtttcttgaggtgtccataagtagcagttgtcctttgatctgctgcccttcattagaacttcattcttctcatttgtcaccaagcattctgactntgtgaagtttacattgaatccttcatcacacaactgactgatgctgatcaagtttgcagtcagtcccttcaccaacagtactttgttcagactaggaagtccatcatgggctagctttcccattccagtgatctctcctttagagccatctncaaatgtcacatagctagtg

SEQ ID NO: 160982 - DNA, 432 bp, Glycine max
  unsure (1)..(432): unsure at all n locations
ctcataggtganatcaggtgcaatcatttcccttagagttctctcacggngtggaggttgtgccatgttctcataatgttcaaaatcagaatgttcataacaataatgctcaaaatcaccaataacagaatgctcaggatgctcaaaaggtactaaatgatgtctgactaatctatgaaatgtcctatctatctcaggatcaaagggttgtaagtcatatggattgcctctagtcatacactatattcagcatgcacaactagttgccttcttatgtaagtaatagtgtaggtttgaactacagctaccattaaatgatatccaaatgacttcaaattttgtgggaaaccttataaaatgatgagaagatagcacaaaaaatttcaaacagaaattcaaagtctaactataanagctaaaaatgacaagtta

SEQ ID NO: 160983 - DNA, 482 bp, Glycine max
  unsure (1)..(482): unsure at all n locations
agcttgtgtcacaatccactatgacagtcaaattgtcattcacttagcaaatcaccaaatgtaccatgagaggacaaaggacatagatgtgaaactacacttcatcagagatgtgattgaatctaagaaggtgaaggtggagaaggtttcaacagaagaaaatcccattgacatgttcacaaagtccctatctagtgtcaagttcaagcactgcctagacttgatcaattttgaagatgcctaaagcagatttttttttagaagtgcagccctgaatcactaggtagacacttgctaatttggagtcaaggtggagatttgtggtgtgtgactcanaatcacaaaaggcacaagtgggaaggtgttaagtggtgttgtcataactggtttcagttattataactaaattggttntggcaccaaagtatagcctttgttccttggactagcatttagagtgtatatatgtctgatcatgttat

SEQ ID NO: 160984 - DNA, 442 bp, Glycine max
  unsure (1)..(442): unsure at all n locations
ctggggaggttgccacccaagtgcttcattagcaacgactgactttatactctcatgacgataaanaatgagacatataccatctttatctgtgacatgttcacgcaagtgtgccaaaaaccgtgaccatgctgttaatgtttctccctcaaccacagcaaatgcgagcagaagaacatggccattaacaatgtcccacgatattttccatacaagaatgtaccgttgacttgtatgattgacttgcaataattgaaagcctctttacattgaccgaaagtccaaaatactcgatggaactgatggtattcacgactcaccgtattgtcaactacaaaatcatcgtcacatatttgataatacgatcttagacaatgattntgcatgtgcttcagccatgacaaaagttggccataagaatcatcccaatcaccatattcta

SEQ ID NO: 160985 - DNA, 497 bp, Glycine max
  unsure (1)..(497): unsure at all n locations
ttaagtcacctgcggctgcaagcttatggcgctctgatcgtctctaatgatgtttaaccaaacttggttaatgtcaactataaagtagagatattgtaagttgtaactttctccttgatttgaaacaagaaanttcactcatacagagagagaatggctataacatggcaaattattccaagataaaaaggaaagagaactttcatgaaattggggaagaaataatctcttaaataaaatcaaagtgaacaaacaaaaacttagcaaatacaagaacaccaatatgaatccaagaggatgtcgcattcttaattaactaaaaaatgaaggctatctttaaatnttgaagcactgtataccaaccaatgtaacattacttctaagattgcaatccatagagaaccatctgaactttggtactcggagaactccttaaacaatcaacatcatctctaatgtgtgcacaaaaatcaacatttaatggatcaagttaaatc

SEQ ID NO: 160986 - DNA, 439 bp, Glycine max
  unsure (1)..(439): unsure at all n locations
ntntggaacccaagccacaggtaacacctttgccacactcttttctgttaaatgattaaaacaacctctgtgctaatcttgtctcatcactgcttttcatttagtaatagaagatttaggagtcaaggaaaaaggtagaattgatatagaaaatctgagactagagcttagacaaaacaaggtttggatggcttcttctattcatagtcgacaagaagaaactcagttccttcttctatacctctggattttaaattcatggaattgatggaattcatatttttgtgtgattttaaattaatggaattcatattttatagattgttcatactttggcctccttttgtgtcattntaaattcatggaattcatatattttacaagctntatactgttacctctatgtttcttctgtcctttacagactgttctacatatt

SEQ ID NO: 160987 - DNA, 388 bp, Glycine max
  unsure (1)..(388): unsure at all n locations
cagctagctcacttgtcaagagtgggcgtttttattcttctatatgcatatagactcggagcttctgaagttcttttgaacaaactacttcgctagccaaagccagctagctctagctgcgatcttcattaccggttatggaagacaagaaaataacgacgtggaagacttgtctgctcatgatagcatagcttaagcttgaatcggaaattcttgttcattagtggatgattcatatcttcattgtctctcacgctagtgatttgcttcaaaatgtgtagacgctttttacctcctcaattgtgaactttttattagcacagaagaatagaagacaagatccctctatctacgcagacttntgcgtacttctacgtgctcattcacc

SEQ ID NO: 160988 - DNA, 360 bp, Glycine max
  unsure (1)..(360): unsure at all n locations
cactatccaccactcatactntaagtgacgaatggctcagcacagaagggatacaagtgattctttggcttacatgagctacaacctcgctgactgcaaagttatttgttgccatgagagcaacattactgctatttacttcccaaaactccatctcgactttgctgttgggatctatatgaataaccaagtatgaataccctctcacatttcttgatgactatcagtacgaaattgaagatatcaagtatatgaagagtaagtgcgattactgctctcgtgggatcatatactgcatgagctgcagcaagcatgctatcaaagacctcagacgtcctttcaccaaccacgaccacttgc

SEQ ID NO: 160989 - DNA, 468 bp, Glycine max
  unsure (1)..(468): unsure at all n locations
agcttacaaatgagaaaagcatgtcataactgtttttttctgtagcaggtgtgggaggtgagactctggaagaatgatgcttcaaattcacaaaacagatccttggtttcatcttctagggtaactctactatccaacatgcccgtcccagatcatgcaaaagatgctgccaaaccgctaaagaactttgcaaaactgtaaatattcatgtcatttgctcttaagagaaattcaaatttagcttgaatgtaattatatcacaccaacgatccaaatgcattcggatcaattttctaatgcttcaagacgtacaccacgatagtcattgtggctcttacaaaattgttcaacgcttcanaatgtagaccgtgatagacattgcagctcttacaaaattggtcacatcatccaccacagacaaactcgatacccgccaaccncatattagccaacattgattgagtcaat

SEQ ID NO: 160990 - DNA, 439 bp, Glycine max
  unsure (1)..(439): unsure at all n locations
ctttaactgaatntacaacgttccaattgatttcaaaatggtgtaatctattacaatgatttggtaatcgattactagtatgtttgaaccttgaaattcaaattcaattgtgaagagtcacatcctttcacaaaaatgctttgtgtaatcgattacaatgatttggtaatcaattaccagtgatgggttttgaataaaaatcaaatgatgtaactcttccaatggttttcaagtttttctaaaggttataactcttctaatggttttcttaactagacataaagagtctataaaagtaataccttgatttgcatttgtagagtacttacaagacttacttacaacctttacaaacaatcttttacaacctttgaatctctttgaacatcttcttcttcttcttcctttgtcaaagagtttctggttttccaaaccttgt

SEQ ID NO: 160991 - DNA, 459 bp, Glycine max
  unsure (1)..(459): unsure at all n locations
agctntgcaaacatgtgctcacgtaatcttgtgtttcttgagtatatatgtataagatacatagttaaaacctcacaagaagaaatttgttgtaacatcccatttttcgtgaattaaattaaaaaggtttttcatttaaaataaatagagttttagaaaaaaaaaatgatgaggtttttgtaattaaataaataagaagaaataactttattaaaataatagtttgaaggaaaataaaaatgatatttgatttattcatttgataggaaataaaatagagtatttgtttataaaataataataaaaataataaaaaatagagtaaataatagaataagagtacataactataaataggggcatgctaggtcanttttcagaagtctctgaagtttctcttccttttattnntcgtgccccttctctctttccaaaattctctctttttctcgcacacac

SEQ ID NO: 160992 - DNA, 430 bp, Glycine max
  unsure (1)..(430): unsure at all n locations
ggcganagatcaaataaactcagcctaatgttcatgttaatgactgttacaaacaatattaagacagctcttctaagaccgataatgctaaaaagtttatgggattagtggaagaacactctcaaatagctgataagtctcttgttgggacattaatgagtacattgaccaccatgaagtttgatggttcacgtattatacatgtcattgagatgacaaacattgcagcaagacttaagaccttgggaatgattgtgaatgagaacttccttgttcattttattctaaactcattaacgtttgagtatggcccgttccaaatgagctataataccatgaaagataaatggaatgtgcatgaattgcacaatgtgttagttcaggaagaaacgaggcttaagaatcaaggaagtcactcggttcattatgt

SEQ ID NO: 160993 - DNA, 422 bp, Glycine max
  unsure (1)..(422): unsure at all n locations
agcttcnaggtaagagatgcttgacttaatatttattaattgtgaagatcttaaattaaaaagtgaagccatgtctttagcaactcatgaacttgaagattttgaattnttattacgaatgaatatttggtatgatattntgtttgctgtcaattctgttagcaagattctacaatcaaaagatatgcatatagatgttgctatagatcatttaaaaggtcttatcacttatttaaaacattatagggaaaacgggtttgcattggctttagaatccacagaaaaacagtggaaaactttgcaagataatgtatctaaattttctgttanatcattatctcacactcatcgcgaaagtagaatagaaagtgtcaaagctattaagtttcagcttcaanggtangagatgcttgactgattat

SEQ ID NO: 160994 - DNA, 435 bp, Glycine max
  unsure (1)..(435): unsure at all n locations
tgtcccttacgagaattaattcttagggcttctacatattttntgtgggtgaacttcaaccattagagcttattataattttattaccaattctatcatgatgtatcacttggtagtctagtctagtctaaaacattttagttatttaattcaataatcaatataaatgttatgattgaggtcatcatttacatagcaaattatactaaaatagacacattttacagtcttctttttatctttcaactcttaacttcagacaggtaagcatntttttatgccttccctattcaaacaccctagtgccttatggatacctttcacttttacttgatctccatcttatgaaataagagaggaagtttcacttatgcctaccaatttccacacccaaatgtacatattactacttgccaccagtcagcagtatccaat

SEQ ID NO: 160995 - DNA, 414 bp, Glycine max
  unsure (1)..(414): unsure at all n locations
agctntagtctataagttgttcatgttgtttttatatctctaatatttgtcaagattatgcattcagtttgtgttcttcctaatcttaagcatagtggatgactaactagcttttgaggtaaacatagaacttgtagataattgtcttagctctaaaacaagataaaatgcaacttgataagattagcgtaactacaaatatagtggttacacctcagagagttcataaacacacaatcgaaaatgataaaagtaatgctcaaaacttaaaggatgttataccaatcataatacaaagtaagaagatgctaaaattgatgtgtggcctatagttaacatgcacatgacttgattgaataatgatattgaatacatgtgttgatgctataacttgaatggtgatttatgagtgtt

SEQ ID NO: 160996 - DNA, 436 bp, Glycine max
tgaggaatcttacggaattgctaaagatgtcgctatcactgtcagactacacacgtgagcctgcttagaggtaaatgatgagtttatcatagttggggttagaatgaacatgtgtagggatccttagaaggtcaaattggggtttattttgtgatatttattgtattgtaattcttcatgtatgattataattatgagattgttgtgtttgatggaccaattggtgccttgatgcgaattggttcataaaattgagtgctcttggtattttcgtatttttgacctatgattctgatatgattatgtgaaattgtttgaggggttttactctctatgttgtgagaaacatttttgtataatttgtttgtgttctggataagatttactagattagcgggataaattgttatattggaatcatgacattgtgtgtaag

SEQ ID NO: 160997 - DNA, 445 bp, Glycine max
  unsure (1)..(445): unsure at all n locations
agcttgtgcatccaataccctgatgagtgtatgtctcatatgttcttaagacaggactgattcatttgcttccaaagttccatggccttgcaggtgaagacccgcacaaacatttgaaagaaattcacattgtctgctccaccatgaaaccctcaaatgttcaagaggatcacatatttctgaacgcttttcctcattcattagagggagtggcaaaggactggctgtattaccttgctccaaggtccatcacgagctgggatgacctcaagagagtattcttagaaaatnntttccctgctttcaggaccacagccattaggaaggatatcttatgtattagacaactcattggagagagcctgtatgagtactgcgagagatttaagacactatgtgccatgtgcgcccaccatcagatttcagaacagcttcttcttcaata

SEQ ID NO: 160998 - DNA, 436 bp, Glycine max
  unsure (1)..(436): unsure at all n locations
tgtatggtcgctcagatcttgactagttataaactntctgattaaaatgagtttatcccacgttnttactccaaagatcagtgcgaataaaatcactcccgcattttatctctagcatgcataagcatctcttcatggcatcataatgaacatatcgtttctgcagttgtccgttatcatattccagcatcacattttgcatgagccattgcatcatcatgcatatgcgttcaacatactttntgttctacaaaatgcataccttttgttttcatgttcgctcatgcgtgatccttgcattttcctctacaaaacaaaaacaaaaagggaagcatgaaaattcatgatgcattcttggttgcatatattcggtaccatgagccaaccatgtcgggatcataaacccgtttcacttanaaacaaaatgagtaaacat

SEQ ID NO: 160999 - DNA, 407 bp, Glycine max
  unsure (1)..(407): unsure at all n locations
agcttaatcaatagaaaatcgtcggtgtgattttttcccaggactctactangggcaatctttcttggcacccttaatcatgttcaatttgttggtaagattatgtcttttactccaaaaaaggaaacttggttaccatgtgagagtaatttggataaatgaaaatagttctggttgttatctgcatgagtatttcgatgcttgtttgccacaatgtattataaaaaagtacctaccacatagagagtggctatgcaatttggaatgcatcacaaagtttcagattgtgtgattgcattctctgacaccaaagctattgcatataaactcatgtcatctccgtgtcttgaagaatgcaccccatatatgctcttcctctgcaggtactggagtataaacatcctgtg

SEQ ID NO: 161000 - DNA, 433 bp, Glycine max
  unsure (1)..(433): unsure at all n locations
taatcnncttgaaattgagggtaggagatttgccctatattcagctacggactactttccttagcacccttatgttcaatatgttggataaataaaaatagttattttttttttgctatatgcatgagagtatcaatgctagctgtcacacacatgtcttacacaaaagtacctatcacataaagagtggctatgctatttacaatgcatcaagaagttctagattgtgtggctacattctttggaaccgaatgcattgcatggaaaaattactacatacctatatctaacgggaatatctattttcctgcttggcttttttgagggagatgtcaccacacgttatgcatgatggtggaagcagaccatattgtatcatcatcatgaatatgcaaagaatattactcggcgaaagagcagtctatgcaatgat

SEQ ID NO: 161001 - DNA, 435 bp, Glycine max
  unsure (1)..(435): unsure at all n locations
cccgagatcctctgagtcacctgcngctgcagcttagacaggaaagaacccttttattatctacaatagggaggtgagaaagcataacaagactttcctaatttgtgttaaagatacagatcttgatgacaataatgcttctaaaacattaatgaagttaacacatgggcctaaaagacatgttataacttggcaaggatacgatatcaacaagtatttgttcttcacaaaatctcaagacgacaatagttaaatgcagaacagtggggttagtctagcttgcatgccttactttgaagtcattgaagaaatatgggagcataattatgtaaaattcattgtctgtgttttcaagtgtgagtgggttgatagtaatattagtgtgcaaacgtgatgttttagatttactgtggatgatctgaagaagctcgcata

SEQ ID NO: 161002 - DNA, 420 bp, Glycine max
  unsure (1)..(420): unsure at all n locations
cgtacaatggctacacatgatacatgtcaagtgttgttttgtctcaaggataaaacggatgccccacattatgttcatgacacaaatgcaaaaatgatgatgtggaaattttatgcacaactggtcatgcatgcacctatgtggacgctcaagtgccaaatctttatggtcatgtgatgctagggctcatgattcattttctctattgtaaatcaacccaatgtttccaaaatatgttcttttatcaatttgtgcatccatccgagtccattttgggcgtctgggaaaatcttcacagcattcacccttcaagtgtatacacatttnttcataaactagttatgatcagtgaattgtttcaaagattagttggaagtcatctcttttcagaagcatgttggtttttcagcttgacaactt

SEQ ID NO: 161003 - DNA, 464 bp, Glycine max
  unsure (1)..(464): unsure at all n locations
agcttatagaataggacgaatgtctttatgatattngacaacaggcttacacctgtggtttagaacctgctcttgcgcttagcacaataatacaacgcttaacgagcagtaatggaccccagttaatgacctgcttatgttgcacaccagatgcgactcaactcttgcgcttagtggcaaacgcttctctgagtatacacacacatcttatccttcttccagaatcttccgcgcgcttagatgaagaatgaagcgctcaacaggaggatggctatgcctccaggaggacaattggcaatggttaatatctacacttgagaactagcctagtcatccacaaattgagagaatattattattcctctcaccgaatgtgagtactattattattactcatctcaacaaatttaattacaacaatactatattccatgtcttggaagagttgatctattacactcttt

SEQ ID NO: 161004 - DNA, 313 bp, Glycine max
ctacacccgatgcaagactgggtgaccaatgatcttctgcagatctgagtcctactatccagctatctggaatcattgagctgcctgacacatatgctgcaaacactcttgatctacgtccaccgcagcaatatccccatcgacctatgacgcctgacctttctcgcaacacactctatctaagtgggaggaataatgcacaccggatatggtcggactctgcacaacaataccggtaggtccatccatatagaatgtagctgtctccctcagcctatgtcctcctcaatgccccacgcatcatctaaaccac

SEQ ID NO: 161005 - DNA, 485 bp, Glycine max
  unsure (1)..(485): unsure at all n locations
agcttcatgatgaatcaagattgattcanagaagttttgatgataacaaaggtgatgacaaanagctcanatatcaagaacacttcatgataacaaagatgatgatctcaagaatcaaagaatgaattcaagaatgaatcaagaacacttcaaggttcaagaggaaatttgatttcaagaatccaagaattaagatcaagattcaagacacaagattcaagaatcaagagaagaattaatcaagataagtattaaaaagttttttcaaaaactgagtagcacatgaatttttctcanaaccttttaccaaagagtttttactctctggtaatcgattactagattattgtaatcgattaccagtagcaaaatggttntcanaaaacctttcaactgaatntacaacgttccaattgatttcanaatggtgtaatcaattacaatgtnttggtaatcgattaccagtgtgtttgaacgttgaaatt

SEQ ID NO: 161006 - DNA, 395 bp, Glycine max
  unsure (1)..(395): unsure at all n locations
ngacattgcgggttgatttagccttagtttcactttagttatatttttattcaattaagaaagagaaatcccaaagagaaacgttcgattgattttttttcgctatattttactaaaagggtattctttgattattatattattattctacctcttttctgatttccaacgtggttacggcacgacctaaccgtcagatttcattttaacagaaagtaacggatattacaaatcaaatgatcggtgaacatttatcttattgttttattacgcgagatattacttaaataaattactgaagcacgttaaaaggaggttcggaaagttaaatgaaacgagaataaatgtcacaatacacatggggaccaacacgtgtacatatgaatgaattgaaa

SEQ ID NO: 161007 - DNA, 480 bp, Glycine max
  unsure (1)..(480): unsure at all n locations
agcttgagaaacanaatctgctaggtggtgattaactatataaacttgnaatttgtgatcattgtgtgcttggtaaatcacatagaataagctttggcacgggtattcatgtttcatctaagccttttgagtatgtgcgttcaaatttatggngaccatctagagtgaaaactcatggtggaagctcatactttctcaccatcatagatgatttctcaagaagagtatgactgtatgttttgaaaaataagtcaaaagcttttcaaaaattcagagaatggcatactcttgttggaaatcaacttggtacaaaattaanagtcttaaggactgacaatggcctggagtttggttcagagcagttcaatgagttttgcaggaaaataggcatcanaaggcgtaaaatagtccctcacactccatagcagaatggttnggcagaaagaatgaatacgaccattttggaaagagtgaggtgca

SEQ ID NO: 161008 - DNA, 440 bp, Glycine max
  unsure (1)..(440): unsure at all n locations
ntgatgcaacatttggagaggttaatgaaacaacgagattatcatctttgagaggttggatcaaatggagaatagagatcataatgaagaagaaaggaggagaagagggaatgatggtgttcctagacaaaaccgaattgatggtattaaactcaacattcctccatttaaaggaaagaatgatccggaggcctacttggagtgggagatgaaaatagagcatgtattctcatgcaacaactatgaggaggacaaaaaggtgaagcttgccgccacggaattttccgactatgcccttgtgtggtggaacaagctacaaaaggagagagcaagaaatgaagagccaatggttgatacatggacggagatgaaaaagatcatgaggaagcgatatgtgccggctagttactcaagggacttgaaatncaagctccaaaaac

SEQ ID NO: 161009 - DNA, 454 bp, Glycine max
  unsure (1)..(454): unsure at all n locations
agcttctttgttagacctcgatcggcatctttctttttcttgtcgaccgtcattnttttcgatccatttcggtgaataatatttttttgccgagatgggcaaaatgccagtttcggccgaataaatgggaaaatgccagtttcggccgaaacgaagagtcggttgggctcgcacaaaagaacctagccgacctacattataaatcttttatgcaacaccaaaacaagaaaactttctgtgccgtataaaaaaaacactacatgacagcgagcgttttgaaaaacaaaattgcgcacccgccgctgataaatatcagtcggggctttttcacgagcgatgtcggctattgagtttgtaattcaatccgtgaacgaaatttgatgatgtccttaggaaatgtcgatcggctcatcctggaagttctctttaggctcgacagtatcattctgacgac

SEQ ID NO: 161010 - DNA, 434 bp, Glycine max
  unsure (1)..(434): unsure at all n locations
tcaccggatgacgccgatcgaacatttgctaaccgacgttttctttttctttacggatngaattgaaaactcgttaggcgacatctgtcgcgaagtatcgaccgatattcttcagccgacattgcacaattctttttagaaaagctcgctggtcgataatggtcttattacggcagagtaagttttcttgttttggtgttgcataaaaaagatacaatgtacatcggctaggattttcgtgcgagttcaaccgacattttgttcctgccaggaaaacattagcccacctctgcaaaaaaaatatttgctaaccgtcttcatgcatattgtattcaacgattgaatagaaaactcaatagccgacaacagtcgtgaaatagttccgactgatattattcagccggcattgcgcatttctgttataaaaacgctcc

SEQ ID NO: 161011 - DNA, 466 bp, Glycine max
agctcgtatccatgtaatgaagacccactctcattttcatttaaatgaaggctattcaaaatctttctcatcccatatagatgtatctatcatctcatccacaatgattatagaggaaggcatctcatgcatattcaactctcaacataaggcatacactgttgtcacttcccagaagatgatcatcattttacgcataattacaaaacatcattttaaataactaccacatagatactctaatttcatgcacattaatagctcataaaatcacacctggaattatagcatcatatgaatcaattaataattaattatgaaataaaacacacatgtgtatcataatatatcttaggtgatatataagataactaaacacagaactcaagcacactaattcatgaattttcacatcaatttcaagatttaatatgctaccattgacgaatcatacattgtaataacc

SEQ ID NO: 161012 - DNA, 444 bp, Glycine max
taagcttggagataaaactgtcataaccatggagagacattaatcttaatttattcaacgatgaaacacataatgcaacctccattcaagggcctttcaaagttttgatttgcaacaataggtgaaaaaataagtcgaagaatagccagtgtgatctcaaattgtcttgaacaatcaattaagcagaatcaacaaaccgattaattactgtgtacaagagaaatctgaatttccaaaagtcaggacacatgatcttccaggtgaaccttcaacgcactttacttacttgcatacttgcaacaaaaggctttcttgccctttccatgatgctctcatttcggtcatgcaccgacatttgagacaatgtagaggattagtattagtcacattacatggcatcttaactcgatccttctatcaaaaatgctataatgcatcccaata

SEQ ID NO: 161013 - DNA, 155 bp, Glycine max
  unsure (1)..(155): unsure at all n locations
agcttagtataactatgaagggtanattatctttatacaaaaccaacaaacaaaagaagtaaagttacttatcacgaaatgaacaaacaaagacatgaatgaacctaattatatatttctacgcatagcaagattatcaattctttgccatacac

SEQ ID NO: 161014 - DNA, 232 bp, Glycine max
  unsure (1)..(232): unsure at all n locations
ntaggtgtgtattagagtgctctgagactcgtgtgttctttcttcttggatcgatactcactctatagaaagaaggagaggacttgggctcgcgtactctctctaagcctgcactgttcgactaacatgggtgccagatatagcgcatattactactcctctggcttaacccctattgctgataacacactatacataagctttgaattttgacattcctatatttaagaga

SEQ ID NO: 161015 - DNA, 441 bp, Glycine max
  unsure (1)..(441): unsure at all n locations
agctngttcttgattattcctaagntctgtattatgcttagaacaataaacttggccttctcttaattgtctttgggcttggcgaccacgatcaacaaaatactttcggcacctactatatgttgacttgaccaacgctgctattggaatgctgcgacaatctttcaacaccttattcacacattctgataggttggttgtcatgtgaccatatcgtcgtccagatgtatcgtaagccatgctccatttttcctttgaaatgcgatcaatccatcttgctatggctggactcagttgacgaaattnttctaagttttgatcaaacacatgcttgcaaggagtgtacgctgcatcaaatttgtatcatgagaaggtgacatagacatcaaagtcaaattaaactaatgtataaananaccttacccaattcttgacatctct

SEQ ID NO: 161016 - DNA, 451 bp, Glycine max
  unsure (1)..(451): unsure at all n locations
acacataaaactcagcttactaagtgatttcgtattgagcactatgcttctgtttattcaactntcctaagagtcactacgaggcaaagaagatattatgtcccgttggcatggagtatcgaagaatccatgcatgtcccaatgactgcattctttacagaaatgagtttgcggatctgcacttctgccccacgtgtggagtttcatgttacaagggcaacgatggggaatgcagtgaaggtgcagccaccaccaatcattgtccagcaaaggtgtgttggtatttgccaataatacccaggttcaagtgcttgtttgctagtgcccaggatgccaaaaacttaaggtggcatgtagatgaaagaagaatcgatgggctgattagacatcccacaaattgttcacaatggaagacatttgattgcttgtatccaacatttgcacaggatcc

SEQ ID NO: 161017 - DNA, 423 bp, Glycine max
  unsure (1)..(423): unsure at all n locations
agctntgaaggtgcgtagcccaccatctttctctttatagtatcgataatgtgtctaccatcacgatcatcgtctccctttctatcattgggggtaccacttgggccgccagatccctccaccttttgggcgtgttctttgaatgatccgtccccctttttgcacatgttctgtagttgcatcctatccggaaccatatcaaaattgtactgatactgcctaacaaaggcaaccattaagtccttccaagaatggactcgggaaggttccaagttagtgtactaagtaacagctaccccagtaagactttcttggaaggaatgtatcagcaattcctcatctttggcgtattcccccatcttctgacaatacatctttagatgcgtcttgagacaagtagtctccttgtactcgtcatagtcc

SEQ ID NO: 161018 - DNA, 427 bp, Glycine max
tcttagtctcagctgatgaagatgaattcgtggctacttctttctctcctctaatgacaataacatcatttctggcactaaattgctgggagtttgaagccctcttctcaattaaatttctggcttcagtaggggtcatgtctcccagggctccaccactggcagcatctatcatacttctctccatgttactgagtccttcataaaaatattggagaagaagctgctcagaaatttggtgatgagggcaactagcacatagttttctaaatctctcccagtattcatataggctctcttcactgagttacctaatgcttgaaatatcctttctgatggtcgtggtcctagaagcagggaaattttcttctaagaatactctcttgaggcatcccagctcgtgatggactctggagcaagggaatat

SEQ ID NO: 161019 - DNA, 462 bp, Glycine max
  unsure (1)..(462): unsure at all n locations
agcttcatgatgaatcaagagtgattctttgatgttntgatgataacaaatatgatgacgaaggtgatgacaaaaagctcataggtcaatcaaagaatgagttcaaaatgttcaagatagaatcaagaacacttcaagactcaagaggaaagttgaattcaagaatcaagatttaaggatcaagcttcaagaatcaagatcaagattctagactcaagattcaagaatcaagagaagacttaatcaagataagtatgaaaaagttttttcaaaaactgagtagcacatgaatttttctcacaacctttttaccaaagagttgttactctctggtaatcgattaccagactattgtaatcaattaccagtagcaaaatggatttgaaaaagtttttcaactgaatttacaatgttccaattgatctcaaaaagctgtaatcgattataatgttntggtaatcg

SEQ ID NO: 161020 - DNA, 376 bp, Glycine max
  unsure (1)..(376): unsure at all n locations
tataaaactaagcttgcggagtatcaccctatntactcataggtggtcttatatgatcatttcgaagattctggccaatagaatgaaggcagtattacctactattatatctccgcaacaaatagcctttttacccggaaggaaaatccatgatggtgtggttgttatcaaccagctggcggattgggaaaaacgacaatgtaagaagatgcttatctttaatgctgatttccagaaagcgtatgactcggtcaactggaggtttctggaatacatgttacttcatttggggtttggccaacaatggacaagatggataaaagcttgtgtttgtttatcaagaatctctatattagttaacagaagcctgacgcat

SEQ ID NO: 161021 - DNA, 421 bp, Glycine max
agcttgacttgtatatagacagctattgtgtttctgttaagctgactgtacatacatacattagtcccaccatctcaaatatgttaaaccatattcatatagaagtggggcgtatcaccgagcacttgcggggcgcacgttgggaaatataatgcaagagagaggcggcaatgggtcatggcccattattctagaatgccacgtatgcctatggccgtttaattgcaatgctcgactccagaaagtaagcctagtatcgtaccaaaactgtctcaaagtataatcatatctatacattgcagcacctatagaggaacaaaatgcttttctgggattgaacataactcaccgattgtattcttacttgttggatagagaggaaacaccatggtgatagtatatgcggtctataataacttga

SEQ ID NO: 161022 - DNA, 331 bp, Glycine max
  unsure (1)..(331): unsure at all n locations
agcttgcccttgaggcnnatttntattaaaataattatggacacaangagagaggagggagcacgatattgaaggaagacaaacggagagaagcttaactttgagttgtgtctcacacgactctcattcatcaaagctacaacaagtgtcacacatgcttgtatttatagactaaggagcttccttaagaagctgtcttgataaaacttcctcgacaaacttctttgacataacttccttgggaagctatagcttatctacacacacccctctcataactaagctcacctacttgagaagattcctaaagacgctctagcttaactacaca

SEQ ID NO: 161023 - DNA, 434 bp, Glycine max
tccttgagaagctagagtttagctacacactccatctaatatttaagctcacctccttgagaagcatccttgagaagctagagcttatctacacacacccctctaacagttaagctcaccccatgccaaaatacatgaaaatgcttagctacacacacccctttaatagctaagctcacccccatgcctaaatacatgaaaatacaaaaaagtcccaactacaaagactactcataatgccctgaaatacaaggctaaaatactatactactagaatgaccaaaatacaaggccaaaaagaaggagaacctattctaatatttagaaagaagagtggacccaaccttggcccatgggctcagagatctaccctgaggttcatgagaacctttggtgatgaacttttgcttcctctatctttctattctgtgaat

SEQ ID NO: 161024 - DNA, 124 bp, Glycine max
agcttggaggataaacacgcattagttcatcttatgtgaccagcgttgtcgtggaacgatcttcgatggatatgcgcgctcgcactccgaaggaatcgaaacaagctttgaacgtgtcttacaa

SEQ ID NO: 161025 - DNA, 476 bp, Glycine max
agcttatagaagatgaagaatattatgttctttctcaatatgttgtcaaacttcatgatgaaatttgaactttaaaaactacatttgccaaatttgtcaatggaaaaaataatcttaacaaacaattaaggtacaatagaagttcttcaaacaaatttggaaatggatatgatggaaaatctacgttcatgataagaacaatgttgtctgttatttctgtggtaagattggacatatgacatccaagtgtagatatcaacctagaagggtatcaccaataccattatggataacacaaaagtacccaaaaagatttggatacctaagaaaaaattattcctgttgcatatgcctttgatagtatgaagtatatgcccttcatggtacctggatagcggttgctcatggaacatgatagtacaaaaatgtatattccaatgtctaactcactatcattgcggaacagtcactttaag

SEQ ID NO: 161026 - DNA, 430 bp, Glycine max
  unsure (1)..(430): unsure at all n locations
ctggaacttgacgaactgttgttaaggagctaacatcaccatcatgcattatgatttgtacagaacctatacctacagacttacaaaaggcatcattacccatgaggacgttaccatcatacttcttttcatatgttacaaaccaatgtctatgcgaacacattataagaacaacccgagtccaatacccattgttcaggatgttgtcgtagttgttcaccaacaaccaaaaccaattctttttccaactctttgtaaagtcttgatgccaatgacccgattcattctagtaattgcatatgtctttaggatcatccttgctcatctttccacctttacttttcttcttctatcctttagcacaatcagtcactaataatncaaacatagtggctccatcaccattcttagacgcctttagtcgaagctc

SEQ ID NO: 161027 - DNA, 384 bp, Glycine max
  unsure (1)..(384): unsure at all n locations
agctncaagagagtacctgcattgttaatgtttgcatctactgttncaagcgttgtctctcctagctcacctctcactattaataataataatctactgaaatgtttgattctgtatcttcttctctcagaatggctaatctctggcatgctagattagggcacctaatgatcatgtaaggaaactagttctcactcatcgtaatacttcttcttcaaataaaaattccacagggttttgggcttcttgttgtatgggaaaatctcataaatcaccttctcatatttctacttctgtttattctcctttagagctcattcttacagattggtggggaccttctcatattacctcatattctggttataaatattatgcctcttt

SEQ ID NO: 161028 - DNA, 462 bp, Glycine max
  unsure (1)..(462): unsure at all n locations
ggaagagggtggcctccttgggggcagagaagcgctttttgatgctggatgctggngttgcagagagattctatatgaagagaatgaaattaaattaaatgatagacagatagataggatcacgagagagagagagagaagggtggcgttttgcgacctgcaaagcaaagcaactgcgtttgcgaggcaaggttaccctactgtgactgaaaacacgaaacaaggcaagtgtgcgcttatgtatgtctcactttctcgcctctaaccatgaaattaccatttactttcctcaatactacatcaccatcaaattaccgtttgatcaatttattttcccggtgagtgaatacatttttctcttcacttattaattcaatgattattntatctgcgacggactatatttgatccaaatanaattgtcgcaataaaattaatatgattttttaataataaacattt

SEQ ID NO: 161029 - DNA, 323 bp, Glycine max
  unsure (1)..(323): unsure at all n locations
ttcaccaatattaagtcaaataggcttactcaaagtnttaggaatttttatgaagcattacgaaagcctcggaagctccggaaaccattttccaacaaaacgtggaggatcttgataagttcacccncccccccctttgctaaatgcactcatttttatttacacaccccattttgctaaatacactcccccttgcccttttnttgctgattctntttccataacattaccgaactttacgaattacataacgatacttgttttcttttcgcaatgtcacgaaaccttacggattatgcaaccatcccctctttgcttttgga

SEQ ID NO: 161030 - DNA, 352 bp, Glycine max
attttagagtctgactgcctgttatataatgaataataccttacgtcttggtactctttttatcgaaatggtagatatgatccatagaagtttttgctttcaactctatagcgtgggtcatgttcttagaaagtcgaacatgatagtagattcctttgcaaaacatgagtttaccactagaagagaaggctatctctttctctcaatccttgatttcgcttacaacatctttcttggatgatgcatatgtaactgatttttcattaataatagataatctggtattgggacgctctgttcataccataagaataaatgtattcaacgaatacatcttttataatatcaatga

SEQ ID NO: 161031 - DNA, 424 bp, Glycine max
  unsure (1)..(424): unsure at all n locations
agcttagacgaccttgtttgaaccgagatgactttattatttatttggacaagtttgaatatgatgtanaataaagagaatgtgaccctcttacccatttgaaaggcttgtatttaaaaatgttttaaaaatacttttaattaatatttgaatttttattcctttattagtatatatgtgaggggtagagggtgtcacacctcacaccataatcactaacaatggcactcaatctgcaagcttgatggtcaaaaaattttgtgcaaagaaaggagttcgtcttgtattttcatcagttaagcaccctcggacgaacggtcaagtagaggcagccaacaaagtgtgattaaacatactgaagaaaatgattgaaaagtccgatttcaattgggtagactagctttcacaagtaatttggtcatac

SEQ ID NO: 161032 - DNA, 451 bp, Glycine max
  unsure (1)..(451): unsure at all n locations
taaatctcagcttaagagtgagtctcgatcatttaatcattacagttgttttattatcgttacgtngttgtttgagacaatgactaatttatntacgagtctctgctttaatcgattaccaagtggtttaatcgattacttctctctcgcttagttgttcaaaagtgaacaagaacacttgaattgattactttgagtatctaatcaattacattgttcttgagttatttttagatgttagtaagaacactttagtcgattaaaaagataatctaatcgattacttcattgagttaatccattactttgtagatttaatcgattacagacggttataattgttttctttataaataatcagcttgtgttcccctccatatacatcaagagaatactcaatatctcaaanatataacacaagcctttgaatgagccaaagatctcaagatgt

SEQ ID NO: 161033 - DNA, 423 bp, Glycine max
  unsure (1)..(423): unsure at all n locations
agcttgcgtgggacaaagagggtatatgtatgangggagatgggcgttttgggaattttgagtttgagatctgggatttcgaaccgttggattgagagcaggtggacggttatgattgggggacgaaagatgcgtgtggcgacctcgtgctgtgtccagtgtgagggtgtgaacgaagagataaaggaaatattctttccacgtaagaatcatggcatcattcggaaaggtagggacaagtgtctcccactttaaagtttataacataatttagttataacataatttttaacctatatacatatttatcttctttttttttttacttgaaaatatctatattttattagagatgatcttgtttgaattattatagatgacaaaattttcttaatatatttaatgaagttgtatttattttta

SEQ ID NO: 161034 - DNA, 335 bp, Glycine max
ttaccacccaatattcatatggtcttccgaatccaatattaaatggcacctcccttctccttaaaaaaattcacttcaccatttttcactatcataatttgaaaacctacaaagaataactggtcaacctgggtgtcaatgctttggaacctggttcaaaccctattaagaattaacgatttatttttttaaaggaaaatattttcaaagaaagcgacatctctagattgcgataaaatacatataaatttcaacatttctgaataacactaaaatctatagtagttttattaaaatattcacacaatccttacactttttcactttctttttat

SEQ ID NO: 161035 - DNA, 367 bp, Glycine max
  unsure (1)..(367): unsure at all n locations
agctcgtccanaatctcactaatattattgtttctgtatctggatggggtaagtatctcacgtgcaggacatgaatggtgcagcgctttatcgtcgatgctngacctgcaagaaattcgcatgtccaagtgcaatctcttcgggacccctggattcttccctggcaagacttgagaatctatcagtcatggttcttgaaatgaactatttatcttccccgtggccaaaaccatttgccctttgaaaaaacctaccattcttccccttttctgagtgcaaattgactggaacttttcccagaaaatctcaccattgaaaatggctggtattgacatatacctcacccaaatcttatggttcttttcaa

SEQ ID NO: 161036 - DNA, 412 bp, Glycine max
  unsure (1)..(412): unsure at all n locations
tggttcgaggtaattacccgttgaagatcgtataacgatgaagaacggatgaagaacgtcgaagaacggttgaaacctttgcgaaattcctcacggaaaacgttacggaaacgtttcggaagcgcctcggcttagattttcttcacggaaacaatttttccaagcaaattcgaaagagagaaaagtgcctaaggggctgaacccttttcttcttcacttcctcccctatttatagcaaaataggggaggtggttgccgcccagctcgcccaggcgagccaggttgcttcctccagaagcaacagccttctggaggaatattctggagggcccaagtgggcctgggtgctatttgcacccccattttactaagtacacccncctctgctggtttttggtgaatcttttttcgt

SEQ ID NO: 161037 - DNA, 417 bp, Glycine max
agcttcgacgctacaatacctggtgcctttttcttgttgaatgaagaatctttaaaatcaattgccaataaagttctcaaatattgtagtttgtcaaaaacttcaatatctgagattggatcactgaactctgtaactgacaaatgacgagtctttataccaatcttggtttcttctccaagttcttctgatctgaaataaaattctccaccaaggtataatgctagatcatgcacgaggtcatgcattacaaaataattgcccctagttcgattacttgatcgttgaacaaatgatctcgacactaaatcatcaaaatactcgtaaccaacttctaacgccttttctttgtttggaagcttcaaaagatcttcacccatccacaacaagatcaagttctctcttttgaaactcata

SEQ ID NO: 161038 - DNA, 462 bp, Glycine max
  unsure (1)..(462): unsure at all n locations
ngctcaacatctctatgagggtctctagatgcttagctatgagctttgtttggactaatagtgcatcttgtgatgcgagcttgagaagactcttctttgtaggtgtgtaggctcgatcccaaaggatggcatagtcactggctgctatattttcaatcaactccatagcttcattaggtgtctttagtctgatcttcccaccagtggaggcatcaagtaactactttgaatgggtttgcaagccatcaatgaagatattgagttgaatcggctcgctgaacccgtgggtgggggagtcttccatagtataccatggaaacagtcaagagatatacttattgattcatcggggaattggtggaatgaagatatatccacctntctcttggcagtcttggacttggaaaatacttcttcaaaattcttcaccacttctcctatatccgaagctatttctttaac

SEQ ID NO: 161039 - DNA, 417 bp, Glycine max
agctttatacaaaacaataacattgattctctttttaattataaaaattagttcatatttattaattgcattaaattttttattttattctatttattcttaattttggtgttacatattttttttattaatctaattatgatgtccatggcaatacgaaacatttgattaacaagagctaacatttaattaattatgattactttattactttattttttttttgtattacataattcttttctcaatttgttggcaattaatcgtgaatgaaatttatggagtaaatagtagaaaaaagttgtaataaatttatttgttaattaaataatctctttaaaactatttctaattccaactttgtagtgaaaaaatacttataaagtatatatgatacacctatttatttattctcat

SEQ ID NO: 161040 - DNA, 467 bp, Glycine max
  unsure (1)..(467): unsure at all n locations
tgtctcagcgtttatgcgagacagagaccaacatgctagctatcatcgtcaagtaccaagaagagttaggtctagccgcggcccacgagcataggattgcggacgaatatgcccaagtatacgcggaaaaagaggctagaggaagggtgatcgactctttacaccaagaggcaaccatgtggatggatcggtttgctcttaccttgaacgggagtcaagaacttccccgattgttagccaaggccaatgcgatggcagacacctactccgcccccgaagagattcatgggcttctcggctattgtcagcatatgatagacttaatggcccacataattagaaatcgttaggaaacttgtatggtctctcagaccttgactagatacgacttcctttnnttttgaaatanaatgagttggtccatgtntctactccaaaagcttgtgccaatcaaatcactcctacat

SEQ ID NO: 161041 - DNA, 384 bp, Glycine max
  unsure (1)..(384): unsure at all n locations
tgcaagctcgctattataaaatagatataattctaatttgtttttaccnaccgaatcacttatataagtacctatttccggaaacaatattcttgtgtgatgaaaggtggttgtcaatatccaacagcattataaattctggcctaccttactatgcacaagagaaaaacacatgttctggctattgccccatcctttttaccaaagagctttgtagtttctaaaaattgtgggttacatcattttgaaaatcaggaggatgccattctaaatagaattgctagctggttataatggcataatgacatgttagcctacttgcactagacttgacatggatattaccaacctttctcttattatgtgcaagctatcatgttgtat

SEQ ID NO: 161042 - DNA, 437 bp, Glycine max
  unsure (1)..(437): unsure at all n locations
ntacaacacatgcacgtntgactgttagattacctggtccttttatacagatgcactcacaagtcaatgcttttcattctaactagaaggactaatagaaatatcaaaactaaaatctgacactcgttaacaatgatatgatgactgcaccaaaatagaattcacagtgatggaattcattcatccatacataacataacataaactaccatatcgcccctttattattatagtgctatttgatcttctcctttctttgtttctgattttctatctaagccatagaagaanaaagggtaaagaccaagatgcagattcctcttgtgctgactggaagggttagtcatatatacgatacnaagatgttgttggtgggtcaagcactcaagcatcagtgctaaagaatgaggaaaatgggtttgtcaactgaaactcat

SEQ ID NO: 161043 - DNA, 416 bp, Glycine max
  unsure (1)..(416): unsure at all n locations
agcttccatcaagtggtttcatagtacattagcttcaagtaggtgctccttaaacctcctttaattttttttctttaccttctcttccattgttgtttcttcatttttctccatgtatctcctcacatgtcttgtgctaaatgttgttaacatgattctttagagtttccaccgattaaacttgctatagaagctagatttgattttctatggttcaaatttcttgttcttgttcttgaaccatgaattgtgttgagtttaagttcctttgagttttttcttgttattttttgtggctgaaacctaaaccataaaattcttacaaaaatattaaagtagaagaaaacctcaaaaatctagagtgacttgttcacctattgtagttntatcatagaagtcatgtctaatcatgaaac

SEQ ID NO: 161044 - DNA, 366 bp, Glycine max
  unsure (1)..(366): unsure at all n locations
agcttcttcttatggatcaagntgattcttaagaagctcgcaaatcaacttgatgcataagaatttttttaattttaacaaatggcaaatatattataaattatgaaaaatgattcttattatgatttanggttggttttgaggcttttacgctaaagtagagtacgattgagtaactgaaaaagtttgaaattatgcgttcatctattgatgaagttgatattggtttgaaatttggttttgacgctttttgggtttgtactgtataatgcatgatcttgtatattgaataaagtttgaaatgtctgaacatgttgaccctttatttaagttggtctaaaacacttcttgtaactacaaattgac

SEQ ID NO: 161045 - DNA, 439 bp, Glycine max
  unsure (1)..(439): unsure at all n locations
nttataagtgaaatcaggtgcagccatctccctaagtgttctctcacgaggtggaggttgaaccatgttctcagtatgaaaattagtagtcgaatgctcaaaatcagaatattcagaattaccagcaacagaatactcagaatgctcaaaatactaaaaaatgctcaaaatgcccagaatgaccaggatgaacactatgcctaactaatctataaaaggttctatctatttcaggatcaaaggattgtaaatcacctagattacccctagtcatgcactatatgtagcaaatcatgtatctctcaacaagcacctaacaaggtggtaaaactacagctatacttaaacgatatccaaataagctgaaatnttgtgagcaacaccctataatcatgaaaagatatcacanaaaatttcaaacaaaaatttcaagtctaac

SEQ ID NO: 161046 - DNA, 411 bp, Glycine max
agcttatcatatctatttttatacttgtttaccatatacacagatgatttccaaattgctcccagttcatcaattaattagcataggtcataacaaaacgttcaacacaagtgtcattttacacaatttatagtaaattcatttctcatcccaaaatttaagttttatacatgaaaacataagtcccaaatgtatactttaagaatataatttattttcatcataagagaatccttaaattcaagtatcaattttcgtgtagtatgtgcaacaacatattaaacaacttgagtacacaaattttaacaccaacaacatagttgtaaatttcaagcatcataactttcaattgtgcaaagcaatcatcataaaacaagtcttcaacatatatacatgtaggatcaatcattt

SEQ ID NO: 161047 - DNA, 272 bp, Glycine max
gacgctcttttgcctcctctatacttctcggtcgaacaattccctttaatttcttggtcctcatcctcttctccatatatctcctacattgtcttgcggtatgggctgcttaaatatattaaaaaaaaccgattaaatcctaaatcttcacctgttcttgcatttctatggttcaaattttatagatctactcctgaatcatggttctggtgtgattttaagctctatcacttttcaatcattatacttcttatgctcaaactcttaaattc

SEQ ID NO: 161048 - DNA, 425 bp, Glycine max
  unsure (1)..(425): unsure at all n locations
agcttgtgtttcatagactntggagtttctacttgaccaatgtggctggacacccacttagttggtgaaaactcaaaactcttgcatattctttttagaacaaatgctatttgaaggtactatttgttaagaaattaaatgtagaattttctattattaaaaatatgattaatgtattgtattataattttatcatatttctaatatgatttttaataaaaatattattaattatttaattagcaccctaaatactatactgattataattatggcaagaccgtttttntctcccttttaatttacaagtttaaatccaaaaccatattaatattaaactcatttcacaagtttcaatcttcacttttctgccttaatgacctactagtaaaactgtaggctgtaatatagatgcttctgctcta

SEQ ID NO: 161049 - DNA, 455 bp, Glycine max
  unsure (1)..(455): unsure at all n locations
tgttcttcaattcgtagccgtcatcatcatatctagagtgtgcacttgttggtgatccataggtgttgtctgatgactgatgctggtctgaatgagaagcttgtggagaaaaaggactcctattggatgatacactagcataggaaggagaatcacaacctatgagatcattgattgctggggatgattcaagggtaaagtattgctccttgctggtttcaaaagaaatagtggttccctggctgctgctattatcatggcatgaattgctttgcaatattcggtaatgagtgtaaggatcaatatcttgtgcangctgcaagtataaatggataccagctgaagttgggtgcttcttataagtttgcatctaaaaagaaaatatttacttagtgatcagaacaatgagtggtcaaactttgaattgaaaaatgcttctacctgtcctgatcaat

SEQ ID NO: 161050 - DNA, 431 bp, Glycine max
  unsure (1)..(431): unsure at all n locations
cagcgaattggttgaaatttgtatgcagtgtcttgtttggtatgaaatgagtgtttgaaattgatttgattgagcaaatgtatgaattgaatggattgggatgattanatgattgttttgatcaagtttgcagttattagaagtgaatgagcatctgattggaagtatgtctaaaaatgttaattggttgtcagattgattatgaaagaatgcattgaccgtatcttgatgagagcgtgatccttaaattgtgagagaaacgactatcatttagtactgatgtttgcgtgaatctctgatgtatggactagatgcatgaatttgaggatgatgaacgccatgtttgatttatgaatagccacttagccgaaaagttgaccatatgtttgaatgaattatcccttgtacccaggtggagctgaatgaattga

SEQ ID NO: 161051 - DNA, 420 bp, Glycine max
agcttctagaatagagaacttgattagagccaatatatcattgaagataagcttagagaaatcaaaatcggttggtttagcattagaagaagcggggccgaagttatatgaaattagggtgaggcttccgtcgctgggatcggcagtgcggccgattcgcgccgagaaggacgccctcgcggcggtcggcggccacatcaaccgtgcggtgggccccgctgcagcggtgctcaaggttttcgacgccgtccacggcctcgaaaagtcactcctgtcggatccccggaccgacctggccggatacttgtctgtgctgaagcgcctccaggaggctctgaggttcctgtgagacaattgtgggctggccatacagtggttggaagatataattgagtatttggaggacaattctgttgctga

SEQ ID NO: 161052 - DNA, 402 bp, Glycine max
  unsure (1)..(402): unsure at all n locations
tcaccatatgcttcagaatattttgagctttggaaatgtcttgggaataagtgtggggggttttttggttcattggataacatgttttgttggcatgatgtattntgggccatacttgatgtatattgtatattgggtaaatgttggacatgctgaataaaatgctgtttctcaaaggctacagagctaaaaaaaaaaaattgaaaaagaaaaagaaaaacaatgaagttgagtgaataagatcttaaatggccaaagaatgatgagactcttaggtctactctttatgtttaaattttatctttagttctttttttttctaatatgcacttaattcccattggctctctattcttttggatatagcctcttattccatatattttccataccttggtcttg

SEQ ID NO: 161053 - DNA, 421 bp, Glycine max
  unsure (1)..(421): unsure at all n locations
agcttgaaggtgcatanccccaccatttttcatagtttaacactggtaatgtgtctactattattgtgatcatctctttctccgtcattggaggtgccacttaagctgtcaggtctctccacctttgggcgtattctttgaaagattcatgcccctttttgcacatgttctgtagttgcatcctatccagagccttatcagaattgtattgatactgcctaccaaaggcaaccattangtcctttcaaaaatggactccggaaggttccaagttagtgtaccatgtaacagctaccccagtaagactttcttggaagaaatgtatcagtagttcctcatcttttgcgtatgcccccaccttccgacaatacatatttagatggtgcttggcgcaagtagtccccttgtacttgtcaaagtc

SEQ ID NO: 161054 - DNA, 393 bp, Glycine max
tctggatgcattggttaacttggtaacctatctggtcttgaatcagaaatctgtacctgtcgcaagggtttgtggtttgtgctcctctactgaccaccaaacagacctttgcccttccatgcagcaacctggagcaattaagcagcctgaagcttatgctgcaaatatttacaatagacctcctcaacctcagccgcaaaatcaaccacaacaaagcaattatgacctctccagcaatagatacaaccctggatggaggaatcaccctaaccttagatggtccagccctcagcaacaacgacagcagcctgctccttccttccaaaatgctgttggcccaagcagaccatacattcctccaccaatccaacaacagcaacaaccccagaaaca

SEQ ID NO: 161055 - DNA, 428 bp, Glycine max
  unsure (1)..(428): unsure at all n locations
cgctngcttctacattaaatgcatgagaaacaaatatttcatgagattaaaactgggttgcctcccaggaagcgcttctttaatgccattagcttgacgcttttacctcattgagtgatcttatgttttggttcttactttcagaacctcttgacctccttccattacctgtgagcagacattgtgttctagagcaagcttgttttcaacaaacaaatcaaaatcaatcttctgatcttcaaaacctagctccagctttctcttccccatatcaactatgtagcttgcgatcaacatgaatggccttcccaatattatagggatgtcagtatcttcaaagatatccattaccacaaagtttgtcgggaagataaaatgttttactctgaccaacacatcttcaattactccatatggcctggtaatgg

SEQ ID NO: 161056 - DNA, 458 bp, Glycine max
  unsure (1)..(458): unsure at all n locations
ntgtaaaaaccacttctttgatataacttttctcaagtttcttttaaaagttactgttntttgcttctgagaacacactaaagtaacatttttctaggtttttgctctttttcttcaaaacattttataagttactgtttcttgcttctgagagcacactaaagaacatttctaaaatatatggcatttaaaagttgtaacataattgaacttaatttaaaaaggactcttaaaaaatatgaaaatgtaatctgtaatatcatttcttatatcagcaaatgatattttgaaaaggtcatgcataatataaaatacatatatttttagaacatgtaaagacgacattgtgtctttggtggacaaacaaagcanaatgttaaacacactgacacaaggtcacaactcaaatatggaaactcgcttgaacagcagccagcttatngatcataacagagaga

SEQ ID NO: 161057 - DNA, 422 bp, Glycine max
  unsure (1)..(422): unsure at all n locations
agctntaaattggagagagataaatgttttttttaattgaaaatatgtatcatttcctaaacatntcattaaacaagacgacataaagcatagtaatcaacagaattttctaacataaaacgattaagatttattaattaaaaaacatgaatttgatatttcagtatctattttccttttcgatgataaaattagtacttttcaaaccaatagattttgccataaaacaaaacaatattcgcaacgaaacaaacacactcttcgggaaaagggaagtacagatagaaggttacaaaacacctcactggcagtcaaaacaatggcacaaagcgattgaatctaaaaatatgctgatttcgctnttccaaaacaaaattcacaccacttaatttatgtcaaatagactgcttattctttattta

SEQ ID NO: 161058 - DNA, 391 bp, Glycine max
  unsure (1)..(391): unsure at all n locations
tgatatntgaagtgtaatgatatcattgtntcctttggatttaaggaaaatactgttgatcattgtatatatctaaaggtcagtggcagtaaggttatttttttaattcagtatgttgatgatatcttgcttgcaactaatgatcttggtcttcttcatgagactaagaaatttctctctagcaaatttgaagtgaaagatatgggtgaggtaagctatgtcatagggatataaatattccataatagatcacaaggattattagacttatctcagaaaatatatatcaataaagtactagcgagattcaagatggaaaggtgtttaacatcatcctctctcatttaaaaaagagacanatttggtcttgcacaatcgtctattaatgata

SEQ ID NO: 161059 - DNA, 389 bp, Glycine max
agcttacagctgcacaaaattatatgattttctttcacataaaactaaagatacagaactactaaaatgataaggctaacagaaacatccctctatatctaacaaacttatatgcatgataacttaatttgcccttgtctgcttatatataaatccaatagtaccttgggcatcattggcattcatcagaatccagattttattggttggaaagcagtttgactggcaatgcttgtacctatgcagaaaaaaagggaattttttagtgaatttgaatgaaattatggataaaaatagatcttcagttcttctttttttaaaaaaaaaaaagagatctcaagtccaatgatccataattgatattaatttttccaaagatattctgaatt

SEQ ID NO: 161060 - DNA, 437 bp, Glycine max
tccgctttgagaagggatatcttgctcaaaagccttacttcgaagggaccttgtaattggttaacttctttaatatgtattatattattgtttttatttgttcttatgttggtacctttttgtgtggctgtgatagatatgacaaattctgccccttctacaagtctgtttggatgatgcgcaacattatccatttctacaatttggcaaatcaggtatggtggtgtaaggaatcacgcagtttttggtgtcttatttatattagaaaaaagaagaccagtccatgtaatcattggcatctatgttcaagttactagttcattttatcgcttctgctgtccctcacattctgagaccagacattgtttctttcctttgtgtcctgcattctcgatcatggcttggcaaagtgtattactttgggctgaaaagaattt

SEQ ID NO: 161061 - DNA, 415 bp, Glycine max
agcttagtagaacccccatggtgtagtttttttattatccttatgaattaaaacttcccataaacaaaacctcaaaatcattactgattaaattaagattttgtttatcaccattaaagctagactatcttcactatccattgcttcaactatgaaatgcacaaagtccaaatgaaacaactacatgcaaatgaggttcacttagagcataatgaatgacaaaacataccttgaaattaatattttattttcaaacttaattgtttctgctagatgaccagaaatatcgaaatacatgcttctactgggggtttattcatcctttattagtttacaaatatttattagatttacatttcgactatttcacaattattgtgtaggagaaattagcataggagagtcaccatgagca

SEQ ID NO: 161062 - DNA, 468 bp, Glycine max
  unsure (1)..(468): unsure at all n locations
tgcactagccagtgatggaatgaatccatatggctatttaagcacttaacacaattcatggccaattctactagtaatttacaattntcctccttggttgtgcatgcagtgaaaatacatgatgttgtcgatgatgatatcaggcccaagacagccaggaaatgacattgatgtttatctaagtccgttgattgaaggcctgagaaagctgtgggacgagggggttttagtgtttgatgggtttcagaatgagacttttctaatgcatgcaatgctnntttgtacaattaatgactttccagcatataggaatttgagcagttacagtgttaaggggcatcatgcatgccccatctgtgaagaagacacaagctacatacaactganacatggtaagaaaacagtctacactaggcatcgacattttctataacctcatcacccttacaggcgattgaagaaagcagt

SEQ ID NO: 161063 - DNA, 415 bp, Glycine max
agcttagaagaaaattgcatgttgtcccttacctcgtatacttaaccgagaaatttgcttataagttcttgacaagaaagctcttgattgggggttcaagaccctttagtggaacatctacttctgatttctgttcccatcccctctctattgccccctccccccctagtgggatccctttggaagcactcttgtggtggggcctttcctaagatctgacagatctagtaccccaaaaataaaataaattaattctgttgtagtttaacatctaccctgtatcattactgttgcaacttgcgaccaagttttaagtgttgtttggcctttcccccttctttctgtggatgatgaacaccaccaccaattacgtttcaacacaatattacatactaaagaaagatgctttattgtt

SEQ ID NO: 161064 - DNA, 472 bp, Glycine max
  unsure (1)..(472): unsure at all n locations
tggtattgctganatgagaaaaaaaatgcattactaatttatcttctgatacnnctcccacgagcgctagctaattggtacgtgaatcttgaattaataaagattgagtgagtcaatctaggaaaataaataacaaaaatcattaaaaattacataaaagtccggaataactcaaatttattaagtatcatcataaatactattagaaatgtataagaatgcaaatactataaataaataaaaaggatgaagtgagatattaaggtcttttttagagagaggatgagggcttgacaatggaaatcttattggtggtctcactcttgacatntattttgggttaatttttatgttatatccatatattacttgacaaactcagattgatattagcttgtgtaacacaggcacccaagagaagttacttgaaaatgactacattttggtatatttgaagaaaaatttgacactg

SEQ ID NO: 161065 - DNA, 422 bp, Glycine max
agctttaagacaaaattcaagtttagtactgctattgttgatgacaaaaactgaacgtgcgagtttatctgtattatgatccatcatatttgctaggcccatcttttgtgtacgcgggccgaacccactgtccaggttaaaccttttgtgaatgttgtcaaagaaattggactctcttaccatgtatttgacagaagagaagatgggaagaaagaaaaataagaataacacatcatttctttttgttaaagaaaaaatgaaaggaaaagggagagaaaaattgacttttaaaaataaaatttatttttttaattcaaattttaaaattttgttttctttcttatttttcttcctttcaaccaaacagatcattagtgttgctccaagcgaatctaccttcataatgcgctcaacttttttat

SEQ ID NO: 161066 - DNA, 473 bp, Glycine max
  unsure (1)..(473): unsure at all n locations
tgtatntnntaataaattaaattaataataataatattgctaatattcctctaaaaaatttactataatgcatataaaaaggaatttattatatcattattttaaactcctttcgatattgaatatatgcaaagaaaaatataatttatacatattaagaaaattggttacaataatttaattatatcaatttcatttaaaacataagccttttttttcttctaaattatcctttaacttggtataagaataaaataatcatgaaaacaaaacctcaattaaatgaagcatttgtaagaatgatctcattgaataagataaaattattcaaattttacttatatttaagattgaaagagtactatntaataatatgatactccatttaatctccattataaacaacannaaaatcaatttcactcctattaannaaaataattaacttcattaaaatgtattaattctaatta

SEQ ID NO: 161067 - DNA, 372 bp, Glycine max
agcttgtcgaaattgccatgtttgtgtttgttatacatacccattctgttttaggggttttgtgatgatgtttatgatgtttatatgctgaaattgctgatggaaatctgttagagatgaagggtagaactaacccaaggttagaaagtgagaatgtgatgttatgagtggaaaaagagtgagactttgagagttggaaggctaagtctgaattctgtggtaaatggaggttagagtgagttaatactagcttgaaatgtcatttataacatgtgggaaaggttaggctgagctatatagaaaaacaaatgaccaaagtgaacaaagagccattgctagggcaatattgggtgttgaagagtcaaattttga

SEQ ID NO: 161068 - DNA, 330 bp, Glycine max
  unsure (1)..(330): unsure at all n locations
ctacatcatanaacacaaaagcatgattgatttgagaaacatctttatatacatcagcttgtttgttagaaagacccaacacttttacctagagttggcaatcttacttgcatattttactgtttttagcctacacttagtttaattctattctaaaccatcaattatcaatgtttctttcaacaattccttatttctgaatttaaccctgtcgaatactagttccctgagtttgatacttggattcattcgtttgaatgttaaatacgttacgatccggtgcactctttggtgaatcgaatctcccttaaacatattttgataaagaaa

SEQ ID NO: 161069 - DNA, 415 bp, Glycine max
  unsure (1)..(415): unsure at all n locations
tcaagtcttacaaatttaacaaaattaacatatcattttataccaaaacaaaagaaggcattactgaaactctccaatcacaaacaaaaaaccatggcaatccactcagtctcccttcttcctaaaggagcatccctcagttagccttgcccggccaccggttggttgacacaagacagtctggcagtttccgcatacaacaacagtctgagagtggctaaagacagtggttctgcagtcatattcataccactcaagtattaaaacaaatccacaatcaaattcataacactcgagctatnttatgtacacaatcaaaatcaataataggaagggaaaaaaagacgatccaacttacatgttgaagcaaccctggcacttaacatccttcaaaagaggaatanaacatgcaaac

SEQ ID NO: 161070 - DNA, 437 bp, Glycine max
  unsure (1)..(437): unsure at all n locations
taagcttgcctcctagcttgccaggcgagctcagctcgcccaggcgagctttgttgcttcctccagaagcaacagccttctggaggaatcttctgaacggcccaagtgggcctggttgctatttgcacccccatttttactaagtacaccccctacctttttttggtgattcttttttcgtaaagttacggaaacttacgaatttcgtaacgatactggttttctttccgtaatgttacggaaccttgtggattacataatcatcccctttttgacttacggaatattacggaacctcactaattgtgcaacgatgcttccatttgattttcggtgtgtcacggaaccttacagattgtgcatcaatattttcttttgttttccggcatgtcccggaatttcacaaatngcctaatgatgggtgccaagcacctcac

SEQ ID NO: 161071 - DNA, 428 bp, Glycine max
  unsure (1)..(428): unsure at all n locations
tgagctgcagctttccaacactgacgcgacgcaatcttttttttttttaaatcgcacgaagacaagatcaacgacagacgttgtanccttttctcttacaatcacaatagccctatggccaccattttaccctccacctgttccaagcttcccttcaaacgattgaccttggaggagatcatattttgccaggataagggtttatgctactattgcgaggaaaaatggactacgggccatcgttgtaaaccccgtatccatctttttatcgcagatgatgacatttacccttttccttcaccatcaagccttaccattgactcagctcctccatcaccaccactcattttctcttctaaaacacccttactcatcctaaatgccatgacaagtatgccggcgttggagaccttctatgtttatggtgt

SEQ ID NO: 161072 - DNA, 468 bp, Glycine max
  unsure (1)..(468): unsure at all n locations
gctttacgcanagattttgagattctctagatgaaggatatatagacatgtgaatgcttatttctctcgtactctagccatagccaacacaatgaaggctcatggtgaaagttttatcgaaatagtcattattgcaaagatattgagatcgatggtctcaaaatatgattatgtggcctgctcaattgaagaatccaacaccttagacatgatgactattgatgagtccgtaagtagtcttctggttcatgagctaatgatgagaagtcgtggagaagaagagcatgttcttaagatctcccacgatgaccaagttcgtagaggtaaatgttactgcgccttcacaagatgtctatgtaaacgaacgtgaagaccattctttcataaagctgctattgaatatttcaatgtcacaagtaagacctttcacttgagagcctgatgggagacaatgatcttcctgattgg

SEQ ID NO: 161073 - DNA, 169 bp, Glycine max
ccatacattgtgtgctgaaccaacgttaactctgagtcattatcattcttcccattatttctatctcttcttttatagctctatactaaacaactgatatcaaaagcttttgggtacttcacgggatttccttagtttaaaggaaattaggggagtctttttaacttaa

SEQ ID NO: 161074 - DNA, 414 bp, Glycine max
gctttagataatattgctgcgtcgttccatgatagttgcaagagttggatctgcggcacgacgaatcacatgacatgaggaacgatctgcggtgatgggaccacagcactgagaggtggaggggcaagaaatcaactgcgatggagctctgaacagagcgaggtcaacatgctgttggaatgtagacgcaaaaatccactgagcttggaatagaaacgctaaaataatatttggttggaattttttgttaaacccgtgcagaaactgcctagctcggtgacctgacctcataggtctggatgtgcagagctaggtacctcaatgagtgattttctatattgaaatttaaaaaatgccgggaaatgggaaaaaagaaagtataagtagagctgacgcaccggttggataagagaa

SEQ ID NO: 161075 - DNA, 433 bp, Glycine max
tctaaacctcctgggttctctcccctttgggcaacatctaatagccaaagtacgtggtaatcaacacaagatggaagaataaaaatcaaatagaactaaagttcacacaatcattcataagtcaaaaccaaatataatacaatcataaaatactaagtaccaaataccgaaagataatgaaagttcaaaaaatgataacttaaatagcatagccaaatactcggctgacaataaaagagaataataatctaaaactaagaaggtggtggaaggtcgaagcaccgatgaagataagtcacatcctcttcaagctggtgatgcgggtatccatgccttcaaagcgaccatccaaggaatcgaatcgtgcaccaacataggtgcagaggccccgtaattctgaaagaacttcattcataagggctgaggaatcatc

SEQ ID NO: 161076 - DNA, 457 bp, Glycine max
  unsure (1)..(457): unsure at all n locations
ttgtgatattcctcttgcccaataatataataatnctgcnagcagaggatagtatatataagtatgtaaatcccaccccaatcataaatgagaatatatntccttgccttattccttctccccttccttctatggaggccctggtcctcgaaaccagctaattagatctccccccctaacagtcaatgtgtttgattgcgagaaggacatcaacgtgccagttaccgttgttttcgtggttgaaaatcgagcccgaggagccagagtggatcgtttccttcatcttgtcacagagtgtgacgacagatttagacaaatccgtgatggtggctgcgatcaaatacaactttgaggagtgggtgtccagtttcgtggtctgtgctgccatggtggtcgcgtgagactgaagcgtggacttaatggcctcaagctctactttcaaagcgtcaagtctctg

SEQ ID NO: 161077 - DNA, 319 bp, Glycine max
cttaaataggctctgaaatcgtgacactgcgcttagctctctctctcgcttaacgcgagaaagtgaaattgggcttatcgccaatctcgagcttaccctggctgaaagcacctgctacacttagcgcactgatctcacgcttagcgcgcgactttgatactgatgctctgccagattctccttcgcgctaagcattctgaaactgcccttaacggtggatatgcgcttagcccagctgctgagcttagcccaactactacattttgcaattcaaaacttagccttttttcacctgaaaagcatagatttcatcattaaa

SEQ ID NO: 161078 - DNA, 409 bp, Glycine max
  unsure (1)..(409): unsure at all n locations
agctngcttataaatagtttattcgatatttggtacctctgatttacttttataattactttttccggaaacaatattcttgtgtgatgaaaggtggttgtcaatatccaacagcattataaattctggcctaccttactatgcacaagagaaaaacacatgttctggctattgccccatcctttataccaaagagctttgtagtttctaaaaattgtgggttacatcattttgaaaatcaggaggatgccagtctaaatagaattgctagctggttataatggcataatgacatgttagcttacttgcactagacttgaacatggatattaccaagcttttctctcatttatgttgcgagcatatcatgtgcgttaagtgagatatgtcccatgatgtatgatgaaac

SEQ ID NO: 161079 - DNA, 444 bp, Glycine max
  unsure (1)..(444): unsure at all n locations
ntacaacacatgcacgtntgactggtagattacctggttcttntatacagatgcactcacaagtcaatgcttttcattctaactagaaggactaatagaaatatcaaaactaaaatctgacactcgttaacaatgatatgatgactgcaccaaaatagaattcacagtgatggaattcattcatccatacataacataacataaactaccatatcgcccctttattattatagtgctatttgatcttctcctttctttgtttctgattntctatctaagccatagaagaaaaaaggtaaaagaccaagatgcagattcctcttgtgctgactggaagggttagtcatatatacgatacaaagatgtttgtggtgggtcaagcactcaagcatcagtgcctaagaatgaggaaaatgggttgtcaactgaaaaactcatttgttc

SEQ ID NO: 161080 - DNA, 412 bp, Glycine max
  unsure (1)..(412): unsure at all n locations
agctntatacaaaacaataacattgatcctctttttaattataaaaattagttcatatttattaattgcattcaaatttttattttattctatttattcttaattctggtgttacatattttttttattaatctaattatgatgtccatggcaatacgaaacatttgattaacaagagctaacatttaattaattatgattactttattactttattttttttttgtattacataattcttttctcaatttgttggcaattaatcgtgaatgaaatttatggagtaaatagtagaaaaaagttgtataaatttatttgttaattaaataatttttttaaaactatttctaataccaactttctagtgaaacaatacttataaagtatatatgatacacctatttatttattt

SEQ ID NO: 161081 - DNA, 367 bp, Glycine max
tgtctcagcgtttatgcgagacggagaccaacatgctagctatcattttctagtaccaagacaagttaggtctagccgccgcccacgaacataggattgcggacgaatatgcccaagtatacgctgaataagacgctagaggaagggtgatcgactctttacaccaagaggcaaccatgtggatggatcggcttgctcttaccttgaacgggagtcaagaacttccccgattgttagccaaagccaatgcgaaggcaaacacctactccgaccccgaagagattcatgggcttctcggctattgtcagcatatgatagacttaatggcccacataattagaaatcgtatgaaactcgttggtctctc

SEQ ID NO: 161082 - DNA, 413 bp, Glycine max
agcttgaagcagctttagagctctatatttattctgtcaaacaggacatcattcttgctagagacatactgagctcatttatatcatcactctgcaggaaaggtattattcacttgatcaagtattggtaactaagcatgttgcaaatgcttgtttgtcagcttgttgcctcatatcacaatttaacattttatgctgtatgtttcctgtgcaggacatcttatggctgcctccaaattactttgcagtctcaatcatgatataggatgtgcagaatcccatgtaattttgttggaaagtttggcaaatgctcaagaaattccaattgccattgagcacttgaagtgggttcaagaaaaatcaccttctatactacaacatatatgtacaggacttctggcttctctttcttc

SEQ ID NO: 161083 - DNA, 330 bp, Glycine max
ttgagcaaattcgaacgacaataactttttactcggatgtctgattgagtcccgtaatatatcgagacgctcgaactggaataccgaagctctgagataattcaaacgacaataactttttactctgatgtctgattcagtcccgtaatatatcgaaacgctcgatattgaatgttgaagctctgagcaacttcaaactacaataactttttactcggatgtctgattcagtcccgtaatatatccaaacgctcgatattgaatgttgaagctttgagcaaatcaaacgacaataaacttttactccgatgtctgattgagtcccgtata

SEQ ID NO: 161084 - DNA, 386 bp, Glycine max
  unsure (1)..(386): unsure at all n locations
agcttatcaaacgctattgttatatattctcatgaaaacnccggcaactcaactcataaattcgactagttaacttgtaagaatttatttttattctctttaagttaaaaaatattaatatacctataaataatagaataattcgatgaccttatactttcctctttggtctaacattgttttcaacatggtgcagcagaagatgggtaaatcagttttggtgtgtcaactaaagcatgacgaagctaatctccaacaaaaagctggagctgggcctgatttggtttcctgtcttgaccaggcaatccaagaaaacatcaagtttctgccatatattaacaagcttgaagctgcctttggaattagtgacgattgctcgcagctta

SEQ ID NO: 161085 - DNA, 306 bp, Glycine max
ctttgcaaaagggcttaaagagaatttcaggacaaaaagcatcttctatacaatggctttacttatggttaaataataatgtcccctttcgttcacctgcaatgcatatttgagtgtgaccgatggctagtttctaactgcatcggaaattgactaaagatcagccatatatatctgttattatatacaagtttctttatttaattcttgctttcttgtcatcctctctcttcatgcctacgcgaaggcgaatagcctttatatcttaggtatatattacgttattttagaaaatttaatatatat

SEQ ID NO: 161086 - DNA, 412 bp, Glycine max
  unsure (1)..(412): unsure at all n locations
agcttctaatntctatttctaaaacatattcaatntttattatctatgccattaatgagttgaccatttattgatccaagatttttctttgaattattcttattcttctagactatacgttaaaaatttaagagtttaaccacgctttggtatcttatgataacatctcattttctatcatttcaatagtctaaaaactctacctaatcacacaacaaagcaataacattgtctaccatacacacatataaaattgggatgttagagccgccaccgctgctacctccatcgccattgccaccacaccccattgttgctataccaccaccgttgtctctgccttcaatcgtattgtcgtcattggtaccattattccaccccacacattgttgttgccacaccattattcaat

SEQ ID NO: 161087 - DNA, 456 bp, Glycine max
  unsure (1)..(456): unsure at all n locations
nttcacttgaaagcatagntgagacatccattntgagcttgctatgaactcatcataacatttgttatgttctgctctctatatatgtatcatttacagatatgttggcttgtatagctttcctgcatatgatgttatgctttaagatagttctctgatgtggaaagccactaaatgttctcttaaaggaatactttgatgagatggcatgacaaacttgtattccaaacattctagtgtgagcttgttgtatgcttagtactggtttttatttctttgaccttttgaacggccaaactagttcttgatgccttcatgaaagttgtatagaatattatccttgacattcaagcgctagtctcatgttatttggatcactacagtataagaaatctccaaagcattgcagctgtgatatatagtgaggacacaatgacatatttatcttcatgatca

SEQ ID NO: 161088 - DNA, 428 bp, Glycine max
  unsure (1)..(428): unsure at all n locations
agcttttctcatagatgacgatggatgtattgttnttttctgcaaacgtgcataagaaaaaaatgaaacaaaaagaaaagagaaagaaagacctcgaaggtcggcatgttatggtcataaggaagcacaaatcattcgtagagagcaaacatatcttttggaaacaagaaattgatgctaagagtttattttccaaaataaccgagataagaatggatggattcgttgaaccaatgaaagaacataatttggaaacgttgggtctacttgcgtaaatcccaagccttagtatcataatgccacaaactgaatgcttgagtacccacctagctgtatgcatgactaattttgcacgttctttccaaatcatcattgttacgcctgcctcgtggaaataatatggaagtttaacctgaaaccgacaccct

SEQ ID NO: 161089 - DNA, 381 bp, Glycine max
  unsure (1)..(381): unsure at all n locations
tgcttctacatggagttcatcatccatggccctaactcttcaaacatctntatcttgggaataacatgtagaatagttgttccagataaagtagtagtaagagaaacgtgtccaaaacaggcggcagatcaggagcgagaagggacaaagtaggattgttcctgacataaactttacctggttagcaaggaagatgcagacaagtcagttcaagcacgcagcaaaaatgcacaaatgctcaaggttagaaaaggcagaggctaatgatttttatgtaatgatgcaatcctccctaggaagggaccaatcactagaaccatgagcaagaggctccaagaagattggactagagctgctgaagaaggccctanggttctcatg

SEQ ID NO: 161090 - DNA, 421 bp, Glycine max
  unsure (1)..(421): unsure at all n locations
gcttcaacatcagaccacttgcagggtgttgtatctactttacatggaanngacggggcctatgcaagttgaaagccttggaggaaagaggtatgcctatgttgttgtggatgatttctccagatttacctgtgtaaactttatcagagagaaatcagaaacctttgaagtattcaaagagttgagtctaagacttcaaagagagaaagactgtgtcatcaagagaatcaggagtgaccatggcagagaatttgaaaacagcaggttcactgaattctgcacatctgaaggcatcactcatgagttctctgcagccattacaccacaacagaatgggatagttgagaggaaaaacaggaccttgcaagaggctgcttcggtcatgcttcatgccaaagaacttccctataatctctgggct

SEQ ID NO: 161091 - DNA, 385 bp, Glycine max
  unsure (1)..(385): unsure at all n locations
acgacaataactgtgaactcggattctgattggntttgttataaacgagacgctcgaaattgaatgttgaagctctgaactagttcaaacgacaataacttattactcggatgtctgaatgagtcccgtaatatatggatacgctcgaaattgcatgttgaatctcaaagccaattcaaacgacaataactttttactcggatgtctgattgagtcccgtaatatatcgagacgctcgatattgaatgttgaagctctgagccaattcaaacgaacataactttttactcggatgtctgattgagtcccgtaatatatcgagacgctcgaaatagaatgttgaagcttttaaccaattcagacgacaataatcttttactcggat

SEQ ID NO: 161092 - DNA, 420 bp, Glycine max
agcttcaggctactcaattgctccaggtttctgcatggaatggcaaaggtctgtatggtggtcagcagatgagcacaaaccacaaacccttgcaacaggtacagatttctgattcaaggccagctgggttaccaagttaaccaatgcatccagtttgccttcaagcttcttagtttcagatgatgcatatgggtttgtagctacctcatgcactcctctaatgactatggcatcatttctagcgctaaactgttgggagttggaagccatcttctcaattaaatttctggcttcagcaagagtcatgtctccaagggctccaccactggcagcatctatcatacttctctccatattactgagtccttcataaaaataatggagaagaagctgctccgaaatctgatggtgagggcaact

SEQ ID NO: 161093 - DNA, 444 bp, Glycine max
  unsure (1)..(444): unsure at all n locations
ctcattgtatttcacaaatttagtcgtatctagncaaggtctgagagaccatacaagtttcctaacgatttctaattatgtgggccattaagtctatcatatgctgacaatagccgagaagcccatgaatctcttcgggggtggagtaggtgtctgccatcgccttggccttggctaacaatcggggaagttcttgactcccgttcaaggtaagagcaaaccggtccatccacatggttgcctcttggtgtaaagagtcgatcacccttcctctagcctctttttccgcgtatacttgggcatattcgtccgcaatcctatgctcgtgggccgcggctagacctaactcttcttggacttggcgatgatagctagcatgttggtcttcgtctcgcataaaacgctgaacaagctcttttggaccttgacaggcactaactctct

SEQ ID NO: 161094 - DNA, 448 bp, Glycine max
  unsure (1)..(448): unsure at all n locations
gaatcccccccttaaacaccacgctgaattgatcacagaagctctcgaggactntagatggtcatatattgtaacacggaagtccgattcatgcgcataatatgccgagacgctcgaaattgaacaacggaatctctcgagaaactcaaatggtcataacttatcacacggaggtccgattccggcggatagtatatcgagaagctcggaattgaacaacgaaagctctcgagaaattcaaatggtcataactcttaaaacggaagttagattcacgtgcataatatatcaagaagcttgaaattgaacaacggaagctgtcgatatattcaaatggtcataacttatcacaccaaagatcgattcatgcgcatgatatatcgagacgcttcgaattgaacaacggaagctctcgagatattcaaatggtcataacttatcacacaag

SEQ ID NO: 161095 - DNA, 409 bp, Glycine max
agcttatgcatggaaaatgtattatgattttgagatgcgcgaagaaacaccatctcctagttaaccatgcattatgtaccatgttcaattattttgtttttaagtgaaatgggtttatgatcccaacatggttggctcgtggtgcctaacacatgaaactaagaatgtagtgtgaagtttcacgcttcccccttatttgtttttgttttgtagaggaaaacgcaaggatgagcaaacatgaaaacaaatggtatgcaattttgcagatcaaaaagtttgttgaacgcatatgcatgatgatgccatgactcatgcaaaatgtgaggctgaaatatgataacggacaaatgcaagatatgtccattatgatgttatgaaaagatgcttatgcgatgcatgatatgaatgc

SEQ ID NO: 161096 - DNA, 450 bp, Glycine max
  unsure (1)..(450): unsure at all n locations
tatgctgcanacatntacaacagacctcctctacctcagcagcaaaatcaaccacagcagaacaattatgacctctccagcaacagatacaatcccggatggaggaatcaccctaatctcagatggtctagccctcaacaacaacaacagcagcctgctccttcctttcaaaatgatgctggcctaagcaagccatacattcctccaccaatccaacaacagcaacagccccagaaacaacaaacagttgaggctcctccgcaaccttccctcgaagaacttgtgaggcaaatgactatgcagaacatgtagtttcaacaagagaacagagcctccattcagagcttaactcgccagatgggacaattggctacacaattaaatcaacaacagtcccagaattctgacaagttgccttctcaatttgtcctgaatcccanaaatgtgagt

SEQ ID NO: 161097 - DNA, 436 bp, Glycine max
gatcttaagcacctgagctgcagctaaatgcataaaatagtcttatttattatttgatgatgggtaaaaaaaatgttaatttgataacggctggggaaaaaataaagagaaaaaaaaactaattgaagttaataatttaagcaagagtacatcgatattttttttttaatttcaagtacatttactgtgttagaaaaaagacaaaaaatggtcaaacaaaagagaaaacatgtatttatataataaagttatacaacaaattaatacaatattttatttctagaaagaagtatgaaaaacgataatgtgactgataaataaaaattataatgctataaaaattatacaaaaaatgttgagtggaatataaataaaaacatgtattagagagtttcattcagatattcctactgattaattttatttctactttcta

SEQ ID NO: 161098 - DNA, 450 bp, Glycine max
  unsure (1)..(450): unsure at all n locations
actcactgcttataaatgattattcgatatgcgttacctctgnactacttttataattacttnttccggaaacaatattcttgtgtgatgaaaggtggttgtcaatatccaacagcattataaattctggcctaccttactatgcacaagaaaaaaacacatgttctggctattgccccatcctttttaccaaagagctttgtagtttctaaaaattgtgggttacatcattttgaaaatcatgaggatgccagtctaaatagaattgctagctggttataatggcataatgacatgttagcttacttgcactagacttgaacatggatattaccaagctcttctctcatttatgttgcgagcatatcatgtgggttaagtgacatattgtccatgatgtatgatgaaacttgtcgtctaacctaccacgaataatagctcaatgccttg

SEQ ID NO: 161099 - DNA, 379 bp, Glycine max
  unsure (1)..(379): unsure at all n locations
gcttcaccggatgacgccgtttttcattttctaccgacgncangcaaattttgttcacggattgaattgacaactcgttacgcgacatttgtcgtgaagtaacgaccgatattttttagcccacattgcacaattctttttagaaaagctcgctggtcgataatggtctttttaccgcagaggaagttttcttgctttggcgctgcataaaaaagttacaatgtacttcggctatgtttttcgtgcgagttcaaccgacattttgtttcggccatgataacattagcccacctctgtcaaaaaatatntgctaaccggctcatgcatatttcattcacgattgaatagaaactcctagccgacacggtcgtgaaatatc

SEQ ID NO: 161100 - DNA, 313 bp, Glycine max
cgacaaatagttgataatattttttgccgagatggtctttgttttctggccaataatgggacatgccagtttggaccaacaaaagtcggttgactccacaaataacctactgcctaattgtaatatattgcacaccaatagaaacttcttacgtaaaaagcttattgcacgagagttttaaaaaaatgctcaatgttgctgaaaatatagtcgggcttttaaaccatgcgctttgaattaattaatcctgaacaattgatgatgttgtagaatgtgatggctatcatgacttatataacttatggatgttctg

SEQ ID NO: 161101 - DNA, 417 bp, Glycine max
  unsure (1)..(417): unsure at all n locations
agcttgacaccatggcgtggtgctntcattgctgattcttatgccggaaagttctggactgtcacccttgcttccattatataccagatagtaaagaccctcccctaactctttcttgtgttgaagtgaattgagaaagtattatacatatgcgttacaactcagattttaacttcttggtgctacaataaaacttaagtcgagttctttatattcttaccattaaacttaaattatttcacttattatatatatgtacttttctagatatcttctctctctctttaatttatctctctaagtgtcttcatgaggctgttcatccattattttgcatatggatatttttaaaaatctactactcataatagaggttttatattcagtattaaaaaaaaacacattcacatgccatat

SEQ ID NO: 161102 - DNA, 316 bp, Glycine max
  unsure (1)..(316): unsure at all n locations
acacttgcacagtggccaaagatgcatgggagatcctgataaccactcatgaaggaaccttcaaagtgaagatgtccagattgcaactcttggctacaaaattcgaaaatctgaagatgaaggaggaagagtgtattcatgacttccacatgaacattcttgaaattgccaatgcttgcactgccttgggagaaagaatgacagatgaanagctggtgagaaagatcctcagatccttgcctaagagatttgacatgaaagtcactgcaatagaggaggcccaagacatttgcaacatgagagtggatgaactcat

SEQ ID NO: 161103 - DNA, 420 bp, Glycine max
agcttaaggtttagtcttcatgttgctctccctatctctaacaatctcccccttcttgaattaccatttgagtgcatttggagagtcttgtgagtagagacttttcttagaaaaacttgaaagtttctgaacactaagagaagtatcaattcatatcatcatcatcattaagtagagttatatatgagtgagtgataagtgactgtatgcattgtatgtacgcagtgcactaatgcaatttttctccccctacataatgctaaggcaatacacaatgctaattcaatatttctccctcttttggtatagcaaggccaaaaagtcacacctactcataaaataaatagacaaaaatgtgatgtaaaaagggaaaataccatagcatttcattcatttaaaaacattacatttaatcattat

SEQ ID NO: 161104 - DNA, 317 bp, Glycine max
agattatggattttatgagggagaatgtcttctccagactctctaccctatttctctctgtttttcaagtagcaaatgcttggccacattgtggttgtggtggtgactgtggtgaccttttgttttctgccaatctcaatgttttaaaggctcttagacttcttagcacacgaaggcttgctcagcgaacatgtctcattgagtaagggtgagtgaaatttcactaatcgagctcgggcgcgctcaacgcgaaaagagacaacagtctcatagggcgggctggctggatgctgagtgcgcacatctctaacttatcc

SEQ ID NO: 161105 - DNA, 416 bp, Glycine max
  unsure (1)..(416): unsure at all n locations
agctnttcctgtatatgctctgttatgtgtttccaagcgccagagagaaggagaagagtatatattttaccgtcaacgtgcgagactaatttctcaccccaaaaatattatttcatacatcccaacgggaagactatgcaaaaaaaatttccgaaggtggtgtccaaatttcaatacgatccaatagttgacgagtacatgatcgtagttttactgggacaagttttgggtttttgcaggaaaagagaaagctacgatgcgaaggatatttctctcacctcatacattgtttcaaatattccaatgatgataatgttagggtactctcagcctattatttattttatcttttctttatttctattattctataaacaaaaactttattntatttcctatcaaaatgaatacaaaaa

SEQ ID NO: 161106 - DNA, 450 bp, Glycine max
  unsure (1)..(450): unsure at all n locations
tctcagccaactagtttcctcactagcagtngctagtgatatcatctcaaattccatagtggactaagctaagatagtctgtttctttgacttccaagaaacagccccaccagctatgctaaatatatagctgctggttgctttggaatcatctgaaagagtgttccaatctgcatcgctgtatccttcaagtacagcgggaaaccttttataatgtaatccaaggtttatggttcttttaaggtacctcattaccctttcaatagcgtgccagtgctccatactangtctactggtaaacctgcataataatcccacaacataggctatgtcggatctagtacaatcagtggcatacctatggctgccaatgatacttngtgtactcagttgtcgtataccttcactagtgttcttaaaatagtttacacttggatcatatggtgtact

SEQ ID NO: 161107 - DNA, 410 bp, Glycine max
agctttctagcattttattggtgtatttttatctccttttggggctctaaattgtgggaatgtgcccaaatatgtggggcaattttggtttgttttcttgcttgattgggtcgaattgggggtttgtatgagatggccctaggcctataatgcattttgaagcaatgggatatgccacattgtccccgttctctttctattaatgcctaaatgcgcgcccaccaagtgttcggtgaaatgcctcaatggcattagcgcgtggttttcgtaaggaaacaacccatggggcattttggtttgcacatattttctattttttgggacatgcatttagttccgaaatggctagagtaattggcccacatatatcctatgcctaggaaccaaagtttttatgcaaaagaacacaa

SEQ ID NO: 161108 - DNA, 295 bp, Glycine max
ttaagatgttcctttatcaagtccatccaaacacatctgaattcatttgggttttgggacagtctttcactatatttcattctcaatgatgtctttaaaaaaatccttttgttgagttctaatcccaaaataagtttcaaaaatactggttgtttgattctttccaaagcatgatatgttcatgaaaaatgtgtgaatcatgcaggttttgatgatgaaagcacacatcggtggacaagtggccttaataacttaagagggggggggggggaaattatttttcaaatattatcac

SEQ ID NO: 161109 - DNA, 425 bp, Glycine max
  unsure (1)..(425): unsure at all n locations
agcttattanttatcgaataataaatgtttgacatattngttcacacgcgcaattgcaattattattgaatatcaaattatcaatagtaagtactaagtactaagtacaacgaaattcaataaaatttgatcgattcttttccgttctcccaccaaggaaaatcaccaccatccaaatcttaaattgttactaattatacaagtctaattatcaaattaatagagcaatatcatcctaagcaagaacctgagaaaaaaacgttctatttttctttataaaatttaaagtgttgtgttaatatatatatttaaaatatcaaattatgtttagcaccattaaacaaaacgtgtttgatcaattcattttaatgtgtgtatagctagcacatgaggaaaacagatacgactagattatgattgtttta

SEQ ID NO: 161110 - DNA, 323 bp, Glycine max
  unsure (1)..(323): unsure at all n locations
gagttatgccattgataccttggaagacccttttcttttaacttatcgttgtagccggagtggccaagaccttttaaatcccacattcgaatcattcgacggactctagtctcataccttacacatgattggctgaatcctaacatttttctctcatgatgaaagtgaaatgatatgtgtgaatccaaattatgttattacatgaaacatacatacctgtnactaaaccatagtgtactaaaactaatctgtttcttgttctactcacattggattgcgcaggagatctttaatagtgggtcacgcgataatgacattcagag

SEQ ID NO: 161111 - DNA, 161 bp, Glycine max
  unsure (1)..(161): unsure at all n locations
agccaagggttgttaatcacctggattacccctagtatgcactatatcagcanatatgggttctaacaagccctaacagggggtaaactcagcttactcaacgattccaagagtgaaatttggagacccctatatctgaaagtgccaaaaattaacaaaat

SEQ ID NO: 161112 - DNA, 424 bp, Glycine max
  unsure (1)..(424): unsure at all n locations
tcanagcagcatgtaaatctttcaagtgaccccatnttggttcacgcagctgacctaagaaaacaaggttcatcgtgtgtcatcaatcatgtcaactgctataccctatatgaatcccattagctaccatctaaacaacagtcttattgttattcttctacataccatactcatcaattgaagcaacataatcataacttgtaatttgcaagggtccccctgcagtgcgtccaaaatttgttttgccaaaatactgtaacatgataaggcttgtcaagatctgggttacagatacttaaagactaaaatatacatcagataaaccttgtataatacattcatcctanataattctaaaatatataaataaaagtggcatcagaagatatcacctcactgacttttagtttatttttattgaata

SEQ ID NO: 161113 - DNA, 422 bp, Glycine max
agcttcttgcgtagcctctcttggagcttatattattccattaacaaatccctcttattactagctattttgaattctttagttcctgaatgtacaaccttcaaattgttgctcattcccctctttgttttttgcaaaaaataaaataaaaaaaagtaccttagcaaaagataatttatattataattaagggtcagtactagatgtattgaagtgtacaacatatagcataggcagtgagaaacattgcccaaataagactgaatacaatgacaggatatgtcagccccccctaataaaattcctacctcaaattagacaaccagtgattaaagtgggtattaaaattcttctccatacaccttagccaagaccaagtatggaataatgtctcgtccatgactttttcgggaatgaagagt

SEQ ID NO: 161114 - DNA, 466 bp, Glycine max
tcattaagaggcctcctccagaagcttcattaagagtcttcttcacactctagacatcttctcaaggatcccaacagtcagatcatgtaaaattgtcttgcgaagttgcacaccaaatttcgagaagatccaacggttcacgaatgctgggaagcgtttctatggacgcagcttcatgtaactttctctagaagcttcattaagaggcttcctccataagcttcctcgtggcttctatgagaagctttctcaagaggcttctttgagaatctagatccttatttatccacacccctctattaactaaattaacttccttaaaaataattacggatgataataacacaacaaataatcaaacatcgaacataattactaataatatatagatatatatatcagggtgttacaaaagccaccagaactaatgattctaaagttgttgaggattctgtgagatctaaca

SEQ ID NO: 161115 - DNA, 420 bp, Glycine max
  unsure (1)..(420): unsure at all n locations
agctttccaaagctgaacaccgttttttcttttattttcaacatcagaagtagccaagctatcagaacactgagtctcctcacaccgaatgccgaagtattctgaaaccatcaagtggtcttcattcacaatctttggatctgggaactcgatttngtctaaatcccgggccagtgactttgacgtatctgagtcctgcacggtaccatttgtggccaccttgtttggcattgcagaaattgccctaacatcatgtgaaacaccagtgtaagaaagccacaactgaacaaaacctgaaagagaatggaatagatcctttgaagaaagagaaaactctctctcaagtttcccattctggagcaatacattatacaacgggaccaaaacaaaaccaaaccacttggtcttcaagtagttctt

SEQ ID NO: 161116 - DNA, 442 bp, Glycine max
  unsure (1)..(442): unsure at all n locations
tgttgtntgcttaatgcataattttgatatagntgccatcgagtattttaaaatgtggagtaactgtggttttagattgtgaagcaactgtgggcttacataaggaagaacaatctccaagatcccagcaacaaaaggaaaataatttgcaatgatgaactgcgtgtggtgtttgagacggattgtactgatatgttcaagatgaataagttgctatctaagcacattatcccccttgaaccaaccagtaggtatctaggttatgcttatttttatgacattgtggtttattgtgttgtttaaattcttctttcttgtgcactttcagaaaagcctgttccaaagaaacagaaagtagatgtggagtcaggaacaagaagtgctgaacctactccttctgtaataatatctgatgcacttgctaactntttcggcattactg

SEQ ID NO: 161117 - DNA, 428 bp, Glycine max
  unsure (1)..(428): unsure at all n locations
agcttatgctgcanacatctacaatagaccttctcattctcagcagcaaaatcagccacaacagaataactatgacctctccagcaacaagtacaatcccggatggaggaatcatcccaaccttatttggtcgaatccttcacaacaacagcaacaacaacaaccttactttcaaaatgctgttggcccaagcagaccatacgttcctccaccaatctagcaacaacagcaacaacagaaacaacaaacagttaaggcccctccgcaaccttcgcttgaagaacttgtgaggcaaatgactatgcaaaacatgcagtttcagcaagatatcaaagcctccattcagagcttaactaatcagatgggacagttggctacacagttaaatcaacaacagtcccagaattctgatagattaccttctcaat

SEQ ID NO: 161118 - DNA, 420 bp, Glycine max
taatgactatagactaaaagaacagacttggacatgggagtgaatagtcggatgcgctttggaagcacatattccagcactgatctatatcaacttcgggtcttagcccacttgggttcctgtgacgactgcccaatgtggtcctcaagttcatctccctagttgttcacaaacttggttatgcgacgcttgcagccaatggattgagcaatcatctcaatagtcaactttactaatatccctataacttttccaacaaagtggcctgcattgtcttcgctgctatacaccttggggtcttcacggaagagaatgatgacacacaacatgatgtgggctttgatgatgtatccaacgttttccgagtagtcgatatcagagtagagttcgatatgaactcgtggatcctatctctcattg

SEQ ID NO: 161119 - DNA, 406 bp, Glycine max
  unsure (1)..(406): unsure at all n locations
agcttgctgntattgacagcttctcttttttataccannatgttaatgttgctgatgattatgtatctgttatgtcactaacatgcaaatcaagntatataaacacttttagactttcatagacatatagagaaaattccttagtatctatgactggacagttgaatgtctaatgatgtcaattatacttgnnnnactaacaggataaggtgaagaattctggtcgctatgcggttcatgctctcagtgaagttgcttcagacttacctccagattatcttgagcgtcatggacttaaatctgcttctaaatcttgggcttatggttatactgcttcaggatatggatttattcaagacatgccttatgcttacattcatgaattcaccagaacttccatggcttg

SEQ ID NO: 161120 - DNA, 442 bp, Glycine max
  unsure (1)..(442): unsure at all n locations
taggggattggtctgcattatcttataacatttagcttgtttggtagtatgcattgacatatgttaaatgcctgtttacgaaacacaaaaaatcaattcctccctctgtgacacatttatgtaaaatcaatttctcctaccgtgacacaatgaattctcaattccaacataccaaacatacccttaacttgatttcttgctattcatgaagaatttccagtttttttttcctagaattaagatttgaaccttgggcttttgggattttgtttgtttatgtgagctttcgcatatgctgcttcaatagttagacaaagcacggtatgtgtttcctgcttaagagcacacttatcaactagcttgatntgccatatttacacacaagtgtcaggaacggttgctagtatgtatgttaatatacattattggacaatgtatgctc

SEQ ID NO: 161121 - DNA, 417 bp, Glycine max
  unsure (1)..(417): unsure at all n locations
agctnggactcaaagagaaacttagaatggctctatagtagagnaaaaaaaactgaaaaaaaaagactcaacaaaactctagctttggcacttgtcttcacactaattttgaattgaaatttccaattatagaataaattttgagccaaaacaacaagcacacttccctttcacccgtttttttttttggatactgattttcctgccaacttgtgtgatttttcttattttttccttttatccaaatcacttgtttctttttttataacttttttccagatgtctaaaaaattcagtaaaaatttcatctcaaaattcgaagtaaccaattcgaagtaattnttacacgtttgtatgtccaagctgccagcaccagcgatttgtttctttaacatggtatattgattgccttgggct

SEQ ID NO: 161122 - DNA, 390 bp, Glycine max
  unsure (1)..(390): unsure at all n locations
ttgacctttgagcaccgacgactatttcatctccctattagcaacaatgtatctagggttntctttgagccaggacaatgtgggttctgtggggttcgagcgacgacaatatgggtttttcggcagtgtanggagttctgtgggttccagcgaggacaatgtgggttttccggcagtgtaaggggttctgtgagttcgaccaatgacaatgtgggtgtcgacagagtggttttcggcagatttcaggcgggaggagaaagagaacagtgatttcatgcacgaggatgacaaagagaataggtatggtaagggtttcgagcgcgcgtggcttctgaatctctatttttttaactataaagacacaacatccgattttatgattaccatgtt

SEQ ID NO: 161123 - DNA, 421 bp, Glycine max
agcttctttgagaaaactttcttgatattcttgagcttagctacacatacccctctcataactaagctcacgtacttgagaagcttccttaagaagattcctaaagaagctaaagcttagctacacacacctctctaatagctaagttcacctccttgagatgagaagctagagcttagctacacaccccctataatagctaagctcacccccatgacaaaaaaacatgaaaatacaaaaaaaaaaagtccttactacaaagactactcaaaatgccccgaaatacaaggctaaaaccctatactaccagaatggccaaaatacaaggcccaaacgaaggaaaaacctattctaatatttacaaagaatccaaccttgacccatgggctcaaaaatctaccctaaggttcatgagaaccct

SEQ ID NO: 161124 - DNA, 414 bp, Glycine max
  unsure (1)..(414): unsure at all n locations
agctatgaacaatatacttgctcttcatttaactggctttgggcttggcggccacgctcaacaaagtactttcgacacctactgtacgttgattngaccaatgctgttatgggaatgttgcgacaatccttcaaaaccttattgatacattctgagaggttggttgtcatgtggccatatcgacgtccttctctatcataagccatcgtccatttttcctttgaaatgcgatcaatccatgttgctatggctagactcagttcacgaattttttctaaattttgataaaaaaatgtgcttgcaaggagtgtacgctgcataaaattagttatgaataacaattttaagtatatatgagaagtaaataaacgtgaccaccaaatatgaaatcttacccaatttcttcaacatttc

SEQ ID NO: 161125 - DNA, 461 bp, Glycine max
  unsure (1)..(461): unsure at all n locations
ntaaanattgctaactaaataaactgaaatataaaacttaaattaataacataaattgaacataaataaagatcctgtcatggctcctcctgtgctggtgcaggctcgtcctgacgtgaggagggagcatcctgngctggctgagatgtctcctaagctgttgtgggccaggggtcccaggtgctctgtgctgctgccatgtcagttgcataatctgtgtctgtagcgccatcctcctcatcagcgacctccacaagtggtgtagtaaccggtgaagttcgtggagtggcctctagtgtgacctctggagtaacctccaactgtggctgaggctcatgggttgtagaagcctcaccttcccccaaaggagaaggctggactcctagccaagccacctgggatgtaaactcttccatactgatgatgggtcgatgctgagccangttatgaacactctacat

SEQ ID NO: 161126 - DNA, 407 bp, Glycine max
  unsure (1)..(407): unsure at all n locations
agctngccttaaagagatctatgaaggattttctgctgaaagaaccaattccgctcccgaatatgacagccaccgttttaggagtgctgagaactatcagcgcttcgaggccatcaagggatgatcatttctctgggagcgacgcgtccagctcagggacgacgagtataccgacttacaggaggagatagttctccggcggtgggcatcactggttacccccatggccaagttcgacccaaacatagtcctcgaattttatgctaatgcttggcctacagaggagggcgtgtgagatatgcgatcctgggtgaggggtcagtggatcccgttcgatgcggatgctctcatccatgtcctgagataccctttagtgctggaagacggccattaatgctagtatggtc

SEQ ID NO: 161127 - DNA, 404 bp, Glycine max
  unsure (1)..(404): unsure at all n locations
tgtagtgagcttcnaacaaggaaagggaaacatggctcaaaagggctataaaaggaattaagtcaaggtaagtccatttggctagaagcttataagaacaaaattgcctcaatcatttccaaatatgcatgtgaattangaagcatcaacaagaatcaagccaaggctattgtgcaagcaatcaatggggcaaaacacaccaaatgattatgatgatggatggctcaaattctcacaaaggtaaactcatcactttcaaattgagctttcaaaactatcatgacatgtagaggagaatcaaagatttcaagtcacaaaatgtcaaanacttttattntcaaaacaattacccatttcttgaacatatcctataattcanagaanaacatgcaaagtcgtacatg

SEQ ID NO: 161128 - DNA, 397 bp, Glycine max
agcttcaaccaaggggagatgaaccatttatgtgcttgacagaatcaatgacaatgcttacaaagttgagctgcccggggagtataatgttagttccaccttcaatgtctctaatttacctctatctgatgcagatggagaatccgatttgaggacaaatccttctcaagagggagagaatgatgaggacatgaccaagagcaagggcaaggatccacttgaaggacttggaggacctatgacaagggctatagcaaggaaagccaatgaagctcttcaacaagtgttgtccatactatttgaatacaagcccaagtttcaaagataaaagtccaaggttgtgagttgtatcatggcctatatggaggaggactaaatgacaccactttatttcaat

SEQ ID NO: 161129 - DNA, 439 bp, Glycine max
tactgtcgctatccatgttgttcagtactcgctcatcactgtgctaagctatgatcccacagatctattaacagcttccgtttgcccatctggatgtgggtgacaagtggttgaaaataacaatatcatgcccaacttgcttcataaagtcctacatatatggcttacgaacttagagtccctatcactgacaatgcttcttggtaaccatggagtctcaccgtgtgcttggataacaaatcacccacatgggaagcatcatcaactttgttacatggaatgaaatgagccattttagaaaacctatcaactaccacagaaatggaatctctaccattgcttgtttttggcagccgcagacaaaatccatgcgtcaatcaatctaatgatacttcggaatcggcactggagtatacaatccatgatgctataccttaga

SEQ ID NO: 161130 - DNA, 408 bp, Glycine max
agcgttgatcgaaccctatctactaccatcaaagccatttccggctaccactgtaagcttcttagaaatttactccgattaaagctttcttttggtcaaccgcaataagacttcaccatgtaaacccaatttgaacctcagatcaagcttcttctcttttttttgtgcctgagaagctactccttcacttgcggttcttcttcttcaatttgattcgattcacactacattacctttatttattttttaattcttaaataagtgtaaggacgcattttgtcgttacgtctttgttattgtgttaaattaagagatattcatctttttgagttgtggctgaattttgtggttgagtgagggagagaatgtcttgtggcacgcacaagagttcgagaaaagcacttggag

SEQ ID NO: 161131 - DNA, 437 bp, Glycine max
  unsure (1)..(437): unsure at all n locations
ttctatactttgatagatatcctgctgccagaaatggaaataggaactttaatgttttgatgatgaaatggagagaattatgattgttctgttttttccattgcacaataaaccaatcaccatgcaactttntattgtgatttattttcgtaattgtatgacccccatttccataattattggaaatattatcagcaataatcataacatttaattttgttgtggaactgtctcccacttgccctagtggcgaattaggcactttcgtatcactctcatttgtttccatgtattttttttttaaattttgcattcccttaataaatgaccatattatatgaagaccattatattcaaccttataccaaaaatcttttagccataccttccccacaaccggcttcgttaaatcgatttaacacatactcttgcgaacg

SEQ ID NO: 161132 - DNA, 426 bp, Glycine max
tgctttctaacttatacatttagcttagtaatcatatttattatatatttatcattaattgacaatataaaaactattatgattctgctatacataataattttaattgcttacatgtatctttttttttattgtggcttttaataaatgatttgtatggcaaaataataatcttatgtttagaaaagaattaattgttatacaatttatgtatgttcactaatctaaataagaaaaagaaaaattttcactttttcatttatttctatccatttaaacaacacatcttttctattatgttttttatcttttcattttattcttaccattctggtttacttctaatttgataatatatgttctcaacttgatttgttagagggttaacgaagatgtgaagccgttccaacttccttgtcacattca

SEQ ID NO: 161133 - DNA, 447 bp, Glycine max
tgtatatttcaattgaataaataacaaacttaccatgctcttgatggatgtgaaagttaacatgaaatgcgaacaaaaaaaaaggtgacaaatataaggaataatgaatgaaagtagagatatggtgataattaagttaataacttatatataacatgagatttcattgaaaattcaaaagtatttttagatatcaaaatgaaaataagtgattaagttaaaggataaaaagctggttaaattcataaactaaaataaaagtaagtaattcagtttagagatcaaacatggaagttgtttgttgcttcattatcatccaaatgtgcataaaacgtgttacaaataaaaatgtaacaatagcacactaaacttcattatgtgactatttgacacatttaagagattgaaatacattatattgatgaacatactattctactgacttta

SEQ ID NO: 161134 - DNA, 417 bp, Glycine max
ttgcagctattatatatttgagtgccagtatgttgtttcttattctgtatgtccatcacaatgtcaccctttgttgaatacgggaacatcattcctgtataagctatcttttttcattttatctacaagacgaccatgtgcaacggcctcattattttgtctttcatctgagttattgtaaaatcaagaaataataaattagtcacttaaatctatattttgctctttttgccccagtcagccttgtcaatatcgccctattcaaaaagtctaaaatgaattgttgctctgatgatggtctaatagggatttaaataaatatgattatgtcaataaaagagacctttatcattacattttatgaaaaatgcgcccatatatcagaagtatccgatcggaatcatgtctatgctgtat

SEQ ID NO: 161135 - DNA, 448 bp, Glycine max
  unsure (1)..(448): unsure at all n locations
aaaactaagcttgtagccacgtgccaagtgctccactccctactgttgtgtggtgaacgcttatgtggagtggtcggggaagccaacctantcatatcatggtaccctaccgcaaacaagggctctgtgaatgcccttgtacagaggtggcaccaggagatgtcatccttccacctgctcttttgagtgatgaccattactctggataatgtgtcttgtctcctgcatcttcttgcgatgggttaacctattgatcatgtcccctccaccttcgatagagacgtggtgagcattttgcttattactcaccttggtattccgacagaggaagaggctatggtgatgaccactatatgtggcaggatgaggtccatgtggttggcaaagctatatcatcgatatgtcgagttacggtcacgcgtgtggacaatacatatcttctgcactg

SEQ ID NO: 161136 - DNA, 412 bp, Glycine max
agcttgaatgctctattcaatggagttgtctagaatatcttcagactgatcaacacatgtacagtggccaatgatgcttgggagatcctaaaaatcactcatgaaggaacctccaaagtgaagatgtccagattgcaactattggccacaaaattcgaaaatctgaagatgaaggaggaagaatacattcatgacttccacatgaacattcttgaaattgccaatgcttgcactgccttgggagagaagatgacagatgaaaagctggtgagaaagatcctcatatccttgcctaagagatttgacatgaaagtcactgcaatagaggaggcccaagacatttgcaacatgagagtggatgaactcattggttcccttcaaacctttgagctatgactctcagatagggctg

SEQ ID NO: 161137 - DNA, 468 bp, Glycine max
ttgtcctcaatccctcttgttggactagacttagacttatcagcattattgtaacaacataattaaaaccaaaacttaatccgcagatccctcatttaagactaagtttcaatcctgcttcaatcaatttttaaggcaacaatacatttccaaatgctaaagtcacctaactatgcacacaaatgggtgatcagaccaagagcatacataatttaagcactaaaagaagcattgaacacaataaacacaatcaattagatattaaagtaattacatcagttgttctttagaaatccccaacaagggtgtttcgccagccattacagaaaaaccctaacaataatgagattaagagtagagaataattgctccttacacaagaaggggggtccctcctactcttctcagagtctcacaatcactctgcaactcactaatctctctctaattactaaacctaagtctctc

SEQ ID NO: 161138 - DNA, 424 bp, Glycine max
  unsure (1)..(424): unsure at all n locations
agctntacanagcangcaactcaaccattttaatttttcttggcaatataataatcgcgctagccctagcagcgtccaccatgtcaatattatggaaccctacttggtcaaaccgagctttcacctgggccccccacttggccaacatggtcacaaactcctgctgtcgatccaccatgatgtccccatggaacccaataacaaggcacttcctcaacttcttcacattatcaaggtgcggtcccttcaccatagggttgcaatacctatggtcacggtctgtctccttatgcaaagtcatataccacatcaagtccaacactggctaaggcaacgcttcgtctgtggcatatctaagctctgatcccgtcctcttttcacctccatacatgggtgggttcatcattaatacacgaatccttaa

SEQ ID NO: 161139 - DNA, 470 bp, Glycine max
  unsure (1)..(470): unsure at all n locations
ttagtggcgggttagcatcttcttatagagtaagttttgtaatttatttntgcagcaaccatgtgaatgctaacagtggcgaatccacacttacttacttgaggagtacacatgcatttttacttttaaaaaataacacataaatatcttaaatgtgtataatttaattatctccctaattttacatatttaaacctcctatccctaattttcttctcctttcataatgataattattaatttatatcttttaaataaattatgcccgacttaagtacctaaatctgccactggatgctaatttcatcgtcaacttttttttttcctttgcttctatatttgtattggccaaatcgacactacttacggttggttgccgagaaactgatacctataaattattaataactttaaccaaatncccaacgctaatgttaaaagtgcatcttgcattgatttttgttataagt

SEQ ID NO: 161140 - DNA, 429 bp, Glycine max
  unsure (1)..(429): unsure at all n locations
agcttgttgtggtcccaaaagacacatatatgactgttatttggatcttgntngccaagccattccatgcataagtgtcttccttctgattctttcttctcaatggctaaagggttgaatggtcccagtgcccaaatcttcttgccaccactgatgcgctccatcgactcaatgtaagaaccttcaattgccctgcttgtgttgtagatgtatccatcactaaatttgtcgaaatctctctgtgcaataatgaaatccatgaattggggtgtgaagcatccttccatggaaggaatttctggtacatgcaaaccttcaaccgagggccttcccattttatcccaaagatacacgaaggtggtaaaggcacacgtgatttgaaaagtgtaattctcaacattcggcatgtttgtggcatcttgtgccacc

SEQ ID NO: 161141 - DNA, 442 bp, Glycine max
  unsure (1)..(442): unsure at all n locations
tggagaggatgcttcaatggaggaaaagaaagagggatataatgagagaggagggagcacgaaattgaaggaagaaaaaaaggagagaagttgaactttgagttttgtcttacaagagtctcattcatcaaagttacaacaagtgttacacatgcttttatttatagactaggtagcttccttgagaagctntcttgagaaaatttccttgagaaacttctttgagaaaacttccttgagaagctagagcttagctacacatacccctctcataactaagctcacctccttgagaaacttccttaagaagattcctaaagaagctagagcttagctacacacacctctctaatagctaagctcaccttcttgatatgaaanactagagtntagctacacaccccctataatagttaagctcacccccattgacaaatacatg

SEQ ID NO: 161142 - DNA, 440 bp, Glycine max
ggatccttaagtcacctgcggcatgcaagcttctttccaagctcatttggtgtgtgaactcttctccatggcttattccatactggatggcgcctcgtctcacctcttctcctttgtctttcgctgcatctccatggtggaaaatcaccattaaaggacctcattgaggttcaaagatccagcctccatagaagccccacaagcaagcttccatcaagtggtatcagagcacaagagcttcaagtaggtgctccttaaacctccattaatttgttgctttaccttctcttccattgttgtttcttcatttttctccatgtatctcttcacatgtctttctctaaatgtttttaacatgattatttatagttcccaccgattaaacttgctatagaagctagaattgattttctatggttcacatttcttgttcttgttct

SEQ ID NO: 161143 - DNA, 447 bp, Glycine max
  unsure (1)..(447): unsure at all n locations
tgttctatcaacatcaagctggctgggtggaaaaaatgacttccttggagttgcccaatttattgttggtgccttctgtatattaatctccatcatcttcctgttgcttcatgtgaaaaatcctacgtaatacggtgtcctaatctacccttttgagattgattctccaatacattttttgaattggtttcgtttacattttatgcttcctttttgggacagaccttatggggacacggcctacttatcttggaataggaaaaacattgctagctgaataggtacgtggtacaatggtaatacttttcttaagcgacacacaggatacacattctngttattaaaactgatgtatttaattgtaaaagatgaagcanggtaaacaattcctttggctttaactatcatggaaatgagccattangagtgggatagttgagtttgggt

SEQ ID NO: 161144 - DNA, 410 bp, Glycine max
agcctttgttccatttgtataaaaagagatgttctgaaactcatcacgttgtctaaaaaggtcttgaggtggatctaagtgctctgatcattcattagcataacatattcatgatttggtggcatgctcaccactgtttgtttctttatgaaactcatcataactaaaaatgcgcaaaggcacccctataacacctgatccaaaagtaagatgggtaacgaagagggagtgcatgaacagatgaaggccgacatgtcggctttaaaagatcagatggcttctatgacggaagccatgctaaaaattcaaaaatcaatagaagacaatgctacgacggccgcttccaacacaactagggaagcgaaaccggtgctataacccgcaatgaactcgggccgggacagaagcac

SEQ ID NO: 161145 - DNA, 410 bp, Glycine max
tcaggttgataggggaatcagtaatgccctatgcagtgaatcaaatgataaggaagaagatattgagagaacactgagtgtcataattgataaatgcaaacacatttatgcagataaaagaaataaagcaattgggaagaaatccatttctttccttatgaagaagatatttgtttgtagaagtagaaactgtccaacacctagcctaagagatacccttcaagagtcaagaatggagaaagtacccttttgtttttctgataacctttcattttcctaactagctggacaaaatattgtatggtatgagatcaccacatgttcatgattcaagttaatctccatgtgacaagtagttgaagttttcaagttatgagagagttaataaaacttcgtcatgtatcacatac

SEQ ID NO: 161146 - DNA, 384 bp, Glycine max
ggatgactgagcggcgggtaatgaaaaaggctgatattggttgaataatgacactgttgagttgctatgaaatttggacatgtagaaacgacagtcacaacatgggttccttcctccttatcatcctctctatttgccctaggcttcttatttgtcaaagcaggatgatcaaatttgcctcttttctgacccacttcgatccttttgccaacgaaaactaaacctacaaagcttgaaggtgtgtaacccactaccttctcatagtagaacactggtaaggtgtctactatcattgttatcttctctttctccatcattgagggcaccacttgagctgccaaatcccttcaccttttggcgtatcctatgaaggatttgtgctct

SEQ ID NO: 161147 - DNA, 465 bp, Glycine max
  unsure (1)..(465): unsure at all n locations
tggagagaatgcttcaatggagganaagaattatagatagaaagagagaggggcgagcacgaaattgaaggaggaaaagggggagagaagttgaactntgagtagtgtttcacaagactctcattcatcaaagttaccacaagtgttacacatgcttctatttatagccaaggtagcttccttgagaaacttccttgagaagcttccttgaaaaacttccttgataaacttccttgagaaactttcttgagaagcttccttgagaagctaaaacttagctacacacacccctctaataactaagctcacttccttgagaaacttccttgagaagaatcctagagaagctaaatcttagctacacacacctctctaatagctaagctcacctncttgagatgagaagctaaagcttagctacacacccatattattgctaagctcaccccctgccaaaatacatga

SEQ ID NO: 161148 - DNA, 416 bp, Glycine max
  unsure (1)..(416): unsure at all n locations
cctgcccgcatgcaagctngcactctatatctacttgtggtatctcttttctaacgnaagaatataaaagcgaggatgccacttcggctctttttaacactatatttagttgcttttaatttcttattgttaactaaggaaggttattatatttgcgtgtaagtcttgtttgaagagtgtgtagaaaggttattagaatttgcgtgactcttgcttcaagagtgttacaagaatctagtttgagcgacctttatgtccaaaatttcatcttacttgtttctaacttcccaacttggaacatcttcttcaataaaagtgaagcacaattggatgatataaatgtttgcttaatgcaggggacgggatatgtatataatactgtgctgccgccttatgtattaagccatgaaaatgac

SEQ ID NO: 161149 - DNA, 426 bp, Glycine max
  unsure (1)..(426): unsure at all n locations
tctcacagcttgcataagtagttatttgttccttccttccttctagaacttgctatatcacactatatttttggcaaggtttccactccatatctagtcatggatatagagtcaacaacccaagcaaacaagggtggatttttatctcatttggggaactgcctccaggatttgccttggaacttcaagtccaaggttatcaacatcacaaggagcataacaaagattggaaaagatgaccccagacgagtaattcactcattaaaagtggcagttgctctcacatcggtgtcattggtttactactcgaggcctctntatgatggcttcngagttgccggaatgtgggctgttctgacagtggtggtagtgtttgaattcagtgtaggtaagtttcagacatcgtatacatattgctccttatta

SEQ ID NO: 161150 - DNA, 389 bp, Glycine max
caacctgtaattcaaaatgcatatgtattttatggttgccttaagattccacactcctctgatgtgcctcacctcaactcttaacattattatctgcttaccttgatatatcatggctactatatgtatctcacgtgaaacatattactattattaataattggcgctcatgattttataatttaaagatcggttgagacggatcatcgttgctcggcgaatgttaataatccatcgaaatgtgatgggttcttcatatgattttattaaactaaatatgtttcatatcatgtcttttgtcttccccttgctcgacaatacgagattgacctaactctctcagggaaaaaatatatctacccgcgacaatcgatctgatgccccacatc

SEQ ID NO: 161151 - DNA, 458 bp, Glycine max
  unsure (1)..(458): unsure at all n locations
ngtgggtatgtgttcatcactacaagatntcttcatttgggtttctctccgattgaaaaaaattggtcgctttacactaaatttgtttgctttcacttcttaccaatctgatgcattcttggattttttttttttttttgctatttcaagtttgcttctcctaatgtgtatgagtggtttcagaattcacggtaaaggaatgtgtaataagtttttatgaagaaaattttttctttttttgggtaataagtcagagatgcttttcaagcttttgctacattgctcgatcagattttgttctgggtaagttaatcttttcatttttctaaggattattatatatttgtatattacaatcttactgactttaacatggggaagtcttccttttcttgtggtaagtccaacaacatacgtgttcctttcatactgcaattttatgacttcctatcatacat

SEQ ID NO: 161152 - DNA, 414 bp, Glycine max
  unsure (1)..(414): unsure at all n locations
catgcaagcttnctcgtggctattttgaataactttctttagaagcttctttgagaagctaacgctttaactattaacacccttttaataactaaactcacctccttaaaaataattacggataaaaataacacaacaaatataatcaaacatcaaacataattactaataatatgtagatatatatatcagggtgttacacgccatatgatgtgtaaagtaagggaaatctcttgttcttgtttattctgaagttaatttaacttttatacctaaagatacttgatggatagattctggtgctactactcacataagtgtaaccatgcacggttgcctgtggatccgattgccaagtgatgatgaaaaaatcataattgttggcgatgacaaaaaagttgcggtggaagctat

SEQ ID NO: 161153 - DNA, 424 bp, Glycine max
tccaagaatcaagatccagattcaagactttatattcttgaatcaagaagctttgtgtaatcgattacattgattcggtaatcgattaccactgattgtttctggacaaatcataagatgtaactcttcaaataagttttgactttttcaaattggttttaaggttttcaaaaagtcataactcttctaatggttctcgtgaccagacatgaagagtctataaaagcaaggctttgtattgcattttcaaatcaatccaatctatgaatctacacatctgtcttttcaattcattctttacacaagccatttttcccattgatttctgagtcttcttgaacttcttcttcttcctttgccaaagctttccaaattttctggtttctaaaccttgaaactcgtgctatcattcttttatctctct

SEQ ID NO: 161154 - DNA, 403 bp, Glycine max
atgatctattcttgatttaagttttgtagcacccaatttgggcaatattggatgaacgccataatgatttccataatttgcactattatgcagaattttgctgttgaaatgtgcagcagaattctgtgctcttgcagaaaatgcttatgcattgctggttgcggaaagggttgtacatattgggttatggaagttttctagaacatcccaacggccaaactgtagatatatgtattatggacctccactaaaaattctgagttgatccatccgattacgaatcgaaacaaatagaatgctactggggtatttgagtgaggaaaactgtggtattggaatgtgtcttgagaagagttttctgcctatgccctgtcttcttggatttggatagaacatgatgttt

SEQ ID NO: 161155 - DNA, 475 bp, Glycine max
  unsure (1)..(475): unsure at all n locations
tcagaagacaagaaaaaaagagcttgtctaaagcttttttattgcaaatgcaagaatctgatggatccacagatgatgaaatgaccctcatcatgtctaaaaagtgcaaacaaatgataaagaagaaaggaaagttccaacactcctctagaaaaaaatattcaagattaaaaaagacaaaccaggatgaaagcaatgaggtaatctactttaagtgtaggaagcctgtaactatgaagatcgaatgtccctatttgaaatagagaatatactctgggaatatgaaaaaaataagtctgatggtcatctggatgactggaacaatgagaagagtagcaattcagatgattagattgaggcaaataaacttgttcagaaattggtacttttcttgtgcttcatcagatgatgaagaggataagccctatgatgtnnttctaaaaactatcatatgatttccttaagtgcaaaagtt

SEQ ID NO: 161156 - DNA, 422 bp, Glycine max
  unsure (1)..(422): unsure at all n locations
agctngaaggtgtgtgtagcccaccatcttttcatagtataacactggtnatgtgtctactatcacagttatcatctcccttttcgtcattgggagtgccacctgggctgccaggtctctaaacctttgggcgtattctttgaaaaattcatgcccctttttgcacatgttctgtagttgcatcctatccggagccatatcagaattgtactgacactgcctaacgaaggcaaccattatgtccttcccaaaatggactcgggaaggttccaagttagcgtaccaggtaacagctaccccagctagggcaaggttccaagactttcttggaagaaatgtatcaacagtcctcatcttttgcgtatgcccncatctttcgacaacacatctttagatggttcttggagcatgtagtccccttg

SEQ ID NO: 161157 - DNA, 444 bp, Glycine max
  unsure (1)..(444): unsure at all n locations
tgcttgtggagcttctatggaggctggatctttgagcttcaatgttgtcctttaatggngattttccaccatggagatgcagcggaagacaaaggagaagaggtgagaggatgcgccatccactatggaataagccatggaagaaggagcttcaccaccaagatgaaccttggataagaagcttggaaggatgcttcaatggaggaaaagaaagagagaggggggagcacgaaattgaaggactaaaagagggagagaagtggaactttgaagtatgtctcacaagactctcattcatcaaagttacaacaagtgttacacatgcttctatttatagactatagtagcttcttgagaactttcttgagaaacattcttgagagcttctttaaaaaacttcttgagagctagacttactaccacaccctctatactagctacctc

SEQ ID NO: 161158 - DNA, 423 bp, Glycine max
tgagccaattcctgactcaccatatacctttacctttgtgagaatgtcaatccttaccctcggaagcgaaaagaatataaggaaggtttccaatcaaagagaaagcaaaaaagataagaatgaaaattcccaatcaaagagtgggagaaagcaaaaagaaaagaaagaaaattcccaatcaaagaatgggagaaagtaaaaaaggaagaagaagaaggaaagaaagctcctgatcagggatcaaaagaaaacagaagaaatgtgcagaaaggtctttggaccggacaatatctgaacaatacagaattgtcaccaaatgaacaaaaagaaggaaaggaaaccacgacctaaaatggtcttctccctttgattaccaaccaaaatcccatgcgctagcgacttttttcgccccgcactaaacaa

SEQ ID NO: 161159 - DNA, 272 bp, Glycine max
  unsure (1)..(272): unsure at all n locations
ttcttttatttgttaccacagagtggtacctggagatatgttccgggggtcaagagaccttggggacgtcaagtggggtgctattgcccaaaaacaaacttgaccaatcccgacccacacccggcatattcagtcaatgagaacctgtgatgtaccttaacatgcgagctcctggcagtccacagattaaagaacaaagaccacaaagctaggaggcttgtgtggtggctggccanctgtgaactttgagtgttatatgggatatggtctct

SEQ ID NO: 161160 - DNA, 404 bp, Glycine max
  unsure (1)..(404): unsure at all n locations
gcttgcaacgaanactcngctcgcgagatatggaatagctgctaacatcttctgtcgnnnctgagatgcagaagaaactactgcccacttatnttattggtgtaccactatgagaaaagtgtggaaagatattctggtgtggatcgatctttatcatgaatcaacatacctgtgatagagaaatcatttgattactccgctacggatctgacaaagggtggaaggcggctttactaaagttagcagtaactgaaaccatctaccgtttatggaactatacgaatgaacattgctttgggaaaccataagatatagatactatacgaaataacattataaatatgatcacatacggcgttgcaatagtaataagatgagagctcgcattgccgagctgatcgtat

SEQ ID NO: 161161 - DNA, 427 bp, Glycine max
  unsure (1)..(427): unsure at all n locations
agcttcatgatgaatcaagagtgattcatatatgttttgatgattacaaagataatgacaaaggtgatgacaaaaagctcaaaggtcaatgaaagaatgagttcaagatgttcaagatagaatcaagaacacttcaagattcaagaggaaagttgaagaacacttcaagactcanaaggaaaagttgaagaacacttcaagattcaagaggaaagttgaattcaagaatcaagaatcaagattcaaggatcaagcttcaagatcaagatttaagattcaagattcaagaatcaagagaagacttaatcaagataagtatgaaaaggttttttcaaaaactgagtagcacatggttttttctcacaacatgtttaccaaagagtctttactctctggtaatcgattaccaaattggtggtatcgatac

SEQ ID NO: 161162 - DNA, 352 bp, Glycine max
  unsure (1)..(352): unsure at all n locations
tgtgggtggaggacgcatgaacganaacacaattcattgngtctttaanaagggttgaggatggagaattgcactaagcaatcactacgcatggctccaagctcctgggtggaggacgcatgaacganaacgcaactcatggggctccgaaataagattgagaatggagaattgcactaagcacattacggcgcatggctccaaactcatgggtggaggacgcatgaacgaaaacgccattcatggggctccgaaaaagggttgaggatggagaattccactaagcaatcactacgcatggctctaagctcctgggtggagaacgcatgaacaaaaatgcagttcatggggc

SEQ ID NO: 161163 - DNA, 359 bp, Glycine max
agctatggatgttcgagacttgttctttttcgccaaggctcgaaaagaaaacatctctctattgcatgtctagcacttgaaaacaccatcatctctaccctttgatattgggtaaatggtttcactctcaccatctttggtcaatagcataaagcaaatagccatgtctaacccaccctcttctctgcctctcttcatggatactacgtacttatgacggattaatgggttactataacaaaaaagcgcactacacgaaagttgttgagattgaaaatgccctactctctacgtaatgagattatgacaatttgaaggcacctcactctaaaatatatacataagattctccaacgtgt

SEQ ID NO: 161164 - DNA, 457 bp, Glycine max
  unsure (1)..(457): unsure at all n locations
cagctgatatcagcagtgaaggaattgcaaggagttacatctctggatcttaataaantattgagggactctgaaaatttcactattcattaccttactgaaaaaggatcattgcttaaggttgtctgatgctcagcatcataatgctatttgatatgttgttttatcagattgtaatatcttattgtaatgtgtcagattgatatggaaaagcttgtgggatctctatctttgcaccttactacactgctgatgtcagctgttagagatgaagccctgttcagatacttattatgtggcattcgattattgcactccttgtgtgaattagcctcccgatattctaagttcgagcacgttaatattataatgcgcattaacatttatcatattctgcttatcatgtagctttttagtgttttccttgtgtggcaaagacatgttatcataatgttga

SEQ ID NO: 161165 - DNA, 418 bp, Glycine max
agcttgaagacaagataatctattttccttttgtgaagtcagaagatcaactagctgatatacttacaaaggttgtctctaacaaaatatttcacaactcacttgacaagttgggcattgaagatatctatgcatcaacttgagggggagtgttgatgtgagctgtcaaagaggaataacaggaaacaataatattcttgttacccaatttatatcattgaatatttgttgaattattctagcctgaattagtgtgattatatttttctaccaaaaatagcttcatgtattgagtatatatagcgttcctctgttacattgtaaacaaggaaaaaataaatatattctttctctagttttgggaaagcaactttccagaagttttcaaggtgaaatcaatcaatgacagccttgtgat

SEQ ID NO: 161166 - DNA, 459 bp, Glycine max
  unsure (1)..(459): unsure at all n locations
ntgcaactggaatgttaggaagatatcaaagtaatctctgtatggaacattggaaagctacgaagaaatttctgagatacttacaaggaacgaaagatcacttgcttacatataagaggtttaatcaccttgagctgattgggtattcagactcagactttgttggatgtgtagatacgagaaaatccactcttggctttgtatttctcttagtcagaggaatagtatcatgaaagagtgcaaaaaaattagttgttgttgcatctatcatggaagctgaatttgtagcatgttttaaggctacaattcaggctaattggctgtggaactntatttcagggttggaattatcgacagtattgctaggccgctgaanatgtattgtgataactctacagtagtatttntctctaagaaacgacagtactctaagggtgctaagcatatggaattgaagta

SEQ ID NO: 161167 - DNA, 430 bp, Glycine max
atcctctgagtcgcggggcggcatgcaagcttcaccggatgacgccgatcgaacattttctaaccgacgtcatgcaaatttcgttcagggattgaattgagaactcgttaggcgacatctgtcgtgaagtagcgaccgatatttttcagccgacattgcacaattctttttagaaaagctcgctggtcgataatggtctttttacggcagagtaagttttcttgttttggtgttgcataaaaaagttacaatgtacttcggctaggtttttcgtgcgagttcaaccgacattttgtttcggccaggataacattagcccacctctgcaaaaaaaatatgtgctaaccgtcttcatgcatatttcattcaacgattgaatagacaactcaatagccgacaacggtcgtgaaaagtcccgactgatattttc

SEQ ID NO: 161168 - DNA, 445 bp, Glycine max
tcttttctagacctcgatcagtcatgtttcctagcctatgtctcactgtcattttttcgatcaatatagttgaataatattttttttgccgagatggtctattgttttcctggccgaataaatgggaacatgccagtttcggaccaagcaaaaggtcggttgagctcgcacaaaaaaacctagctgacctacattgtaaatatcatttgcaacaccaaaataagaaaacttcctctaccgtaaaaaaagcattatctgccagcgagagtttctcaaaaaaaattgctcaatgtctgctgaaaaatatcagtcggggctatttcaagaccgatgtcggctattgagatttcaattcaatccgtgaacgaaatttcatgatgtctgtaggaaatgttcgatcggcctcatccaatgaagcttcatttatagacctcgatcggtcatg

SEQ ID NO: 161169 - DNA, 414 bp, Glycine max
  unsure (1)..(414): unsure at all n locations
agcttgaaattatggttgctaatcttaaagccaccttanatttttgaacatgaaagccatggaatgaaggttgctaatgttgaacaacacactgatgtataaactgataccactaacatagttgttggaatcaaagatccactgatcaattcttataaaattgaatctgtgattcaataattaatcctttaaaaaagtttgaattacttgacatgagatgtaaaaatcagtttttacatgagtagttaattgtttaaattaaattagttaactacccataaaaattagctaaaattcatattttgagaaaatnggcatgtagaggttcatgttaattttgaatagtaaagtctcttcagaacttatataaaattattttcaagtaagtttcattccgcataacatgaaaaatta

SEQ ID NO: 161170 - DNA, 452 bp, Glycine max
  unsure (1)..(452): unsure at all n locations
tgcttgtanggcttctgtggaggctggatctttgatctcaatgaggtcctttaatggtgattttccaccatggagatgcagcgtaagacaaaggagaagaggtgagaggaggcgccatccactatggaataagccatggaagaaggagcttcaccaccaagatgagccttggataagaagcttggaaggatgcttcaatggaggaaaagaaagagggagagaaagagagaggggggagcacgaaattgaaggaataaaagagggagagaagtggaactttgaagtatgtctcacaagactctcattcatcaaagttacaacaagtgttacacatgcttctatttatagactangtagcttccttgagaagctntcttaagaaaacttccttganaagcttctttgagaaaacttccttgagaagctagagtttagctacacacacccatcta

SEQ ID NO: 161171 - DNA, 419 bp, Glycine max
  unsure (1)..(419): unsure at all n locations
agcttctatgagaaaacttccttgagaagtctttttgagaaaacttccttgagaagctagagcttagcaacacacacccatctaaaaactaagctcacctccttgagaaacttccttgagaagctagagcttacctacacacacccatctaaaaactaagctcacctccttgacaaaatacatgaaaatacaaaataagtccatactacaaagactactcaaaatgccctgaaatacaaggctaaaaccctatactaatagaatgaccaaaatacaaggcccaaaagaaggaaaaacctattctaatatttacaaagaagagtggatcctaccttgacccatgggctcaataatctacgctaaggttcatgagaaccttacggccttctntagtagctctagcccaagcctcttggagt

SEQ ID NO: 161172 - DNA, 446 bp, Glycine max
  unsure (1)..(446): unsure at all n locations
tcttggtgatnttaggatntagaaatccacgtttaactctataaagcagaanataccatttcaaggcgttggaccttaaaaatggattnttaggtgatgacaaaaagttgatttatgaattgattttagccttagtttcactttggttattagtcaattcgattaagaaagaaaaatcccaaagaaaaacgtccgattgatttttttgattattttattaaaagatatttttttttattattatattattattttgcctttttttggttttaaacgtggttacggcatgacagaacggtcggatttcattttaacagaaattaaaagatgttacaattcaaatgaacgttggaaatntattttattntttattatgcgagaaaacgacttanatanattactaaagcacgtcaaaagggggtacggaaagtaaatgaaataaaaat

SEQ ID NO: 161173 - DNA, 391 bp, Glycine max
  unsure (1)..(391): unsure at all n locations
agcttaatatgcaatgtgnaaatttgcatgggagagagactgcaggaatttgctttgtaattttgggtaagtgtaagtgtaactgttgttacacttaacttaagccatttttgacaaactcgcttatcgagtcagcgtgataagcgagtgagagagacgtttggtttctcaaagttgtcacttagagggccgacgcgcggggcccaaattgaaattcaaatgttttttttagtagggcttatctcaaagcaatgtgcttagtgagtaatgcagatgttaattcctgcaactctcgctaagctggattcagggctggctcatcgaatataatgcatcctatatattgaggagtgcatgcgcttagcgagtagttgctcgcttagtgctattc

SEQ ID NO: 161174 - DNA, 463 bp, Glycine max
  unsure (1)..(463): unsure at all n locations
tcccagaatcaagatcaagattcaagacttcttattctagaatcaacagaagacttaatcaagataagtgtgacaagggtttttaaaaactgagtagcacatggatttttctcaaaacatgtgtaccaaagagtttttactctctggtaatcaattaccagattattgtgatcgattaccagtagcaaaatggatntgaaaaagttttcaaatgaatttacaacgttccaattgatttcaaaaagctgtaatcaattacaatgttttggtaatcgattaccaatgcctttgaacgttgaaattcaaattcaaatgtgaagagtcacatcctttcacataaaagctttgtgtaatcgattacactgatttggtaatcgattaccagtgattgtttctatataaatcaaaagatgtaactcttcaaatggtttttgactttttcaaattggttttaaagttttct

SEQ ID NO: 161175 - DNA, 408 bp, Glycine max
agctatttggttttaaataaaacgtttttctctttttctattattttattcaagctctgccacatgtccctattcgattggagcaaaaagggcccactttctctttttgactgtgacctatactcagtcacaaaagtggggaaaatctgacctctgaaacgctaaaatactgcctcggcttgcgtgtcgtttctctggttccagtttctcgcgtttctctgcgtccgccggggccagttttcgaaagcaagcaatatatatatcaaaacactcagaataaaaccccgagcgtggttcagaggttggtttcgttaaattttaagtcgcacgcaaaacgatgatctttaactaattaattaggaattaacccataacctcccaggtatggatttctctaccttaattagt

SEQ ID NO: 161176 - DNA, 382 bp, Glycine max
  unsure (1)..(382): unsure at all n locations
ntanaagtttggatgacaccacttctagttattgaagataagctangggagacgcgacaaggattaccttgataagtctgagattggttcaacatagaacccagagagaagctctcacaaaattttatcaaatgccaaaagttcctctattgaaaatgaaaaccaatacatatagtgtgtctgaacaaaaagatagaaataaacatgggccttctaaacagtttgggccaacattacaactaaaaaattataaataaaaaagaacatatttggcatgggccttcaaattagtttgggcattcagcaacaattaatagtcttggtaatgcctctgcctctgggccttcatccttctccactagagcctctgtaagtatgcccg

SEQ ID NO: 161177 - DNA, 231 bp, Glycine max
ggccatacacacaaatttaagaggacatgcccccgacatggacgccacggtgattcgcatggctaataaaccctgaaataaactgcagtttagccatgccggcccaaaaacaggggcgcatcatccgtcagggtgagggtaccgattcttttgacctaaacccgtatcagttcctggcgacacgtaagtggagaagctagaatcaattctgtccaaaagactagcccaggg

SEQ ID NO: 161178 - DNA, 477 bp, Glycine max
  unsure (1)..(477): unsure at all n locations
tcaaaccacagcaacacanaatctaggtgtccaaaacctttctattcaatggcttttctaggtttgaaaggtggaatttagaatgaggtaaatttggagcaaattctcacctcacacaagtctataacatcaatctaaacttgctcaaactggatttacacctaaatttccaccgaatcaaaatttgactcctcaacacccaattttgccctagaaatggctcttggttcactntggtcatttgtttttctctctagctcagcctaacctttctcacatgtcctaaatgacatttcaagctagtattaactcactttaacctccatttaccacagaattcagacttagccttccaactctcagagtctcactctttttccactcataacatcacattctcactgtctaaccctaggntagttctaccctttgtctctacagaattctatcagcaaattcagcatatanacatcacaa

SEQ ID NO: 161179 - DNA, 445 bp, Glycine max
  unsure (1)..(445): unsure at all n locations
gaaactaagctttgcaatatttgtccctggcacaattgtcaagatnttttactatttctgcactggacgagtccaaccaaccaatcccaaacaatgtcatattccattgactttnttggtcatttaaggcatgcattgatgcatttgccttttgtaaacccattgtgcaaatcggtggaacatggctatatggaagatacaaagggacattattacttgaagttgcacaagatgacgctaacaacatatttccattggcatttgtcattgtcgagggtgagacaacagatatgtggcacttttttttttgcaaaacttgagaacacatgtgacaccacaacatggtatatgcttaatctctgataggcacgagtcaatcaaatgtgcatataaacgacttgacagtgngtggaaaacagacaactcgtcacatgtgttctgtatt

SEQ ID NO: 161180 - DNA, 425 bp, Glycine max
agctttacacttgaatacatgtagggtaagactaatgtctatgtgccataaagcaacctccacctccaccttcctgtcattaatttgattttattattttgccttctcttcacctcccagcttcctcattcttaatattagaagagtccccaaacatattctctaatacactcttttattattctctaatagacatattttttttattattcggtgatatttattgaaaattataaatttttataggtctcatttcttatttaatgaatctctctcctaattttataatttttaataaatttcaattaataagagagtgtatttaaaagagtattttaaagagtgtgttagtattaatattggtagtagaggaaaaaaagtgattttgtagtttttctccacccttctaattctagatataaaac

SEQ ID NO: 161181 - DNA, 400 bp, Glycine max
tcggacctgtcgccgatattcaatccgatgttcttaacgggaacacgtccgggctaggtttcagtacgctcgcgtctaagttcaatggacacaaatcgtttccttgtttctgcaagttcctcttctttgccacaatttattaagggtttcaccatggtgacattgaactcctttaattacccacatttaaaaaaaattaagagtaattgtacccaaaatggtaatttcaattttttttttatattttatttattgggtgtctccatactttgtatttgttacctagattgtgaattactattattaaaaaataaaaatgtttttcaatattttttatgaaattttagaaatgtaattataaaaattacaataaattttcacattaatatgggaacaagta

SEQ ID NO: 161182 - DNA, 426 bp, Glycine max
  unsure (1)..(426): unsure at all n locations
agcttggctattactttatacatgcaaccaatgagataaatangtctatagtcatttaaagactgtggatgggttgttttaggaataagagccaagaaggaggcattgctgcctctagggaagctgccatgaatatggaattcatccacaaatctcctgaattcaggtttcaaaaccccccaaaatttcttattaaaattgaaattaaagccatctggccctgngcatttgtctccaccacaactccaaacaacatctttaagctcttggtctgaaaaaggggcaattttcccctccctttgcctctgatcaatcatagggaaatataccccatccagagaaggtctgaacaatttatcttcagtaaatctatggagaaagaatttgagaacttcattcttgactaaattaggctgttgaacccat

SEQ ID NO: 161183 - DNA, 470 bp, Glycine max
  unsure (1)..(470): unsure at all n locations
ntntggagtagaaacatgggaccaactcattgtatttcaaaaatgaagtcgtatctagtcaaggtctgagagaccatacaagtttcctaacgatttctaattatgtgggccattaagtctatcatatgctgacaatagccgagaagcccatgaatctcttcgggggtggagtaggtgtctgccatcgccttggccttggctaacaagcggngaagttcttgactcccgttcaaggtaagagcaaaccggtccatccacatggttgcctcttggtgtaaagagtcgatcacacttcctctagcctctntttccgcatatacttgagcatactcatccgcgattctatgctcgtgggccgtggctagacctaactcttcttggtacttggcgatgatagctagcatgttggtctccgtctcgcataaacgctgagaacaagctctttttggactttaacaagcaattaactc

SEQ ID NO: 161184 - DNA, 380 bp, Glycine max
agctttagcttgttatagagaatatatttccaacaaaaacataaaacttaagctccactataaaagacaatagttcgaatgataactcacggatgttgatgaagtccgagaattttgctagaaagagagctggaatatccatcaccctaagaaaagcaagtttcaactttcttaaaatcatcatttggaagtttcaaaccaatattttgatgacaactcaaggatcttggtgaaattgaggaatattgctagaaagagagctggaatatccatcagcttaagtaaatccaaagcaagtttcaatcttcttaaaaccaagatttggaagcttcaaaccaactgtggagactctaaattattaacactgaagagatgaaatt

SEQ ID NO: 161185 - DNA, 412 bp, Glycine max
  unsure (1)..(412): unsure at all n locations
tgaagaggatgctntaatggaggataagatagagagaatgagggagcacgaaattgaaggaataaaagagggaaagaagtggaactttgatgtttatctcataagactttcattcatcaaagttacaacaagtgttacacatgcttctatttatagactaggtagcttccttgagaagctttcttaagaaaacttccttgagaagctttcttaagaaaatttccttgagaagcttctttgagaaaacttccttgagaagctagagtttagctacacacacccatctaaaaactaagctcacctccttgagaagcttccttgagaagctagagcttagctacacacccatataatagctaagctcacccncatgaaaaanaaacatgaaaatacaaaaaaanaatcgtactac

SEQ ID NO: 161186 - DNA, 417 bp, Glycine max
  unsure (1)..(417): unsure at all n locations
agctnggagagatagatggcgacccggtgttgataggaacgacgataagggctacgtgggagtacgtgagctcagtgaaggtgggcaactggggatggtgggtttatgtgtgatctgtggatgtggagagttgacttgcaccatcgcccgaccgccacctagtaccacatgtgatgggtaccgcataatcctacaagcttgaaatgaggaagtgtggaaaggggagacttcctacttttattcgttgaccacacagtgatacctggagatatgtcgcgggggtcacgagaccttggtgacgtcaggtggggtgctattgcccaaaaccaagcttgaccaatcccgacccaacccgggcatagtcagtcagtgagaacctgtgatgtacctaaacaggcgagctcttggcagtcaacc

SEQ ID NO: 161187 - DNA, 380 bp, Glycine max
  unsure (1)..(380): unsure at all n locations
tcacccttcgtcccaaacttagtccaaacttatcttcttttaacttctcatcctctagccttcaccacttctctcgcacctctatttcccatctccttccttccttgttcgattccagntgctagtcattataggatatccattggagctcatgcttccaagaagatataacatatgtcaacctatatctaaacatgcaatccaacttcatataaattttttcataaaattagtaaatactcaacaaaatatcatggcggattattcgtacttccattatgattccagctgtgtagcattggtctatattattatattacttttataaatgagtggaaattattttctcattttatgtctatttattcaaattaaaattt

SEQ ID NO: 161188 - DNA, 413 bp, Glycine max
  unsure (1)..(413): unsure at all n locations
agcttgaagtgaagaagtgcggcanggtgatacttcctacttgtattcgtggaccacagagtggtacctgaagtatgtcgcgggggtcaggatatcttggagacgtcatgtggcgtactattgtccaaaaccaagctcgaccaatcccgacccaacccgggcatatccagtcagtgagaacctgtgatgtacctaaacaggcgacctcttggcaggcaaccgataaaagaacgaacaccacaaagcatggaggcttgtgtggtggctggccaactatggatcttgagtgagattatgaatatggtctctggtaatcgactaccgagggtgggtaaactattacaccgctgaaaatggaagatagaaagctgagatggcctctgcgaatcgattaccagaggagtgtcatcgat

SEQ ID NO: 161189 - DNA, 414 bp, Glycine max
  unsure (1)..(414): unsure at all n locations
tctgatccaaagcacattcttggcggtgaatttccttactccatggctcattcccttgaggatggagcctcccctctactcttctactatgccttccgctgcatctgcacggnggaatataaccattgaaggacctcatcgtagctcaaagatgcagcggtcatagaagctccaaaagcaagcttccctcaccatattcatgcattgcattctgcataagacatttcatcaccatgcatatgcatctaataggcgttttgcataccatatagcttcatgtttaaacatgcatgatccttgcattctcctctgcacaacaagagcataaaaggaagcatgataattcatgctgcattcttagttgcatatgtttcggaccatgaaccaaccatgttgggatcataaacactattc

SEQ ID NO: 161190 - DNA, 416 bp, Glycine max
  unsure (1)..(416): unsure at all n locations
agcttatcccatgcttctttggccgnctttgcgttggatatcttctcaaatgtatcttcatccaccgattgataaatgagaaagagagctttcttgtctctctttcttgactccttcaacgtctcctttacaccttggcttagcgaggcttcatcttgctcctcgaagccattctctacgatatcccacacatcttgagctcctagtagcgccttcatcttgatactccaattatcatagttgttctttgtgagcatcgacatttggaaaggaaaacctccattcgccatcttttgaggatcttgaagctctgataccactttgttggaaataaggctttttatgtttacgaaaagtgtttaggaatatcggagactttgaatagaaanttgataggaaggagaattctttatgga

SEQ ID NO: 161191 - DNA, 397 bp, Glycine max
tagcaagaaagtgctccaaaagttggagaccactctcatagtggttggagctgtgcttgatgatgccgagaagaaacagatcacaaacaccaatgtcaaacactggctcaatgatctcaaagatgctgtctatgaagccgatgacttactcgaccatgttttcaccaaagctgccacccaaaacaaggtaagagacttgttttctcgcttttccgataggaagatcgttagtaagttggaagacatagttgtcacactagagtctcatttaaaactcaaggagagtcttgatttgaaagagagtgcagtggagaacttgtcatggaaagctccatcaacatctctggaagatggatctcatatatatggtagagagaaagataagcaggccataatc

SEQ ID NO: 161192 - DNA, 407 bp, Glycine max
  unsure (1)..(407): unsure at all n locations
agcttcaactgtaatatgctatgtaataattcttgtaaacattcattctttgggaaaattataactcttttaaatttattatacctaanatcatgagttacctaaattatggtcttaattcaattttaatgttacatcccttcacatttcccacctttaattttaatattttatgtaataattattgtgaaatttcattctttggaaaaattataacttctttaaattcattatacctaaaatcatgagacacctaaattataattttagttcaattttaatgttgtatccctcaacattcttaaccttcaactataatatgccgagtaataattgttgtaaaatttcattctttgggaaaattataactcttttaaatctattatacctaagatcattaatcactt

SEQ ID NO: 161193 - DNA, 467 bp, Glycine max
  unsure (1)..(467): unsure at all n locations
tattaagctttcagcttgtgagaaagaaaacaattcattttctcacaaataaataggaagactaaaaattgagctccaccaaaacaatagnttgaaaggcaactcaatgatgagaagcctaagagaattgatagaaagataacttcgccacataactggaatgatcatcagcttgaaagaaatttgttggcaagcaatcacgcaaagcaaagcaaggttcgacctcaaaaacgcatttagaagcttcaaacgaataatattggagacctaaatatatttaaacttgaaactaagtctgacaactgcttctgggacagagatgaataatattggagacccaaatatatttaaacgngaaactaagtctgacaactgcttttgggacagagatgagatcagagcatctggactaagacaaggccagtgcacctangaaaaanggttgatcataatcgacataagtcacc

SEQ ID NO: 161194 - DNA, 397 bp, Glycine max
  unsure (1)..(397): unsure at all n locations
agcttntgacaaacaacgttataatattgccatataaataatatatatatatatatataccccatgcatggcatgttataccccatgcatggcatgttgtgtcataggttattaagaataacttacccaaaattctaaaaacttacactcagaaggagattccttttaattttaaaaaaattaacttatatccccttaattggtttgcagtcaatgtgaatattgtagaattaacaatgaaatccactatttaattaactttaaatttttatattaggcgttggaccttaaaattatttccagtgatattagacaaaaataagtttgaacgagaattgatttctttctcattagggcttggtcatatagcagatatcctttgtatccatctattacg

SEQ ID NO: 161195 - DNA, 335 bp, Glycine max
ctgagacccggatcttaattactgagatcagctaaagaagttttcgttctttttccaggtcttgggttgggttactgtcggggatgacaaaggtgaatgttctgggcgctttctgtttctgactcgggactattgtgggggtgtgggtgatggcatgaaagactcttatggtgtgattgccgaccctgttgatccaaaaaaggcgcgtcgatctttcttcctgtgagatggaaatcttgctttggaagaccccctgagttggagttcatattttgttttgacatgctacctcctgttctcatgatgtgattggccttccatggatctgctactgg

SEQ ID NO: 161196 - DNA, 448 bp, Glycine max
  unsure (1)..(448): unsure at all n locations
cttggctatacccaaaaatcacatgcatgcagactattatttgcagacagattntcgtttcagatttcacttaacttgagatggtttgtcaaattctaggaaataaagttattgcttgttggtccattttacttctgtaattagctctgaagtgcttcacacatttgtaatcacatcattcacgggcaatacatgcacttaaatatctattgaaactacttatcattcaatcagatgatttattgaaattaaatagaagcaagattatcttccttttggaatgtgtacttaaatttctctgattaattatttccaggaaaggtatatcgggatatnagtggtagtgcttactatgttgctcctgaagttctgcggcgcagatgtgggaaggaaatagatatatggagtgcaggagtcatattgtatatcttacttagtggagtccctc

SEQ ID NO: 161197 - DNA, 401 bp, Glycine max
agctttaatgtccatcattcccattttttggaaggcccaaagaatctaagattgcttataatggccccaaagaagtggtgcttccttctacgcagtgtgattaccctttactaagtagcaaccaaatactagtcgattcatttcttcacctgttccattccatatcatatgtctagatgtaaaaggagaaacttggtttaaacaatttaaaaggcagatatgtactctcacattcaaaaggctataaggaagcacactaaacacattcatttcttaaaccccaacccagaataactctaaaatagaacatgtttatgcaaagataatatgaccagactactaaatgtgatatggcctctaaatacccatataaccaatcaccattcatgggatcatcaaac

SEQ ID NO: 161198 - DNA, 219 bp, Glycine max
cctatgaccggcctgagacccttttatacggtcgcatactttctcatctatatagaagtcttacactcttctaacacaatcattggataggaaccgatcaaatctaatctctgaacgaactatcctttgttgactatgatcataaacaaactttgccaaggatatgacatttctttgtctggagaatggcatacacaaataaagtgtcctccctatata

SEQ ID NO: 161199 - DNA, 386 bp, Glycine max
  unsure (1)..(386): unsure at all n locations
agcttcatgaaataagtcatcaaaatgttgaaatattttattttattatgataggaaatgatcttgttntactaccagagaaatatcaatgtgctttttcatttttgttttaccagattttntttcattaatttattgctatattttagttactattaattacagttccaaaaatttatgtcacagacataaaaatatttaatggcaataaattccacaaagatacatgataaattgtgaatataatcaatttttatattgagttttaattacttgtcataaatttttttatttgaatatattntaatagtctattttttgtgaaaagtattaattattaaatatttaatttaataaattatacaatagtgaatactagtatacta

SEQ ID NO: 161200 - DNA, 417 bp, Glycine max
cgcttctacaatctcccactttttgatgatgacaaccctgttatctataaacacatacacattctttttcctagtcgatcactcacttaattctccatattctcccccctttgtttttgagtttaagcttcacttgaaattaaattacttaattgtgtgagttcttgatttaatccctattttctctccccctttgacatcaacaaaaagccaaaatgcgtaagacatacatgatttttattctttaaaaaaatcatacacatagcatccattgtaaatcaatcataaaagattctaaactaatcatgaagcaagacatgaataaaccaaacttaaatataaaccacatagtcatataacataactcataaatgttcagtcatactaatcaaatattataagaaaatactgatgttc

SEQ ID NO: 161201 - DNA, 440 bp, Glycine max
acctgaggcatgcaagcttctaaaattatacaagaatgaagctctgataccacttgttggacaagtggcctcagatatcttaagaagggggggggtcgaattaagatattacaaattatttccccaattaaaagttctatttaacttttctattcaaggtataaattcccttaataacaaattgcttaaataatgattcaaaagaacaatttgaatatgaatataaaacaataataaataaaggagtttaagggaagagaaaatgcaaactcacatttatactggttcggccacacccttgtgcctacgtccagtccccaagcaacccgcttgagagttccactatcttgtaattcctgttacaagttctaaacacacaaggacaatccttcctttgtgtgagaatcctttacaataagagaactcggtctctaatcgct

SEQ ID NO: 161202 - DNA, 458 bp, Glycine max
tactaagcttttctgtacaatcaatctgtctactgactaaaaattctaattgcaagttcacattcttgttctttctttgtctaacatacacacttgctcaaactcatgaaaaggaacacaaactccatcaaaatcatgcactcaattcaaaataatgacatacacccatttttcacaaaaagataaaagtgttttactgccatgtcatcaaaaaaaagtcaaactgttcaaaatgcttcatgatgagcaaactaactacccataaataaaactagcagtgtacgtagatggcgccagtagacataaaggaaatactgtactgaaaccataattataataataagccaaaaagaaaaaagtatcatcaagaatcaacaatgtcaacagcgtttaaactggtgaattagtaagagcaacaacttctccagatgacgaatataaagatcagcaattctcca

SEQ ID NO: 161203 - DNA, 466 bp, Glycine max
accgagcatgcagcttctaacaatggtgtgtagatcttctctcctttcttatcatgggttccatcaggccatgcatgattactccctattcaccattggttcatggaactccttaatcattctactagtgtatgtagatgacatcatcctgtcaggaccaaattctgcctctgtgcaagctatgtagacccaattgcaatctatgtttcaattgaagatccttggcactttgaaatattgtcttggcttagaaatagctaaatccagcaaaggtatctcactctcccagagaaaatacactctatcccctttggaagatacaagtttcttggtatgcaaaccttccaatcttccaatggatcccaacctgaagctcaatctctatgatggagacttactccttgatccttaatgataaaaagttactggtagattgattatctgacctttacctcccgattaacat

SEQ ID NO: 161204 - DNA, 452 bp, Glycine max
  unsure (1)..(452): unsure at all n locations
ttatattntgtatgtcattttactgatatggtatcttattatttaaaaaaaaaaatctctatgagttatggagaaaaagagaaccaaatctgaaatatcttaaagtgtggggtgtctagtaaaagttaacatccctattaacaagaaaaggaaaattgacaaaaaaaaatgttatttgtatttttgttggatattctttacataatattacttataaattcgtagttgttaattcataagtgtctgaaatttctaatgatactattatgacatcttttctttgaaaatgtttttccttgaaaaataaattgttaaatctttatatggtttgaaacaagctccaacgcattgacacaaaaagttngatcaagttgttctttcgtatgattttcaaattaatgatagtgataaatgtgtgtatgtgaaacaatctaatgataatggatgtgtca

SEQ ID NO: 161205 - DNA, 462 bp, Glycine max
  unsure (1)..(462): unsure at all n locations
gcttcaatcccactttctgcctaattgcataagtggattataaganaatgacagatgtggcttacgatctctttagtttcatggagctataagaggatctccggtgctctttgtataaacaactcattntatctctttaagtggattcatacattgctaatgctagatgaaaataaagatgatagaaatagaaaataaaatttaattaaaatacaaaaatgtaaaagatgtgaatcctacatgagacctaccaaatttctgtctatcctccctaaaccaaacacggcctaagttcagagtctcgctcgcacttggtgtctacagctctacagcaaaagtatggtccacttgttgtgttatgcgtcatactcattgatccatttactcagtagatatcagctttgttctttataaagatgctaacaaattgatggcgtaataaaatattcaattgaatttaat

SEQ ID NO: 161206 - DNA, 404 bp, Glycine max
  unsure (1)..(404): unsure at all n locations
ctgctgagccttgatgtaaaaactcttttctatctatttaatggtgntttgatgtattcattgcttctatctgcatttaattattgcatgcttgtggactgatcacccatttgtgtgtaaagttaggatttttagcattggaaaatgttttgaatccttagaactggatagagcagggctagataactgtatgtatggacacgaagtgtaaggatttaatttttaatatgctgtaatcgtaatgcaattcgtttaggctaagttcgacgagacatcctagaacgaggtttaaatagaataagtccattcacgcgagatatcggtgtttggtgtatttgccctcaccatataacacagatacaaccttatatagagaanaacctctaattgcatcaagttactca

SEQ ID NO: 161207 - DNA, 361 bp, Glycine max
agaacctgagctgcagctttccaaagggattcggatacatttaactcatccattgcgataaccctttgcgacaacatggccatacactttaccgatcatgaaagccttgtgtgtcctctcccttatggaatctttttcgcaacgcaataatgtggggtatatgattaacagccttaaaaccctcatgaattcgggctcatgggcatattgagacttataacacgacatgagctcaattatgacagtaagcaacaatcctgtgagtttatcagtgtcactccttaatccttgtggagagcaagactaggcctttcaagcacgcttcttaaacctttttttagcctttacactgagacacctt

SEQ ID NO: 161208 - DNA, 423 bp, Glycine max
gacaattcaagacaaagcaattaaagatatccattatggatgatcaagacagtctatagagtcttagaaagggtatattaaataggaagggaattccaattgaagtagcaaaaggtttggccaagaaaattaagttaaaaagtcttttacaagaaatttactctctggtaatcgattaccagaggatgtaatcgattaccagtggccaaaactgatttacaacagctattaaaatttgaattcaaaatttgccctgtgtaatcgattacacatatatggtaatcgattaccagcagtttctgaacgttgtaattcaaaattgtaaagcttgtaatcgattacacatatactgtaatcgattaccagagcagaatttcagaatatattctcaacaatcacatacttttatgtggttcttgaatg

SEQ ID NO: 161209 - DNA, 457 bp, Glycine max
  unsure (1)..(457): unsure at all n locations
agcnttataaatattatattatagaattattgatgtgagcgccataagcattgtaggtatatattaaaattatttactctcgtgaattaagtgaatattttcctgaaaaaaatcttcatgtgtctcatgttatatataatcatattaaattattaccacaattattttttataaatatacaaagctattatagaatatatntctttcacaaaattgaattcgtaggtggattaagttaataaaaaaatattataagttaagtctaaattcttcttaatactctaatgaaaatgttcatttctattataattttgttatattaatttgatgttaatgtgaaattaggtaaaattgttcgtacccattaaattctcaataataacataaattatttaatcatagaagagaaagaaatacaaatgtgtgaataaaattatataataatgaataaacaaca

SEQ ID NO: 161210 - DNA, 391 bp, Glycine max
accggccttcgtgagtcgtgagatacgtcttgatgtcatggatagagactgggccgtattagacgacgtcgtccaaatcaagcacgctgcatttttcatcgtgatcgcgatcaccgcatcacaccctgctttccacgctactatctatgtatgactctgtgctagggtttcaattgagttcgttcagtgctttggagtttcaatttggtccttcaaagcttccttctccatgtgattttacgctacaataacaatgactctgtttgatgtttgtgctcgctgttgcatttgcagatcacaggaggaggaggaagacgaagaagaaggggggtttgcataagatgttttgcggcgtgactcgagttgacgtttatgcccctaggtcaacgga

SEQ ID NO: 161211 - DNA, 431 bp, Glycine max
  unsure (1)..(431): unsure at all n locations
agcttctagtcatccatagacctcctcattggtacggtccagcaaacgttgcatctgtgcattcatcgcatccagtaacagacgttgagcggcgtccaactgatgatactcatcaccaccaccacctgctccagccataattcaacaggaaaaaaaatgtgcaataaaaattattaaggtttcaggacctcacaacactctactcacgtgtttaactcttagatgggtagacactcgtgtttaatgctctcaataggctnttgtgtaatgtattccctcttgccttttaccactcgtgtttcctcttaagttcctggatggaccaaattagatgcacaaggttatataaaataaaaggaaagacaatatantgatcacaaacnagattgatttgggataacaacttggacttgatttggataataatatat

SEQ ID NO: 161212 - DNA, 407 bp, Glycine max
  unsure (1)..(407): unsure at all n locations
tggaaatgaaaaacggaagccctcgagaaattcatatggtcatattcttgtcacacggaagtccgattaacgcgcagactatatcgagacgctcgaaattgagcaacgaatgctctcgagaaattcatatggccataacttttgaaacggaagtctgattccggcgcataatatatctagaagcttgaaattgaaaaacgaaaaccctcgagaaattcaaatggtcataacttgtcacacggaagttcgattaacgcgcagactatatcgagacgctcgaaattgagcaacgaatgctctcgagaaattcatatggccataacttgtcacacggatgtccgattcaggcgcataatatatcgagatactcgaaatctaacaacggatgctctcganaaattcaaatg

SEQ ID NO: 161213 - DNA, 465 bp, Glycine max
  unsure (1)..(465): unsure at all n locations
agctnttacatgcatgttcaaaccatatttactatacttcgatcaactgatgcaatctatntgattgaaaagataatttatattacgcttctaatgtagtcgacaactaaaaaaaaatataacagaaagtaatgcttaagccaatcaaatcaaatcatttagaatctcatcattactatcatgcatctcaaagagaaggagaatcaggcatcataatgtatagcacaacaaaacattaaaagaaaacatgccttctaaagccaaccaaggtaaaaatgtatttatatttgtgaactttttcaaaattataacacatatataaccatatataanaacatggttgaacaatctgaccacatgcacaacacattccacacattatntctgaatatgagtggtaagggaatataataaagcattgttatttaaactgtatgtgcactaagataacaagggtgtcatgac

SEQ ID NO: 161214 - DNA, 447 bp, Glycine max
tgtaacagttgtgaatcatgccgaaagtatgtaaaagtttttcatctctgttttcttccataactacacaagttatgccaagattaatgtgtgtgatttgcataaaaaatgggaaataaggtcagtcattaaaagaaatgcctaaactagtggaggagactgcagtgactaaagagagcacacggctctacggacttgcaattgcaatatatcagcctccttataattatatttttctaatatgattccaggttgcaagaattcttcattgagtaacctcattgagtagctatatatgcatatagctacattgttgacatttttggcaagaatacatcttggtacctctaagcttatcaacatacaaacaagagctagaagagaaaaaaccatttttcacatagcctagaatgataaggaggttcatatagccgtacattaaatatc

SEQ ID NO: 161215 - DNA, 454 bp, Glycine max
  unsure (1)..(454): unsure at all n locations
agcttagcaaaagagatattagcataatttgttgaaccgtcgattaagtaatcccatcccatttgacacaagcaaacaacttagagtgtttaaatcatattttatttctattttctcaatttagacaatcaaataacaaaatagaattttctttgtcaccaaaaaagctaacagttacatctcanagcattcacactgcaaattcatcactgtacacagtagccttcttgtctgatttctaatttttcagcaatctaagaaacaaactccgaccctgtctaggaaacatggatactaacatagtctctagtctctacccatgtcaaacaaatacttgtgttacaaacttcattaacacttgngatactttaagttacatttcgctgattttatacttanttcttttttgaatgttatactaatacaaacagaaattcataactaggtagatgat

SEQ ID NO: 161216 - DNA, 425 bp, Glycine max
  unsure (1)..(425): unsure at all n locations
ggatgaagatttcaaaagcataggcgcaattggttgatagtttaagaagacganggcgaatnggcagctttctgcaaccacttcactatttgttctgtttagttgctgagaagttatggacattattcgaggtttgcagcccataatggtcctatccgacacgaatatgattgcctccggtgaaggatacatgtggttcagacaaaaaaataaaagttagtcgaagctcccagcctcatcttaaagatattgaaaatatctcatttgaaaagcaaatactttggattttacaagtccctaatgattgattaagcacaaacacaaacagatacacccagaccatcaaatgaaagttttttttttgtttatatattacaggctggctaaaaacagaaagaacaaatagctatgtacacaaatgcatt

SEQ ID NO: 161217 - DNA, 463 bp, Glycine max
  unsure (1)..(463): unsure at all n locations
agcttatcatcctttctgagtgactcattacaaccctgagtttacttcaattattgntatttatagaatttgtcttttttaaatacacttaagaaaactcatcaatagacataaactcataaggcttatgatttctatttagaaggtttgtcataatccaagggttttagactcaacaacaaaaaaatccaaattaaaaccactaacaattgatattgttaaaactagaaagaaatataaaaaaggatactaacatcatcaacttctatatcctttatcacttttttgggataacattatgtcctccttcaatattgttgagcttgaaaaaaaaacaagtacattcaaatatctaattatcatgaatatataattaacagtgttaatgtaattaccttccatgttgattcaaaccaatcttggaacacatccatgccttaaagnatattgggtgtaatctact

SEQ ID NO: 161218 - DNA, 441 bp, Glycine max
  unsure (1)..(441): unsure at all n locations
tgtataatggccaaacatgatacatgtcanggtttgttttggttcaanggtaaaagggatgccccacattatttccatgacacaaatgcaaaaatgatgatttggaaactttgtgcaaaactggtcatgcatgcacctatgtggacactcaagtgtcaaatttttatggtcatgtgatgctagggctcaggattcattccctctattttagtcaacccaatgtttccaaaatatgttcttttatccatttgtgcattcatccgagtccattntgggcgtccggtgaaatttcacagcgttcacccttcgggtgtacacacattttttccaaaaaccagctatgatcggcgaatttcccaaagaagagttggaagtcatctctgttcaaaagcatgtcggtttttcagctaaacaacttatttgtcttttcttttccctctc

SEQ ID NO: 161219 - DNA, 317 bp, Glycine max
actggttgggcattcaccccacctgacgtccattgttctgacccccgaatatctcatgtaccatctgtggtaacaataaagcggaagtttacccttcaacacttctatctaagcttgaggattatggggtacccatcacatatggactggtggcggtcgggcgatggtgcacaatagttttcacatcccaatgcgcgcataacccaccatcctgttgccacctcaactgagctacgtactccacgtagctcatatctcgttctctaacacaggtcccatcaatctccaagcttcccacataaagtataaacatcaca

SEQ ID NO: 161220 - DNA, 421 bp, Glycine max
  unsure (1)..(421): unsure at all n locations
tgtcactttnttgagtcactcangacagccctaagtttttttcaattggngtctttatagaacttgtcttttcttaatacacttaagcaaactcataaataggcattaattgaaaatgcttatgatttgtgtttaaaaggtttgtaataattaaagcatcaagggttttggactcaacaaatttcccataaaataagatgtaaaaacaattatcaaagagacattggagaacattcaccatacaatgatagagagcacatatgaactaatcaaactgaatggtacacatattgaaataataagggactaaacaataaatatctaaacttcatataaccggttaaaattacctgctacaacaagtcgattgtggtgattcatcgtgcaactgccatttcanaacatgtctaaaacttatgat

SEQ ID NO: 161221 - DNA, 399 bp, Glycine max
actagatgccttggttaatctggttacccaactggccatgaataaaaaatctgcacctgtcgccagactctgtggtttatgctcctctaccgaccaccacacatacctttgcctttctgtgcaacaatatgaagtaattgaacagcctgaagcttatgctacaaacatctacaacagacctcctcaacctcagcagcaaaatcagccacaacagaacaattatgacctctccagcaacaggtacaatcccgggtggaggaataatcccaaccttagatggtcgaatccttcacaacaacagcaacaacaacaaccttattttaaaatgttgtagcccaacacaccatacgttcctccccaatccagcataacagcgcaacagccccagaacaacaaata

SEQ ID NO: 161222 - DNA, 334 bp, Glycine max
aattaaaacattcagaaactgctggtaatcaattaccatatatgtgtaatcgattacacagggcaaattttgaattcaaattttaatagctgtttgtaaatcagttttggccactggtaatcgatcacatcctctggtaattgattaccacacagtaaatttcttgtaaaagactttttaacttaaaattcttggccaaaccttttgctacttcaattggaattcccttcctaattaatataccctgtctaagactctatagattgtcttgatcatccatgttgaatatctttaattgctttgtcttgaataaagctttgagacacatgtgatc

SEQ ID NO: 161223 - DNA, 482 bp, Glycine max
  unsure (1)..(482): unsure at all n locations
cctgaggcatgcaagcttaagctccttaactgcataaggctcttaatattttaagagnatccttgtggaaccttcacccgacgaagacattgacaaaaacttatcttctccttcttggacaaagtatggcaggctgggggcaagtaaatattcttcccatcagacattggattcnactgtgatcgtatacccatatcagctagatcttgacgggtattcaagccatccttcatcttgccttgaatgttaaagagcgttccaataacactgtcacaaacatttttctccacattcataacatcaatacaatgtctaacgtcgagatcacaccagtacggaagatcaaagaaaatggacctcttcttccatatgcaactctgacttttatacttctttngggtcttcccaaatatagtattcaggtgttgaacccgctgatatacctgcttaccagtcaacgctatcagcgcaatatcatgctc

SEQ ID NO: 161224 - DNA, 426 bp, Glycine max
  unsure (1)..(426): unsure at all n locations
actaagcttatggttgtgaaaccaagtctgtcggagaaagctntacaccttgttctctatgtttcttgataagtcacatttctttgaaagcactcaaggcaaaacattattaacaaaagtctaacatatttaaaattttcttctaaaagtttgttgtcattaaaacattcatctcattaagggttctgcttcaacactaagaatatcatattccatggtctattgaaagtgggttgtaataaatgttctcgaaagagtttctcaaaaaaaggtaaattagtattggcaaaatatttctaaatacttaattcaccttttctcttttcttgagcaccatttaacccattgtatttctacaacaaatacatattatgaatcttgtacctggtgttgcacttgttcaacacttgcaantttggttgatct

SEQ ID NO: 161225 - DNA, 452 bp, Glycine max
  unsure (1)..(452): unsure at all n locations
atcagagcaaccaaaggataagctcgaggaatgttatggaaccattagagatgccgctatcgctgatggaacacatgtgagcccgcttagaggtaagggatgagttattcacaattggagagtagtgagaacatgtgtagggattcttagaataccaattgaaatgggtttttggggcatttttgcaaatnttgattctatctttacaattataattgtgaattatacatgtttggcagaccaattaatatcccaatgagaaattgtcatgaaattgatgtgtttttgtgttgagtatgaaccctacaaattgagttttnttgttaattaacatgaattgtactctaaataatattctcttcaattggttattttatacaaattattggaattctttctgtatgatcatgtgaactggttgagggattttactcctcgtgttgtgagaaaca

SEQ ID NO: 161226 - DNA, 421 bp, Glycine max
  unsure (1)..(421): unsure at all n locations
gatgagaatcctcatgtaagtgctccagaatgttctcttccttcaccaatgaataattcgggttccggttcaggttcgtggtctaccaaaggtgaatctcctccagctgataagcataatcctaatccatctggagattctagtcctaatccaaagtctagtagttcttttgagtcgaataagtcttccattgggaaaaaattggttccaattgtggctcctatcgcangtgttgcaactgtggcttttgtgctcattccgctttatgtgtattgtttcatgaagaaaaagggtgtctctgatggtccacggtcattggtgattcaccctanggatgcttctgatctggacaatgtgctgaagattagttgtgctaacaacagcaatgggagcgtttccacagtgactggcagtgggtctg

SEQ ID NO: 161227 - DNA, 486 bp, Glycine max
  unsure (1)..(486): unsure at all n locations
caagcttgatagatgctctgtattagaggtggcctgttaaaacaataagaatattttngagacaagaacaaactaagtattgtaaccgttgatcagtccacatggacgaaagggatacttgaganaaattgatgttaattcttacactttgttagagttggcgaagtttcatgtgtatctcaagctctattgtgtaaaccacctattggagtgattagaatacatttgtctatcaaatatatattatttgtgaaagacaagagtgacttagagacaaataatatttggatcttaatctcaaggggagattaagtatagtgctagaagtggcctagagagtactcattgtagtcaaaatagacatagaggatactgggctgaatcaaatatttgattaatgaaacccttcatgtttgaatgataaatgacatagccaagaatatagtgaaccagtcaaaatctgtggtgttcattactgatctatat

SEQ ID NO: 161228 - DNA, 430 bp, Glycine max
  unsure (1)..(430): unsure at all n locations
ctgctcttagaaaaaacaacagtaaagttaatgactttcttaaatgacagacacatacaattacacataatgaatgcaaacacatgctgtttgatttaatgccacacatcatttcacaaaaataaaacaaaaattaaaaagtgctaaatgaaacaattatctcacaaccctaacacaaacatcaaaattcaaaatcaattacttcttatctgatgcagatacagatgcaggtccatctatttcctcagtggcagcagtggcttccaaatttatgcgagcctccatgagtttttcagcgatttccgcatcagtgtagccctgatcaataagtttgtcttcaaagatggtgagactgagctgaatctgacgctngcgatcatgctcaaagatatacttgttgggcttcctgtaacacatcaatgccctgatc

SEQ ID NO: 161229 - DNA, 445 bp, Glycine max
  unsure (1)..(445): unsure at all n locations
agctngcacgtgcccagtgctccatcatctctcccagcgagtcaattgtctcttatggcgctaagtgcacctggctcgctaagccaaaatccactaactctcacttagcatgaaaatggtgctaagcgagccttcgaggacagaaagcccttaaaagctaaagttggcgaaaaataaaggagtgatgagagagttcggatagctttngtgaaaagagacgcagtagagtgaaaaatctcatctttcaagaggattattaggtttagaagtgatttttaggtttctagaggtggaggagacatcctcaccactgtgntaatcttaatttacttcaaaaacctcatcttgttgctgaaaggtgataacttgcaatggaggctangtctcttgtgggaattctgctgagcctgatgtaaactcttactatctattaaaagtgttttat

SEQ ID NO: 161230 - DNA, 207 bp, Glycine max
tgttatccaaggctcatcttggttgtgaagctccttcttccatggcttattccgaaatggatggtgcctcctctcacctcttctcctttgtcatccgctgcacctccatggtggaaaatcaccattaaaggacctcattgaagctcaaagattcagcctccatagaagccccacaagcaagcttccatcaactggtatcagagcaac

SEQ ID NO: 161231 - DNA, 438 bp, Glycine max
  unsure (1)..(438): unsure at all n locations
agcttggagaacatatcatgtatattgggttgtgccaatgctttggtgagaaagtctgccacttgatcacttgttgaaactggtagtagctttagagtgcccttcaaaaccttctctcgtacaagatggcaatcaatttccaaagtgtttgtgcgttcgtgaaaaaccggatttgaggcaatgtgaattgcgctttggttgtcacacgaaagagttggagttctagtaagctgaactctcatatcttgcaaaagatacaacagccattgcaactcacaagcagctgaagacagagccctgtactctgcttctgaagatgatctggacacagntgcttggcttttagcacgccatgacactatagatttgctatgaagaaacatatcagatatgatttctagatccatcagccgccatcacattgataccatagttgat

SEQ ID NO: 161232 - DNA, 461 bp, Glycine max
tatgaattacttaatctcaatctaaatataagaaaatttattaatttcaaaaacaaacaaattgtaactacattagcatgtttaatgaaactattttaaaattactcttcaattaattaagtttatattttcaattatatttttttattttttgatgtcaagttttaataaaggtaaattcagaagaaaaaaaaatcatttcttaaatacaaataataaaattaaatgatataaattaaaaaattttaattaacgtaataattgattaggttttgcttatatatatttatgtcctgcggaagtagtagcttaccttcaaaagataaaccaccaagtacatatgtacaaatttgttccaaattaatcaataatttcatattgaaatcttagatacacagatacaattaactcgaaaggagaacttttatgatagttatatccgcatcgaaaatattgtcttt

SEQ ID NO: 161233 - DNA, 436 bp, Glycine max
  unsure (1)..(436): unsure at all n locations
ggaaggagagagaacgaaaccaagggaagaagaaagcttgtggggggaggttgtctgggtgcancggganaaagaagggaatgcgcgtgatgaaaaacgtttttttaaaacagaacgaaagaagagtaatgttttttttttttaaaaaaatatatttaacttnttattttnnttaaatgaaggggtattttagaaaagttcatccaatttgctaggggtgcaccagcaatttcggcttgggtgcaccttagcaaaaagcctaacactaagcancttggactgtntctaatntctttttcccctttgaataatanaatcactatgtaagatttatcaaaatttaacacacacaaaataaaaccaaattctttgcagatagcttttgataccaagcttcttacttacaattttttttaatttctatttcaagtactac

SEQ ID NO: 161234 - DNA, 443 bp, Glycine max
tgtgctattaggtgaagaaccatgagtgtttgtgtatctagcaaataataattacaaatattatggaaactttaattacataatataatactcatcatatactatctccacataaattactaaatagaacaattagacattacgataaacagccatgggattggaacatcgctcttgtctacttaataattttctgatatattaattgtcacattgcacctatctatcatgcatacatatagagagatttcatatgtacaactcttttatgatggtactttcttgggttaattaagtttttaatcccttaagttttttagcttccaatttttagtcttaaatgttttgtaactactttcaatcttacattacttttttgtcatcacttttagtctctcatttttttttatttttcaaaattagtcctaaatataaaatagatg

SEQ ID NO: 161235 - DNA, 440 bp, Glycine max
agctcggacactttcaatatgattgccctacgtgggaaaagaaaccaaattatgctgagatggaggataaagaggaacatgaggatgagctcttgttaataaccttcatagattgcatagaagggaagaaggatgagtggtttctaaactcgggatgcggcaaccacatgagtagtaacaaggagtggttctcacaatcggatgagaactttcggcacaatgtaaggcttggtaatgatactcacatagctgtgaaggggaaaggtagtagttggatggttgtgaatgaaatatacatgaatcacacatgtatatatgttcttgaactcaaaataatttattagtataggactgcttaagaataaggctaattataacaattctaacacatgggcatgtgtctcctagaaagcccgtctggagtacatagtgaacaaatg

SEQ ID NO: 161236 - DNA, 450 bp, Glycine max
  unsure (1)..(450): unsure at all n locations
cgcttgaggggaattntgggcttaactggttactacaagattattgtgtaagattatgggaagattgctaaaccactcacgaatttgttgaagaaaggagcttttaattggagtgcaaaggcaactgagtcctttaatgcccttaatgacgcattaacccactctccagttttggctttaccagactttaaagaacctttttccattgaatgtgatgcttgcagaacagggataggagctatgttaacacaatggaaacgtccagttgcatatttcaacaaagggttagctacttcagttttaagtaaatctgtgtacgagaaggagttaatggctntggtcttagcaatccagcattggatgccttacctattgggaagacgtgtcactgtattcactgaaccaaaaagactgaagtaactgctggaacaacggataaccactccaaat

SEQ ID NO: 161237 - DNA, 452 bp, Glycine max
  unsure (1)..(452): unsure at all n locations
agctcgtacgtgcgcctaacatctaatcctattgcttacaaaccgccatatgatagtatcttgtgcaaacatatccaaaattggtgtttccaaattagcatgcacatctctcggttaaatagttgagtgattaattcttaggacatccataatatctaccactttcagattttgaaggccgtcaataataggagtgtcaagagcaaggttgctctccaatctcagccatgccacgactcattccaaagtccagtatttgatccattgtccaatttccatttatatccttacttaatgacaattttagaagagaaaatgcttccccaaggaaatgatgggttgtgtcctaaagtagctcccataaaaatctaggataatatntagatntgaagactctagaaggaaagacattcgacatagacataatcctgcatacttgctntcctaacatg

SEQ ID NO: 161238 - DNA, 388 bp, Glycine max
  unsure (1)..(388): unsure at all n locations
tggatgtgttgatggggacccggtgctgagatgttcgtggataatggctacgtangagtacgtgagctcagttgaaggtgggcaactggggatggtgggttcatgtttgatttgaggatgtgggagagttgatttgcaccatctcccgattgccacctagtaccacatatgactggtgccccatatatccaccaagcttgatgtgaggaagtgtggaagagtcagtcttcctacttttgtttgttgaccatatagtggtacctggagatatgtcgcatgggtcatgagaccttggggaggtcatgtggtgtgctatttcccaaaaccaagcttgtccaatcccaacccaacctgggcatagtcagtcagtgtgaacctgtgacgtacc

SEQ ID NO: 161239 - DNA, 324 bp, Glycine max
agctagaaggtaattctatatgcttttggtaacccggtgaacccagctggccatgaatcaaaatcctgccctagtcccagactctgtggtatatgctcctctaccgaccaccacacagaccttttgcacttatgtgcaacaatctgaaagctattgaacagcctgaagcttatgctgcaaactatttacacaaatctcttaacctcagcacgaaatatccacaacagacaactataacctttcagcaacggtcaatcccagaggtggaatcttccaacctagatgggcgaaccttattttaaaatggtgtggcccaagcgacca

SEQ ID NO: 161240 - DNA, 440 bp, Glycine max
  unsure (1)..(440): unsure at all n locations
tgcctcanagagatctangaaggataaagctgctgatttaaccagttccgctcccgaatatgacagccaccgttttatgagcgctgatcaccatcagcgcttcgaggccatcaagggatggtcatttctccgggagcgatgcgtccagcttatggatgacgagtataccgacttgggttcagccttcttggcacttctgattctctcgaaattgctaaggaaaattgtttccgtgaagaaaatccaagccgatgcgcttccgtaacgtttccgtgagtgattacacgaagattttcgaccgctcttcaacattcatcgttcgttcttcaacgggtaagtacctcaaatcgagcttttcaattcattctatgtacccgtggtggtccacattttcgttcatgtatttttattctcattntcatttactttccgtaccccct

SEQ ID NO: 161241 - DNA, 446 bp, Glycine max
  unsure (1)..(446): unsure at all n locations
agcttgttgaaattgccatgtttggattttttaaacatacccattctgttttagggtttttgtgatgatgttagtgatgtttatatgctgaaatttgctgatgggaatatctgttgggactaaaggtagaactaaccctagggtaaaaagtgagaatgtgttgttatgagtgtgaaaaaaacagagtgagactttgaggggttaaaggcttagtctgaattctgtggtaaatggaggttaaagtgagttaatactagcttgaaatgtcatttaggacttatgagaaagcttggactgtgctttagagataaattaatgaccaatgtgaacaatgagccattctagggcanatntgggtgttgagagtcaaatttgattcggagagatttatgtggtaatccagttgaacaatctaatggatgttatgactggtggatgtgagagtt

SEQ ID NO: 161242 - DNA, 443 bp, Glycine max
tgtccacaaaaataagtgtttgaaagtttatcatttcttcttcttactaagtaaaatggatcatttttaaggtccaacgccttaaaatgatcacctttcaagtaaaaaagagtcacttgattcacgcataagaaagaactatgtaggtatgatttcctcatcccaattgaggaatacgtagcagtaaagggaaatacccttgtcgaccccaaaaagagaaaaaatataaaaagggtataaaggatataaggacgtaaaagggaacataaaaatctaagtcatgtttgcacatttgattatatgctgccgtctcttatgacggacgtgtggggtgctaataccttccccatgcgtaaatacaactcccgagccttgtcacttaaaaagtcgtagatcgcgtcttttccggtttttccgacgtttcctcaaataacgtggtggcg

SEQ ID NO: 161243 - DNA, 419 bp, Glycine max
atctttagttaatcgtctttacctaaagcagtctttgtatttgtttaaaatgcatgaagataaatcagtaggagaacaattggatttgtttaataaactcattctagatcttgaaaatatcgatgtcaccattgatgatgaggattaggctttgctattgctgtgctctttgcctaagagttactctcatttcaaagagactttactgtttggaagagactctgtttctcttgatgaagtgcaggctgctctgaattcaaaggaatcaaatgaaagaaaggaaaagaagtcctctacaagaggtgaagggctgacagcaagagggaagaccttcaagaaagatagtatatctgataagaagaagcaaagcttgaaactagaaaatggtgaaggaacatcttcaaatcagatgttatact

SEQ ID NO: 161244 - DNA, 409 bp, Glycine max
tcggaagatagtgatgaggtacaagccctaaatgcagagcttgaaagatcctgtgtagtcgaagagaagttcaagtccatagccatcaaagtctgaaaagagtatgatgaactaagggatgtcaatatggccaccgatgaatccttggaatgagaaaccaataatgcccgaaaggaagaacacgaccaaagcaaagttttgaggggctttatatggcagcaatattgagctcaagctccgaagaggtgaaaggaatcatcacgggtcaaaggcatgatcttgaatgacgagctaaaggtttgccttatgtcgaaaagaaatttgtcccaacagttaagcgagactgaagggaatatgtgggccatcatcgataagtgcaaagagaagctaaatctatcggcgactcacg

SEQ ID NO: 161245 - DNA, 462 bp, Glycine max
  unsure (1)..(462): unsure at all n locations
gtcacctgaggcatgaagcttgtcagtggtgttcataagcgttgtctttaaatacttgcaaactgtccatgtggggctcaactcatattgaatgagacaaggagcttaactaacagagcangccaaagaggaggaggtggtgaatcgagaggagctttgaactngttaggcatgggactgagttctgggttgtcacctaggttcctctctggattatttacgaaagaaaagccagagaagactagggagcataaagacgaaaatattcatttgatgggttccttaccaagtacctctttatgatcacaacctgtaccgtctatatcttaagttgatcagctataccatccatattacatcttaggatgtttcttcaataatcacaaatgttcatgtattcagtttntgaatttgtcattcgctgtaaaaaagaaatatattcatgtatagtgtgaagtcatg

SEQ ID NO: 161246 - DNA, 409 bp, Glycine max
tcggttattgatcaacatatgaagaggcctccccttttctttctctttattaccatccttaacctttttggtactgcatatgagaaggtcctcctcctgacgagtaaacccttgatcaccgctctcaaaaatcctagcagagctcaccatatatattttttttgtggttgactgggttgatttcaatcctagtaaatatgtttctggctctctcttagtttcgtattcttctaaaacactttgtaaagttattgtttcttcaattaatatgataaacagaattaaacatatataatcataaaaagtttccggccatttatgtcccccgggtcaagaggaatttttgtttgaaggtaaagacgtcgcaataaaatagaaagtgttgttcagaaatatcgagcatacttgt

SEQ ID NO: 161247 - DNA, 462 bp, Glycine max
  unsure (1)..(462): unsure at all n locations
catgcaagcttanacgggagttttatcatattgctatagaccaattataccatantgtagggaatgtagcattttaaagggacaaccaaaaaaggtagtatagatgagtatgttaagatggatgtgtgaccatgtaagaaaggatatgatacagaatgattgtatacgagaaaatatttgtgtgatgtctaatggggaaaggatgaaagaaaatcgggtaaagtagtttgaacacattcaaagaaagctgtggtgaagagagtagatagcatgatttttaatcttgtgaatgtgaaaagggttagaggaagactaagaaggacattgaaggaaattattataaggggtcttagggtgataatatccttggaaatttggtgttcaactgaatctaatgggatcttgggatccatatagngacctcacacagtagaataaggctattgttggtatttgtctata

SEQ ID NO: 161248 - DNA, 398 bp, Glycine max
cgtgatggttgaatgaataggtcttgttttcttcgttcaccgtcgtacaaagttgagtagtaatatctgtaaaagaattcaagaaattatagcattacccaacaaattagttgagaaacaaaaatgtttataggctgacttttttatttttatttttttgacaatacttacattgtaaaaaacttcgctattactgaagtacaatgcaaaattttgaatggcagatcgacgacggttaaatatccgttaaagctaagtgcgtaaaaaaaaaatttatagtcaaaatgacactgccgttaagtttactcattacagatgatcaagaggtggttgttgataataatagacaaaattctaattggtggtactaatgggttgaccatcactaatgttagtag

SEQ ID NO: 161249 - DNA, 435 bp, Glycine max
  unsure (1)..(435): unsure at all n locations
ctattcataaaaaggggtgaccaagctactatgctgtaaaaatcacccttgacagatacaatgaacacataagagcatcatttaatagatagtgaaagagttttacatcaaagggtcagcagaactccttaacangagatttatccttccattacaagcaatgaacttttcagcacaaagtacaatattttatggaagaatatggttgagaatggttgaggatgctttcttcaacctttaataccttaatctcacccctcttacctaaactctcttggaggctggtggtctgacgctcaaacttctactcttgctctatttgttgactcctctctttattctacatctacctcagtggttcacaggctacttgaacgtcaaattctaaagctcgcttaacgagattgacccctaacgccaggtaataatttggct

SEQ ID NO: 161250 - DNA, 336 bp, Glycine max
tttcaaattctaattcatctgtttactgtagattgaaagaagaggttacctgtttaagggacaaattgaccacttcttaaaaaaatgtcaagatattaaaaaatgtcatgcctgcatacattcaaatgaaggaaaggcatattccttttgaaacgaatgctatgtttggtcataatactagtaacggagttgtaagtacttctcttattcttgtgttaattaaatttaatatattattaacactcactactacaaaaaatagattcaacatcggtgtgttaacatcggttgttaaaaaaaccgatgtttacatatgcgccgtggcataattgtaat

SEQ ID NO: 161251 - DNA, 452 bp, Glycine max
  unsure (1)..(452): unsure at all n locations
ttaatanaattaattgttaaagtttcttanaaatatgtaaaataacaaagataaatatatttatattttactattttatgttatatctnttcttattgagtatttttttattaattttatgttgtttcttaaaatatttttaatcaagtttaaaataatataaaaaatacatttaaataggtattatatttttattatgttaattagtgtcatagttaaaatgaatcatctaatataaaattattcaaaaaataatagacaaaatacattatttaaataataaattaaatattataagtagcataatggttaaaataaataatgtaacataaaaaatataaaatataataacacagaataaataaaattatcatcaatcattataaatgtctatatttataatgctaaattaataaaataaataatataatcattacattacaaatgtgata

SEQ ID NO: 161252 - DNA, 451 bp, Glycine max
  unsure (1)..(451): unsure at all n locations
taagctcgcacttcccttgaaatggacaattggttaaattctatctcatttgtgagatctttntctccatccataactcctttgccttgctcatcgtggctatagttataaaaaactgttgatttccctgaagaatgttcgttaagacttttcaaagatgcaccatatgttgtgtggttttcttcatcattagcatccaaattgagttccatgtaacgaaggtcaatttcagtgattatatcatttggggttctcaaccttttataagaatcttgaggctcgtcatgaggtaatgtanggtcctcttccattggtgtaattattttatctcgaaaatacctctgagatagtatgtttgacaaaatattaacatcttttaactgcaagaatatgaaatggagaccaattcaacaatataataaacatanatgaagtgtagcttttgtatatg

SEQ ID NO: 161253 - DNA, 459 bp, Glycine max
  unsure (1)..(459): unsure at all n locations
agcttctggccaaataatatattttgagatatcaaaagtcttctttagtgcaaatacccctccatccaggaggaaaataccccttcattcttttaatcttgctatgctatggaagcaaggttggagattcatttccaacaaagatactatggtttttaaagtcttcaaagcaaaatattttcctaaagaggattttctagatgccaatcttaggaaaaatccaagctatgtatggcatagtatttatgcttcactggttgctatgagacaaggaatgaaatggagaattggaaataggtaagctataaacatttggagagatcaatggctcaattttgaggacaaaactcttattcccactacaccgtcattcattttagagtatcttaaggttagtaacataattgatccctttctcgtacatggatctgaacgtcatccncactattttcagccaaa

SEQ ID NO: 161254 - DNA, 395 bp, Glycine max
gttaaattatcgggccctatattaatttctggcttgtggtagtacttaattctttcgctctttttctctgttgtaaagtgcctcaatttgcacctctgctctcttttgtacttgttgacctttgtgtcatctaatatatataaaagctccagctgagtgtgtcatatatagagacactcaagcattatcccccaatatattttctgaagtattatatctaaattaaaaagttaacagaacactaacgtcgttaacggaaaattgaaaaaaggacctatatgatacatttcataaataaaatggaccatataaagacttgtaaaacttaatgtaccacaacacaaaaacataaatgatcataagtgacatttaacacttgaatgtatgagattcta

SEQ ID NO: 161255 - DNA, 431 bp, Glycine max
  unsure (1)..(431): unsure at all n locations
gtcacctgcggcatgcaagcttgaaatcaaattgtgtgaagagtttggactgggattcagagctttgtatgtctaggatttctagagagagaaaggtccaagttccagagagttttgagagattctgctgtgtgaagatctgcagagaccagagcttgaagcaagagccggtttgagagcttgagatgagtttgtgagtgattgtgagatcctagaggtgaaggagacatcctcaccacttgtatttttgcaatctttcatcttgttcttctctttgttgttaagaagacttcctggtatggaaagctaaatcctctgttggatcttccctgtaggtacctgatgtaaatatatntctatctatntaatgatgctttgtgtgttctctgtggtatctggctttcattccagtatgcctttaccttgatcac

SEQ ID NO: 161256 - DNA, 452 bp, Glycine max
  unsure (1)..(452): unsure at all n locations
aaaaaatattgatcttgcattcggaacttaaaactaagctacattcttttctttcttgccttcataccaattgttaaactcatgataaaacacaagcttcattccaatcatgcatgcaatccataatcaccatttcaaaactactgcaatttcaaggagtcaagttaaactgttcagtatgcttcaagacatgcatactactatccacaatcaaaagtaaaccaatatcaccacaaaaaaaagtgtactaaagacataagtataataattataatatttatccaaaacacacaagaacaggaatttaaaactcttgtgactagtcatcctgctgggtctcctgatcctgagtgccctcctcatctgtcaaatgtagcacaagagtggctggaggagtggtaatcaatcccaaggctggtgtggcanggtcctctggaatctccaaatatgga

SEQ ID NO: 161257 - DNA, 453 bp, Glycine max
cttgcaagcttgaaattgaacaacggaagctctctagaaattgaaatggtcataacttatgacacggaagtctcaatcaagcgcataatatatcaagacgctcggaatgtgacaacggaaagctttcagaaattcaaaaggtcataaccttgtacaacggaagtctgattcatgcgcataatatatcgagacgcttgaattaaacataggaaggtgtgggaaactcaaacggtcataacttttctaacggaagttcgattatgagcataatatatccggaagctcgaaattgaacaacggatgctctccagaaattcaaatggtcataacttgtcacacggaagtccgattcagacgcataatataccgagacgctcgaattgaacacggaatctgtctaaaattcaatggtctatacttctacacggaagtgcgatcaggccataattatcg

SEQ ID NO: 161258 - DNA, 394 bp, Glycine max
atgaccatttgaattcctcgagtgcttccgttgttcaatttccagggtcttaatatattatgcgcccgaatcggagttctgtgggataagttatgaccatttgaatttctcgagagcattcgttgttcaatttcaagcctctcgatatattgtgcacctgaatcggacttccgtttgaagaattatgaccctttgaatttctcgagagcctccgttgtttaatttcaagcgtctcgatatattatgcaccttaatcggacttccgtgtgacaaagtatgaccattttaatttctcaagagctttcgttgttcaattccgagcttctagatatattatgcacctgaatcggacctgcgtttgaaaagtttgaccatttgaatttctcgagagctt

SEQ ID NO: 161259 - DNA, 368 bp, Glycine max
  unsure (1)..(368): unsure at all n locations
attgtctgatggctgacaatacatgtataacaaaatatttatgaatggttctgaatagttgacagatatgggtggaaaaagaaagttcatatacgtttggtctgctacacctctccataagcacttctaggagaacaaaatnttaaggaaaaacgaaatattctctcccataagttaaaatcagtttatccataagcctatttgcacaaatcctttcatattagctttcttaaaagatgagttttaacttatgcctaagttaattttcctcatcgaaagcttatttcttttcctttcttttctagaaggctatagataaggtatgcaagagacctttgttacttccttatatacgggaacatgaccct

SEQ ID NO: 161260 - DNA, 321 bp, Glycine max
tgtagctaaaaggaaaaaataggcgacgtggagcgttgtatcttctgcataacattgattgccaactcaactttcctttcctgtgaccatctacgaagagctttgttccttggttcattctcccctgaaaagtgatgtttccagaactctgtgtaaagcaaagcttcatggtcgaatcaaaggtgattcaaaaatgtctgatgataacaaagaagatgacaaaggtgatgaacaaaaagctcaaagatcatccaaagattgagttcaaaaatttcaaaatagaatcaagattacttcacgatccagaggaaagttgatttc

SEQ ID NO: 161261 - DNA, 342 bp, Glycine max
tgcactgaacaacctcatgcatgcagctgaaccaccatctcttcattacctccttcagctgcagttacagccccaccatacgcaccaaccacttctccacccgcttctcctgcaccaaatactaaccgcagttcagaaggttctcgagatcctcatcaaccaactttgtggtcgcatcaggacttaatatctcacatgaaccgaaccttctgcatatttttggctgctacatcatcaaagttgcatggtgacatggatcactactcacgtgaccgactttgttgctttcgtttgatcgatgtaacagcttctttgttttttttttttttggatcggttcttg

SEQ ID NO: 161262 - DNA, 381 bp, Glycine max
tataacattataagcttaccgtccagtatgtgaatatccgtgtgttgttatcaccgtataaatccgggctaacctgttatcatgcacatgaagtcattacaatttacaatcatagttcttagtcaaagacaggtacttagattgcacacttggtatgaatgaaataatgactattatttcttagtacctgccagccagcttcgatgctgttaagatcttgaccaaatgagcctcctaatatccaaagctgagacaagctgaactcattagtctgctgaatcttgggttcccacacatttatagtggcttttgctccataatacttgtctccttcaacatatgctattgcatgctgattaacaacaacacacataaacacca

SEQ ID NO: 161263 - DNA, 383 bp, Glycine max
  unsure (1)..(383): unsure at all n locations
agcttggatttcaagtgattccaactgatnttatgtacataatgaattctaatgaggaggggaccttctcaattggnaatctcgtccatttggaacccgtccaaatcgaccacattctactgtttaaattacggacagggcaactattggcttttcattcacaaattaaattattcaattaatggaatgaaaaggaaaaaattggaaagaaagaggaagagatggagaaagagtttttatttattatttgaagtttgtttaagttaagcagaaaggagacaaacacttacaaaagaaagggcacaaacttctcccacatgaaatgctaaataggggtttgatcgcttcactctgtttggcttagtgccctctctctcttcttt

SEQ ID NO: 161264 - DNA, 431 bp, Glycine max
  unsure (1)..(431): unsure at all n locations
tctaaatgctgaaataaattgctacagacacttgccttttactttatcctttatgatgtggctcccacttcctatacattctacaaggtcctagttgaccagatattagataatcctttatgctctacattagtaattaaatccttattcaaagtggtgtttgatagagccccaatgacatggcttgatccatgtagctgatctcacttagtaggacatggactatggagttcattccttactaccctattcttctaattaaattatagtttttgctcaaagtcaagtggccatgtgttttttccacacttgaatggcttttgcatttggggacatgtntcacataaaaaccatttgtagacttgcatctaacagcttagtcttttaagatgattgtttgcttacaaagataattaatcatagctagatat

SEQ ID NO: 161265 - DNA, 494 bp, Glycine max
  unsure (1)..(494): unsure at all n locations
cacctgcggcatgcaagcctttagccttgaattagaagttgaagcttgcagtaagtttctttggtgggtgtttaattttttcataccaaattaacctaaatattgaataaataactatattntgagntttcaagtctaaaatgtggttaaatacttnggcgaactcaaagtgttgatttattttctataaattgatatttcgtgatattttaaggaggtgtgttctggctaggggtcaaaatctatacgaacaagagggaacgaagggacaatagaatggaaaatgantttgatttgtgaagaaatctgcataactctgttttttatatataaaaacaactaggaattccatcttaaaactctatcacaaaattggaagttgctgaaatgcgattctatgtgaaaggttttgtgtttctggaacatgctttctctcaaatatgcccaccacataatataaaggaaaattttcttcttcaatacctacaatttat

SEQ ID NO: 161266 - DNA, 457 bp, Glycine max
actaagctatttcttaggtcccttccattttaggttcaacttttgtggctacctatctttcagtaagatccaataggcttttccaagagcatgccaagtctgggcaagaaataagaatgaaaagaggaatttactatcaggaatgaataaaaaaaaggaatgctaccatcatcaccgttatgttcatctctaaagactacaaaaaatatagatcaacaaaatgaattgaatcggtcttccaaagctgtcaatcagatatttttgtaaaatagttacaaatgaaaaataatgaagctatctcttgatattcttgaaatgtagccccaatatctaattccaatctgtcatgatagcaattttctgatcatcatgaatggaggcagcttcacctcataagaacttgtgatagaactcatccgaagatttcaggtgagaaataattatctggtgtcattat

SEQ ID NO: 161267 - DNA, 477 bp, Glycine max
  unsure (1)..(477): unsure at all n locations
agcttcaagctntagctatcttgttgttcatgttgctccccttatctctaanaaattcattgttacatacatccatcatccttagagtatgtgaccggttaacgtattctattattcatggattagatgcccagaagtcctatgtattcccttgcactctattacatgttgaaaaatcctttggaagacaatcccttattgcagagctttgtggatggagatgatgcttataagaacctaggatttaagttgataccatatatttctaaggttcatttatactaaaatgtgacatgtaataaacaccaacaaaaaaaatgcaggatcaggataataagcgtatctaaggggttttgctcccacgtgacttgtttctctcaaggatcatggatagtaaagaanagtggttgaaagaaagcatgtttagtgcgacaagcactagatatgctntatatccatgtgaagaactatctatag

SEQ ID NO: 161268 - DNA, 450 bp, Glycine max
tctctgagaaaacttccttgagaagctagagcttagctacacacacccctctcataactaagcccacctgcttgagaaattaccttaagaagattcctaaagaagctagagcttagctacacatacctgtctaatagctaagctcacctccttgagatgagaagctagagcttagctatacacaccctataatagctaagctcccccccatgacaaaaacatgaaaatacaaaaaaagtccttactacaaagactactcaaaatgtcccgaaatacaaggctgaaaccctatactactagaatggccaaaatacaaggcccagacgaaggataaacctattctaatatttacaaagataagcgagctcatacttagcccatgggctcgaaatctaccctaaggctcatgagaaccctatggcctgtccttggatctctagcccagtctac

SEQ ID NO: 161269 - DNA, 477 bp, Glycine max
agcttatcagaaagctctgagagaagctgattgtgcaatatcttataattacacgagtgagatcacaaactaatgcaaatgaaacacttagtatttatcttcaaatataacatgcaacccatcatattgacgcaatcgtaacaggaaatggtctaagatgttcatgtgacattggacatagccactacataacaccgtaaactcttgagagaagataaattatagaaataaatgatatcaacgacagattaaaaaagggggttcatttgaaaatatatacaacgtattttgcacctatagattctgctctgtttacagagagatagaactttgccttccttagcttttcttcagcatcatattaccagcctattcatatgaacaagaattcattttaaccttatagaccgctctgcgaactttgacaatcaacttaacattgttggatgtcctgtctgtagcattctctagatcatg

SEQ ID NO: 161270 - DNA, 451 bp, Glycine max
tactaagcttattcccttaaaatatatgcggaaaacgacgcgatgtgtgagtaaatacacatgttgggcaacgcgggcagtgcgggcacctagacattgatactataccctatggtcgccgtcaatggcccagcctctgactctgaccctgaccttgaccctcaccaccatcctattccattccattctctctctctctgttccattatgccacttgtttttattgttcatcaacttagtttcacttggcgcctgataatgttcaacttttccttcaatttgttctaaacattcacaatgtaccactttggtacaatataacttaacgatgcataatcatatttttacctacatgattgacacttaattttgtttcttagatatgtaggtaaactttaatctagatttagagaaacatttattaaaaaaataatatgtttatagatctaat

SEQ ID NO: 161271 - DNA, 492 bp, Glycine max
  unsure (1)..(492): unsure at all n locations
gtcacctgaggcatgcaagctcgaaggaagacgactgtggtgtgaactgtttgtttgacaggaggggtaggacttccttntttgataagttcagcacttgccactatgggccctatgctctctcctagagaactgctaggcatgacggagtcagcatcagagggactattgctgggactcaggtggtaatctctccaaccaccaatattgctggatctagatgtgctctggatggtctgacaattatcaaagactgggagaaggagttaacctanagaaaccgtggataagttgctctatggaatgcctcatctagacagaggtgacaaaaaggttctcaacaccttcgtgaggacatccaacttgatctacatgtgtaggatgatccacagtgtgttattcaacatactcatgcctaatgtatgctcaatggactatgtcaaggacaaatcttttctgcatctataacattatggaagtgagaatgtgaat

SEQ ID NO: 161272 - DNA, 437 bp, Glycine max
  unsure (1)..(437): unsure at all n locations
ctcagcaaacgccttatttccataatggaattctatcaatagacctccaatctttaatggagagggttaccatcactggaaaacccgaatgcaaatttttattgaggcaatagacctaaatatttgggaagccatataaatagggccttatattcccaccatagtagaaagaattacaatagatggcagttcatcaagtgaaagtataactatagaaaaacctagagatagatggtctgaagaggatagaaaacgagtacaatacaatttaaaagccaaaaacataataacatttgccctgggaatggatgaatatttcanggtttcaaattgtaagagtgctaaggaaatgtgggacactcttcgattaacacatgaaggaactacagatgttaaaagatctanngataatgcactaactcatgagtatgaaatat

SEQ ID NO: 161273 - DNA, 461 bp, Glycine max
  unsure (1)..(461): unsure at all n locations
ttaatcacctgcggcatgcaancttggcttgagctagcactctccacttctttaatatgtcaatcaatcntttgaagtattattaattatcagagcgcttttggatcctaaaatcacggctcattgaatcaataatgaacagaaaatagtgttctcatcccctctgagaatctaacttcaggataaaaagcctgacatacaaaatgattcgtcttccaaagataatatcataccaacatcggtaatgtgtacatgaagatacaatgctatatcaagagaaaaaatctactgtcactgcattctatgtagacttttgtagaaaatcttcgtcggggaatatgcaatatccaattagccacgaattatcataaataaatctttgtgcctgtttatatcgggcccacaaacaacacaatatacacatacctatggatcttgacactgccaaaacacctagaact

SEQ ID NO: 161274 - DNA, 352 bp, Glycine max
ttatcaataaacacaagttgagttgtattcttataattagaaggtatctcttttatcttagtgagagtgattctcctaaattcttgagtgattcaagaacaccctgtgtgtatcaaatgactttcacaacctttgtgtgttgccctcgctggaaaaagtgattctttccttccaatcatctccacccttgttctttcataccacaattccagaaaatccacctctgtccaaaattatctcgtgaccataactcccattttacacactcaaattaagtgattcttgagcctaaattgaatttcaaaacgagacctttcacctcgttttggaatcacctcatttggagccctgt

SEQ ID NO: 161275 - DNA, 280 bp, Glycine max
caacaaattgctgtatcaccaagtgcaattaatgcaattacactcaagcactgttgctatactacctacatctaacgggtcacatatccctgcagcgtagtcctacctagctctaatgtgtcacatatccctgcaagtagtctattatctctctgaatgattctaccatccctatatgctactaaacgcttcgatcacgtgaagactattttctcgcctgccatttcatgggctcatatggtctcttcctccacttacatgcaactcccgttactgtcct

SEQ ID NO: 161276 - DNA, 468 bp, Glycine max
  unsure (1)..(468): unsure at all n locations
ggacactaataatactaagcttaaggactaatgtattaatactatatatgtatttatgctnntattgangtggtgacaaattcctagttgtgcataaaaagctggttaaaatgataaatnttaattttagtacaaattttaaattttatgtagtatattttgtgaaagggttggagtactccttttactcactcccaaaaacagcactatacactttaatggtgatttactctaaataattttttttacagaaatttaatatgttcttatcgcattttgcatcataaatttaaatttaattataaaatcattcaaatagttaagaaagcttatttactcctgaaaaataaactataaaaagattacaagactcataagatgctcttcccactaactcctatatgtacaaatctttgaactatctataatttaattataaaatcattagcagatattatcacattattt

SEQ ID NO: 161277 - DNA, 424 bp, Glycine max
tcggaagaaagtgatgaggtacaagccctaaatgcagatcttgattgtacctgtgtagtcgaagagaagttcaagtccatagccatcaaagtctgaaaagagtatgatgtgttagtgcttaactctactgagttttaaaagattggctaagattttgttaaaacataagcacttagacaatgaaagaaagctggagttgctgcacatgatgtccaaccttatgtcaaggaataagatcgggctgcacaatgcacaaggcaagataaagtgtcaagtgaagaattgaagctgcaggatccacgatgtcggatacaatgtccatgacatcctgcccgaaaatactggagttgctgcacaatgcacaatgcaagataaaagaattgaagctgcaggatccacgatgtctgatacgatgtccatgaca

SEQ ID NO: 161278 - DNA, 459 bp, Glycine max
  unsure (1)..(459): unsure at all n locations
gatctcatagtcacctgcggctgcaagcttctaaacagtgctgacgtangcatcttccttgaaataaagattatctataataattgatatactcttttttgaaagaatctttaaattcatttaaaaaataaagattgaaatgatagataaaactaaaataagaggttgagggaattataattcctaacacatcttcatagaaacaaaaagttattaaaaatctatttattaaaaagtacctcctaaatgaaataattattttcaagaaaaatcgaaagtaccaattaaaactttgacagaacttgtaaaaatgataaaagactatattacgctaaaaatgaaatgtccttaagtttataatgcaatcatatattggatatacagaccccaggtatgtacgtaacctcagatgaaacatattggtgtgattacttaaaatgatcaccattctcattatgg

SEQ ID NO: 161279 - DNA, 450 bp, Glycine max
  unsure (1)..(450): unsure at all n locations
ntgaattcattctatgcatccttaggggtccatccttgttttatatgtctacatcttcattcttctaccatcggtgatctttttctttgtttaaagcgagtttcgaccgattaattgtgatgtaatcttgtttaatcactgttaaaatgaattctaaccgatcgtatatgttgtaacctcgattagtcattgaaaaataagtttcaatctgtcatttgcttcgtaagtcctcttttaatgagttggaaaataatcaagtgaaatcgaagctaaaatcagctcataatcaagcttttgtccacaagaaaatcgcttgaatccgttcaaaggtccaatgccttaacggtctttttacatttatcagttaaacgaacctttcaaaagtctaaaatcaatcccacgcgtaactttcttgttttaaagaactacataagtctgagttcctcatcg

SEQ ID NO: 161280 - DNA, 434 bp, Glycine max
  unsure (1)..(434): unsure at all n locations
caagcttatgatgtngaatctagagtgattctcgttgttttgatgatatccaacatgatgacatgtagcccttgagaatgatttcaagattgagtctagaacgattcaagaatcaagagaagtttgatttcctgattcaagacaagatgaattcatgtttcgagagaagatatcaagaagactctcccaagggaagtattgaaaagatgtttcaaaaaattaacattacacaggtttgttttcaaaagagttttctcaaattttctaagttaccagagttttactctctggaatcgattccagtttcgtgttttcgttaccagggcaagtttgtttcaaagcttcaatggattacacgtcccattatccaaatgtgttacgatacagatattgtatcgttaccaggtgtggatttgatctcttacacttctaat

SEQ ID NO: 161281 - DNA, 433 bp, Glycine max
  unsure (1)..(433): unsure at all n locations
acttangggcgttggtaagggcttagagtaagagaatgatgaaaaagtttgctgtttacacagctgcacgaaataaaaagcctgcaacactcaaatttttctgcttcggtaaacaaatcgtatctcacacgccagatgttatatcgcaaatcgcaacggtcaaactgtggatataggtcttaggaacctccaaaggaaaatttaggatgatcaaacgggtaacgaatcaaggagggtgattttaccgaaataggtttaggtagcttctttgagaagactccttgagaagcttctttgagaagcctccttgcattaaatatgggtaaaataatacgatgaataaaattaacatcatttatattataatatttagggtgtacatctaactgtgtgagtcaacctgggtgtgctcatgctttatgcttttcttgct

SEQ ID NO: 161282 - DNA, 434 bp, Glycine max
  unsure (1)..(434): unsure at all n locations
agctagagatgaggaagtgttgaagggttaaacttcctgcntttattgttgaccacaaagtggtacctggagatatgtcgcgggggtcaagagaccttggggacgtcaggtggggtgctattgcccaaaaccaagcttgaccaattccgacccaacccgggcatagtcggtcagtgagaacctgtgatgtacctaagcaggcgagctcctggcagtcaacagataaaaggaacaaagaccacaaagcaaggaggcttgtggtggctggccagctgtgaaactcgattgatatgtgagatatggtctctggtaatcgattaccaagggtgggtaatcgattaaaaggcttaaaaatgaagacaggaggctaagatggtctctggtaatcgattaccacggggtgtaatcgattaccaggcttgaaaacgaagtca

SEQ ID NO: 161283 - DNA, 351 bp, Glycine max
  unsure (1)..(351): unsure at all n locations
tcagcctgatcgctaagcgacagcttatccttggctattctcgacctattgttgccaagcgcaattccttatggccataactgaggtccatgaagctaagcgccagtcatggcagctaagcaagattcattgcggcaatgtgagcgctaagcgagtccttatcatctaatcgcatgctcctctgtacttaagatgcatcattttagctaagccagccagagtttggcttattgagagttgcagcttttcggatctgcaaacctcgctaagcggtcggatcctcgtgctaagcgaagcctgtgttgaaaaaaaaactgattntgaatttgaaacatcggctaatcgcgtgta

SEQ ID NO: 161284 - DNA, 429 bp, Glycine max
  unsure (1)..(429): unsure at all n locations
cgctttagagagttattttgaagaatttaggagctgaacatatttgttgtaggtattgagggactgagactnttccccctaaataataccattaaaggaaaattcctttactgaggcgttgagcgttgttttatgatactgaatgctggtcggtaaagagctaaaaagagcttatgctaaatgttatagagatgaggacattgtggtgaatgagtgaacatgctagacaagattgagagttaattcatttgggagaaggtaagtgtagaacttgttgaggaaaagatggtagaattagaatctcacctaaaattgtttggccatgtgagaagaagactattagacaccctattaataaaaagctgaagctgatatggtggacaatagcccaatattagaggtagatggagatctagaaaaaacagttag

SEQ ID NO: 161285 - DNA, 360 bp, Glycine max
  unsure (1)..(360): unsure at all n locations
tgcagctngtatagntccgcaatntatggntatttttgtagtgattttgaaataaatcttggtttatgggtaatgttgtctctagaatatttccattggatttaatgatgaaatctgtgcattttcaggtgaaaaagaggctaagttttgaattgcaaaaagtagcagttgggctaagtgcatatccaccgctaagcatagcttcagcgcgcttagtgcaatggagaattttgcagagcgtcagcatcaaagtcgtgcgctaagggcgagatcaatgcactaagcgcagcaggtgccttcagccaggctaagcgcgagtctggcgctaagcccaatttaacttactcgtgctaagcgcga

SEQ ID NO: 161286 - DNA, 370 bp, Glycine max
  unsure (1)..(370): unsure at all n locations
ntaccatcagaatttatacatgcttcattaaaggcaatttctatccacttaaatttagtaatgatccactaacctaggaaattagaagaacttaatggctgagtgtaactgaaattgtggcaaccaaaagtcaccccataagccatcgagccaatcaccaattggtctcccaaatgctgatgcctaatctgccaattgggcccttattacaacttgaactaaaccaaactaaagcccctttagttgattaacccaaaacatatttttggtcagccaactttacatggattgtgccattatttatacaaacaaaacactctaaaattgagacgaagtggaacatttagtcctnctcatttgggtcatgata

SEQ ID NO: 161287 - DNA, 476 bp, Glycine max
agcttattcctcaaccacaaccacacctactgtctccgtaaccactgtctccacaaccacaacaacagtctccacaaccattaccgtacaataacctagacctcaatgatccagtgtcttcatacaacaaccttgaaacacaagatatctttgacatttatacttcataaacacaactattatcccaaaatgattctttttttttttatgcccaacaaacctcctttaaccaacaaaactatcatccatcataatattttacaacatcaccccatcacaacaaccacaaacacaaacatcaaaaccaaatgaacatcccatcactaatgaagatcccattatacgcatccattataatattttacaacatcaccatatcacaataaccacaaacacaaacatcaaacccaaatgaacatcacatcactaatgaaaatctcattatacgaattcacgaagaaaacatggatgattta

SEQ ID NO: 161288 - DNA, 450 bp, Glycine max
atgcttccagtgcattcaatagcacgatctactcctccattagtcatttcatcaatgaccttagtgccacatatcatagcaaaatagagaattagttctcttggatttgattaaattactttgtatggaataaagaatatttggaagctgaattgaagtaatgaatataatgaaactagaactatttgaggaatacagaaattgaacttaggtaaattgttttatgatatgaactaacctcttggactggtttgttgtgatctttcgggtttacaaaatcagtgaccccaaattttttggctgaccaagaacaatgaaatggagattttcatcaataagtgaatagcaatgtaattaaccatttaatctttaaaatatgcaaaataatgtaattaacaaaattcaagtgtataccttacgtgttgtggtactatctctattcaattggag

SEQ ID NO: 161289 - DNA, 386 bp, Glycine max
  unsure (1)..(386): unsure at all n locations
agctccttgcgtagccgctcttggtgctcataaaatcctaaaaccaatccctcttattactagctattttgaatnttctagttcctgaatgtacaaccttcaaattggtgctcgttcccctctttcttttctgcaaaaaagaaaatcaaatgctgtcaaaacatggatgaagtcctaagaaaatcaatatcaaagaaaacatggatgaaatcacaattaaatagcacaactacctatctttcagagtcctttggttaatttgtcttgtctccttatgttgtggggttttgattaataatcttatacttttgccttccaaaaaaaacttatcactaatcctcttttcattaatccaattgtgtatgttattggataaaagatcatgg

SEQ ID NO: 161290 - DNA, 427 bp, Glycine max
agcacaacattcgttcgaacaggttttcgttcattccgaagaccagaggtttaactaaggtttttactaattaaatgttaatcaaaattatattaaattttgttacttaaaaaaataaaccttaccttaaaatatctcaaaaagtttgctgattaaaatcatagtaaaatagcacaaaatccaccatagttggtagatgaataggtttcttaaccatgttgataaaggttaaattttctaatcgcgcgtatgaaaaagattttgttagaaaacgtaaaatttactttgatgatttctgcgtctcgacagttaatgtcatgacttctcatcgtgtgaatatcttacttaaaaaaatatcacagtaaaatcacaatatattcagcataaaaatttcaaaaattaagcatacaattgagctttgctcata

SEQ ID NO: 161291 - DNA, 302 bp, Glycine max
caatcggtcataccaaggactggtgcaaatttgcagctgattacctgaattgtggtcccctgcaatttccattcagctacctagggatgcctataggcgtcaatcctataaggaaagtgtggggggagcccataattagaaaatacgatgctaagttgaataaatggtaccagagaaatgtctcaatggcaagcagaatactttaattagttctgtcttgacacttttgctctgttttacatgtgtattttacggcccctacatagtgaaaataggcttatactatcataaacacttttttg

SEQ ID NO: 161292 - DNA, 379 bp, Glycine max
ttgcaaggataaattccaaacattttgatatttataagaacaaaaaatatattttagccctgtttttattgttaaaaaaaaagagaaatgcttcttacatactcttttacacacttcttcatacacaacttctcttatgtggtaaaatgtatttaattgaaaaacacgttccacaaaatcttgaacctaccaagtgtgatggttgggattggtatgaatgggatcatttgccacaccctttggttgggccctttggaaaaatggtcaaaggagctttcgacccattttcaattgattctggtaatggtaatgacttttttgtgaggatcttgataattccacgttgggttagtttaatagttttgatggaatttagtta

SEQ ID NO: 161293 - DNA, 437 bp, Glycine max
  unsure (1)..(437): unsure at all n locations
tgttgggaagatatcaaagtaatccatgatttgaacattggaaagctgcaaaggaagttctgagatacttacagggaacaaaagaccacatgcttacatataagaggtctgatcacctagaggtgattggatattcagactcagactttgctggatgtgtggatacaagaaaatccactcttggctttgtatttctcttatccggaagagcaatatcatggaagagtgcaaaacaatcagttgttgctgcatccaccatggaagctgaatttgtagcatgttttgaggctacaatttatgctaattggttgcggaactttatttcanggcttggaattgtcgacagtattgctatgccgctgaaaatgtattgtgataactccgcagcaatattcttttctaagaacgacaagtactctacgggtgctaagcatatg

SEQ ID NO: 161294 - DNA, 407 bp, Glycine max
  unsure (1)..(407): unsure at all n locations
tcaacatagaacacaaaagcatgagtgattagataaacatctgtatatacatcacctcgccagtcaaaaagacccaacacttttacctactgctgtcaatctcacttacttgcaatttttactgtttttagcctaaacttagtttaattctattctaaactatcaattatcaatgtttctttcaacaatgtcttatttctgaatttaaccctgtctaatactagttacctgagtttgatactcggattaatacgctttaatgttatatacttaagaatctagtgcgcttttcggcatatcagatttaccttgaacatacttgtatataaaaaaattggaccaataaagtagttgtgtaacatcccaattntcgtaaactagataaaataaagattgtattgataaat

SEQ ID NO: 161295 - DNA, 261 bp, Glycine max
catctcgctaaacaaagtcaggttaaccattgttagacaagtggcctcagatatcttaagaagggtgggggggttgaatttaaatcttccaaactgttctccattactaaatacttacttcacttctctctcaagatattaacttcccttatcgacaatctctcttaagtattattccattatacaccttcttcatttaattttcccccttcattatctgcgggtcatgggtaaaatattgtgcaccctatcttatctatg

SEQ ID NO: 161296 - DNA, 430 bp, Glycine max
tccatcaagtggtatcaagagcatcttcatctatgtgatgttcttttgcttcctctatctttttgttcggtgaattctctttaattccttgttcttcatcttattctccttgtttatcctccattgtcttgtggtttggttctgtttaaagtagactcaaaataaataaaccgattaaatcttatatctacacttgttcttgcatttctatggttcaaattttgtagatctactcttgaatcatgttttttgtgttgattttaggttctatcatttttcattcataatattcttgtgctgaacctttagatctaaatttcttccaaaatattgattagaaaaaaaaaacacaaaaatctaagtgtaaatcacttaatccatgttgtcttagagtcatgtttagtcatagtaattgtcacattatgttcta

SEQ ID NO: 161297 - DNA, 421 bp, Glycine max
tgagatgaagaagcgttgaatggtgaaacttcctgcttttattgttgaccacagagtggtacctggagatatgtcgtgggggtcaagagaccttgcggacgtcaagtggggtgctattgcccaaaaccaatcttgaccaatccctacccaacccgggcatagtctgtcagtgagaacctgtgatgtacctaaacaggcgagctcctggcagtctacagataaaagaaacaaataccacaaaccatggaggcttgtggtggctggccagctgtgaatatcgtgtgatatgtggattatggcctctggtaatcgattaccaagggtgggtaatcgattcaaggcttaaaaatgaagacaggaggctaatatggtctctggtaatcgattaccaaggggtgtattcgattaccaggcttgaaaa

SEQ ID NO: 161298 - DNA, 468 bp, Glycine max
  unsure (1)..(468): unsure at all n locations
agcttgagatgaggaagtgttgaanggttatacttcctgcttttattggtgaccacaaagaggtacctggagatatgtcgcgggggtcaggagaccttggggacgtcaggtggggtgctattgcccaaaaccaagcttgaccaattccgacccaacccgggcatagtcggtcagtgagaacctgtgatgtacctaagcaggcgagctcctggcagtcaacagataaaaggaacaaagaccacaaagcaaggaggcttgtggtggctggccagctgtgaaacttgattgatatgtgagatatggtctctggtaatcgattaccaagggtgggtaatcgatttaaaggcttaaaaatgaagacaggaggctaagatggtctctggtcatcgattaccacggggtgtaatcgattaccangctttgaaacgaagtcatgaaactaatggagcctctggtaatcgattaccc

SEQ ID NO: 161299 - DNA, 362 bp, Glycine max
tcatcctgatcgctaagcgacagcttatccttggctaatcgcgacctattgttgccaagcgcaattccttatggccataactgaggtccatgaagctaagcgccagtcatggcagctaagcaagattcattgcggcaatgtgagcgctaagcgagtccttatcagctaatcgcatgctcctctgtacttaagatgcatcattttagctaagccagccagagtttggcttattgagagttgcagcttttcggatctgcaaacctcgctaagcggtcggatcctcgtgctaagcgaagcctgtgttgaaaaaaaaactgattttgaatttgaaacatcggctaagcgcgtgtatccgctaagcg

SEQ ID NO: 161300 - DNA, 419 bp, Glycine max
  unsure (1)..(419): unsure at all n locations
tagcttctattacaagagatattatcaatatcttttaactgctgnctcagctgctgaactatcttgaatttgacatccccaaactctctactccactgcataagctggatttaagttcctcagcttttttttaagcacaaatcccccccaaccagcctgctgatctctagtccatgattccttcaccaatgtttgatattctttatttgtgagccaccaatccagcaccctaaagggcttagggccccaatccaccatatattgttttaataatattgggcagtggtctgaatagccccttggaattacatgttgagaggagtccggccaatgcgacagccactgttctgagaccagacatctattcaatctgctcttcacaagtccattgagtctgaaccaagtatatctgctaccat

SEQ ID NO: 161301 - DNA, 448 bp, Glycine max
gtgatcacatttctcattccagacaaacttctcattcttttgagtcaacttagttaggggcagggccaatttataaaatccctcaatgaattgtctataatagccagccatccccaagaaacttcgaacttccgttggagttgtcggttgttgccactccataaccgactccactttaattggatcaaccgcaaccccgtctttagaaatcacgtgtcccaagaactgcactttctccaaccaaaattcacatttcgacaatttggcgaacaatttactatccctcaggatatgtaagacaattctcaagtgcttctcatgctcctccttattcctagaatacactaggatatcatcaatgaacacaaccacgaactgatctaagtaatcatggaatatacggttcatatagtccatgaagatagccggagcattagtcactccaaat

SEQ ID NO: 161302 - DNA, 428 bp, Glycine max
  unsure (1)..(428): unsure at all n locations
agcttgtagaatggctagacatgatacatgtcaaggcttggttaggntcaaggataaaatggatgccccacattatttccatgacacaaatgcaaaaaatgatgatttggaaattttatgcaaaactggtcatgcatgcgcctatgcggacgctcaagtgtcaaatttttatggtcatgtntctgtttttgtttagtgcggggcgaaaaagtcgctagcgcacgggattttggttggtaatcaaagggagaagaccattttaggtcgtggtttcctttccttctttgtgttcatgtggtgacaattctgtattgttcagatattgatcggtccaaagacctttctgcacattttttctgttttcctgcgatccctgatcaggagctttctttccttctacttcttccttttttactttctcccattct

SEQ ID NO: 161303 - DNA, 408 bp, Glycine max
  unsure (1)..(408): unsure at all n locations
ntgagcaaattcaaacgacaataactttntactcggatgtctgattcagtcccgtaatatatcgagacgcttcaaattgattatcgaagctctgagaaaattcaaacgacaataactttttactcggatgtctgattgagtcccgtaatatatcaaaacgcttgaaattgaataccgaagctctgagcaaattcaaacgataataactttttactcagatgtctgattcagtcccgtaatatatcgagatgctcgaaattgaataccgaagctctgagcaaaatctaacgacaataactttttattcgactgtccgattgagtcccgtaatatatcggaacgctcgaaattgaatattgaagctctgaacaaattgaaatgacaataactttttactcggatgtctga

SEQ ID NO: 161304 - DNA, 401 bp, Glycine max
agcttttagaagccattgccactgtaatcgatacatcttttggaatcaagaccatagagtaaattctttaaaaacattctaagttaatcctttggccaacctttggtgttcaacttgaaattttatcctaagactctaaaattatcttgacatatttgtgaatttcttggtatctggattattgtctgaaaaaactgaaaagcatgttcctttggatcatcaaaacattagatagcttttcttttcaacttcatacttaaagggattaaactcattcaggtctggtttttattgaaaatgtgcacccataatggaatgaatcagttgttaccaagtgagaaatgaaagatcctattacaacatggatggtggttatcctattaaactgattagacaatgtc

SEQ ID NO: 161305 - DNA, 433 bp, Glycine max
  unsure (1)..(433): unsure at all n locations
actcaacttggtcatggtttcgtgtatcgattccttgagcctaattccatacacaatgcatagaatagacatggtgaatgccaacgatacattgaaacatgggttaaggaatcccaacgaggggtctacctatgagcttacttgaatcagtaagtcaaatttatgaaatgactataaacaatgtttgtgttatacatatctaattcatttcaaattcaaggcgcattggcagcaggttgttttgtgtcctattacaaatgttgttgtttggttatgtttgttgcgtaagaagtctgatattcatatcaaagctacaattaacaagttaaattgtaacatataacttattttgtgatcttattaaacgttgatacataaatagttngtccttctatcttcgttgatggtttttggtagtagtgcaataaacaca

SEQ ID NO: 161306 - DNA, 364 bp, Glycine max
ctcttaatgtctttagaggttatttccctcttgacatcttttgttttgaatggaattgccatgacagggttattgttactggtctttgatgtaggtagttgatatcgtgttgcgggagggaattccgaatggattaactcaccatccttcacttgccaattttgtatgacatttggtggtggatcacctatgatgtcttggttccaagggtaatctatatcctttctgatggcataagcatgaaaccaatcaaagaaaaggacattaattttgattcttccgacaattcgtagaacttgtcttggaatttgtttctgctcgacccttgtaatgttgaaaaaccatctcctttggtgtcattctc

SEQ ID NO: 161307 - DNA, 441 bp, Glycine max
  unsure (1)..(441): unsure at all n locations
tctatataagctgaaccattttatcaataatcacaagttgagttntattcaaaaaattagagtttatctcttttatattagtgagagtgattctcctaaattcttgagtgattcaagaacaccctggctgtatcaaaagactttcacaacctttgtgtgttgccctcgtcggaaagagtgattatttccttcctttcatcttcaaccttgttctttcaaaccacaatttcagaaaatccattccagcccagaattatctcgtggccataattcccgttttacgcattcaaattaagtgattcttgagcctaaattgaatttcaaaacgagacctttcacctcgttttggaatcacctcatttggagtcctgtagcttgagttattgccatttctatatttttgtcagacactacttaacctatgttgtatcatctcattct

SEQ ID NO: 161308 - DNA, 430 bp, Glycine max
  unsure (1)..(430): unsure at all n locations
tcatcatggacatgcaagttgcgcagatagatctatttttgtctcanatcaacatgcatattcaaacttatccaatcctttatatggaacccgaataagttaccccactatcaacaagatgaagccaaacatggcaagttagctagtgtcccgtccattgcactcacattaaatttctataactatgaacatccattcccttccatttgttatcaactctcagaacttctcactaccaaaaaaactttcaaagtttctcttttgccttaacctgctattaatcaagtggttgatgctcatagtcatagaaaacataaagaatcaaaatggccaactttttcaatgctcatatatatcttcggttttgaatattatatataggaacatgtaatagacaattataattagcctgttggatttgctaacaaaa

SEQ ID NO: 161309 - DNA, 295 bp, Glycine max
agctcaactaaaaccgaaaaggtttcttttctacaagaatcactgtaaggaattaagtagctttagcctgaaatgggaatgaaatattattgcaagttatgatacaatatgacctaaagggaatttcaagtgggattggtatttgagagacaccactatatgaactatctttcatataagtggataaaatggaatcatcatggaatgaagagagactataagattactatagagctaaccaagaagatttgtttcgaacaactgagaacatcgtttatatattccagggaaagaa

SEQ ID NO: 161310 - DNA, 422 bp, Glycine max
ataagctatgttgaccaaaataatttggtacacgagtttattataataatttattttttaaagttatgtatggtaagacatttcaattagtttagaatattttttattaactttaagtttgttttgctgtttgataaataagtttttttttaataatttttagtatttttttttagatgttagcttctaatttttagttttttatattttttatttttatcttcaatacatttatttaattttcttattatctttttaaataaattatgattttattatttttatattattttataatttttaactatttcaacatataattgtatcgaatacttataatttaataaactaatttttcaactatcaactagctttctgagtttaagttagttttatcaaacatagcctaagtaacttatttt

SEQ ID NO: 161311 - DNA, 425 bp, Glycine max
  unsure (1)..(425): unsure at all n locations
acacactagaaaggggattttatagtgngttggataaaaacttagtctttataaaattgttaaaagatattttcaaacagatatcaatggacgaaaggtttcgtccaaatggtacaaaatcatgatgtgctttaaaaccagttcacaaaactgggatatagtagtgtagaaatgatttatagaaaataactatttatatagaaattttatgctggttcacccaaactcttgggctatgttcaattctcctccaaaccttgaagggtttcactaatcaattcttttattacaaccaagtattctctatgccacttctggctacaacaagtactctctatgccacttctatcactacactcgttagagatatgggagcaacatgatcaacatggtgaacaacctctcaaggaaaagctgaagaattt

SEQ ID NO: 161312 - DNA, 447 bp, Glycine max
  unsure (1)..(447): unsure at all n locations
ctgcaggcattgcaagcttctgtccatggtgatgtaagcattgtttttancttnttgtccatggatnctnacagcatgtgaaattgtgtgtctgtgctctctcactcttgataggttaaagacgccgtatgcttctgcccaagttgtcaatacttntgagagtatagctttttagcttggcggttaagagtttgatagtttcattggattaatgtatttgagacttctgccataatggatcttgctatgtgatttcacattgattggttaagctctcattgcttgctttggactcttggaagaagattgagaaagtctaagttggtcgaataattctagaagtttatgttttattcgatgtatctccgacatgtttatctatattccaagttttcaaacatttttngtcatcttctttgatgttgatgtattgttctctccaagctg

SEQ ID NO: 161313 - DNA, 461 bp, Glycine max
  unsure (1)..(461): unsure at all n locations
cgcctaattaacctgaaatggagagaagagtgagacgttatctcttataatggacgtactaagtatttattacctatacttataacactacaaaataaccataaattggaagagcttgatacaatttacacaagttttatacacgaaagttagtcgtattcaccgattaacagctacgagactaccaagacatcttcgcttggtcgtaccaagatatgcccaacttgaaccccggtattgtgcagcataggttgccttataatcttggttgtttcccaatgaaacaaaaactaagaaggatgaagcctgagatgtgcttatagataaaggaagaggtgaataagatatctgatgttggcttcttggcagtcactcgatacccggaatgggtaccnacattgtgccagtccccaagaaagatgggaaggtgtgaatgtgcgtggactatccggatctaaact

SEQ ID NO: 161314 - DNA, 429 bp, Glycine max
  unsure (1)..(429): unsure at all n locations
agcttgagatgaggaagtgnttaanggttatacttcctgcctttattggtgaccacagagtggtacctggagatatgtcgcgggggtcacgagaccttgcggacatcaggtggggtgctattgcccaaaaccaagctagaccaatcccgacccaacccgggcatagtcggtcagtgagaacctgtgatgtacctaagcaagcgagcttctggcagtcaacagataaaaggaataaagaccacaaatcaaggatgcttgtggtggctggccagctgtgaactttgattgatatgtgggttatggcctctggtaatcgattaccaagggtgggtaatcgattacaaggcttaaaaatgaaaacaggagactaagatggtctctggtaatcgattaccagtgggtgtaatcgattactaggcttgagaaacg

SEQ ID NO: 161315 - DNA, 386 bp, Glycine max
tggaattgcatttgggcacctatgttgaatctcctatgctgtacctacatataagaaacagtcccactctccccattttacaaaatcatattcatacatcattggggcatttcaccgagcacttggtgggtgcacgtttcgacataaattgcaagagaatggggacaatgtggcatgccccattgcttcagaatacagcatatgcctaaagccttctcattcaaatcctcaactcaagaaaacaagcataaaaacaaaccaatactgccccacaaatataagcacattctcacaatttggagcaccaaaaggtgaagaaaatataccgatgggaggctaaaaacatcaaggattgaatacttacttgttggagtgaattataacac

SEQ ID NO: 161316 - DNA, 452 bp, Glycine max
  unsure (1)..(452): unsure at all n locations
gcaagctctcactccagttnccattcgagtacttaactggtgtgaatctcaaacgttaaagaccagaatacacttatactaaccgacaagcaatatntggatgaaatntactaccggcagcctttcacgtatgcaggtaattaatttcggtttcaatgtaagcaactgaaagatgatgctgatgttaacacaatgttaatgtgtaatcatgaaattttgtttgttggaccgattgagttattatgtaacattgctagaaccccaaatggtatgttaaactgacttgaaactactatgacccctactcatgatgccctgctatattacagtgggaggtggaacatgtcacgccataatgagtttgtatgttactcgttcacaggaataaatcccaaatatgtgacattccaccggaggaccatggatgaactgaggaattgacaaacagttgc

SEQ ID NO: 161317 - DNA, 453 bp, Glycine max
  unsure (1)..(453): unsure at all n locations
tgttattaattaaccatatatgttatacccaatgtggtattgaaaatgtagaaactcaacccctccaaaaaacagggatcttaagtcaaaatatcaataaaactaaaaaatcatccgaagaaaaagggaaatactaaaaaatatacaagaagaaagagcatgacgctacctgctttaaacaattcaaaacatctgcacaaatagatttatgcatacactgaatctgcaataaagttccacactgtggggcaatcaaaggtgatctgtgaaaatttaaaaatagagaacaaattgtagacttacaggaaacacattaacattctgattattcaaacttgaaaggatacatgaacatatcatatggcaacaatgtaaaacaaaaatcaattaccataataacatgttccanactgctcaatgtaaaatgtataccatctaacctataaaatcctt

SEQ ID NO: 161318 - DNA, 443 bp, Glycine max
  unsure (1)..(443): unsure at all n locations
agcttgagaaagatctaactgattcnctctattgttgatgagaatgactgttgcagacagtattaagacaactctccctaaaatcaaaagtgctaaaaggtttatgggattagtgggagagtgctctcaaacagctgataagtctgtcgctaggacattaatgagtacattgatcagcaagaagtttgatggttcacgtactatgtagaacatgtcattgagatgacaaacattatagcaagacttaagaccttaggaatataatggctgtgaatgagaactttcttgttcagtttattctaaactcattaccgtctgagtatgatccgttcttaatgagctataataccatgaaagataaatgaaatatgcatgaattgcacaatatgttagttcaagaagaaatgacgcttaagaatcaaggaagtcactctcccatatgt

SEQ ID NO: 161319 - DNA, 444 bp, Glycine max
tttgcccgagttcctcagctagggtttccaagcattattgagaatgagaagagattaaagcgtcaatttcactgcctctgtgcaaggggcatatctctctctacagacattatttcacaaattccaacggtgggaatgtgcgaaaatgagttccaaaggtgatgcccaaatttcatgacgatttaacagttaacagaatcatagttttactgggacatgtttgtgtttatgcgggaaaaagagtgttttgggagagggaaaatggagaacgaatttgagaggaagaaagagcatagaaacatcgtaaataaaaattgacttaatatgtctctatttatagttagggtactctgaagtcattatttattccattttttattttttattttataaaaaggaactctattgtactcttttattaaataaataataaattaaaacatt

SEQ ID NO: 161320 - DNA, 405 bp, Glycine max
  unsure (1)..(405): unsure at all n locations
agcttatgcatggaaaatgtaattataattttgagatgcccgaagaaacaccatttcttagttaaccatgcattaggtaccatgttcaattattttgtttttaagtgaaacgtgtgaatgtatgtatacatgattctgatgatgtcaaagaagaatctaacaaggctgcttcaaatgataagcatttgcttcaagaataattcaagattgcttcaacaaacaaagccttgtttcaagattcactaaagaccaagccttgccttaaaacaatgtgctntcaagacatgcaaggctctggtaatcgattaccaggaagtgtaatcgattaccagatgacagggttgagatatagctgttgaaaaaggcttttgaatttgaattttaacatgtaatcgttaccatatg

SEQ ID NO: 161321 - DNA, 459 bp, Glycine max
gtgacacttatatactaagcttccatttcactgtcttcgtgtgattcacttttctctctccaagaatattatctcacaaatcccaacggtgaaagggtgcggaattgaatttccaaccacatatcaaaatttcatgaaaatccaacgtttaaggaaaccatgatctctgttttactgaaaccattttgggtttctacgggaaaagagaaaactatggtgcgaagggtatttatcttatctctaacatgtttacggaatttccaacagtgagaatgctaggaattgggtttcgaaggtggtgctcaaatttcacgatgatccaacggtaaatgagttcgagattgtagtttttctgagaaagtttggtggactacaggaaaaagaaagggctctgggaagagaagagagataaacgataatgaatgaaagatgaggcatcgttagtctcaaaactgacct

SEQ ID NO: 161322 - DNA, 413 bp, Glycine max
tcagatggtgcggaatggcagtccacaccagtatgattttaaattgcttcacctagtgttgccagctaaaagataatgaacgagttgtagcatgtcaagttgccattacctgtgactctcaattccataaaacgagtgcttatagcaaccacctcgacctctaatctgtgccttggtccatctacaaagcttgacaccactatgcgacccaataattgtatacccctgcaaattggtaatccatgaagaaagccaattcaaaaaaacaacctataccctaattctcatcaaccaaagctaattctgaattaagaaccatcctaattaagcaacacaataaactcaacaacttcaactaatgcaaatcaaacacgaattacacaaagtaccatgtaacattatcacattatata

SEQ ID NO: 161323 - DNA, 401 bp, Glycine max
  unsure (1)..(401): unsure at all n locations
gatccttaagtcacctgcggcancaagctngaaaggacctagtgtgaaagtttttaccatttaattncccggagcttccgtgttcatttcgagggtcttaatatgtgatgcgccttaatctaacatccgtgtgaaaagttatgaccattcgaatttctcaagagcttatgttgttcaatttcgagcctttctacttattatgcgcccgaatcggatattcgtgtgaaaatgtatggccacttgaatttcttgagagtttccgtcgttttattatgagcgtattgatatattatacgccttaatcagacatccgtgtggaaagttatgaccatttgagattctctagagcatcctgttgtcaatttcgaaccctctcgacatatatgcgcccaaatcggaca

SEQ ID NO: 161324 - DNA, 400 bp, Glycine max
atggtcataactcttcacacagatgtttgattattgcgcatcacatatagagacgcacgattatgaacaacggtagctctcgataaattcaaatggtcatcacttttcacactgaggtctgattcaggcttataatatatagacttgctcgaaattaaagatcggaagctctcgagatattcaaatggtcaaaacttttcacacagatgttagattatggcgcatcacatataaagacgctcgaaaatgaactacggaagctctcgggaaattaaaatggtcctaacttttcacactgaggtccgatccatgcttataatatatcgatacgctcgaaattaaacatcggaagctctcgagatattcaaatggtcataacttttcacacagatgttcgatt

SEQ ID NO: 161325 - DNA, 337 bp, Glycine max
tggagaacctacccaaagggaacttttgtctacctggatcctgaattccttgctctaggagaactaacttcaaatcaaatggctatttcattggaatcatttagttgagaatgtgactgggagaccagctttgggaataacaaaggaagtgaaatatgccttaaacactggaaagttgaaatccgtattggattctttggctggagactggccatttgtgcacgctgaacaattggctcgcttgcttatatgtgttggatatgaataaaagagccaccggatcttatcatattctggaggacttgagcttgaggttctttggaggctactcttgata

SEQ ID NO: 161326 - DNA, 412 bp, Glycine max
tcttgcgccattgaaatatagatgtcagttgcttcttctttaaagctctctgagatgcctgcacttgtctagcaagttccatacgctgacgttcacataacctaacaaacttgcggtatggcctatctggcattgccattatctcttggtgctgttgatcaatctcatcccttaaacgtgcctgaagatctaaaaggcgaagttttttctcttcaatttgcaacctcaacacaagatctggcctaattcttttcctctccaagtgtaccgccaataaaccttcaatcttctttaaactctctgtccttctcttgccaaagacctctatgccttcatcaataagaagctctttcactcatatgccatgaccaatattgtgttgatcatatgatgacccaaacaatatgttttt

SEQ ID NO: 161327 - DNA, 252 bp, Glycine max
cacactgcctcctaggctgaacttacatacatgcatactcaatgcattttggggtaccaaaaactgctacagccctcatcttggtacttctaatacccctacatatacatacttcagatgaattttgactacctacacatataggtgctccattcatgctgttttacaagttttgctacctaacgccatgagcaaatccaagcttatttcctttagtgactcaaatgatttcaattaaagggattattttat

SEQ ID NO: 161328 - DNA, 438 bp, Glycine max
  unsure (1)..(438): unsure at all n locations
tcagactaaagcaacacataatctatgtatccaaaacccctcaatttaatggattttaaggtttgagaaatgaaattgagaatgaggtaaatntggagcaaactctcacctcacacaagtctataacatcaatttaaacttgctcaaactggatttacacctaaaattccaccgaatcaaaatttgactcctcaacatccaattttaccctataaatgactctttgttcactttggtcatttgtttttctctcttgcacagcccaagctttctcataagtcctaaatgacatttcaaactaggattaactcactgtaacctccaaataccactaaatccagatttggccttccaactctcaaaaactcactctgtttttttcactcataacaccatattctcactttctaanactatgtaactctacccttcatccct

SEQ ID NO: 161329 - DNA, 353 bp, Glycine max
tttactcttatgactgatcgactcccgtaatatatcgacacgctctaaattgaatgctgaagctctgaggaaatttctactacaattattttttactcggatgtctgatatgagtccgttacatatcgaggcgctcgatatggaatgttgaagctctcaccctattcaaacgataataactctttacacggatgccttgttgagttccgctatatttcgagacgctccaaattgattgtggaatctctgagaatattcacaccacaataacgttctactctgatgtcagatagagcccgtcaatatcgaacgctcgaattgattgttgagctttgagcaattcaaacgaaaat

SEQ ID NO: 161330 - DNA, 404 bp, Glycine max
atacgactcatttagacatccgagtaaaaagttattgtcgtttgaattggctgaaagcatcaaccttcaatttcgagcgtctcgatatatgacgggactcaatcagacatccgagtaaaaagatattgtcgtcttaattggctcagagcttttacattatatttcgagcgtctcgatatatgacgggactcaatcaggcatccgtgttaaaagttattgtcgtttgaattggctgagagcttcaacattcaatttcgagcgtctcgatatgttacgggactcaatcagacatccgagtaaaaagttattgtcgtctgaagtggctcaaagcttcaacattcaatttcaagcgtcttgatatatgacgggactcaatcagacatccgagtaaaaagtattgtcgt

SEQ ID NO: 161331 - DNA, 372 bp, Glycine max
ttcaatacgcttcttttaaaagctaacgctgtaactagtaacaccctttctataactaaactcacctccttataaataattacggataaaaataacacaacaaatattatcaaacatcaaacataattactattaatatgttgatatatatatcagggtgctacacgccatatgatgtgtaaagaaaggtgaatctcttgctcttgtttattctgaagttaacttagcttctatacctaaagatacttgatggatagattctggtgctactactcacatatagtgtaaccatgcaaggttgcctgtggattcgattgccaagtgatgaagaaagatacatatttgctggcgatacaaaaaggttgcggggga

SEQ ID NO: 161332 - DNA, 400 bp, Glycine max
tcaagatcaagaatcaagagtcgtgattcatgcttccatgattctagatcaagattcaagactctagattcaagaatcaagagccttgtgtaatcgattacattgatttggtaatcgattaccagtgattgtttctggacaaatcaaaagatgtaactcttcaaatagtttttgactttttcaaattggttttaaggttttcaaaaagtcataactcttctaatggttctcgtgaccagacatgaagagtctataaaagcaaggctttgtattgcattttcaaatcaatccaatctatgaatctacacatctgtcttttccaattcattctttacacaatcatttttccacttgatttctgagtctcttgaaactcttcttcttcctttgccaaaagctt

SEQ ID NO: 161333 - DNA, 450 bp, Glycine max
  unsure (1)..(450): unsure at all n locations
agctnttaccaaagagtttttactctctggttatcgattaccagnttactgtaatcgattaccagtggcaagtnttgttttcaaaaagctttcaactgaatttacaacgttccaatcaatttcaaaatggtgtaatcgattacaatattttggtaatcgattaccagtgtgtttgaacgttgaaattcaaattcaaatgtgaagagtcacattctttcacaaaaatgctttgtgtaatcgattacaatgatttggtaatcgattaccagtgacaagttttgaataaaaatcaaaagatgtaactcttccaatggttttcttgactagacatgaagagtctataaaagcaagaccttaacttgcattctacatacattgaatacattgatttcaatcttttacaacccttgagtctctttgaacatcttcttgaaattcttcttacttttc

SEQ ID NO: 161334 - DNA, 426 bp, Glycine max
ttgaaggtatgacgaacatgaatagtgatagacaaactatctttactctgtatgacatcttcatattcatagccatgtagttgtaatgaagctaaacattaacacgttcatttatactagtccgatctctctaaaaatccttgtaattttttttaaaaatactatgcttaacatattacattagtgaactagctaaaggtcaatcagaattgagaacttttcccaatccaatgttccaccaagtgaaaaagaaaaaaaggaactgtgatggcaaataagaaagatattaaaagcagacctcattaatctgttacatcataatggctttggtctgtttttcgatgaaaagcctgacatatagtcaagccatagtcaagcatcgaactaatttgctaatgcacctttatacttttgttccctacaaaa

SEQ ID NO: 161335 - DNA, 391 bp, Glycine max
  unsure (1)..(391): unsure at all n locations
agctntgagccaaaatcctaactcaccatattccttgactccaggtgagaatgtcaatccttacccttggaagcaaaaaagaagagaaggaaaatttccaatcaaagaaaaaaaaaagagaaggaaaatttccaatcaaagagaaagttaaaaaaaaagagagaaggaaaatttccaatcaaaggaaaaaagagaggaaaggaaattcccaatcaaagagtgggagaaagcgaaaagaaaagaaagaaaattcccaaccaaagagtgggagaaagtaaaaggaaggaaagaaagctcctgatcaaggatcaaaacaattcagaagaaatgtgcagaaaggtctttggaccggacaatatctgtacaatacataattgtcaccaaatgaaca

SEQ ID NO: 161336 - DNA, 446 bp, Glycine max
tgaataaagtgccaatgacatgacatatgcctatgcatctatttttttggtcttggatgtaaaaatgcataaatatgagaacatgtttgtgaggttttctttaaactagcacttggattggttgcatcatggcgaataccttgcacataggtaggaaaatgtgtttcaaaaatacaaaatatatgtgaataggtagcatgaaaatgcctttaaaaatgtatatatatgtgaatatatagcatgaaaaattcctttcaaaaaatgtgtgtatatatgtgtggatatgtagcataaaaggctttttcaaaagaaatgtgcatatatgttggcatatagcataaagaaaatgctcttcaaaaaaatgcaagtgtatatatgtggatatgtcataaaatgcctttcaccaaaaatatatgcatatgcatgtatgttaatatatatatcat

SEQ ID NO: 161337 - DNA, 401 bp, Glycine max
  unsure (1)..(401): unsure at all n locations
agcttgcacaaggcattggctatctaactcatgaaggagggacagttgaaaggataggtgaatatcaagctccgctgcctacctgagagccaaagcctcgacaatatgaacctcataacaagcaggaagaagacgtgaagcagcaaccaggacctcgccagagtggtctcaaaagataacatccaaaccaattccctcatcacaatntgctnttatgaccccttgggtcgagcacttccagattgagctcttctccacacttaaatttggtttcttgctcaaatccattaggaaggattgggctctatctagagtaacatacaaaggatactcgtgttggtggaaaacccattaatgtcgctaaaatcatatgctgaatttgagtcccttcatgatcttgg

SEQ ID NO: 161338 - DNA, 393 bp, Glycine max
  unsure (1)..(393): unsure at all n locations
tccatcntaacggttcaaccttatgagaaggcaatatgttgactcttcgagagggcctctcatcctaaactctaaagatagggaattagatctgggaaattggtatataaagagaaatctatgcacttatagcctaatatgaacatgatttttgggatgcagatgcatgcaaccttcatcttgaaatgtaataaatgtaggctttgtatctagtaatgcaaaaggttttgaatcatgaaaattgtgtaacgctcatgacattctttccctagtggagtcgccatctgtcgcaacctaccctactgcggatgggcgaggcgaaatgccaaaaggtatgtcttctaaaaaagaaacgcataggagttgccaccaacgtttattcgatgaaaacgt

SEQ ID NO: 161339 - DNA, 468 bp, Glycine max
  unsure (1)..(468): unsure at all n locations
agcttccatggtgaaccccacaaagtcctttcaaccctgccctaggagggctacccatcatgctaccatctaccttcaatgtcaccgcccttaaaggaggtcccacccagcaaatccatctgctttgctcatgcaaattaacatgttccccaacacacaacttntagtataatgcacaagagactacacttgcgcatgtcactgagtagatgtccccatctcctcctcaaaatgcttttattcctagccctccaaataacccacagcgtgatgggaatttgaatcccatgaatccacgtatggtggtgcacccagtctggcacttgagcatcaaccttaggcataatctaattatcaacttcccttgccaagtgccaaccatagcattataatacttgtacactacaaataattataaatgataaatgaaataataattattaattaatacctttaggtctaattatt

SEQ ID NO: 161340 - DNA, 445 bp, Glycine max
  unsure (1)..(445): unsure at all n locations
tatgaagacctatttgcaatgttatctcccatatntgtttatcatcttgtcgcaacctacccttcggcgggagggcgacgcgagactcgcgggatgcgtgttccacgaaaggaatacgcgcggagtcgccaccaacgtttatttgaggaaaacgtcggaaaaaccgaataagacgcgatctacgaacttttaagtgaatggttcgggagttgtatttacgcacggggaatgtattatcaccccacacgtccgtcccaagggacggcagcctttaatcgaatgtgcaaacatgactttgatttttacgttcccttttatgtccttatatcctttataccctttatattttttcctttttttgtggtcgacaagggtgtttacctttgctcctacgtattcctcaantttgggatgagaaaatcagacctacgtagttctttcttat

SEQ ID NO: 161341 - DNA, 340 bp, Glycine max
agctaccattgaacatgtttgtcttagtttatataatcataataatccgagcactcgtaaatattattataaatatgtgtataaaaaattataaatctatatgactatggatattatatatattcaactaacggtagacttacatatcttatatcatcgtaagtcacatagatacccgtctaatcttaaaaaatgctacgtttatcaatatatctccatttgtatataactcattcttatacaaaagtctaataagagatatcttatcttaatgtgttaaattttctagatacagatttatacactattgaatcatcattgacagctcttttaagacaca

SEQ ID NO: 161342 - DNA, 375 bp, Glycine max
ctatacatttttaataaataggccaggtcttatgcggtgcaagccgtttggtttattttcaccaatagttgccaatattaacgtaaattgttattttaattcagaaagtgcgaaagtggataatgttgtcacatattagtctataaaactaaaaaatatcataatgagattctaaaagtgcaatctgtcaataacgtacattaattcaaaattttaaagaatgtgggacttatgtgataatatatattaacatatatatttatgatcaaaatgatggatatgaaattaaaatactatgatagaaactaatgttctagggattgatgttaaaatttcttaagtttagtgattaattaatgtacaacatattatact

SEQ ID NO: 161343 - DNA, 452 bp, Glycine max
  unsure (1)..(452): unsure at all n locations
agcttaggtacccctcaccttacaaaactgttncgtaggaatgagttagacccatagtctaagatggtattaaagtttatcctagatctattattggaccacctaccatattatattattattattcatgcaccaagcccaatattgttgggtgtgaggaggatgtattggaaaaaactcaattcccacattacaaaagatagttcctaataagaacttataaagctctttttgatgttgttgctttcacaaggaatgttctctactggtgtaaggcctaatctcttccggggtacaaaatgcaaaaggttacaccctcccaactaggttttctcgggaatcaaacctcaacctctctccttggcaagaaatcaaattgatatttagtaacagaagagacatcttaatctttgctcaattatccttacctataacgtcatagtatgattcat

SEQ ID NO: 161344 - DNA, 387 bp, Glycine max
  unsure (1)..(387): unsure at all n locations
tcatcttctgtaatattcatgcatgagagacacatgttctgtttntcaatggcatcagtgctatgaatctgatggtcattgatgcttgattctttgtttgcccctaatattggttttgtgttatgcatttataatctttatggaaaattcaaattttcaaatttgatgtttgtgatatttcctttaaaataatttcaaatgattttccttcgattatgagtcagatggtatttttgttgaaaaattcttgtcccgttcctattttcttataattctttatctaatctcttactgaaatctgttcttgacaatatcttggtggaatttttttaattacatattgtgacgtgtgttatattataattttaacattaacctgtttctttt

SEQ ID NO: 161345 - DNA, 425 bp, Glycine max
tagctttaggcaaatggacttaccttgaattaatccctcggagagcccttttgagccttgattccctttccttgtgttgaagctcactacaagccttaagtgaaaaaccatgatattaccatatccttaaagaattttggagctatggaattgctatgggaataagtgagggggagttttgtttcattggacaacttgttttgttggctatgcttcatgatacatttcgggccatacttgatgtacattgcatattggttaaatgttggacatgctgaatgaaatgttgatctccaagtctaaaaaaaaaaaataaaatattcgaaaaaattcggatagaaaaaaaaaaaaaagcaatatgttgggaatatacttaagggccaaaatgagaacttggtccactctcagttaattttacctactcc

SEQ ID NO: 161346 - DNA, 228 bp, Glycine max
acaaaaacaaaacgaggaggcaaagtgccgacaaacccagatggcggaagaaaaaagaagcgcgaagcacaaacccaccccaccacggcaaacaaaaacaccgaacgagcagcaaagccgaacaacaaaagggcaacggaaccaagaacacccgcggtcaacaaacccgaccccccgggaaaaagacgagaaagacaggcaaaaagcccccaacgagccccgggccac

SEQ ID NO: 161347 - DNA, 412 bp, Glycine max
  unsure (1)..(412): unsure at all n locations
agcttcatgatgaatcaacattgattcaagggagtttgacgaatacaaagatgatgattanaagctcaaaagtcaagatcacttcatgataacaaagatgatgacattcaagaatgagtcaagattgagtcaagaacacttcaaggaaaaagattcaagattcatagattcaagaataatcaagatcaagattcacgactcaaagattcaagaatcaagagaagacttaatcatgataagtattaaacagtttttcacaacattgagtagcacaagaaggtttacaaaatcattaccaaagagtgttactctctggtaatcgattactagattatagtaatcaattaccaggggtttataaacgtaagaatttcaaaattcaaaatgaagagtaacatctgttgatgtgtaa

SEQ ID NO: 161348 - DNA, 407 bp, Glycine max
  unsure (1)..(407): unsure at all n locations
gtcaacntatgtcttcacaaataatcatcacacagtatatccctagcatgattacccatcatatctccccaaaaccccatacccacgaaatttaagagagaaagaagtccacccaaacctgaattttcgaagtcccactcgtagccacgcacttcacgaccccgaaaatgctgtcctttcgcgatttggagcagaaatgagcaccaaaggttgaagctttgttgggcaacaatggtggatgggagaaaagaagaagaagactgcgtgagagagagagagctgtctgaaatnttgtggggctgagtgaagagagagagagttgctttttagttttaaaagaaagagttttccctttttccattattttatttgagcaatgccacatgtctccatttgagtggagcaag

SEQ ID NO: 161349 - DNA, 396 bp, Glycine max
  unsure (1)..(396): unsure at all n locations
cgctttanagagttattctgaagaatttatgagctgaacattgtagntgtaggtattgagggactgagacttttccccctatataataccatttaaagaaaattcctttactgaggcgttgagcgttgttttatgatactgaatgctggtcggtaaagagctaaaaagagcttaggctaaatgttatagaaatgaagacattgtggtgaatgagtgaacatgctagacaagattgagagttaattcatttgggagaaggtaagtgtagaacttgttgaggaaaagatggtagaattagaatctcacctaaaattggttggccatgtgaaaagaagactattatacaccctatttataaaaagctgaagctgatatggtggacaatagcccaatatt

SEQ ID NO: 161350 - DNA, 303 bp, Glycine max
atcagataacatatattttgaccctatcaagactgacttaacatcaaaagttttcttctcgaaagaaaagaattggagttcaacgtatgactgatcacttccccgaatgttcataattatctgctttcatgcaaattcctgtctttcacattttgttcctggctgtagagagcaagctgttgttgctaccgttcaaagcaataaccagattgatcattagtttttacagacaccctttaaacttcaatttaaatggatctcaacgtgtggacgtaacacgtatgttatccaagcaagaatata

SEQ ID NO: 161351 - DNA, 369 bp, Glycine max
gtctggtagaacaaagggattactattattcgaagatgtgatctttggtgtgacatgcatatcgcatatagcgtaaaccaagcatggcaacagtgacggcctcttcttatgcggtgtcatgaagcgcgtgtcacaatcaccgtggcgcgtctagaagagatgccaaagtgaattctttggctgaagtaaatctcaattatgatgggatgagatccctgaacaagctgcacgtgcgaaccacgcgtgcggccaaaaccaaaaccttgatgtctgcgaaaagtaacaagagtggacatgaccgagttttggggaggattaaatgtgggatgaacatgtacttcgggggactgaagtggaccctcgagcaaa

SEQ ID NO: 161352 - DNA, 435 bp, Glycine max
ttacataagtaagggcactctctattgagaaaattgaagcatcaatggcagatttctcacacagagaacttggcttgagtttctcttacttggaaggcttcaacttgacttaatgctccttaatgacctctttaatatccaaagaagaccttctaagtggagtccactcaacgaatagacttcttaaggaagcagacatagatgacaactatcatgtcatgatacctaccatggtcactctgaggttcacattttgacgaaccttttttatgaacattttgaagttacattagaatgaagattctaatgttatttgagaaaagatcctactggccatagattctttgatgaagtcaaatgatatgttcttctaaagtatacagttcatcaatctacccttttaacacacaaatatgtgaaaagatgcttataaaa

SEQ ID NO: 161353 - DNA, 462 bp, Glycine max
  unsure (1)..(462): unsure at all n locations
agcttaatacagatcataggagtgtgtcttcttaggctactcctantcacataaaggttataaatgtttagcatcagatggttgaatttacatcttaaaagatgtattattcaatgagtcgaaattccctaccctaccctatttccttcaaagtcttctactcccaccaagtcttaaactaatcttacctttctcattggtttacctactatccatgcttttgttgattgactaccctcataactatatattgcctctatacaacaacaactcttgtcttgaatgctacaccaaaacctagcatttcccctcataattccactgctgctgtttacaactgcagtctcctacacgtgaacctattaattcctcacccattagcaccactttacaagactcacctgaaactccacaatcctctcctttttctgaantttacatgctactgcaccatatcaatct

SEQ ID NO: 161354 - DNA, 391 bp, Glycine max
acccgacttgtttaactaatgataagtgataatactttattttatttaatcttatcttatccagattttatgctatctaaattgtattgtgtccagattttatttcatcccatcttatcttatcttgtctaaattttattttatttcgtttatgagctggaacttaaaataaatttgtaagctttggggctgagaacctatataacagcactaagggtttagtttagggagttttttttcaaagagaaaaataattctatgattttagaattccaattgttattactgttcatacacactgttcacgtacaataaaattcattctctgcaaatcttctctaatccatacattgtttaatattatgctctgtttattttcctttgatatact

SEQ ID NO: 161355 - DNA, 478 bp, Glycine max
  unsure (1)..(478): unsure at all n locations
agctnttcaaatgggtaaaaggctcgcattcactttcttctacgtcatattcaaacttgtccaaatgaataataaagtcatctcgactcaaagaaggtcatctaagtctcatacaattaatatagaacctatatcctaatgtcacatcctatcagagcgcggtgttcccgtgtcctctagcatgaggttctttatagtcatccacctattcatctgctcccccgaacacaaagttcaagatcatcacaggatccaaacacaaacaacaaaccgggaatgagttatcacatttctaactactagagagaaacaacacaacatatagtagccaaatacaatttacttagcatatctcacattatttcatcactttgtcattcatcaatcacacttttcatccattaatcacacctttcaatcatcaatcactatacacaggaatcacacactccgatcaagacataataacacatcaatt

SEQ ID NO: 161356 - DNA, 463 bp, Glycine max
tctcagcttgaacaattactgcccttatttaactgtctttgggcttggcggccacactcaacaaagtatttttgaaacctactgtacgttgatgtgaccaacgctgttatgggaatgttgcgacaatccttcaaaaccttattgatacattctgaaaggttggttgtcatgtggccatatcgacgtccttctctatcataagccatcgttcatttttcttttgaaatgcgatcaatccatgttgctatggctggactcaattcacgaaatttttctaaattttgataaaaaaatgtgcttgcaaggagtgtatgctgcataaaattagttatgaataacaattttaagtacatatgaaagttaaataaacgtcaaccatcaaatatgatatcttacccaatttcttcaacatttctttttgtttggcattatgaatttccaattgaagttgctgctatgtgtc

SEQ ID NO: 161357 - DNA, 461 bp, Glycine max
  unsure (1)..(461): unsure at all n locations
agcttaagctccttcatactgcctatgctcttaatattngaatagtatccttttggaaccttcacccgacgaatatgttagacaagtggcctcagatatcttaagaaaggggggttgaattaagatatcccaaactatttcccctaattaaaaatctatttcactttttactcacagtatgaattcccttaatgacaatcttcttaaatattaattcaaatgagacaatgtaaatatgaatattaagcaataataaataacggagattaagggaagagaaaatgcacactcagttttatactggttcggccacaccctggtgcctacgtccagtccccaagcaacacgcttgagagtccactatcttgtaaattcctgttacaagctctaaacacacaaggacgattcttcctgtgttgttagaactcctttacaacaagagactcacagctctcttaatc

SEQ ID NO: 161358 - DNA, 391 bp, Glycine max
  unsure (1)..(391): unsure at all n locations
ngagggataacttgatgccttggtcaacctattaacttgttcttgccatgaatcagaaatctgcacctattgcaagagtctgtggtctatgttctactgcagattaccatacagatctctgtccttctttgcagcaatctatagtcaatgagcaacctaaagcttatgctgcaaacatttataatagacctcctcaacagcttaaccaacaacagcagaattattatgacctttctagcaacaaatacaaggggaaacaacatgttttaattctgttattttctaattcaaatttgcttgctgtttaatttacaaaaacaaacacccacccaattcgtttactatttatcactatctgttatgaacagttggttgaccattactcgttggg

SEQ ID NO: 161359 - DNA, 120 bp, Glycine max
cgatgaagcttggcatgtactgatgctgtcaacacttatgggctcccctgaccatgtgatggaatattgattcttcgccaccattccagcgggttgaattatgaatgattgaacctgaga

SEQ ID NO: 161360 - DNA, 449 bp, Glycine max
  unsure (1)..(449): unsure at all n locations
agctaataagatattatatgaatcatttataattatataaataaacttgaaaaaaatagaaaatcttcctgtaaaatttttcaactcagatgggagtgaattcattnttcatttttactcttctaaaacggctcgtcttcaaactcatcacacggatgtgatgaaggcgaggatgaagataatcaaatatgtattttaatgcaattttaactgataatttttaatctaactagttggcatataattttgttcaaatcataaatatcacaccataacaaggtagattctcccaataaagaactcattttaatatatttcgggggtagatgttacccgcagccatatatggatacaaatgctgtgtttatatctctacatcagatctancgaggggcgtgaagcacggcgaggtatttattcttatgcttggtcatattaaagaaacattg

SEQ ID NO: 161361 - DNA, 449 bp, Glycine max
gtcttgaatcaaattcattacagcccatataatattattcaatatataaaccctcggtcctttgatctcaatcttgtaaagtacagcaataattggagaataaggaatcaaaagttggttataaaaaagaagaagacgaagaatcagaagttgaagagtaaaaccacaacaaaattcacttgattattgagtatgtgagcaacctcatacataatagtacatccacccaaacccttacttacttttcatatatgggtgtacaaaagctgttgtcagtaattctaaagtgtttacatcattctacatcaacttgctcattctcttttacagcagcaccattgataccatgaactatttcggattcaccagccctagaagacaaccttggtatctgaaagttgggagaagcttatactgcccaaatgtcagaaactgactcagcttctcat

SEQ ID NO: 161362 - DNA, 392 bp, Glycine max
agcttgctcatgtgaaatctcaacatcttgttgttgatatcttcacaaagcccttaatgcttctagctctctctacctttatccgcaagttgtgactcattaacatttactctccaactagagaggggtattatagctctatgcgtaaaatagagtaagttattttcacttagaggataagtggattagttagcagttagtcagaagtaaatcagttactatagtttgttaagctggatatagagcactttgtatgcaatcttgcattaacatattatcaaaatactttgcgacccttcttgctgacatagcttccattaattaaagatcttaagaagtcaaaatattattttaataataaaatttattattttaagcctttatgaaaggtg

SEQ ID NO: 161363 - DNA, 430 bp, Glycine max
ttggcacttgtcttcacactgatttgcaattgttatttcaattgtgaaataaattttgagccataacaataatcacacttccctgttaccctttttttttctggatactgattttactgccaacttgtgcgatttttcgtattttttacttttatccaaatgcctttcttctttttttttctaactatttttccatatgtctagaaaattaaataaaaatttcatctcaaaattcgaaataaccaatctctcagtaatttttacaattttgtatgtccaagctgccaacaccagcgatattttttttaagcatggtatattgattgccttgggcttactatcaaccctgctatgtctgttgaactcactattttgcttaccacactttatgagttcaatattactaagatcaactttcgccacattcatt

SEQ ID NO: 161364 - DNA, 362 bp, Glycine max
  unsure (1)..(362): unsure at all n locations
agcttgaaaagtgcaagataacgaactacattntctgcanttttagaanaaagagatgaactcgctaagcgagcatgctgcgctaagcgagttcatcagtactcattgtatataggcgttctctgaagaactcgttgagtgtgcttaacgcgctaagcgagttcatcctttgaggatgaacacttatcctcttgcttaattacctgtggctaagtgaggatgaatcgctaagcccaggttacttagaaaantttttattgatagccgcgcgctaggctgagctttcctgggccaagcacgaattgttgcggcatccgctgagttaagcgagcttcgctcgctaagctcccaatacttagtga

SEQ ID NO: 161365 - DNA, 399 bp, Glycine max
  unsure (1)..(399): unsure at all n locations
ngatcaatacaagcatctaatcattccagtccacttaattcatacattgtctcattcaagtcattcacaaacactcatttcatatcaaataaaccactgaaacatgattcaatcatttcactattcaaacatgcttttgttcaagcaatcaacactaaaataactggaatttaaatgaatgaaacataaagcaactaaataactaataaataaattgttcatgatttgtagaaattaaaacaaaacaaaatttaaacatcctgctcatcctgtggttgatcttcattgaaatacagtactagagcagctggtgcatcctgaagaatgggatgctctggctccatggcangtgtagatggctgggaatcctcangaatgggtgctggagagatatgaact

SEQ ID NO: 161366 - DNA, 422 bp, Glycine max
agctttgagccatataaaaggataatgaatatttccaatcaaagaggaagcaaaaaaaaggagagaaggaaaatctccaatcaaaggaaaaaagagaggaaaggaaattcccaatcaaagagtgggagaaagcaaaaagaaaagaaaggaaattcccaatcaaagaatgggagaaagaaaaaagagaaggagaagaaggaaagaaagctcctgatcaaggatcgaaagaaaacagaagatatgtgcagagaggtctctggaccatacaatatctgaacaaatacggaattgtcaccaaatgaacaaaagaaagaaaaggaaaccataacctaaaagtggtcttcttccttttgataccaaccaaaatcctgtgcgtctgtgacttgttcgcctcgcgtcatacacaaacagaatatgaaaaa

SEQ ID NO: 161367 - DNA, 381 bp, Glycine max
tcctccacgttttcctgcatacctagaacttcaaaccttcgattctcactcaattcttcaccaaatcacgtcccgtaaagcccaatcttcctctttttcactcctctttcacttccaccgatcaaaatccagaaaaacttcatcaaatggcagagccatcaaagaagagaaagggatcatcctccaccgctaccgctgctgcccatcgtcgtcacggcccatccggagcacccacagcacctattcctccttctttgtcatctccaagatcatcaacattgttttcatccgatgatcaacgtctacggtacctttctcagttttcttctagaataatcttagaccctaagtatctagacgtagagttctttaatgatgaaa

SEQ ID NO: 161368 - DNA, 371 bp, Glycine max
  unsure (1)..(371): unsure at all n locations
cccggatccttaagtcacctgcggcatgcaagcttgtacttgtaaccaacaaccatgataaatacccatcggttcggcctctctcattntcagcttctctaattgtcgcaacaacactcactttttttttcttttcttttatttgaaagttatgagacatgagtcttcatggtggaggtggcgcgagaggggaacacagccgtggattgatccggaaccataatctgcggtccaacctttacttccatgaactgaacattttgacgcacatttcctcaggacaggtcatttattacatatgctacactgtacagatatgatgatctaaactgtatgtgtgatgtgaactacctgcttaataatattgccag

SEQ ID NO: 161369 - DNA, 446 bp, Glycine max
  unsure (1)..(446): unsure at all n locations
gtgacacttataaactaagcttatttacatgttctgcagcacttggatgcatggtatatcactttccactctntaccggagaagcatgctttggcctggattgagtttgctggtagtacagcttaattatcctttagctggtattaattttaagcatgcatttatctatgtctgatctacattgaaaaataaaataagaaggtcaaatgctaaatggtgcttgaatattatgtaaataattttgatactgtaattaacagtagcatgcagtggttttatggtgtcactatgttgcccaagtttgtttatttactagttaaacaagcttaagctggtaaattgtacaaccacatcatggtaattcccatgctatattatggattgcctccctcttgtttttcttattgtaactgaaattgaaatatacagcactacttttcaaatct

SEQ ID NO: 161370 - DNA, 452 bp, Glycine max
  unsure (1)..(452): unsure at all n locations
agcttgtaagtgacagtgacaactattgtgttggagatgaagatgatnggaaaagtactgatggatttgtgtttttcatggggaatatgtgaatgtatgtatacatgattttgatgatgtcaaaagaagaatcaaacaaggctcatttgattcaagaataatacaagattgtttcaacaaataaagccttgattcaagatttcttcaagatcaagccttgcctcaaaatgaaaggtttcaagtcatccaaggcacatgtaatcgattaccattacatgtaattgattaccaaggcacatgtaatcattaccaatacatgtaatcgattaccaatggtttgaaagtgtgtaatcgattacacatcatatgtaatcgattaccagagactctgaacgttgggaattcaaaatttaatgaagagcacaactgtcaagataatactgttaatggat

SEQ ID NO: 161371 - DNA, 406 bp, Glycine max
  unsure (1)..(406): unsure at all n locations
tatctcatgttagacaccctaatatcatcagttgcatacaatcacagtttacttggtgccaacttaaagtgcataaaaaagttaaataatgctcaaaataggaaatcctagcttaaatcttaccctttccttgatgtcacccaaagtcggcaagtacaacttatagaattcctctttaaatgcaaccacaaacctaaataaagtttataaaccaacaagagtaagacaattagaatttgtgtgatttgtataaatttaagggacaacaacatacatgtactatattatagtattttcacttttaaaggactaaagatgaattattgaccataattgatatattagcatttgtatatcactaactcgctcttacttagtatgtctctcaacttgcaantacaaattc

SEQ ID NO: 161372 - DNA, 365 bp, Glycine max
  unsure (1)..(365): unsure at all n locations
agcttcaggctgttcaattgctccaggntgnattatttataggccaacgcctgtatggcggtcatcatatgtatacaaaccacacacccttgcgacaggtacagatttctgattcaaggacagttgggttaccaagttaaccaatgcatccagtttgcctttcagctttttaatttcagatgatgcacatgaggttgtagctacctcatgcactcctctaatgactatggcatcatttctggcgctaaaatgttgggagttggaggccatcttttcaattatatgtttggcttaacaaaaattatgtcttcaaaaggtctaccctggcagcaactattataattctctccatattaactgagtcc

SEQ ID NO: 161373 - DNA, 371 bp, Glycine max
  unsure (1)..(371): unsure at all n locations
cttaagtgacctgccgctgaagctggtggtngggctatgattataattttttttttatgccgaaattgaattaatgaaccactggataagggcacaccagtatttatcattctgttataggggttgcaagtgtcatattggcatgtacttattctgccaacacttctctacagctattcatatttctagtttattttcttgaaggatttaatgaagtgtggtcttgaactttaattcacacttgccatgcttatcaatgaagggactccaggttcatctctgcctaaatgtggaatgtttgtgcactgaaaagcttcccggatgccggtttgtgtcaagttcaatacaaaaaagctgcccttgttcttgtt

SEQ ID NO: 161374 - DNA, 101 bp, Glycine max
atgcacaccgccgatatacttgtacacaacaagggtgcttcccaaatctcgaggatatttcgtgtcacaaagtgcaccaagcacaaatacctgcttcataa

SEQ ID NO: 161375 - DNA, 414 bp, Glycine max
  unsure (1)..(414): unsure at all n locations
agcttgtgactcttggcaaattctttaaaacttttctcttataaagttgcgactnttgaaaaaaatttcagaaacaagccacttgaagaattgtgactttacgaaatgtatctttcaaaatcagtcactggtaatcgattaccattaaggtgtaatcgattacacatcaacagatgtgactcttcattttgaattttgaaaaataaaacatttagaagctctggtaatcgattacaagtgttgtgtaatcgattacacaagtttaaaatgatttaaaactgttaaacacaagttgttactcttgaaatttgaaatcttaacgttttaaaacactggtaatcgattattaccttttggttatcgattaccagagagtaaaactctttggtaatgattttgtgaaaacttcttgtg

SEQ ID NO: 161376 - DNA, 389 bp, Glycine max
  unsure (1)..(389): unsure at all n locations
tagtgacatctgtgacttgatcttaagcgaagatgtttgttatagagtatcatgagaatcttccagtcatgtttccaattcagcattgaatactgaaggcaggggaaggactacccacaagggtcagaatggtcgaggcagatcaaagtcaagagggaaaggtcagagaaaatttcaaagtgacgttacttgctggaattgtgacaagagaggtcactctagcaatcagtgcaaggcaccaaagaagaacaagtcgcacaaaaacgagaagcgcgatgatgatgaatctgtaaatgcaacaactgatgaacttgatgatgcattaatttgcagcttggatagtcctgttgattcatggatcatggactcangtgcgtcgttccacacta

SEQ ID NO: 161377 - DNA, 424 bp, Glycine max
agctttgcggattcggtctttgctagcgaaattatttttgttggtctgaaacaaggcaaatctagtcatcctgcttggacgaatgagaaaactatggcaaatgaagagtgtcagaatgagggagaaacccctgctgtgactgccattcctatacaaccaagtttcccaccaacccaacaatgtcattactcagccaatacaaaccttctccttactcaccgcccagttatccacaaaggccattcctaatatcaaccacaaagcctacctaccgcacttccaatgacaaacaccacctttagcataaaccaaaacaccaaccaataaattgaatttgcagcgagaaagcctgtataattcaccccacatcagtattctatgctgacttgctcccatatctacttgataattcaatggtagccat

SEQ ID NO: 161378 - DNA, 403 bp, Glycine max
  unsure (1)..(403): unsure at all n locations
tatgcacggagaatgtaattatgaaattgagatgcccgattaaacacctatttctagttaaccatgcattaggtaccatgttcaattattntgcttttaagtgaaacgggtttatgatcccaacatggttggctcgtggtgcctaacacatganactaagaatgtagtgtgaagtttcacgcttccccnctttttggttttgttttgtagaggaatacgccaggatgagcaaacatgaaaacaaatggtatgcaattttgcagatcaaaaagtttgttgaacgcatatgcatgatgatgccatgactcatgccaaatgtgaggctggaatatgataacggacacatgcaggatatgtccattatgatgttatgaagagatgcttatgcgatgcatgatatgaa

SEQ ID NO: 161379 - DNA, 418 bp, Glycine max
agcttttacaaggatgtccgaatgaatcccgtatatattgatacgctcctaactgaaaatggaagctctgagcaaatacaaacgacaataactttttactcggatgtcctaacgactctcgtgtcatatcgagacgtgcgaaatgcagaactgatatcttgagccatactcatactaccactactttgtacttgggtatccgattgtgtctccgtggtatatcgtgatgctccgaatgcatgacataatctctgggcaaaataaaaagacactaactcttatctccgatgtacgaacgaacctctgtatatatccagacgcccgaaattgacatcgagtgcttggaacttatgtaaccggtcataccttttttccgcgggtccgacggggcccgtatatatcgcgacgctagacaata

SEQ ID NO: 161380 - DNA, 422 bp, Glycine max
tctgttatgaatctcgagtgtctcgatatactacgggactctatctgtcttcctagtaaaaagatatggacattcgaattagctcatagcatccgttgtcaattacgagcgtctagatatattaaaggattcattcggacatccgagtatgaagatatcagtctctttattttgctcagagcctcctgttttcaatttcgagcatctggatattttacaggactcaatcggatatccgagtcataagctattgtcgtttgtatttgctacgagcttccagtttcaattacgagcgtctcaatatgctaccggacacaatcggacatccgagtagaaagttattgccgtgtgaatctactcagagctttcgtttctattacgagcgtttccgtttttacaagatatatttggacattcgagta

SEQ ID NO: 161381 - DNA, 302 bp, Glycine max
  unsure (1)..(302): unsure at all n locations
gcttggcctcaaagngccttataatatgctgacatactatccatttattagcactcacccctacgggaattccaagataagagaaaggaaattccagctgagtacaatggagaaattgagttgcatccctgcaccagccctctgatttgcccacgcagcccgaaatggcttttagaataatttatcttaagaccagaaaccttctcaaaacacctcagaatacaatgtaatgatttggctataacctacacacatcatggatggctcgcatccatatgctgtaccattcattctaggcttct

SEQ ID NO: 161382 - DNA, 364 bp, Glycine max
agcttgaaatgaggaagtgtagaagggttatattttctgtttttattcgttgaccacagagtggtacctggagatatgtcgcggtggtcaggaaaccttggggacgtcaggtggggtgctattgcccaaaaccaagcttgaccaatcccgacccaacccgggcttagtcaatgcagtgagaacctgtgatgtacctaaacaggcgagctctctgcagttaccgatctaggaactagacccaaacacggaggttgtgtggggctggccactgtgaaactttattgattatgggattggctctggaatccataccaagggtgtcctcgttacaggctttaaataaagaaggagactagaaggtctc

SEQ ID NO: 161383 - DNA, 359 bp, Glycine max
  unsure (1)..(359): unsure at all n locations
actataaaactcaagctgtatgagtggattacttggtgactggtttttcactactanagagactgtcaagaagtgaccagtgaaactatttttgatgttaaccgacgtacacacaacaacgggtgaatttatttaatagtgattaaacgagattacaacaccagatgatcaatgtgaaacttcccttgtatgcagtgattaatgtgaggattactgacacgatttatatcgggtcgaaagctcgctttataataaatgaatacagatcacccgatggtatgaagattgaagatgaatattgccaaagcaagagtggaccactacgggtgcctataatgaatcacaacttcaaaaaaata

SEQ ID NO: 161384 - DNA, 417 bp, Glycine max
agctttgacttgagtcatcaagagattattttatgtgaccatggcatgagttctaaaaataattatcattatctctttcaatcaatctttcaatatctttcatctctttcaacagaactttctggtttcatttctcttcatctttctaaaagttttttatcaacactttctcttccaagaaaagttctttattcaaaaacttgtgctattcatctttgtcattctcttctctcttttccaaaaagaattcaagaaggactaatcgcctaaattctttttgtgtctctcttctcccttttccaaaagaacaaaggactaaccgccagaattcttttgtgtctcccttttccctttccaagagaattcaaaaggacatagtttgaaaattcttttgattcttccctttcccttaaacaa

SEQ ID NO: 161385 - DNA, 350 bp, Glycine max
  unsure (1)..(350): unsure at all n locations
ntacggtgctcattgactccagattgctgcatataaggacaaagatctgaatggtgatctgcagaagaatatagaccacatactcttccaacaggtgtagattttgtattcatggcaagctgggttactaagttgactaaggcatcaaattntccttcaagctttttattttcagtagatgaagatgaatccgtggccacctcatggactcctctaagaataatagcatcatttcttgcactgaattgttgggagttggaagccatcttctcaatcacaatcctatcctcagcaagggtcatatcaccaagaactccaccactgacagcatcaatcatactcctcttcat

SEQ ID NO: 161386 - DNA, 274 bp, Glycine max
gctcatgaggtgggatattgctatctatgactagcaaatcctacacactcaccatctcaagagtgaatgtgaggaaacgtatcatctgtgtatgaacctcgtccaccaatcacatcttccatggtcacctaagtctgatcatcccattcccaaactaaatctgctcacccacgtgtgacgccacccataaatttatattcaccatacccattttcctttgtttcactctcaaagctatcataggctctatcctatgccctacctgtagttcccc

SEQ ID NO: 161387 - DNA, 404 bp, Glycine max
  unsure (1)..(404): unsure at all n locations
agcnttgatgatatggactgtgccggtttattgttcaaagtgggtctaaaaagaggcaaatttaatcatcccactcggacgaatgagaaaactggggtaaatgaagagggtgagaatgagggagaagcccatgctgngacttccattcctatactgccgagtttcccaccaacccaacaatgtcattactcagccaataacaaaccttctccttacccaccgcctatatatccacaaaggccatctcctaatcaaccacaaagtctgtctacctgacttccaatgacgaacatcacctttagctcaatccaaaatcactcatcaagaaatgaattttgcagcgagaaagcctgttgaatatacccctatatcagtgttttatactgactngcgcccatgtctac

SEQ ID NO: 161388 - DNA, 330 bp, Glycine max
  unsure (1)..(330): unsure at all n locations
tgtacgcgacactactgaatgactcagctgcgcttatctacacatagagtggctattgctactctctctctcgctacacatcgcaatttgactaactgggatcgttaatagctctagaagcctctgaataattcagggtattcagggatgcccctccagtaccacttacgatgctgtagtgntggatggctttttcctctagtgcgatgttcattgcagtcatagagtgagagggctctatctatgcccatagaatacaatgtagatgagagaatcttcctcgaaaatagctgcagaggaggctatgacctcatgttcttttaaaatcat

SEQ ID NO: 161389 - DNA, 415 bp, Glycine max
  unsure (1)..(415): unsure at all n locations
agctntggaagaaattgatgtattataatcctctttagcagagctngaaagagcctgtgtagtcgaagagaagttcaagtccatagccatcaaagtctgaaaagagtatgatgaactaagggatgtcaatatggccaccgatgaagccttggaatgagaaaccacgaaggcccgaaaggaagaacacgaccaaagcaaagttttgaggggctctatagggcagcaatagtgagctcaagcttcgaagaagtgaaaggaatcatcacgggtcaaaggcatgatcttgaaggacgagctaaaggtttgccttatgtcgaaaagaaatctgtccctacagttaaacgagactgacaggaatatgcgtgccatcctcgattagtgcaaatagaatcttaatctagcggcgactcacgag

SEQ ID NO: 161390 - DNA, 386 bp, Glycine max
actcagcttatgtccatctcacaggtaagtgcaagacttgtcttttccatttgaaacagcgataagcctatcagagtcttaaatgctgctctatatgcccataaagcatcattcagcttgcgtgaccaatccttcttagtataggccacagtcctttataaaatcttctgcaatttcctatatgacacttctgcttgtccattggtctgagggtgatagggtgatgctatctcgtgtgtacattatattgcttcaacaccttccgtaactgattattgcacaaatgtgtgcttcatcactgattaaaattcttggaccccaaatcgcgaaagatgttttctctagaactcactacagcttggatcatatgggagtaccactgttca

SEQ ID NO: 161391 - DNA, 412 bp, Glycine max
  unsure (1)..(412): unsure at all n locations
agcttaaagtatgcccgagacattcattccnatagatgncgnagaagcatcggcgatcagaatatccattccttggattacggggttgaaccaagctcaagcttttacaaaaaggttcatcaagtcaagttgaaatatggaagtaaccatcctgcaaaattggggcaaaagatgaatcgagtcacatcactgcttcgactactgccaaacatatttaggattattgatgtccttgtacttccagtttcaccttgacaaagatgtcatggaccatgttgaaaatctaaattgactcaaccccatatcctgcgtgaaaattacgaatactttgactgttcatcattcgcatgcatccatgcttatcattggttgcattgctcattgcattcttttcctagaaatataaaataaa

SEQ ID NO: 161392 - DNA, 248 bp, Glycine max
  unsure (1)..(248): unsure at all n locations
ngagcttggttcaaccncgtaatccaatgaatggatattctgattgccaatacttcaacaacatctcatagggatgaatgactcgggcatactctaagcttatgcacggaaaatggtattatgaaattgagatgcccgaagaaacaccatttcctagttaaccatgcattatgtaccatgttcaaatattttggttctgtgatgggtggttttttttttttttttaaaacggggttattatcccaaca

SEQ ID NO: 161393 - DNA, 417 bp, Glycine max
  unsure (1)..(417): unsure at all n locations
agcttattntggcctaattattcaaattgactatgtttatacttcaaacctaactggactatgtgcaatgtcgcgctgcttttcatttccaccaccaggatatacaaacaagggatatgaaaagaatgctataacagaggacgtggaattactgacaaaggttaacgtactttccttatattcacagggtacattntgtttcattatcatgagttgggatgcaaaaatgaaatttcttgtcaattgtgttgttgttaaatataagatacaaaaatgaatttaataaatgggatgtattgagcgttaataggagtatattaattattagctgttaaacaaatatgagtatattattaaatatacttaattactttaacaatatatatncaatattcttttttgtattttatatatagc

SEQ ID NO: 161394 - DNA, 167 bp, Glycine max
aacctctgcaaccctgcactgagaatcacacagatacaccaacgcacacacatagagacctacacacgcggacactaacattatacacgaagacacactcactcacacacacacacgtagagatacacacacacacacactcatgttaatatgcactactctcgcac

SEQ ID NO: 161395 - DNA, 434 bp, Glycine max
cttaatcacctgccgcatgcagctatatttagccttttgctaggagtaatttgtttttgacaagcgactccatctgtttatttaccttaaatctgagtaattcatgaccatttcataattcattgtttcaaataataaaatttctgaactttaaaaaattaaaataaaagaaatcaatctaaacaaggaactgatatcatgtgagatattttaattctccagtttgttagtttagaagttttattatattttaacatttaaaaatgaattattataaaaaaaaataaatgaatggttgaaagtgaagataaataaaaaaattaacactactcatagtaatttaatctctatttaacacgaagaacttattgtccctttggagatcgcatggctacaacccaactacgataccaagaaacctaccctagaatctt

SEQ ID NO: 161396 - DNA, 400 bp, Glycine max
  unsure (1)..(400): unsure at all n locations
ctaagctgggtattgtananatgtaaagcgtgtgtgacacagcaagttctcatatttcttgagaaagaaaccccacaagctccatttaataattgaaaaaatcatcattggacaggggtgatcctacagagcgaagcacacagaacatttaccaacaagaatactttgttgacacaacagatatgatttatttatatttaaagcagtgagattgtgtttgccattaatgattcactggatctaattcacatttgcatgttgaataagataattctattgcacaattatgcctgttaagggtggtcgtgtgggacggagtatattgagttctaaccggtctgaattttttatagtgtcaattctctaattctaaactcaatccgttaaaacataaatacat

SEQ ID NO: 161397 - DNA, 425 bp, Glycine max
agcttggagggaaacgcacatgcatgcactgtctctatatgcagctaaatgtgtccatccaatctcatcaagcaaagagagctttagttcatagaacttcttcttggcagcctcagcatcatcttgaattatgtcacacagtacctgaatcaagggagtagaggttcagaagtaagtaatttggtggtttatctacccaaagtccctttccccaatcacctatcatcatcaaaatataaatatatatacacttgcattgaggacacgcatgtagattgatctcaattataaattttaatgatctacctcacaagttgtatgacttttatccattaatcacacatgttacaatatgcaacaatgaaaaatactgaccaggctggtctaattgactcaaaaccaatcatctgagtgttcaattcata

SEQ ID NO: 161398 - DNA, 387 bp, Glycine max
  unsure (1)..(387): unsure at all n locations
agctgcaagccatttggagatgggtgatggactgccatcttctctttntagagtttaacaacttgtacgctttttatctgaaaatcttactttaaatttattaagtatatcatatcatccagggataaaatgattctctttttacatatcaaagttgtgaaaacaataatattttataaaagataaggttgtataaaatctggcacgttttatacataaattagaaaagctatgttaactaagagcatctttaatacgtgttgcctaaagaaaatatatgttaatatcttattttgcaataagatttttggaaagagtcttacattatattttttattatcacttcctcttattttaaatatttttagataaaactttggactttaa

SEQ ID NO: 161399 - DNA, 422 bp, Glycine max
agcttgtaggattatgggggacccatcacatgttgttttatgtggcagtcaggcgatggtgcacaaaaagttttccacatccacaaatcgcgtataaacccaccatcccctgttgcccacctccaactgagctcacgtactcccacgtagcccataccctcatttctctatcaacatcgggtccccatcaatcctcccaagcttccccaacatccaagtaattcaacatccaaatcatcacaactaacaaaccaagcaaaacagggcaaaggcagaaaactctgcccaaaacacaactcaaaatcacagcttttcacatacaaataccccaggaacattttcttcgttccaattcgataaccgctggctcgactctataaatttactggaagtctctagtacataagtctacattgtgaccg

SEQ ID NO: 161400 - DNA, 481 bp, Glycine max
  unsure (1)..(481): unsure at all n locations
ngaaccataatcggtgagagtctgaacataaactgtgagtttacgactatcnttgagtaatggtctntgcatcaatctctgaaatttataatgaaatgtatgaatgaggacatgatgatggccatgatagtgtatatacaagccaattgaccaaaaagcttaccatgaatgataattgtatcctttgcaccctttgtgagctaaatgagtttgtcacaattgaaccctaaacttaaatgaatatctctagtaccttggttagattctangagagcatatgattcaaggaaaatttaccccaatttatgggagtggagttgattgggttgtaaagtaaaaggcatagcatagcacacataacatatagttatgttaaaaaagaaaaaaaagacatgtgtgtgttgtataaagtcaaagcanataaagtgaagctattgagtaactatatgattgagaaaaaacatttgataatcttgattat

SEQ ID NO: 161401 - DNA, 196 bp, Glycine max
  unsure (1)..(196): unsure at all n locations
acccacgtccctaccccccccccccgagnnttgactcagcaccgacaaacacgagagcacgacgacgggaattttccccccgaccgcggcagaccgggaaaaaaggacacagcgaagaacacaggggcacgagagcgaccggacacgcccgccagcggccagaagacccacacacccgaaccaaccgcaggggggc

SEQ ID NO: 161402 - DNA, 393 bp, Glycine max
  unsure (1)..(393): unsure at all n locations
tgagcaaantagcaattccagcgagaaccaaatataagcatacacaccccgtgttttctctgttttgaagcatatctaatacagagaacttaagacacaattcttctgtactcttcgcgcgtttactcttcaattagaagccctatacttttatcagcgcttcacccaacaaaacacatacagaaatatatgttcaccacaatctaaacaaatgttcttcaatatccttttcttatatgcatgtcccacacttcatgatcaatatggagatataagattaagttgtagtcaatcagcaataaaaagacgaaatgacggtgatatttgatcttcacgcgataaagattaacgataactattatacgccgatttattattaaaagaactttaata

SEQ ID NO: 161403 - DNA, 417 bp, Glycine max
  unsure (1)..(417): unsure at all n locations
agcttcaaaccacagcaacacaaaatctttgttttctttacccctcaatttaatggattttcaaggtttgagaagtgaaattgagaatgaggtaaatctgaagcaaactctcacctcacacaagtctataacatcaatttaaacttgttcaaactggattgacacctataatttcaccgaatcaaaatttgactcctcaacacccaatattaccctagaaatggctgtttgttcactttggtcatttgtttttctctctagcacaacccaacctttctcataagtcctaaatggcatttcaagctaggattaactcactctaacctctaaatactaccaattctagatttggccttccagctctcanaagatcactctctttccactcataacatcatattctcaccttctaaccct

SEQ ID NO: 161404 - DNA, 290 bp, Glycine max
  unsure (1)..(290): unsure at all n locations
tagcanaaagaaccatttgcccattcttgtggtatcttncttgttcttgatcaaaacattgaacgatctttcatctcgtgcggtaaatggtgtcgaacaacgtagttcagctagtgagaatcaaaacatcaatgaatgatagtccctggacgaaattatggtctgacactaaacacagaaattaaaatttctagtgcaaattcaagttatcaacatacatagagaaataaatatggttcaatcacacataaagactatcaagcgacaagagagatgccccataccttgag

SEQ ID NO: 161405 - DNA, 245 bp, Glycine max
tcgaatacatcgactcaaaaaaaaattatccaaagagactttagcaagacaaaaaaaaaaggagctacaatacacgaactcaaggtaaaacacggaaactcattcccaattctattactcccacaaattaaagcaacaaccgcccagaacttccagaacgaaatagaaaattgacctgaacaaaacaactacaatatcaaccactgttgccctgtattaataaccacgaatcccttacacagctc

SEQ ID NO: 161406 - DNA, 380 bp, Glycine max
  unsure (1)..(380): unsure at all n locations
nntattaacactgtgttattgttgtatatattgttatagatagtattagaagccaattacatacagaagtagtttatataaagctagattaacattgtctttactatttaaaatggtttcaccttgtgttatgacgaatttgtagattatatttactcaattccaaatcctaatgcttttaagctataataaactacgaataaaaaatgcataatgaacaacaggtatcacattctatataagcatgcgactttgtaatcattagataattgaagttataaatccacctttttactaatataatttttgtttatattaaaacatcaatctggattgggctttaaagatttatctatcatggatgatttaggcatgtcaac

SEQ ID NO: 161407 - DNA, 415 bp, Glycine max
  unsure (1)..(415): unsure at all n locations
agcttgtcaaacccaatgtccacccttaattttttctatatgcttanatgccacgtctccagtgcgtgccactccacgagtgacacgtatgcaagagcacgacactacgtctccagtacgtgccactccatgagtgacacgtatgcaagagcacaccacaacgtctctagtgtgtttcactccatgaagtgacatgtatgcaagagcatgccacatctctagtacatgccactccacgagtgacacgtatgcaagagcacaccacaacatctctagtatgtgccactccatgaagtgacacatatgcaagagctcaacaccatgtcttcagtacgtgccactccatgggtgacatgtatgcaagagcaccccactatgtctccagtatgtgccactccatgggtgacacgtatgc

SEQ ID NO: 161408 - DNA, 340 bp, Glycine max
  unsure (1)..(340): unsure at all n locations
ntggagagggtgtgtggngagctccgtttttgttgtgtgttattgttggaaaagacgggataacaatggattgatcccataagatagtggtggaaatgttgatctttgtatggtgtgttgatgagctcatgtgtttagttgactgtcgtccggtaccattggcaggagcccacacagacctacaaaagacaatctcgatggggaacgtcgttgaggattccacccttaaaagtggtggatgactgcagattgatatccgaggtatgcttgttggcttattgttcctttggggtgtggtggtgagtttgtggtcatgtatccacacggtttggaagagttt

SEQ ID NO: 161409 - DNA, 416 bp, Glycine max
  unsure (1)..(416): unsure at all n locations
agctctantcaaatggaaaaaaagattttttctangttggtaatncgtctctagcagagaatgaggactgctagctctaccaactctccacaatttgcttgtccattcctatcttgatgtagttcacttttggcggcatcattccccgatcttgaaatctttacattccaagaagaaaggataaattgaacggatatgtctctgctagaatttgggatttctactgacatatacctgatgcacaacaactaaaaatgtaccatgaaaaagagtcacgagctttatctttctatgaagaattgctcctaaaataaatatgggcccgtagactttcttccactactcactacgcccacattgcattatcagatccacccctcaataatgcgtgctatgaaatacctgaatagtgattt

SEQ ID NO: 161410 - DNA, 403 bp, Glycine max
  unsure (1)..(403): unsure at all n locations
agctttgttgctaagtcccattctcttccttattcactatcnanaatttggaagtcacgccggaggcgagtatagtcccttcattttttcaaatcatatccacaggttctcagttccaagttgaaattcttcaaagcagcaggagaccttaagcttggtattgccatttgcaggagtacaatcccagctgaatacatatcaaacaaatcagggctgtttaactgcaacaataatcacataactccactttagcacttcctgagcaaaataggtatatgtggaacaaacccgagaatagttaattcagtcagtatgtgattaacatgtttcttaactaggagttcttaaaattttaaatacagaacaattatattgtgtgtgaacagatcttaactgatatgct

SEQ ID NO: 161411 - DNA, 444 bp, Glycine max
tgtcctcacgtcaacgagcgtggatgttatatattttgtcttatactcatactttcatacacctcttatagaaaatggataaaacatgtgatgtaatctttctaaaataatacttgacatcatcatgcgattacactataatatatcctatgagagagaggacggaagagatttctatttaaaatcattttctaacaacactattttacattaaaaagatttttccggtataaaatttatgtttaacaaaagtaaattatatactatacatattatgggatttctatactattaatatatgacgtatactatattaatgggttgtgtgaccgacacacatagtggcaaataattatttctatagataatactattaaacaagttaactcacattaaccttagaatatctttgagggaaggatgggcaataaaataaaatttttt

SEQ ID NO: 161412 - DNA, 407 bp, Glycine max
  unsure (1)..(407): unsure at all n locations
agcttagtaaagtttagcttgagtgcttttgttatattagcgnnngaaattgcacaaggccaaaatccgccataaacatatggcggatggcatggtggacaggaaaaaaatacacccactcataaatactaaaaaaacatcagtgtgggggaatttaactcttgcgtcaaggaagcaagagtcgtgcattgtacgcctgtggacaacttcactcagcacttctctttggctgcttcgagggctactaatagaaagtggaagatttggtggatagcagccacagtttctatttggaactatatgaatgatatgatttttaaaaatcaacagtttgtcatctctaagtggtggaaatgcacattttctacctggtcttggttgacgggggggaaaagactttgccgtcc

SEQ ID NO: 161413 - DNA, 280 bp, Glycine max
ctatagacctataactagctctgtgatctaaaaagagttattgttatcattgaaatgcattgatgttgggtaatctaaccttgcaagaaggacaaaacatttgcatggatgaaggtgattatagttccttactcatatttactgctcatttcttgcatttggctaacttatttcgcatagtaggtggtccattctcaaatttatcggaccttcataatagaatcatctaaccttctttttctaggtgagctctggctcctctatgaaatgatctcaaaca

SEQ ID NO: 161414 - DNA, 427 bp, Glycine max
  unsure (1)..(427): unsure at all n locations
agcttattactcctccatttggatgtatcttgctgctcatgctctaagctcgtccaagtccttgggttgcttctggcaaaggttgtcggcgaatggccccattttgagtgctatgatcatagaatgcaatccaacactagggtcaaggtctttcattttaagagagatggtgacgtacctctccgtgaaggatgataatgactaatcattagcttggtgtaggttgaccaaagcagtggatgttgtgtggtgagggctgctggttgcatattgcgctccaaaatgttagactaaggaggagaaggagttgtcgcaacatgcccttcacgagcgagcgagggcgaggctcactggtgcgctttccaaaggaggaaagatgcgcggagtctccaccaacgtntatttgtggaatacgtcggaaaaaccg

SEQ ID NO: 161415 - DNA, 443 bp, Glycine max
  unsure (1)..(443): unsure at all n locations
agtccaccatcttttcatagtagaatactgtttatgtgtctactatcattatcatntttctccgncattgaggtgccacttgagctgccaggtctctccacctttgggcgtattctttgaaagatctgtgccccttcttgcacatagttctgtgttgcatnctatcctgaaccatatcaaaattgtactgatactgccctatgaaggcaacctttatgtccttccaagagtggactcgaganaggtccaggtcaatgtaccaagtaacagctactccagtaagaatttctcggaaagaatgtatcaacagtttctcatcttttgcgcatgcccccatctttcaataatacatctttagatgggtcttggggcaagtagtccccttgtactgtcaaatccacaccttgacttgggagggtgagatattggtctatgacactctt

SEQ ID NO: 161416 - DNA, 419 bp, Glycine max
  unsure (1)..(419): unsure at all n locations
agctntataccaaaagttcaacattgaagagagttatttatcacatggcactgaagtggatccatttgagaggtctttccattcgaccaacatatgctttatgggttctccaccggcagtgagccatgcatcagcctgatgatgcacaagcacagcatcagtgtgagtgtgacagagaaaaactatacatactttcaattccaatagggtgacattaacgtgctagaaattcgaggttgatttctgctacggcattcttctcttgtaagtatgaggaacatgtttttgatccgtttgtacagacttgctacatgagtgacacgtggaaaccgtaactaaccccagttagtttgttctgctcgcttgtttttaagaagcttggacattttccatcttgttggactcttaaatatcataaa

SEQ ID NO: 161417 - DNA, 392 bp, Glycine max
  unsure (1)..(392): unsure at all n locations
tgccacagnctacatggaanggatcaaatcctacctttcttgttttactaaatcacatatcctgactctactcatgtggcgtagattactacttcattaatactttagctaattgtcacatatgatgttactgcattatgtatgctttttatgccacgtcgcgataatattatggcggttcttgttgcactttaaatgggacgaatatgctgtctagtgtaatggcacaatgcccatgcttaaccttgaacctgcagtgatggttttttggtttctgaaagtgaaacatgctgctattatgtgtggcgatcttgattgatatgggcccatgtgatgagaattcaattctactttactcttaaggcaatatgtgacatggatcatagacatcg

SEQ ID NO: 161418 - DNA, 423 bp, Glycine max
agcttgttgtcaccatcaacaatctgaatgtttttgatgtatctagccttgccaaaaccctcctcagggaaatggccactccccatttgagtcgaggtgtgttggccgtcggactcagagttcacaacctctcccccccactcaatcattgacgcgctgtcagagaggtacgagaatagaggagccggccagtatcccataacatggtcattcccaaactgcatacaccagttaccctctttggggtcctacatacatattggttttccataatagacaacatcagatggcattgttccatattaataaattcatggaccctaaaaaataatgcagcattcacgtataatgaaatgttagtgtcagagattctcttgatttataattaactagtgtggtctgcacaaaacagtggtgttaata

SEQ ID NO: 161419 - DNA, 419 bp, Glycine max
  unsure (1)..(419): unsure at all n locations
agcttatgaaataccttttcttactgtgggagactgttttgatgggtccgcaaatgtcagaatgtactaattgcaacctttgtgatgctctccacaaactcttcttagagattgcatccctgtgttgttttcccaccatacaatcagtgcatactttaaatgatgcattcaagtgaggtagccctctcaccatctccttatattgcagggttttcaaacctttgtagctaagatgtccgtacctacgatgccaaaggtgagtgttgtcctcaagagttgcttgaaaacaagtcagagcctttggtaaaactcttgcaggcaacttgaacatcctgtttgttgacattgctatctctataataagtcatttctcaggatgatagactntacatactccttgttgtataaaaacaaccacc

SEQ ID NO: 161420 - DNA, 335 bp, Glycine max
gtgtctatgaatcttaggctagctacatcagtgcaatctccttcatctataattaaagagcatattctccccatgaccatgcacctagtatgaaaaatgctctccctttgtgcttcatctcaatccttacacacactccccagtaacctcctaaccatcaaaagatcacctttcatggagtgtacatcacaatgactttcacactcagtagaagaactataagagccgaaaaaagatgcactagtaataaccacataccccacacaaccattgtccttttgttaagacattcggaaacaatatgaccctttcccaaacacttaaaacatttaatg

SEQ ID NO: 161421 - DNA, 416 bp, Glycine max
agcttattagttttagaccaaatagaaactatattcttatgtaatttatagaatgactttattgaaaagatgcttataatgtgatcgtattaggataaagatgtattcaggtcattggctaaaatttttatacataggttaaaatgtaattttgatttctttatttttataaatccatgattttagtttccatcttttaaaattgagatatttagtccttcaattttctaagattcttaattttggtcaattcattcatatgagatggttaattggtaattgattaacgttgatcatttatctggttttttattttcatctttttattaccgagtaaaagaattttaaaaaaaaaatatttgacgatattggcccctgtctactggtgagaatccaaagctgccatatatttggat

SEQ ID NO: 161422 - DNA, 351 bp, Glycine max
  unsure (1)..(351): unsure at all n locations
ctaagcttgaagaagttgtggcttttacatgcctaacttccttgaattatanttttattggttgttatctaggntgttgtatcctaatacattcgatatatgtattgcatcatcatggttagaatgaagacaagtttctaagttagaaaagtttcttcaaacgcaaaaactctttgttttaattgataacaacaagttgtatgaagcttaaagaagtaagtctcgcatcgatttaatcgattaccactatctcataatcgattactctattgtttgagacaatgactaatttatctaggagtctctgctttaatcaatcatcaagtggattaatccgatacttctctctcg

SEQ ID NO: 161423 - DNA, 242 bp, Glycine max
gactaaaccgcgcattcccttagtgagtgcgccggaccaccctggaaaaccccaataagtagccaccccgaaccagagggtcgggtatgcctacggttaacaaaaagaatgcataatacgaccggatgtatcccttctcgggatcgctcgcaacaacagagaagaacatgagtcgacatggaccgaaaagaaggataaaactggtctttcttatatccggaacaaaaacgacattccgtcct

SEQ ID NO: 161424 - DNA, 411 bp, Glycine max
  unsure (1)..(411): unsure at all n locations
agcttactatatttaacagcaagcagacctgtcttcacctntgcagnaggtgtntgtgcaagatatcaagccaatcccaagatgagtcacttgaatcaagtaaagagaattctgaaatatgtaaatggcaccagtgactatgggattatgtactgtcattgttcagattcaatgctggttggatattgtgatgctgattgggctggaagtgcagatgacagaaaaagcacttctggtggatgtgtctattcgggaaacaatcttatttcatggttcagcaagaagcaaaactgtgtgtccctatttactgcagaagcagagtatattgcagcatgaagcagctgttcacaactagtttggatgaagcatatgctgaatgagtacaatgttcaacaatatgttatgacattg

SEQ ID NO: 161425 - DNA, 397 bp, Glycine max
  unsure (1)..(397): unsure at all n locations
tatgcggngcatgatatgaatgcatttaccgatatgagatctccaataaatcatntcttcttacttgtgcattcggnggcgcagtgccccatgtgtgcagttaagaaggtgatatggaccttccagcttcccgtgacaaaagacgagaccaacatacaacacatgcgtgatgacatgatgcagatgttcaaaaacgcaacagggggatgtacatagcatggcaatatccccagataatcatacaacaaaggcgttcatgacatttaggttatatgcatggtagttttaaaatgcacgcaacgtgttcgctttgtgcccctattttatggaccttaatgggaggaactcaaaggcctttagtgataatatccaacgcggtcatatctctcttgatggg

SEQ ID NO: 161426 - DNA, 411 bp, Glycine max
agcttcaagaaaaagatggcctcagcatatttcttatttccagaagggaattctatcaatagacctccaatctttaatggagagggttaccactactggaaaacccgaatgcaaatttttattgaggcaatagatctaaatatttgggacgccatagaaatagggccttatatacccaccacagtagaaagagtttcaatagatggtagttcatcaagtgaaagcataaccatagaaaaacctagagatagatggtctgaagaggatagaaaacgagtacaatacaacttaaaagccaaaaacataataacatctaccctgggaatggatgaatatttcagggtttcaaattgtaagagtgctaaggaaatgtgggacactcttcgattaacacatgaaggaactacagat

SEQ ID NO: 161427 - DNA, 346 bp, Glycine max
  unsure (1)..(346): unsure at all n locations
ggctctagatntacattgatgtgtggagttattgtgaggattgtttatgccanactagtcttaagagtaatgtgcctctgagataactaactttccgaatgtttgtcttcgcatgaatggtcccgatgaagctcgtctctaatatgtcctgtatgacatagctgtctaaggataatattaccttcagatgtacacgatcatctatttatgagcgctgttctccagagttcgcttaagccatcaaggatggcatttcctccgtatcgtaccgttcacctcatggagtatagattctattttcagatgaaatatgctctcgatttggcactcatcgaatcctattgtc

SEQ ID NO: 161428 - DNA, 374 bp, Glycine max
agctatactcttgtagatgtgtgaggttcttttcttgttctatcttcacaaattcttcatacatttgttgatagtagttcttttaccaatagttagtcaatcttttcaacaaacatctaattgacatgtgagtgttcaaatctctaagagaatgttcaggaatccgcagctaaattatgttaagggtgattgtaatttcacgagcgggttaaaactcttacttttgcatgtgttttattactattggttggatttgcattgtatgcacacctacacttttcaacgcaaactaaacgttcactatggccctgttggtggctctaatataatgtgataagattactattatattgtgctttgaaagctacaagata

SEQ ID NO: 161429 - DNA, 416 bp, Glycine max
agcttataatcccagaaacagaggaagttccttcttcaaaggtgcaaagagaataagggaccaagagaagagtggtgaagccaacgtaccttgatgattacgtctaaggagcaaaactggaagaacgaattagtagaatcaacaccaaatcctacttgtggtgtttgctccctcataggcagacatgcataacaaaatctgttattagaatattccttttggataaaattggcacaaatctgttatttgaattcctctatatatagccatgtaaataaacaagcaggatatgagaaataaaatttccttcttaccatgagtttatcttcttcttctacctctttggtctggaggtgcttaccctcgaagtcaataaacacactcagagcaccttacataaggttttttgcatcatc

SEQ ID NO: 161430 - DNA, 122 bp, Glycine max
agcttgtgccacctacatagctatattgttttttatggttgatcaacctagggctgtggttgcaaatttgagaatctctcccatacccaaatatcaaccaagtagtaaaaggttgatatttt

SEQ ID NO: 161431 - DNA, 396 bp, Glycine max
  unsure (1)..(396): unsure at all n locations
agcnttcaaattagtgtaccactcttctgctgtttcggccaagctatccgtgaaagaagtgtattaatagcttttcatctatagagtgggcgcccatcttacggcagtacattttgagttggtttttgggacaaatcgtccctttatacttgacgaagtccggcactttgaacttcgggggaataacaacatctggtactaaacaaagatccgtcatgtctgtcaacggatagtccccaaatactatctcggccctcaatctttccttaaagagatcgagctttctcctttcttcagttgctgggggcggcccttccgaggacataactattgatggagctgctatgttaggtagatgcaatacgttcggtgcctgcccttcagggatcgagggat

SEQ ID NO: 161432 - DNA, 415 bp, Glycine max
agctttagagatgcaagcataggcaaatagatgtttattgtatcctataattaagtcttctctggattcaaatattacctcttcaccattagagttgacaatgtcattaagctgagagtcctcatcatctcaacttgagtccagtgttaattctgttttattggtggatagccattaaacacaggttggcttcttcctcactgtgctcatcagacgatgaatggtctaggtcctcccaagagctcatggggctcttctttttggacttgaagaacttcttcttcttatcctttggcttttcaaggtcacgacattttgacttgaaatgccctggcttctcgcacactcatagcagatgattggacttttctctttcttgtggaaggatcttttgaacgatccgttgaaccttgag

SEQ ID NO: 161433 - DNA, 368 bp, Glycine max
tctcggctcatactgggaatgcctctagatcaacacccgtgctttctattgcacccacccagagggaagctccccaagttccaactccgaacacgactcgaccggccggtaatttcaacacgacaaggaacttccctccgaggccatttctggaattcaccccactcccaatgacgtacgaagatcttctgccatccctcatcgccaatcatttggccgtggtaactcccggaagggtcctcgaacccccttttccaaagtggtatgaccctaacgcaacttgcaagtaccatgggggtgtcccggagcattctgtcgaaaaatgcttggcccttatatacaaggtccaacatttaatggatgctgga

SEQ ID NO: 161434 - DNA, 423 bp, Glycine max
agcttattgaaataagctggaaagagttcttttattataagttattgttggatcttacgtaaaaacacttccaaacaacacctaaataaatacatgacacatcatcatgttccattatattgttgcataaatctacaatctaaaatttttttacatagtcttatcagttgattttagcttacgcaagcagctcaattcatttcatcttcttatttttctactataaatgtttataaagaagtttattcaaacaggaccatagaaagtagtgtgttgcttaatatagacaactatgcatcttttctggaaaataaagtatattgagctgctttttggatttagcatcaaccaattgagtaggtttatagcttcttatagtcaacaatgcatcaataactaggaggtaatagaaaatgtaccttc

SEQ ID NO: 161435 - DNA, 329 bp, Glycine max
  unsure (1)..(329): unsure at all n locations
ctaagcttcaagaaaggccaaagtaccctcccaatattatttcatgtcttatatatgcagctnntgccgngcttgtgcgcttagcgcaattctgaaccgcttagcgcttaataatggattttggcttagcgcgtgcttttctcgctcagcaaatggactgaagtggtgtgcttcactgaatggcccttcacttagcgcaaatgccattgacatagtttataattggtagcatgttgcatcaactatgaacgaccaccttctcattacactngtgttgaacgttacacaaaatgaaataaagactataagagcaacctttgtagctctat

SEQ ID NO: 161436 - DNA, 289 bp, Glycine max
ctcgttattgaaaacagatgctcatatcatattcaaacgacaataactttttactcagatgttgaatgggctccgtaatatatcagacgctagaatcgaaaaccaatctcggacaatgcatacacactaacgttagctcggatgccgataagtcagtaattttcgcgcgctcaaattgaaacatcagctttaaaaattcaacacaatacttctatccgatgtcgatggacccgtatatttggacttcaaattgaaacgaaccccaggaattaaactcaatacttttact

SEQ ID NO: 161437 - DNA, 367 bp, Glycine max
  unsure (1)..(367): unsure at all n locations
ctcaagctagcttcttctggatgtggcaagagcgaatggagtactcttcttctgtttatattctngagncgcccagacctcttaaggcgggatgttccctctctgttttgaagtctctccgcaatgccaggtgccaacctgttggcaatgggttcttcatcagattcgacttcttccatgtcaatgaggtcacccggaacaagttctggtgcccgtggtgcacgaagtctcctctgacgcttgatactcttcttctcgtgatatctcttcactgggtgaacggagcggcttatcattcggagcggaagatgttggaacatttttctaatcatctggacatcaacttcttgtggggacgagttggata

SEQ ID NO: 161438 - DNA, 415 bp, Glycine max
  unsure (1)..(415): unsure at all n locations
agcttaagctccttcaactgcacaaggctctttatatttgaagagtatccngggggaaccttcacccaacgaagacactgacaaaaacttatcttctcctttttggacaaagtatggcaagctgggggcaagtaaattttcttcccatcagaccttggatgcaactgtgattgaatccccatatcagctagatcttgacgggtattcaagccatccttcgtcttgccttgaatgttaaggagcgttccaatgacactatcccatacattcttctccacatgcataacatcaatacaatgtctaacgtctagatcagatcagtacggaagatcaaagaaaatgaacctcttcttccatatgcaattgttacttttattcttcttttgggtcttccaaatacagaattgaggtgttg

SEQ ID NO: 161439 - DNA, 328 bp, Glycine max
cttacttgttgggatgaacaacaacgcttattgttatcataaaaatgcgaaaaaggatgaccctatggctgcgaactcgtcactcccgtgggtatggcttttgaaaggggggaagggaagtttttgaatgcaaaaacgtcccccctctcgtcattcttatattttggtgcacaggtggctccgccagtcgagcctaacttgcccagtcgagcttatccgcactttttattttcttattgttcttgggaactaatacaatttccctcctttctatgattaccattttcacattgactatctaggttcacatggctcataatttttattt

SEQ ID NO: 161440 - DNA, 415 bp, Glycine max
agcttgcgaaaatttcacgttcttctatttgttatcactgattttccattcaattactgctattattatcaattattattattttgctgtgatcaaattggtttatcgtattaagaattttcattattattattactgttgagactttcctcaagtcttgcaccaaagaactgggttcccagttttctccaattctagggcaactttttcggctaaatccctttcttcccatcgaagcgagctctcattgcaaattaaacgcgctttgcgtgctgcgatcttggttgtgatggaaactatggcataaattggccgtgcacaagataaaagcgttaaagaatgttcttcagcggcgatcctttacacgtgagcgtgtcgattgggaggtctaattcacaggagaggaccggaaaac

SEQ ID NO: 161441 - DNA, 439 bp, Glycine max
  unsure (1)..(439): unsure at all n locations
gctganacatcagccacccttttgcttccgcttctcaacgtgttgacggtgctgctgctgcttgcaccctcctcctgactgacatcaacaaaagaagtcttaatccttttgaaagttggtagtttctctatagcagcccacttggactgaagctccttatcttcctccacaaaggaatctgcatctctctcanaggtcaacacatgaccttgagttcttcctcttggagttaactccattggaagaattgaacttagctttgcttgaagcagtagctattattgctggagctgttaagcctcaagctcctcacaatcactgatatgatctcagaagttgcaatgattgtacagaatgtgggggatgatggaaggagaaaaaaagtcttactcagaagacaaactaaagggtgttttgttctctttaacacgaagctctg

SEQ ID NO: 161442 - DNA, 391 bp, Glycine max
  unsure (1)..(391): unsure at all n locations
agcttctgtttctaatctcgagcgtggtaatatattccacgactcaatcccgcatccgagtaataagttattgtccttcgaattngctacgagcttctgttttcaatttcgaacgtatctatatattacgggactcaatccgacatccgagtaaaaaatcattgtcgcttgaatatgaactgggcttccgttttcaaatcctagcgtgtcgatatattacaagacataatccgagtaccgagctagaagttttcgttgttggattaggcacgaccttccgtctacaattctgagattctcgaatattaccggaatcaatcacacatccgagaaagaagctcttgttgttgcattcgttcaagctttcatcatcaattccagcgtttgatat

SEQ ID NO: 161443 - DNA, 412 bp, Glycine max
agcttcaacctttggccatcatttctgttactttatcgctaaaggagggcattttcggggtcgtgaagtgcgtggctacgagtgggacttcaaaaatccaggttgggtggacttctttctctcttaaatttcgtgggtatggggttttgggagatatgatgggtggttatgttagttttctgctgtgtgatgattatttgtgaaggcatttgctgaaaacttgttgaaattgccatgtttggatgagttaaacatacccattctgttttagggtttttgagatgatgtttgtgatgtttatatgctgaaattgctgatggaaaactgttagagatgaagggtacaactaacctatggttataaagtgagaatgtgatgatatgagtggaaaaagagtgagactctcagagtt

SEQ ID NO: 161444 - DNA, 423 bp, Glycine max
  unsure (1)..(423): unsure at all n locations
tcctcattngattntctaagcttgcttganacacttnggatgctgcttatgaaggacttaacctctctgtgatctagagatcctagtgtcactctgatagaatgcatccaaccagactcattntgagtgtggtccatgactctgaactcttaagaaatgaagggtgtggatatagaaataaaatgcaacttggttaatactcaaaccagtgaaggatagataatggtttgctgaaagcagtcccacactcccacctaaaactaaatttcaaataggttactctgattgagtgattctgtataaataaaatatagaaaanagcctgatcagattctgtttgagcttgcttangcactgcctaatgtctaaaggtggatcaccctttaatggtaaagatngaagcataacgtcatttatttcaac

SEQ ID NO: 161445 - DNA, 380 bp, Glycine max
agcttttctctctcctcactcagccaattcatatttattcagaagctctccctcttcctcacattgctttttccttctcctccattctccattgaaaaccccaacaaagctccaacctttggccatcatttctgccccaaatcgtgaaaggagggcgtttttggagtcgtgaagtccgtggctacgagtgggacttcaaaatttcaggtttgggtggacttctttctcctttaaatttcgtgggtatggggttttgggagatatgatgggtagttttgatagtcttcttgcttcatggacgttatttgcgaagactcttgctgaaagcttgttgaaatacgccatgtctggatgaagtaaacatacccattctgtatttg

SEQ ID NO: 161446 - DNA, 345 bp, Glycine max
gaccttaaaactaagctttgggggactctgacttgtgtccaacttacttctcacaattctgcttctctatttcagattggaatgcctctccagcacctttgcaatgattttttcatgcctcttaagtgcagatgtccaaatctttgatgccatattctgacttcatcttctttggaggatagacatgtggaggagtaactgggttcttgaggtgttcatacgtaacagttggtctttgatctgctgccctttattagaacttcactcttctcatttgtcaccaagcattctgactttgtgaaagttacattgaatccttcatcacacagctgactgatgctgatc

SEQ ID NO: 161447 - DNA, 359 bp, Glycine max
acaataatcttttcatgggaagagatttgttgtttaactatgcctacaagagtcccacaataattatcttacaataattttacaggagaatggactatgatattcaacattaaaagaatacctgtattacatattatgaaggaaatcaactattatcgttttgtaaacacctttttgttaccaagaagttacatgaacttatgacaaagaagataattgcgtgggagtagtaagcgattagttaaaaagtaactttgtcggagttcatataacgatatataacaatattatagctcttgtgtttggacctgaaacactcatatgaacattaattctaatgttagaccttgttttatata

SEQ ID NO: 161448 - DNA, 420 bp, Glycine max
agcttgtatatattatttattaaacagctaactgtattctcacgaactcttcataatcaacgagcccgtcaccatctaaatcagcctctttgaccatctgttccacttcttcgtcggtcaccttctcttcaatggttctcatcacagacctcaactgcacgaatacacatgtgatgtggcatgtccattatatggttcatatgaactcatgcaatgttgttgaacaaattaaattaagatttacaattctcacatggtaattgacaaactctaccttccgtgtaaaataaaaattaaaaaaaaaaaaaagcattgtacctcactgggcgatatataaccatcatgatctttgacaaacaccctgaaagcttccttcaattcctcttctgcttccgtctcctttcggatcaaaatacataa

SEQ ID NO: 161449 - DNA, 301 bp, Glycine max
  unsure (1)..(301): unsure at all n locations
ctaagctatatgtgccaaanagaacaaataaagatctcgnttataccactacaatcaaggccaataatatcctgctttcttgtgcctaacacatgacaagccttgagcaaacaggcacggtatttgcaatttgcagtaaccagcaaactttgttataacataagaaaaaacagcatcaataaacaggaaaagaatcatcaaccattctagaaaagccgacgccaaggccgtggtaacactcggagagagcttacgccactcagaagatgaacatntatgtgtagccatcattcaccaaact

SEQ ID NO: 161450 - DNA, 412 bp, Glycine max
agcttgtaatgaagatgaacatgaacttatgttttcttatttctggtcagatttcactcattgctcagtccaactcctcgcggcttggatttccagccctgattactgccttgggcaaggcccgaggagtcacctcagattctcttaccttcgagtcactcagcccagccattaatttggcttatattaagaagaattgctggaacctggatgacccttcggtaacttttctagggacccaaaaatccatggctagaagatctgaggccctatcttcttcagctactcctgctccccctacccctgctccctttacttttgctctcccttcagcaccagtaactccagttcttccaggtcctttcgctcagagcttagagcctttcatgtctatgctgcaaagctcgcatca

SEQ ID NO: 161451 - DNA, 352 bp, Glycine max
  unsure (1)..(352): unsure at all n locations
tngaaagcggagatcgaaagaatgagtgtcgtcattgagaatctaaagatgacaatcactagggttatgatagaatgtgatgagctgagaaatgtcaacatgactatggtagaagcattagagcaggaaacaaaaagggcccgaaaggaagagtggagcacgaacaacatttgatgggctctatggggtagcagcaatgagctcacgcttataatggctgaaagggatgagtcaagggtgaaaagcatggtgttcgatgataatctaaaggcttgtcaaaggtcgaagagaagtttgacggaatagctaagcagaacggaagagagtatgttgaagaatattgatcaatata

SEQ ID NO: 161452 - DNA, 413 bp, Glycine max
  unsure (1)..(413): unsure at all n locations
agctttgaatctctntgaacttcttcttctnctttgtaccaaaagctttctgaagttttctggttttctaaaccttgaaaacttgtgctattcatcttttcattctcttctccctttgccaaaaagaattcgccaaggactaaccgcctgaattctttttgtgtctctcttctcccttttccaaaagaacaaaggactaaccgcctgaattcttttgtgtctcccatctcccttgtcaaagaattcaaaacgacacagtctgagaattcttttgattcttccctttccctaatacaaaagtgttcaaaggactaaccgcctgagaattcttttgtatccccattcacaaagtatcatagttttaacagcctgagatctttgtctcaacacattggagggtacatcctttgtgg

SEQ ID NO: 161453 - DNA, 469 bp, Glycine max
  unsure (1)..(469): unsure at all n locations
ntgagacgcatgtgatcttttggcatcatcaaaacatcggcttgatcctttgtctacaatctccacctttgtgatgatgacaatccctgaaatcaagacaaactatatacaagatgatagcacgttcacacacgccttactccccctatcttttggcatgtatgcctaactttacttaatgataaatttctaattgatttctaacccaagctctgtcaagttctcttcccctttggcaacatcaaaaagaactaagcaatacaaacaaaatccaaacaaagcccaacattaaaccaaagataaatccacacattgtcataaccaaccaaagcaaagtcctganatgtaataatagtgcaagagtacgataactagagcaacaagaagcccaatacacggcgattatacaaagtactaagaatacttaattactaataagactcagtcatagtaataataacaactaatc

SEQ ID NO: 161454 - DNA, 427 bp, Glycine max
agctttagatctttttccatgtacaaatagagcattgacaatgtatgtctcaatgactaggtgaagaaaatcaagataaagaggaaaatgaacaccaacaaactcaatatcatcatgatttggcccttcgcactagccttcttcatgaccattcccattttttttttctgatatcataaacaatgagacacacatcaactttcacattcaacattaaaaaatttatccttatagtattactaattaatcacagcaatcggccagatagatcatacattttaatgcaataaaggaaacttgaagcagaaactcacttggacaaaatctaggcgattagatgtactgtccatctcattacccaattcatcaatgaaacaataatcatcttgtgtgagtggtttccctagaattcttcccacaaaatcat

SEQ ID NO: 161455 - DNA, 401 bp, Glycine max
  unsure (1)..(401): unsure at all n locations
acacaactttatttcggacaacaaggttttcttgtgatgaaagctccaanaaacatcttggtaggaatatgaactctatcatgcaaaattgcgtggtcactggcagccatattttcaattaaatccatggcttcttcaggtgtcttcatggaatgaagaaattgcagcttttcttctgcaaatttagactctgggaaatatttttttagaaacttctcaacaacctcatcccaggtctttaaactattgcccttgaatgaatgcaaccatctcttggcctcccctgataaagaaaatgagaacaggctgagcctaatagcatcttcaggtacaccgacaagcttaacagtattacaaatctcaatatacggttgccaagtgtgagtatggatcttcatttg

SEQ ID NO: 161456 - DNA, 425 bp, Glycine max
  unsure (1)..(425): unsure at all n locations
agcttgcttgtagggcttctatggaggctggatcntttagcttcaatgaggtcctttaatggtgattttccaccatggagatgcagtggaagacaaaggagaagaggtaagaggaggcgccatccactagggaataagccatggaagaaggagctttaccaccaagatgagccttggataagaagcttggagaggatgcttcaatggaggaaaagagagagggagagaaagagaaaggggggagcacgatattgaatgaagaaaaagggagacgagttgaactttgaattgtgtctcacaagactctcattcatcaaagttacaacaagtgttacacatgcttctatttatagactaggtagctttcttgagaagctntcttgagaaaactgtcttgagaagcttctttgagaaaactttcttga

SEQ ID NO: 161457 - DNA, 366 bp, Glycine max
gacttgatcgggcttgcgcgcttagcgcaactctgaaccgcttaacgcgcattagtgaatttcggcttagcgcgtgcttttctcgctcagcggatggactgaagtggtgcgcttaacgggatgaaccttcgctcagcgaacatgcatagctcatccttcttccagattcttcctcgtgcttaaccgaggaatgttgcgctcagcggatggcttgctatgccagtagattggcttagcgagcgtgtgaaaatcaacacttcacaaactctcctaattaacctataattgagagagaatgattatttaacacaccacatggaagtactaagcatttattacctatctttaacaaaaagtaattacaac

SEQ ID NO: 161458 - DNA, 401 bp, Glycine max
agcttgtcgggttcagtttcaattaagcgctttggcatcctttggtactgagcgaaaaggctcgggtcattaaggactacgcatcttttaaggcacaaagcgaggatcaaaacaaaaaaaccccaatcctacattctttaaaagactgtgatgagaaaattacatatgacaggaatccatgggggaaaccacagaaaataaaaacatgtagcgactttcttaattgccccaaatcttaagcatagtatcgcttgacaacgtcggagttcacgggtaaaggtagttccttcccattcatgtaggcaagtgttgcaacctacccttcggcgggagggcgacacgagactcgcgggatgcgtgttccacgaaaggaatacgcgcggagtctccaccaacgttta

SEQ ID NO: 161459 - DNA, 419 bp, Glycine max
tcatattcagatacaagaggttgttctctatctcttcttacattcattttgccttcatgagtgacttcaagcatttttcatattttctttgcacttattcaccttgcagttcataataattcatcacaagataaaccgacagataaattattgttagcttatttatcatcttgcactttttttctcatcatctttcatctcacaccattctttaggcccaattcaccattcactatttttagttggataaatgatgggaatgtatgaatatacgtttttgatgatgcccaagtattatcaaacaaaattgctgtcaaaaacattcgacggtaaacaaatagagattgcctcagatttaatcaagaccccaaaacaagatcaagagaaagctactcttactctattttgtaaaagagctc

SEQ ID NO: 161460 - DNA, 423 bp, Glycine max
agcttgtaaagcgattctatggacccttccatgttatttaacaaattggcacaggggcctacaagttacagttgtcgaaagaagctaagatacatcatgtgttccattgttccatgattaaaccatttcgaggatctctagagcaaaaggaagaaatttctcttccattaaaatttctcaatgaccatcatcttgtgtatcccttggccattttggactatcgcagaccatctgcaaaggctccttgggaggtgttggtacaatggcagggcctttctccaaatgaaacctcttgggaggattggacgcaattacagagggactatcactttgaggacaaggtgatcttacaaggatcgaaggatgataagaacatagaagcatcatcagagatcgaaaatgcaaaagaaggggtgctgaaag

SEQ ID NO: 161461 - DNA, 422 bp, Glycine max
  unsure (1)..(422): unsure at all n locations
ntctgtaaggatcattaatctttggttcattgggatccctgaaaagtcttaacaagtcgaaatggttattggtgattntgatgtatgttnttccccgttnttttattactatacactatattattgaccattcaatcaggtatttatatactttgtatattatagggagatgaaatccatattggttgcaaacaaaatcagctaaagtcttggaaggctgatttgaaggaaaatttaacttatgtgatgcataattttaaagttatgaagaatgatggtcaattcacaatttgcgatcatgaatataaattatcttttactggagttactgttgttagggaatatgatatggaacacctaccttttaggaaattcaaatttgttgatttttcactgtcnatgctggcattttaaactgactc

SEQ ID NO: 161462 - DNA, 422 bp, Glycine max
agcttcctacgtgttaagctataaatagaaacatgtgttacacttgtcataactttgatgaatgagaaacttgtgagacacacttcaaagttcaacttctctccctcttctccttcaatttccgtgcccccctcttctctctctcattctcttcctccattgaggcttcctctctaagcttcttatccaaggcattctcttggtggtgaagcttctccttccatggcttattctctagtggatggcgcctcctctcacctcttctcctttatcttccgctgcaactccatggctaaaaaatcaccattgaaggaccttatagaagctcaaagatccagcctccatagaaacttctcaagcaagcttccatcataaggcttcttcttaaacgataggagtaacatgatgagtgaagacgaatc

SEQ ID NO: 161463 - DNA, 481 bp, Glycine max
  unsure (1)..(481): unsure at all n locations
ntgccgatttagttntcgttggcgaaaggatcgaagtgtgttttataatatgcaaatttgattatcctgctttgatgaatgggaagcctgcggcaaatggagagaattagaaggaaggaggaacccatattgtgactgtcgttcctacttggccaaatttcccaccagctcaacaatatcaatactcggccaatatcatcccttcttattacccaccaccctatcaaccaagaacgctctctcatccacaaaggccacccctaaatcatccaataccaaacaccacccttaacacaaaccaaaacacccaccaaggaaggaattttccagaaaagaagcctgtagaattcaccccaattccggtgtcgtatgctaacttaatcccatatctactagataatgaaatggtagccataacccccaccaanggtcctcaaccttcatttttcctaggatacaactcanacgcaacatgtgcgta

SEQ ID NO: 161464 - DNA, 404 bp, Glycine max
agctttgagtaaagtacactaagacatttattatttcctttacctgcgttccttgaggcgagtgatgataatttaactagtgatatgacggtcaagcggtctacccgaaatgctcttatggtcaatcatggatgttgagaaaaggccatactcaaatttttgttaaatcaagcaagaatgctagattggccaaaccaaaatgctcaacggtcaaattaagtcggatgaatggtcatatcgaccactgggtacgcctaaacaaaatgaccagttgtatttctacttggttgagtgcatgctttaatcagctaagtgtcatataaaatcttataaattaaactggttatgaatgataggcagagctaagcggtcaacaaatcctttttggcctattgagtcattgc

SEQ ID NO: 161465 - DNA, 377 bp, Glycine max
  unsure (1)..(377): unsure at all n locations
taggctccttcaactgcacaaggctctgaatatttgaagattattctngnggaaccttcacccgacaaagacactgacaaaaacttatcttttccttcttggacaaagtatggcatgcagggggcaagtaaattatcttcccatcagaccttggatgcaactgtgatcgtatacccatatcagttagatcttgacgggtattcaagccatccttcgtcttgccttgaatgttaaggagcgtcccaatcacactgtcacaaacatttttctccacatgcataacatcaatacaatgtctaacgtcaagaacacaccagtaccgaagataaaagatnatggacctcttcgtgcatatgcaactctgacttttatccttc

SEQ ID NO: 161466 - DNA, 427 bp, Glycine max
agcttcccttacctatatttgagaagaagaatataatgtatatctttagctccaccaagggatttcattcaatcttcatccacaacatcatactcatggaaacacaacaaaaacaacacccatgacggtctctacatcaaaacccattatatataggtcactccaagaaaagcaaaagaaaagaaaaatggaacaaggaggtcaaacaggaaggatgtgagcttacccaaaccaaagtaaagtgaagaaactctatggaagaggaaaacaagccactaaggatatataaatataagttcaactcaagaggaatgagagcttagagaggaaggaagatgagaatgaaggaatgggagaaagaatgaaacttttcacatttaaagctcttggggcatcttgtgtttttctaattacacctatgttttcg

SEQ ID NO: 161467 - DNA, 422 bp, Glycine max
  unsure (1)..(422): unsure at all n locations
tcgtccacagatccctcatgtatgactaggccctattattttgctctcttangnntagactaacttaaattgagcttcattcgcagatcgctcatgtaagactagactcaactcaagtagcttacgagagtttatcctaatttagctaaactttatttgcagatccctcatgtaggactaggccttaacttaacagcctaatttaaacccaaactttacgcgcagatccctcatgtangattaagtttaatccttcttttatcaagtcctaaggcaacaatacatttcccaatgcttaagtcacctaactatgcatgcatatgggtgacagaccacaagcatacatacatcaagcattgaatgatgcatcgaacacacgaaacacactgaattatatgttatgtatgtacatccgttggtca

SEQ ID NO: 161468 - DNA, 415 bp, Glycine max
agcttgttatccaattgacatctgcttatgtttttttaagattttgctgtgaggatgaagtcatgaattcaattgtcgaccaggctggcttacctttcccctttgcctatcaaatactttcagcccatatacaaataacaataaattattagatccagattaaaggataatttgctacgatttgcaaaatttgagagcagaaattggaagatttaaaagtccatgatgggtacttgcaattttcctaatgtttttaaaggttgtgtacactgtaaatttttcctgagcctttgttatcattcccttttggtaattttcatgcttatattatttacttcgtgagtgtgagaaaaatcctgtattttttcttattcaagcatatttgtgatgcctatagaaattcatcctaataaat

SEQ ID NO: 161469 - DNA, 252 bp, Glycine max
tcctctgttccttttcacaaacttgtgaaagtcttataatctctctcattctttattatgctctaaaacttcaagttttatgggcttggatcttttttagatactctcttagagaaatttatcagagggaacaaataacaaatgccattcagcctccaatgaattaaacacggagaagaataaacacacagtgaagaaacaaagtgtaaaaaccaagattctcatagaagaataaacactggcacctatagt

SEQ ID NO: 161470 - DNA, 414 bp, Glycine max
agcttgaaggtgcgtaccccaccatttttcatattataacattggtaatgtgtctactatcattgtaataatctctttctatgttattgggggtgctacttgagctgccaaatccttccacctctgggcatattccttgaaggattcatgctcttttttgcacatgttctatagttgcatcttatctgaagccatatcataattgtactgatactgcttaacgaacacaaccattatgtccttccaagaatggactcacgaaggttcctaaattagtataccacgtgatagttgccttagtaagactttcttaagaaaaatgtattagcagtttctcatcttttgtgtatgcccccatcttccgacaatacatatttatatggtttttggagcacgtagtcctcttgtacttgt

SEQ ID NO: 161471 - DNA, 394 bp, Glycine max
  unsure (1)..(394): unsure at all n locations
actcaagcctaatacaatactnnggagataatggcaataagaacccaacatttatgcaatagacactcaaaaagngtctaacttaatgggttctttctggttttgtttagagctgcacncataatgcgaatagcgatactcgatacggctggctttntggcgtacatcgaataagttgagaatgttatatgtagaatgacactgctagcctaaggtccatttgacagtcggcaatatagtagccatcagcttaaattataggataattttcactactcggtagccatgaacaaaactaaaataatatttaaagaaattaatagtggtggtggtgtaaagaacgcttatttcttactatctatttaagaatacagtatcagaaccattggaacat

SEQ ID NO: 161472 - DNA, 420 bp, Glycine max
agcttgttggcgaggtagagaaatggtgtgatttgtcccattgtaaaccatgggaccattgctatgtgcaaagaaggtgaagaagccataatagccaaatattgcagtaagtcaaccagagacaaggaaatctaggagggctagttggttcactctgtgagaatcaactttcctacaacaatatttatagagttctacagttacccacgtaaaagcgtgtagttccctcatacacgtcacaaatttattattttaatgttaaaatttatcgatatgtacgtcattgttattggttaaatgcaagtttaaacccttaaataaaggccaggattgaagtgtcttttaaatgaaaaaaaatgattaaaataagaaatcttatgatatgtttgttgttagtcaggttctttatagtagagatta

SEQ ID NO: 161473 - DNA, 481 bp, Glycine max
  unsure (1)..(481): unsure at all n locations
taagctgggaccanggatgtttgataagttcctccaggagttccagtttcgcagatgggaccaggttctgacccgacttccagagaagcggattgatgttgctcgggtgaaggagttntactccaacctatatgatccagaggaccgcaatccgaagttttccagggttcgaggacaggtggtcagattcgatgctgagacgattaatgacttcgttgacaccccggtcatcctggcagatagagaggagtatccagcctactctcagtacctccgcactcctccagaccatgacgccatcctctccgccttgtgtacactatgggggacaattgtgctgaatggtgatggtgccccctagaaactgcttgtgaaggatctgacaacactcgctcagacatggagnggtctctcttattnntaatctggctctacttctcatacttctgatattaacgtngacagggcccgactcatatat

SEQ ID NO: 161474 - DNA, 415 bp, Glycine max
  unsure (1)..(415): unsure at all n locations
agctntatccatgcaagaccatgcctaaatttttttttgtgacaaaccctcttttggaaatcatccagcatcttgattttgattctttctggatcagagcattcctgtaatatacaaaatctgtttaagaaggcccaccacttactacaagtcaaaacaagttctagcaacaccatattagttgattatcaactaacccttttattaaatgacttccttttcttaataggctttgccctgtagcagccatcaattttctcttcaacatcaaaaccattaagaaccaacttgttggactctaaagtgcttctagcagaattgtttgcattcacagtgtttatatacttcttcctaggcctgggatgcaccatggtaagtatcttcagataaagatccaatttcacttaatataatt

SEQ ID NO: 161475 - DNA, 298 bp, Glycine max
aatccatcgatgcttcaagatagagaaattaacacatacttgaagcgccggtgaaataaaaacctgatgtttcatgcttgtccattacagaatacaacctttttgacgtgactctgatacatggaagcaacaatctatatataataaccattaagaaaaatattgttttacaacacagcatatatataatggaactgacctggagctgtattaagaagggcccaccctgtaaaccgttctttacgtattctgggtggaggaagggcaaacacctagacattatttttgcgagagacga

SEQ ID NO: 161476 - DNA, 414 bp, Glycine max
agcttagtgaaatgcaatgttttgagtgcaatcgtgctaagccacctaaagcgggtcagatcctttttgaaaaagcccaattcttttcaattcccccctcattttgtctctcctcaccctaaacacttaaccgtgactatcataaatcttttcgaccttttgctatcaaaccttctgcaaactctccacattctctctctcttagaaacctttctacacctaaacatctccttctctcataaacttctagaaaccctgacaatggccaagatctatagattcaatgatcggtagatgtgtcttcctgaggcaagagggtgataatgagttctatcaatgattcattcatgatactccccctcttcgctctcagtttgtcttcaacttgcacaagtacccaaaagctactatgaa

SEQ ID NO: 161477 - DNA, 451 bp, Glycine max
  unsure (1)..(451): unsure at all n locations
tggagcatggagaaaaccttgaagatgttntatcttttacgtgcacaacttccttgagtggcatttgtattgattgttatattgaatgttgcatcttagtccatatcatatcttttgtgcattatgtatcatcatgagtaagtgagaagaaaaaattctaagctaaaaaagtttcttcacaaggaaaaactctttgttttaatcaattacagccttatcataatcaattacaccaaatgtctaaatctttcagaagtatgtcttgcatcagtttaatctattgaagcctaatccttatcgactacaaanacttgttttgagacaatgactcgattattcaagagtctctactttaatcgattaccatgtgatataatngagtacttctctttctataacttttttcagaagtgaacaagaacactttaatngattaccttgagtatctaat

SEQ ID NO: 161478 - DNA, 426 bp, Glycine max
  unsure (1)..(426): unsure at all n locations
agcttccttaagaagattcctaaagaagctagagcttagctactcacacctctctaataactaagctcacctccttgagaagcttccttaagaagattcctaaagaagctagagcttagctacacatacctttctaatagctaagctcacctccttgagatgagaagctagaacttagctacacaccccctataatagctaagctcacccccatgacaaaaaaaacatgaaaatacaaaaaaaaagtccttactacaaagactactcagaatgccccgaaatacaaggctaaaaccctatactactagaatggccaaaatacaaggcccanacgaagganaaacctattataatatttacaaagataagcgggctcatacttagcccatgggctcgaaatctaccctaaggctcatgagaacccta

SEQ ID NO: 161479 - DNA, 456 bp, Glycine max
  unsure (1)..(456): unsure at all n locations
ctaagcttatggtggagcttatggagaactaactgagaatctgtgtcttatgagggtgntgatggataacaaatcaacaattgatttatctaagcatcctatggcacatggcaggagtaaacatattgaaaccaagtttcatttcctgcatgatcaagtgagtaaggagaagcttgaattggagttttgtaggtctaaagatcaagttgcagacatattaactaagcccttgaagtctatcaagntcaaggaattgagagacaagctaggagtgacatccttgacaaatctgaattaaggaggcgatgtgatgtatgcctgaattcaattagttaggtaggagttgggagttagttaattttgcagctatgagaggtgttatagctacatgtgcagtgtgtataataataatagtgatcatgaatgagacataagagagtgcagaagtttaattca

SEQ ID NO: 161480 - DNA, 415 bp, Glycine max
  unsure (1)..(415): unsure at all n locations
agcttggagccatgcattgggattgcttagtgtttctcccatcctcaaccctttntcggagccccatgaatggcgttttcgttcatgcgtccttcacccacgagtttggagccatgcgtagtgattgcttagtgcaattctccatcctttaccctttttcggagccccatgaactgcattttcgttcatgcgttctccacccaggaacttggagccatgcgtagtgattgcttagtgcaattctccatcctcaaccctttttcggagccccatgaatggcgtttttgttcatgcgtcctccacccatgagtttggagccatgtgccgtaatgtgcttagtgcaattctccattctcaatcctatttcggagccccatgagttgcgttttcgttcatgcgtcctccacccacgagc

SEQ ID NO: 161481 - DNA, 357 bp, Glycine max
  unsure (1)..(357): unsure at all n locations
gaaactaagctagctcacatacctctctaatagctaagctcacctcctttatatgatattctagagcttagctacacaccccctataatagctaagctcacccncatgagaaaaaacatgataataacaaaaaaagtccttattacaaagacaactcataatgccccaaaatacaaggctaaaaccctatactactagaatggccaatatacaacgcctagacgaaggaaaaacctattctaatatttacaaagataagcgggctcatacttaacccatgggctcgaaatctaccctaaggctcatgagaaccctagggccttttcttggatctctagcccaatctacttggagtct

SEQ ID NO: 161482 - DNA, 421 bp, Glycine max
  unsure (1)..(421): unsure at all n locations
agctttaacttttatttcattaagacttttgtttttaaccaaaactatttttctatcattagaaaaaatagtctgtatctgttatcttgcttgttatcttgtgaaaaagtcctctttgcaaaagtgtttatgtctttggttagcacactattcaacccccctatctagtgtgatctttgatatttcaatccacatgcttggcgctttaagtcaacattgtaaactcaatttttccatgtgaaactaatttctagctgggtnttgtttatcataaatttggtggcattataaactgaccaacaagtggaaaaaaactactagaatcaagtttaaaaaaataaaaattgactttcactatgttaacaaataaccatgcatgtcattctaatatatatatatatatatatatatatatatatat

SEQ ID NO: 161483 - DNA, 422 bp, Glycine max
gcgtccgctaagcgcagcactcctgtgctaagcgcgaggaagactctataagaagatgagctgcacaggttcgctaagcgcaccacttcatctcactaaacacaaccgcttcagttcatccgctaagcgagaaaggcgcgcttagtcaaaaatcactaacatgcgcttagcacacaagcacgaacaaggccacctatttaagcctgaaatcagattctgtgaagggagtttggactgggagtcacagctttgcatgtctacggtttctagagagagaaaggccaagtccaaagagtttgagagatttgttggtgagaactgagagacagacttgaacaagaaccatttagagctgagatgagttggagtgattggagatctatagtgaagagacatctcacactagagtttgcatcttcatt

SEQ ID NO: 161484 - DNA, 418 bp, Glycine max
agcttattattcttttatagagaaaaagaggattattattctattattgagtagaataaaaatagaaaaaaaaagagtgaaatgtaatttctccctgcatgtgtaaataccatgttataactattatacaatcaatttcaacaagcgaaaaacagaaaaaaaaattaatgagagaaaataatatttatattttttggatgtaattggttgtaagttaagtattttgtaaatacttatgatataattttctctttcaataaaaagtttgcagtaattcggatatatgtgcataattagttgaactcctttatcaattttgatgtgtgactatttcatatttattttgtctctcagagatttgattataagaaatttatgtaattcaacaaaaagaagtaatatgacattgttcatgaaa

SEQ ID NO: 161485 - DNA, 473 bp, Glycine max
  unsure (1)..(473): unsure at all n locations
tgcacgattaaattagcanagacgaaccaataaagtttagtttaattattactgataaaaagaaaagtagaattgccaaaaaaataatgttatttttacccatctttataaaaattaaaattgttaagggaagttatatttatttttaaaaattttaactttattattttcaaaaacagttttctgtttttaagaatttgtttgttccttcaacatatttgaaagtgttccgagaacatatttatgttttttaaaagtctctctgcaaagcccttgtacagttgtacataatacttgataaanaaatgaaaaaagaggatgggacttgagagtgcttttatgtattattaaaanaaaattcatttgaaaataaaatatacgctattcatggttgtttgaaaaaattataaacattataagtagtttaaatactaataaaaatggaacacaaattgtaaaacataacacatatg

SEQ ID NO: 161486 - DNA, 418 bp, Glycine max
agctttgatacgtaacaaacaggactacctggtcaattgtatatccagcacctctaggagagatgccccaaccacaacgatcatctggatcagaccatagaagatcacacatgggtccctcgtgaggaacttcttgtacgcgatcaaaattacgtatgttatccagggtttcaatagatggtgacaacccaccatgaagacaaaatatttcagattcaacctatgaaagttagcatatcacactttagcaacactcaattattgaaaactagaaatccagtgaaatatgtgaactgcaattgattgagcagcatatcacgaagcttaataaaaaaggagacacaattaaactagacacagctcaaaagaagcataatgaattcagagtaccaagaacataatgcacatggaactagac

SEQ ID NO: 161487 - DNA, 446 bp, Glycine max
  unsure (1)..(446): unsure at all n locations
actcaagcttgacacaatngatctatacagttgcatagtgaataccttttattttttttcatttcatcttcaatgaaagactctctgtgattgtgtataaatcgcactgtacaactgtctggaactaggtttatttatggcttaattgtgtaatgagagttgtgccgattaacttagtccagtttggcttaaaaatttctgtcttatgggagttatctgactgtgataaacattatatctaaaagatcaatatgtatatgaaaacccagtaccaaaaaaatgcacttcctacatatctacagaggactcttgttgagagagttggagcttactatgagattacacttatgccaatatgtacgtcagtagtgaatgttgaaagccgcttattggggcctctatccttattataatatgtggaccgcagaggaaaatcattttcaact

SEQ ID NO: 161488 - DNA, 399 bp, Glycine max
  unsure (1)..(399): unsure at all n locations
tagctngatatttacgttagggacgctatttttctgtttattatgcctttccttttaaggcagctatcggctatatgatttttatgaatacagcctcagcaatgctggtgttttatttgcttggaactaaacataaacatgttggtgctacagattaagttggacaaggaaaagaatattctctcaattcgagacagaggtatcggtatgactaacgaggatttgattataaatttggggacactctcgaaatctgtaacttctggtacgtatgatgtggacattattgctgaacaatttttgcttgggatgtggtcgggaacatgttaattggagctgtgtgttaatatcgcatttgttgagaggatgcccacaagcggagatcctcatatgattcgg

SEQ ID NO: 161489 - DNA, 421 bp, Glycine max
agctttgaattcattctatgcacccttatttgttcatctttgctttacatgtcttcatcttcattcttctaccattggtgatctttttctttgtttaaagcgagtttcgaccgattaattgtgccataatctcgtttaatcattgttaaaatgaattccaactgatcgtttgtgttgtaatcttttttaatcactattaaaaataattccaaccgatcgtttgtgctataaccttagttagtcattgaaataaatacgtttcaaccggtcatttgcttcgtaagtcctgctttaatgagttggaaaataatcaagcgaaaccaaagctaaaatcaactcataatcaagctcttgtccacaagaagatccgttgaatccgttcaaaggttcaacgccttaacggtctttttacctttatccg

SEQ ID NO: 161490 - DNA, 415 bp, Glycine max
actagtcttttaacattgtgtgactcttgaaaaaatcttcacaaacaagtcacttaaagaattgtgacttgtggaaatgtatttttcgaaatcagtaactggtaatcgattaccattacacatcaacagatgtgactcttcattctgaatcttgaaaattaaaacgtttagaaacactgataatcgattacacgtattgtgtaatcgattacacaagttcaacatgtttaaacacaacgtgtaacttctgaaatttgaatcttagcgttctaaacactggtaatgaatactacctctggaatcgataccaaaagaaaactctttgaatgaattgtgaaacttctgtgtactaatggttggagaacgtttttgtcctatctgatgaacttccctgagcttgaacttgatctgatat

SEQ ID NO: 161491 - DNA, 415 bp, Glycine max
agcttgtgctgctcgcttagcgtgggtgcttgttttcacgcttagcgcgactttgctcgcttagtgccaatgcgtgttttcgtcgtgagcatgtgatgcgcattgagcacgtcttgggctgggcctttttgctattttttgcatctttttgactttttattcctctttttcatatctacaagccatgaataagaaaaacatcaattcttaacttttaagcataaataattgctaaataattatttttaaggttatttccattatatttttatcataaaaaacaactcatatttagcaattatcagtgatgcagtggggaatatagcaaagatatgttggtgggtgcccaagaaaccaacctaatctaatgctatacctcaagcacctgcagccctcaatcaccttagacaacaat

SEQ ID NO: 161492 - DNA, 408 bp, Glycine max
  unsure (1)..(408): unsure at all n locations
tgataaaagagcatcaccaggcatctttataggttatagctctgttagcaaagcctataanatttttcagccacagactggaagcattgttgttagcagagatgttcacttcatagaagatgaagagtggaactgggatgaggtaaagaagaacgatcaaactgtggaagacctacaacttaactctcttgcttcaagaaccgaanaagaagaggattggcagagtgaaatggtagacgatgcccctgcaagaggaactagaccactctctgatatttatgagaggtgcaatattgccgtttgtgaacctgtagatnttggagcagcaaagaaagatcaaattggatggctgcaatgaaggaggaatatgctatgattgagaaaaacagaccatgggaatcggttgat

SEQ ID NO: 161493 - DNA, 417 bp, Glycine max
agcttggcaagtgtcgcgacgtaccctttctttttctagtgaaggcgaggctcacgggtgcgcttttcaaaaggaggaaagatgcgcggagtcgccaccaacgtttatttgtgggaaacgtcggaaaaaccgaatgaaaccggtcaaaatgaaaattctaagttcgggagttgtatttacgtttgaggaaggtattagcacctctcacgtttgtctcaaaggacaacaacctattttttagaattgtggaaattgtgttaccttaactttatttctttttattttttgaggacgacaaaagcgaggcttttgctcctacataccctccatcgaagaggatatcagacctacgttgctctttcttaagagtgaatcaagcgattctttctacttgaaaggtgatcattttaaggcgtt

SEQ ID NO: 161494 - DNA, 337 bp, Glycine max
  unsure (1)..(337): unsure at all n locations
tctcagcttacccattctgtntaaggttattatgatgatgttcgtgatgtgtatgtgctgnacatgcttatggaagactgctagagatgaagggtagagttaacctatggttagaaagtgagaatgtggtgctatgagtggaaaaagagtgatgctctgagagttggaaggccaaatctggatttagtggtatttggaggttaaagggagttaatcctagtttgaaatgtcatttaggacttatgagaaagcttagactgtgcaaatgaggaatatgagtgaccaaagtgaaaacaagagccatttctagggtaataattgggtgttgaggagtcat

SEQ ID NO: 161495 - DNA, 415 bp, Glycine max
agcttgtttaaaagccgagaaaaaataatgattacttataaatttaggagcttgttaaaggaaagttctgcagaataatcatttgacaacacacctgtcttttccttttttggtatgttatcatcactggtggaattgatgtactgtgatactgagaagctcattataagtgttaaaaaattaatgaatacatagccaaatcccactgcacattctgttagaacagatatagctgaaccaactggactctatcaatgataaaatgcagagctaatgtccttcattattggtgcaccatttctaagttaaaatcctattgtctgactttttgccttcatggttcaatgcagcttcacctctgacatgtttaaaggatcaccctatgagaggtgagaagcttatcttatcaccgagt

SEQ ID NO: 161496 - DNA, 412 bp, Glycine max
  unsure (1)..(412): unsure at all n locations
agccactgttggctcanacacaaataaaaaatatttgttggtttaattgcacaatgactaatactctatcatcttatagatggataagtagtttcaacctttagttgtttctctcaagatgaacaaagtgttntgagagttattctaaactttacaagaatttacatagagagctttctacataaagaatgaaataatgagcgcttcanaatcatacttcatatctgtcaagcttctgatatatataggcctccttcaatcaagtattcatttgtctctagacagacatattttctctcttaagcttgcctctgaagaaatggtcgttgcgacattaaataaatgcattacatgcacatacttcttcatgttgagaaaccactctncatcactagtgtggtanacactacta

SEQ ID NO: 161497 - DNA, 385 bp, Glycine max
agcttgagatgaggaagagttgaagggtgaatcttcctgcttttatgggcgaccacagagtggtacctggagatatgtcgcgggggtcaagagaccttgtggacgtcaggtggggtgctattgcccaaaaccaagcttgaccaatcccgacccaaccccggcatagacggtcagtgagaacctgtgatgtacctaagcatgcgagctcctggcagtccacccataaaaggaggacaagaccaccaatcgaggaggcttgtggtggctggccagctgtgaattttgtgtaatatgtggattgtggcctctggtaatcgattaccagtggtgagtaatcgattacaaggcttcaagattgcgacacgatgctaagatggtctctggt

SEQ ID NO: 161498 - DNA, 216 bp, Glycine max
tgccgatggagctgaaccatcaatcgtcctaactctattatattggtgatccctagagctcttaacttgactggatagaacctctgtttaaactaacgcttttgacttgatcccatgttttactagagtgatataataatctaatgtgaatcagaactgccacacctattatgggctgaactggtgactgcctgagggaatgcgtatgactcatct

SEQ ID NO: 161499 - DNA, 416 bp, Glycine max
agcttgagaattagcaaaatgggtgcgattaatcatgaaaaactttcgcttacgagaaagaaggacaaccttgtaagatgcctcatgctatagtgaacttcgcagtgcaaagtcttggtgatttgctcattcaagaaggaatattcctatataggctggaaaacaaagtgttgcaactgcaaactgatttgaggatgatgaggtcttacgtgcaagttgcagatagaaagcaagatggtaatgaaagcctattgaattggatctcagaaatcaaaaacactgcttatgattctaatgatgtcattgagtcatatgccctcagaggagcttcaagaagaaatgtgactggtgttttaagcctcatcaaaaggtatgctttaaacatcaacaatttattagaaacccccaagtgggat

SEQ ID NO: 161500 - DNA, 245 bp, Glycine max
cactcaagcttctatggaggctggatctttaagcttcaatgaggaccttctatggtgtttctccaccacggagatgcagcggaagataaaggagaataggtgagaggagacttcatctactacggaataagccatggaagaatgagcttcaccaccaagagagtgcctcggataagaagcttacataggaagctccactgggggaaaagatagagagagaggcgggtggggggagcactacatcg

SEQ ID NO: 161501 - DNA, 405 bp, Glycine max
  unsure (1)..(405): unsure at all n locations
agcttcaccaccaagagagtgttttggataagaagcttagagaggaagcttcaatggaggaagagaatgagagagagagaaagaaagtggcgtgggaatgaaggaaagagagggagagaagtttaactntgaagtgtgtctcacaggactctaactcatcaaagttatcacaagtattacacatgcttctatttatagcctaagcagcttccttgagaagctagtgttacacccttccaatagctaagctcaccctcatgccaaaatacatcaaagaagaaagcttgcatgaaaggctttcttggggaagaagtgttacaccccttccaatagcaagctcaccccatgggaacacacaccccttcaataactaaactcaccgtcccccaaaatacaaaaaaaaag

SEQ ID NO: 161502 - DNA, 481 bp, Glycine max
  unsure (1)..(481): unsure at all n locations
tcttgagatgcgctttggttatctcattagaggctatggttttatcaattatctcattagaaacatngatgttgaagtgatcaatgaatctagaggctaatacaacatatggaaactcgtaatccactaatgaatggctctttaacataatatcttcaataagaagtacccaattcaattgaataccctaatttaggccatatacaatctgtaattcatcatcagttacttgcgcatgatngctaaaccttggtgtgagaatgtangtaatgagatacactagcatccaatcttctgtagttaaaccaccaaatactaagcgatttgtcagattccttgcttggtcaaggagcataccttcgtatgtcttcatcttgttgtaccatccacatattctttgacctgcagaatcacccatattcaatctgcactgttttcaactgtacatcatgatatactacccattgtatagatacaaatt

SEQ ID NO: 161503 - DNA, 231 bp, Glycine max
tctactaacttatgcttccatcaataacaaacgcggaccacacaaatcatgatgatacacactgctcacatttcatcggctagaattatgagttattagacccaatccccttctcactcactattaatataatccttcaattcacaagatgtgacgtacaccgcaaccatttcgttatttttctaggacatactatagagatgcactctggactccatcttccaagttggg

SEQ ID NO: 161504 - DNA, 418 bp, Glycine max
  unsure (1)..(418): unsure at all n locations
agcttgccgccacagagttatccaactatgctttttttggtggaacaagctacaaaaggagagagcaagaaatgaagagcctatggttgatacatgggcgtaaatgaaaaggatcatgatgaagcggtatgtgccatctagttactcaagggatttgaaatncaagctccaaaaactaacccaatgcaaaagggggttgaggagtatttcaaggaaatggatgtgctcatgattcaagcaaagattgaagaagatgaagaggtaactatggctcgatttcttaatggtttgactaatgatatccgcgatattgttgagctgcaggagtttgctgaaatggatgatttgcttcacaaagcaatccaagttgagcaacgattaataacgaaaggagtggctaagaggagttttaccaact

SEQ ID NO: 161505 - DNA, 372 bp, Glycine max
  unsure (1)..(372): unsure at all n locations
ggacacctagaaactcaagcttatacaaatgactagttntccccgctaatattctatggattcctctttgataaatggcttggggatatttggacgtgggtatggaagttatactggggggaagagtggtggtgggcttaatggttgcaatggattagtaacttggggaggtagaaatggggttggagctgggagaagtggatttggagggagaaatggattttgggggagaaatgggattgtgggtaggaatgggattggaggaaactggattgtgggaagataagggattggacgtagaaatgggattggagggacagggaaaaagggatccttcattgatttcttatctaatgtagaaagggctatatt

SEQ ID NO: 161506 - DNA, 398 bp, Glycine max
agcttgccgccacggagttttccgactatgctcttgtttggtggaacaagctacaaaaggagagagcaagaaatgaagagccaatggttgatacatggacggagatgaaaaagatcatgaggaagcggtatgtgccggctagttactcaagggacttgaaattcaagctccaaaaactaacccaaggcaacaagggggttgaggagtatttcaaggaaatggatgtgctcatgattcaagcaaatattgaagaagatgaggaggtaactatggctcgatttcttaatggtttgactaatgatatccgtgatattgttgcgctggatgagtttgttgaaatggatgatctgcttcacaaagcaatccaagtggagcaacaaattaaaaggaagggagtg

SEQ ID NO: 161507 - DNA, 383 bp, Glycine max
  unsure (1)..(383): unsure at all n locations
ctaagcttcttgcgtagccgctcttggtgctcagaanataccagaaatatattcttcttattactaggtattgtgaattctttagttcctgaatgtacaaccttcaaattgttgctcgttcccctctttgttttctacaaaaaagaatatcaatatcaaagaatacatggatgaagtcctaaggatgccatgtacatgtgtatttctgaagatatagtatttatattccatcaagcatacattgactattgattacatgtaatagactctctataacatggtttcccccaatcacaattaaaaagcacaactacccatctttcacagtctttgggtaatatgtcttgcctcttacgagtgggggtttgttaataatatatact

SEQ ID NO: 161508 - DNA, 418 bp, Glycine max
agcttattggaacttgcttatgtttcttcttcatacttttaatttctttcttaattcttttcctcaaagttaactataggattgatggcataaggatatatgcacaatttgttttataaagatttgcaaatgaaaaccaactctttgaagccactaggtgtgttagtttaagatatctgtatagttatcaagacataaataaaaaaaagctttcattgataataatattaaaatatacgataatgagagaaaatataaaaatagggtataatatctttaagacccttaactttttagaattttggtttttggcccttacatttttcattgaaacttaatttccttccatatgttttaggccttgccatctatttccttcattaaatgctaatcttcgcgtaataattggagacatgac

SEQ ID NO: 161509 - DNA, 370 bp, Glycine max
tgagggagaacttgatgccttggtcaacctagtatctcattttgccatgaatcaaaaatccgcacctgttgcaagagtctgtggtctatgttcttctacagatcaccatacagatctttgtccttctttgcagcaatctggagtcaatgagcaaccttgaactcatgctgcaaacatttatatagaccccctcagcaacgaaaccaactacagcgaaataattttgatcctttcagcaacagatacaatccaggttggagaaatcatccaaatttgagatatgcatgtcttcacaacaacaacaacctggtcctctttccagaatgctgctagttcaagcaagccatatgttcctccttctatacagcag

SEQ ID NO: 161510 - DNA, 419 bp, Glycine max
agcttgcatcaacaactggggtggatttttattatgacataacacacttagtttatgtgtcatccagagaagctagattacccggtggtgacctttacctagccaaaggactatgactgagccctgatactcaacgagtcatgctctattttgctggttgttcgggaggcgtggccggcttacgtgttgcgaaagacatagctgagaacaaccctggaagccgagtgctgattgctacctcagaaactacaattattgggttcaagccaccaagtgcagatagaccttatgatctagttggggtggcactctatgaggatggtgctggtgcaatgataattggctcagacccaatattggagtctgagaagcctctctttgagctctacactgctgttcaagagattttgcccacactc

SEQ ID NO: 161511 - DNA, 363 bp, Glycine max
  unsure (1)..(363): unsure at all n locations
ggaccttaaaactcagctaatgtaacctctaatattacaggatttggtcttgtctanttttaaatggngcaactgatgatggtgccgtaattgccttttatcctggtgtggtctattctccagcttattaccaatatattcccggataccttgatgagcagaacccctatttgattacaagatatgacgggactgtcattgattgccaacctttgggttgtggacgtgtagggccggaacgattcaatggtataataatgttagaaagacagcttgacaatgaaagagctgaaaagggttcatacagaatagagtacacctttggtacgttcccacgtataaaatgactacgaaaatgatgat

SEQ ID NO: 161512 - DNA, 384 bp, Glycine max
cgcttgcctcaaagaggtccaggaatgtctatgtttgtctaagaactagttctgctccggagtacgacagtcaccgctttaggagcgctgtacaccagcagcgcttcgaagccatcaagggatggtcgtttctcctggagcgacgcgttcagctcagggacgacgagtatactgattctcaggaggaaatatggcgccggcggtgggcaccactggttactcctatggccaagtttgatccaggaatagaccttgaattttatgccaatgcttggccaacagaggagggcgtgcgtgacatgagattctgggttatgggtcagtggatcccattcgatgccgacgctatcatccagctcctgagatatccgatggtgttggaag

SEQ ID NO: 161513 - DNA, 269 bp, Glycine max
aacaacatcacatcctataggattcaaaaaaaaaaatgttagcaacatcaatatacgaacaccccctcacaactgactgacacgaatcaggcaaccgaaaacacaatgaacacaccaattcaactatcgaccatcatcacatacaccaatgcatccaacacccgcaactaaatatgcccatcatattcaaacaaaaaaacgtgaaagaacaacaacaaagcccaatggattgaaaccgacgaactaaaaaaaatacgttggaacttgac

SEQ ID NO: 161514 - DNA, 375 bp, Glycine max
ttagagcacctgcagctgcagcttctagactagggacttcctttttttattctcgagaccctctgaccttgctccctttcttgtttgaactcactacaagccttaagcgaaaaaccatgatattacatatccttaagaatcttggagctcctaatagcatgggaaaagtgtggggggtttttgttcaatggacaacttgtttgccgctatgcttatgatgcatttgcgccatacttgatgacattgatatcgtataaagacgactgctgaatgagcgtcgttctaaagactaaaccaaaaaaatatggatgtgctataacatttggacgacaaaacaaaaaaacactgtacatcgatgaatataacttaatgggc

SEQ ID NO: 161515 - DNA, 374 bp, Glycine max
taggacacttaaaactagctgggtatggacaccagagttgtatttcttgtccgtcaaataatcaaagatgaagcatgtgctggtatacaataaatttagggacaggctaaaaattaccctttaaatccctttataaagactcatactaatgtacaacgatcataacgttaaactgaacattgaacaattctctccattataaaactgacaacctgagaataaaatccagctgctggtggtataataaacagacgaccttttgatgaaacagcaagttcacactatacgtagctatcctatctttaggggactatgtgctccccgttttaaaattggttgctcaactattaaaggggtgtgtataggagtgtggt

SEQ ID NO: 161516 - DNA, 416 bp, Glycine max
agcttcatgaagaataaacattgattcaggtattttgacgcataccaagatgatgataaaaagctccaaagtcaagatcacttcatgataacaaagatgatgacattcaagaatgagtttaagattgagtcaagaacacttcaaggaaaaagattcaagattccaagattcaagaataatcaagatcgagattcaagactccaagattcaagaatcaagagaagacttaatcatgattagtattaaaaagtttttcaaaacattgagtaacacaagaagttttcacaaaatcattaccaaagagttttactctctggtaatcgattactagattatagtaatcaattaccagtggttttaaaacgttgagattttcaaaattcataatgaagagttacatctgttgatgtgtaatc

SEQ ID NO: 161517 - DNA, 274 bp, Glycine max
acaatatattaacattgatttcttcaagagtacccatcatatctgcccaaaaccccgtacccacgagatttaagagagaaagaagttcacccgaacctggattttcgaagttccctcgtagccacgcactgtacgacctccaaaatgctgtcctttctcgatttggagcataaatgagcaccacaagttgaagctttgatgggctacaacggcggatgtgataaaagaagaagaaacttgctgagaatagagagctgctgaaattttgggggct

SEQ ID NO: 161518 - DNA, 404 bp, Glycine max
agcttgaaagagcccgggtagccgaatagaatttcaagtccatagccatcaaagtctgaaaagagtatgatgaactaagggacgtcaatatggccaccgctgaagccttggaacgagaaaccaagaaggcccgaaaggaagaacacgaccaatgcaaagttttgaggggctttatagggcagcaatagtgagctcaagctccgaagaggtgaaaggaatcatcacgggtcaaaggcatgatcttgaaggacgagctaaaggtttgccttatgtcgaaaagaaatttgtcccatcagttaagcgaaactgaagggaatatgtgggccatcatcgataagtgcaaagagaagctaaatctagcggcgactcacgagcaaaggctatacgatgagaacgcctagata

SEQ ID NO: 161519 - DNA, 430 bp, Glycine max
  unsure (1)..(430): unsure at all n locations
actcagctgctgaaagctcttggggctttatctttttctttttgaggtccttcaatggtgattttcagccatggagttgtagcacaagataaaagagaatatgtgagaggaggtgccattcactacggaataagtcatggaagaagaagcttcaccaccaagagagtgtcttgataataagcttagagaggaagcttaaatggaggaagagaatgaatgagagagagaaaaagtggcgtgggaatgaaggatagataacgagagaatctaactttgaagatgtctacaagactctcattcatcaacttatttaagtgtacccatgttctatnatagcctacacatggagacttcttgagaacaggaagtacttcttgtgaactgaggagaaacttcttgtatctagaggggctcctcccccctctatact

SEQ ID NO: 161520 - DNA, 412 bp, Glycine max
  unsure (1)..(412): unsure at all n locations
agcttgtatggagaatgttgaggctattaaggttatgcttaggtcttttgagttggtatcaggattgaagattaattttgctaagagttcttttggagcctttggagtatcagatcattggaggcatcttgcggccaagtatttgaattgtagtttgatggcttttccttttgtttacctgngcattcctattggggctaatccgaggcggggtaggatgtggaattctatccttaacaaatgtgagagaaaactctcaagatggaagcaaaggcatatcacattcggggggagagtgactttgattcaatctgtgctaacatcaattcctatatatttcttgtcttttttcaggatacctcaagtagtgggtgccaaattagtcaagatccagcggagattcctttgggga

SEQ ID NO: 161521 - DNA, 426 bp, Glycine max
  unsure (1)..(426): unsure at all n locations
acactaagcttgtagggcctgtgacaaagaatatatgaggatggccatgtttaaacttctttaaactctcaaagagcaggtacttcttctctttctatattccttcagaatattcttcctcaatcaggattactagagcctgagattcatgagaatgtctttcacaggtatatgagcttcatcgtttgtaccaaattcagaagatactgatgcataacatggatgccataagaggaatcgtaaggaccanagaagaatggtactcttagaatgcgatcggtttaacttgataggggcacatgaaaagccctcaatgataatcgaccctcgaaaggcctgctgaggagcacattgcagaatcacaagatggngtgctcgacgtcatagatgagactgagattggctgacattagccccctcaggttc

SEQ ID NO: 161522 - DNA, 425 bp, Glycine max
  unsure (1)..(425): unsure at all n locations
agcttcagcaagacttgggttctaatattctttagcagatcctcaatgtaatttctgataaatggatcatccatgatggttcttctgttactctggaaagtacattatgcaatattcatttaaaataaagtattaaatagaaaaaagaggatgaatactttaaagccaaactagtgcatagcataatctcatggcagattcaataaaagtaccttcaggattttctcgaattccgatatttcattccgttgataagctgctattaagtttgtcattaccaaaatttcggggtcattcttgtatctgcagtatagaatatatgcaaggtgagaacaganagaagtgaaggtatatcatcctcacctcagtggataaagaacagaatcagagaaatgaaaattgagtaaaatatattaaaaacaaaa

SEQ ID NO: 161523 - DNA, 366 bp, Glycine max
aaactaagcctggtcaaacagattgtccaaactgcggggagcacattctttatctatttcgcccacactcggaggagacattgggtaaagaaataaaatggtccacacagagcagcatatacacactgctttctatgtcaaaaaaaactgtaagtatatacaaaaatgtataatagtgtgtgtgttgcaaataatgaaatgaagctaagtgcctataaagaggcaagtattggggtgggaatgaatgataagtgaatgcttatctatggatgagtgttctcctagaatctaaacttttgaatctacaaaaaccaggatttgttggcagcccaacctcattacaagcctagaaagtccttcaaatca

SEQ ID NO: 161524 - DNA, 89 bp, Glycine max
gatgccaccctgattggcaatgggccatgagcggcctgctcctctacgcatcggggcggatatccaccggataggtggcttcagtaaac

SEQ ID NO: 161525 - DNA, 424 bp, Glycine max
agcttgtagaatttaccccaattccagtgtcctatgctgacttgctcccatatctacttgataattcaatggtagccataaccctagccaaggttcatcaacctccatttctccgagaatacgactcgaaacgcaacgtgtgcttgtcacggaggagcccgggggcattccattgagcattgtatgaccccgaagcataaagtgtgaagtctaattgatacgggccggctgaaatttgaggagaatcgcttgttgaatcctaacattgacaagcaacaccatacatggggcaattctggaagctgttgttatgactcatcaggattttcaagtttatgccattattataaaccacagttgcaatgctaaatgatatggataaaatggacatccttgtctctctcatcctctcatgaacacatct

SEQ ID NO: 161526 - DNA, 455 bp, Glycine max
gatctcaccactcttgcacatacatggagttgtttcttctatctacaacctgactcacacttcccacacctctgatcttagtatggacagagccaagttggtttacagcttagtcacaggcatggacatgaatatcagagccctaatctcaggtcagatgtctatcattgcccagagtaactcctctaggcttggaattccagccttggtcactgccttatgcagagctagcggagttacctctggcagtctgacctatgagagcctgagctcggccattaactcggcctacattaagaaaaactattggaatatgaatgatctagcaattaacttcacagggtccatgaaggtaatggcttgaccagccgaatgtcctttcttttctgaccaccagctctctcacttttgcacgcctacctagctgctatgacttcacacttttgagcatgctt

SEQ ID NO: 161527 - DNA, 406 bp, Glycine max
  unsure (1)..(406): unsure at all n locations
agcttataaaattttccaaccgtatattgatatagtagtggtagcagggatgttcactttgtggaagatgaagaatggaattgggataatccaaggatgataaatcaagcccctggacatttgaacttaaactttcctgcaccaagttcaaaaaattggcaagatgagcttgttgatgatgttctagtaagagggactacacttctttctgatatttatgacaagtgcaatattgttgtatgtgaacctgaaaactatgaagaagccaagaaaaatcaaatttgggttgctgcaatgaaagaggagctctcaatgatagagaaataacaaacttggcatctttgtaaaaagaccttcaaacaggaatgtgattggagtccaatgggtttatanaactaagcttaat

SEQ ID NO: 161528 - DNA, 129 bp, Glycine max
  unsure (1)..(129): unsure at all n locations
ctcagccgcttggaagcttctatggagctgttctntttcttctatgttgngccncaacggtgattgtacaccatgcatgatgctaatggcaagatacactgagaagaggtgagaggaggcgccatccac

SEQ ID NO: 161529 - DNA, 402 bp, Glycine max
agcttctccttccttttcttataaataggggaatgagggaagaacaaaaatgttcaaccctcctggtatctgagattcacttacaattagtgagaaaaattgtttccgtgaacaaaatccgagccgaggtgcttccgtaacgcttccgtgacgtttccgtgggtgatttcgcgaagattttcaaccggtcttcgtcggccttcggtcttcaatcagtaaggtcctgaaatcgaagttttcaattcattctatgtacccttagtggtcctcatttgactcgcgtgcttttatttttatttcatttacttttcgcacacccttttgacgtgctttagtcattgatttacgtcattttctccactaatgagaaatacaatacatttgcaccggtcattcttatta

SEQ ID NO: 161530 - DNA, 351 bp, Glycine max
  unsure (1)..(351): unsure at all n locations
ntgtctttcttcttctctcttgcgttctcactgttactncttttctntccctnctatataatnttcaactgtctctgtttcttcatcttctctttcattttctacctctatttcttttccttggccgtgtatttctttctcctcaaccattattgatttttcactctcttgacttgtcacatactgtaccttcctcttctttttctaaggccatcctctacaacaattagttctccaaagccacctattcttatcttaactaccaacgcttcttgtttcttgtcatcccacatttattcctcttgggacactttctggttcccccaagctttggagactttcactaatgct

SEQ ID NO: 161531 - DNA, 420 bp, Glycine max
agctaataaattattatatgaatcatttaatattagataaataaacttgaaaaaaatagaaaattttcctgtaaattttttcaactcagatgggagtgaattcatttttcatttttactcttctaaaacggctcgtcttcaaactcatcacacggatgtgatgaaggcgaggatgaagataatcaaatatgtattttaatgcaattttaactgataatttttaatctagctagttggcatataattttgttcaaatcataaatatcacaccataacaaggtagattctcccaataaagaactcattttaatatacttcgggggtagatgttacccgcagccatatatggatacaaatgcttgttttatatctctacatcagatctaacgaggggctgaagcacggcaaggtatttatgct

SEQ ID NO: 161532 - DNA, 468 bp, Glycine max
  unsure (1)..(468): unsure at all n locations
ttcttgaatcanattcattacagcccagaaagtatatacttatataaaccctcggncctttgatctcaatcttgtaaagtacagcaataattggagaataaggaatcaaaagttggttataaaaaagaagatgacgaagaatcagaagttgaagagtaaaaccacgacaaaattcacttgactatcgagtatgtgagcaacctcatacataataggacatncacccaaacccttacttactcttcatatatgggtgtacanaagctgttgtcagtaattctaaagtggttacatcattctacatcgactctgctcattcttttttacagcagcaccattgataccaggaactaattcggattcaccagccctanaagacaacctttgtatctgacagttgtgagaagcttatactgcgcaaatgttagaaactgactcagcttcttatagccccatctttgttgatat

SEQ ID NO: 161533 - DNA, 420 bp, Glycine max
gcaagcttcttacaaagcatacggctttctggatgtatatgatgatatctatacagatggatcttatatatctatatatctatagatagatatatagatatagatatatagatatagatcatacaatgaagtaccgcacgagtgggtatataggaatccaaatctgccgaatcactcatgttatgatcttctacatcctaggtcttcccgttccttcatctggcttatgttcttcatgtagcattcagactgaatgactctatgaaattacgtcgctacttccacatggtacgggtaacgtaggagacatctctatttttcccggggggaatccttagaattaccacagcttagctttcaattcgcctctgaccatcaaatgaaatgtgaataacccgtcctcccctctttgaaactttg

SEQ ID NO: 161534 - DNA, 108 bp, Glycine max
  unsure (1)..(108): unsure at all n locations
tacttcaaccgaaangcccttaggcacagcaatacataacatagaaatcacactcggaaagggnggacaattacctagagcagcatgtgctgtagcgaaactaaatgc

SEQ ID NO: 161535 - DNA, 416 bp, Glycine max
agcttgaaaagtgcaagaaaacgaactacattttctgcattttttgaaaaaagagatgaactcgctaagcgagcatgctgcgctaagcgagttcatcagtactcattgtatataggcgttctctgaagaactcgttgagtgtgcttaacgcgctaagcgagttcatcctttgaggatgaacacttatcctcttgcttaattacctgtggctaagtgaggatgaatcgctaagcccaggttacttagaaaattttttattgatagccgcgcgctaggctgagctttgctgggccaagcacgatttgttgcggcatccgctgagttaagcgagcttcgctcgctaagctcccaatacttagtgaaattttttaggagttggtgccgctaagcacaacctttaaggagcttagcgcata

SEQ ID NO: 161536 - DNA, 347 bp, Glycine max
  unsure (1)..(347): unsure at all n locations
ngatcaaaacaagcatctaatcattccaggccatttaatgtttacattntctcattcaagtcattcacaaacactcatttcatatcaaataaaccactgaaacatgattcaatcatttcactattcaaacatgctgttgtacaagcaatcaacactaaaataactggaatttaaatgaatgaaacataaagcaactaaataactaataaataaattgttcatgatttgtagaaattaaaacaaaacaaaatttaaacatcctgctcatcctgtggttgatcttcattgaaatacagnactagagcagctggtgcattctgaagaatgggatgctctggctccatggc

SEQ ID NO: 161537 - DNA, 408 bp, Glycine max
agcttatagtcattacttgttgagaaccatataccaaagtcgattgttcctttgatgtagcaaataattcattttatggccttgggatgagtagtggttggagtctacatgtattaactgatgagtctagtagcatatagaatgtctagtctcatgcacgtcaaatatcgcaaactacccaccaaactcttgaaatttgtagcatcaaccttttctgctttgtcaaactttgataacttcattttgcagtccatcggtgttccaattggcttgcaactgtacatctcgaatttcttgagcatctctttcgcatagttctgctatgaaatgaagattccatctttcttttgctttacctcaatgccaagatagtatgacattagtccaatatcagtcatctcgaactct

SEQ ID NO: 161538 - DNA, 291 bp, Glycine max
  unsure (1)..(291): unsure at all n locations
tcatcacaacatcgattcataaaaattagcattggcttttaccaaaaaccgatgtctgttatcagataacaacatctatttgtagtgaaaatcgatgttggtttattaccagcaacatctaatctttactaaaaaccaatgttgtcttcatatattaacatacgntttggcaaaaaccaatgttgatatgtagatatatgacgtttcttcataattcttactgtataatatcgagtatgtaaattatcgatgttgtaattttatgttaacatcgagtttagataccgatgt

SEQ ID NO: 161539 - DNA, 413 bp, Glycine max
agcttaagaaacagttagaggagttgttagataagtggtttgtgagacgcaatgtatctccatggggagcaccagtgttgttagtaaagaagaaagattggaccatgaggttgtgtgtagactatcgccagttgaataaggtgacgattaagaatacgtaccctttgcctaatagacgaccttatggaccagttggtagaagcttgtgtgtttagcaagatataccttaggtcaggttaccatcagattcgagtgaagtctgacgatattccgaagactacttttaggacccgttatggtcactacgagtatctagtcatgccctttggtgtgactaatgctccaggtgtgtttatggactacatgaataaagtctttcacccttactttgatacgtttgtggtagtattcat

SEQ ID NO: 161540 - DNA, 371 bp, Glycine max
  unsure (1)..(371): unsure at all n locations
gcattgtgcctgctgcaatttatggaagatgagaaatgaggcttatgatgggaaaaaatgacttcaacattctaacattatctgccttgggcttgatgtatgataggccatagatagtgctctgccctattttctggacttgatgttcgcctatttcaaaatgaataagctgcaaaccaattgtagacagttgagtctttactcaagatctaaagaaaggtngagttttattaagtgttgataagacagacttgctttttattccctaaacactacaagtcccttaataactacatgccctaaataccacatttactactgctttcacttccaaattatttaataagaagatatctcatcaaaacatctgc

SEQ ID NO: 161541 - DNA, 403 bp, Glycine max
  unsure (1)..(403): unsure at all n locations
agcttgcttaagaagattcctaaagaagctagagcttanctacacacacctctctaatagctaagctcacctccttgagatgagaagctagagcttagctacacaccccctataataactaagctcacccctatgccaaaaaaaaacatgaaaatacaaaaaaagtccttactacaaagactactcaaaatgccctgaaatacaaggctaaaaccctataatactagaatggccaaaatacaaggcctaaacgaaggaaaaacctattctaatatttacaaagataagtgggctcatacttagcccatgggctcgaaatctaccctaaggctcatgagaaccctagggccttcccttggatctctggcccaatctacttggagtcttctatccaatgcccttg

SEQ ID NO: 161542 - DNA, 393 bp, Glycine max
  unsure (1)..(393): unsure at all n locations
cttgngtcgtacttccattgctaagatcaagtctttattattctcgaacaatagcaattctttcaccatcataacgaacatatgcaaggacttcttgctcaaagcattcaccacaatgttagccttgctgggatggtatgacaactcaaagtcataatcctttagaaactccatccatctcctctgtctcatgtttagctcttttttggtcaaacaggtacttcaagctgttgcgatcattaaataatttgaatatttgcccgaaagagataatgcatncatatctataaccataaaccatatgtgccagctctaagtcatgggtaggatagttcacttcttgtggtctcagatatctctgagcatatgtagacactctagcatcataacata

SEQ ID NO: 161543 - DNA, 207 bp, Glycine max
  unsure (1)..(207): unsure at all n locations
taaccctctaagcttagaaaaaaattacgaacacgaaactatgctaagacccgctaatttctcgcttataatttgctctatattgagatcagaactggtgctaatctagaacgaattcgaatttatacttntgtgggtctctaanatcaagtcctatctttcaaatgcctttggtctcaatcaattanaagttcctaccatgtttat

SEQ ID NO: 161544 - DNA, 510 bp, Glycine max
  unsure (1)..(510): unsure at all n locations
cggcctttcctgtgtcctgagctcggaccttgagtctgaacggcgcgatcttctgtccattgaaagcgatgaactttttttcatggggtgacacatttgctatccctggcctgtaaatcataaatattatattccgcaggcatatgtggtcttaagacgtatatcgtgtcgatgcatgtcctctattcacattttacctgtcttaaatctcgcttgccttcgtgagaatctcagttagtttgagagcgcaagatactgtcgcataataacggaataattacaatctgactgcattcaaatgcgatacataacgaaaggtaatgtcattgtggaacgctatctcgctcagcacaatgaacgacctatagcatccgtaacagggcattctcctattaaagtatctatgactgatgctggtccccgctctaatgcggaaggacttattctaacgggactaaatttctattgtcccatcgtggggaancaaattccgggtgctaaagtccaacg

SEQ ID NO: 161545 - DNA, 89 bp, Glycine max
  unsure (1)..(89): unsure at all n locations
gcgtcttaagtcgccgagctcagctggtgcagtgtttatctagttccttgatatcctcactcttcangaactttcgagaaaacgtcgat

SEQ ID NO: 161546 - DNA, 260 bp, Glycine max
aagatctttggatgccgtcagaaattttatgactatgagtgtgagtatttggtacttgtgaattcattactcttctatgtagaaatttattgatttacaccccttgcaaactcagcatttgttacacaaagcttaaaattcagagagaacgcaccttgtcctatgtattattaaattcgcttcacaaccccttgctaactcagcacgctgcaagccataatgcattcatgtgatatattgccgtgcgacaacaacaacat

SEQ ID NO: 161547 - DNA, 468 bp, Glycine max
  unsure (1)..(468): unsure at all n locations
tgttcaaatttcggtttaccaattatacattatgaaaactcatttattgaccattataaatatagtacaagtttatctagcaataacttcaaaagctccatttaaacaattatatggacaacaaaacacaaaacgaacaagctgtaacacaatcataattgctatttgttaatcacacttaaacaaaagaatagctaggcaaactaaaatcaccaacaatcacggacaactaacacctaccatttggtaaacaataaataatcttgcatttttattcaataaataaacacttaaaattgtttcctgaatttgaataaataaattcactaaggtaatgttgtcatatctatatcggtcatcgactcgattaagatactaagttactaaatcatgcatcaacccaatgaatcactaattgactcccatgattcaacctatattanaaaattctaaataatttcataacct

SEQ ID NO: 161548 - DNA, 374 bp, Glycine max
tggccccacatagagaatggccaaggtgtatccatgacgttcaaaggtatggtggagcattaacattatcagtgaaggcctgacacttatggcatttcctcacatggatgcaacaattgctctccatagtgagctagtaatacccagttctcagaattttctaggccatggcatgtccattggtatgcgttccaaaggatcctttatgcacctctactagaatttgctcagcccctttagcatccatacaccgaagtagtaccatgtcatggttattcttgtataggatattcccactcaggaagaagtcggtcgccaaccttcacaacattcttttatcgttgtcagaggcctcccgtgggcattccttgtct

SEQ ID NO: 161549 - DNA, 224 bp, Glycine max
  unsure (1)..(224): unsure at all n locations
ccactggtaaaactntccaaatgtttgccttcgcaggaaatggccccgaggaagcttgcctcaaagaggtccaggaaggacaaggcagccgaaggaactagttccgctccggagtatgacagtcaccgcttcaggagcgctgtacaccagcagcgcttctaggccatcaacggatggttgtttctccgggagcgacgcgttcagctcanggacgacgagtatac

SEQ ID NO: 161550 - DNA, 380 bp, Glycine max
ttaactcggaggtccgattcaagcgcataatatatcgagacgctcgaaattaaccaacggaagctctcgagaaattcaaatggtcataacttttaactcggaggtccgattcatgcgcataatatatcgagacgctcgaaattgaacaacggaagctctcgagaaattcaaatggtcataacttttcacacggaggtctgattcaggcgcataatatatcgagaccctctaaatttaacaacggaagctctcgagaaataccaatggtcataacttttcactgggatgtccgattcaggcgcatcatacattgagacgctccagattgaacaacggaagctcttcagaaattcagatggtcataacttttcactcggatg

SEQ ID NO: 161551 - DNA, 366 bp, Glycine max
catggagtcaagtttaagtatggaagtaaccatcttgcaaatattggggcaaaagatggatcgtgttacatcgttgcttcgtctactgccaaacacatttagggccgtcgatgtccctgttacttccagtttcaccttgacgaagatgtcatggaccatgttgaaaatctaaattgattcaaccccatatcctgcgtaaaaattcgcaatacttcagctgtgcatcattcgcatacatccatgttgttcattggttgcattgctcattgcattctttccttataaaaaaaaagaacttaatcattgttataaaaaaaaaacatgatttacggtgccctcatcgaacctgtgctagagctagagtaa

SEQ ID NO: 161552 - DNA, 164 bp, Glycine max
  unsure (1)..(164): unsure at all n locations
gcgtctgtatatgtgatgcgcctgaatcggacatccgagtgaaaagttatgaccatttgaatttctcgagagctttcgatgtttaattntgagcgtctctatataatataagcctgaatctgacatcagtgtgaaaacttatgaccatantaacttctggagag

SEQ ID NO: 161553 - DNA, 401 bp, Glycine max
  unsure (1)..(401): unsure at all n locations
gtggtaatcagagcacaagagcttcaagtaggtgctccttanacctccattaattgtttttctttaccttctcttccattgttgtttcttcatttttctccatgtatctcctcacatgtcttgttctaaatgttgttaacatgattctttagagtttccaccgattaaacttgctatagaagttagatttgattttctatggttcaaatttcttgttcttgttcttgaaccatgaattgtgttgagtttaggttcctttgagttttgtcttgttattttttgtggctgaaacctaaaccataaaattcttacaaaaatattaaagtagaagaaaacctcataaatctagagtgactttgtcacctattgtagttttgtcatagaagtcatgtctagtcatg

SEQ ID NO: 161554 - DNA, 436 bp, Glycine max
  unsure (1)..(436): unsure at all n locations
actaagctngtttattctgatatgaagcaacgtatttaaaatcatggattagatagtaactgctaacaaaaagataacaccactaacagatcatgactagagaataggatcaaaactgctttatcctatcagtcaacatgacttttatttttcctaaaaaatagcaaaagaatcttatctactatagtttgttagacagtttcaacagtcacatcttaacaattcaaaacaaaattgtgataaactcatcccttacatctaagtgactcccatgtgtagtccaacagtagtagtggcatctctagttgtttcttaagtttcctcaaacttttgctttggttgttctgctanggttttcaagcattaaagagtagcagaagggatttgagcctccatttctctatctctatngcgagggacgttctctctccacata

SEQ ID NO: 161555 - DNA, 216 bp, Glycine max
  unsure (1)..(216): unsure at all n locations
taaagggatgccccacattatttccacgacacanatgcanaaatgatgatttgtgaaatttatgcaaaactggtcatgcatgcacctatgtggacgctcaagtgtcaaaattttatggtcatgtgatgctagggctcangattcatttcctctattttaaatcaacccaatgtttccaaaatatgttcttttattcaattgtgcattcatccgagt

SEQ ID NO: 161556 - DNA, 452 bp, Glycine max
tcaagaaaaagatggcctcagcaaattccttatttccagaatggaattctatcaatagacctccaatctttaatggagagggttaccactactggaaaacccgaatgcaaatttttatcgaggcaatagatctaaatatctgggaagccattgaaatagggccttatatacccaccacagtagaaagagtttcaatagatggtagttcatcaagtgaaagcataaccatagaaaaacctagagatagatggtctgaagaggatagaaaacgagtacaatacaacctataagccaaaaacataataacatctgccctaggaatggatgaatatttcagagtttcaaattgcaagagtgctaaggaaatgtgggacactcttcgattaacacatgaaggaactacagatgttaaaagatctaggataaatgcactaactcatgagtatgaatta

SEQ ID NO: 161557 - DNA, 323 bp, Glycine max
  unsure (1)..(323): unsure at all n locations
tgattctgttattttaagagagaaatttctttttgttgatgcagaccagcagaatcccaagatgtcgaagaacttgaaaagagattggcttctcttctaagaatttaaatctctgctacagcctgtacccatatatatgtttcttaatgtacaaatcattatatatatcaatggagagattgtactattggcacctcttttaattaccaattttatgctgtgatgtgtgtttggatataaagaactagtaaaaatagttntagactggaatatatattactatcccacacatttattatatatactatatagcaatggagaga

SEQ ID NO: 161558 - DNA, 262 bp, Glycine max
catcaccctattatcaacagtgtatgtagggttttcttcgacccaggacaatgtgggttctgtggggttccagcgacgacaatatgggttttccggcactgtagggggttctgtgggttccaaagaggacaacgtggatactccggcagtgtagggggttctgtggcttcaactgacgacaatgtgggtgtcgagggagcggcttccgacagatttcatgcgggaggatatagaggagcgatttcatgcaggaggatgacaa

SEQ ID NO: 161559 - DNA, 175 bp, Glycine max
  unsure (1)..(175): unsure at all n locations
ctcatacattgagttcatgccaaacaatccactgcatatcattntcaatcaattcactattcaaacacgctttatgtacaagcanacaactcatagtgctgaaatntaaataactganattaaaataactgaaatatgacaacgaaatcagctggaaatataaggtgtttaacct

SEQ ID NO: 161560 - DNA, 441 bp, Glycine max
  unsure (1)..(441): unsure at all n locations
cagcattcaatgtcgagcatctctatatgtcacgggacttgatcagacatccgagttataagttattgtcgttcgaatttgctcaaagcatcaacactcaattatgagcgtctagatatgtgacaggactcaatcagacatcctagtaacaagttcattgcgattcgaattggnacacagcttcatcatctcatttttaacatcgtaatataatacaggactaaatcaaacatcctagtagaaagttatatgctgtangactatgctcagagcatcgtacattcgattacgagcgtatcaatatatgacagggactcactaatacatccgactaaatagatattgtcgtttgatgtggtgtgagcttctcatttaatatcagcatctctatgtactgtancattcgacatcgattaaagctttgtcgtgatttgtacagcg

SEQ ID NO: 161561 - DNA, 333 bp, Glycine max
  unsure (1)..(333): unsure at all n locations
ctaagcttatccaggggagacggaccatctcaagtgctngaaagaatcaatgacaatgcttacaaagttgagctgcccggtgagtataatgttagttccaccttcaatgtctctgatttatctctttttgatgcagatggagaatccgatttgaggacaaatccttctcaagagggagagaatgatgaggacatgaccaagagcaagggcaaggatccacttgaaggacttggaggacctatgacaagggctagagcaaggaaagccaatgaagctcttcaacaagtgctgtccatactatttgaatacaagcccaagtttcaaggagaaaag

SEQ ID NO: 161562 - DNA, 289 bp, Glycine max
tcagcccccttaggcacttctctctctctctctcgaaatagatgaggaaaattagttccgtgaagaaaattcaagccgaggcgcttccgtaacatttccgtaacgtttccgtgagtaattactcgaagatcctcgaccgttcttcaagattcatcgtttgttcttcgttttcttcagtcttcaacgggtaagtacctcaaaccaagcttttcatttcattctatgtaccccgggtggtccacattgtgtttcatgtatttatattctcgttatcatttactttttatac

SEQ ID NO: 161563 - DNA, 175 bp, Glycine max
  unsure (1)..(175): unsure at all n locations
tattcanatcattctcatacattcatttcatgcanaacaatccactgcatatcattttcaatcaattcactattcaaacacgctttatgtacaagcaaacaactcanagtgcttgaaattaaataactgaaattaaaataactgaaatatgacaacgaaatcagctggaaatata

SEQ ID NO: 161564 - DNA, 418 bp, Glycine max
  unsure (1)..(418): unsure at all n locations
gctaactcatccaacatggcaagttcaacatgctttcaacttatttcttcacaaataaccatcatgaagcagaaacctagcaaaactacccatcatatctcccaaaaccccatacccacgaaaatcaagagagaaagaagtccacccaaacctgaaatttctaggtcccacacgtagagatgcgcttcacgactccgaaaatgccctcctttcgcgatttggagcagaaatgatggccaaaggttggagctttgttggagcttcaatggtggaggaagaagaaggagaatagcaacgtgagggagagggagagagcttctgaaaatgtggggctgagtgaggagagagagagttgctttttagttctaaaaaggctntttcctcttttattattattttatttaagctatgccacatg

SEQ ID NO: 161565 - DNA, 125 bp, Glycine max
gagaacctgtgatgtacctaaacaggcgagctgctggcagtacacacataaaacgaacaaagaccacaaagcaaggaggcttgtgtggtggctggcaactgtgaactttgattatatgtgagata

SEQ ID NO: 161566 - DNA, 441 bp, Glycine max
gtggtaagcaacgcttatgtcgagtctccccagtgcaaccccgctcatctagtgttgcattgacggtagcccatgtaatgttggggcatgggtatgagcccagaaggggtttaggtcggagcgacaatgatgtggcgagcttggtggagttcaaagagaaccgtggaaggttcgggctaggatataagcctacacgcgtcaacgtaaggagaagtgccctagaaagaaggggccgaagcatgggccaacagcaaggaccgcaagtggaagagactcccttatatcacatcaatgaaagcttcatcagcacaggctggatgcgtgaagggcggatcgccatgatcaacgatgaagtccctcaagagcaatcaaactgggtgcggccatgcccttctgacgtcgggttgggaaactagaaaattatcgaacaacccgaaattt

SEQ ID NO: 161567 - DNA, 374 bp, Glycine max
  unsure (1)..(374): unsure at all n locations
ctcagcttgacataaagttaagacaaagagganatcttgttacctaattgtacactattagagatctcttgtagatgttgatatttctacaacacaatgagttggagaaacttcactcacttgataattgtcacacatatatgaaaaaattgaactatcctcaacaataaaagtgaaaaagagaaagataactatggagagtatgtaacagtaaaatgaataaattacttgggctaataggaatgatctaaaaaactggtcattatctgttccaattaagttaactgtgaaaatgttgctaattntgaaagaaaaatgagcaagcaaacaaaaagaaagaagaaaaaatgcttaactgacctctgaaaagcttt

SEQ ID NO: 161568 - DNA, 181 bp, Glycine max
gctgaatatcgcacaaaccaacaaataacgtatggagctggaacgtgatcttcctccctctcctgcaaacagatgcctttttcagcactttaaagagaacagtagggacaacatgaacaaggcataatacgacatcttaggaatcatcggggatagtaatcaaagagggccgggtatcctc

SEQ ID NO: 161569 - DNA, 198 bp, Glycine max
  unsure (1)..(198): unsure at all n locations
atacacctcataacaattcctagaattctgtgatgaagcaggaattgtacatgagttcacacgaccctacactccacaacacaatgggttagcagaaaggaagaatagagaaattatgaatgcggttaggagaatactcagatgcaaggatctgtcacanaacttgtggagtggactgcttcactgatgtgatgtgct

SEQ ID NO: 161570 - DNA, 148 bp, Glycine max
gtagctgcattcatagtatgctcctatgaaccatgatatattctggtgcgaacactgcgatgcacaataatgacaggctgctatttaacaagagatcttgatggctagacccactatataactcgttgctcttacggcctcattagga

SEQ ID NO: 161571 - DNA, 322 bp, Glycine max
  unsure (1)..(322): unsure at all n locations
caatacctcagtttttctcaccaagtaaaaatggaccattntaaggtccaacgccttataaggaccaccttccaaataaaaagaatcgtttgattcacccttttgaaagaactacgtaggtctgatttcctcttcgatggagggtacgtaggagcaagggccccgcttttgtcgacctcaaaaataaaaaagaaataaaagtttagatacgcaatttcacacaattctaatttaaggctgttgtcctttgggacaaatgtgagaggtgctaataccttcctcatacgtaaatacaactcccgaatctagaatattcttcatg

SEQ ID NO: 161572 - DNA, 199 bp, Glycine max
  unsure (1)..(199): unsure at all n locations
atgtctcatgtataggtatcaattcaatcgatataaaanatctttgttaaccacagtaaacaattaggtactggtcatatattaaaaattgaggttgtaatcttaaccatcaatttttattataatctaatgattaanatcaattcttctcattttagatntattctcatttgaaacatctcctatatatgttatgtgt

SEQ ID NO: 161573 - DNA, 438 bp, Glycine max
  unsure (1)..(438): unsure at all n locations
tatttggctattttagaagttagaagagatcctacgaagttgcaatagacttttaatctatcgggctctgatggatttgactctatggagggtcaaagattttcgggaggtatcattattgcttggaaaaagaataatgttaaccttggaagttgctcagacgcattttcaattcttgcatgttaagattatcttgcaaggaggtggtattttgaggtttactcctctctacactagtcctaatgagggaaacattctctaatatggagtgcgcttcttgatatagctacttccatgaatgatagttggatgattggaggtgacttcaatgatatagtgtgtaatgctaagaagaaaggaggagcattagtggttcttacgaaatgtcagatatttagagacagaatcaacagagccaagcttattgacctanactct

SEQ ID NO: 161574 - DNA, 67 bp, Glycine max
tttgggtggtatggtagccctctcaaagaccgagctcctggatggctaacagatgccgcgggcagct

SEQ ID NO: 161575 - DNA, 300 bp, Glycine max
  unsure (1)..(300): unsure at all n locations
gcttcttgaanaacttccttgagaagctngagcttatctacatcacacccctctcataactaagctcacctccttgagaagcttccttaagaagattcctaaagaagctagagcttagctacacatacctttctaatagctaagctcacctccttgagatgagaagctagaacttagctacacaccccctataatagctaagctcacccncatgacaaaaaccatgataatacaaaaaaaggtccttactacaaagactactcataatgccccgaaatacaaggctaanaccctatacta

SEQ ID NO: 161576 - DNA, 225 bp, Glycine max
aggaaaaaggagaagggaaatttccaatccaagaggaagccaaaaaagggagagaaggaaaatttccaatcaaaggaaaaaagagaggaaaggaaattcccaatcacagagtgtgagaaagtaaaaaaggaagagagaaaaggaaagagagctcctgatcaacgatcgaaagaaaacagaagatatatgcagaaaggtctttggaccacaccatatctgaacata

SEQ ID NO: 161577 - DNA, 81 bp, Glycine max
gatcttaaggcactgacgctgccgcttgaccaaccctgctacacctgccaggtgtatgtcatcttaactctgagccagctt

SEQ ID NO: 161578 - DNA, 441 bp, Glycine max
  unsure (1)..(441): unsure at all n locations
tgcttctatagatggtagggaccaagcaaggaaatattcacatccttcaagggtccactatgacaggatcaactatttcacaatatgagagccatgcgtccaatggctcatccaatgataattctctatggcatctgtgtctgggcccataagtgaaaacataataaaagttttgagcaagcgaggcttacttggaaaacataaggttgaacctcttcagttttgtgagcattatgtctaagggaagtaacataggacaaaatttctaaaggttgttcacactacaaagggcattttggactatgntccatttgactactggggggactttgagagttccatcactgagaggggaaaggtatttcctctncatcatcaatgnatactccacaatgacatgggtattcatgatgaagtagaaatctgaagcttaccaatttt

SEQ ID NO: 161579 - DNA, 389 bp, Glycine max
tgacattgcgggttgattgtagccttagtttcactgtagttattagtcaattcaattatgagagagaaatcccatagagaaacgtccgattgattttttttcgctttattttactaaaagggtattttttgattattatattattattttacctcttttttgatttccaacgtggttactgcacgaccgagcggtcagatgtcattgtaactgacattaacggatattgcaaatcaaatgatcggtgaagatttagtttatttttttattacgcgagaaattacttaaataaatgactgtggcacgttgaattgtggtccggcaagtttatgattctagaatatatgtacacaagacaaatggtgaccagcacgggtacatagaatgaa

SEQ ID NO: 161580 - DNA, 413 bp, Glycine max
  unsure (1)..(413): unsure at all n locations
aaatttacaatatatcatgcatcaaatctatgcttttataaattttcctgcttcatctcataagaaaatattcatgttatattagataaaataacatattcaataaattagttaagtctcatgttcattctcctaagttaagcgtaaattcttctttgctttttttggttatattaaaaaaaattgctgacaaaaaaagtataaattctcctacttgattcaataaaaaatgttcatgccaagaatttgatttaaaaatttattttttaggttaaaaatataaaattgtaataaaaaagttctttaaatgccaaaactattcaaataattaatgtaaagctttttgcccaagtttgtaagataatggaacattntacaatanatcatgtattatatggttttttttagttaca

SEQ ID NO: 161581 - DNA, 185 bp, Glycine max
  unsure (1)..(185): unsure at all n locations
tcgaacatacactctcaagacagcttgaacgcctcgagatatattacatcgtggtgagattatatatgcatcgacatgatgattaagaggtgttcattgtgcanacaaacagaaaatcttttgtntatgtagaggcggcagtggcttgagaggacaaagaatgctgcggtgataagtcatagcat

SEQ ID NO: 161582 - DNA, 219 bp, Glycine max
  unsure (1)..(219): unsure at all n locations
acccaccatccactgttgcccacctccatctgagctcacgtactcccacgtagcccatatccttgtttctctcaacaccgggtccacatcaatcctcccaagcttccacaacatccaagcanaacaacattcataccgcacaagctatcacagccaagcaaaacagagcatatgcngaaaaactctgcanaacaccaaccaaatcacaactnttctcac

SEQ ID NO: 161583 - DNA, 402 bp, Glycine max
  unsure (1)..(402): unsure at all n locations
caataatcatatttccttatgttttccagagaattaattntgaatacaaggctcatttaatttgatgttctcctataattnttatttcccgcttcatagccttgtagtcattgttaaaatggaattatgagaaaattaagtgcaacatccaactagaacataatgcatgcctcccatcatcatgtttgtatgaaagcaacaaatgaagtggcaaaaacaataatgttccaatcctttctgttaacagtaaatatatgaatacattcacatccnctacaaatgattttatcaagaattcccggttggactactgagacagcatgctcattaaacttctcatcaagcctgtactntgtcacttgcaatatgagaaacacgttcagagtcattcttcttctttat

SEQ ID NO: 161584 - DNA, 238 bp, Glycine max
  unsure (1)..(238): unsure at all n locations
cctattctttgtccttcagcttcacacttatcaattgctatctgcagttcatcagtgccttcaacagccctcatggtgtagaagtatgcaccaaagaccaaagctgtcaaacccccagccactaccagattctttgccttatgtggaaggctcctatatcctanaagtccacccatcttgatcaatggcggaaaatagggttagcacagattcacacaattacaattactcttcaatt

SEQ ID NO: 161585 - DNA, 445 bp, Glycine max
  unsure (1)..(445): unsure at all n locations
gggtgttacatgataaaaaaatgtattgtgactcattttgcattatatactatntatgataacttttattggttatgggtcaaagatcatgtgtgtctctcgatcaactcgatcaaatattaatcttgtttatgacatgtgactgtaattgaaccaaaaaaattaaataaaaattatttcactaaataaattgttctccaaatataaacaagtgatgccttacaccttgcgtcaatcatatgaattaagatataatgtttatgatacttctagcaatgtaccaaatgttcccttattctcttgtcctttgagctattcttaaattctttntaattatgtattcatattaattntaaactttttcatcttttgatatataatttgaaatctatactgattaatggactatatatatatatatatatatatatataantttaacttc

SEQ ID NO: 161586 - DNA, 394 bp, Glycine max
  unsure (1)..(394): unsure at all n locations
taagacaacttgttgtaatcaattacaatgaggctgtaatctataaaaacaaagagtttttgcctttgaattaatttttctaacttagaaaattttctcaaaataaaccatgatgatgcatgatgaaatacagatatcaaatgtactaagatgcaccaaccaagataacaaccaatacaaatgccactcaagaaagttgggcatgtaaaagccaaccaaaacttcttcagaacttcttcgagcttttccttgagcttcaagctttagcctttgggtagttcaccatgttgctcattgttcatggtcggcaagtgtaccggatcgcacaagtagtataaaacagtaagaaccgagtatcgaactctcggngaacttgtgttatctggcaagctat

SEQ ID NO: 161587 - DNA, 186 bp, Glycine max
  unsure (1)..(186): unsure at all n locations
ttgtttccgtgaagaaaatccaagccgaggcgcttccgtaacgttntcgtgagtgatttcgcgaagggtttcgaccattcttcgacgntcttcattcgttcttcatcgntcttcggtcttcaacggggaagtaccttgaaccaagcgtttcgattcattctatgtaccccgtggtgggccacattt

SEQ ID NO: 161588 - DNA, 454 bp, Glycine max
  unsure (1)..(454): unsure at all n locations
tgtgtaacccaccatcttttcatagtatattactgttnatgtgtctaccatcacgattatcatctccctttccatcattgggagtgccacttgggctgccagatccctccacctttgggtgtattctttgaaagattcgtgcccctttttgcacatattttgtagttgcatcgtagaatggactcgagaaccattaggtccttccaagaatgcactcgggaaggttccaagttagtgtaccaagtatgagctaccccagtaagactttcttagaagaaatgtatcaacaattcctcatcttttgggtatgcccccatcttccgacaatacatctttagatggttcttggggcaagtagtccctttgtacttgtcaaagtccagcgccttgaactcgggaatgaccacgttcgggtactatgaacaactcttctatgtcagtaaaggcataatct

SEQ ID NO: 161589 - DNA, 194 bp, Glycine max
  unsure (1)..(194): unsure at all n locations
actaactgacganaagagaataacatacttttcctggtataattcaagagtcgatatgaaagcatcttanaattcanattataaccagaaatgaatgtgatttaacaatatacacaaccaattcttgntgaaacagaatgcttaatagaaaatgaatattgtctacacggagtccatcttaatcatactatgag

SEQ ID NO: 161590 - DNA, 398 bp, Glycine max
  unsure (1)..(398): unsure at all n locations
agcagcaagaggtcttgcaaagattcatgcttagtacagtgcagccaaagtgcctcacgggaatgtgaaatcctccaacgtgcttctagacaagaacggtgttgcatgcatctccgattntgggttatcactcctattaaacccggttcacgccattgcccgattgggagggtacagggccccggagcaagaacagaacaagaggctatctcagcaggctgatgtgtatagtttcggagtattgttgttagaagttctcacaggaagagctccttcatcgcagtacccttcaccggctcgtccccgaatggaggtagagccggaacaggctgcggtggaccttcccaaatgggttcgctcggtggtgagagaagagtggactgcagaggtttttgatc

SEQ ID NO: 161591 - DNA, 154 bp, Glycine max
  unsure (1)..(154): unsure at all n locations
atgggaagaagacaatntatacacggcaccgtaggtgtttaanacattatcacccctatcgatgattgaagaaagcatttaatggtagccaagagactaaagaacccccagaaccgttagctccccatgaagtgtatgatcgggtgaaagacat

SEQ ID NO: 161592 - DNA, 394 bp, Glycine max
  unsure (1)..(394): unsure at all n locations
ngaagagagacaacaatggtggtgaagaaaatgaataagatacgtggaggaagaaagagagagctgtgctagaagtttctagagaaagagagagaagatttggcttttaaaatggtttttcttttctttttcattttctttttaaaagcaattccacatgtcattttttaaattggagcaaaaagggcccacctttacctttgacttgaccacatactcagctataaaagaagaaaaaaatcggacctttttggatgctgaaatcctgcttcggtttgcgtgccgtctctcccgttccaattcttcgcgtatgtttgcacccgtcggngcccgttttcaaagataggaaatatatatatatatatcataacgcttagaatgagaccctgagcgt

SEQ ID NO: 161593 - DNA, 177 bp, Glycine max
tctcacatgtaagcacggacactactggagaagaaaagtgcaagttgcgctttgagatatagacgcttgcccacgagggggtggcgcttcctgacacctgtatggtgttcgtgtacataccggatgatcttcaaaaaggtctcaggaacttgatgaactacgcatgcatcataatgc

SEQ ID NO: 161594 - DNA, 331 bp, Glycine max
tggccaaatgcaacacaatttgttttcctttaatccatatctacttatgatcaatcataagagcattggttagggacctcatccaatgaaagtattcaaactttcggattgatgaaacgagctttcttgactttgtatggaaggcatacaaatcctacaatgttcaaggatgaggtgcttatgtggtcaaagagagactcatgctcctaaaaaaaatcatcaatacgtggagtgtggacaaagttgggagtcatcaaacacaagtcgacaagatgagggccaatataacttctttggatgttggaagaatctcatatgagaaggcgtgtga

SEQ ID NO: 161595 - DNA, 338 bp, Glycine max
  unsure (1)..(338): unsure at all n locations
tgttcgcacatcgtccgcgtctatgatatccacttgacatggtttgaactagaggagaccttcaatcctaaaacgcaacgtggcggacaaaagtgggtagttaacttgaatgaccattattgtcaatgcggaaagtattctgctattcactatccatgtccacacattattgctgcttgtggttacgtgagcatgaattacttccaatatgtagatgttgtttacacaaatgagcacatcttataagcttatttcgcgcaatggtggcctcttgngaatgaagcggctattcctccttttgatgatccatggacacttatccctgatccaagtataat

SEQ ID NO: 161596 - DNA, 172 bp, Glycine max
  unsure (1)..(172): unsure at all n locations
gtgatcacctttcagtaaaagaatcgcttgattcacctttaaggaagaactacgtacgtctgatttcctttttgatggagggtacgtaagagcaagagccccgcttttgtcgacctcanaaaataaaaagaaataaaagtttagataacacaattccacaattctaaaaaat

SEQ ID NO: 161597 - DNA, 334 bp, Glycine max
  unsure (1)..(334): unsure at all n locations
aaaatttacaatatatcatgcatcaaatctatgcttttataaattttcctgcttcatctcataagaaaatattcatgttatattagataaaataacatattcaataaattagttaagtctcatgttcattctcctaagttaagcgtaaattcttctttgctttttttggttatattaaaaaaaattgctgacaaaaaaagtataaattctcctacttgattcaataaaaaatgttcatgccaagaatttgatttaaaaatttattttttaggttaaaaatataaaactgtaataaaaaagttntttaaatgccaaaactattcaaataattaat

SEQ ID NO: 161598 - DNA, 439 bp, Glycine max
  unsure (1)..(439): unsure at all n locations
tttcaacatttgagatctcanatggaatatganaatggagttgttagtgggagaggaagcangtggaggcggtggcgggcgtgggtgtggatgcgttcagaaatgggaaattgggtgtgagtgtgtgaaggatgagagagctgtgccgcgagagagattgggagagcatgcaaaaattgagggaattgaaagcgtaaatgaaaaaggttttcaaagacaatttttcaccgtccttgaaaacttacttttaaagacgatttttgaaaatcatcttttanaactttctttcanagacaatttttgcaaaaacggcttacaaaaattgaacttaatttcaaaaatgtcactgcttatnttttacattcgattttttgaanactgacttggattaatgatgttaaacatgatttttactagtgagggagcactttcatgacaa

SEQ ID NO: 161599 - DNA, 183 bp, Glycine max
  unsure (1)..(183): unsure at all n locations
aatgaagagggtgagaatgaaggagaaacccatgctgcgactatcgttcctacatggccaagtttcccaccaatccaacaatgtcattactcagccaataacaaccattctccttatccaccacccagntatccacaaagtccatccctaaatcaacaacaaaacccacctaccacacaacca

SEQ ID NO: 161600 - DNA, 306 bp, Glycine max
  unsure (1)..(306): unsure at all n locations
gagaggngggagcacgannatgaaggaataaaagagggagagaagtggaactttgaagtatgtctcagaagactctcattcatcaaagttacaacaagtgttacacatgcttctatttatagactaggtagcttccttgagaagctttcttgagaaaatgatgcatcttgagtacagaggagaaaactcttagcggatgatggatcgcttagcactgctatggccgaaaggaattgggcttagctggcatgagtttcgctttgctcaatgaaacccaattctaaccgcatggaaatgagcttagcc

SEQ ID NO: 161601 - DNA, 104 bp, Glycine max
accattgaaggaccccattgaagctcaacgatacagcctccatagaagccccacaagcaagcttacatcaagtggtatcagagcacaagagcttcttgtgtcga

SEQ ID NO: 161602 - DNA, 345 bp, Glycine max
gagtagtgtcccactggtaaaactaactttccaaatttttgccttcgcaggaaatggccccgaggaagcttgcctcaaagaggtccaggaaggacaaggcagccgaaggaactagttccgctccggagtatgacagtcaccgctttaggagcgctgtacaccagcagcgcttcgaggccatcaagggatggtcgtttctccgggagcgacgcgtccagctcagggacgacgagtatactgatttccaggaggaaatagctctacggagttttaaaagactggctaagaatttggtaaaacataagcacttagacaatgaaggaaagctggagttgctgacatgat

SEQ ID NO: 161603 - DNA, 233 bp, Glycine max
  unsure (1)..(233): unsure at all n locations
attcaatttgggcaaaattggatgagggaaagtgtgatttcgaaaatttgcactttatgcagaattttgctgtcaaataggtgcagcagaattatggctttgtgcagaaagtgttgtgtatttgctggctgtggaaagagtagtacagattgggttctggatgttntctagcagatcccaacggtcataatgtagatntatgtgctagagacttcccagtaaaattttgagtc

SEQ ID NO: 161604 - DNA, 304 bp, Glycine max
atctaggtccttatatggatggagctcaaccttgtctctcacttacatattaagttcactaaggaacctagcaatacttgttctttcctccttcctaagtccagctctcaaaatgagtagttccatttgttgcctatactcttcaacactcacactcccttgtctaagcctttggagcttgtccataagctccctttcagagtaggaggggatgtgcctcttcctaagggcactattcaagacaatcctatacctactagaggatccccatgaatccttctttccctagtgatgcaatcctacc

SEQ ID NO: 161605 - DNA, 233 bp, Glycine max
  unsure (1)..(233): unsure at all n locations
gagtgctttctggacccacctaccctttaactccattgccactatcttcatgccaggcctttctttcactttaaggatcaagcacttgcttgctaaaacaacaactttcttgatctccttctcattntctatagtaagaagaccaatttcaactatcttaaacaagcgacttttttctaaggtagagagattaagcatggcaagacttctttcgcctcttgatctctgaaatg

SEQ ID NO: 161606 - DNA, 344 bp, Glycine max
  unsure (1)..(344): unsure at all n locations
ctcagcttaggtttgtgctgatgcatatatcatggatcatctaatatgtatcactgtacttggagngagactgtataatatgccagaataaaacgttgtcttgaatcttaacccaatgatatttacttttctcactgcacatcaaaactggtatctatatttggcatggagtatcttcacttacccataataagcattttttcattaatagcttgaagctggccaatccaaattgaagtcgagattgcaagatgaagaacaagctaaagcagcattgatgggaagaattcagcgactaaccaaattaatcttagtttctacaaagaatgtaatgtcatcaagca

SEQ ID NO: 161607 - DNA, 260 bp, Glycine max
gatgatgacaacagggacatgcagatatcctcatagctagggtccctaaccctagctatggtggtaaaatggtaaattatataataaactcccctcacctatcgtgagctaccctgcgggttcctcgtcacatcacttgaagattccgttttcttctctgctcttcggatccacgcaagcctctaccatgccaaaacgaaggagacttaatatggattttcataaacaaagctaaccacaatgctctgggcagacaccca

SEQ ID NO: 161608 - DNA, 123 bp, Glycine max
  unsure (1)..(123): unsure at all n locations
caatcatctnntaatcatctatctttcaatctttnttcatcatcatccttcaacaatctttcaatatcttctttcatctctntcaacactttcaacagaacttcttactcatttatcttcgtc

SEQ ID NO: 161609 - DNA, 166 bp, Glycine max
  unsure (1)..(166): unsure at all n locations
atgaagcaacaatgatgtaagctccattggagcttgtangcctaggatcttcttcatcaatggattcctttgcttcttggaagatgaatggcagcggaatggagaaaggaagagagagaggagacgccacttcaaggagaagatgagtctagaagaagctcaccac

SEQ ID NO: 161610 - DNA, 428 bp, Glycine max
  unsure (1)..(428): unsure at all n locations
tcctcggngccatttcctgcgaaggcaaacatttggagagttagttttaccaagaaatgctattcttaaaacgaaaatggcatacgacctcccccaataacacaaacatcaatgtaaatttagagcgaactcatgcgcatacttcctttcgaacattcactcgcaccagatattcttctaactaagaaaaatgcacccaggcacaatcaaggcaccttcgttacctagatcacttatatgtacttccaaggtgtatttgctacctacatcacatgcacttcctttgctaaatttacatacatgcatactcaaagcattttggctaccaaaaattgcatacgtgcacattctggtatttctaatacctatacatatacaaactttgtgatgaatcttggctacctacacaataaggtgctacatttcat

SEQ ID NO: 161611 - DNA, 400 bp, Glycine max
  unsure (1)..(400): unsure at all n locations
tcttagtctcacctgatgaattcatggctacttcatgcactcctctaatgacaatagcatcacttctgacactaaattgctgggagtttgaagccatcttctcaattaaatttctggcttcagcaggggtcatgtctccaagggctccaccactggcagcatctatcatacctctcttcatgttgctaagtccttcataaaaatattggagaagaagctgctctgaaatctggtggtaagggaaactagcacataatttctttaatctctcccagtattcatacaggctctctccacagagttgtctaatacctganatatcctttctgatggtcgtggtcctggaagcagggaaaaaaatatctaagaatactctcttgaggccattccagctcgtgat

SEQ ID NO: 161612 - DNA, 349 bp, Glycine max
  unsure (1)..(349): unsure at all n locations
tgtgtcacgattcactgtgacagtcaaagtgccattcacttagcaaatcaccaaatgtaccatgagaggacaaagcacatagatgtaaaactacacttcatcagagatgtgattgaatctaagaaggtgaaggtggaaaaggtttcaacagaagaaaacccagctgatatgttcacaaagtccctctctagtgtcaagttcaagcactgtctgaacttgatcaatttcgaagatgcctaaagctgattggtagaagtgcagccctgaatcacaagatagacactngctaatttggagtcaaggtggagatttgtggtgtgtgactcanaatcacaattggcacaagtga

SEQ ID NO: 161613 - DNA, 325 bp, Glycine max
  unsure (1)..(325): unsure at all n locations
ntactgaagaaagctaggggtgactcaccttgcattagtactatgcccatggccgtgccggaggcgtccgtttcgagtgtgaatggacgggaaaaatctggcagagctagcactggtgcctgtgtcatggcacgcttaagagagtcaaacgcaagttgagaatcctcgccccaatggaaattatccttctggaggagtgaagttaacagcgccgcaaaggcagcataatcacggatgaacttgcggtagaagtccgttaaacccaaaaaaccacgcacagattgggttgtcatgggtgtaggccaattcaccatagcttctatct

SEQ ID NO: 161614 - DNA, 362 bp, Glycine max
cttatcatctgaaaacgtgaaacatgctattgtatgttcttcacgttatatgcatagattatgctcgactagttggttttctggcgacattcaatgatatcgaagtaatattacaaagttctctcctgttgcttgcatataatgtgtgctgctgccctttgtgaatacaacaattaatgtcctttgtccaatatttctcttagggtaattagggattatgcatgtgcgttatccaaaagtatactaaactattcagactttcatattttgctaagataattaatgaatcttaacttctgctgagaatcatgagataatccatggttgatattacatacacatgcataacaaatcatagatat

SEQ ID NO: 161615 - DNA, 104 bp, Glycine max
  unsure (1)..(104): unsure at all n locations
tacagaaagaggaacttcctagtatactctcagcctaccattgntcaccccagacaacaaccaatgaaactccttaccgactcatatatgatacacatatcatg

SEQ ID NO: 161616 - DNA, 466 bp, Glycine max
  unsure (1)..(466): unsure at all n locations
tatcccacaagactntcagtgttgtctcctttaacacattgtacttgatctcgagagcaagagttaatcaaattgtgttcacagctttcctttgtatttgagcatattctctttcaactatagtagctgacttttcatcttctaaagccaaatcaataccttgctgcactaaaaggtcttgaatggtagactgccaaatcataaaatttgttttcccatcaaacaatgggatttcaaacttttgtgtgtttcctatcatagctttgatgccacttgttgggaaaactcctctacacacaacaaaattacccacacgtccaaggaatcttagatggaagggatcctaanaagtcctctatagaattttctttttggctctggatatagagctaaatagcaagggttcctaanaattaaaaatggttnttttcccctgaattntggtagataataattttaatctcta

SEQ ID NO: 161617 - DNA, 215 bp, Glycine max
  unsure (1)..(215): unsure at all n locations
tcctctaatgactatggcatcatttntggcgctaaactgctgggagttggaggccatcttctcaattaaatttctggcttcagcaggagtcatgtctccaagggctccaccactggcagcatctatcatacttctctgcatattactgagtccttcataaaaatattggagaagaaactgttctgaaatctgatggtggcggcaactggcacata

SEQ ID NO: 161618 - DNA, 382 bp, Glycine max
  unsure (1)..(382): unsure at all n locations
ctcagctttacatatgggagggcgggcttcttactttcttgtcccaacgcgagctntgaccactgttcttccttcccgtaatgcttcttttcatgtccgcctgagtgggcttatagcctaaaccatacttcccacgatttccttgggtatttatcaggctagttatgccgccgttgtttttgcctaaacccatcccgggttcataaccgttccccaacataactcgggccatcattaccgctgcatcggacagacaaggctgcccaaagagggagtccacggaggaaatgctgaccacctcanaagactggaaagcagtttctaacgattcttctgcggcttccacataaggcatggaggatgggcagcttaccaagatatc

SEQ ID NO: 161619 - DNA, 185 bp, Glycine max
gcacttaataattgatgttttgacaaattctctcctcactattaccaaaaaaaagctctcattaattgataccgagtattgtattgatcattttgccgaagagaaaatcacataggacgggcctttttaggtaccaataggatatatttaaggatagataattatgatattattcttttaacatt

SEQ ID NO: 161620 - DNA, 474 bp, Glycine max
  unsure (1)..(474): unsure at all n locations
actaagcctttaagttatgtggtggagtgtacaatgtcacacatgaatcttgatatatctttatccagagaaatctgtaactattggattgtctcatatctgacccaatcctcacaaatattntacccaaactatgttactgccgactaaaatcactaaacttagtcttagactatgtagcaaaatagtaccaaagacttcacacatcatattaacatatttcattcttttttaatattttatttctagaaaattaaaaataatgggtgtgtgttgaaatatatgtttctattttatattaaaaaaatgtaaaataagatttcaatttttatgcttgatataattctttttacaatgtaagcaaatcagaaatattaatatgactacttacataatttccaatggtattcatataaataattctggttatgtgactntaatgttaagtaattaatttattttctttgcatagat

SEQ ID NO: 161621 - DNA, 209 bp, Glycine max
  unsure (1)..(209): unsure at all n locations
tctttctntacccactcctcacgttgggttattagggaanaacaccataactaaacgcgccacaaggcatccctatcgcaccagatccaaatctagaatgatgggtgatcaagaggagacacaggaacagatgacagccgacatgtcggctctgatagaacaaatggcctccatgatggaggccatgttangaatgatgcagctcatgg

SEQ ID NO: 161622 - DNA, 368 bp, Glycine max
  unsure (1)..(368): unsure at all n locations
ctttctctctcctcactcagccccacanaaattntagacagctctccctctctctcacgcagccttcttcttcttttctcccatccaccattgaaaccccaacaaagctccaacctttggtactcatttctgctccaaatcgtgaaaggagagcattttcggagtcgtgaagtgcgtggctacgagtgggacttcgaaaatccaggtttgggtggacttctttctctcttaaatttcgtgggtatggggttttgggagatatgatgggtggttntgttagttntctgctgtgtgatgattatttgtgaaggaacttgttgaaagcttgttgaaattgccatgtttgggtgagttagacatacccattc

SEQ ID NO: 161623 - DNA, 372 bp, Glycine max
  unsure (1)..(372): unsure at all n locations
ctcattccctgngattaaaactacatactgtttaaccactgggacacccttctgtttatggctccaaccgataatgtctgcccagtcttcaaccaactgatcctgaacgtagatgaagaagctctggtcaccaggacggctaatattcgggtcaagctggcaaaagtgtaaccttagcaagtaggtgaagcctgaatcaatgggaagttgccatgtgaggttgaaccccatgttgaaggtaccattacttcccatattccttacggatcggtacactgtgtctggtgcagtgtagttaggagtcttctttgtgaatctcagcttaattccagtggcaatatctagagatagtacactttgagtcgttacata

SEQ ID NO: 161624 - DNA, 289 bp, Glycine max
  unsure (1)..(289): unsure at all n locations
gctacgctcttaactgacacgctcttaatattcgaagagtatccttgtggaaccttcacccgacgaagacactgacaaanacttatattattcttctttgacaaagtatggcaggatagggacaaagtaaatttcttcccatcagaccttggatgcaactgtgatcgtatacccatatcagctagatcttgacgggtattcaagccatccttcgtcttgccttgaatgttaaggagcgtcccaatcacactgtcacaaacatgtttcttcacatgcataacatcaatac

SEQ ID NO: 161625 - DNA, 407 bp, Glycine max
  unsure (1)..(407): unsure at all n locations
ctcagctgagctcgcactattgtcccagagccactcggtccttgttcctgctccattcttcctttcgggccctttttgtttcccactctaacgcttcaaccgtggtcatgttgatatctttcagctcatcacactctttcttgaccttagtgactgccaccttcagcttctctttcaccactcttgtctttttgagctctactttcaaagctttcacttcttcactttcctcaaaaatttcaacctccttcccacttagactttatagctttgggagccaagttatcccttgcgttctagacttcaaccacttgtgatagccgctgatgatgtcattgctacttcccctaagctccttatcttttcttcccactatattccacgctgtatnggatttctaaaagatc

SEQ ID NO: 161626 - DNA, 261 bp, Glycine max
  unsure (1)..(261): unsure at all n locations
gtcacctgangctgcagcttttttgtgacaattcttctgcctctttttgtctgcaattttatctcattaattgattaacccattgatttgttaatggatntagacgaagaataactttttatttngaatttcaaaactcgtggttagtatgtgcttgagctcgatatatagttcttttaataaaaaatttcaatggggcttggtggggataaaactgtttactgtcatattctttgcacataaaattgatgctaatattat

SEQ ID NO: 161627 - DNA, 430 bp, Glycine max
  unsure (1)..(430): unsure at all n locations
acccttgtctgttacttatttcatatattagaaaaaattatttgcaatttttgtgtgagaatcttgcaagaaacattaagatttatatatataataattcatatctaaagtattatccttaattcttattttaaagaaattattatgaatcatttgaaaattatttcgctattttggtgtcactggtgtgatctcatttgtaacatgtaatgaagttcaactcttaagcatgttgtcacggtttcattatgtgtatgaaaaaatatatattattagaaaagggcaatttcctttcacttttagtgtgtatgaaaaaatatatattattagaaaaggtcaatttcctttatattctagtgaggtttgtcttaattctgatatactagtataaactagctgtacccatannatgtaatgaagtttattatta

SEQ ID NO: 161628 - DNA, 171 bp, Glycine max
  unsure (1)..(171): unsure at all n locations
tgaaatatatttttcggcaagaactaatattatattacgcactagttaaaattagttgttttttatagaagatagcttctccacaagatgattttaacttatatataaattcatcttattttatgggataaatatatctatggagaagnttatctataataaattttaatt

SEQ ID NO: 161629 - DNA, 465 bp, Glycine max
  unsure (1)..(465): unsure at all n locations
tagttaccacaaaaggaccctntaggcatgtnttatcgcctcatctatgataagatggctctatcattttataagagtcagggtacgactctcttgcatgtcttgcttaatatactatttttaagataagatcaagtttactttaaactaaggtatccctaatccctaataagtaacatatataaccccttcttagtgctcactttcaacagtggagcagatcatttgtcaatatatgtataccaataacaggtcctctctaggtataggtcgcttattcaatcaaatgtactttattattattaatcaaaacaatatataatgcaatatccactaaacaattcattccgttccctcttctcctcttttcttttctctcaaataaaatatcatttctaatggtagntagtcttttaattctctcttatcttggattaatatttgatagaagaataaaaagacact

SEQ ID NO: 161630 - DNA, 431 bp, Glycine max
  unsure (1)..(431): unsure at all n locations
cactgcagtggatcactagggttgaaatctctaactggattgtggtggatcgtgatgatgataacagcgttttcggtgcttagtttgtggattggattctatgtctagaccatgatcaaagttgattccactataagagcccgattcattaagtttaatcaatttgatgacgttgtgtaaatggaacccgttattatctctttttttatgaggatgttacttacgaaggctctatgtacgtgtttatttttagtgtaatttctttgtaaccacggtaatatactgtatatgggaagctgttcatatctttctttaatgataacagtgatgtgcacttgaggttattcttgtcgatacacgcatctacatgctagcaaanatattatacatttgttttgtgtaagtataacaatgaaaaaatgatagagtta

SEQ ID NO: 161631 - DNA, 366 bp, Glycine max
  unsure (1)..(366): unsure at all n locations
gtgtatatacattngatagggaagcaccatctatccaagttgataccttatgtgttcatggaggccctaatggatttataactggaattagaggaagggttcaatgtctttcataagaagatttggggaagactgagacacagctagagaagcacgatatgatcaaagaaaaatgctatctccgctttcctacactgccattcattcccaaggaaccttatgatcgtgatgctacagattatgacaatctttctcttgtttcaggagctaaagatcaaagttttattcatgtatctaagatactataaaatgtaccttatatactcctgaatctagatcatgtgctaagcatgcattctaactctg

SEQ ID NO: 161632 - DNA, 451 bp, Glycine max
  unsure (1)..(451): unsure at all n locations
tctactcattagcttactggagaagcttttcttnttaattttcttctcctattagtgcttatagaaaagcttatccaaacaaggtccactatatattctgcaatctggtactgtgccatatatatggatggtggttttggacatttggatttgtgtagttgttgttaataacaatgatgcttatgcatttgggcatgggtttggactagttgtatcaaactatgtttgtgtattggtattttgggggaggatttccacttgcttactacatttttacatgtatattatgtaactggtttcattttattgctacgtgtgaggtataactacttctgtttttaaagccattgcattctttttttattttcttatgtttatgtcattgtggccttattntaaaagcatggttttgttgactaattataagcacatctaacttctgtttgagttt

SEQ ID NO: 161633 - DNA, 169 bp, Glycine max
acttctgtattagtgtcaatgatgcacgagacagcctcctcgtcacactcaatgctaccatgctacacttacttcaacacgtccgacatatatgctccatgcagaccttcgtacggacatggaggcctataacttacaccacaccccatcctaacccatgccgtatacc

SEQ ID NO: 161634 - DNA, 202 bp, Glycine max
  unsure (1)..(202): unsure at all n locations
ttaactgagacttaatgagtgaatgtaaatgtttaatagatttgaaaaagaagaaatgaaattttcctaaaatttaaatactntctatttatatattntagtggtggatcaagtggcctcaaaataattaagaagggggttgaattaattattcctaaacctttactaattaaaaaattactcttctaaggcttttacttat

SEQ ID NO: 161635 - DNA, 112 bp, Glycine max
  unsure (1)..(112): unsure at all n locations
gcttctgtctcttggtcttactcttaaaagccacaaaatgctgngatggctccagcactgtcaacacaagcacgaatatcttcactgtgacagcacaaagctcacagaacat

SEQ ID NO: 161636 - DNA, 303 bp, Glycine max
  unsure (1)..(303): unsure at all n locations
tgcagcttacccagctacgactgggagcaagcttatgttcttctgcaatgattcaaatgtggtttgatgataacaatgatgacaacaaaagatgatgactaaagtgatgaacaaaaagctcaagagaatcaaagaacatccatctcacgaagatctagaacaagtcagagagttcaagaatcaagaagaattcaagactctagaagaaagcctactaacaagaatcaagattcaagatcttcagaatcaagatcgcgattcaagacttanngagatcacgatctcaagatcangagtcaagac

SEQ ID NO: 161637 - DNA, 435 bp, Glycine max
  unsure (1)..(435): unsure at all n locations
agaaactgattattaaacacacataatgaaaatactaagtatttattacctatacttaacagaaaatacttataacattacaaaataaccataaatttggagagtttgatataatttatacaagttttatacacaaaagttagtcattttcaccgactaacaacttccccaaatttatagttttgcttgtcctcaagcaaaaagagaacaactcacttgtcctaaagtgacaatgacatggagtgactatgtacaaaggtgtatgctacaaagttactgattgcatgataagagaatggagtaaaatgccctcatcacttgtctttcacaagttatgcagttatccaaagagaagaataaaatgtatactgaacaaatagatgaagttaggcattagacagatatcaaggagagtagcttanaccacagtctcat

SEQ ID NO: 161638 - DNA, 235 bp, Glycine max
  unsure (1)..(235): unsure at all n locations
ctgcagcttccantatggaagctaactctctggtggatcttcttgtcgtacttgatgtacatatannttttatctattaatgatgttntgtatgctcactatgctatcagaacttcattcttccatgctttngccttgatcacgtagatgcatgtgtttataggatcattcaattgtggaaactggtctgattcttagaacttgatgggacagggctagtttgtcgtactttcac

SEQ ID NO: 161639 - DNA, 407 bp, Glycine max
  unsure (1)..(407): unsure at all n locations
ctaagctntatagtgcgggtctgngagacgaaggtcaagtgttcgctatatgtgaagatgatgttccaagtacttcggatttggtccgaccatgccctcctgatttccagctgggaaattggcgagtggaggaacgccccggcatttacgcaacaagcataatgtaaacctttacggttttaaaagctctatagttgggcctaggctntagagtttcctttntgttaaggctctgtgtcttttgtttttgaatntataatacaaggatctttcttcatctgttcctggtctctacccattctcattcatttgcatgtttacttctttntctgaaacggcagattcgatgacgagtcccccgaaggtactaatacttgngacccgtctatcaacttcgagcaagaaat

SEQ ID NO: 161640 - DNA, 340 bp, Glycine max
  unsure (1)..(340): unsure at all n locations
tgcctaaggaggtccggaaggacaaggcggctctttgttctagttccgctcctgagtatgacagtcaccgctttaagagcgctgtacaccagcagcgcttcgaggccatcatgggatggtcatttctccgggagcgacgcgtccagctcagggatgacgagtatactgatttccaggaggagataggtcgccggcggtaggcatcactggttacccccatggccaagttcgatccagaagtagtccttgagttntatgccaatgcttggccaacagaggagggcgtgcgtgacatgaggtcctgtgtgaggggtcagtggatcccgtttgatgcagatgc

SEQ ID NO: 161641 - DNA, 222 bp, Glycine max
  unsure (1)..(222): unsure at all n locations
atgcacaggtcanagttgagtatgtgaaaagattgtatgaccaagtgaanggtgcaaattgcanagaagaatgaaagttatactaagcaagccaacaagaaaaggaaggaagtggtacttgaacctggtgataatcttggacattngacgacaaatgttntccaagaaggagggaatgatgagaatcatgaaactggccacatacacgctaaaggcccaagt

SEQ ID NO: 161642 - DNA, 307 bp, Glycine max
  unsure (1)..(307): unsure at all n locations
tatcgagacgctcgtaattgaaaacagaagctctgagccaattcaaacgacaataacttttaactcgggtgtccgattgtgtcctgtagtatattgagacgctcgaaattgaaaacagaagctttgagcaaattcaaacgacaataacttttgactcggatgtccgattgtgtcccgtagtatatcgagacgctcgaaattgaaaactgaagctctgagaaaaatcaaacgacgataactttttactcggatgtccgatggagacccgtaatatatcgagacgctcgtanttgagaacagaagctct

SEQ ID NO: 161643 - DNA, 273 bp, Glycine max
  unsure (1)..(273): unsure at all n locations
cacttgttgaatatgcttctttgctntccttgcgctagcccttgtcataggtcttccaagatcttcaagtggatccttgcccttgctcttggtcatgtcctcatcattctctccctcttgagaaggatttgtcctcatatcggattctccatctgcatcanaaatagataagtcagatacattgaaggtggtactaacattatacttatcgggtagctcaactntgtaagcatcattgcttctttcaagcacttgacatggtccatcttccct

SEQ ID NO: 161644 - DNA, 235 bp, Glycine max
  unsure (1)..(235): unsure at all n locations
gagcaatgttctcaatataaanattagtagtggaattctcacaatcagaatattcagaatcaccctcaacagaatgctcacaatgcatagaatgaccaagatgcacactatgcctaactaatctatgagaggttctatctatttcangatcaaaggattgtgaatcacctgggatgcccctagtcatgcactatatgcagcaaataatgtgtttctcaacaagcacctaacaaag

SEQ ID NO: 161645 - DNA, 435 bp, Glycine max
  unsure (1)..(435): unsure at all n locations
gcttanacattgagaagacagtatgagcttcttgctatggatgagactgaatcaatagctgagtatttcaccaagattctcacactcaccaataagatgaagtgttgtggagaacagattaaggaacaactggtggttgagaaggtgctcagaacactgacatcaaagtttgatcacattgtggtggccattgaagaatcaaaggatcttacatctttcaagcttgaagaactacaaagttcacttgaagcgcatgagcagagattaatagacaggaatcctgagaagcacaatgatcaagccttacaagctcaaacaggcataaagtttgacaagcaatgagacaaatccaaaaagaacaaaggatagtggtgtgatgagaagtggagaaagactgaagattccatatgtggtgattctggatcatcttcacag

SEQ ID NO: 161646 - DNA, 230 bp, Glycine max
  unsure (1)..(230): unsure at all n locations
aattaaacacacaaacttgaacanatgattaatgagccaaactcaataattcactaatagttnggctcacttanatcctatgtataacatcccaaatgctaacgaggacgaagaatgatcattgttgtanaagagaagagacatcgacaagtagtggttcatttagtatctcttgacatcctagntcataattgtggtctgcctactntgacatctacaaatttagtccc

SEQ ID NO: 161647 - DNA, 253 bp, Glycine max
atgaataacctgttagaaagttattgtttaagtatttaattgtatcgtttccctaaaagataaaatttcgacacagtttcttgagtaattttagtcctgctatccaattagaatcaaagatttacaccaaaggtcagcataagatactgaaactccaatttcaatcgaagaatatacgtcaaaaaacatgcaaagaactaacaaatatgaatatgacagtaacgtggttgcgtttctcttatctattgtacat

SEQ ID NO: 161648 - DNA, 376 bp, Glycine max
  unsure (1)..(376): unsure at all n locations
cgcgaactgagatctttgcgtgatccataaattgtgtctattggtttattggaatgcggatgatgctgcctctgctctccatgtatacatgcgagtctacgtgaggatggagacatatgattggcattttaattttgctctcgatgttgaatttgagtttttcgtatgtgccgtgtttntgtcagagttttcataaaactagtgaatcttactatcaacaacgaactgagcaacatcggcctactatagtagtgttaatcaaattctttcacataagtgtataattggcattntgattgtaacttcaaagaatcatttgaattgtagataatgtattggattatattgcgctcttcattggttggaatacattgag

SEQ ID NO: 161649 - DNA, 314 bp, Glycine max
  unsure (1)..(314): unsure at all n locations
aactcactcttcanacaaaactaatgagaacagtgtcttataacacatgttttcataaaagaagaccaacacttttttttatttaggttaaatatcacttttaatttattatattttagtattttttattttattacattaaggtttaaaacgtttattttaattatttatatttttttttaaattatcattataatcattgtttctaattntatgttaaanaacattaatgtttcatcaatattctaactaaaataatacctgaaatctcgtcgaagagtcaaattaactaaggaggggtggtaagtttttat

SEQ ID NO: 161650 - DNA, 399 bp, Glycine max
  unsure (1)..(399): unsure at all n locations
ttaaactcgctgtaaaaatatctatattcaatcactcaaattatcaattgctcattcttatcattctcaaacactcatttcatgcaaaacaatccactacatatcattttcaatcaattcattgttcaaacacgcttttggtacaaacaaacaactcaaagtgctgaaatttatataattgaaatttaaaaaaattgaaatataaaatctgaaattaaaatgactgaacataaatcataaaataattgaaaataaactaaaatgttcgagatgcacaaatntaaatgtcctgctcctgtggttgctcctatgcatgctcattaaggtccaacacctgagcagctggtgcagatggtgtggcataatcaagtatgggtgctagggatggctttgggatct

SEQ ID NO: 161651 - DNA, 109 bp, Glycine max
cagttcagaccttacgaattgactgcaagctctgtcatgaatcgttatatcatatttattcgacccccatgaatcgattgcattcctgcacctgcacattgagacggag

SEQ ID NO: 161652 - DNA, 380 bp, Glycine max
  unsure (1)..(380): unsure at all n locations
gatctgagcgacaatacaaacttcctagcggtttctaatcatatggtccattaagtctatcatatgttgacaatagctgagaagtctgtggatcttcttgggggcggagtaggtgtccgccattgctttggccttggctagcaatcggggaaattcttgactcctgttcaaagtaagagcaaatcggtccgtccacattgttgcctcttggtgccatgaatcaattaccctctcccttgcttcgctntctgctgatatcttggcgtactcatcctctagcctttgctcgtgagtcgccgctagaattagcttctctttgcactcatcgatgacgggccacatattcccttcagtctcgcttaattggtgggacaaatttc

SEQ ID NO: 161653 - DNA, 227 bp, Glycine max
  unsure (1)..(227): unsure at all n locations
tacatgagcatatgcaatgtttatcacactctcaagagatcaactcttgtgttactncactccatgcttttggggagttgatcttcacactcattgttggggagcgattggacaaatatacggcacatgctacagcctcagcccataattgctttggcatatatttagccttcaacatacatctagtcatattaagaatagttctattttttctcttcgctacccca

SEQ ID NO: 161654 - DNA, 352 bp, Glycine max
cggcgtttgtagaacctgttacatgaggtcttttaggctcttgtggtccgtgatgataatgaaggggtacccgaggaggtaatggcgccattttcgaactgccgaggtaatggcatgaagctcgtgaatgtaagtagatgcatgttgaaggcgtgggcagaacatcttactataaaaggcgattggatgtgatctctgttgaagaatggcacccatggcaatagcaaaggcatatgttttgaggacaaaaggcaatgagaaatccgacgaggccaacaccggagcctgagtcattacttccttatgacgaaggaaggagtgggtagcctcttcagaccattagaattgatct

SEQ ID NO: 161655 - DNA, 136 bp, Glycine max
aatgtgaagacccacaatttcttgtgttttctaattagagagggaaaaaatatccagaagctatgaaatgtttctgcactttcaaatagaacctaaaagacatacaagacatttgtcactgcattgagctgcatgc

SEQ ID NO: 161656 - DNA, 431 bp, Glycine max
  unsure (1)..(431): unsure at all n locations
gcggtagagagattgagatgatattgtagtcttcattttactgtcaacatgcaagggacatttctctcgttttagacattgtttcacaaattccaacggtggagatgtgtgaaaatggattccaaagtcggtgtccaaattgcacaatgatccaacggttaacgagtccaggatcatagttttaatgagataggttttgggtctctacgagaaaagagaaagctagaatgcgaaggatatttctctcacctctgacgttntttggcaaatttcaacggtgagaatatttgaaagtgagttctaaacctggttctcaaatttcatgatgatccaacggttaacgagtctgagatcgttgttttactaagatatgtttgagtgtatgcganaaanagagaggaatttggaaagaggagaagggaaaacgaaat

SEQ ID NO: 161657 - DNA, 232 bp, Glycine max
  unsure (1)..(232): unsure at all n locations
tactgtctctagaacatcttcattggatataatgatggaatctgtgcattcttagctgatgaagatgcttagtntgaatagcaaacagtagcagatggactaagctcatcagataggctaagcgcataaccactgctaagcgcagcttcagcgcggttagcgcaaaggagaatctagcagagcatcagtatcaaagccgtgcgctaatggcgagatcagtacactaagcgca

SEQ ID NO: 161658 - DNA, 115 bp, Glycine max
  unsure (1)..(115): unsure at all n locations
gccagtattataaccaatcgctgacgtgcttcacctttggggacttccagctatcaccaatgtgggaagaatttgaagagatcctatgatgccctctanggggaaggaaaccata

SEQ ID NO: 161659 - DNA, 158 bp, Glycine max
gacaacatgaacatgagagcatcacttattggaatgtaacacaagctatttgacatgttatacaaatttacagctaatacctctgtatatactaatcataatccacatcttgataagatagtgaaatatggcaatcaatcctaatgagatgatgagga

SEQ ID NO: 161660 - DNA, 475 bp, Glycine max
  unsure (1)..(475): unsure at all n locations
ttacgtgacactataaaactcagcttaaattgaatanaactttaataactgctgtttatcgattacacagtgcanattntgaattcaaattttaatagctgttgtaaatcattttttgccactggtaatcgattacatcctctggtaatcgattactagagagtaaatctcttgaaaaagactttttaacttaaatttcttggccaaaccttttgctacttcaattaggaattcccttcctatttaatatacccttcctaagactctagagactgtcttgatcatccatcttgaatatctttaatttctttgtcttgaataaagctttgagaaacatgtgatcctttggcatcatcaaaaaattcagcttgatcctttgtctacaatctcccnctttttgatgataacaatccctgaaatcaagacaagctatatacaagatgatagcacgttcacacaacccttttactcccta

SEQ ID NO: 161661 - DNA, 223 bp, Glycine max
  unsure (1)..(223): unsure at all n locations
aaatgcacccatatacaatcaaggcagcttccttacctagaatatttacatgtacttccaaggtgtattngntatttacatcaccacgtctccttggctaaatntacatacatgcatactcaaagcactttggggtaccaaaaattgcacatgtgcacatcttggtatttctaatacctatacatacacanacttcatgatgaatcttgactatctacacaat

SEQ ID NO: 161662 - DNA, 399 bp, Glycine max
  unsure (1)..(399): unsure at all n locations
tcttgcacttgatgaattatattctatgaattactcatgagttctctcaagcattacaaagaagtgatcaatatattataaatgctatgaaattagatattgtgtccaaacaaaggttacaaacaatgaaggatgattgacattctctgctcggtgatgtttcattattttgtgaaaaacacaatactattgttcaaaatatgaatgacacttttcaaacacaaggaaggtcaaggcgccatatggaaaagtttataatttgcatcatttttaaaaattggtttatcacatgattgatcgacaacttcaagagttgaataagtcgtttacaaaagtgaatattgagttgcttctttgtgtagcttgcttaaatctaagaannatcatttctacatttga

SEQ ID NO: 161663 - DNA, 478 bp, Glycine max
  unsure (1)..(478): unsure at all n locations
ttagtgtgaatcattcgttgatataaactaacctgntaggtttggaatactccacaggatatagatttcatctagtttgctcatgggcgagcgatgtcaactgctggtcacacgatgcgatacaaccacagagaattgactctcgaatgaatcaggtgctcacaattgttcataatgataagtgcaatgcacagaacccaaatctgtgctcttctgctagcaaggttaatgttcaaagcatggaatgaagtcaacagaaacccaatgttgccttggttgtatttagaggatgngtatgccttacctgtaattgacctgtcttccacacaatggaatatgtctntaactccacatctgatgtggccatgatatcctacagctcatcgtgctgttttgaggaagaaatggattaccttaccgcattcttctgtactggtgatgcatagaaaattgtctgatgctacatattgtgcaaccg

SEQ ID NO: 161664 - DNA, 172 bp, Glycine max
atacactgaattgcaactaataaacactacaataatattgatttatccatagagggagggtaagaatatactctctattattaatttgaactcattactattcacaagagtgcctctaagatttattgaacaatgtgaacttcaatagacttcatagatgttaataacttct

SEQ ID NO: 161665 - DNA, 338 bp, Glycine max
gggagcgctatccgcagactcaacagaagtcagttgtgagagaaatcagactatgtgcacgaatcgtatacccagtgggttattgataggaccaagagctttggcctaccctaccgcttacctagatacctatcgtccaccatcccaccatcatccttgcctatcccctttgacactaacgaagagtttcatgaacagttaaccaaagaaaggcaagataaagaaacttggaagaggagatgccaggagctcgagcaagagaatgagactatgaaggggaagatagcccaacagagccgtgagcttattatccagaaccagaggatgattgagaagga

SEQ ID NO: 161666 - DNA, 270 bp, Glycine max
  unsure (1)..(270): unsure at all n locations
atatatacaacaatggccttcatcatatgncacattatgcattgcattctaatatttagagattgatacgacaatcattgctctatgctaggcgttctctcaataattaaattcacactctcaccgggntatggctcaagctcttctttctcaatcaatctggctactgactaacatttgtaattgcaagcttacattcttagtctttctttgtgtagcagacacactngctcaaactcatgatanaacacatgctttattccaatcatg

SEQ ID NO: 161667 - DNA, 354 bp, Glycine max
  unsure (1)..(354): unsure at all n locations
agaaccaaagaagagcaagttatattgagacatgaactttggttatgcgaaaaactttttggatgagaaaacatatatctggatatggtttataattctatacttaagacatttaaaatagaactgagggaatcaaacttaggtcaatttaattctagtttacgatatgtactcatggttaaattntattttagtgattttaatttaatctttataaattatttagatatgttatgtgatatgtcacttacatagttattaaagtaacatatatgatttgttatatattacatcatttcatgaataaatcttttttattatgcagaaaaagcaatggattntttaattattttt

SEQ ID NO: 161668 - DNA, 447 bp, Glycine max
tagactaacttcagcctaccattctcatactgatggccatactgaacggaccattcagtcattgaaggaccttctaagagcgtgtgtcttatagtagaatgaaagctgggagagttttcttccatcgatagagttcacttataacaatagttttcactctaccattggcatggatccctatgaagctctgtatggtagaaggtgtatggcacccttatgttggctagagcccagagaaggccttaccttatgacctaaagtggtacaacaaaccaccgagaaagtcaagttaatccaggataggatgatgactgctcacagtaggcatacaagttatcatgataagaggaggaaagatctggaatatgaggatggtgatcatgtattcttgagagtcacttcgtggactgaggttggtcgagcattgaaatcccgaaaactcacacc

SEQ ID NO: 161669 - DNA, 278 bp, Glycine max
tgtcttcacaaattatcatctcacagcagattactaacaaaactacccctcatatctcccaaaaccccatacccacgaaatttaagagagaaagaagtccacccaaacctggattttcgaagtcccactcgtagccacgcacttcacgaccccgaaaatgccctcctttcgcgatttggagcagaaatgagcaccaaaggttggagctatgttggggtttcaatggagaatggaggagaaggaaaaagcaacgtgaggaagagggagagcttctgaat

SEQ ID NO: 161670 - DNA, 167 bp, Glycine max
tgacttgaataactcagctgcaggcaagttttatcctacctaggactctttgacaaagagctgaccattgactgaactatctagctaactaaagatacttctttgagaaaagaaagatggctgcctattgacagcctctctgtaagacatattcatgccatatgcta

SEQ ID NO: 161671 - DNA, 397 bp, Glycine max
  unsure (1)..(397): unsure at all n locations
ctttctaagctntnttacaaccttttctccncctttggcttcatcaaaaagccaaagaactcggaaatcaacacagatataacaatggagtagcaagatataaatatcagagtaaaaaaaacaaaataagccaaactcacaaacaagaaataatcaaaccagaattcaaataacataaaatgtcaacaaccacaaaatatccaagactgaaatttaaaaaccaaaagataaataagcaaagtacttagcataataatgtaaattctaagaaactaaaagccaaaatacacggcttataaaaagacatataatcataaactaaaatctaagaagacggaggtggtggaggaagatcaaaactctgacaaatgtatccgacatcctcttcaagctgtgt

SEQ ID NO: 161672 - DNA, 438 bp, Glycine max
  unsure (1)..(438): unsure at all n locations
tgccacccagctcgcccaggcgagcagggttgcttcctccataagcaacagcctactggaggaatcttctagagggcccaagtgggcctggttggctattgcacccccatttttactaagtacacccccctgcctttnttggtgattcttttttcgtaaagttacggaaacttacgaatttcgtaacgatacttgttttctttccgtaatgttacggaaccttgtggattacataatcatcccctttttgacttacggaatgttacggaacctcactaattgtgcaacgatgcttccatttgatttccggtgtgtcacggaaccttacggattgtgcatcaatattttcttttgtntccggcacgtcccggaatttcacaaattgcctaatgatgggtgccaagcaccttacaaggaccaaacaaaagtcgcatgtca

SEQ ID NO: 161673 - DNA, 58 bp, Glycine max
ttgggtaatacagagttttcgattatactgagacagggagtttttagcgggttgataa

SEQ ID NO: 161674 - DNA, 476 bp, Glycine max
  unsure (1)..(476): unsure at all n locations
catcctggtcatggatagatcacccaggttcgggtctataagcaatgacaattgccctgtgaagattcgctttcgctacagcttcggtggtttcccttaaccaagccacaacctatgagtcgccagctcattcttcaacaggcacgtggtcagagtcccgagcctcctcccactgcttgggagcttacggtttcatgttctatttcactccccgatgggggttcttttcacccttccctcacggtactacttcactatcggtcacccaggagtatttagccttgcaaggtggtccttgctgatacacacgggattccacgtgccccatcttaatatgaattactcanaagacaattcanaataaacttctttaaagaanaagataaatagcaataaataaaacaagtttaaaggaagagagaatgcanactcatattntatactgggttggccatgccttgtgcctacgtacaatn

SEQ ID NO: 161675 - DNA, 226 bp, Glycine max
  unsure (1)..(226): unsure at all n locations
agaaacatatatctcccccatatataacanatcgataaatggtgtgtgattcaatgaaggtgccaattcatgacaaataactggtaaaaactaagttcccctcggacatgtaacgatgttcgacgaatcccgttacgctctccgtagggccattttcgtgccaactcgaagtcgcaacaaggtcttctactgcatactctnttctttcttcattgtcatcacatac

SEQ ID NO: 161676 - DNA, 218 bp, Glycine max
  unsure (1)..(218): unsure at all n locations
aactttgaagtatgtctcacaagactctcattcatcanagttacaacaagtattacacatgcttctatntatagactaggtagcttccttgagaagctntcttgaganaacttccttgagaagctntcttgaganaacttccttgagaagcttctttgaganaacttccttgagaagctagagcttagctacacacacccctntcataactaagctca

SEQ ID NO: 161677 - DNA, 72 bp, Glycine max
tcttgactgatgctgatcttacattgacttcttatgactgactttgctacttgcatacttgtatatatgtat

SEQ ID NO: 161678 - DNA, 518 bp, Glycine max
  unsure (1)..(518): unsure at all n locations
aggggctgantcctgtattacttgcaccnttgattctcgngacactatntagtactcaagctgatagatacgtgaccagacgatcgcgagttcagccaagctctcttggaggaagagcgtcaacagcgatttctacctagagtgcgcccccctcttgcaacgatacattatgagatggttcttatgacaagtcgtgcctttgtacctatcagaatcaggtaccttgaattatggagggatgatgacgtcggtactaagcaaagatttgccatgtccgcgaacggatagtctccagatccttcgacagctctcaatctttcttcgatgagaatcgagttccttttttcttccgctgccgaaggtggcccttctgcggacaagaatattggctgtgctgggagggttcgagggtctcccatgaggttgggctgaggtagtctgttgggtgctggcccctcnacggcgacccgngagtangaattggtgtctcttggcatgctctctacactctcgagatn

SEQ ID NO: 161679 - DNA, 427 bp, Glycine max
  unsure (1)..(427): unsure at all n locations
tatatccttttcaccgtanatattttatattgttttctcgtatccacatttactcgagattatttcttattttcatattttctaatattttcaaagaatgtgccactcataaagtaacattccaaattagagataggcattcatctactttctatggtaacattagtaaaacacatgaaattatttactatgtgtttaaattgtgccgtttggcatgacatgaacaaggttcttcatatcacgtaaaaagtagataaataaaagtaaacaaataagtatggcatatcccattagtctaaaagcaagtttaatatattcaaagttttatatcccattatttcatattttcacatgaaggattattcaactgagagtataccttaattaaagattacaaaatggagaatctcattggaagcagatactc

SEQ ID NO: 161680 - DNA, 395 bp, Glycine max
cgtagcccaccatcttttcatagtatagtatctataatgtgtctaccatcacgattatcgtctccctttccatcattgggggtaccacttgtgccgccagatccctctacctcttgggcgtgttctttgaaagatccgtccccctttttgcaaatgttctgtagttgcatcctatccagaaccatatcaaaattgtactaatactgcctaacaaaggcaaccattacgtccttccaagaatagactcgggaaggttccaagttagtgtaccaggtaacagctaccccagtaagactttcatggaaggaatgtatcaacaattcctcatcttttgcgtattcccccatcttctgacaatacatctttagatgtgtcttgtgacaagtagtcccctt

SEQ ID NO: 161681 - DNA, 388 bp, Glycine max
  unsure (1)..(388): unsure at all n locations
tgcctgtcgtatggtcagcaatgctcaagttgatattaccggcagactgcttgtcaggtcattgacatttgattatcacatcttgcactatatcattgtaagaattatgatgcctcgttcttctaatctagctcaagcctctgaggaggatttgattctgatgtgggatttcttgaccgttcgtcaaatcgactgtgcccatttgattcgttaccgcatgcatatggcattgcggtctagtgcacctttaccctatcctcagntaatcactctatttctgcgtcatttgaatgtacctcttgcttcttagcctctcattcaagataaatgatccttctctattggtgttggagcggtcacctcttttggctactgcatggagttggat

SEQ ID NO: 161682 - DNA, 212 bp, Glycine max
  unsure (1)..(212): unsure at all n locations
ttatgaaatattatttcgttggcttcttatgtntatacttggatccgaatcaattaattatgagttgctttcggaaatgtctttgtaccatatttctgttctcgttgaagtgagtctcaactcttatgagaattagttttggttattgttaacgctatgtttggcttttggtttctaaattcccttcatgaatggttggtactttgcaagat

SEQ ID NO: 161683 - DNA, 414 bp, Glycine max
  unsure (1)..(414): unsure at all n locations
gtcatgacattgtcccatgcatatctttttaccaacaaaggttttacattgtgccttcacattcgtatgaatatgagaccgacacaacagattggtagactcggggaaaacagntttctaacatgttaaatatctgtcagtaacaatgactccaaggagtgcatcacgtctcagattaataccttgaagtcgttctagagcccgaacaacattatttaaacgttttccttccaaataggcaaaatgcagctgacaatgtcatacatgttggtgtcacaccaacaatgtcaagtaacggcagcctgtacctgtttgttatgcaggttctatctatgagaataccaaactatcgacattggataatttcgactgtttaggatgacttcaacatatagtaatgacaacatcttaata

SEQ ID NO: 161684 - DNA, 207 bp, Glycine max
  unsure (1)..(207): unsure at all n locations
tagcataattaaaaccaagacttaatctgtagatccctcttgtaagattaagttctgatactgcttcaatcaagttataaggcaacagtacatttcccaatgctaaattcacctaactatgcacacaaatggattatcagaccanaagcatacaaacattaagcagtgaaggaagcatcgaacacagaanacataatcaattagata

SEQ ID NO: 161685 - DNA, 426 bp, Glycine max
  unsure (1)..(426): unsure at all n locations
tatactatagacaaaagntaatattaaataacatttaatttctcacattaatataaaataaaggataataagattatttgattgcaaatataaatatttatattatagcctttaaaataacaataatagattataaaaggaaaaataattaaaataaataatataacacttgaacattttgttctaaaagataaaaaacaatgacttattcctacaaggaagactataaaaaaataaaatagtacattgtctaaagagataaaaaagaatatcattttatttttaaaatgaatattataaaaaaggaaacgaaatgtttttttcaaaaataaaaaatagattattaatatttaaatactattattcatataattaaatcctcaaatacaatatttttctaatattaagatattatacatatatatt

SEQ ID NO: 161686 - DNA, 277 bp, Glycine max
atgctttttcttattgaagcccgcacctcctaaatttttaacaatttcaaactacccttttcatattatacctttccaaaataggtgtctcataatatgtaacaaaaatagcttttggaatcaatgccccataacagtgctttggataagaagcttacaaaggatgcttcactggaggaaaaaaaagagagagaacgagaaaggggggagcatcaaattaaaggaggaaaagggggagagaagctgaactttgagctgtgtctcacaagactctcat

SEQ ID NO: 161687 - DNA, 221 bp, Glycine max
tatgccaattctgctttaatacagtctcacattgaaggcaacactatgggcaatcaacctctcttgatctcagtatcatccttggtggtggatagttacaacaagctctctaaggaacacgtttactcgaggagggacattcaacatccatatcagcatccaaaaacccttttactttcaagtgactcacatcaagcacttctaccatacaaatcctatat

SEQ ID NO: 161688 - DNA, 285 bp, Glycine max
  unsure (1)..(285): unsure at all n locations
attcaaacaaaggtttttagttttatggttgggttggtttgattatggttttttttgcttttaatatgaattcttattttgtatacttaccaaattaaaaatcgaggtccagccggttctcacttctagcagtcaagcaagtttacaactttccggntctagccagatttagatttttttacaaagctgaggcaaagagtcttctgagataaacaaaatctcataggcactggaattatttatattttgcattgttttgtcaaaaaaaaatcttacttatcaatc

SEQ ID NO: 161689 - DNA, 107 bp, Glycine max
agcttgtgttttcaatttggagcgtctcgatatattacgggactcaatcggacatccgaataaaaagttattgtcgcttgaattcgcttacagcttctgctttcaat

SEQ ID NO: 161690 - DNA, 190 bp, Glycine max
  unsure (1)..(190): unsure at all n locations
cctcccagaagagtatggagtcagcaccacttttaacatttctgatataactccttttgcaggtggagctgatattgaggaggaggaactaacagatntgaggtcagatcctcttcaaggggaaggagatgatgcaatcctccctangaagggaccaatcacaagaaccatgagcaagaggctccaagaa

SEQ ID NO: 161691 - DNA, 375 bp, Glycine max
  unsure (1)..(375): unsure at all n locations
agctttgatcttccaccaccaccgccaccatcatcttagatttctatattattagtactttgattttcaaccttgtattttggctatattattatggtatttgaacaatttactatttccttatttgcatggtatgtttgaacaaatattaagtatgttatttgactatgtggattttatagttaatctattcatgattattgcttcatggttcttgcttcattaattggttgatagttnttccatgaatgttgtatggatgtttagttatatgtgaatacttcaaatttgatatgaactctggcattttgttgatgccaaagggggagggtaataaggattaaatcaagaactcacatgagtaatctacttaat

SEQ ID NO: 161692 - DNA, 220 bp, Glycine max
  unsure (1)..(220): unsure at all n locations
ttgctgaggaaatatatccgtgaagaacatccaagctgaggcgcttctgtaacgtttccgtgagtaattacgcgaagattctcgaccgttcttcaagattcaccgttcgttcttacgttttctttagtcttcaatgggtaagtacctcanaccaagctnttcaattcattctatgtacccgtggtggtccacattntgtttcgtgtattcttattctcat

SEQ ID NO: 161693 - DNA, 190 bp, Glycine max
tagctccattttgaggatgaattatttaacaacgagctgccgatagaatatttgctttatgccacgctggcactgtgttccaaaagcattctaagatttccaagatatttgattcgaaacgataaatcttatgctctgccttttggaatggatataaatactttcataacattctaattgaaccagtttg

SEQ ID NO: 161694 - DNA, 615 bp, Glycine max
  unsure (1)..(615): unsure at all n locations
tttgacgccgctagangtgacactatagatgactacgcttcagcgtngcattgaatntganggagaggggacactgtggaactgtaacttactctcgacgaangcgattatgagagagtcgaggactgcgtcggcnaagagaataccatgggcgaatgtgtgtataggcgattacgagcagggtgattcttcctctagatctcttaggaggtgctgactgcgtcaccgattcataggacatcgttcctctgctgttcagctttctgcctccaggtttcattatgtcgtccactaacacgatcaattcaacatactgacttggatgtcttagctataacagcagactcctctctcactatcacattaattttggttatagctcgacccctgaccatctgaattgtgtttttcttttcacacccgctacactatctcttactccagagaaaagagagaaacactgcatcctctcctcgtancttaaatgaagagaatattgccacagattcttgaatctcatcttactatgtgtgttaacacgacggctcttatataatcttcagtgttcaataacacaaatttctacctccgtgattttctgaataaccagaggcg

SEQ ID NO: 161695 - DNA, 357 bp, Glycine max
ttaagcgactgcggctgcagctttatggggctggatctttttcttaatgaggtccttcaatggtgattttccaccatggagatgcagcggaagataaaggagaagaagtgagaggaggtgtcatccactatggaataagtcatggaagaaggaacttcgccaccaagaatgtgctttggataagaagcttagaaaggatgcttcaattggggaactacacgagagagaaagagaaaggggggagcataaaattaaaggaggaaaagggggagagaagttgaactttgagttgtgtctcacaagactctcattcatcaaagttacaacaagtgttacatatacttctatttataacct

SEQ ID NO: 161696 - DNA, 557 bp, Glycine max
  unsure (1)..(557): unsure at all n locations
cactganggtcttcaatggtgattntncatcatggagatgcaacgaaagatattggaanagaggtgagatgaggcgtcatccactacggaataagccatggaaggagaagcttcacccccaagagaatgtcttggataagaagcttagagagagaacttcactgaaggaagagaatgagagagagagagagagagagagacagtgacatggtaaatcgaatgaagaaagggagagaagtcgaactttgaagtgtgtctcacaagactctcattcattcagaataccacaagtggtacacatgcttctatttatagcctanngtagcttcttgagaagtagagctatctaccacaccctctatagtaagctcaacctctgagagctagagctagctgacacccctctatactaactcacctctagatgatagtagctcaccacccttatattagctcaccatgcaaatactgagatcagaagtctctcanactctcaatgctatatcaagtanactatctctagatgcaatcaggtcaagatgaactattatatacan

SEQ ID NO: 161697 - DNA, 344 bp, Glycine max
cttaactacccacaccctctaataactaaactaacctccttgaaaataaaacatggataaaataacacaacaaataaaatcaaacatcaattataattgctaataatatttcagggtgttacagttacttctacaactcctaaccctagtcccacaccaacttatgtttctgctcctacgagcaccctaatccattcaaccatgtcaaatcggcgccctccacacacaccacctagatttatctcctaacccatgaacacaacaccttatttcacacattttcctacccctttgcctttatttccatcatatgaccaaactaattctcccttccacattaccct

SEQ ID NO: 161698 - DNA, 361 bp, Glycine max
agcttatcagtcttggttgtggcagttattttcaccatcttctcacgttcttcaggagatatttcccttccccatcgagcctgggcctcatagaactctgctaaagtaccagcctgtgccgttgcttcaccttgccacaatggaattgcatcaactgctctgcaccgcaccttgtcttcaacatcctgtacctgttatggcaattcctctctttcagctaaaactgcagccacacttgttggaacaaagtctttcccacggtatataacaatgaaatatttattccttaacagcaacgtccctccagttaacatctgtaccatagcagggaaaaaattaattttctgaaattcaaatgaca

SEQ ID NO: 161699 - DNA, 419 bp, Glycine max
agcttccttgataagcttccgtgaaattaaacatggataaaataacacaataaataaaattaaacatcaatttataattaataatatttcagggtgttacactgaacccgttcccgtcagccttccacacctatttatagcaaaatagggggaggagcttgccgcccaggcgagttggtgacttactccagaagcaacttgctcgcctaggtgagctggttgcttctcccctaagtcttctaatgggcccaggtgggcccaagggctgaagaatgtcccacaatggaccattttgcccctactttgagttttttgcccatttccttccgaaacattgtgaaaccttgtagattgcgctacaattggtggtaagcaactcaattcggctggtgagaatctaaatgttggcaaacaattgt

SEQ ID NO: 161700 - DNA, 580 bp, Glycine max
  unsure (1)..(580): unsure at all n locations
caggctgctcgatagctccaggttgctgcatgganaggcanaggtctgtatggtggtcagcagaggagcacataccacanacccttgcaacatgtatagatntctgattcacggccagctggngtaccaaggtaacccaatgcattcacgtttgccttcaagcttcttagtctcagatgatgcagctgagtntgtaactacctcatgcacttctctaatgactatggcattatttctggcgctaaactgctgagaagtggaagccatcttctcaattataatttctggcttcagcangagtcatgtcttcaagggctgcaccactcgcagcatctatcatacttctcttcatattactgagtccttcataaaaatattggagaagaagctgctctgaaatctgatggtgangggcacttgcacatacgtttttaaatcgctcccagactcatacaggctctctcacctgagtgctatacctgnatattatctgatgctatgtctagagcaggagattttctataaacttctaggcatccactctgatgacctgacaagatacagcagctttgcctctcan

SEQ ID NO: 161701 - DNA, 339 bp, Glycine max
  unsure (1)..(339): unsure at all n locations
agctttgcaaatttggttttcgcctgtgaattgatcgaactgggtctaagaagagcaaatttgattatcctgctttgatgaatatgaagcttggggaaaatggagagaataagaaagagggaggaatccatgttgtgactgccgtccctacatggccaaatttcccaccaactcaacaatgtcaacacttagctagtatcagtcattctcattacccaccaccctactagtcaagaacacttaatcatccacaaaggccacccttaaatcagccacaaagtccacctgccgcacatncgatatcaaacaccacccttaacacaaaccanaacactaacc

SEQ ID NO: 161702 - DNA, 233 bp, Glycine max
  unsure (1)..(233): unsure at all n locations
ctgcgtatctaatgtcctactntatgcagagggaatatgctctatacanacaagcaaagggatggaaacacctttgtgtatacaagtcccgtatacatgctctangtctttacacttctcgattcatttcccggggtgaaatggtatgataccagtctacaagtctttatgtgccactccactatgatngcaaatatgaagtatttcctgtacttctacagnngtgtgagtat

SEQ ID NO: 161703 - DNA, 292 bp, Glycine max
  unsure (1)..(292): unsure at all n locations
agcttagtccttagtcatcatatttctgttcggtcgctaaagcttagtccttagtcatcaaatttcaatttggtcgctatttagcgactgcataagtcaatcgcaagataataaaattcgatcactacatatatggnttctatttgtcttgggaccaattcagcaacccaaattgtgagtcactaataaataataaaaatttaaatttaaaataaattaaaataacattcgctcactattgaataattaatttaaaatataaaataaattaaaataatattaggtcggtatt

SEQ ID NO: 161704 - DNA, 522 bp, Glycine max
  unsure (1)..(522): unsure at all n locations
tatgaccccttgagnacctanatactaccttgagctcgctagtngtnngcnnnnnnatgtcgcactttagcaccttaanactagctcaaccccaccaatcagtgcaaacctcacatggttctagtgaaggaattaaatgaagtaattgaggcnactctacctccaccagcctaacatcattagacttgtcaactagattacacctaaatctcaccgatcaaaatngactcttcacacccaacattgcctacaatggcttttgtcacttaggtcttagttttctcttaacctagncaacctttctacatgttctaatgacatttcagctagataactactctacctcattnacacagaatagactagcctncaatctcaagctcactctttcactcatactacatttacttctacctggtagttacctcatttacaattcacacattcgaataactacccattccaaacctaacaatggttgtacttcaactggattacagttcacatgctcaaatataaccn

SEQ ID NO: 161705 - DNA, 355 bp, Glycine max
  unsure (1)..(355): unsure at all n locations
agcttggacttcctatgttttgggaacctctccttcctcaggtgtacccaaacccaatcacctggttcaagcacgactttctttctgcttttgttggttctccttgcatagcttgcatttttgttttcaatttgagccttcacttgcttatgcaacttcttcacatacttagctttagcctctgcgtccttatgcttaaacatagcaatgttagtcataggcaacaaatcaagaggtgtcaaaggattaaatccatacactatctcaaatggtgaacaattagttgtgctatggacagcccgattataggcaaactaaacatgaggcannacatgcttccaagtttaagattttc

SEQ ID NO: 161706 - DNA, 196 bp, Glycine max
  unsure (1)..(196): unsure at all n locations
tccctgcttcttgacaatctgacgcctgcagaatccatatgttctgnggttttggattcaatacatgtctagacagaaaacacatccctgccctcgactttgtatagagatgcttcgctgcatgcctgtcctcacggctgtagattaggatttaaaatgctaaggtatgtatcctgtatgtctttatgtgtgaagt

SEQ ID NO: 161707 - DNA, 262 bp, Glycine max
  unsure (1)..(262): unsure at all n locations
atagaacaagtgtggatatttataaatttaactaagaaaacaactttaattgattaccaaaacatgtaatcaattattttgatcaaaatatatttggtatgcatttctagaattatgggaatcaattacatcatgtggtaatcgattatgtcaagtagcacagagtttcgtatgtttctgtgagccagtggaatcgattactatatctagntaatggataattcatctttcanagagcaattgaagtcttttagagcaacat

SEQ ID NO: 161708 - DNA, 653 bp, Glycine max
  unsure (1)..(653): unsure at all n locations
ctatgacgacgtttgangtgacctatgtnatctaccttgangctacgctatganttctaagctatnactattggtactattgctcgatgttnttatganagtcacgtanactttgttgagttggcagagattacacgtaatctcactgcttgatacgaacacatataacagtgtatgtcttatatctgtataactattattctaactaccataggatataatcagattctcggtttgcataagagttattagcactattcgctgtcatcgtctaattgtatttgtttgttgaaaactctgtattatctgttgatacaaccttatcatatatatatatatatatgcgcgcgcgtgtgagagagataatggacacacttatttggtatgttagaatgtagtagcatactacaccgtggttactaatccacttatgaacgtatacgcactttgttnttagtntanatactttagaagtacacccactgtcggctggagtgcggtggcaagctgaccatgcatgatctccgcaaatttgtagagttatatatatatgtaatatgactgttgcccatctatctttatagctcttatctattctttataaacactgagtacagcatattatttcttgtatcagtgctcttatagttacn

SEQ ID NO: 161709 - DNA, 331 bp, Glycine max
cgcacatcgttcgcgtgtatgacatccactccacaaggtttgaaagagaggagacctttcatcctattacgcaacgtgggggacaaaaatgggcaattaacttgaatggtcattattgtcaatgcggaaggtattctgcgcttcactatccatgttcacatattattgcagcttgtggttacgtgagcctgaactactaccaatatataaatgttgtttatacaaatgagcacatcttagaagcttactccccacaatggtggcctcttgggaatgaagtggctattcctccttctaatgatgcatggacacttatccctgacccaactac

SEQ ID NO: 161710 - DNA, 394 bp, Glycine max
  unsure (1)..(394): unsure at all n locations
atgtcaccatctacagcactnttctcgagcttctntaatccctcgnttacaatnntgtgtattctcattctcaaaccatcacttctcattgaatttgatcttaagctgcaatttatcccagggatcattgcctcattgctctccattggagtagcattagactctaatgcagagggcacattggcatccaacgacttcacagctaatacttcttctagtaaatctacattctgcatgtatcggtcanaagcttcattntccacttcaacattccgctccttgtatcctntatcttggcannatctcatttcgtgatagatgcagcatccctgaaacatcacaatgctattactttcacacaacatacaggtcaccggaaccaagtatacactta

SEQ ID NO: 161711 - DNA, 347 bp, Glycine max
  unsure (1)..(347): unsure at all n locations
agcttggactcatgagtggtaagttgaggtctaagtggattggtcctttggttgttactaatgcttttccttatggtacaattgagatcaaaagcgactccacaaacaagagcttcacggtcaatagacaccgacttaagccattcctcacaaacccttctttagtggacgtaatggtggaagagacttccttactccaccctactcttcctccaccatgacttagggagttgttctttcctatctccttctntacttttactacattggtccgattctatttgatggtctaattgcatttaatcttttaattgtgctacattgaggacaatgtgttgcttaagtat

SEQ ID NO: 161712 - DNA, 70 bp, Glycine max
  unsure (1)..(70): unsure at all n locations
cttgtttgaagctcattacaagcccttaagtgaaaaccatgatcacaccttacccttaanngaatttgga

SEQ ID NO: 161713 - DNA, 426 bp, Glycine max
  unsure (1)..(426): unsure at all n locations
agcttttggaaaagtggttttccattttagggatcaatttggtnagttagaatagtcattttgctttcttgtancctagcatgtaangcataanaatgaaaaactttgtaataagttgtgagtnagagtgggtcagtttaaattagtttaanaccaaaaaacaaaaagatataataaagattatttatattttcaaaanaattatactaanaaaagaaaatattaaaattagataattaaagataaatatcctaagtactaaaaaaatattagaaaataaaagatatatttttaattaaaattttcaatttttttataaaagagatataatctgaaaagttaaactgctaattatttctagatttatttaagaaatagttagcattntaattacgaaaaaaataacaaaaaatataagatatttat

SEQ ID NO: 161714 - DNA, 648 bp, Glycine max
  unsure (1)..(648): unsure at all n locations
tggattgacncccggttgangcgcactatgatgtctgacgctgcacgtcaccagagcatantgagatccagatgatccctgccaaaactgtncaagattcaccatttgagagcagagtacgtatatacggttcaagttctactatcactactaacctcctcgcacggaccagagggtgctactnttcaatcattctcatgataggacatgcctcttatagaggtacatgattactcgcgagctatataactttgatgacgctactcttcgtaatcagatagtacagtgcgacactttctcagcctccatatttgctgtaaacggacaagaacatacattacacatggcttccgtacgagcgtgatgtacatcctacacgtgtcacttacataacgcattngtctatcntgtgataaacaatgactatgacttcatcgctagagtcgagacactaatactcatcttcaccacactgtgattgactacacatatggatgatatgtcttgactgcaatgtatgtgtacgcccataatgcactgtctacactcngtctatgacactgcgtctgcactttatctgatcttggtgtcgaactatgcggatctcagtcagatctgatcacgcctcacgtgtgatgtatgaacatn

SEQ ID NO: 161715 - DNA, 216 bp, Glycine max
  unsure (1)..(216): unsure at all n locations
tgcctatgttgctgcggatgattgcttcatatntacctgngtcaactctatcagagagaaatcacacaccttcgaagtattcaaagagttgagtctaagacttcatagagatgaagactgtgtcatcacgagaatcacgagtgaccatggcagagagtttgaaaacagcactgttactgaattctcacatctgagggcatactcatgagctctcta

SEQ ID NO: 161716 - DNA, 435 bp, Glycine max
  unsure (1)..(435): unsure at all n locations
agcttccaacaccaaagatactcatgttgttatcaagactcatgctcagtggcggacctaggttcatttgaaggggtgcacttacactccctcattntttaaaatttatcaaatttgtaaataaaattttatattgttatattttattgtatctatatttatataattaaatctcttaattttattttttataattcgcacccactaacttaagatcttagatccgccactgccatgcttctagttcatttgggacctagtcataaaaaaattcctgcagaccaaccatggtaaaaacttgagagactccgaacaagagatattggggaatcaactatcatatactcattggaacagttgcattatgttcaacaacaacaccagactcttgagctgttttcaatcttttcatctcaacaagggctgcaaatacta

SEQ ID NO: 161717 - DNA, 614 bp, Glycine max
  unsure (1)..(614): unsure at all n locations
ngttattgacncccgcttagangtacactatagatgatctcaccattggangctgacactatagaattactcaagctntagctntggtctgtaactgaaccagatgtcatcgtgtaatccatgtagccaacctcacatagtaagataagactactgtagtcgtatcataccacaacaacctacttatcanaggggagaaggggnggactaaacaagaatactacattcatatggagaacaccanatacaactcttggcattctatattagaatagataagctcaatcaagcataacatgaatttgttttntcatattctttgtacccatgtacatggcttccaagaactcaaacaacgcataaaggtgcattgtgaacaactcatttaaggattgtcataagaagaatacatgaggcgtaagtacatacataagctaccacaactacttaatgctatatatangcagctatgccctagagccgagctttgttcataaaatattctctaagcgaaatatcaagtnaaataaaagctaatcgatttgcctcattttnataccaatatgccctcttaaaaaacagaactaattttaatgcactagctattaaaaacg

SEQ ID NO: 161718 - DNA, 499 bp, Glycine max
  unsure (1)..(499): unsure at all n locations
gttattgcctctctggannngccccngcgctctatagtcgacctgcccggcatgcagcttatgatatatcattgatggatcttcttttactctcatgtatccactctctccccaacaacatgttaaagttgactcgccacgaaatcactaaaaacattgtaggtcttctcttgctgcccacaaaaacgtcccaacagataacccccttagaattngcaggcttcctatanaaatctgataccatcatgtgtgaaggtatcaagtcttcatttctaccaaacctctggaacaaatattgggaagatgtggtgaacaagcggcctcaataacttaagagggggggtgaattaagtcttaaaaattatggactaacaagnttaaatcccctcttaatgatatgtgattagaattagaatgtccaagaacaagcagcaatcaatttaacaatgttcctttcaatgtgtcagacaaagaaaatcttagttacaactatcgaccg

SEQ ID NO: 161719 - DNA, 69 bp, Glycine max
ttcttgtaagatacaagctctcaaacacctcgataccttgtgataaagactaatagtgctaagtgatat

SEQ ID NO: 161720 - DNA, 385 bp, Glycine max
  unsure (1)..(385): unsure at all n locations
agctnntgacaactttcctgcatgatgcccctacgactcttttcaatttgtactttttgcattccactgcatatttgcatccacttgcacatctctcaagtgcactaatcttactagaatgaagtcttagtcagatcgatagttgtgctcgagtccctgtgaactatcacacaattgttgattgttggacgatgtacaatagtgatagggtggatgatagtgttggttgtttagtctagtactcttgtcttttgaataggtcgtccaatcttctataatctggtggagcgtccagttacatagaagggagtgtccagctcgatggttcattgggcataagtttgttatgattggtttttgttgaactattttcgttagacaatat

SEQ ID NO: 161721 - DNA, 606 bp, Glycine max
  unsure (1)..(606): unsure at all n locations
tgatgaccccttgaggccttgatgttacctgaacggcacttgnatctcagctctaccaatggactaccttgaatatattctttgtagncctttgagccttgattccctttcttgntntgaagctcactacaagccttaagtgagaaaccatgatattaccatatccttcaggaatnttggagctttggaatttgtttgagaataagtgtggcggggttttggttcattgtgacacgtcgcttcgctgactatgcttcatgaagcagtctgggccatacttgatgtacattgtatatcnggtaaatcgtggacatgctgaatgatatgttgcttctcanaggcangaacatacaatcgnagtacataagaagaggatagtcatcaagaaggccctacgctgagtgatataacttaatggacaaaatatgaactctggtctactttcatgtaacntatgttacttctttatctctaatgtttctaaaggcactatgccctttgctcttattcttnggaattagcactaatcatattctcatacctgtcttggcncatacgacgtanagacntatgatctatgtcgtgngtatggtgatgcatataaan

SEQ ID NO: 161722 - DNA, 277 bp, Glycine max
  unsure (1)..(277): unsure at all n locations
acatcaaacgattgctatatttcctccactttctccttgaaacctctatccaaaaaccaacaattgaggactttataaggctttggccccccagagaannnnnttatttttcattatataaggacaatgatccgaacagctcttactaaagacatattgagtactactcaaccattcttgaaaccactcatttgatacaaggaatctatcaaacctactcttggagtacttgctcgatctaccaagtataactctcgcccaccaacgaaatatcttc

SEQ ID NO: 161723 - DNA, 171 bp, Glycine max
tcttcttaaccatgatagcattctccaaccaagtcggatactagacctctctgatgtagaagcacgcttcatgatgatgaaccaagcaactttgatgatacccaaagcccaagtgattgattcaagactgattcaagacttcaagatcaagcatcaagaacccaatccaag

SEQ ID NO: 161724 - DNA, 619 bp, Glycine max
  unsure (1)..(619): unsure at all n locations
tgccagctttgancccttnganngctnnnatgatnccattgangnccactaagattctcagctagacaaggttaccatgttcanagcttgttngngacagctgaacagcgtantcttgagtgatagatgaatgaaggtatggtggttcttggctggcannaagtctacttggtatagacctaatggcgcatctagaagcagacttgacaggttcctagtttctcatgaatggcttgctagatggcccagcagcattcaagctacacttgcaagggaatntttggatcattgtccaatngtgcttcgctctaaggagattgattgcngcccacaacctcttaggatcatggattgctggtacttgataggtcatcaaagaaactgtcatcattgctgacatccatcagcaagccgggtgggaggatacatcttaaagatnaaataagaaattgaacacatcttgagagatggatagagacatttggaatccttacaaggcaaacgatgatctgattaacaactgatgaagacacatcaaacactatccacaaacgagcgaaagaacactgaggagacttgcngaccaactatatctgtaccacacattcattgactttgn

SEQ ID NO: 161725 - DNA, 383 bp, Glycine max
  unsure (1)..(383): unsure at all n locations
agcttgcctcanagaggtccattatgtgacatggcggccgaaggaactagttccgctccggagtacgacagtcaccgctttaggagcgctgtacaccagcagcgcttcgaggccatcaagggatggtcgtttctccgggagcgacgcgtccagctcagggacgacgagtatactgatttccaggaggaaatagggcgccggaggtggacatcactggttactcccatggccaagttcgatccagaaatagcccttgagttttatgccaatgcttggccaacagaggagggcgtgcgtgacatgagatcctgcgtaaggggtcagtggatcccgtttgatgccgacgctatcgngccagctctgggatatctgttggtggtgga

SEQ ID NO: 161726 - DNA, 386 bp, Glycine max
  unsure (1)..(386): unsure at all n locations
agcttgtgatgtttctgatcttgaacattgtctttacccttngatgatcattggtgtttctgatcttgaacattgtctttaccctttgatgatcattgngacaatactttagatatataacanaaatcttctaacaatcataacatttgtcctgcttatggtgaaaattgcagttctggctttgagtatcatctcatcaaccattgcttagataagtttgaatttatgcgttggaatgttcacattgcttgactacaactaaagtgctcctgaaggaacctcatgattcttgcccgaagatgctactcatactactgcgtttgctcatgttgagtcttgaaaatttctcagttctaccgtgctttgaggatggtctgttttctttg

SEQ ID NO: 161727 - DNA, 145 bp, Glycine max
tacgaatttcaactttttggggagtgtagagggaacaactcccactgagtggatccacggccgccccaacagacagctgtaggggggttaataaccattatttggaaggtaacttgacaggtgtgagggcctatctgtaccggga

SEQ ID NO: 161728 - DNA, 169 bp, Glycine max
  unsure (1)..(169): unsure at all n locations
ccaaaggttccagaaacanacctagctattcaatagaacaacacaggtagacgaaatgaaacgtacctgtcacgatctttagcgcaatggagaacaacaagctntgatgttaacagagaagaagagagcgcgagagaatacacggagaagaagagagcgcgagcaaaat

SEQ ID NO: 161729 - DNA, 329 bp, Glycine max
gatcaacaaagtactttcgacacctactatatgttgatttggccaacgttgttatcggtatgttgcgacaatccttcaaaaccttatttatacattctgacaggttggttgtcatgtggtcatatcgacgtccttctctgtcataagccatcatccatttgtcctttgaaatgcgatcaatccatgttgctatggctggactcagttgacagaatttttctaaattttgataaaaaatgtgcttgcaaggagtgtaccctgcatgaaattagttagcaacaacaatttttactatatatgagacttaaattaatgtgaccatgataaat

SEQ ID NO: 161730 - DNA, 331 bp, Glycine max
  unsure (1)..(331): unsure at all n locations
ctgtcctcgtagactcgcttagcgccattntcgcgctaagcgcgagttagtggaatttggcttagcgcttcaagcgcgctgagcgccagaagagacanactactcgctgngcaagctgatggcgcgctgagcgcgtgcatgcgtggcagattctcttccagattctcctcactcgctaagcgggctgatgtctcgcttagcggatgttgctcgataagcacatttgtctcgcttagcgagacaatagctacagtaaccttctatttcttcatcttttcacctganactgaagttgaaaactcattaattcacactggaggggatatctact

SEQ ID NO: 161731 - DNA, 384 bp, Glycine max
  unsure (1)..(384): unsure at all n locations
agctnggcaaggttcttttcttgacaatgtgtcaccctttaaccaatgggcaaactgaagtgataaatcaaactctttctcaaatcctatgacacttcattaaaggtaatttgaaagcttttgaagattggctgccccatgtggaaattgcatacaataagggaaccaactataccattcttcttttgaagttgtttatggttttaaccctttgtctcttcttgatttgattcctttgcctaatattgattctatgttgaataaagatggatttttcaaagcttcttttattaagaacttgcatgagcaagtgaaggctcaaattagaaggaagatggaacaatatgttaaacaagccatcaaagggaggaagaagatggtgtt

SEQ ID NO: 161732 - DNA, 297 bp, Glycine max
  unsure (1)..(297): unsure at all n locations
cactatctatcttcaatgtagctgaacanaatgaatgtcatagacatgaccgatacanattatgtgatgcacagaagaatctgttggtggttgacttctaagaggaaataatgtcatgctntattgtcgggacatcgatacaaggattacattataccttgatgcaatgacatatcccatnctcggtatatccatccacttatccacagtaacatgaatganacanatatacacgtcaaagttaattcttannaagcanaacatanattacatacctttggtaacccatcaacaagt

SEQ ID NO: 161733 - DNA, 397 bp, Glycine max
ggctgcagctttagatttttaataaaagacctatgattattgaagaatctatccatgttgcttttgatgagactaaccctataggccaagaaaggaaacacttgatgatattaacggattcattataagatatgcacttggtgaaagggcacaagacaaggaaatggaaatgaaaaagactttcaaattgatgaaaataaaataaatatagatcttccaagagagtggagaacttcaagatatcatcctcttgataatatcatcggtgacatctcaaaaagggtaacaactcgacactctctcaaagatccatgcaataatatggcttttgttcctttaattgaatctaaaaatttaaatgaagccataattaatgaacattggattattgttatgc

SEQ ID NO: 161734 - DNA, 277 bp, Glycine max
  unsure (1)..(277): unsure at all n locations
gctatgcgcatacttcttacanatgttctcttgcacaagacattctattaaccgaatatatgcacncatatacaatcaaggcagctccgntacctagaatatntacacgtacttncaaggtgtattngttacttacatcccacacatctnctttggctaaatcacatacatgcatacccanagcattntggngtaccaaaaattgcacatgtacacctcttggtatttctaatacctatacatacacaaactntatgatgaatcttgactatctaca

SEQ ID NO: 161735 - DNA, 325 bp, Glycine max
  unsure (1)..(325): unsure at all n locations
ctgagctgcagctaaataatgtaactgcgaccctttggtaaaccttcacagttgactttggaagggctatggatacaataagcacaattgacttttctttgtaaatgttagaaacttctacatgctttgctcgagcatgctaaacacgattatgagctatgctgataggtgatttaatatcacagaatggggccattggtccataccatttaatcttgaaagggctttatggacacaccacattgactgtttaatcgctgagaagatattntaaaagacattgctttcttcagatttttgtttaagaacaaaaccctagtgatct

SEQ ID NO: 161736 - DNA, 234 bp, Glycine max
  unsure (1)..(234): unsure at all n locations
tcttcatatgcattagcttgttattatatagacctaacgctntntacctattactgtcaactnttacttacttgcatttactcgttttatcanagaagtagtttatgtctatctttaaccatcatttatcaatgatgttccaacaatgccttacttctaaataaaactctgtctaataagcaagntcccttgagttgatactcggatcattccgcttcaatttaaatacttgac

SEQ ID NO: 161737 - DNA, 211 bp, Glycine max
  unsure (1)..(211): unsure at all n locations
agctttctagctnttcattggggtattttgttcttcttttggtgctctaaattgnggggatgtgctcaaatatgtggggcaattttggtttgttttcttgcttggttggtttgaattgcgggtttgtatgagatggccctatgcctataatgtattntgaagtaatggggcatgccacattgtccccgttctcttgctattgatgcctaaa

SEQ ID NO: 161738 - DNA, 213 bp, Glycine max
gcttatagccaaatggaactaccttgaattatttctctttgatagccccttgagcctatgttcccctttctttgttttgaagctcattacaagccttaagtgaaaaaccatgatatcaccttacccttaaggaattttggagctttggaattgttttgggaataagtgtgtgtgtgtgtgggggggggggggacctttcaccctgccttttgt

SEQ ID NO: 161739 - DNA, 313 bp, Glycine max
tgctagaaaggatttggttacttcgattgcttgatgagtctcacgaccccttccgcaagtctatgaaactgcccgacatggtttctctgacgcaacactcttgcaacagaccctctccttgacttgtctactttatatgatggcaccccatgcttgactatatgagggaagacattctgcaactgagtccacatagtatgtctatgaccatgaacatcataatcatgatgatggtaatggtgacggtggaggaggtggtgaaagattattcctaaagtatttttcaccctccttagtcttacactgttgcctt

SEQ ID NO: 161740 - DNA, 591 bp, Glycine max
  unsure (1)..(591): unsure at all n locations
ttgaaccgtttgaggccttaatatctcacgctatgccacacttgcttacaatgagctttagcactagacattctgtacaccgattatatgctcncatctacacataacgctattgcgcttgatagattatgtacacgttgattgacatagacttgaccacttacatgcaccacatctccttgcaaaaatgcacatacatgcatacccanagcattatgtggtactactaattgacatgcactcatctagggatgctatatcctttgatgcacgacataacgatatctttatattctcctctatagacggagcttgagtcaatatgatactcgcaaaataagccttaggagcctccataaataccttcttgataacccataacaagagggcctctgaatcatcaatgtgctgtccaccgacagctgttctagctatagaattggtaggctatatcaatgacgacaccatgacaagactttaccatactaataaacgcactcgcgaatcaagtaccgcactctgctccatgatgcatacgccgttaaggtgaatgatcngatctatgccgtctgattgtgtctagagacactt

SEQ ID NO: 161741 - DNA, 405 bp, Glycine max
  unsure (1)..(405): unsure at all n locations
agcttgatgaccatgccagagtatgaatcatatttttggctgggaaagcctgtgcattatggattaacaagtctgtttcaggtaaatagggcaggaattcttccaagcccagatggagatggtgttattgttaacatatttttccaggaagcacttatgcagcttttcaaaaagttgttctacgaggatttgtatgtatcctcattatagcacatatggagctatgaaatattctgttagctactatcatggatntaaactgtggctgcaatcaggatcgtgatgagtcaaaatctttacattatggataattacggaaaaatatgactgatgccatatcaattccggtcataatatgactgtgaagagtcanaataccttggcggtacgatcacaatttcagtc

SEQ ID NO: 161742 - DNA, 403 bp, Glycine max
  unsure (1)..(403): unsure at all n locations
tgcacncatatacaatcaacgtagttgcgatagctagatgatatacacgtacttccactgtgtatatgttacttacatcccacacatctacttgactaaattcacatacatgcatacccaaagcatgttgtggcaccaaaaattgcacatgtacacctgttggcatttctaatacctatacatacactaactttatgatgaatctcgactatctacacaataaggcgctacatctcatgctctgtcaaagttgtgtacctagagccgatgcagatgacagatatttcctttgtaactaaactgcttcaatagaaggatcactttttggtatgtattcttacatacatgagatattattgattcttggcacattgatacattatattgacatactcacatttgc

SEQ ID NO: 161743 - DNA, 390 bp, Glycine max
agtcacctgcggcatgcagcttataagcgcgggtttgggagatttattgtcaagcgttcgcgatatgcgaagatgatattccgagtactttggatttggtacgaccatgccctcctgatttccagctgggaaattggcgagtggaggaacgccccggcatttacgcaacaagcataatgtaaacctttacggttttaaaagctctatagttgggcctaggctttagagtttttccttttgttaaggctttgtgtcttttgtttttgaatttataatacaaggatctttcttcatctgttgctggtctctacccattctcattcatttgcatggttacttctttttctgaaacggcagatccgatgacgagtcccccgaggtactaatacc

SEQ ID NO: 161744 - DNA, 377 bp, Glycine max
  unsure (1)..(377): unsure at all n locations
atgatgaanggatgtcttcagttctcgctctctntcttgatgccatctgcaagaaaagaatgtagactgtcgcaacctacccttcggcgggagggcgatgcggngatcatgggtgcgtcttcaaagaaagaaaaatgcgcggagtcaccaccaacgtttanttgangaanacgtcggnaaaaccgacaaatgtgtggtctacgaactntaagtgtgaaaaggtctgganngtgtttacacaccgngaaggtatagcacccacgcgtcatcacaaggatgacaccttaatcaaggtccatatactcaaatgttatttccttntatgctttatgctttggatttatctttgtgcacaggtgtcctcctctcgatctcac

SEQ ID NO: 161745 - DNA, 346 bp, Glycine max
  unsure (1)..(346): unsure at all n locations
agcttgaaacttcatccctggcacatttgttaggattcaaactattcctgcactggaggagtccaaccaactaatcccaaacaaggtcatattccatcgatttttttgctcatttaaggcatgcattgatgtgtttgcattctgtaaacacattgtgcaaatcgatggaacatggctatatggaagatacaaagggacgctgttaattgtagttgcacaaaatgacgctaacaacatatttccattggcattttccatttgtgagggtgagacaatagatgggtgacactnttttttgtaaacttgagaacacatgtgatgccacaatatgatatatgcttaatct

SEQ ID NO: 161746 - DNA, 355 bp, Glycine max
  unsure (1)..(355): unsure at all n locations
gtaagctntcctgggggtttctattttctaaataaaatgctcctccaccaaaaaaaaaaatatatgcatgttactataggcgtattattgagttttaattaccaacttatttaataaggtggcaaacgggtacttaaaaacaatctcagttattaggaaataacaaaattgacgaacaacaaagtgtgatttgattcttcaacgctagttttagcgatgaaaacaaaggctaaaggttcaagcattatacaggaaaaacgggtccttttattaattaattgtactcgttgagtaaactaagttagacaatacacagaaaatgtttcataacgcatagtcggtgacttacccttac

SEQ ID NO: 161747 - DNA, 248 bp, Glycine max
gacacatgctgaggggcatcaacaactgtaaacactgattccatatttcgtaaatttcaaggattttcacataatcacatcaaattcatattttttttgacacgcatcttaattcttttacttcaacgctgtgcatttgataaaagtataccaaagagggcattttctgtaaaggacaatgcgtgtttataatttttggaagacataaaaagaatagtttgaatatttaaatgtaagaaaaaaaaata

SEQ ID NO: 161748 - DNA, 187 bp, Glycine max
tttcgccagtggcgccaacttgaattgaagaacgacagcctatctccacactgttagacatgagtcagttgatataccttaatcgcgcggaactataaggcgatgacggcaccttgtacttatcttaacaaaatacacagcgccggctgtactcggagaatgcttaaactaacacacatacgggtct

SEQ ID NO: 161749 - DNA, 185 bp, Glycine max
  unsure (1)..(185): unsure at all n locations
catactacatacaaccctattaatagtcatatccatagcaggaagctctttacctaatggatttgcaatagcttcaacacagctaccattcgngctcaaacgtgcacctaatagcttgatatcggccttgaccggggcgagtgctgctatggcttttggacaactcaactttgatggccttctta

SEQ ID NO: 161750 - DNA, 324 bp, Glycine max
  unsure (1)..(324): unsure at all n locations
taactgaagggcaaaattgatctttcattgaattgctgggtgcaccagcaatattgctgggtgcacctagcatatcccgctggtcaacggtcatggttgcctgcaattctccaggatgganaactgtagtagtttgtgcaagaacctctatttgtcatatgagtgttgctaggtgcactcaacattatctgttgaagtggtgcacctactagcacttgagggtgtgcacttgcactctctcattntgtaanattcattanatctgtaaataacaatctatacttttatattctaattatctatattcatataatcgaatccact

SEQ ID NO: 161751 - DNA, 383 bp, Glycine max
  unsure (1)..(383): unsure at all n locations
gcttgtagaacggctggacatgatatatgttatggtattggtttggccagcggttcagggataaaggaatgtcccacattatttccatgacacgcgtgcaacaatgatgaattaaaaatttatgccaagctagtcatgcatgcacctatgcggacactcaaacattaagttttggggtcgtgtgacactagggctcaggactcaagcatcaatttatgcattcgtccgagtccattttgggtgttcggaaaattccacagcattcacccttcaaaagtattttgctacctaaacatatgcatantttgtgtgtggcatctttgctacctanacatatacatacatattcaaagcatttttgctacctaaacatatacatatat

SEQ ID NO: 161752 - DNA, 404 bp, Glycine max
  unsure (1)..(404): unsure at all n locations
tgtgactgccgtgtcttaaacattttcagttatannatttggtttttataactctngngtccatatggtatgctntgaagaataagttagttaaaattggggatctgtatatatttntacaagttgggtagctgatcatgtattggaaactgaagctcagaaacttanaanagcaactatgttcatataaagnntttggttattttattagcctctcattggaagcatccnctgcatggttnggataatgtangtctgaaagtaaggatgctgcatatgatgatgtaatgaaagatttcctttggactatagatattnntaatttgtgcaccttttatcatttctttagaggctagatatcactacttactatgaaataggccccattgtatcacttataatta

SEQ ID NO: 161753 - DNA, 63 bp, Glycine max
tctactctaccactactcttaagaaatacccttagagctaccgattaaaaagcttaagagaat

SEQ ID NO: 161754 - DNA, 89 bp, Glycine max
atgctctggaagatgaccattaactctactccgcgccttttatagatcgatcggcgacacttaccacataagaatggttcaaaatcctt

SEQ ID NO: 161755 - DNA, 356 bp, Glycine max
agcttgataaatgtacggatcgatattttatcatcatggctaggttctcatatacacagatatacatagacaaatcacaagcgcataggatcaattatatatagatatatcttattaaagatatttccatcatgtacaatccaacaaaacaaaggcatcaattgtccacaagtttggatcatcaagaaccaacagaagtgcccagtttcggaattaatgccgattcttgtgaattaactacaattattccacgattgggcgagcttgactaagagaaagtctacatatatctactttgtaaaattgagttgagtgtctaaactctaaagggctgaactatgagtggaagtccatga

SEQ ID NO: 161756 - DNA, 499 bp, Glycine max
  unsure (1)..(499): unsure at all n locations
atgacncccctttganggcacttnatgattacatttgaagtgcactatgattctaagctgcactgtgctgagcatggaacattatgagataaataaacttttttattgattgacatgaaatgacagcagacctgggatcatcggaaaggaagatggtggaaagccatgagaatgaaggtgagaattgcgcctttgaataccggtaggcggaggtgagatatttcttttattgtggcgcgctgttgcctcatccaaagaggctcttaatgaaagtgtggcacatgataactatagccactagacaatgtgcatgtgtatggcaataattgcagtgaattcttattattaggtaagtttaccctaacctcaacatatggagatttttaaatataaaaataattatctattaaatatataacatgtttattctttcttagttacttactgccttctgtttctcacaaanagatgaccgcggaaatatatgttnactaatggg

SEQ ID NO: 161757 - DNA, 356 bp, Glycine max
  unsure (1)..(356): unsure at all n locations
cgtactttgtttaaacttaaaataaatgcatcacaaaagcatcanatttataacaaaattaattttaatattgatatttctgaagaaaaaaaatattaaatgcttatgcgttttatgtcatgcatgctttcttttttttacttaaataattataaaaactattaaactcattgattgaaagatctagcatttctatttcaacttttttgcgtagtgatgtggaccttcgggtggccaataagagtcaggaaaagtgacatctgtcttttagactcgaaagtatccaaagctcttgtttcctactaaaaaggtaaaataaaataaaaatatttttaagtttcataattcttttaaac

SEQ ID NO: 161758 - DNA, 606 bp, Glycine max
  unsure (1)..(606): unsure at all n locations
tgcgcgttaggccttgtgctcgtgttaggccttgatctagctgacaagtctcaattagtattactgaataggaaacttctggttgtagcactggtgagaattgattgaagtgaacaggttgtgcgagcacgaataaagaaaactatcgatgcctaagagaatcaagttgtatttgatgcacagtgattataaccaccacgtntctgattacgctgaatgcatgtatacttgatgcaatctttatactatgtgtctgaagcacatgtggtgtagctctgctgcatatatgatgagcaattgtggtgatatanatacatctccanagcaatcacaatcacatcatgtgcagntaactggtagtgtagtatacanatctaanagttgtatagcttcatgacatctactttctgcataantagatacataacanaatagacctcagcttcatcttgctacctttgaacatgagttcttatatatgggtgattatatcatttcagcttaaactatatgtcgttatacgtatgtgtcgaaatgactgcagggtactcttaaataatacctgatggtcatgatangancatgactgaatttcacgatcatgcn

SEQ ID NO: 161759 - DNA, 198 bp, Glycine max
attgttttttgtgtttcgcaagaacttcttaggatttttggtgcatcacgatgcatacaagttgatcagaacaaagaagaggctgtccaagaagcccgtgttggatcaagcggcttccaaataattaacaaagaggggttgaattaattatgaacgtatcttgactaattagaaacttatccttcttaatgctactag

SEQ ID NO: 161760 - DNA, 106 bp, Glycine max
tcccccctttatactactctgaagctctaaaatctaaaagtaagtactcctcctttaagtagttctctgaagaaagtgactactccacccttatactactacccct

SEQ ID NO: 161761 - DNA, 332 bp, Glycine max
  unsure (1)..(332): unsure at all n locations
tagctagcagaaaaagctatantttatctattcatcttacaaaccaacagcggctagcatcttagagaaaataagcttcaaagtccattacttcataatgaaaacactctaagtctcacattgagcaaaatatcttcaccaaccctattcttactctatatttagagaagaccacgcaccttgtcactcccacagaatagaggaggcttaacgtttagcgctcaacgcctcatagttgatagtttatactatccttagagattctgaacttaagttatataggctatgttggaatgtggtttaaatcacacacacgctttagccttagtaag

SEQ ID NO: 161762 - DNA, 428 bp, Glycine max
  unsure (1)..(428): unsure at all n locations
agctntagaagagtaattntttaattagtttaggtttaggaataattaattcaaccccccttcttaattattctgaggccacttgatccaattctaaacaatggagaggagtgttactcttagtccaacggtcaattaatatggagtgcactacctcataaaagggtgatccttcactctcctcctttctctcatattgatatattgcattcttcaccttttcaatcattgaatcccacatctcatatactagatggagagatgaagcttccgtatccgttcttctaagaacatcatagatagggctagtgaaagaaaaaatataatcaaccttatcccaccatttatcatncaacagagtatctttcacaaatatagcctttgcaacatcatcttccttataagaagaccattgtcactaatgacca

SEQ ID NO: 161763 - DNA, 321 bp, Glycine max
agcttgtaggcaataaggtcagttgtggatttcctaacatgtgttaaaagcatatattaccatagtaggattgtctggttagccatcatcaatctgtcaaagtattcattaaacaagcttagagcaagtgctttggaaatatcgagaggatgaaaaagaaagtggagatcactaacaacactaataattttattcatacttttatctatttaattactgattgaagatacgtggtatgaaatcaatatgaatcaagaaataaattaatctccatttcaaaatcgggaagagactataaatactagtgtacattaacattat

SEQ ID NO: 161764 - DNA, 321 bp, Glycine max
  unsure (1)..(321): unsure at all n locations
agctntagcaactctntctttttgtttagtctagacttctaatgctcttaatctctcctcgtctaaatcaactaactcatctgacatcattttccaataatggtcgatcggaatgtccatttgtttttgtactctagctgattgcaaatgtatttcgaccggaagtatagcatcgtgcccataagtcagtcgaaatggggtagtattagttgattccttaggagaatttctacatgcccatagaacttgatctaacgttttattccaatttcttggcttttgggcaatgtgttttttaatcaagttaattacaatcttatt

SEQ ID NO: 161765 - DNA, 399 bp, Glycine max
  unsure (1)..(399): unsure at all n locations
agctntcttaagatcaagccttgcctacaaggaaaggtttcaagtcatccaagggacatgtaatcgattaccaatggttcgaaagtgtgtaatcgattacacatcatatgtaattgattaccagagactctgaacgttgggaattcaaattttaaatgaagagttacaattgttcaagaaaaacaactgtgtaatcgattacaccaattctgtaatcgattaccagagaggattttcaaggaatatcgccaacagtcacatcttatcatttggattttgaatggccatcaaaggcctatatatatgtgtgacttgggacaaaattagagagagttttgctggtccaaaatgtcttatcctctcanaataaaatgagagagatntccagagaacttcatt

SEQ ID NO: 161766 - DNA, 513 bp, Glycine max
  unsure (1)..(513): unsure at all n locations
tcactcagcgaacatgaactttgtacgaattgttctcctgcattggattcattntgaataggtgcttgaaaaatttattntcatattttattcactatgatcctttgagaaatgaaccaatctcattaaggtgaggacataataaaattgttggatactatacaagccacgtttattctacatctaatgctaaaattagtctaggatttccaaatttttgtagccaanaaggagacatgttntgaaagtntaatcagtagtgcanaaattgagagctaccanaacttataagttgagttttggtggccgtacttttctagagtctttgtatcgctggaatngtatagcctttcaacacntccaatgtaaatcttatctcagacaaatgtgctaagaaagtcgatagataatacatcagattagagttactacctgattatntagattatanaacctgtattaaatntatcatatcatataatgctaatgaaaaaattttatatattaatattt

SEQ ID NO: 161767 - DNA, 408 bp, Glycine max
  unsure (1)..(408): unsure at all n locations
atccttttcattttacaagcttgaaaagttnttgaaaggctttaaaagcgttactcttagaagatacgaataaagtccaggtatatatagagcagtcatctacaataaccaaagcatagtaattccctccgttgctcatcgttctagaaggaccaaaaagatctagatgtaaaagttcaagcggtctaaaggtagaaacaacatttttagatttgaaagatgctctagttttctttccattntgacatgcattacataattcatccttcacaaatttgagctttaggagtcctctaactaactccttagacactagcttatttaaatgattcatgtggatatgagttattctcctatgccaaagccaagagagatcatcactacttattaaacaagtcatgtttgagt

SEQ ID NO: 161768 - DNA, 603 bp, Glycine max
  unsure (1)..(603): unsure at all n locations
ngtgatgacnnaccgatnangtgcactatgtgactcagctctgcgtgtcagagatatctgtagagagaatggtccaagtgccagatagcnttgttgtgcgaatactgactgacaactgatctcgattaggccacttcctgatagcatgatatgatatctgtgagagacctgcacgatctatatgttggagagacatccccactcctcgactctcatacattcatggttcttatactgcacttgttgatacgaagctgcacacatatggagacgtacaacgatagtggtattccttggtgtacttgatgttatacctctatctcattcatgaagtggatgcgacgatgcgccatcntgatgtgatatgcatgttatgcatgaacggtagaacatgcttcccatgatgtcaataagcgtctgcccgatctctatctagtatgcgagcgtagcaccgcatacacataggacatggccagatgcgcttcgatgcacgtgttgacgagtctgtgatatagctcacggatgaccgtgcgaactgacatatatgtgacatacgtggtgaggcacattaagacctctctatgtgcatgtgacataaactcg

SEQ ID NO: 161769 - DNA, 370 bp, Glycine max
  unsure (1)..(370): unsure at all n locations
agcttgaaatgaggacgtgtggaagggtgatactttctactttaattcgttgaccacagagtggtacctggagatatgtcgcgggggtcaggagaccttggggacatcaagtgaggtgctatttcccaaaaccaagcttgaccaatcccgacccaacccgggcatagtcagtcagtgaaaacctgtgatgtacctaaacaggcgagctcctggcagtcaaccgataaaagaacaaagaccacaaagcaaggaggctggtgtggtggctggccancaatgagtcttgagtgagatttgggatatggcctctggtaatcgaataccaagggtaggtaatcgattacaaggcttaaaagtgaagacaggaagc

SEQ ID NO: 161770 - DNA, 349 bp, Glycine max
  unsure (1)..(349): unsure at all n locations
tcttcagaaacaagtcacttgaagaaatgtgactntngganatgtatntttcgaaattattcactggtaatcaattaccattaaggtgtaatcgatgacacatcaacagatgtgactcttcattntgaattntgaanatttaaacgtttagaggctctggtaatcgattacaaatattgtgtaatcgattacacaagtttanaatgatntganaatgtntaaacccaagttgtgactctngaaatttganatctaacattntanagacactggtaatcgatacatgaatatggaattgatacagctctgtagtcagttttgaaataatgtggtactggaatcgatactg

SEQ ID NO: 161771 - DNA, 408 bp, Glycine max
  unsure (1)..(408): unsure at all n locations
ctgcagctatgaacttgtaatgttttcttactaattatgggtattggatttttggattaatttctttaataataaactcactcctcacaatttttgtaccgtgtggttggtacctgtgatgatcacgaacctttgttcgtgggagcagaatgaacagcatagtggacgagaagtgagattcttttgtggagccgccgagctgacgtgatgacgttgggattattttgggagagagttgtgttttgttaattgactcctccatagctggttccctaattctttntgttgatttgaagatgtaaatcacaaatttaattatatgtatgaacaaatttattttccattatgtgaatgatgtgtactagggtattatacctatatatatatatatatatatatattcactta

SEQ ID NO: 161772 - DNA, 368 bp, Glycine max
  unsure (1)..(368): unsure at all n locations
gtgccttatgaatcctcccgtgcttatgccaccagtacctggaatgcctctcattntgtacatgacaatcttagacgagtcaatggggtgtatngctgggcaacatgacgaatccgggaagagagagcgcgcctgttactacctaagtaagaagttcacgacctgtgagatgagatactccttgctcgaaagaacgtgttgtgctctagtgtgggcatcccatcgcctaaggcagtacatgctgagctatactacctcgttgatatccaagatggacccggntaagtacatctttgagaagccagctctcacgggacgaatcgcccggtggcaagtcctgctatgcaagtntgatatantctacgtca

SEQ ID NO: 161773 - DNA, 405 bp, Glycine max
  unsure (1)..(405): unsure at all n locations
atggatttagttntcaccggcgaaatgatctatgttggtctgaaaagaagaaaatttgatcatcctactttgaccaatgagaaaactgggggcaatggagagaatgagaaagaaggaggaacccctggtgtggctgccattcctacatggcccaattttccaccaactcaacaataccaatacttagcccatatcaacctttcttatatattgtcgtcctatcagccaggaaccctaaatcaatcacaaaggccacccctaaaccatccaatgccaaacaccactcttaacacaaaccaagacaccaaccagagagggaatattccaacgaaaaagcctgtagaantcaccccaatgccggtgtcctatgctaacttgctcccatatctactcgataattcaatg

SEQ ID NO: 161774 - DNA, 312 bp, Glycine max
  unsure (1)..(312): unsure at all n locations
acagggcagagggcagaaactctgcccanaacacanaccaataccacaactttgtcttactcaattacctcagcaacattctcttcgttccaattcgttcaccgttggaatcgactcgaaactttactggagatccctagtacataagtctacattntgaccgttgggatcttctagganacgtccagaacccaatatatacaacccttttcacaaccagcaatgcataagcattntctgcaccaacacanaattctgctgcacactttaacagcanaattctgcatagaagtgcagaatttcgaaatcact

SEQ ID NO: 161775 - DNA, 236 bp, Glycine max
agcttaactacacactcttggcgcgtatgatgaatgaacagcgcttggccatgacattcatgtggctccaaatgaaagcgcgaaacggagactcgccgtatacaactcggcaacctcattcgcggagctccagactcctaggtggaagacacatgaacagtgctaggcaatgacattcatggggctccgaagaaaggggacaatggaggactgccctataagggacacacttaagc

SEQ ID NO: 161776 - DNA, 385 bp, Glycine max
agcttgtaatctcttgcttctcgcgaaatctcctataaaattgatcacacacccaaaaattgatacacttaatttcaactaataaacactacaataatattgatttatccaaagagggaggttaaaaatatactttttattattaatttgaactcattaatattcacaaaattgcatctaagatttattgaaaaaagtgaaattcaatagatttcataaattttaataacttctaattaataataaaaatgtattatttaaaaaagaattcaattaaaaatagtgacagtataaatgtttttgagtaaatagtacatgcaagttaaaaaaaaattccactcttatttatatacatgttgatataatttgatgactcttatgatag

SEQ ID NO: 161777 - DNA, 208 bp, Glycine max
  unsure (1)..(208): unsure at all n locations
gcgctatccgcagactcaacagaagtcagtggggaaagagatcagactatgtgcacgaatcttatacccagtgtgttattgataggaccaatagctctggcctaccctaccgcttacctagatacctatcgtncaccatcccaccatcattcttgcctatcccctttgacactaaggaagagtttcatgaacagttaaccaaagaaag

SEQ ID NO: 161778 - DNA, 392 bp, Glycine max
agctttgagcggtttttttagccatgaagagatcaaaattgctctttttgatatggtccttggaaagcttcaagacccgatggtttattacctggtggcttttattagcacacttggcatattgtaggagaaagaaaggtgcaggaagatgatatctttattcacatgagagaatatgtttatatacacatattgtagtacaatcgtgatcctataattaagctaggattaattacactaattatagaaatgaacatatatggaaagaattggtcttgatagctacacatacgcagaaaccacatcatagagcaatcaaggtcatgatacaggatcaagagattgacataatgatattggaatcaatgtgaatcattagaatattatttctc

SEQ ID NO: 161779 - DNA, 528 bp, Glycine max
  unsure (1)..(528): unsure at all n locations
aagttctaggagagcattcatctgtagatcaacactgtctctattattccatcttctattacttgactagtacatgtaaggcacttagcttcaacaatagccgcacactattatatctganagttactactctatctctacttttaagacctgagtatagcagctcttatttacctgttcatgacaagttctgtgtggctgtatctatcttaccactcttatcatcctgcaacaatctacctcanatatgtgacagaattgctctgaaccataatgctcttctacgacctaatgaaagtacatggagatataacttacacgcttncgtcagctcatcaataataatacaaagactcatatggggcanggatcatattcataacangcagcttttgctagtgctattcatcatctgacgcatcattgcaatctgcgtattcgattcaagatatgacatcatacaattaatgtcttcccgtgtgtatatactccagtactggnacactatattctctgtctatatgcttn

SEQ ID NO: 161780 - DNA, 386 bp, Glycine max
  unsure (1)..(386): unsure at all n locations
agcttgcactccaatcattcataaacctatttgaaacattagacataattattgttaaccatattttgtaacacatattaattatgagttaataaattatacacctattataccgaatttacttacatcatccacaactgtagtatagatatgttcaaacatttgtcacctaaaataatttcagttacatctacatgtgtgataaaaagatatcttttacattaggtatcccaaattttgtctcatcccacgacaactaaattggcttttggtaaacatcaaacaaattcttcaccgattctcccaatggatcaactccagccactgcattgtgcaattcagtagatccaaccggttntggttgatgcttttgtaaatcctacatg

SEQ ID NO: 161781 - DNA, 361 bp, Glycine max
  unsure (1)..(361): unsure at all n locations
agcttgtagaatggccagacatgatacatgtcaaggtttggtttggttcaaggattaaagggatgccccacattatttccacgacacaaatgcaaaaatgatgatttggaaattttatgcaaaactggtcatgcatgcacctatgtggacgctcaagtgtcaaatttttatggtcatgtgatgctagggctcaggattcatttcctctattttaaatcaacccaatgtttccaaaatatgttcttttatcaatttgtgcattcatccgagtccatttcgggcgtccggngaaatttcacagcattcacccttcanggtagacacattttccaaaaattggttatgatcaatgaattttttt

SEQ ID NO: 161782 - DNA, 262 bp, Glycine max
  unsure (1)..(262): unsure at all n locations
tctatcaatagacctccaatctntaatggagagggttaccactactgganaacccgaatgcannattttatcgaggcaatagatctaaatatctgggaagccatnganatanggccttatatacccaccacagtaganagagtttcaatagatggtagttcatcaagtgaaagcataaccatagaanaacctagagatagatggtctgaagaggatagannacgagtacaatacaacctannagcccaaaacataataacat

SEQ ID NO: 161783 - DNA, 410 bp, Glycine max
  unsure (1)..(410): unsure at all n locations
agcttgtaggattatggngtacccatcacatgtggtactaggtggcagtcgggcgatggtgcacaacaagttttccacatccacaaagcgcgcataaacccaccatcccctgttgcccacctccaactgagctcacgtactcccacgtagcccataacctcgtttctctcaacaccgggtccccatcaatcctcccaagcttccccaacatcaaagtaaatcaacattcaaacagcacaaattaccacagccaagaaaacagggcaaaggcagaaaactctgcccaaaacaccaaccaaaatcacagcttttctcacttaaagaccccagtaacaattccttcgatccaattcgttaaccgttggatcgactccaaaattttactggaagtctatagtacataagcctac

SEQ ID NO: 161784 - DNA, 561 bp, Glycine max
  unsure (1)..(561): unsure at all n locations
catanggagccatgccaatggtagagtggagactggtattataagtgaactctatcaatggaagaaaactactccagctatccttctgctctagacacatgctcttaananaganctncaacgaatgaatggtccgttcaggttggccatcactctgacgatggcaagctgaacttagtctaagcttggttccaacgctctgttcaagctcttccanaatctagaggtagatctangatctttgtcagatactatgctagatggcacaccatgtaacttgacaacctcacttatatacaaagtggtcaacttctccaaganaatctgatattaatgggaatgaagcgagttgacttagtcaatctgtcaacaataacccagatagaatctaaacctctangngttctagggtgtcttaccacannaatcatgganatactgtccgacttncactgnggtatctctaaggggtgtacntccgttanngctctgatgtctatctaagcttctgaagacangcatgatacacaactactaactcttcttatagtggccacaacn

SEQ ID NO: 161785 - DNA, 367 bp, Glycine max
agcttgctaacccatggaagctcctaatatctcccacactctttggggtgggccattcttggatggccttgattttctcctagagagggaaactacaaaccctaagaaaactatattatctacacgaaaggtacacttctctatatttgcatagagggtatttttcctaaggactgaaagaacttgcctgagatgtcctaaatgatcatctaggctcctactgtacactaaaatatcatcaaaataaacaacttcaaatctgactatgaaatcccttaagacatgatgcataagcctcataaaggtgcttggtgcattagtgagcccaaaagacatcactagccattcataccaaccaaacttggtc

SEQ ID NO: 161786 - DNA, 583 bp, Glycine max
  unsure (1)..(583): unsure at all n locations
attgatcgccatctattangtgcactatgaatactaagcttgcacactcgcncaggcgagccaagagctggtccagctccaatatttccgcttcagtgaaaaactcatatctcatactcaagatgctatatatatagcccaacggttataatgtggaaaagtgtcttacgaacctncagagaaaattgaagacgatccaacggttaacgaatccgagaccgcaattttactgaaatagggttaggtaaaaatctgaaatatcataatttcaacttaactcaacanaattccacataactcaacatccacatcaagaaattcacacatgacttattcanaccatacctcaactcattcaagtcaaccatatagtcaaataacacaatanataccantaaacatcgattattantagtaatatntcagggtgtacagaggccaccaccctacangacaggacacctctatatcncgctnaatactctttgctgaccacaaacaggatactnngtattngttgtagaagggatcactgataactacaccttaactctgggactcaaatctcatagaggttatgtcg

SEQ ID NO: 161787 - DNA, 430 bp, Glycine max
  unsure (1)..(430): unsure at all n locations
agcttctccctattttgctataaatagggtatgaattgaagaagaaaagggttcagccccttaggcacttctctctctctcgaaatagctgaggaaaattagttccgtgaaaaaaaatccaagccgaggcgcttccgtaacgtttctgtgagtaattacgcgaagattctcgaccgttcttcaagattcatcgttcgttcttcgttttcttcagtcttcaacaggtaagtacctcaaaccaagcttttcaattcattctatgtacccgtggtggtccacattntgtttcatgtatttttgttctcgttttcatttactttntatacccccttttgacgtgcttaagccatttatttaagtcatttctcgcctaatctaaaaataaaataaatttccaccgatcgtttgaattgtatcatccgttaatttt

SEQ ID NO: 161788 - DNA, 611 bp, Glycine max
  unsure (1)..(611): unsure at all n locations
ttatgacgacgctataggaccttgagactcacgctgtgtagtattanattaaggacaagatntntgaatgatctccatgatatcatatctattgaatgaactattaagaagcacgtcacatagaaagtgtgatggtgacatcatgctctattataacgtgaaccanatttccctagctctagcattcacctaattcgcttatcttgatcttcgactctcttttgaactactcgtngtctttctgcctcgtgagctgagttgaatgacatatatgtacaataaccatgatcaaactaagcaaaaattgatgttgctcaagcttctatgcagaacaagtaactaaccaatactggttacatactatcatcgatatggaagaaacaatggctaattaatcagaaaccgcattgtacatatagactaccttgccatgtaccaattaactanggctcgttgttatctcagctccaagtacataagtgtctcgtaaatgagcacatagataaggagtgatcacctatgattatcccaatatgctcatgcctaactacaagtgtgtaaagacacatgacacatcatatgccttaatgatctgcaagtcgatccntgcg

SEQ ID NO: 161789 - DNA, 412 bp, Glycine max
acaattgaaatcacttgtactgttgtacatatttgcattgacttatcatgtaatcaaatatttttattcaaaataacttataattaaaatctttttaggacatttttttttggtgggggggacttacaatttaaacaaatccaaacatgctacaaaccttgacattcaatatttcaatttaattaccatataaacgaactcgtcatttaatcaagagtcaagacaagagtgtaagattccacacaagtattacactaaaatataaatatccagccaaataaagtttgaagtagagttgcatctacatacattgtacaaggatggccatttaaggataacaaatacgcaaataaaattgcacagtttcgcttatacaaagaaccagtcctacaggaaatctccgtcattcagt

SEQ ID NO: 161790 - DNA, 396 bp, Glycine max
  unsure (1)..(396): unsure at all n locations
aggctttactagcttatctgtcatgtcgctattcgtctcttatattacaatagcctttgcctgcttagtattgcaattggtgtgttgctatcttcgacattattttacgcggttgaaggaattagaatttacaactctgaagcagtaaaaacaataatataattggtaatactctacgacagttaaatactaaatataaatatattatttaaaaatataaaaattataattattgaataaatgaagaaatataaaaatagaagtaaagtataattttactatcaaaataaataactaatgctatatgacaacaataaccttgaaggatgtattatgagggcgaggctgcaacatatggtntctatatatgtctctatttattgtaaaacacacact

SEQ ID NO: 161791 - DNA, 303 bp, Glycine max
ctacagctagtatactagctagtactgaagaaagcaacgctagctaaagctaggtcctcaaattaaaaattgaatgttggggtttcgcatgtatcggaatcaagttcatcagaagaacaaattaaatggtggacttgcaagggacggttaaagaagaaagttctcaagttgatgtattgattcggctattaatttggaattcttagaaggggttcagaacgtaaacttgatttccatgggtgcaaataaccatattacaggagggacaaccattaatcaattagccttcaggctgaggattat

SEQ ID NO: 161792 - DNA, 304 bp, Glycine max
  unsure (1)..(304): unsure at all n locations
tatctatacanattgatacataccaatacccattaacatcacaatcttattataatgtgactataataataaagccatagccaaaagaattaatgagaaactctgatacctcaagtacaacaacacatgactatgaccatggcacaaaatcgaaactagaagtctacacanaactagtccctgcacgaccatggtgcaacaaatagtgcgctatctgatctctggcttgctctgcagcattagaagcgaacgtattctccgccaccatctcatcatcgaagatctcatacttccagtgaggatc

SEQ ID NO: 161793 - DNA, 400 bp, Glycine max
agcttttgagccaaaatcctgactcaccatatactttgacccagggtgagaatgtcaatccttaccttcggaagcgaaaagaatagaagggaaatttcccatcaaagaaaaggaaagaagggagaatttccattcaaagagaaagccaaaaaagaaaagaaggaaaatttccaaatcaagaatgggagaaagccaaaagaaaagaaagaaaattcccaatcaaagaatgggagaaagtaaaaaaggaagaagaagaaggaaagaaagctcctgatcagggatcgaaagaaaacagaagatatgtgcagaaaggtctttggaccggacaatatctcaataatacagaattgtcaccaaatgaacaaaaagaaggaaaggaaaccacgacctaaaatggtct

SEQ ID NO: 161794 - DNA, 622 bp, Glycine max
  unsure (1)..(622): unsure at all n locations
cttatgactccctttgangtgacctatgatgctaaccttatactncttatggtgagagaatgttagaacacgcaaggtanagagtgtgtatttgtgatntctaattgacttgtgactttcggtttcttggtttgananatcattnctaagtgtgtttcatcttgctaatcttacgtcttgcaacagagccgtgacaacccatttggggtaaaagctgtgagaagaacgcctgccacaagtacttggacccagaggatagttgccatgaaaggcaactaagcttgagagaagccagtggaatcagtaaaatggttcacgcacaacannacataaatcattgggacctggaatcgtgtgcttgtgctaaagaatgcttctgtaatgtgtgtcttccatacatatctagataccaacattctcttttccacactggatgctgagagtactctacactactcaagactatgcattgtgatgttgatgtagntaataactgatatactggtccaatcttgtatcttgatcttataacatcataagagaaataatggttagaatgtcngcctactangactacaatattttataagaaacgtaaatgccctaagatcgcgcgcttccn

SEQ ID NO: 161795 - DNA, 586 bp, Glycine max
  unsure (1)..(586): unsure at all n locations
cgcccactgtgttgancccctttnagngacctaaatgatgacagtgcacgtnctccnnnantatngagngnnncgaacgctctacgatctattttcgttgctggtcgnggaccacacttgtattattgattggtattcgaattgtaatcgcatcgtatagaaacttgatgtccttatctacacattgatggttctatagatcttgtggcgcttaagcgagggtactttgttcttanctgcaacacagttgcagtgaancatatggttgctgattctacggcttangcataactgaatccacgcttacacgtggattgcccatccttatgcatcagaaccngaaagtatctttggagtccacggattaacttatattgtatactatatggcatatgagagcttcacacgtttcagcttctatgaattcacttttaanattgtactgttacatgttgaagcattctcattcattgtgctggcctccggattagtacaagatccaatcttcgaaagacagctcaactttcgtacctctacttaaatgcaaagtgtcaatcacctccatgagaccgcgcgtctacgcccg

SEQ ID NO: 161796 - DNA, 400 bp, Glycine max
agctttagtagacactagttgttcctttactttcatatgcaaaagtggtgtacctcaacataattgctttagaagtaatataataaccaagactagaactatgttaggagacataataacgaatgatacaaaaaccagaaatttaactatacaattatctacaaattgtgacattttggcaaaaagaattttataaataaggcagacgtagtagatctgcaacctgctaaagaacaaatgatcctaggacttaattttattatacatgataatagatcagttactattacaaaagattatttattaatctctacaaactcacaaatgtcaccaataatagacgaattcacatcagaagtatgagcaaagcgtggtgatacccctatcaaccctacaccta

SEQ ID NO: 161797 - DNA, 84 bp, Glycine max
acagattatctttatcacgatcatttttattgaagagtgagatatcataatatgatcttgcacatctaactgaatagccatata

SEQ ID NO: 161798 - DNA, 369 bp, Glycine max
  unsure (1)..(369): unsure at all n locations
agcttctatataagctgaaccattntatcaataaagacaagttgagttttattcagaaaattagagtttatctcttttatcttagtgagagtgattctcctaaattcttgagtgattcaagaacaccttggctgtatcaaaggactttcacaacctttgtgtgttgccctcgctggaaagagtgattctttccttcctttcatcatcactcttgttctttcaaaccacaattccagaaaatccacctctgcccagaattatctcgtggccataactcccattttacgcactcaaattaagtgattcttgagcctaaatngaatttcaaaacgagacctttcaccttgttttggaatcacctcatttgga

SEQ ID NO: 161799 - DNA, 662 bp, Glycine max
  unsure (1)..(662): unsure at all n locations
atgannnccgnntgnangngcncnnnattgactcccgctgtnangtgccactatagantactcaagctagggtgatggtgcgcgtactgatgngtaccatgaggtgttagctgaggtctgatccacgtgggtggtgaagagacagcatgggcatctccttcctttcgttttgcccgtagtgccccgattctttaggcgttcacgatcgtggaagaaacgtaatcaaactttcctctcttcaatccaaactcgattctattcccggcacacaccagatgcgcagagctggacggcatgtaacccactagcttctcatagtagaacactggcagagtgtctaccatcatggtgatcatctctctctcaaccatgggaggagctacttngtgccgcaaaatcctccatcgctgcgcatattctataaaggtttcaccctctttcttatacatattactgcagtgagtacggtcaggagccatatcagaaatgtactgatactggcttangaangcgggtatcagaatctctcacgtacggatatgggaagcttcanattagagtacacactaccgcactcctgccagtatctgaagaatgatcacagctttatcttagatgacgccatctacagagacatatgaatggtntgtgacagcgtcctn

SEQ ID NO: 161800 - DNA, 344 bp, Glycine max
agcttggagaggatgctcaatggatgtatatataagggagagaaagagggagggggagcacgaaattgaaggaagaaaaagggagagaagctgaactctgagttgtgtctcacaagactctcattcatcagagttacaacaagtggtacacatgcttctatttatagactaggtagctccttgagaagctttcttgagaaaacttccttgagaagcttctttgagaaaacttccttgagaagctagagcttagctactcacacccctctcataactaagctcacctccttgagaagcttccttaagaagattgcttaagacgctagagcttagctacacatacc

SEQ ID NO: 161801 - DNA, 568 bp, Glycine max
  unsure (1)..(568): unsure at all n locations
nntatctacantntanaggtatagatctttattngtatatataataatatgggttttctttagnattcttaacataaatagaataaaatatgggagctactcataaatctatataggatgagctaaaattaatggctagtaatatctatgtttttcaagacactcaattctaaataanaattatacataagtgacaattatagaataaaagaaatagtactaatatagcccttttcttttgctttntctacttcatctcaggagaactctcgagtcagtctaaactccacaatgtcctttggttctactatgataacactcggaaatangagtaataactaaatgcacttaactcactctgggactattagtggctcacataatgtatttacaaacataantcacttncgtattacctgcactgagtcttgtgggatgaaaatcactaactgagtcttaacaccaaggaagttctataactcttgatatcctttgtggacccaagtattaagttccatggttattatggaagaaccgaaatcaaagtcttttgttatatttattttgg

SEQ ID NO: 161802 - DNA, 341 bp, Glycine max
agcttgcttgtggagcttctatggagtgtgtatctttgagcttcaatgaggtcctttaatggtggttttccaccatggagatgcagcggaagacaaaggagaaaaggggagaggaggcgccatccactagggaataagccatggaagaaagagcttcaccaccatgatgagccttggataagaagcttggaaggatgcttcaatggaggaaaagaaagagggagagaaagagagaggggggagcacgaaattgaaggaagaaaaaagggagagaagttgaactttgagttgtgtctcacaagactctcattcatcaaagttacaacaagtgttacacatgc

SEQ ID NO: 161803 - DNA, 160 bp, Glycine max
acttttggtaactcatactgcaattaatgaggaactcgcttgactcccccttgatctgcaatagagaaagtagcttctgtaacaatcaggttttgagacttccaaagttacaatatttgtcctaaactagatgtacgactcctgaaaaaaccaatgtttt

SEQ ID NO: 161804 - DNA, 438 bp, Glycine max
  unsure (1)..(438): unsure at all n locations
agcttatccaagggcatagaatattcattttcttgaagatatcaaggaaacgagccagatgncattccttgtctttctttgttggcaccaatggatatggcacctcctcccttttgcttgggctttcctcttttctcttttctctagccagcttactcttggnccttttcttctctttttttctctcattctctttttctttttcatttctttcattctttttcattatcttttgctttctctctttctttatctttatctttcttttgcgtctcacttatttatttttcactcacaattattggtatcttcttctgttgatcatcttctgctttcacttcttcctcagtctcactcagaggttccatcactaggtcaatttctggttcagtcactagttgntcttcacctatcctcttctcaccttcattcatgctc

SEQ ID NO: 161805 - DNA, 569 bp, Glycine max
  unsure (1)..(569): unsure at all n locations
ntctttccatcacgatcacagggagcatagacattgacantcatcatcctctgtatattactaatacatgtcctttcaagcattanaaaacttctactctttctctctcctatccacctcanaaatggagttattccacanacataataggccaccagcagcctgcacagaaagaacataatcctaatgggcagtcgagtccccccaaatggcctggcanatactcttattanatttctccctttttggttcttggagacagacaangtccactcttgtgctgttacaatgaacaacanattgaangnnnnncnnnnnnnncnnnnnnnnnnnnnnnnnnnnnnnnnnnnngnnnngnnntnnnantnnnnnagncnnnnanngnnnnncnnnnnnnnnnncntnnnnnnnnnnnnntnnnnnnnnnnnnnccnctnntnncnntcnncctcnnnncnccnnncncnnccccccccccnnncncncccncctcccncctcccctcttttctcttnntccctnnntctcccttnttcctcctctnctctctccttcttcctcctctcccc

SEQ ID NO: 161806 - DNA, 375 bp, Glycine max
  unsure (1)..(375): unsure at all n locations
agctttgaatgttcatcattgtttaaacctttattggntctgaggtttggagaaagtaaaattctttgaaagaatcgaaatgctggaagtaaattgacaagggaaaggtaaattgcagaatttaaaggctcaacgagttcattcgatcgaatgaaccatttaaaagacaggaattatataaaatgaaacgtaaattgcattgcattcgaaatataaagtttacagaattttaaaatggttcacaatcatacattctccttgtgtactcgtttctctctgcgctgggtactttgagtgtataaggatttgtagaaatgatttgcgacctcgaaatctgactaaaaactgctatatatagacattcgaaaataaact

SEQ ID NO: 161807 - DNA, 375 bp, Glycine max
  unsure (1)..(375): unsure at all n locations
agcttctgcatgtctagagagttctagagagagaaaggtccaagtttcagagagtttgacaaaatttgttgtgtgaagatctgcagagaccacagctggaagaggaagccgtcctgagagctttagatgagtttatgagtgattgtgaggttctagaggtggaggagacatccccactacttgtatttttgcaatctttcatctttctcttctctttgttggaaaggaagcttcccaattatggaaagctaaatcctctgttggatcttccttgtaggtacttgatgtaaatatctttntatctatctaatgatgttttgtgtgttcactgtgctatcaaaacttcattctaccatgctnttgccttgatcacgt

SEQ ID NO: 161808 - DNA, 62 bp, Glycine max
cgtctccggcaattgggagatgagtggtacacattcctaacaactgatgatgaccgtctgag

SEQ ID NO: 161809 - DNA, 404 bp, Glycine max
  unsure (1)..(404): unsure at all n locations
agctttgagccaaaatcttgactcaccattatttcttgacccagggtgagaatgtcaatccttaccctcgaagcaaaaaagaagaaaaggaaaatttcccatcaaaggaaaaaagaaaaagaaaatttccaatcaaagaggaagcaaaaaaaggaaagaaagaaaatttccaatcaaaggaaaaagagagganaggaaattcccaatcaaagagtgggagaaagcaaaaagaaaagaaagataattcccaatcaaagaatgggagaaagaaaaaaagagaaggagaagaaggaaagatagctcatgatcaaggatcgaaagaaaacaaaagaaatgtgcagagaggtctttggaccagacaatatctgaacaatacggaattgtcaccaaatgaacaaaagaaa

SEQ ID NO: 161810 - DNA, 587 bp, Glycine max
  unsure (1)..(587): unsure at all n locations
gattgaaacccgcttgangtgcactatagtgactcacgcttgagatgncgaagtngtgaagggngannacttctgcttatatcgttgaccacactattgtacctggagatatgtcgtggtggtcaagagaccttggtgacgtcaagtggtgtgctatcgctcacaaccaagctagaccaatcccgacccaacccgggcatagtcggtcagtgagaacctgtgatgtacctaaacaggcgagctccttgcagtcaacagatattatgaacatagaccatcaagcacggaggctagtggtggctgccagctcgtgaatttgtgaatatgtggattatggcctcttgtaatcgattacacaggtgtgtaatcgatacgacgctaatatgaaacaggangctagatgctctggaatcgataccangggagtatcgataccagttaaaacaagtcngaactgnggagctctgtatcatacacctgttatcataccaagaaggtatgtatcatccagctggatcataccgtgtttctatcagtctagtgtatcagtagcttggatatacaggggatcttcccaatcacctagt

SEQ ID NO: 161811 - DNA, 394 bp, Glycine max
  unsure (1)..(394): unsure at all n locations
agcttgaagggtctaacgctgagaccatatttgttttccatggttaatatttaaggccatcattgaataatcttgaatngaaaaaaaagcttccacttgagggggaattaccatgtggagtagactcacttaagagaaagattgttgaagtacaagtgtgaagatgaagtcccacattgtgtacaaatgggaaagttgagaaacatataagtgagcatgacccacaaacctaatgccttaatatttgtggttgaagtgtagtgtcaagttcacttatgtggtgtgtttgtggcccatttcgtcaaagccatagttcttaggttctagtgcattgcataagagtttgtcgaaaatgttagaagggagtgaagtagtggttggttttttttcgtat

SEQ ID NO: 161812 - DNA, 403 bp, Glycine max
  unsure (1)..(403): unsure at all n locations
gctacagattgnngaaaagaagaatacaatgtagattaattccattacatattgctctttntaatgtttctattgttctcttttgtgaatntatgctntccaatgtccatggctagctaaacccctgagttagggttacctatctatgaatcctaattctcttatttcaataaaagtcccattatttctcaattatattattgtgttgtgtatatctctatttgggatngatcaccctanaacctgaattgattaattgttatgatcgacanacttaaattaatcgacctatgaaataattggattcctaggatntgcatgaactaacttatccccaagttactaatcttatagtaagtgtaataatctctggctanacttctttaattaatcctatgaacat

SEQ ID NO: 161813 - DNA, 359 bp, Glycine max
  unsure (1)..(359): unsure at all n locations
gagggagagaagttgaactttgaaagtgttctcacaagtttctcattcatcaaaggtatgaacagtgttacacatgtttctatttatagcctaagtcactaactaaatgaaagcttccttgagaaacttccttgagaagctagagcttagttacacacacccttctaatagctaagctcacctccttgagaagcttccttgagaagctagggcttagctacacacacccctctaatagttaagctcacctncttgagatgagaagctaaagcttagctacacacacccctctaatagctaagctcacccccatgccaaaatacatgaaaatacaaaaaagtctctactacagagactac

SEQ ID NO: 161814 - DNA, 397 bp, Glycine max
  unsure (1)..(397): unsure at all n locations
tctcctcatgtcgattcaatctcatcaattccatatcatgttcctataactntccagacagagtagcaagagacatgttagaaagatctcttgattcagtaatgggtgctaccttaggttgccattccatgcttaagcaactcanaactntattgataagaatcttcatttggaaatattttcctaaggatgcaagatgattaattatgtgtgtgaatctcttttgcatgtcctgtatggtttcattangattcattctaaataattcatattcatgagttaaagtatgtgtcctagacctttntcacatctgtggtccttcatgggttacctataaggtatcccacatatcttttgcattttgcacattgacaccccanagtatcatccattcctg

SEQ ID NO: 161815 - DNA, 435 bp, Glycine max
  unsure (1)..(435): unsure at all n locations
agcttgtaggttaatggggaaccaataacttttgttactaggtggcagccggccgatggtgcacaaacaagttttccacatccacaaagcgcgcataaacccacccatccctggttgccaccctcaactgagcttacgtacctccacgtaacccataaccttcgttctctcaacaccgggtccccatcaatcctccaagcttccccaacatcaaagtaaatcaacattcaaacagcacaaattaccacagccaagaaaacagggcaaaggcagaatactctgcccaaaacaccaaccaaaatcacagcttttctcacttaaagaccccagtaacaattccttcgatccaattcgttaaccggtggatcgactncaaaattntactggaagtctatagtacataagcctacattntgaccgtggggatctactagt

SEQ ID NO: 161816 - DNA, 320 bp, Glycine max
  unsure (1)..(320): unsure at all n locations
acacgctgcgtgcctttaaacactgtcatgcatataacctaaatgtcatgtatgcctcttgtgtatgattatntgaggatattgccatgctgtgtaaatncntctggtgcgcttttgcgcttctgcatcatggcgtcacacatgcgttgtatgtgggtctcgtcttttgtcatgggaagtcggaagatccatatcgtctntntaactgcacacatanggcactgcgccctcaatgcgcaagtaaggagagatgatcnttcgggctctcgtgttcataaatgcattcatatcatgcattgcataaacatctcttcagcatc

SEQ ID NO: 161817 - DNA, 346 bp, Glycine max
acaatcacacatgaaacccaccatccccagttgcccacccttaactgagctcacgtactcctaccgagcctttatcctcattcctctcaacaccggggccccatcaatctctccaagcctccacaacatccaagagattaaacatccaaatatcatgaactatccaaaaacaagaaaacagggcagaggtagaaaactctgcccaaaacacaaccaataccacaacttttcttactcaaatacctcagtaacattatcttcgttccaatttattcaccgttggatcgactcgaaacttttactggaggtccctaggacataaatctacatgttgaccggtgggatc

SEQ ID NO: 161818 - DNA, 418 bp, Glycine max
  unsure (1)..(418): unsure at all n locations
agcttcgagaatttcccanactccctctctatttctgatttcaggcttaaatagggggccttgttggtgcttgcgcgcttagcgcaactctggaccgcttagcgtgcattagtgaattttggcttagcatgcgtcttctcactcagtgggtggactcaagcagtgcgcttagcgggatgatccatcactcagtgaacatgcacaactcatccttcttccagattcttcctcacgctcaaccaaaggagtggtgcgctcaacagatggcttgctaagacaacagattggcttagcaagcggatgaaaatcagcacttcagaaacttgcctaattaacctaaaattaagggaaaatgattattaaatacacaaaatgggagtactaagtatttattaagctatcttaacaaaagtaatta

SEQ ID NO: 161819 - DNA, 145 bp, Glycine max
accactgtcagcatcaatcatacttctctccatgttactgagaacttcataacaatattggagaaaaactgctcatatatctggtggaaggacaactgacacataatttttatatctctccaatatcatatacgctctctcactg

SEQ ID NO: 161820 - DNA, 355 bp, Glycine max
tgttatattggaggggaagatgcaaataaaggggaatgcacaataagtcatacatttaaggggaataaaaagaagcaaaaagggtcatgagaatgttagtgatcatcgtttgatggtttggaagcaacaaaaaaattgcccgcaaaaattctatgattgataccaaagttgaaaaggatgtttatgtcttcaaaggcagctaactgttagacactatacgatccatcactggacgacccaaacatcttttacagttttgatgaaaaaaagatataatttgtgttaccaccttgtgcatgtagtcaacaggttgatgactggaacacaccaatgagattatcattatgataccttg

SEQ ID NO: 161821 - DNA, 344 bp, Glycine max
  unsure (1)..(344): unsure at all n locations
tgcagcttacatatatttactatgtttattaaaggcaattacaatccacttaaatttagtaatgatacactaacctagggaattaaaagaacttaatggctgagtgtaactgaaacttggacaactaaaagtcaccccaaagctaatgccctagctaccaattgggcccttattacaacttgaactataccaaactaaagcccctttagttgattaacccaaaacatatttttgttcagccaactttacatggatggcgccattatttatataaactanacactctnaaattgagacgaagtggcgccatttagtcctcctccatttgggcatgatacaactac

SEQ ID NO: 161822 - DNA, 298 bp, Glycine max
ttgggcaagattggatgagaggaagtgtgattttcgaaatctgcacttatgcagaattttgcttgtcaaatgggtgcagcaaaattttggctttgtgcagaaaaacgcttgtgtgtggttggctgtgggaagagtaatacagaatgagttctggatgtttgctagtagatcccaacggtcacaatgtaggcttaagtactagagacttccagtaaaattttcgagtcgatccaacggttgatgaaccggaacgagggaattgttactggggtctttaagtgagaaaagctgtgatttg

SEQ ID NO: 161823 - DNA, 60 bp, Glycine max
tcatacatgtcattcttctaacacatctctatctctactatagaatgcgactaagatgcg

SEQ ID NO: 161824 - DNA, 155 bp, Glycine max
  unsure (1)..(155): unsure at all n locations
accttcctatcatttgctcttttatactattaaaatcccctacaagacaccaactttntataccactacttgcccttntcaactntaactcctnccaccctcttaacctactacctctctcacaagaagaatacatattaacgattgtgacttca

SEQ ID NO: 161825 - DNA, 371 bp, Glycine max
  unsure (1)..(371): unsure at all n locations
agctntgaattagtgtctgggttgaggataaattttgctaaaagtaaattcagggcaattagcaagtcacatcagcggattcaaaatgcggcaaattaccttaagtgcagagtattggccattcccttcttgtatttgggtatccctattgaggcaaacccaaagcgtagtgtgatatgagaccctatagttgagagatttgagagaaaactatcaaagtggaaccaaagacatctatcttttgggggaaggatcactcttataaagtcagctttaaattcaatccctgttttttctttctttcttttttcagggtcccaaagaacgtggccatcaaattggtgaggctgcaacgatggttcttatgggat

SEQ ID NO: 161826 - DNA, 69 bp, Glycine max
agcttaaggatggaatacttacttgttggtgatgaacaaaaacgcaaaatggaatcaaaaaatgcgaaa

SEQ ID NO: 161827 - DNA, 401 bp, Glycine max
  unsure (1)..(401): unsure at all n locations
gctccttcaactgcacaaggctcttaatatttgaagagtatccttgtggaaccttcacccgatgaagacactgacaaaaaattatcttctacttcttggacaaagtatggcaggctgggggcaagtaaattttcttcccatcagaccttggatgcaattgtgatcgtatacccatatcagctagatcttgacaggtattcaagccatccttcgtcttgccttgaatgttaaggagcgtcccaatcacactttcacaaacatttttctccacatgcataacatcaatacaatttctaacgtcaagatcacaccagtacggaagatcaaagaaaatggatctcttcttccatatgcaactctgacttttatccttctttngggtcttcccaaatacaatattc

SEQ ID NO: 161828 - DNA, 192 bp, Glycine max
  unsure (1)..(192): unsure at all n locations
tgctgaccaccatagagacctttgttcttccatgcatcaacctggagcgattgagcaacctgaagcttatgctgcanatatatacaatagacctactcaacctcagcagcacaatcaaccacagcagantaattatgacctctccagcaacagatacaaccatggatggatgaatcaccctagcctcacatg

SEQ ID NO: 161829 - DNA, 252 bp, Glycine max
atgaatttcaagaaatttccaaatgtcctaagtgtggggtatcacagtacaaagtgaaggatgatgacgagtgtagtagtgacgaaaactcaaagaagggccacccaacgaaggtgttgtggtatcttcccatcattccaaggtttaagcgtctgtttgctaatggagatgacgcacaagaccttacatggcatgcaaatgagagaaactgcgatggaatgctctgtcaatggttatctaagtccattgatt

SEQ ID NO: 161830 - DNA, 242 bp, Glycine max
  unsure (1)..(242): unsure at all n locations
tcgacctgactgttcaagattctgtataacatanaagcctacaccttaagatgacttccattaaggaagacaacttcttgatccatgcaattgctatatacttaattaacaaatacgtcaacaatcatatacaaaagttatctaacagatagaagaaaaagaaataccatacttacatatcaagataaacataacattagtgaagaattgtgaacagataaatgatgccatattgaaatgag

SEQ ID NO: 161831 - DNA, 270 bp, Glycine max
  unsure (1)..(270): unsure at all n locations
tagcttgtgtgtgaaagaatacatgttgtcatattaaaccgtggagaatgtgaatgtatgtatacatgattatgatgatgtcttaagaagaatanacaaggctcattattcttcaagaataatacaagattgtttcatcacacaaagtcttgattgaagagttcttcaagatcaagcctcgcctcacaatgagtgctttcaagtcattcaaggcacatgtaatcgattaccaatggtttgaaagtgtgtaatcgattacacatcatatgt

SEQ ID NO: 161832 - DNA, 191 bp, Glycine max
  unsure (1)..(191): unsure at all n locations
cacgtcttgaagacgatataagtttcatctgacattgctttgattcacctgcccgatcctagatgttcctagnattctacagcgttcattctctagacatttttactattttgccttgtattttggctttagttaatttgaacttggctaacttttggctattttgttttcgctgctttttgctttggata

SEQ ID NO: 161833 - DNA, 400 bp, Glycine max
  unsure (1)..(400): unsure at all n locations
gtgcctagctccttataatatatgtataatgtataacttcgttattatngcattgtcaacattgcattntctgtcatcatactngattatgaatttttcttcatccttttcttttggctatantaactttagcanctttcttatttgggtagactaaatggtgttttgcattgaaggtttgctaactctttaannagtgttctgacagatatgtattgaaaccanaatatcctcacgattcatttatcagcatgctaaaagggtagtgctttaatatcaacatacctacatatcctngtctttgcttttgctntctcatcttgantccagaaccaatgttcatatcangctagcatgagatcactaatacaaaccatatttagaaaactatacatgcata

SEQ ID NO: 161834 - DNA, 99 bp, Glycine max
taggccttgaactcgctgcctgttatactatgtctgttggctgagatcattggcaatgggaggaagggttcaaattgctttgcagatttgtgcaatagg

SEQ ID NO: 161835 - DNA, 431 bp, Glycine max
  unsure (1)..(431): unsure at all n locations
ggatccttaagcgacctgcggctgcagctaacgtgtanactttgatacttttcgaaaattntttatgcaantttgtttgtttgaataggtctttataatttaacagagtttagtactcatccttaataagtagtgactttaaaaaaaattctaaacttcaaacttattggaaactaagtaaaatgatagaaaattacaacaaattgtaatatatatatatatatatatatatatatatatatatatatatatatatatatattaagatttaatcttaaaaatattatataaacatatttccacttctgtcacttacatctatcagctaattcaatatataattcatgaagatgagtgctaacaatattctccaacattctctttgacatacattttattattgagtgaattgggtgaaaattataaaatta

SEQ ID NO: 161836 - DNA, 639 bp, Glycine max
  unsure (1)..(639): unsure at all n locations
gatgancccgctgnanggctcttatgactccatttgaangngcactatagantactcaagcctatacantnctgagaagcgctaganactctctagcatatctcttacacacattttggtaattgctaaaatgtatagcacaatattagatcttatctatgacttatcacatccttatcattattagtcaatttaaccaataacaatgtatgtatacttaagagagtatgtgctcctaatatctntcttctctctacacatattatagactacttatttatctccactaaagacactgtgtggatctctcacggatgtcaattgcanattgcattgaatatagacaattgacttgcatcttaccttataggtggtcgatactatataacgactnttctttgttcttgcctatattgnngaccatangagcagcacaactctggcaggaatgtacaatgttctacactcttctggcattgaactaatccttcttgtcatactactgatgcacagacatcaatagcataatctttgtacgtactctcagaatgtacttcangctcagcncatgacatgatatattgaantcgcgcatgatttaaacataacaagtctacactgctaatacactctctgagg

SEQ ID NO: 161837 - DNA, 358 bp, Glycine max
agcttaaggatggaatacatacttgttgtgttatgaataaaagtgcaaaacggaatcgaaaaatgcgaaaaatagtgaccctagggctgcaaactcgtaaattccgtgggtattgcttttgaatggggggaaaagaagtttttgactgcaaaaacgtcccccttcttcattttttatattttggtgcaggggctgctcgcccaggcgagctaacctgcactttttttttttaaaaaaaaaggtcggttgatttcagaggcgactgtacaagggaatggctcgcgtgaggggaccaaagcttttgatgctccgccagccactccgtaaggtactgatccgaaactccccaggatagatt

SEQ ID NO: 161838 - DNA, 541 bp, Glycine max
  unsure (1)..(541): unsure at all n locations
ctccgagggcatggcatgtncagtttcctganatatctanaatctcgtctatgacgatcttttctttcttgaagagtccacagggtattgtancttcacaccttcatccacagacttgtcactcctactattctttgcagtcttatgacttttcgtcctccttatcattctntcactaactatgtctttntctttatctagcgccttcaattctatattctagaccatnttctgacctctcttgtcttgattactatnggatgacttggcaactatctgctcggccagntgtgccacctggacctcaaagttcttcagtgctgactcagtgcttttgcgatctgacatgtaccttcatatactgagtcaaggctccaccagctagtagtttctggatatgtaggtcgtcgtgattgcctgttgacgccacttgtcttgtgactgatgcaggcgtgctcctgacttgtataatgacctgtgaacctggatctctgagatacttgcctgtgatccataatgatctgaggttctancgacactg

SEQ ID NO: 161839 - DNA, 589 bp, Glycine max
  unsure (1)..(589): unsure at all n locations
tgaccctttaggccttatgctcgctgtagccctataatctagctcacgagtaaatcngaccggttggactggatacaaagactctggcccgtggattaatttatatcatcaacaatttggcagatatgaaacagatgcctccgattatagatgaattcatgcaaacggtgtataccaagagagctaatgcttcatttattgcttaataccaaaggactgaacccaatgcctcaacgattcagaccatctcctcattgctgntctacaaatcgtggtaagctgctaccaacagattgagagaactatgtatctattatagatgaacgtcgatctgcttcatagtcngaagacacttatacacnagcgtgcattgctatgaagtgtaacgaagcangatggaacaaagtatgctgatattcacgcgatttgaagagctacgatcagttcatggactnttctctacatgctanganggtgngtctgcaacaatgatactttgatganagctgctatatctgcaccgtgtngnngttagtactgaagtgtccacacanaaggtgtttccacaaaggctatacaacgtgaccnn

SEQ ID NO: 161840 - DNA, 247 bp, Glycine max
ttgaaaactacccgatgacatttctaaaggataaggctctttcctacagggcaaataactactaaaaacactaccaaaaaatgataactgaatccaaagataattatatctgatgttccaaatgataagtttttgtgaatatacaatgaaatgaaatgaacctgaagcatgagctcctcctttgatgtgaagggagaccaatcaagaattgttttcaagttggctgacctttcatgctgtgagctat

SEQ ID NO: 161841 - DNA, 462 bp, Glycine max
  unsure (1)..(462): unsure at all n locations
gtgcaccttttngctntttgtcccttgagtcacttgatctagctgccagtgtaccttgctgctgatcatatgagataaagtcgtaccaacaaatgaactaattgtattaattgaatatgagatacttaaacgttattgcctataatgtgcaaactgattcatgcggcaacacgtaattgacttaagacatgtcagctatgtcatgtgaattctactctggaatcatgaattcttgggctacatatacatgacttaatgtagcgaaatgaaacaatggaagaatctatgatgtctgttgctgaatagatgaggacatgtgcgaaatatatgtacacaacgggtgtgcaaattggggaaaactcttactagtttactttgcgttaagtacatgagacgagctttgtgtgacaatagtttgatatgcatgcatgtttacactgcactttatgataatcaattccn

SEQ ID NO: 161842 - DNA, 187 bp, Glycine max
gcttttatcgttgaccacagagtggtacctaaagatatgtcgcggcggtcaagaaaccttgtgggacgtcaggtggggtgctattgccccaaaccaagcttgaccaatcccgacccaacccgggcatagtcggtcagtgagaacctgtgatgtacctaaacatgcgagctcctggcagtcaacagat

SEQ ID NO: 161843 - DNA, 396 bp, Glycine max
  unsure (1)..(396): unsure at all n locations
agcttgctctanatttacattgatctttgtatttatgggaggagggttatatgccattttgctttaagagtagtgtcccactggtaaaattaactttctaaatggttggccttcgcaggattggccccgaggaagcttgcctcanagaggtccaggaaggacaaggcggccgaaggaactagttccgctccggagtacgacagtcaccgctttaggagcgctgtacaccagcagcgcttcgaagccatcaagggatggtcgtttctccgggagcgacgcgtccagctcagggacgacgagtatactgattttcaggaggaaatagggcgccggcggtgggcaccactgggtactcctatggccaagtttgatccaaaaatagtccttgagtttatg

SEQ ID NO: 161844 - DNA, 368 bp, Glycine max
agcttgaagaaagagtcatagatgcttttattaaatctataatttatagtttggaattgcagtaggtattattgaactcatcacctcacgaacgaattctattaattattttaatacgggtaattctttggacataaaacataataacttgcatttgaaggatcaaatcagtataaagtaaaataaaggaggtaaataaggagaaattgtttatctttgaaggacataatgagaaattgttaagaaaataatcaaatactactgcccagttagatactttgacttggtgcccaacagcaattagagtgcatcgacaatttctattttgacttagtgtgcatgtgcaacagcaattatagctttcaacg

SEQ ID NO: 161845 - DNA, 207 bp, Glycine max
agcttcgatcttaaatttcgagcttcacgatatattacgcgactcactcggacttacgagtgacaagttatttatcgtagaattcgctactatcttctattgtaaatatccagcgtattgatatattacgggactccatcggacttccgagtgaaatgttattgtcgtgcaaaattgctaccagcttcggtatttaatctctagcga

SEQ ID NO: 161846 - DNA, 457 bp, Glycine max
  unsure (1)..(457): unsure at all n locations
tactcaagcttcgttnccagagcatctcttatttaaagcattcagcgttgtcttcgtgttgcttacgaaaaacgccatttcttctcctttctttcttacaagccacttctaacatcccaagcactttctccatcacccacaaccaccattagccaccaccaactatcgttgttctccattgaaaccccacaccgagaggaaccctctcaccgaagcggaatcttctaactcggcttgcgatttcggtagagaacgaaaccctaatctgacctctcgttttttttcgaggtaaacataagtctatgctcgtttcttgttagattcatcttggctttgcatcttttctgactttggaaccgccattgtatgtcttatgctttctttganaaaccttagagaaagagactttgctagtgtatcctttcatgaaatgcatgttattttacgtacctacact

SEQ ID NO: 161847 - DNA, 279 bp, Glycine max
  unsure (1)..(279): unsure at all n locations
cgctgcatgctntctactttgagtagattgagatgaattcatcgctatctcatggactcctctaaggacaatagcattatttcttgcactgaatagatgggagctggaagtcatcattctaatcaaatgcctagcctcagtaggggtcatatcaacaagagcatccccattggcagcatcaaacatactagtctccatgttgctaagtccctcatagaaaattaaagatggagatgcttaaaaatatggtggngaggacaacttgcacacaatttcttg

SEQ ID NO: 161848 - DNA, 470 bp, Glycine max
  unsure (1)..(470): unsure at all n locations
tgctggtacatacgacatcctcacggatcagtaccaagtccttgctctcttgcaattctgtgtaaaaggacacaatatagtaaggagccgcttgtgttcccctggccttgtaatcttcaagacctgtagaaaccatgtgtggcgtctggactgcaagaaaaaaacgaatacgtattgtgagactacgatggaagtgttgaaaaagaaaacactcggaataaataaatcattctttacatgtctttttaataatatttcacgttctgtaagtagaaaatttgttaagaggaagcatgtccataactatgtgcagggagagattagaattcgatttcttgataggtaaggtatatccaaagggtgtcaacagtagtttatatgaatctagaaactgtccaggacctagtggcaaatattaacatctttntatatatgtaactaanactgcatctctttctccaggctcggga

SEQ ID NO: 161849 - DNA, 391 bp, Glycine max
attttagtaatgacccactaacctagagaaaaataaataaatgccattaacctagggaattaatactaactaaatggctgagtgtaactgaaatcgttggcaaccaaaagtcacccccaacagcctacaagtcagtcaccatttggtctcccaaaaggctgatgcctacgttgccaattgggcccttattacaacttgaactaaagccctcttagttgattaacccaaaacatatttttggtcacccaactttacaaggattgggccattatttagacaaactaaacactctaaaattgaaataaagtggtgtcatttagtcctccatttgcgccatgatacaactcaaaccttggactttctccttgaacttggcttgattcaaatatat

SEQ ID NO: 161850 - DNA, 437 bp, Glycine max
  unsure (1)..(437): unsure at all n locations
acgagcgtctcgatatactacgggacataatcggacatccgggtaaaaagttattgttatttgaatttgctcataggttctgttttcaattacgatcgcctcaatatattatgggattcattcggacatccgagtaaaaatttattgccatttgaatttgctacgagcttccgatntcaattacgagcgtcttgatatacaacgaaaaacaatccgacatccgagtaaaaagttattgtcgttagaatatgcttagagcttctgttttcaattacgagcgtctcgatatattacgggactcaatccgacatccgagtaaaaagttattgtcatttgaatttgctcatagcttctgtnttcaattacgatcgcctcgatatatcatgggattcattcggacatccgagttaaaatttattgcctgttgagtttgctac

SEQ ID NO: 161851 - DNA, 451 bp, Glycine max
agctatgaccgattctcaacatcatgaaaattatgcagtgcatgtgagctgatgtagaatatactttgatattgatggtgtttagctgtacataaaaatataatgtatggactagttaatttaagcacattacaccctttattgactccgtggtactcgcgagaatacacaagtatcacattccttgagagttgagaccgctgactcaaagccagttgtaactgtgaggccaagaaacttttgagcaaatcctgtaggtgaaaagataaagaaagatggtttgtgtacaatattatgcgaacacaaaggattctgtactataaagatggttgaaaagatgaatacatatgtgatatgtctatgttgcgagccttctctatatgctatcttctatgctatacaacccgaataattaatgatggaataaaacagattaatgtactgttaatga

SEQ ID NO: 161852 - DNA, 444 bp, Glycine max
  unsure (1)..(444): unsure at all n locations
gagaatcaagtcgtccaagcattgatgctgaacacttccacatatctcgctttccaaataaaccagtagacaatggaaaaacgcactccttcgttggatgttggtttattttgaaggaaaatacttctcatatttccattatctctttcatccaacttttacctttttttttttcatttatctatttctttatttgttatcacatcttctctacctttttttccctcatatatcccatcgatttttttttctctctaccttctttttcttccttaccttgnaatctctatttatttctttctaatccacccaaaatgagatatatgaatatgatcataactctaattcaaattggacattgcaaactcaaatataattaaactcgactattgcttaaccctaccattatagagtcgntaactttgtacgttacatttntatgac

SEQ ID NO: 161853 - DNA, 382 bp, Glycine max
  unsure (1)..(382): unsure at all n locations
agcttggagcttggagttgcttgctttgaggaagactaatatagctggtattttccaatgtatgggatttttatttatgtttatgtatctctttaaggttttgtaagacacacaagtgtcaaaagctttgtatttgtttgcttatgtaatataagtttatattttaattttggtgtagttaaattatgatgtacttatatactaagttttataatttagtaagataatgaaaccacattcaaatctccaactcatcacacgtgagttccacatcaagtataaaaatgatctaattgagctctttttgngagaaaaaaaacacaaaccatataggtatcactttaaagctttagtctcagtatcagtaccaaaattaagttag

SEQ ID NO: 161854 - DNA, 156 bp, Glycine max
  unsure (1)..(156): unsure at all n locations
tgtttcctgcataattgggtattttgtgtcattntactctcaattntgagtccaatttgggagaataagagacctgagantttagtttagaaaatcagatgacattgttgatgatgatttgtgatcatatttgaaattgcagttacaagaaaatta

SEQ ID NO: 161855 - DNA, 346 bp, Glycine max
agcgttatgatgaatcaacaatgattcagaggtgttttgatgataacaatgatgacaacaaaagatgatgaacaaaaagctcaagtgaatcaaagaacatccatctcaagatcaagattcaagactcatgaagaaagcctacaaacaagaatcaagattcaagatctcaagaatcaagatcaagattcaagacttaagagattcaagatctcaagatcaagattcaagactcaggattcaagaatgaagagaaaactcaatcaagataagtattaaaaaggttttcaaaactttgaatagcacattagtttttgacaaaacctttaccacagaggttttactctct

SEQ ID NO: 161856 - DNA, 436 bp, Glycine max
  unsure (1)..(436): unsure at all n locations
tgcagcaaattctaacgacagataactttcactcggaagttcgattgagtcccgtaatatatcgacacgctcgaaatttaaaaccgaagctcatagcaaattcgaacgacaataacttttcattcggaagtctgattgagtcccataacatatcgagacgctcaaaatagaaaacagaagctcgttgcaaattcgaacgacaataacgttttactcggatgtccgattgagccccgtaatatatagagacgctcgaaatttanaaccgaagctcgcagcanattctaacgacaataacttttcactcggaagtccgattgagtcctgtaatatatcgagacgctcgaaatttaaaaccgaggctcgtagcaaatacgaacgacaataacttttaactcggaagtacgaatgagtcccgttacatattgagacgctc

SEQ ID NO: 161857 - DNA, 299 bp, Glycine max
aacatccaggtaattccacattcaatcatcatggactatttataccaagcatcactggggacaggcacaatactctgtgcaaaacacaactgagaatcgcagcttttcatatacaactaccccataaacattttcttggttccaattccataaccgttggatcaactcgaaaattgtactggaattctctagtacataagtccacattttgaccgtagggatctgctagcaaatgtccagaacccgatatgcactacccttttcacaattagccatacacaagcatgtttctgcactta

SEQ ID NO: 161858 - DNA, 346 bp, Glycine max
agcttagctcaaccttggctagcttagcggaccaaatcatccttagatgcaagggttgggcgcttagcgcttaagactcgtagcttatcgcatgaatagaactgcgcttagcgcgaggcttgcgcttatcgaaaggacttattttttcaaaaaatattttctaagttatttttcagtcctttttccatgaaattgaaacccttatgttaagcattcaaaaattggctgatatactcctatgtacagattacatagcaagttccaaatgatcaaatgcatgagaaaccaaaaataacacacattgaaactatgttgcctcccacggagtgcttctttaacgtcatta

SEQ ID NO: 161859 - DNA, 357 bp, Glycine max
  unsure (1)..(357): unsure at all n locations
agctntataaaacagatatacatattccctttttctattctttttaaaaaaatgaaaggctatatatagagagctagcgggtgctatacgagtccaacccagctttaaaatcaaagtacattaataccttctatctatctatttccccaacaaaatttcaatgtgtctatatatgcaattatacattcagcaatgatattgagttacaaagcatatacaaaaggatacaaagatgtcattgaagctgtgactctcacgtgaaacaaagtatagagaggtttccttgtttaattttttatcgaatgaaatggctgctgtgaacgaacggctaaatggttatttggaggccatattgga

SEQ ID NO: 161860 - DNA, 445 bp, Glycine max
  unsure (1)..(445): unsure at all n locations
taatgccgacttaatccttggagatgctctaatgtccgactttcttgtttgaacatggattgcacaacgcttcttgaagcctgagtatagaagacgttctggttctccaatttagtcattggcgcagtanaggaaatgtgattaacgattgtcacgtgtctattttgggtctgtaaaaaagttggatatccncaaacgtgcatcgtatgtgtactaagtaatgtgctatagaaataacgtgccacagaagtactcacattatgtttaacgtatctcaattaatggaggagtaaaataggaatcattctacacacgtttacggatgctatcanagttttttttttatatatattttcaggaacctgaatgacactgaattatcatttgacgtgtcagagagactatttattctaacattaatattaatgttacactctctactatc

SEQ ID NO: 161861 - DNA, 420 bp, Glycine max
  unsure (1)..(420): unsure at all n locations
agcttcttaagcaagtntccaccagattcttacctcaatacatcattgcactaaaaaaagaaagtagcattgtgtatttatcgctatatctttcgtaaaagttttaaaatttttggtctatgtatatactatttatttgttctaacaagttagtatttggagcccaaaaaattatagtaccatttagtgatcttagaggtcaagaaaggaaattagcataatataattcaagcaacataatttgagggaaaaaaggttgagaaaataagtgaagcaagaattagcaatagataagttgcaaccttggatactaggtntggtatgaattgggcacaatagtatgaatcattatatatattcattggtcactttgctaagggtcatgaatttctttctatacccaacataatttcttctaca

SEQ ID NO: 161862 - DNA, 468 bp, Glycine max
  unsure (1)..(468): unsure at all n locations
cgtgtgtatgcactggtcgttcattgcccanaaaaagtatatatgagaccctacatgatctcatttttcttatagtatctttcttaaagagaggttaatttattttttcttaaaagtacttccatattaatatcacacatgtatctataattacttatctagttatcatcttatgacacaaatccaatgtttaatgtaaaatactgaagaacacaaagggaaggtgatgagttgaggctgaggtcccctctccaactaaagtgatgaggtattttaccacagaaaatctcacctgtcgatcaccagtcctaattcttttgattattnggaaaaatggtagggtcatgggagaggggtaccacaggtttcactttcacgtgaattggtgttccaaaatgcaattcagtgttgaagggataaaaaactgaatattaataactaaataatggtgaaaacaacaaaattagc

SEQ ID NO: 161863 - DNA, 434 bp, Glycine max
gcaagcttacagaaattaaagtcttattaagtttagtatgaccactctaaccatccaacgatagacactgtcataccaattaagtaagcgcgtagggcaatagtgaatgaataaagacatacgaaacttcatagaaattaaaactctctttaagtttcgaagagatagtatggtcatagttaaaaaaaagaagaagatatgaagcttcacagaaacgctataagcttaagcctgtataagttagcttggttgattagaatggagacccaacactcctccatctacaatcatacaaacctttattctaagttctgatggctgtgcgatcattctcctacgatgtgttcctcagcttccgaggggaagatactcgttatggtttcactggctatctctacaatgtcctccgggaaagggaaattgacaccttcatt

SEQ ID NO: 161864 - DNA, 222 bp, Glycine max
tgtcagaatctggcatatatatatcaacatgaccctttttaattaaataaatatattatatttaataaaaagcccttagttgtctctgcttaattatttcctttatattgtaatctatctccaaaaaagcccttttaattcctaaatcatatccttcactgaactgctctaacatcaatgagtaaacaatcctcgatcactgcttgccctctttctactttt

SEQ ID NO: 161865 - DNA, 318 bp, Glycine max
  unsure (1)..(318): unsure at all n locations
agcttcacaacatccaggtaattccacattcaatcatcatggactaacaaaaccaagcaaaacagggcaaaggcagaaaactctgcccaaaacacaactcagaatcacagcttttcacatacaaataccccagtaacatttccttcgttccaattcgttaaccgttggatcaactcgaaaattgtactggaattctctagtacataagtctacattttgaccggtgggatctgctagcaaatgtccagaaccccatatgtactacccttttcacaattagccatacacaagcatttttctgcacttatacanaattct

SEQ ID NO: 161866 - DNA, 445 bp, Glycine max
  unsure (1)..(445): unsure at all n locations
gagctcacacaacatccagtgaagtacacattctatcatcatggactaacaaaaccgagcataacagggcaaaggcagaaaactctgcccaaaacacaactcagaatcacagcttttcacatacaaataccccagtaacatttccttcgttccaattcgttaaccgttggatcaactcgaaaatgggactggaactctctagtacataagtctacatttagaccgatgggatctgctagcaaatgtgcagaaccccatatgactaccctttgcacaattagccatacaccaagcattttctgcacttatacaaaattctgctgcacatttccaacaacanaattctgcataaagtgcagatttcgaagaccactctgtccctcatccaaatttgcccaaattgaatcctacaagtcccaaatcatgtatgaatcatgtctaaacc

SEQ ID NO: 161867 - DNA, 457 bp, Glycine max
  unsure (1)..(457): unsure at all n locations
ctaagcttctanaagacttgtgtaatcgattaagaatagatggtaatcaattaaaacaaagagttatgcactgaagatgtttcttaacttagaaactatcttcctacttctatatggtgatgcatgatgtacacatagatagattaagactaaaaggcaacaatcaatacaaatgtcactcagtaaggagttgggcatgtaaaaagacaaaactcttcatagcttgatcttcatgttgctccccttatctctaacaatctcctcattttcaactttgaagatgccaaactctaatttccattgagtgcatttggagaggcttgagagtagagacttatcttatgatagacctgaaaatgactaaacactatggtgaagagaagtgttaaatcatatcatcatcataatagagtggtcaaataaatgagtcaaactgtatgtataaatgcaatacttc

SEQ ID NO: 161868 - DNA, 402 bp, Glycine max
  unsure (1)..(402): unsure at all n locations
agctcggcctcaacttctgatgtaaccatgtctcttccattcgcatggaactctctatatgacatgctcccatcctcactggactccatcaatcatctccctccaacctgcacacacacacaccccataaccaccctttccacatatgttccaatttttttttgtaaccctttcatgcttcgatgccattgcacactcgtaattcacatttcagaanaggctaaacaaaaactcatacacacatgttcaaaatcttcagaatcacaaagaagaacacagttccccatttcacacggcattgctcaaaactgatcctagcaatgccttatggcttataggattcaactccctgcaaaaactcgttntggtgaaatggggttccatgataacagaaaaatcatc

SEQ ID NO: 161869 - DNA, 433 bp, Glycine max
  unsure (1)..(433): unsure at all n locations
tcggttagagaaaatctacaacctcaagagtaccccgtggcattcaacactcggtgaaacttgaaaatctcactctctggggtgtgccaactgaagttaagcagagcattgatcccaatggaggacaagagcattggatgatccaacatgtgcctagcgttgctattgctgattcgtttatggtccagagattagaagaatttctagaggaggaaaggatgaagatattangaattagaagatatgttctttcctcttggtaatatttctatagattgataattttgtcccttattcttttttcaattataaaaatgaaactgtttcctaattactaatctgatttctttacttttgtctcccttccattacttttctttgtctacatatctcccgtgtctcatagaagttagagataaaatngtcttatagc

SEQ ID NO: 161870 - DNA, 400 bp, Glycine max
  unsure (1)..(400): unsure at all n locations
agcttgaagganaacttaatgccttggtcaacctagtaacccagcttgccatgaataagaaatctacgcttgttgcaagagtctgtggtctatgttcttctgcagatcaccatacaaatctgggtccttctttgtagcaatctggagtcaatgagcaacctgaagcttatgctgcaaacatttataatagacctcctcagtagcaaaaccaataacaacagaataattatgacctttcaagtaatagatacaatccaggttggaggaatcatccaaatctgagatggacaagtcctccacaaaaacaacagtctgtccctcattntcagaatgctgctggtccaagcaagccatatgttcctcctcaatacagcaataggaaccacaacagtcaccacaa

SEQ ID NO: 161871 - DNA, 480 bp, Glycine max
  unsure (1)..(480): unsure at all n locations
gcttctaaggcacttttctcaagaaagcttctcaaggaagctacctagtctataaatagaagcatgtgtaacacttgttgtaactttgatgaatgagagtcttgtgagacacaactcanagttcaacttctctccctttttcttccttcaatttcgtgctcccccctctctctttctctccctctttcttttcctccattgaagcaccctctccaagcttcttatccaaggctcatcttggtggtgaagctccttcttccatggcttattccctagtggatggcgcctcctctcaccttttctcctttgtcttccgctgcatctccatggtggaaaatcaccattaaaggacctcattgaagctcanagatccagcctccatagaagccccacaagcaagcttccatcacgggcggcccccatgatgtgcaaattcaaaacgagcacgctttcccgccatatggctggcctctcaactat

SEQ ID NO: 161872 - DNA, 428 bp, Glycine max
  unsure (1)..(428): unsure at all n locations
agcttgctcactagcttttcactttcatttgcttttgaccttgttacatcaacacactttattcttttattttcttttttttaacatacaacttgtgtgttgtgtgtgttgatgctttctctctttctttgcatcccaattagttccactcccccaaatttggggtaaatttgctttgaactatatgctctcctagaatctaaacaaggtatcaggagataattatttaagttcagggttcaatttatgacaaaatcattcagctcaaaaagggtgcaaaggatataattatcattcaaggtaagctttttggtcaaaaggcttgtgtatgtacaatcatggccttcatcatgttctcgtttatacatttcattctaaaaattagagaatcatgcanagattattactcacagctagtcgttcactca

SEQ ID NO: 161873 - DNA, 462 bp, Glycine max
  unsure (1)..(462): unsure at all n locations
gtagcttcaatgcaacgaaacatgcttatggctaggaatccaaaatttggttttaggattagaaaagcatgaaaatagggatttgtttgtaagaatttgggctgccccatgattggtacttcgcacctaagtaacgtgggaaatgcttttcaatggtgtgtagatatatgtgtaaatataaagggcatgaaattctttgtaaagggtgaaggaatattgaggtcccttcctaaatgaatgtatgataccacgggattcccttttgaatgcaagtatgtgcataatgttaaatatcttgccaatatgcataagtgtgagtgcaacaatgaaagtttgtatggtatatatantttgagtgtgtgtaagtagtttgtgatagcaagtgtttatgacatagttaagtgtaaattttgacgcaatgccttaagcgtgagaatgtgtgttcttttcaaaatgcatata

SEQ ID NO: 161874 - DNA, 454 bp, Glycine max
  unsure (1)..(454): unsure at all n locations
agcttggttcgaggtacttacccgttgaagatcgaagaacgatgaagatcgaatgaagaatgtcgaagaacggtcgaaaaccttcgcgaaattcctcacggaaaacgttacggaaacgtttcggaaccgcctcggcttacattttcttcacggaaacaatttttccaagcaaattcgaaagagagagaagtacctaaggggctgaaccctttttctcttcacttcctcccttatttatagcacaataggggaggtggttgccgtccagctcgcccaggcgagccaggttgcttcctccagaagcaacagccttctggaggaatattctggagggcccaagtgggcctgggtgctatctgcacccccattnttactaagtacacctccctctgcttttttggggattcttttccgaaagtaccgatcatacgactntcatacgatacttgtttct

SEQ ID NO: 161875 - DNA, 438 bp, Glycine max
  unsure (1)..(438): unsure at all n locations
tataaagagacatanaataaaggaacagagggaccgaatgtttgtgggaaagaagggtctggtgctgccttcttttggtatagtcctgcatctagatgtatccactttgatctatgaccatggtccacactctatactactccataataacaaggtcattgcttgcgaaatttgtataagatttttaatttgtaaaaatcagttcctttagaacaagagcatgattaattccgtgtaacaaattgtgttagttagtgggagaaggctntcttgttgttgatgtggttctgatttattatgatgaaataaactgcttctcctgcaccttagctaatgatagtggtaggtttattggctaaacttacgtttgtggtgcatttgagggactntggcgatgtatttgttttcccaaatacaagtataatggaggcatctatg

SEQ ID NO: 161876 - DNA, 174 bp, Glycine max
gatccttagaggcatgtggcgatgctgctttgtgatgtgatgatgttgattaaattgtaatggagcttctgatacgacatgctccaagtcaagatgtattgttttagttgtaatttgagagtgagtgaatatttaggctgtatagggggtttttctatataggaataaattttt

SEQ ID NO: 161877 - DNA, 463 bp, Glycine max
  unsure (1)..(463): unsure at all n locations
tagcacatcaaattatgatttcataaaaataaacgttatgaaataattttaaatttaaaagttaacataatacttataaaaaaaataaaaataatgaaacttttaaaatttagtatcaaagtgaaacaagacaaacataatggatcaaaaataatattaaatctttttatttttttattttttcacctctcactcaataataaaaatataattctattacaaatgaaaaagttatcctanaaatgtcatctcattatatacttttacgacaaaattatatttttatttatattttaattttttcacttctcatttaagcaatataaacatattttcattatatttccatcaaaagaataatttcaggatacgattaanaggcacattatatttccatcanaaagataatttcaggatacgattaanagacacccagatgaatagtgccaatagcaactccccc

SEQ ID NO: 161878 - DNA, 234 bp, Glycine max
actctcatcaatcatctttctccatcctgcgcacacacacggcggataaccaccctttccagatctgttccaattttttatagtcaccctttcatgcttcgatgccatcgcactctcgtaattcgcatttcagagcacgctagcctcaagctcgtgctcacttgtcctacatcttcagattgacatacattaactcacatcgccgtttacacagtattgctcaaagctgatcct

SEQ ID NO: 161879 - DNA, 465 bp, Glycine max
  unsure (1)..(465): unsure at all n locations
cgccaagacaacgcacacgtnctctnntttaggtcctttgactnttgaatatatatcatttgtccaatcagtagaatcttgggtgctttgtaaattttgcgaactctctgcttcaaccattttattttttagttcatcctacataaatacaccttataaattattatcatacatcaatatcctgaatacttcaatatcactaaacaaaactcatctccacattagttactccccctcaccccataaccttctattagaaaattgagcaaaacaaagaanaagtattgaaataaaaattaaaattcttacaattacaatagcagccttttcagtaataatgcttccatcttttcgagttcgagtgtcaatataaatttctgccctagaaggttgcacttccttagcctttgtagtctaacattagttaaaaaaatcaatcatcctatttgtattaagcaatttaat

SEQ ID NO: 161880 - DNA, 413 bp, Glycine max
agcttatgcctctacagcgccaacttcattgttaatcacctaccacaaatcttcaccccagatcttgccccaatcgttcacctcatactcgttccttgtggcaatgccaaactccgtgccaacgccacctttgactgccaggtactctcttctccaatcttatacacactcttcacctatttttatttaattctgatgacaattgcagcatgggccatatgagtgcttgctgaacacagatgacgcctgtgcaattcacatctggcctcaactcgtaagtaacaattgctgtgcctttgcccctgtctttctttctttcttttttctttattctttgattcgggatcagaacttaagaatggcttttctattattataatattatgttattattacggattattcagcatcga

SEQ ID NO: 161881 - DNA, 329 bp, Glycine max
  unsure (1)..(329): unsure at all n locations
tgatncaaatagggaatgagaaaaggtatagtattttttagaagtttaaatatgttgtgnttttgntattgntaaacagattgttgggctgcatgaaagttatactaaaataacattattttgttaattggtttataatgttgactggacagctgaaaaattaaaactgtggagaatgtttaaagttttaatttatatggatgaataggtggattttaatgatatatgaggtatcgattaatgatgtatagattaatcttgtttataagaatgattttaatttgggtttgaatagagtaaagacaagaagaaattttaatattttttga

SEQ ID NO: 161882 - DNA, 401 bp, Glycine max
  unsure (1)..(401): unsure at all n locations
agctttgatttcctttgttccgganacctttcttttctcatgtgcacccaaacccaatctccgggttcgaagacaaccttctttctccctttgttggcttgtttagcatagcttttatttttcctctcaatttgatctttgactctctcatgaagcttcttcacatagtccgcctttgcttgaccttctttatgcttaaaaacagaaacattaggcataggcaaaagatcaagaggagttagtgggttaaaaccataaacaacttcaaaaggagaacaattagtggtgctatgaatagctctattgtaagcaaattcaacatggggtaaacaagcttcccaagtttttaagttcttcctcaaaactgtcctaagcaaagatcccaaagtcctattaacaac

SEQ ID NO: 161883 - DNA, 447 bp, Glycine max
  unsure (1)..(447): unsure at all n locations
tccagattggtataccatgccactgctgctctggctaagctgtcttgaaagaaatgcatcaacagcttttcgttcgtagaatatgcccccatcttttggcaatacatccgaagatgaccttttggacatgtcatccctttgtatttatcaaaatctggtactttaaacttgggaggtgtcgcaatatgcccttttgcgggcgagtgaaggcgtggctcacgggtgcgctttccaaaggaagaaagatgcgcggagtcaccaccaacgtttatttgtgggaaacgtcggaaaaaccgaaggaaaccggtcgaaatgaaaattctaagttcgggagttgtatttacgtttgaggaaggtattagcacctcttacgtttgtctcataggacaacaacctattnttcagaattgtggaaattgtgttatcttaacttttagttctttttat

SEQ ID NO: 161884 - DNA, 258 bp, Glycine max
  unsure (1)..(258): unsure at all n locations
agcttgaatntgcatgatgttgttattgatactactacaaaaaacagttttaacatcggcttattaacattggttttgtccaaaaccgatgttaagttaaacgcggtgacatatttgtaaataaagtatccttcttaacatcggtttttccaaaaaaccgatgttaactaatgatgttaacatcggttattggaaaaccgatgttaacgtatgataatgtaacattgattttttggaaaaccgatgttaatgcatata

SEQ ID NO: 161885 - DNA, 456 bp, Glycine max
  unsure (1)..(456): unsure at all n locations
ntagcttctttaggaatcttctcaggaggtgatcttagttataagagggatgtgtgtagctaagctctagcttcccaaggaagttttctcacagaagcttctcaaggaagttntctcaagaaagcttctcaaggaagctaccttgtctataaatagaagcatgtgtaacacttgttcgaactttgatgaatgagagtcttgtgagacacaactcaaagttcaacttctctccttatttcttccttcaatttcatgctcccccctctctctttctctccctttttcttttcctccattgaagcatcctctccaagcttcttatccaaggctcatcttggtggtgaagctccttcttccatggcttattccctagtggatggcgcctcctctcacctcttctcctttgtcttctgctgcatctccatggtggaaaatcaacattaaaggacctcattg

SEQ ID NO: 161886 - DNA, 362 bp, Glycine max
  unsure (1)..(362): unsure at all n locations
agctttntgaacaacgttaaggggacatcatgaatgtgcccttcaatccaaaaacctactaaaaatgaatctgaaatccacaaataatgaaccaacaacaaatctacacaatttgcaagcaaggaaagatcacaagcctacgcatcatcactccaattaaatgtctcggcaattaaattcaaactagataacctcagcagcaacagaattcaaattcttcgaattggaaccagaaaccccatcctgtttcgaagtagtctcactctgacctaaaatctggcctttactcaagcctaatgcatccttgtcgctccaacaaggccggtacagattcctccctcttatggaatatcttccactcc

SEQ ID NO: 161887 - DNA, 391 bp, Glycine max
  unsure (1)..(391): unsure at all n locations
nttcccacataactcttccaatctttgatggagagaattatgatctttgggaagtgaaaatgcaatcctacatggagtctttggatttatgggatgctgtggaagaggattatgaaatatatccgctgcatgaaaatcccaccatgtcccaaattaaaaatcacaaggaaagaaagatgaagaatgcaaaggcgaggtcatgtttgttcactggtgtttcacaaatgatattcatcagaatcatgactcttaaatcacccaaagcaatttgggattatctgaaagaggaatacgctgaagatgatagaatacgaagcatgcaagtgctgaatttaaggagggaatttgagcttcaaaggatgcaagagtcagagacaatcaaagaatactc

SEQ ID NO: 161888 - DNA, 449 bp, Glycine max
  unsure (1)..(449): unsure at all n locations
agcttatacacggaaaatgtaattatgaaattgagatgcccgaagaaacaccatttcctagttaaccatgcattaggtaccatgttcaattattttgttttgttgttgtgtgttttttttttttgttagaaatgggtttatgatcccaacatggttggctcatggtgcctaacacatgcaactaagaatgtagtgtgaagtttcacgcttccccttttttgtttttgttttgtagaggaaaacgcaaggatgagcaaacatgaaaacaaatggtatgcaattttgcagatcaaaaagttggttgaacgcatatgcatgatgatgccatgactcatgcaaaatgtgagcctggaatatgataacggacaaatgcaggaacgatatgttcattatgatgttatgaagagatgcttatgcgatgcatgatatgaacgcattntacggacacg

SEQ ID NO: 161889 - DNA, 439 bp, Glycine max
tatgcgcacacttctttacgaacattcacttgcacaagacattcttataactaagaaaaatgcacccatatacaatcaaggcaccttcgttacctagattatttacatgtacttccaaggtgtatttgttacctacatcacacacatttcctttgctaaattcacatacatgcatactctaagcactttggctatcaaaaattgcatacgtgcacatcttggtatttctaatacctatacatacacaaacttcatgatgaatcttgactatctacacaataaagtgctacatttcatgcttttttcaagtgtttttttttactacctaaagccgcatgcaaattcaagtatattttcttttgctcactaaaattgtattcaaattaaaagggtattttgtaatgtattttctttacataacatgcaacatatttataga

SEQ ID NO: 161890 - DNA, 305 bp, Glycine max
agcttacgaccgcctgaaagacaattacacatcactatcgggaagaactttatgtacacgttttttttctaacatacatccttgtatcatgtgggcatagaatgtggttctggagcacgtacgttctattggagcacgggatcataaccacgcagcatgattttgcgaaaactctaggtgattgtcttcagctagctcttggtcacacgaactgcagcgtccatacattaaaaataacttacatgggattcttttatacagaaaaatagaagaactcatcagttctatacttagagcgttaatga

SEQ ID NO: 161891 - DNA, 478 bp, Glycine max
gacactatcaaactgaagctcgtgtccaggaggatatccatgtttctgtaacattcatcaacaatgtgatttgtgaatccagaatgtgtacaaaccttgtttcctttcccattagaactccctctgccagagcctccttggctacttcttcctcctctagaagtatagtttggaggaaaaccacttttcctataacatctgcccactgtgtgattatctccacaaacatcaagttgaacaaattgagcttatctttcattgactccgctaccacattaggcggcaccaccgactcctttccctctagcatcaaaatgtgcagcatcttattccatgagcttctttgatagagtttacagttatgccccacctttgtcgcggtttgtcggaaccaattatcatttctttcatccacaatggatctccatttacatgcctcttgtcctatgtatcttagaatattcatcataaacacata

SEQ ID NO: 161892 - DNA, 592 bp, Glycine max
  unsure (1)..(592): unsure at all n locations
cgctcacgtggntcgttattttggtgtnctataatatcttaccgtgcggatantcnnnnccacaaggggcgggtgggattgaaaccatgaagcccctgcgganacctgnagtcctcccgagngcatccgcgcgcatgtgacaaagttcctcgacatgctagagcccatttacacacactctctctgatgacgaagactcggcgccctgagacgctcgattaggaagatgcctatagaagctagagcttagctgcacatacctctttaatagctaagctcagcgccttgagatgagacgctcgagctgagctacgcaccccctataataggtagacgcaccgccgggacaaaagacatggggataataagagagatgggcttagtacaaagacaacgcagaatgccgcgtaagacaaggctaacacccgatactcctagagtggtcttagtgatgcgcctaggcgagagaaatcctattctaatcatgacctccaatgacggctcatctctaagccatgggtgcatatctccgtacgctgatggagacggagcgctgcctggaacctatccaactcagtggaggtgaaccagg

SEQ ID NO: 161893 - DNA, 421 bp, Glycine max
  unsure (1)..(421): unsure at all n locations
agatgaggaagtgttgaagggtgaaacttcctgcttttattgttgaccacagagtggtacctggagatatgtcgcggnggtcacgagaccttggggacgtcaggtggggtgctattgcccaaaaccaagcttgaccaatcccgacccaacccgggcatagtcggtcagtgagaacctgtgatgtacctaagcaggcgagctcctggcagtcaacagataataggaaaacaagaccacaaagcaaggaggcttgtggtggctggccagctgtgaattttgtgtaatatgtggattgtggcctctggtaatcgattaccaagggtgggtaatcgattacaaggcttaaaaatgaagacaggaggctaagatggtctctggtaatcgattaccacggngtgtaatcgattaccaggcttgaaaa

SEQ ID NO: 161894 - DNA, 448 bp, Glycine max
ctgcatgcttactgccatcccaaataattctcatactactatctcatacaattccctagcgcgattgctactttccccaccacaaatgccatcgaagaacacaatgtgtacatggcagattttctccaactcctcatataatgtccactggaaacgcatgatcaccaccaccacccaccaacacgcttcaccttcctactttcccctcccttccatgcaagatcttcctcgccagggttccgattcctcattcactttttctacctccaaatacattcttttccttttcctctgttttcattttaccaatattttatctcgcaggcactccaactcttccactccaagacgacgccgttgctcgaggactagctaatgctttgcccgaacacgaatccataatttaattaattattctaaagcctcgacattcctcttattttttata

SEQ ID NO: 161895 - DNA, 469 bp, Glycine max
  unsure (1)..(469): unsure at all n locations
cgcttctacatttatcacctttatagatggatgttcgtgatatatgaatatttatttgcttcataacaaaaataaagcattggatcccttcaaagtctttaaggctgaagttgagaaccaatgtggtaagaaaataaaaatagtgagattagatagaggtggagaatattatggcaaatatactgagaatggacaagcacctggtccttttgcaaagtttcttcaagaacataggattgttgcccggtacactatgcctggttctccaaatcaaaatggtgtggcaaaaagaaggaaccgaacattattggacacggtacggagtatgcttagcaactctgatcttcctaaatccttgtgggctgaagcactaaagacggcagtgtatatattaaactatgttccaaccaaggctgtccaaaagacaccttntgagttgtttaaaggttgaaaacaaagtttgaaacat

SEQ ID NO: 161896 - DNA, 400 bp, Glycine max
  unsure (1)..(400): unsure at all n locations
agcttgccacccagctcgcccagacgagcactgctgcttcttccataagcaactaccttctggaggatatttccggagggcccaagcgggcctgcttgctatatgcaccctcatttttactaaatacaccccttgcccttctttggtgattcttttttcgtaaagctacggaaacttatggatttcgcaacgatacttgttttcattctgtaacgtcacagaaccttgcggatgacatactcatcccctttttttacttacggaatgttacggaacctcactaattgtgcaacgatgcttccttttgatttccggngtgtcacggaaccttacggattgcgcatcaatacctctttttgattaacggcatgttccggaactttacaaattgcctaatgat

SEQ ID NO: 161897 - DNA, 76 bp, Glycine max
ttctctgcgactcattcatgaatcataaacacttgaaatcatagtggtttctttcattttccttttctgcctatat

SEQ ID NO: 161898 - DNA, 455 bp, Glycine max
  unsure (1)..(455): unsure at all n locations
tgctcaccactactagaggagaagcctttaggttgtttcatataaacctcctcttctaaatcaccattaagaaaagctattttcacatccatttgttgcaactcaaggtcaaaatgagcaactaatgccaagattatacgaagataatctttcttagatactggagaaaaagtctttgtgtaatctattccttctttntgagtaaattccttagcaacaagtcttgccatgtatctctcaatgttgcctaatgaatcccttttggtcttaaaaacccatttacatccaatggcctttgccccattaggcatctctacaaggttccaaactttgttactctgcatagaattcatctcatccttcatgacatcataccatannattgactctttacaactctnggcttgatgcaaaagttcaggatcattttcagctccatattatagcatattcta

SEQ ID NO: 161899 - DNA, 427 bp, Glycine max
  unsure (1)..(427): unsure at all n locations
ctctcanagccttgagactacacatatcataaacaactttctttatctcctcctcagtatatatttctccctaacatctcaatctcctcttgaaccaaaactgtaaatttacctcttaagcaaaaaggttaataatctgccacttcagtgaataaattcctatagaaagaagtcaccatttcttctaaatctatcgaattaagcacccaatagcccttttcattcaatagcctagcatataagttagattgctttcttaanagagtggtgcaatgaaagtaatgagaattcttatctccaaatttaagccacttgcaccaagacttttgaaaccacaaaacttcttggaacaatatctgctctaactccccacataaatcttnttgtagccttaaatggtacttattatccttaatccttcaacttc

SEQ ID NO: 161900 - DNA, 366 bp, Glycine max
agctttgatctaccaccatcgccgccaccattattttagttcttctcttattttaatattactagtactctgatttccagccgtgtatttggctatattattatgacatttgaacaatttagtatttctttatttgcatggtgtgtttgaacaattatgaattatgttatgtgactatgtgatttttctatatatttgatctggtcatgtttcttgcttcatgattagtttatattcttccatgattgttgtgtgaatgattagttgtattagtatgtttcatactcgttacgcactttggctttttgtgatgccaagggggagagaatagggattaaatcacgactcacatgagtaataacttaa

SEQ ID NO: 161901 - DNA, 173 bp, Glycine max
tacctcatgcactcctctaatgactatggcatcatttctggcactaaactgctgagaagtggaacccatcttctcaattaaatttctgcttcagcaggagtcatgtcttcaagggctccaccactggcagcatctatcatacttctctccataatactgagtccttcataaaa

SEQ ID NO: 161902 - DNA, 398 bp, Glycine max
  unsure (1)..(398): unsure at all n locations
agcttgcttgtggagcttctatggaggctggatctttgagcttcaatggggtcctttaatggtgattttccaccatggagatgcagcggaagacaaaggaaaataggtgagaggaggcgccatccattaaggaataagccatggaagaaggagcttcaccaccaagatgagccttggataagaagcttggagaagatgcttcaatggaggaaaagaaagagggagagaaagagagaggggggagcacgaaattgaaggaataaaagaggtatagaagtggaactttgaagtatgtctcacaagactctcattcatcanagttacaacaagtgttacacatgcttctatttatagactaggtagcttccttgagaagctttcttgagaaaacttccttg

SEQ ID NO: 161903 - DNA, 416 bp, Glycine max
  unsure (1)..(416): unsure at all n locations
ngagatgaggaagtgttgaagggtgaaactttctgctnttattgntgaccacagagtggtacctggagatatgtcgcggnggtcaggagaccttggggacgtcaggtggggtgctattgcccaaaaccaagcttgaccaatcccgacccaacccgggcatagtcggtcagtgagaacctgtgatgtacctaagcaggcgagctcctggcagtcaacagataaaaggaaaacaagaccacaaagcaaggaggcttgtggtggctggccagctgtgaattttgtgtaatatgtggattgtggcctctggtaatcgattaccaagggtgggtaatcgattacaaggcttataaatgaagacaggaggctaagatggtctctggtaatcgattaccacngcgtggaatcgattaccaggc

SEQ ID NO: 161904 - DNA, 429 bp, Glycine max
  unsure (1)..(429): unsure at all n locations
agctntctcaacaagcttctttgagaagctagatccttatctatccacacccctctattaactaaattaacttccttaaaaataattacggatgaaaataacgcaacaaataatcaaacatcaaacataattactaacaatatatagatatatatatcagggtgttacaaggagtgcattccttgcaagctaccttggaaagagcccattatttatcaacaatttttagattagccttggttgctttggtttttagtcttcttggaacttcagaaaggataactagtttcttagctacaagtgttgctctagccttcttaaaagcaagagatgcttgcttctgagtattgaccttccttttctgtagaacaagttgaacattatcaacatcgttatcctcagtttcacttcagtttttcaacttctaag

SEQ ID NO: 161905 - DNA, 470 bp, Glycine max
  unsure (1)..(470): unsure at all n locations
ntatatagacttcanagctntgatccattgagagatctcaactagccgntgtctaataggttaggtgctttacacgaggcatgttattatgcagagagagagtgtgggaccacaaacatcttctgcagtgtatcttcatagaagtacaacttgtcagtgtcgccttgtgctcaaagttgacttttagcatacaattcaaatacaacgttaatagcataggacaaaaggaataaagaatgcaagacaagacaatttgaaacttccctcttatgcactatggcacaaattgcttactgaaccatggaccttactttctgatgattatttcagaacttgagtattaagtaactattccatttcctttggactatgagccaagtgctaaagcacttgtcttcttagaactgggcactaaggcaatatcatccaatggctaatactttatctatcgtccaaaggctntctactcg

SEQ ID NO: 161906 - DNA, 457 bp, Glycine max
  unsure (1)..(457): unsure at all n locations
agctnggattggattggtctgacgaggatcgatgtttagtaatttaggctacaacatagaacacaaagcatgattgattagagaaatatatttatatgcattagcttgtttgttagaaagacccaacatttctacctactgctctcacttttacttaccttgcattttatagtttttagcataaaggtttagtttaaattctgtttgaaattatcaatcatacatgttctctcaacaatgcttcatttatgaacttaactcaggctaacattagttccctgtgttcaatactcagattcatccgttntaattnttaaatacttgatgatccggtgtgctttccggcaaaccgggtttcccatgaatatatgtgtacgaagaataagtggaacaaaaagtaaccgcaggggaaatccaacaaagtgtaattctcanatgatcaaagntcaaaaaatga

SEQ ID NO: 161907 - DNA, 450 bp, Glycine max
tataagaaacagaatgcctaaatcatttccaaatatgcatgtgaattaggaagcataaacaagaataaagccaaggctattgtgcaagcaatcaatggggcaaaacacaccaaaagattatgatgatggatggctcaaattcttacaaaggtaaacttatcactttcaaattgagctttcaaaactatcatgacatgtagaggaaaaacaatgatttcaaatcacaaaatgtctagagacttttattttcagaacaattacccatttcttgaacatatcctataattcaaagaaaaatatgcaaagttgtacatgcaaacagaattgacctataatattaaactagagacccaacaaaactaacaaaactaataaatttaacacaaactaactaaaaaaaattactaaacccaaaccaaagaacactctccccatacttaaacaacacat

SEQ ID NO: 161908 - DNA, 403 bp, Glycine max
  unsure (1)..(403): unsure at all n locations
ataataatataatatatatatcctaatgtcacatcctatcagagcgttgtgttcccgtgtcctctagcatgaggttcttcatagtcatccacctattcatctactcccccgaacacaaagttcaagatcattacaggatctaaacacaaacaacaaactaggagtgagttatcacattcctaactactagagagaaataagacaacatatagtagtcaaatacaatttacttagcatatctcacattatttcatcactgtgtcattcaaaatatacttttcaatcatcaatcacaatacacaagaatcacacactncgatcaagacataataacacatcaatttcataatatacaattagcaagcgtatgcaacagttatgctaagactcaagcctatattgc

SEQ ID NO: 161909 - DNA, 451 bp, Glycine max
  unsure (1)..(451): unsure at all n locations
cttgcttaactcttgattctttggcatcatcaaaataatcttggaaggcattgctttcacaaaactttatatgaaactactcctaggatttgaaggatggaacaataatagtgtgtatagtcagaattcgtagttaaagaccttgggcagctacaacactttcctgtgatggaagtgaccagaagcaggaaaggtattttcatctcccaaacgaagtacactattgatttgcttaaagaaatagggaaactaggaagcatacttacagtactatgaaatacaccattntatgaaatagtatactgaaatataaatccagctgctctaaaggtttattatcctaagcagctgttagtgctaccaaccccaaataactttagtgggatgactattatattgaagactataggtacaagaataaataattatttaactntagtgggatgatcat

SEQ ID NO: 161910 - DNA, 311 bp, Glycine max
agctatcagctagtgcaactctttcacacagtggattctatgctgaaaggaacaaagaatcaccgactaaccatgaggtccagacatgattgagcaatcctaaatgcacaccacattgttgaagatatagcctgtagaataagatgatctgaatgggggaaggaaagctcagcatccaacccttactctgaattggaaaagaaaaactatcagataggcctgctatgggtctattagaaacagaataaaattagactattaatttaaatacttgaattgtaaaaaagataatgctagatgttatgagattg

SEQ ID NO: 161911 - DNA, 462 bp, Glycine max
  unsure (1)..(462): unsure at all n locations
acactataaaactcagcttcttggaggctggattttcatggtgattttcagccatggtattgcaacgaaagataaaggagaagaggtgagaggaggcgccatccactagagaataagccatggaagaagaaacttcaccaccaagagagtgtcttggataagaagcttagagaggaagcttcaatggaggaagagaatgagagagagagagagagagagagagagaggcgtggaaaatgaaggagaatanggagagaagttgaactttgaagtatgtctcacaagtttctcaatcatcaaagttgtaacaagtgttacacatgtttctatttatagcctangtcactaactttgtgaatttcattttcattntatatgaatctannaggaatattccaagaatatgttaaaggcatcttagcatattccctttagatatcacaagcatggaagatgtgactc

SEQ ID NO: 161912 - DNA, 442 bp, Glycine max
  unsure (1)..(442): unsure at all n locations
agctattgcntacaaccttttctccccctttggcaacatcaaaaagccaaagaactcggaaatcaacacagttataacaatggagtagcaagatataagtatcagagtattaaatccaataagccaaactcataatcaagaaaataatcaaaccagaattcaaataacataaaatgtcaacaatcacaaaatatccaagaccgaaacacaagaaaaataagcaaagtacttagcataataatgtaaattctaagaaactaaaagccaaaatacacggcttataaaagataaataagcagaatctaaaatctaagaagacggaggaggtggtggaagatcaaaactctgacgaatgtatccgacatcctcttcaagctgtgtaagacgaatgtccataccggcaaagcgtgaatctaacgagtcanagcggtcaccaacatac

SEQ ID NO: 161913 - DNA, 429 bp, Glycine max
  unsure (1)..(429): unsure at all n locations
agctntgaatgctctattcaatggagttgacaagaatatcttcagactgatcaacacatgcacagtggccaaagatgcatgggagatcctgaaaaccactcatgaaggaacctccaaagtgaagatgtccagattgcaactattggctacaaaatttgaaaatctgaagatgaaggaggaagagtgtattcatgacttccacatgaacattcttgaaattgccaatgcttgcactgccttgggagaaagaatgacagatgaaaagctggtgagaaagatcctcagatccttgcctaagagatttgacatgaaagtcactgcaatagaggaggcccaagacatttgcaacatgagagtggatgaactcattggttcccttcaaacctttgagctangactctcggatagggctgaaaaggaggcacatga

SEQ ID NO: 161914 - DNA, 418 bp, Glycine max
  unsure (1)..(418): unsure at all n locations
caagagaaagaacatgtgattagaactttgactgagaatgttagtcagtttgtcagattgattgtgaaggaatgcattgatcgtatcccggtgagagtgtgatctttataatttgagagaaacgactatcatttagtactgatttttgcatgaatctctgaagtatggactgaatgcatgaaattgaggatgatgaaggccatgtttgattgtgatagccacttagccaaaaagctaaccgcgtgcttgaatgaattatcccttgcacccagtttaagctgaatgaattattgattgagtgaaccttgagcccatacagtgttatcttctactaccttgtcttaggttgtaggagagcatcatccacaggaagcttggttcaatgtaaatntgtcctatatttgggggagtaattatc

SEQ ID NO: 161915 - DNA, 436 bp, Glycine max
  unsure (1)..(436): unsure at all n locations
agcttctagccaaatggacttaccttgaattaattcctttgatagcccttttcagccttgtgtccctttccttgttttgaagctcactacaaaccttaagtgaaaaaccatgatattaccatatccttaaggaattttggagctttggaattgttttgggaataagtgtggggggtttttgtttcattggacaacttgttttgttggctatgcttcatgatgtattttgggccatacttgatgtacattgtatattggttaaatgttggacatgctgaatgaaatgttgtttctcaaaggctaaagagtaaaaaaaaaaaaaattcgaanaaagaaaaagaaaagcaataaagttgagtgaataagatcttaaatggcacaagaatgatgaaactttnggttctactcttcatggttaaatnttatctttacttct

SEQ ID NO: 161916 - DNA, 463 bp, Glycine max
  unsure (1)..(463): unsure at all n locations
tganatgaggaagtgtagaagggtgaaacttcctgcttttattcgttgaccacagagtggtacctggagatatgtcacggnggtcaagagaccttgnggacgtcaggtggggtgctattgcccaaaaccaagcttgaccaatcccgacccaacccgggcatagtcagtcagtgagaacctgtgatgtacctaagcaggcgagctcctggcagtcaacagataaaaggaacaaagaccacaaagcaaggaggcttgtggtggctggccagttgtgaattttgtgtgatgtatgggttgtggcctctggtaatcgattaccaagggtgggtaatcgattacaaggcttataaatgaagacaggagactaagatggtctctggtaatcgattaccacggngtgtaatcgattaccaggcttgaaaacgaggtcaggaagctatgagnggcttctggtaatcgatac

SEQ ID NO: 161917 - DNA, 455 bp, Glycine max
  unsure (1)..(455): unsure at all n locations
tgcttgaagggttgtacatgaccaaatctttagttaatcgtctttacgtttagcagtctntgtattcgtttaaaatgcatgaagataaatcagtacgagaacaattggatttgtttaataaactgattcttgatcttgaaaatatcgatgtcactattgatgatgaggatcaagccttgttattgttgtgctctttgcttaagagttactctcatttcaaagagactttattgtttggaagagactctgtttctcttgatgaagtgcaagttgctctgaattcaaaggaattgaatgaaagaaaggaaaagaagtcttctataagtggtgaagggctgacagcaagagacaagaccttcaagaaagatagtaaatctgataagaagaagcataagccagataatcatatgaatggtgaatgaaacatgttcaaaatcaattgtatcactgtaaaa

SEQ ID NO: 161918 - DNA, 472 bp, Glycine max
  unsure (1)..(472): unsure at all n locations
taccctatcctgngaacacgaanatcaaacacttttagagattattaaggttagaaaagtagaattatcagacactcacaagctctgatttgatgggatgatcatctgggtggaccccggtacaccttatgttcactgaagagaatgaaagaacaaaagggtaagtaaggcgaaactcaaactcaaaattaaaacagtgattacaaaaacagatgcgtntttgagattacatgcaagaagggtagatgtgactttggcgaggatgaagagggaatgagcccgttgaagagggggcatttgggagagggtttgagggtcggagagagacaaaaactcgttaaagtgcgttcggagttgttgaaggttggagagagtggtgttgactgaatccataaccggttcgggaactgcaccgctctcacttnctttcaccattntcaaattcagaggttggagagaaagggataccaca

SEQ ID NO: 161919 - DNA, 377 bp, Glycine max
  unsure (1)..(377): unsure at all n locations
agctngtgcttgttntatntaaattcctaggatcatgagctactaggtgtgtcctactatgacttgagaaacaaaaggtgatcaaataacaacagaaatttaaaaggtactaggttgcctcctagtagcacttctttaacgtcttaagctggacgcttgatgagttgtcgatcacggacctagtacttttgcttacctttggcgttggacttggtcgcctgctggtcgaccacaggttgtaggcaacgctccagcttttgtagatgagctaaagggctttggaggtggcggcggtgcgtctgttgcctgctgtcggccatccccaggctgctgtggttttcgccctgcgcctacactggggcgcagcacttcttgat

SEQ ID NO: 161920 - DNA, 464 bp, Glycine max
  unsure (1)..(464): unsure at all n locations
tgagatgaggaagtgttgaagggtgaaacttnctgcttttattgttgaccacagagtggtacctggagatatgtcgcgggggtcaggagaccttggggacgtcaggtggggtgctattgcccaaaaccaagcttgaccaatcccgacccaacccgggcatagtcggtcagtgagaacctgtgatgtacctaagcaagcgagctcctggcagtcaacagataaaaggaaaacaagaccacaaagcaaggaggcttgtggtagctggccagcagtgaattttgtgtaatatgtggattatggcctctggtaatcgattaccaagggtgggtaatcgattacaaggcttanaattgaagacaggaggctaagatggtctctggtaaatcgataccaaggggtgtaatcgattaccaggctcgaaaacaaagtcagaaagcttaaggagcctctggtaatcgattacc

SEQ ID NO: 161921 - DNA, 408 bp, Glycine max
gcttgagagattgtatctaggtggttgcttttcccttagaagcctccgatgcaatatccatttggactctcttcgttatctctccctctatggctgcatgtcactgaagtatttctcagtgacctcaaagaatatggtaaggttgaatgtataactcactagtatcaaacaattgccttcatctattggacttcaaagcaagcttgaaaagctacgtctagcatacacttacattgagaacttaccaacaagtatcaagcatcttacaaagctgcgacatctagatgtaagacattgcagggagcttcgaactctaccggagcttcccccgtcactagaaacactagatgctcgcggatgtgtatcattggagactgtaatgttcccttctactgctggagaacaact

SEQ ID NO: 161922 - DNA, 283 bp, Glycine max
tagccctgatcagccttgtgacccttgccttgctttgaagctcactacaaaccttaagtgaataaccgtgatattaccatatccttatagaattttggagctttggaattgttttgggaataagtgaggggggtttgtgttcattggacaacttgacaagttggtatgtgacatatgccatggatgcactgccttggcatacatgatgatcaatgttaatgttggacaggcagacttacatgctgacctgatagtgctcaagagctatacactcaaatatacg

SEQ ID NO: 161923 - DNA, 397 bp, Glycine max
gttgatgcacaatggcgtctataggtctttataatcttgtcgaatcattgacattaggaatattctgttccttccgtgtattctggatgattaaattgctcgagtgtacgacaaagcggttaatctataatgctgcgctgctcaggaaaattgtggagttcaaactgaattttctgtaagcataggtttggttcatggactggattatatattttgctccttgcacgtttttctagatgattaaatcgttcacatttggaatacagtgctaaatctataatgttgtgcgcctgcatccatatcccggaaaattgtggagttcaaattgcaatctctgtcagcatagattatgcttacggactgaattatgttatgaacgtgggtcttttgtatggct

SEQ ID NO: 161924 - DNA, 316 bp, Glycine max
aggcacccgccgcatgccccttggacttactacgaattattcactttgagaaccttttatatcttgtactctttaaatgattgagatgcgcactactaacacttaagagaccttcctgatattaccatatcataattggatcatggagcatggggaatgtgtatgcaataattgggcagtatgcttatatatgtgtacaacttgttctgttggctatgctgcatgatgtattctgagccatacttgatgtacattgtatatcggataagagaagcacatgctgaacgacatgttgtttctcagaggctacagagta

SEQ ID NO: 161925 - DNA, 464 bp, Glycine max
  unsure (1)..(464): unsure at all n locations
tcctctnttcttcggttggccggggcggtccttccgtggacaaaactattggttgtgtcgcgatgttgggttgaggcaacgtgctgggtgccggcccttcgaggatcgggggatagaactcaacatcccttcgagcataatcttgagggtctttgtgggcctcgtcaggctgttgaggaggttctctttcaaggacgggagaagcaatatggaccgcatcgtcttgcaagacgggtggtgagtagttgggcggcaatccataagggtaagccgctcggttgtatcccaggtgagggctgccatcgtgccccagtgtgtcccttcaccgtcctactacgtttgagggaggatggtgcgcagttgccaagagagttgggtctgcttcggcagccgaactgatagcggcagcggtggccacattcttttccatgagctgcctcatccctaacataggcttcatcatg

SEQ ID NO: 161926 - DNA, 417 bp, Glycine max
  unsure (1)..(417): unsure at all n locations
agcttgtaatcgattacaacatttgtgtaatcgattaccagacataaaaattcaaatttcaagtctcaagagtcacaactcttcagaaactaattgtgtaatcgattaccacatttatgtaatcgattaccaataaggaattttcgaaaagtacacccaagagtcacaattgttcaagaagtttttgaatggccatcaaaggcctataaataggtgacttgngatacgaaattctttagagttttttctgaacaacattgtcttatcctctcaaaaccaaattgtcttatcactctcaaaatattccttggccaaaacacttgcaaattcaataaggaatcttgatcgatcttcaattggaatatccttctcttaaagagagaaaatgcttcttcttcttattcaaagagatctgtt

SEQ ID NO: 161927 - DNA, 429 bp, Glycine max
  unsure (1)..(429): unsure at all n locations
ctacatttgttaagttgtctaaggtggtcgtacaactgccctagttaatgaggaccttggacaccatgaatatggcgaccacaatggagataatcatggggtcttcctcgtggatagggttgatgcccttgaagtctttatcaatggaaatggtgggagggagacttcatagtgatggtatgttaacacagttgatgtcgatgtcctagatgacatggaggtgatgcctacgagactaactggactgccctccataggaaaatcttcccgtaatggtattgattacacctataattagttggatgagctcattntcctattcttgaggaggttcatgctcgtgtctttgctggtgatgcctttgtctccctctatcttatgctcgatcccttcttctgtcgacatgttgattcctgtgctagtcctcat

SEQ ID NO: 161928 - DNA, 398 bp, Glycine max
agcttagctacacacacccatctaaaaactatctctcacctccttgagaagcttccttgagaagctagagcttagctacacacacccctctaataactaagctcacctccttaggaagagaagctagagcttagctacacacccctataatagctaagctcacccccatgacaaaatacatgaaaatacaaaaaaatcctactacaaagactactcaaaatgccctgaaatacaaggctaaaaccctatactgttagaatggccaaaatacaaggcccaaaagaagaaaaaaaaacctattctaatatttacaaagaagagtggacccaaccttgacccatgggctcaaaaatctaccctaaggttcattagaaccctaaggccttctttatcagctc

SEQ ID NO: 161929 - DNA, 424 bp, Glycine max
  unsure (1)..(424): unsure at all n locations
tctccctctntntcctattaatagggggaggagggtagaacataatattcaaccctcctggtatctgagaatcacttanaattagtgagaaaaattattttcgtgaagaanatccaagccggggtgcttccataatgcttccgagagggttctgtgggcgatttcgtgaagaatttccaccgttcttcatcgntcttcggtcttcaaccggtaagttcccgaaatcgaacttttcaattcattntatgtacccatagtgatccccacttgtttcgcatgcttttattttcatttcatttactttccgtacccccttttgacgtgctttagtcattctatttaagtcattttctcgcctaatcaaaaataaaataaatttccaccgatcatctttattgtaacatactttaatatcttttaaaat

SEQ ID NO: 161930 - DNA, 458 bp, Glycine max
tgctctattaagacaaagaaattaaagatattcaggattgatgatcaagacagtctctagagtcttaggaagggtatattaaataggaagggaatcccaattgacgtatcaaatggtttggccaagatatttaaattaataaagttgtttttcaagagatttactctctggtaatcgattaccagagaatgtaatcgattaccagtggccaaaaatgatttacaacagctattaaaatttgaattcaaatttgcactgtgtaatggattacacatatatggtaatcgagtaccagcagttactgaacatttcaattcgcattttatagcttgtaatcgattacacatatactgtattcgattaccataggagaatttcagataatattctcaatagtcacatctttttatttcattcttaattgccatccaaggcttatatatatgagacttgagaca

SEQ ID NO: 161931 - DNA, 457 bp, Glycine max
  unsure (1)..(457): unsure at all n locations
tgtgagagctgaagacttcttcagacatgtagaactggggaagactgacaacccaataggttcaaacgtgactcaagtgtttgttgatcaactatcacgactaaacacgttgggtttgaacgctccccacactcaccctcgaggcactgagatccttatagtccttgagggtactctctatgttggatttgtgacttccaatcaagatggaaatcacctcttcaacaaagtgctgaacaagggtgatgtgtttgtgttcccaattggtctcattgatttctgcatcaatgtgggatatggcaatgttgccgccattgttggtcttagcagttaaaatgcaggaggcattactattgcaaatgctttgtttaaagctaatccacctatntcttctaaggttctcaccaaagcttgccaggtggacaagagcataattgattatcttgaanagcaatct

SEQ ID NO: 161932 - DNA, 365 bp, Glycine max
  unsure (1)..(365): unsure at all n locations
agctattanattgttctcatggtggacatgatgtggcctaataatgcagttctcagttggggatgatgaagttgtgatggccatatcaggttatgcggacccatatttaaatcctttgttttaaaatatgcagttgttttaagtaaaatacatgtcaatatgggccttattttagcatacatacatctcttcttactaatgctcatagttgtcaatagcacaccaaataacagcgctatgacagaattgagaagctctgcttcacagtttgtagtagtggcagttgtgattgtgatggcagacataattacagaaaagtgtggctggaggggggcactattggagcgggtcacaaagaaaaccta

SEQ ID NO: 161933 - DNA, 437 bp, Glycine max
  unsure (1)..(437): unsure at all n locations
ntaaaaggcaattcagggctctaatggctcgtcgccatcattagtcttccacctaaattcacctatttatcgtcgccacctgaagcgtctctacaaagaaagcacaaaggcaccaagaagaattttcagtccaccagtaccggataaaccagcttgcgtaagaggaataagagaaaaaggttntgttactcgcctgtggttaaaggtttactagggaagaagcatgaatgtgaaggggggagaaaccaaccctcgaaagcatcttgacaaactcttcatgtagagtaaagagtcacccattatgatttatgcagaggtaatgctaaaaaaaacaggtcaataaaattttcgatttatggtatgaagaanaattaaaataaggtgcaaccatgcctaaaacattccttctgagttctaagtcgcaaccatttactata

SEQ ID NO: 161934 - DNA, 388 bp, Glycine max
agctatacagcagaatttagtaatgacccactaacctagaattaaaataacttaatgccattaacctagggaattaaaaaaaaaaacttaatggctgagtgtaactgaaattgtggcaaccaaaaggctgatgcctatgttgccaattgggcccttattacaacttgaactaaacctaaccaaagcccttttagttgattaacccaaaacatatttttggtcagccaactttacaaggattgggccattatttacacaaactaaacactctaaaattgaaacaaagcggtgtcatttagtcctcctccatttgggccatgacacaactcacaaccttggacttttctccttgaaacttgggcttgtattcacacagtatggacaacac

SEQ ID NO: 161935 - DNA, 403 bp, Glycine max
  unsure (1)..(403): unsure at all n locations
tctggtgggacatcttgacttgctttccaatctgacattcatcacanaatctgccttcttctatnttcagattgggaatgcctctaacagcacttttgtcaaggaatttcttcatgcctcttaagtgcagatgtccaaacctttgatgccatattctgacttcatcttctttggaggatagacatgtggaggagtagctggtttcttggggtgtccataggtaacaaatgtcctttgatctgctgcccttcattagaacttcactcttctcatttgtcaccaagcattctgactttgtgaagtttacattgaatacttcatcaaacagctgactgatgctgatcaagtttgcagtcagtcccttcaccagcagtactttgttcagactaggaagtccatcatg

SEQ ID NO: 161936 - DNA, 405 bp, Glycine max
agcttgcttctacacttgactcagtcatatgcctattgttgttaagacaaagtaaattatgtatgaatttaaaacaataacttaggtaattaacaataatctaaattgacttacagaatccacaactgtataacaaagatgttgagacattgaccatcgtgtgctatttcagagagatcttcatgctttatgtacaaggggaagtcttcattaaacacttcgaacatggtagcatcccacataacctgcaacagcttcaaaaaaagctgagggatggtcaatgtcatcagatataggggatcatcaacctcatgatctggcctatctgcaggttttgctggtcccatagctccctcacttacagaaaaatgacatatacttacggagacttttgcctacacacat

SEQ ID NO: 161937 - DNA, 474 bp, Glycine max
  unsure (1)..(474): unsure at all n locations
cgattcagatctaattgccacgtgtgtagtaggtatgtattttatgttcatattatgctacttttgcgttaattgtcatttaaattatgttattttattgacatgtatgattagagaagatccatcaataaaagtttctttgattcaagagaggattaacagtgaatttgcctacaacgtgtcgtacaaaaaagcttgtgtggcgaaacaaaaagccattgctattgaatatggcgattgagaagagtcatatgcgaaactttcgtcttggctagcacacatgcaaaatcattctcctgaattatattttcaaatactacatgacgattntatcgttgggaatacggctagtcgcgaacaccgttagtttcatagagtgttttggactctnggtcaatgtaaagaggctttcaagtattgtaagccaatcatacaagttgacgacacacatttgtacggcaaataccatgggat

SEQ ID NO: 161938 - DNA, 374 bp, Glycine max
  unsure (1)..(374): unsure at all n locations
agcttgtagggttaaagtctcacgattgtcacgtgctcatgcaacaattgttagccgtggctatacgagacatcttgccaaacaaagtcaagttcacgataactcgcctgtgctttttcttccatgctatatgtagcaaagtgattgatccagtaatgtttgatgagttggaaaatgaggccacaattatactatgccagttggagatgtattttccccctactttctttgacatcatgattcacttgattgtgcatctggttagagaaatcaaatgctgtggtcctgtttatctacggtggatgtacccggttgagcgatacatgaagatcttaanagggtatacaaagaatctatatcgtccagaagcatct

SEQ ID NO: 161939 - DNA, 474 bp, Glycine max
  unsure (1)..(474): unsure at all n locations
gcttggatggtttattattggtctggtgatagggattgagtttgagtttgctttggggcttaagagattcttaaggctgaaggcactgctagaagccattgcaaggagttttaaggagaaaagttcaactatgagaagggaggtcataagaaaaataaatttaaaaacataggaagtaacacttgaattctgaagctaagtaaagcctcttgaaagcacaaccataaacttccaaaaatgacaagattgagaaagtataggcttcttttgaacaaccaaataatgcactgagttgtccaagttatagaaaatagtgatagttttatgttaaatgcaaattatttctaatgtttgcatgtcactccctattcgctatgtatctaaactatgattntaaattgcagttatggtcatggcacggtgagtcagaaaacctttatattgtgaaaaatangactgatngtgatcacggtg

SEQ ID NO: 161940 - DNA, 341 bp, Glycine max
  unsure (1)..(341): unsure at all n locations
agcttgagtgagccaccataaagtgagtcaattntgtaaacacatccttgtaaccctactatctttatgtatagcggaagaatctccatattagagaattataatcgtgtgctcccattactacctttaattactaagtgtctatcttaacttcacgaagcgggaaagtctgataagataaatagcttgggaagtctctatccttaagcttgagtgagccaccatagagtgagtcaattttgtaaacacatccttgggaccctactatcactttgtatagtggaagaatcttcatatcggagaattataattcgggtgttcccattactacacttaattac

SEQ ID NO: 161941 - DNA, 467 bp, Glycine max
  unsure (1)..(467): unsure at all n locations
tttatgatacatgcattacggacctatgatactaagctcatataaaactgaattattttctaatgatgcatgcanataattaaagacaaagcgacaaagtcgattcttaccaacttcttgagacataacangtaagagagaatagaatgccgtatataaccgaaatctaacccaagagcagcattggatatattcggttaaaccttaaaaatataaaggtctaatgattgctaaaacgaggtttggtgggactggctactctgatacctatatttaataaccgtcactggtaggttagccaatatgaaactgagaattgggggaagccaatgctttaaattggaaatttatcatttatttgacacttgacacaagacattttttaattttcattttcgaaccatatatttacgagtattttataattcttaataataaataaacaccgtttatttagaagagttcat

SEQ ID NO: 161942 - DNA, 406 bp, Glycine max
agcttggcagcaatgtgggatatgagccgctccatattattgcaagtgacacgtgctgtagagaaagaagtgaaaggaggaaacgggtcgggtttcaatcggagctccagattcggaaatgggtcacaacgacccggttcgtttagtggaggacggggcagtactgattgggtgttggtaaaaggaaaggaagttggagggtccaaagggccagctattgggcctaagagagatgggtcaacccatggagacaaaaaaaaacatgggcctcgtgacaggggctttacccacttatcctatcaagagttaatggataggaaacagaaggggctgttgttcaagtgtggaggagcctttcatccaatgcatcaatgttctgacaagcagttgatggtcctggtgatag

SEQ ID NO: 161943 - DNA, 464 bp, Glycine max
tgcctcatagagatccaggatagacaaggcggttgaaggaaccagttccactcccgaatatgatagccatcgttttaggagtgctgagcaccagcagcgcttcgaggccatcaaaggatggtcattcttccgggagagacgcgtccagctcaaggacgacgagtataccgacttccaggaagagatagttcgttggcggtgggcattgctggttacccccatggctaagttcgacccagacatagtcctcgagttttatgccaatgcttggcctacagaagagggtgtgagagatatgcgatcttgggtgaggggttagtggatccctttcgatgcggatgccctcagccagttcctaggataccctttagtgttggaggaggaccaggagtgcgagtatggtcagaggaggaaccaggccgatgggtttgatgaggaggccatcgcccagatgatgtgtatac

SEQ ID NO: 161944 - DNA, 451 bp, Glycine max
agctatgaattcctccactaccacacatagtttacccttgtttggattatcttcaacctttcatatagaaatcaaaagacaaccaaccattcttcaacacccaaaagaaagaaggaaggaaaatagacttcagatgtaatgtaaaaagaaatctctattgtagatctaagcttacacttttactctttttttgtagatttttcaatccaaaatatgcctttctgcaaatgcctgaatatatgatcacatataagatagattatataaaaacaaattattcaaatgccatatgaatttaacatcatttccacaagaaaaaccttgtggcaatatcatgatcagctaaatagtaatatgcacagccacataacaacaatgcctctaaattattttcatcttccttgagaagaaacccagactcagcaatagcactctcatactctttatcagc

SEQ ID NO: 161945 - DNA, 464 bp, Glycine max
  unsure (1)..(464): unsure at all n locations
tcctcggatcctatggtcatatgataccactcctcattcattcactcacaagcccnctttcactctggtatatagaacaaatgccatgatccctatcgaagttactgagcccactttccaagtggatgtattcgaggaagaatgattaaaagaagactgatttgtggatctagacactattgaaaagctacaaaggattatgcagattcatgaagtggcgaccaagattcgagtcaagccaagatacaatcctaatttgacttgggagaattgaaagagggggatttggttataataagggcttaacctaaccagattgtcaacaagttatctcccaagtgggttggcctttatcgaatcagttaggtggtcgaaaaggagcatacaaggttgtgcactaactggtggagtcactagagccatgagcaagaggctccaagagaattgtgttatagctactgaag

SEQ ID NO: 161946 - DNA, 584 bp, Glycine max
  unsure (1)..(584): unsure at all n locations
nttcaatctcgatatgtanctctagattcgatatcgtattggcaatctcgactttnncnccncaacagggaacgggaanattganatccttgtcgaccctgtgagcctcgagagtcgaccagagtgcatgcgcgcgcatgctggcaagagtcactaggtcgtgtatcgcttgtgcgcacttatgttacaccggtgatgctgtgcattatgtcataacacagtcctacaccccaaagctcacagacgcacgctcttctctgctgtatgcattacaccgagcgatagcggcgcgcttgttcaagcaccaaatatgaacgacaatggtgtactatggggcgtgcgccatgtatttacacatcacactatgggacagccagacctaatagactgtgcattagcaaaagaagcaacagctgaggatagtacatcacggtagttagaccacatgcgcatacacgccagattcatcggtggacagtaactgcccagagagaggtgtcatctgttgcagagaattgtcaacaaacgatgctgttggcaaaatcgtgacaacggctgcacagcgtgagccgggacttttttcn

SEQ ID NO: 161947 - DNA, 277 bp, Glycine max
gaatcaagattcatgagaagatgagttcgagattcaagagaagaaaccaaaaagcatcaagtcaagacttcacaagggatgtattgaaaaaaaactaatcatacacccagcatagcacaattttgtttacaagaaacgtttttccaaattcttctaagttaccagagtatttactctctggttatcgattaccaattacctgtaatcgattaccagcggtaaatgttgatttcaaaagcttttaactgaatctgcaacattacaaatgcttttaaat

SEQ ID NO: 161948 - DNA, 391 bp, Glycine max
cgccgcgtgcgagcttcatggtgagacaaaggtgattcacatgtgtttcgatgataacaatgatgataacataagatgatgacaacaggtgactgactaacacagctcacatgaccatgtcgcttgatacattctccatgctgatatgatagaacaagtgattgagttcatgattgattgatgaagaattcaagactcacgaggatagtctatagtcaagaatcaagattcaaggctcatgatctcaagaatcacgatcaagattcgagacttcagattcacgaatcaagagaaggcttaatcaagataagtttgacaattttttctcccaaattgagtagcacatgatttttctcataacatgtctaccaaacagattttactctctagt

SEQ ID NO: 161949 - DNA, 440 bp, Glycine max
  unsure (1)..(440): unsure at all n locations
tctatcaaaactcttgtccttttattttgtaatgtcaacgtacacctctccttagttaactacggccatatattattgttatatatgcaagttgaattaagtcaaaactagcaactagcttaaacagctatgagctataccttatagggtctagcaaatgaaaacaaaggaatgaaaggggaaaaccacgatagatcaacaaccagggaaaacaacgatagattaacaaccaaaatatggggatcctacaaaaagaaatggtggattataaaaaggtcgaattagttctaggtattcatattattataaaattttataattaggttgctatgccctttatatttttaattgagtcgntatattaattntaaatctgtaatcacgtctctatattaatttgtcatgaaacatctgacgaaatctttcatcatatacatgca

SEQ ID NO: 161950 - DNA, 479 bp, Glycine max
  unsure (1)..(479): unsure at all n locations
ctggcctatgaatacatcggcacgaanataactttcattcttatatacttagcatgtctcggatcaacgcctgcgatactgcgtatcgacaactcatcatacatgataatgagcggcctcatctcagatgagcactcgcgagcgcttgaatccaatacatatctcacacacacacacgcacactcaaagcaagcaatagatgatgtcatagctataccgcccctgtcttcttctttctgcttcgaccgtaataaggcagaaactctcatcttggcttgctaactcacatgctgcagtctcgggagtagttgataggcgttcatacttgacagaaatggatggattccctccattggcaccataggcgtgagtttccccaaccgtcaaattcgaatgtgtaactgcaatgctgctactataagatcccatacatagtgttacgacggacaacctcgagccaaagccaacttctcaggccc

SEQ ID NO: 161951 - DNA, 458 bp, Glycine max
agcttgagtattggctgctgcgccgagtgcaagactacgagttgtgttaggcttgggagcaagactgcgaggtcactaaccatagaacttagacaccgctttttgtccaaacaatatataaactcagtattagggacattagacctcactcattcaaacaagcggcttatatcacctccgtgtgttatatatacagcatttttggaaacgcattatattctacgctatatattgaaaatttaggcattgttccaatagaattcaattcattaaaatacacccagtataattttttttttacatcatataatcataaaatgcagaataaaatgcagtgtttgattaactctcacatgcagaactgcagaagaccaaatcaaaagctaaaacaatataataaatgaatttcaattcaacacatctacagacatgtaaaaatagagattggcaagaatata

SEQ ID NO: 161952 - DNA, 441 bp, Glycine max
  unsure (1)..(441): unsure at all n locations
ttaaattctattgacaagagatttctgaggaggagtttcttgctttttggataacaaataaagtgtgtttagtaacttttataaatcaattcttactagtgttgatggtaccatcttcattggtgacatctatgcgagggcagtctcatatttcattggcttgtggagtggcgttgccacatttatctattgggactgacgagagtaacatttccatccatatgttttgttaaattttgttatttaaattgaatagggagtttcatgatatagatctatttttactgtttcttttatgtacccactgcgatttatcatattacttttcagtcattagtaggttactcactattgagttatgcatttgtgagttntacttaattgtttaaagtgcttctagtgtattagatgctaatctattatcgaaacacagagctaaat

SEQ ID NO: 161953 - DNA, 594 bp, Glycine max
  unsure (1)..(594): unsure at all n locations
tcctgtnagtctgaacgtaatcatgaattcaccgtgcaatcggatgcttgtcatcanacaactancaccagcaagtganncttgaaacccttgaggaccctagcancncncngaggnanccacgcgcatgaagatgaatctagagnccttcgatgtctgacattgctgatgtttacaagcccgaagaatgactccaagagtgagacaacaagaagaactcctgatgagtccacccataacccccaggtgtatgacccagatacgagtgctcgacatatcggaggaatatnccagacgacttcacaagggaagtataaaacagtttttgcttcaagaaacagaaaagagctctctcagaagtgtatcagctaccagagttattactctcgtggcaggcgaataccagttatttggaatcgatgaccagtggccaagttggatgcacgaggtttttaatgaatcggttccatggagctcgtatcttcaacggtgtaatcgagcactagacataggtaatcacctactcgtgcaactggaacgcaggaagttacatgtgagcagtgaactcgcgtctctctatatcaacgagcgtcn

SEQ ID NO: 161954 - DNA, 403 bp, Glycine max
  unsure (1)..(403): unsure at all n locations
agcttcatgatgatgaatcaagtagttntgataatgacaaagatgatgacaaaaagcccaaagaatgatttcaagattaagtcaacaagaagaaatcaagaagattcaagaatcaagagaagtttgatttcaagattcaagaaaagatgaattcaagattcaagagaagaaatcaagaagacttcacaagggaagtataaaaaagtttttttttcaaaaaacaaaaaagagtttttctcaaaattttataagttaccagagtttttactctctggtaatcgattaccagtttcttgtaatcgattaccagtggcgaagtttgatttcaaaagcttttaacagaatttgcaacgtcccaattgatttcaaaatggtgtaatcgattacaagatattggtaatcg

SEQ ID NO: 161955 - DNA, 459 bp, Glycine max
  unsure (1)..(459): unsure at all n locations
tctgcatgtctagagagttctagagagagaaaggtccaagttccagagagtttgagagattntgttgtgtgaagatctacagagaccagagcttgagaggaaaccgtcctgagagcttgagatgagtttgtgagtgattgtgaggtcctagaggtggaggagacatccccactacttgtatttctacaatctttcatctttctcttctcttttgtgtaaaggaagcttcccagttatggaaagctaaatcctctgttggatcttccttgtaggtacttgatgcaaatatctttttatttatttaatgatgttttttgtgttcactgtggtatcagaacttcattctaccatgcttttgccttgatcatgtagatgcatgtgtttttaggataattgaacagtggaaactgatctgattcttagaacttgataggacggngctagtttgtcgtatttaca

SEQ ID NO: 161956 - DNA, 450 bp, Glycine max
  unsure (1)..(450): unsure at all n locations
agcttatgaccattcgaatttctcaagagtttccgttgttcaatttcgagcgtgtagatgagttatgtccccgaatcggacatctgtgtgaaaagttatgaccattcgattttctcgagagcttccgttgttcaatttcgagcgtctcgatatattatgaccccgaatcggacatctgtgtgaaaacgtatgaccattcgattttctcgagagcttccgttgttcaatttcgagcgtctagatgagttatgtccccgaatcgaacattcgagtgaaaacttatgaccattcgaatttctcgagagcttccgttgttcaatttcgagcgtctcgatatattatgttcccgaatcggacatccgagtganatgttatgaccattcgattttctcgagagcttccgcttgttcaattcgagcgtctcgatatattatgtccccgaatcgacat

SEQ ID NO: 161957 - DNA, 393 bp, Glycine max
  unsure (1)..(393): unsure at all n locations
tgccgccacggagttntccgactatgctcttgtgtggtggaacaagctacataaggagagagcaagaaatgaagagccaatggttgatacatggacggagatgaataagatcatgaggaagcggtatgttccggctagttactcaagggacttgaaattcaagctccaaaaactaacccaaggcaacaaggtggttgaggagtatttcaaggaaatggatgtgctcatgattcaagcaaatattgaagaagatgaggaggtaactatggctcgatttcttaatggtttgactaatgatatccgtgatattgttgagctgcacgagtttgttgaaatggatgaattgcttcacanagcaatccaagtggagcaacaattaaaaagggaaggagt

SEQ ID NO: 161958 - DNA, 390 bp, Glycine max
  unsure (1)..(390): unsure at all n locations
catgcaagctngactataattcattatttgcgttatgagcctacatcaaccaattggattaatgatgtttttgtcacaatcaagtgattgtcaacgtctccatatgggtgtactttgtggtcatgttttcatttatagaattcatttggaatgtctgttgttaattctgaataagtgaccattcttcatttaaaattaaagtctcttaatcaattgagtgttcatctagttatgagttgatcatcttccaatcatgtcttgttaaattgtttgatatattgccatgttgttacttctgtcatgtatagagagagacttttccctctgtaatcacgcttcgacgttcgagaggaaatacttgtgtagacatgatccttgctacctactgat

SEQ ID NO: 161959 - DNA, 158 bp, Glycine max
  unsure (1)..(158): unsure at all n locations
ttctggtnactgacacaccttatattnntgtgctattgattttcttatgacaataggaccaaaaatttaaaaataggatttacattatgcttgtcaacagtgaattannnagagatttaaaccacactaaagaaaaaaattattccaggtgtctatac

SEQ ID NO: 161960 - DNA, 436 bp, Glycine max
  unsure (1)..(436): unsure at all n locations
agctnnttggagtagaaacatgggaccaactcattntatttcaaaaaggaagtcgtatctagtcaaggtctgagagaccatacaagtttcctaacgatttctaattatgtgggccattaagtctatcatatgctgacaatagccgagaagcccatgaatctcttcgggggtggagtaggtgtctgccatcgccttggccttggctaacaagccgggaagttcttgactctcgttcaaggtaagagcaaaccgatccatccacatggttgcctcttggtgtaaagagtcgatcacccttcctctagcctctttttccgcgtatacttgagcatactcgtncgcgattctatgcccgtgggccgcggctagacctaactcttcttggtacttggcgatgatagctagcatgttggtctccgtctctgataaacgctga

SEQ ID NO: 161961 - DNA, 480 bp, Glycine max
  unsure (1)..(480): unsure at all n locations
tggagctcggngtctttntgaagttcctcagctgacttgtagtagaatgagacatattcttccacccaagacttgatatcatcccatatctctagcccatcagaagcataaggatagtcctcgatcaaaagtcaaactccatggggagcagatggatccttaacagcaactcctctgaattaaaagcacccaaataacattgattagcataagagttatatcaagcctgaagccttttttcttcttatgtcattgatgactttttatatcatgcattcatgtgccactactctgtcaaagccatgaactgtcaaagccatcatttaggatgaaacagtctttgtctttccaaaatctgaaatacgagccacttgagcatctgctaaacgatatttcgtgccaccaatagtaacctcagatgaaacagtctccacatccaacacaatataatccaccaattgtctactagtaagtaatgac

SEQ ID NO: 161962 - DNA, 464 bp, Glycine max
agcttgccgcccagctcgcccaggcgagcaaggttgcttcctccagaagcaacagccttctggaggaatcttttagagggccaagtgggcctggttgctatttacacccccatttttactaaatgcaccccccctttctatttttttttgtaattcattttccgtaacgttacgaaactttacgaatttcgtaacgatacctattttccttccgcaaggttacgaatccttacggatcatgtatttactcttttttactttcaaagaagttacggaaactcacggattgcgcaaaaacacctctttttgatttccgccacattacggaatttcacggattacgcaagcctgcttccttttggatttctgagacgtctcgggacttcatttaatgcatgtcatcaagtaataatccccggacgaaatatggtatgacagttgcccctctttacttacctctcatc

SEQ ID NO: 161963 - DNA, 490 bp, Glycine max
  unsure (1)..(490): unsure at all n locations
tactaagcttacaacanattcaaaaccaacaacaacaaccacccaaaaccatatacaaacaacaatacaatcatgcaacaacatcacaatagcaaaaaatcattgaacgcttcaacaaaagcagcttcaaagggatgggaccacttacctggaagaagattacccaatgaccggaagaaaatgggaacaaccaccaacggaagaagtgaacggcggaagaacaccggaacaggagcaaccaccaatggaggatcggaagaggaacaagcaacaaccgtcaaacaccagaagaggaagacgaacacgtgcgtaggcagaagaagacgaagaagcatatgagaggaagatgaagatgaaacagtgtcgtatgaacgaaatgtagcaaatgcactgtacgaacgactaactntgggattntatagtaatagggtgaatggcattttggacttttcgccatgggtgttgggtgcacaaagtaacacccctgata

SEQ ID NO: 161964 - DNA, 346 bp, Glycine max
gcgcgtatgaccattcgaagttagtcagagagttttcgttggtcaataacgagcgcgtagatagagaatgacttcaagactggagcgccaagactcatacaatgaggcatcaaattgctacataagcagcggatgcatagtcctgagcgtatgaaccatttatttgcgagaagatatcaacagtgccttatgagactacccttcgacactttcaagacccttccttggagaatctgcacttttgctataacttttgcaccctattctaacatttctgcgacagctggtgaacttttctcaatcctaatagcggctcgtgttactcgtaaatacgcttgctctatgg

SEQ ID NO: 161965 - DNA, 419 bp, Glycine max
  unsure (1)..(419): unsure at all n locations
aatacgtggttcgtgatatcttttggtgtcatcctgatgcagtgaagttggtcaacacatgtaatttggtgtttttgataaacagtacctacaaaacaaacaggtacagactcccactgctcgattttgntggggtggcaccaaataagatgacattctctgccggatttgcatatctggagtgtgaacgtcttaataatgtggtttgggctttataatgcttctgaggtatatttttaagacgtgatgccctccctggagttattgtgactgacagagaccaaacattgatgaatgcagtgaaaattgtattccctgagtgtacaatttattgtgcagctntcacataaacaagaatgtggagaccaaatggtaatcgttgattggtcaaagaaatgctcgtgagtatgtcatggatg

SEQ ID NO: 161966 - DNA, 348 bp, Glycine max
  unsure (1)..(348): unsure at all n locations
gagcgtatgaccattcaaatcggtaagagttttcgtagatcgatatctagcgtgaacacgagttatgtacccgactcgcacatcggagcgagaagatatgaccagtcnagttgttcgagagctgttcgttgttcatttacaagcgggtctatgaaccaagcacgggaggctcacggtggcgagaacacgcatgatcaaacgaagtgcgagagagcatgcgttgttcattgtttagcggctgtataagatatggccccgcttctgccttaccaaacatgacaacagacggtatgcagtttgtcaaacataaagtatgttgaacgcgagcgcatgatgatgcaatgactc

SEQ ID NO: 161967 - DNA, 297 bp, Glycine max
  unsure (1)..(297): unsure at all n locations
ctcttctcctctcggacctgttccttctcaatgtatgcttaatttctaagtccaaaggaactaaattgcctgtgggagatctatgcatataaaatactaacagacacaatggttatccaattcaataagagaagttatatatgaatagaanacaaatattcgcagataataaaaaaataacgaataaagaatagacacctataaatgaactaacttgtcagataaaaagaagttccctggcaacggcgccaaaaacttggttgcttccggcaagtgcaccggatcgcacaagtagta

SEQ ID NO: 161968 - DNA, 453 bp, Glycine max
  unsure (1)..(453): unsure at all n locations
agcttatatactccactgtatatattaaaatgaaagctccacatgatatatgtatgaaaaacanagatagcagatattaaaactgggttgcctcccaggaagcgcttctttaacgtcattagcttgacacatagcttaatgccttcaaggtggcatgaaagtcacataaaacacatcttccttgcagtttcgccttttagctagaaattccatgaacttcatgtagtttgcaagtacattccaaatcatttcaggaaaggtgttagtgattaaagaaagaatggcacttaagatttcctcatgctctccttgccttcttttcttgtcaatctgttgatgaggaagggtattgatctggagaataccttcttgattgttntctactatcgagaacttctcncattgttgctgtgcttggtactcatctttttccttgactcatgctctnttaca

SEQ ID NO: 161969 - DNA, 462 bp, Glycine max
  unsure (1)..(462): unsure at all n locations
tctatagaaggttcgttcctaatttctctacaattgcatcatcttctaggaacttcaagttgtatcatctgttctaaaagagagaaatcattatgttcatcttataaaactcagttgtaatcaagagattgtttgtctcttggcatgtgagaaactcgaacataagggtgagggatcccaaggtgtgttcaaagattgtaaaggatttacaaggatagtggaaaatattaagtaggttacttaaggacaggacatatgcacgggaagtggccgaaccaatataaatcaagtttgcaattctctcttcccttgtcttgtttatttttattgcaatttactttgtcttgcacatttaaacaatattgttaaattgactattgcttcttcttctacattctaaatctatcacatatcatntaaaaggggattaanactttttagttggaaaatttaaagacttaa

SEQ ID NO: 161970 - DNA, 425 bp, Glycine max
agcttcttatccaacgcactctcttggtggtgaagctcctccttccatggcttattccctagtggatgacgcctcttctcacctcttttcccttatcttccgctacatcttcatggttgaaaatcaccattgaacgacctcattgaagctcatggatccagcctccatagaagattctcaagaagcttccatcataacctgatagagaaataaaaaatacttaattcaaattgaaaaacaaaacgatgctagtcccttgcatggttcaaattgttgagcatattatagtacatgatagatcgataattatgttaatactataaggacttgtgcatgttgtaaacttggataactcatttgattggacaagtgaatgaggttgggtgcgcacactctacatgagatcatgaatatcttataatata

SEQ ID NO: 161971 - DNA, 449 bp, Glycine max
  unsure (1)..(449): unsure at all n locations
gtagttattcataatcaaacatggccttcatcatcctcaagttcatacatccaatccatactttagagattcacgcaaaaatcagcactacatgatagtcgtttctctcaaaattttaaagatcacacactcactgggatacggttaatgcattccttcataatcaatctgacaactgactaacattttcagacataattccaatcatatgctcattctcttctaataacggcaaacttgatcaaaacaatcatccaatcatcccaatccattcaattcatacatttgctcaatcaatcatttcctaacactcattccataccaaacaagccactgcatacaatgttcaatcaattcactgttcaatcaagctttntgtacaagaaaacaaacaactatactactgaaattaaaagactgaaacacnaaagcttgaaattaaatgacat

SEQ ID NO: 161972 - DNA, 269 bp, Glycine max
  unsure (1)..(269): unsure at all n locations
gcttttatccaagacattctcttgggggtgaagcttcttcttccatggcttattccctagtggatgacgcctcctctcacctcttttcctttatctttcgatgcatctccatggnggaaaatcaccattgaaggacctcattgaagcttaaagatccaacctccatagaagcttctcaagcaagcttccatcaataggcaattaggcaatttgacctgctaaaccctaaatctcaaattcatctagcaagcaaaattgtccctatacag

SEQ ID NO: 161973 - DNA, 434 bp, Glycine max
  unsure (1)..(434): unsure at all n locations
ttctgagctaggtccatatttcaatttttaagatgcatggttctctgtgttgccatgtaatcctttattcctaattagntctgctagtctaatactattttcaaaatctaaatgttaaagataatgaaaacaagtgtgaatatttgtcttttctagtaaacttcttggattttgcttaatttcagaaagtatgtgtgcaacttgctatctagcttgtgtgtgtataagctctgctaaaatgattntaaccaaaggatatctactaacttatttacctatttccgtgtgtattacagcaacatagcttctatgagctaattgtgaacagagctagaggcgaaagcggtctagtatgaatgttttatttatatattatacatttctctattggaaggcgcatgttttgatgataaatgatgccatcaacactcaat

SEQ ID NO: 161974 - DNA, 431 bp, Glycine max
agctctgagccaattctaacgataataactttttactcggatgtccgattgagtctcgtaatatatcgacacgctcgaaattgaatggtgaagctctaggcctattcaaacgacaataacgttttactcggatgtccgactcagtgacgtaatatatcgggacgctcgaaattgaatgttgaacctctgagccaactcaaacgacaataactttttactcggatgtctgattgagtcccgtattatatcgagacgctcgaaattgaatgttgaacctctgagccaattcaaacgacaataactttatactcggatgtctgattgagacccataatatatggagacgctcgaaatggaatgttgaacctctgagccaattcaaactacaataactctatactcggatgtccgattgagtgacgtaatatatc

SEQ ID NO: 161975 - DNA, 440 bp, Glycine max
  unsure (1)..(440): unsure at all n locations
taaacattcaatttcgagagtctcgttatattacgggactctatcagacatccgagtaaaaagttattgtcgtatgaattggcttatagcataaacattcaactttgagcctctcgatatattacgggactcaatcagacatccgagtaaaaagttattgtcgtttgaatttgctcataggttcaaaattcaatttcgagcgtctcgatatatttcgggactcaatcagacatccgagtaaaaagttattgtcttttgagttggctcagaggttcaacattcaatttcgagcgtcccgatatattacgtcactgaatcggacatccgaggaaaaagttattgtcgtttgaatntgctctgagcttcaacattatattacgagcgtctcgatatattacgggactcaatcagacatccgagatacaagttattgtcgtttg

SEQ ID NO: 161976 - DNA, 394 bp, Glycine max
  unsure (1)..(394): unsure at all n locations
agcttgtctcagcgtttatgcgagacagagaccaacatgttagccatcgtcagcaagtaccaagaagaattaaatctagccacggcccacaagcacaaagtggcagacgagtatgcccgagtgtacgcggaaaaggaggctagaggaagggtgatcgactcgttacatcaagaggcaacaatgtggatggactgatttgctcttactttgaactggagtcaagaacttcaccgattgctagccaaggccaaggcaatggcgaacacctactccgtcctcaaggagatccaggaacttcttagctattgtcagcatatgatagacttaatggcccatataattagagaccctanngaagttgtattggcactcagatcttgactagttataactt

SEQ ID NO: 161977 - DNA, 455 bp, Glycine max
  unsure (1)..(455): unsure at all n locations
tgcttgtggtgcttctatggaggctggatctttgagcttcaatggcgtcctttaatggtgattttccaccatggagatgcagcggaagacaaaggagaagaggtgagaggaggcgccatccattaaggaataagccatggaaaaaggagcttcaccaccaagatgaaccttggataagaagcttggaaggatgcttcaatggaggaaaagaaagagggagagaaagagagaggggggagcacgaaattgaaggaataaaagagggagagaagtggaactttgaagtgtgtctcataagactttcattcatcaaagttacaacaagtgttacatatgtttctatttatagactangtagcttcctggagaagctttcttgagaaaacttccttgagaggcttctttgagaaaacttccttgaggagctagagcttagcaacacacacccctctcat

SEQ ID NO: 161978 - DNA, 456 bp, Glycine max
  unsure (1)..(456): unsure at all n locations
agctcgcttattaattaacaaccttttattgtcttaatagcttaagtttcaagattgattggtcgattgagatgaaattaaaactgttgacgttaatttcaaatagctggctcctacatgtgctctgttcttaaatttgtatagataattgggctttttttagtaatcaaattttagaaaaaataaaaaatgatgataagtagtaaccaagtttattttttatatatttttttctagcagtccaataattttatttgaatgtattaaaatataatagaaattactggaaataataaacatttgttttgaataaattgtgatagacaagttaagaatgaaaacaaagaagaaatgtcataattggaattgttgggtgaaaactaatataagttttgatatttatttctatgaaatgtanggtcacttcaagtaaatgaagtttcatactaattatat

SEQ ID NO: 161979 - DNA, 463 bp, Glycine max
  unsure (1)..(463): unsure at all n locations
gatgcttctagtgaagacaggaaacgcgatgaaattagaaaacacaatgaaatgttaaaggcttctgaagctgttgctgaagtcagagcagaggtggataagctcgctgagagggtgagcctgcttctcatattatctttggttattgaaacataataactggagctgagaatgaggatatgagtgattttgatttgcaagtatctgtcttggaagtggctgtggatggagggaccagggtttctgacaaagagtttttgatgtccacagagttgcttatgaggcaattgctgaaactggatagtattgaggctgaaggtgaagtaaagctgcagagaaaagctgaggtagtgtttatggtggttagaattataacttaaattctaactaattgcgtattagntattgtgtttattttggtatttacaaaatcccacctattagtaagtcatggacactgact

SEQ ID NO: 161980 - DNA, 352 bp, Glycine max
aagcttatgaccattcgaatttctcaagagttttcgttgttcaatttcgagcgtgtagatgagttatgtccccgaatcggacatctgtgtgaaaagttatgaccattcgattttctcgagagcttccgttgttcaatttcgagcgtctagatatattatgaccccgaatcggacatctgtgtgaaaacgtatgaccattcgattttctcgagagcttccgttgttcaatctcgagcgtctagatgaattatgtatccgagtcgtacattcgagtgacaacttatgaccattcgaatttctcgagagcttacgtagttcaatttcgagcgtttagatatattatgtccccgaa

SEQ ID NO: 161981 - DNA, 427 bp, Glycine max
tttccgactatgctctcgtgtggtggaacaagctacaaaaggagagagcaagaaatgaagagccaatggttgatacatggacggagatgaaaaagatcatgaggaagcggtatgttccggctagttactcaagggacttgaaattcaagctccaaaaactaacccaaggcaacaagggggttgaggagtatttcaaggaaatggatgtgctcatgattcaagcaaatattgaagaagatgaggaggtaactatggctcgatttcttaatggtttgactaatgatatccgtgatattgttgagctgcaggagtttgttgaaatggatgatttgcttcacaaagcaatccaagtggagcaacaattaaaaaggaagggagtggctaagaggagttttaccaactttggttcttctagttggaaagacaa

SEQ ID NO: 161982 - DNA, 452 bp, Glycine max
agcttagatcaggcatccgagtcaaacgttatggccgtccgaatatgcatgggcattccatttcaacttttaatcgtcatgatatattacgggcctcaatcggacatgcgagtcaaaactttagcccgtcagaattcacccgagtcttccatgttaaattttgagcgtcgcgataggttacttggcttattcgaagatccggaggaaaagttatggccgtttgtatttgcgatgggcttcacttttatcctaagagcatctcgatatattatgagcttcaattgggaatccgagccaaacgttatggctgtccgaatttgcgtggtcagtccatttctactttcgagggcgatgatatattatgggcctcattcggacatcgattaaaactttgccctgcggattcacccgagtttccatgttaattctagcgcccgataggtacttgctta

SEQ ID NO: 161983 - DNA, 478 bp, Glycine max
  unsure (1)..(478): unsure at all n locations
taacanacttaganatcaagtgatcatgtattccgaaatatatggggagaaaacggatgcacattttatctatatacagttgtttgttgtttgcttgaatcttgatttcaggtattgtattgtcatcatcaaaaagggggagattgtagatgcaattggctttgatgttttgatgatgatcatgatgatgtgttgcaattgatgcaaatgggcttttcaagattaaaattcaagacaatacttcaagattacaagtcacaacatcaagatgatcactagaatattaggaagggaattcctaattgaattagcaaaggtttggccaagtgatttaaaataaaaagtgtttttcaaaggttttactctctggtaatcgattaccagaggatgtaatcgattaccagtggccaaatacgttttataacagctataaaaatttgaattcgaaattttaaaacctgtaatcgattacacaatt

SEQ ID NO: 161984 - DNA, 172 bp, Glycine max
taattaattcaaattgagaaataaaatgatgctagtcccttgcatggtcttaaattgttgagcatattatagtacatgatacactgataattatgttaattctataaggactcgtgcatgccgtatacttgcattaactcatctgaatgggaccattcaatgtcgccgagag

SEQ ID NO: 161985 - DNA, 381 bp, Glycine max
  unsure (1)..(381): unsure at all n locations
tagaacttaaaccttcgattctcactcgattcttcaccaaatcacgtcccgtaaagcccaatcttcctctntttcactcctctttcacttccaccgatcaaaatccagaaaaacttcatcaaatggcagagccatcaaagaagagaaagggatcatcttccaccgccaccgctgctgcccatcgccgtcacgggccatccggagcacccacagcacctattcctccttctttgtcatctccaagatcatcaacactgttttcatccgatgatcaacgtctacggtacctttctcagttttcttctagaataatcttagaccctaagtacctagacgtagagttctttaatgatgaaacgtttgattgctatcaagtgtttc

SEQ ID NO: 161986 - DNA, 448 bp, Glycine max
  unsure (1)..(448): unsure at all n locations
agcttattattatcttggttcataaattggatgaaatatattcctaatttcattttataaagcatatcaccataataattaataagcaataataacgtcactataagtagtatcccaaagttaaggtgattcctagaggaactaacaagagaccttaactaaaatatgaatcccaagtgaagggtgacgattaatgttttgtcctcatgtaattcaacatgcccttgggtctttgaaatttactaatttatgccattgataatacaaataaatgattattaaatatttaaataactaaaagaaaaaagcatgcatgtctcanatattatgctacagcaacaaagagtggtaaaggagattaatacagacaactatggcaacggagaaatcgcgtattctttcataagtgtccacaatacccattctctgaagtgccataagccgacta

SEQ ID NO: 161987 - DNA, 453 bp, Glycine max
  unsure (1)..(453): unsure at all n locations
gcgaatatgagaaacgtagagaacattatcacaatccataccccaagctaactctaacccttcattggaataactattttgaacatgtgttttagaattttatttttgacaaaatgttttatcctaatatcatgaattgaccatttgattatattttcattnttttgtttttgattattttcaaatatatttttatttttttaaaaatctaatttgattaaaataatagctaaaaattttatttctcaaccatcttaaactacttggtcttttatcttntattgtatgggtgattttcttaattacttatctctttcaagttattattattatttttatttttaaattaaattttaatatatttaaaataaatcattaaatagttaaaattaaccttgtatcttgnaattaattatctattatanatctaacatatatctgtatcttaattat

SEQ ID NO: 161988 - DNA, 439 bp, Glycine max
agctatagcaactctttctttttgtttagtcaaaacttctaatgctcttaatctctcctcatctaaatcaactaactcatctgacatcattttccaataatggtcgattggaatgtccatttgtttttgtaccctggctgattgcaaatgtatttcgaccggaagtacagcatcatgcccataagtcagtcgaaatggggtagtattagttgattccttaggagaatttctacatgcccatagaacttgatctaacgttttattccaatttcttggctttagggcaatgtgttttttaatcaagttaattacaatcttattggctgcttcgacctgaccatttgcttgcgcgtaatatggtgttgaggttaataatcgaaagccagttttttgggcaaattcttgcatttttcgtccagtaaaaactgaaccttgatca

SEQ ID NO: 161989 - DNA, 442 bp, Glycine max
  unsure (1)..(442): unsure at all n locations
ngtgaatgtatatctatcattcccaacttgcaagtaaggtcttgaagttgctccgtgggaagtccttggtaagggatgtattcggtggctataagaccactgtctaattnttccttaataaaatgtcgattaatctctatgtgctttgttcgatcatgttgaactggattgtgtgcaatgctgatggcaaacttattatcacaaaccagtcccataggaacttcatattttattttgaggtcatcaagtatgatattcatccataacaactcacaaacaccttgagccatagctctgcttttgcacttgatcttgcaaccacattntgcttcttactcctccacgttactaaatttccacccaagaacatgcagtatcctgtggtagatctcccatcaacaatngatcctgcatagtcagcatcagtatatactttcatgat

SEQ ID NO: 161990 - DNA, 190 bp, Glycine max
agcttgctgcatatataacaatcttgagtactctctaaatgactggtaagaatatctgccagttgataatttcaattgatgaagttagtggtgatgtctctggataaaatctacagtgaggaggtagagagaagattgtaatggaatttcaatagatggcagtgatggaggggaggaatacatttacact

SEQ ID NO: 161991 - DNA, 423 bp, Glycine max
  unsure (1)..(423): unsure at all n locations
tatcagaaggggaatgagtaaataccacctcatgctgatattatgaaggtggcaaagtgtttcttttgcaagaagaagggacacatgaaaaagaattgccccggattccaganatggcttgagaagaaaggtaaatcaatctcattagtatgttatgaatctaatatggttagtgttaatattaacacctggtggattgattctggatctactattcatattgcaaattctttacagggtatgcataacctaatgaaaccagtgggaagtgagcaaagcattttatcaggcaataagctaggctcacatgtggaggccattggaacttgcattctgactttaagtagtggctgtattttaaaattagaaaggactttctatgtanccaagttttcccgaaacttgatttctatttcaaggctt

SEQ ID NO: 161992 - DNA, 393 bp, Glycine max
  unsure (1)..(393): unsure at all n locations
agcttcttgcgtagccgctcttggtgctcatataatccaaaaaacaaatccctcttattactagctattttgaattctttagttcctgaatgtacaaccttcaaattgttgctcgttcccctctttcttttctgcaaaaaagaaaatcaaatgctgtcaaaacaaggatgaagtcctaagaaaatcaatatcaaagaaaacatggatgaaatcacaattaaaaagcacaactacctatctttcagagtcctttggttaatttgtcttgtctccttatatggtggggttctgtttaataatcttatacttttgccttccaaaaaaaaacttatcactaatcctcttttcattaatccaatttttntatgttattgtataaaagatcatgggttc

SEQ ID NO: 161993 - DNA, 454 bp, Glycine max
cgcacaatatctatgagtgcagctatggtagcgaaaattgtatgagtttatcttcagtcaagcaacaagaagatagaagcgccttaacttcctatgccagtcaaatagtagtacctacaacgaatatggggtgatatgtgtcggtgagaaagttaagcagtcatttataatttggtgatgttattaacaaaaatgaatagagatagaaggagactcaattatttgttgaattagagacaataagtgacaccacatctttggaataatcgatgacatttgtagttaacgaaattcttcatttctaatctactgttgaggagcttatatatgaaagtcacagccagacctaagctagaaaaatttgcaacatcatattttacaaagcacaagggacttggtgattgtccagttaaaagctgtccaacataagagtctgaatgatgtagctagcatg

SEQ ID NO: 161994 - DNA, 406 bp, Glycine max
  unsure (1)..(406): unsure at all n locations
agcttgtagaatggttagacatgatacatgtcagggcttggtttggttcaaggataaaagggatgccccacattatttccatgacacaaatgcaaaaatgatgatttggaaactttatgcaaaactggtcatgcatgcgcctatgcggacgctcaagtgtcaaatttttatggtcatgtgatgctagggctcangattcatttcctctattttaaatcaacccaatgtttccaaaatatgttcttttatcaatttgtgcattcctccaagtccatttcgggcgtccgaggaaattttcacagcattcacccttcaggtgtagacacgttttttcttcaaaaatcggttatgatcaatgaattntttntcaaagaaaagttggaaatcatctcttttanaagcatgt

SEQ ID NO: 161995 - DNA, 442 bp, Glycine max
  unsure (1)..(442): unsure at all n locations
ntatagcacagcaacacagaatctaggtgtccaacacccctcaattcaatgggttntctaggtttgaaaagtgaaatcgagaatgaggtaaatttgaagcaaactctcacctcacaccagtccataacatcaatctaaacttgctcaaactggatttacgcttaaaatctcaccgaatcaaaatttgactcttccacacccaaatttgccctagaaatggctctntgttcactntggtcatttgtttttctctctagcacagcctaatctttctcataagtcctaaatgacatttcaagctaggattaactcactntaacctccatttaccacagaatccagaattaaccttccaactctcaaagcctcactctntntccactcataacatcacattctcactttctaaccctaggttaactctacccttcacctctatcag

SEQ ID NO: 161996 - DNA, 355 bp, Glycine max
agcttgagaaatctcttcgattctgcaatacatttctgactctatggcatgagatgcaccgcatagataggacctcccggtggttgttatcaacgaatatcttaaacacttgtgcttgagtgaaacagtcgctgtgagactgcaggaggagctactgtccttgatacctgtgttatgactaacttcgtctaactgtataggacacattatgttctactctttatctagctgcatattatgggagaacaagtgattggtacacattgcttcatcttctacatcatgcaatcaatgaattataacgcgtacacctttgaacatatacactgcgtgctttaccacttgaggacaagtg

SEQ ID NO: 161997 - DNA, 388 bp, Glycine max
  unsure (1)..(388): unsure at all n locations
ngccacccagctcgcccagatgagctaggttgcttcctccataatgcaccacaacgatgcttgttttgcacaacaatgctctttgtgacttccagaatgttgcgaaactttacggattgcgcaacaatgcttgttaaacatttcagaatgttacggaactttatggattgcacaacaattcttgttgaacattttgaggcggtcaagagaaggtcgtatgccaacaaataatgtgcccttgacgaaattagggtatgacagacgcccctctctacttatcttttattggagataaaagtgaagtaaagataagacactaatttcgttcgagtggaacatgatttggccgatcaatatccctacccgcggaacctgtcattcagaaaga

SEQ ID NO: 161998 - DNA, 303 bp, Glycine max
  unsure (1)..(303): unsure at all n locations
tcggatgtncgatntaggcgnatattatatttagacacttgatattgaataacagaagctctcgagaaattcgaatggtcataacttttcacacggatgtccgattcgggcgcataatatgtcgagacgctcgaaattgaacaacggaagctctcgagaaattccaatggtcataacttttcactcggaggaccgattcaggcgcataatatatcgagacgctcgaacttgaacaacggaagctcccgagaaattcaaatggtcataacttttaactcagaggtccgattccggcgcataata

SEQ ID NO: 161999 - DNA, 378 bp, Glycine max
atgacaatttgaattgctctagagattccattgttcaatttcgagcgtctcgatatattatgaatatgaatcggacctccgagttaaaaggtatgaccatatgaatttctcgagagctttcgttgttcaatttcgaggcgtttgatatattatacgcctgaatcggaactccgtgtgaaaagttatgaccatatgaatttctccagagattccgttgctcaatttcgagcgtctcgatatattatgcgcccgaatcggacctccgggtgaaaagttatgaccatataaatatcttgagagcttctggtgctcaatattgagcgtcttgatatatatgctccagaaattgacttgcgagtaaaagtatgaccatttgat

SEQ ID NO: 162000 - DNA, 434 bp, Glycine max
  unsure (1)..(434): unsure at all n locations
gagcccgggtagtcaaagagaagttcaagtctatagccatcaaagtctgaagagagtatgatgaactaagggacgtcaatatggccaccgatgaagccttggaatgagaaaccaagaaggcccgaaaggaagaacacgaccaaaacaagttttgaggggctttatagggcagcaatagtgagctcaagctccgaagaggtgaaaggaatcatcacgggtcaaaggcatgatcttgaaggacgagctaaaggcttgccttaggtcgaaaagaaatttgtcccaacagttaaagcgagactgaagggaatatgtgggccatcatcgatgagtgcaaagagaagctaaatctagcggcgactcacgagcanaggctagaggatgagtacgccaagatatcagcagaaagggaagcanggganagggtaattgattca

SEQ ID NO: 162001 - DNA, 460 bp, Glycine max
  unsure (1)..(460): unsure at all n locations
tcaaactatttgcttcccgagggaaattctataaacagacctcccatctttaatggagtgggttaccactactggaaaacccgcatgcaaatcttcatagaggcaatagatttaaatatttgggaagccatagaacaaggaccttatgttccctctataatagccggaagtgcaacaatagaaaaacctagagcagattggactgagaaagaaagaagattagtacaatataatttaaaggccaaaaatattattacatatagcttaggaatagatgaatactttagggtttcaaattgtaaaagtgctaaggatatgtgggatacactacaagtaacacatgaaggcacaacagatgttaaaagatctaggataaacactttgactcgtgaatatgaactttntaggatgaatgtaaatgagagtatacaagacatgcaaaagagggtcacacacatag

SEQ ID NO: 162002 - DNA, 443 bp, Glycine max
tggatactctgagtcacctgcagctgcagcttgaattgatacatcatttgtgtaatcttttaccagacacaaaagaaattcaaatttcaagtctgaagagtcacaactctatagaaactaactgtgtaatcaattaccacatttatgtaatcgattaccatgaagatattttcgaaaataactcccaagagtcacaactgttcaagaagtttttgagtggccatcaaaggcctataaataggtgacttgggatataaaattccttagagtttttttgaacaacattgtcttatcctctcaaaaccaaattgtcttatcactctcaaaatattccttggccaaaacactcgcaaattcaataaggaatcttgatcgatcttcaattgtaatatccttctcttaaagagagaaaattcttgttcttcttattcaaagagaattga

SEQ ID NO: 162003 - DNA, 415 bp, Glycine max
ctaagctaaggaaccgacacacctgtcggcaaccccaacactaaacatgagagagaataaaaaagacacttcactccaattccaaacctgttgctgaaaccccaaaaaacttacaacattctatgtttctgttcagaggaagaaggaaaaaaaaaaagttagcgtggttttgttgagttgaaaccgattcagctcaagtcaatccaaacacacatttggagaagaaacaataagtttcatttcgattttcaattattcaatgatggtccaagagcgttcacttcccaaatcagtgaactcgaagccccacgcgcgcacggcggcactggcctccacgaagagcctcgatttctccgcgtgggtctccgacaacctcgtcaggatcgtggcagtggtgctccttgtcgccaccgtc

SEQ ID NO: 162004 - DNA, 368 bp, Glycine max
  unsure (1)..(368): unsure at all n locations
agcttagtgactntttttctctcatttaccttttattattattgtaaaaaatgattgtaaagcatggctaaaatcagggttctacttaacttcaaatgccattcgttcgtttgtttacctttccttggatttcgggttctagtgccaacctgagttagctagcattttggggtatgttaaaaaaaaacgatgttaaaaggcagggaaacgcctttaaaaagctgagcttagttctctcacttaaccttatagaacgctgatggaaaatatgttcttatactttaaattctaaagcaaatttttttcttctcaatcagatatcccatatcttttaaaaattgtgttcgagcgattctctagattttcta

SEQ ID NO: 162005 - DNA, 447 bp, Glycine max
  unsure (1)..(447): unsure at all n locations
attttctgtggactntgaaggtttggaaccttagaatggaccacatatagagtcatggcccaaggaaacaaatagatccatggcgtgtacagttttgggatgctntgctttgagattctatgttctaagttccaactggaaaagttcctttccaagataggcatcaccaagggaagacattagacaaggtttgtgctaatgaaatcanggacattcaactttttaaatattgtaattttttaatgttttctttttcatgtctattctgtgattctgcagtatacactattttcccataattttagcgaaacaattgaaaaaggaaaagcaaaaaaataaaataaagggaaagcatatgtgagattgaaaatncgattttatctgaccaagtaagtgattanaacataataaccctttatttacataanaaaaacaaaacaaaacttt

SEQ ID NO: 162006 - DNA, 163 bp, Glycine max
agcttgccatttattatattaccatgatgtataagcaacaagcttatatatataacttatatatatacactgagaattctgtggcgtgtgtctcaatttctgtgtaagctaggatatcattttctgtgaaaaggtatccctatctctattcccctaccattct

SEQ ID NO: 162007 - DNA, 382 bp, Glycine max
aaaatgaagatacaataaaatagtgagaaaatatatagatttctaaattatttaatatgaaatattcaaaatataaaataaaagtttcttgcccgtacaacaattctatttataataattctatttaattcacataagattacatttaatagaagatacacatcatttaaacaaaaattaaagtttatagatggacaactagaaactaaggaagctatagctagctaagctactacatattaataaagaacaaaacattacaagaaaaggaaataattaaaaaaggtagataaagaaaaaagtgaggtgaaagtttcaaattttgtgtggttccaggcttgcaaaccaatcctccagaaaggaattgttgagaaaaagtaat

SEQ ID NO: 162008 - DNA, 298 bp, Glycine max
  unsure (1)..(298): unsure at all n locations
aagagatttttaagtttataganatgaaagtgtgaagagagtatgaggaattaagggatgttaatatggntattgatgaagttttggaatgagaaaataagaaggtntgaaaggaagaaaatgagtaaaagaagttttgaggggttttatagggnatgaatagtgagtttaagcttagaagaggtgaaaggaattattatgggtnaaagggatgatgttgaaggaagagttaaagggttggattatgtngaaaagaaatttgtgttaatagttaaagtgagaatgaatggaatatgtg

SEQ ID NO: 162009 - DNA, 391 bp, Glycine max
  unsure (1)..(391): unsure at all n locations
gcttgccactacagnagataagtgaacatatgaagtgttcacagtcattggatggttgcttggtagaggtacatgctaataactaataagatttcctgtgcagggtatcattgtttttgcatgactgatggctaccttgtggctggagattttggttgaatctgcctcaagtgttattttgaaggtagctgagataatcttttgttgttgtttgtttattatatacctaaatttgggttcaagactagttattcaacatgtggattatgtaccataagactgttctaataagtgatcttaaggtaggcagatgatcttatcattgaagaggtgtgtttccttctctgttgtggattcatgacctataagttaatacatgaaactgaaaaat

SEQ ID NO: 162010 - DNA, 463 bp, Glycine max
  unsure (1)..(463): unsure at all n locations
agatntagtgtttgcgagcgaaaggatcgaagtaagtctgagaagaggtaaatntgattatgctgctctgatgaataagaagcctgcggcaaatggattgaataagaaagagggagaaacccatgttgtgattgtcgttcctacatggccaaatttcccactagctcaacaatatcaatgcacaatttctttcatttcttcttgctacaaggtcatgacaaacgacaacaacatatacctccaaaccctacaccagggcaatgacagacatcatgcatgagcttcaaacaaacctaggggcagacaagaagtcctatggcctaggcaagttaacgaaataaaaaaaaaaacaatcaagggcgtgttatgaaaggttntgtcccaaaatccacactggtaaagtctctggtcaagaattgaaatgacaaatggtcgtgtttcttcattccaaacacctgattat

SEQ ID NO: 162011 - DNA, 431 bp, Glycine max
  unsure (1)..(431): unsure at all n locations
agcttgtcanaataattattttttcagtagacttcacactcatgtctacaaataagctctcattttataagaacttatagaataaatgcttagttaacttgtttaccaaaacatgccaaagtctcaagtaataaacctagaaaggaagctataaagaattgaaaggtcagtcacttgtaatttagtaaaaagtcatataaagcttgtacattgctgtttccactaaaagctatcaaagatgttgggctattatcaacataatgaccttattcgccaaatctgtgatatttcaaatagcacgcaccaattaatataaattattcaaagagaaaaaaaaaaccactgtaataattgatagaaaactccagacaccatatatgatagggaccatattattgacgccaaatgagataaaatgacgtcccatatta

SEQ ID NO: 162012 - DNA, 473 bp, Glycine max
  unsure (1)..(473): unsure at all n locations
ctgactccacacacgttaganaattcagtcattttcttcattagtgctttctttctcttcgcgaaagccaaatcacgatctctcccatttgggatgggctttaagattaattntgggcgtcccatgttctaaagcatatgcacatatatagaaattgatcaataaagcaaaacttggggtcatacgttggggatagagagatcaaatagacaactagttcatgaattgatcgaatgtttcggataagatgttgttctagaaatttaaaataaaaaataattcaacaaaaaagaaaatcatcaaggatcaaagaagaatggttcaagtctaatctctcctctcatcaaggattaaagaaatttatagaagaaaaagtaaactggttttgaataatagcaaaaatgaaagaaaaaagggaagacagaaagaaacaatagagatatatggatagataataattttcctaacagctg

SEQ ID NO: 162013 - DNA, 367 bp, Glycine max
  unsure (1)..(367): unsure at all n locations
agcttgacaagttataataataataataatgttattttatcaaattctatcgtattcagagtttattttatttagattttattttatccagattttattccatctatattttattttatccagattgtatttcatccgatcttatcttattttatcaagattttagtttatttcgtttatcgggttggccttaaaatagatttgtaaactttggggctgaagacctaatccatacattttttaatattatatgttcttttgttttttttatatattttgggctttaacgactttaatataatatgattttgttgatcaattattcttgggatnttacattacttatatgacattgtataagtttttt

SEQ ID NO: 162014 - DNA, 427 bp, Glycine max
  unsure (1)..(427): unsure at all n locations
cttaaaatntaaagactgaattaatttattgtttgaanatttaacgatcaaattaaatcttttaaaatttaaaaatcaaattaaattatttaaaataattgaacgactaattcataattaaacccttttttttatttttttgttggtagacttcgatttcacattaacaagtatcatgcgaatacacaacatcgatgttgttgccaaaggttaagattttctgtctcttttttcaatcccaatttccctttttttctaccaaacccctcatttccaactctccattatcactttcactctaagtctctatcccttgaaaatgttgatgatgattgttcccaattcaatcgcatgttgtgcatgcatcataccacacccatcattgaatttaacaagattttagattcctttgcaaagatgatgcagt

SEQ ID NO: 162015 - DNA, 245 bp, Glycine max
  unsure (1)..(245): unsure at all n locations
agctatgagccattattctgtctcaacatatatcttgactcagngcgaacaatcctatacttaccctcgcatacgcactgaaagagtaccgcgttattatacaatcaatcgatataggagagagatttatgtcaagcacatgatttgtatttcttaacacaagagagcttaaatgcatacataatgtaatgaatatttgatctcgatgctgtgagaaagagcattggagatgtactctagattat

SEQ ID NO: 162016 - DNA, 489 bp, Glycine max
  unsure (1)..(489): unsure at all n locations
ntgaggcctgcattacggacctatgaaactcagccttctcaagtgtgtagcgtggcatattagcatcgngtatgtgttccgtacacctctcttaattttatggactgccttcggtctgaatgttgtttcatcataattccttgatgtgtgctcgaacatgtgttcatataaagacacataacatggcctctcacaccactacaccagatggtcccatccaaataatgagtatgagcattttggatatagtgaggcgcacgttgttgagtgtaggactgtccgagaccttactgggcaaagctgcacacgcagcggcctatgtgatcaacagatgttcatcatcagacctaatacttcagacaccaatcgaagcttggagtgcagaaccctctacttactaccaagtgtagatgtatggatgactagcacttgctcatgctaacaatgaaacttgctggtgggctgtatgcgtgagtcattggccatccg

SEQ ID NO: 162017 - DNA, 385 bp, Glycine max
agctatattgcctaacaagccaacttacaactttatgccgcaagagactcaacataaggatgcacaggtcaaagttgagtatgagaaaagattgtatgaccaagtgaaggtgcaaattgcaaagaagaatgaaagctatgccaagcaagccaacaagaaaaggaaggaagtggtagttgaacccggtgatgatcctggacatttgaggacaaatgttttccaagaaggagggaatgatgagaatcctgaaattggccaaatacaggctaaaggcccaagtggagaagggcaaaggcccaagtggagaatgctaaagcccccgagtggagaaggatgaaggcccaagtggagaatgatgaacgcccataggcagagacactatcaa

SEQ ID NO: 162018 - DNA, 447 bp, Glycine max
tataatatattattacgctcgaaattaaacatcagaagctctcgagatattcaaatggtcataacttttcacccggatgtccgattatggcgaatcacatatcgagacgctcaaaattgaacaacggaagctcttgagaaattctaatggtcataattttaactcggatgttcgattcaggcgcatcacatatagaagcgctcgaaaaggaacaacggaagctctcgacaaattcaaatggtcataactttccacactgaggtccgattacggattataatatatcaagacgctcgaaattaaacatcgaaagctctcgagaaattcaattggtcatcacttttcacacggatgtgcaattctggcgcataatatgtcgacacgctcgaaattgaacaacggaagctctcgagaaattcaaatggtcttaactcttcacacggatct

SEQ ID NO: 162019 - DNA, 461 bp, Glycine max
agctttcaagaaacttgcaaaagttattcaaaatgaaaaagatttgaaaattaagaccttgagaagtgatcatagaggtgaattccaaaatgaagattttaaaactttttgtgaagaaaatgggatttcacgtgatttttctgctactagaacttcacaacaaaatggggctgcagagaggaaaaatttgtgtttgcaagaactagcaagaactatgttaaatgaaactaacttagcaaattatttttggacggatgccataagtacaacttgctatgttctcaataggattttaataatacctattttaaaatccacaccttgtgaactttacaaaggaagaaagcctaacatatcacacttaagggtctttggaagcaaatgctttgttttgaataatggaaaactataccttgggcaagtttgattccaaactcaatgaagcactctttttacgatat

SEQ ID NO: 162020 - DNA, 370 bp, Glycine max
cttgaatctaagcttctaaggaagttttctcaagaaagcttctcaaggaagctacctagtctataaatagaagcatgtgtaacacttgttgtaactttgatgaatgaaagtcttatgagacacacttcaaagttctacttctccccctcttttattccttcaatttcgtgctcccccctctctctttctctccctctttcttttcctccattgaagcatccttccaagcttcttatccaaggctcatcttggtggtgaagctccttcttccatggcttattccctagtggatggcgcctcccttctcctcttctcctttgccttccgctgcatctccatggtgaaaaatcaccattgaaggacctcattg

SEQ ID NO: 162021 - DNA, 492 bp, Glycine max
agcttaagcttggtatatttaacttaataggcttttaaataagcgtaagcctaaccttttaattaaataggtccgttcagatcagactttatgtaagtcagatcgtaggtccttataggtcggtctgacctattcccacccctaatcataggtttattaattctctgaccctttaaggcatattataatatttatatcactatttacatttaaagaaattgtatttagacgaggctggcctaacgattagttagacttaaagtgattaatgatagtgctatatatgatttttcttatttataaaaattaataacaattttttttttgttgaaactaaaacttgagtggcttattgtatatgaataagaaaaaatattgtatctcgtaaaattactttctaacaaaataaggggattatactggacaaacaagtgtcacttatgttgtgacagttgtgaggaatacctttactcacccggccattttattgat

SEQ ID NO: 162022 - DNA, 273 bp, Glycine max
cctgtaccttttttttttatctttgatagtgtgttttggtatgttattaccttttttcctctggctcactactttccgaggttgatgtaactgcctattttcctaatgccttctttgagttgacttttctttactaatatgaaatatagcacctaatattaatttagagataatctcccaattttttcccatcatgtatgtatgaggtggagtgcgttttgtgattctagctgctgaatatacttgtctacatatattaaaagccatcaaatg

SEQ ID NO: 162023 - DNA, 488 bp, Glycine max
  unsure (1)..(488): unsure at all n locations
agctttgagccaattcaaacgacaataactttttactcggatgcctgattgaggcccgtaatatatcgagacgctcgaaattgaatgtggaagctctgagccaattcaaacgacaataactttttactcggatgtctgattgacgcccgaaatatatcgacacgctcgaaattgaatgttgaagctctgagcaaattcaaacgacaataactttttactcggatgtctgattgagtcctgtcatatatcgagacgctcgaaattgaatgttgaagctctgagccaattcaaacgacaataactttttactcggatgtctgattgagtcccgtaatatatcgagacgctcaaaattgaatgttgaagctctgagccaattcaaacgacaataactttttactcggatgtctgattgagtcctgtcatataccgagacgctcganattgaatgttgaagctctgagccaattcaaacgacaataactttt

SEQ ID NO: 162024 - DNA, 590 bp, Glycine max
gacactatagaaactaagcttaacattgaatttcgagcgtctcgatatattacgggcctcaatcagacatccgagtaaaaagttattgttgtttgaatttgctcagagcttcaacattcaattccgagcgtctcgatatatgacgggactcaatcagacatccgagtaaaaagtcattgtcgtttgaattggctcagagcttcaacattcaatttcgagcgtctcgatatgtgacgagagtcaatcagacatccgagtaaaaagttattgtcgtttgaatgggctcagagcatcaacattcaatttcgagcgtctcgatatattacgagactcaatcagacatccgagtaaaaagttattgtcgtttgaatttgcctcagagcttcaacattcaattttgagcgtctcgatatatgacgggactcaatcagacatccgagtaaaaggtattgtcgttggattggctagaacttcacaattaatttcgagcgtcttgatatatgacggactcaatcagacatccgagtaaaagttatgcgtttgaattgtctaaagcttcacaataaatttgagcgtctcggtttatgacg

SEQ ID NO: 162025 - DNA, 817 bp, Glycine max
  unsure (1)..(817): unsure at all n locations
cacaggaagggagagggaaaatacataagaagaaagctncgggaagaaaaaaaaagaacgaataagagccccntgggttgagctgtgacaggcgnntnggaaanagcgagggagaaagaaaagaagaaaaggaggggaaaattttttgtgaaggggaaagagagaagggggggggaaaaaggagaaaaatgggagggagaaaaagagagtgttgagaagagaagagggggaagggggacaagcagaaaaagaaaaaggtaaaagggtcaggaaaggaaaagaaggggaaaatgagaaaaggagagcaagggaaaggagaagagaaaaaaaagggggagggaaaaaaaaaaaggagaaaaagataaaggaaaagagaaggaagggaaaagggaaaagggaaagaaaaagagggagaaaagagggggaaaggaggggagaagagaaaggagggaaaaagaaggaaaagaagatgggggagaaaaagaaggaaagggaaaaagaagggagggggaagaggaaagaaaaatgggaagaaaaatgagaagaacaaaaagggggaagaaaaaaagaggaaggaaaaaaagaggagagagggggggagaaggaaaaaaagagaggagagaaagggaggaaaagaagaagaaaggggagaatgaagagggaagggggaagaatggagaaagaaaagggaagaaagaaggagagaatgaatgagaagagaagaaggagaaaaggaggaagaaagagaagggtaagaagagaaaagatagaggaggagaagaggaaagaaggagaaggaggaggaggaggaagaggg

SEQ ID NO: 162026 - DNA, 836 bp, Glycine max
  unsure (1)..(836): unsure at all n locations
ttggtctgatcgatgcnatggcgacaccatataatatctaagactgagacgaggaagtgtacaaaggtgaaacttcctgcttctattttttgttattgatgtggtcccggagatatgatcacgggggtcttgaaaccttggggaccgcttgtggggtgctaatttccataaccaagctttgaacaattgcgaacgtacccactcgtatgttgtcaaacagaacctgtgttaggactaaacaggtgagcttttgtcgggcaagatatatggggaacatacaccacataccttaggggcctgttgctggctggccagcatgtagatatcgtgtgaatatggggttgcggtctctcgttattctattccaaagatggcgtccacatttaaatgggttcaatttaagactgtatgcttagaatgtattttggttattgatatatagaggatgtgacctattgccttctcggaaagatggaaaggatcaattgatacattacactaatgcagttcgtatggtgaccattgcctaaatctttttgtagagatggtgccgtatgtcctttctatattttgattagatcctattgggatgatttctagtcaaaagaatttgatcagattctcttgaaatattagcttatttggttggtatccacgtgaacgaacagaattgctttgcaaactaccctatcggttcatatggaaaagaagcgcaagcgattcgattcattatgaatagtaaatagatacaccgtattgggagtgtatggtctacgttttaattttcattgaaacgtcaatgggttcgtgtctttcttgtactccaatgtgcgtcg

SEQ ID NO: 162027 - DNA, 285 bp, Glycine max
  unsure (1)..(285): unsure at all n locations
agcttgttgaaattgccatgtttggatgagttatacatacccattctgntntagggttntgtgatgatgtttatatgctgaaattgcctatggaaactgttagagatgaagggtagagttaacctagggttagaaagtgagaatgtggtgttgtgagtggaaaaagagtgaggctttgagagttgaaaggctaagtctgaattctgtggtaaatggagattaaaatgagttaatactagcttgaaatgtcatttacgacatgtgagaaaggttacgctgacctac

SEQ ID NO: 162028 - DNA, 515 bp, Glycine max
tcttatccaaggctcatcttggtggtgaagcttcttcttccatggcttattccttagtggatggcgcctcctctcacctcttctcctttgtcttccgctgcatctcaaaggtggaaaataaccattaaaggacctcattgaagctcaaagatccaacctccatagaagccctacaagcaagcttccatcaagtggtatcagagcacaagagcttcaagtaggtgatccttaaacctccattaatttttggctttatcttctcttccattgttggttcttcatttttccccatgtatctccttacatgtcttgtgctaaatgttgttaacataattctttagagttttcaccgattaaacttgctataaaagctagatttgattttctatggttcaaatttcttgttcttgttcttgaaccatgaatagtgttgagtttaagttcctttgagttttggcatgctattttttgtggatgaaacctaaaccataaaattcttaccaaaatattaaagt

SEQ ID NO: 162029 - DNA, 82 bp, Glycine max
agcttgtgtggctctatccatatttgaagcttattatatcgctgctgctggttgttgtgctcatatcttttggatgcaaaca

SEQ ID NO: 162030 - DNA, 301 bp, Glycine max
gtaagctggttgttaaaccaaactttagcaatataaaatagtttatgttacacgggactgaagtgtcccaaattgcaaactgataaaagacaagaaattttgtttgcaggtacttactccttcgtactccctccaaggaggcttccccatgaacatttctataattgtacaacccaaacttcaaatatcaacaacgaaagcaacgtcaaagctgttatctttttgcacaaccgcttgaaaaagctacatgtatgtggaataagtgtttatagagaatgcatgagacatcatgaagtaaaat

SEQ ID NO: 162031 - DNA, 553 bp, Glycine max
agcttccactcctttgatgtctcctattatacctgcttccccgggaatatacctgccaattacctcccgtaggttttttatgagtagagggggtatggtccaagtaagtttgaggttcataaggcaaatctgttagctggcccaactgaggcccacattgtatggacttagcctgctgttcagctctgtcttccttatcatatatttgtttatttgcctccttcatgatgtgcttaccctttagcctgctgtccagtaggtccatttaacccatgcaatttttttctgatcaaggccaccaccctataggaacctcctctggattagccccgattggtattcccaaataagagaaaggcagaggcatgattttgcaatttagataattggcagcctgcaattttcattgttcagataggcccaacaccccacagctgctcttcccataatttattttaagtcccttgctcagctgagatcttgctgactttcaacacacccgcccttcccacccccgaaacacacaccccccctctacacagtcccccctcac

SEQ ID NO: 162032 - DNA, 934 bp, Glycine max
  unsure (1)..(934): unsure at all n locations
acagcacacagtggatatattatctgaactcaccaacgcgtcaattgaaattgtaanagagagaagattactgtgtctgantctntaagggtnnnnnnnnnttgctgctgnctctattagcgacacntanaannanaaaacccnagcccctaacagnagacaaaagaaagaagggcttcagaccgttcatccgcgatggaggcaggctaaatccggggcgacgtggaaatggacacccgaaagcaccaaggacggtgtggacaacaccgggaaaaaaaggcactaaccaaggaaaacagggcccaatttagcaaacccgcccagaacccccgagggagggatgtaccatgtaaaatgaaatgggtctcactaaaaactcaggactcataaaacgattggagcaaacaccctcaacaatgctggacacttgcaagaagggcggagaaaagcaccaggccatcatgaaggcaaaacatactccccccacgagctggcccgcggggggggaagaagtatcaaaaacaaaagcggaggggcgagaagaccaagaaaaacccgagaaaggctccaagtntggaagccctgagggcgcaataacccctcaatcccccataagacacaccgagaagaggaagaaggcgcgccccacaaaacctggagacaaaccgtcaaggccgcgaaagaaaaccctgagaacaaggaacggcaattccaacaaaaactgaacaaagggcccttacaaaccaaagcccgggacaaaacaagggctacggccaggactaacggaaggaccagggcaacaaggctcgttgccccgcaaggaccacacgaaagaccgaatggaagcgcaggagaacaataacacatgcaccgcgaccggcgcaggtaccgcaggccccaacaaaacagctaggaacgagcacaaagatggcca

SEQ ID NO: 162033 - DNA, 600 bp, Glycine max
  unsure (1)..(600): unsure at all n locations
agcttcatgcttaagtatgtatggcaaaactttgttactgttgttcaagacatacaagtgagcttgtaacaaatgttctacacttggagtgatcacatgcagtcctcttgaacccttaccacccactctgtcttcatgccgagactcgagaaggctaacaggtttagccttctctaagtattctgaacaaaattcaatggcttcttctgcaatgtacctctcaacaatagatgcttctggacgatatagattctttgtatacccttttaagatcttcatgtaccgctcaaccggatacatccatcgtagataaacaggaccacaacatttgatttctctgaccagatgcacaatcaagtgaatcatgatgtcaaagaaagcagggggaaaatacatctccaactggcacagtataattgcggcctcattttccaactcatcaaacttgacaggactaatgactttgctacatatagcatggaagaaaaatcacaggcgagttatcactaacctgactttgtttggcaagatgtcttgtatagcccaccactaacaaatggttgcatgagcacatganaatcgtgagacttttaaccctac

SEQ ID NO: 162034 - DNA, 449 bp, Glycine max
  unsure (1)..(449): unsure at all n locations
tgtcaagctccccacgtagtttctgcatatcccattaccaagagattgttaggctcaagcatggcttaaaacaggattaggctcctctcaaatgaggggaacacactttagagtttgatttcatcacaattaactattgcgaatgcacttcctcgctttaaaggagccatatcccttataaagacaaagcatcagagctttgctgggaaaggatagagggaacattacccttattaactcgatgacacttttcgaagcagagaaatgacggtaacctccaagcatgtcaatgccctcaccacttttgctagggacaagattaccaccaaatagaagtagggcataatctgaaatgttcgtagagtctttaatatagatgctggtagttntcaccttttcactatacaccatgtaaggaagagggaagagataaatcccagcattaacag

SEQ ID NO: 162035 - DNA, 229 bp, Glycine max
  unsure (1)..(229): unsure at all n locations
agcttgggaggattgatggggacccggtgnngtgnataaacgaggatatgggctacgtgggagtacgtgagctcagttggaggtgggcaacatgggatggtgggtttatgcgcgcattgtggatgtggaaaacttgttgtgcaccatcgcccgaccgttacctaataccacatgtgatggttaccctatattcctcctgggattctttactgaagagttgaacggtgaa

SEQ ID NO: 162036 - DNA, 464 bp, Glycine max
tgatgaagaatgcttggaagttttttagactttgaatgaaaaccttgtatctgccgcaataatggttgtatctgactagagtaaggagtttgagttgatgtgtgatgccaacgactatgctgtgggtgcaaatctaggacatcgacgagacaagatattccatgccatatactatgtcaacaaggtcctgaataacgcacaattgaattatgcgactactgaaaaggaaatattggtcaacgtctatgccttagagaagtttcaatgctttctggtgggctccaaggtcgtcatcttcacagatcatgcaacaatcaaatatcttcttaccaaggcagattcaaagccaaggttgataagatgggtcttgttgattcaagagtttgacatcgtcttcaaagacaagaaatgatctgagaatgtaatagctgaccatttctcccggttagtgaatgaagaagtga

SEQ ID NO: 162037 - DNA, 896 bp, Glycine max
  unsure (1)..(896): unsure at all n locations
acacgacactgtgggattcgaagatgcgcattcgaactacagcttgtggatgctatantatcgctatacatagttataattcacaaagaannnntnnnntggtctgacgctgcataccntggccnntncangaagaanncaaaactcaagccactagactcattcttcagaaactgggccattttatctttcattgctgggacccagcattcaggggacatagcagaatctatgcgtatcggcccaatgccgaaaaggaaaagaagcatgctagaaagagctccttgccaggacatttggcctaagtcaccaaagactcaagaatccggatgagggtgtctcaacaaacataaaataggctctttgactacttcaagggaatcatccattcgagagctggaagcaacctaatatggctgaatgaacagggaacacgcgatatatccaagtgctcaatgtgcaaaggactacccagctgtgaaatataggggggggctaatgccttaaaaactacaggaaggagctttacaaaacaagggtctaaagaattcactccataggcgctgggtaaagggaatatcccaccgagagtcctgaacgccatgggaggcgaaacctgccaaggacaactgggggacgaaaagaaacgcttacatccaaaggggcgaaataagacgaacagagccaacgtccagacaaaaggatagggaggcgtccttagaaggccccaggcagacgtgcgttgtaaaaaaccaccggatgataaagggacgccccgagcagaaaacaatgcagcaggagcaaggacgggcctagggggaacccaagagaagcacaatcgaaggtgcttgaccgagagcgtacccatcgaagggcggggtactgaacaaaacggt

SEQ ID NO: 162038 - DNA, 191 bp, Glycine max
agcttgcttgtggagattctatggaggttggatatttgagcttcaatgaggtccttcaatggtgattttccaccatggagatgcagcggaaggcaaaggagaagaagagaggggagacaccatccattagggaataagccatggaagaatgagtttcaccaccaagaatgcgcctaggataacaagcttgc

SEQ ID NO: 162039 - DNA, 573 bp, Glycine max
ttaattataagtaacaaaacaaaaatgtgattgctgattgcagtttttttatgaattgatggtttcatttttaattgccttgaatatgtttttgtgactaaaaatttagtatttttttatttttgatccatataaatttatttttctaattttaattcttataaattttcgttgttttttcaatttttatccttgtaagatattttgtatatttttttagtcatgtaaatatgtgttttttaactctgaaaaactataaataaaaaatcataattttaaggaactaaaattaaaaaatataaactcaaagaaggactaaaaatgaataaagaaaacttactggaaccaaagttaaaaaaatgaagagaaaaattaaaaaagaataaacttaaagagaacataatgtaaaaaaaatacttaatgaaactaaaaacatatctaaagtatttttaatctacttaaatatattatatacgtattaatctttacaaaaagatattaaaagcgacaaatgtgtatataatgacttttaaactggtcaattcatttccttaaaagaataaaaaaactgtt

SEQ ID NO: 162040 - DNA, 112 bp, Glycine max
agctttaagccaattcatacgacgagagcttttttattttgatgggacgtccgtcacacatccgagcaaaaagatactgtcggttgaaatccgctccaaagctttcaaacat

SEQ ID NO: 162041 - DNA, 62 bp, Glycine max
taaacattcaatttcgagagtctcgttatattacgggactcactcatacatccgaggaaaaa

SEQ ID NO: 162042 - DNA, 264 bp, Glycine max
agcttatagtggagtagcaacttttatatcccttattttcttttattctcttacgaacttatcctttcccacaagatctttacacaaaccggttttcaaacagaacataaaatttgtgatggacatgcgagtccactttagtctggtggtagacctaattcccaaggcgggaagcaatagcaatgtgacaaaagctattttctttggctgatgaaatacatagatgctgaatcacctactcactaaaaaagagccgtgtcggcg

SEQ ID NO: 162043 - DNA, 474 bp, Glycine max
  unsure (1)..(474): unsure at all n locations
tgatcaaaacaaacatctaatcattccaatccactcaattcattcatttgctcaattaattcattcgcaaacactcatttcatacaaaacaatccactacatatcattttcaatcagctcactgttcaaacaagctttttgtacaagcaatcaactcaaagtactgaaatgtttaaagactagaattaaaacaactgaaatataaagcaaactaaatagttggtaaactaaaatgttcatgctttgtagaaattaaactaaacacgatttaaacaactgaacagaatttaaacatcttgctcatcttgtggctgatcttcattaagatccagtgctggagctactgatgaatcctgaataagctactctggctccatgactggtgaagatagcaaggtctccttaggagcaggtgcatgagatggctntggtatctgatcagtagaagtctcctcctgagccatgtgtacatct

SEQ ID NO: 162044 - DNA, 370 bp, Glycine max
tctatataagctgaaccattttatcaataaacacaagttgagttttattcagaaaattagagtttatctcttttatcttagtgagagtgattctcctaaattcttgagtgattcaagaacaccctggctgtatcaaaggactttcacaacctttgtgtgttgccctcgctggaaagagtgattctttccttccaatcatctccacccttgttctttcaaaccacaattccagaaaatccacctctgcccaaaattatctcgtgaaaggtctctgtttgaaattcaatttaggctcaagaatcacttaatttgagtgtgtaaaatgggaattatggtcacgagataattttggccgaataaatgggaaaat

SEQ ID NO: 162045 - DNA, 138 bp, Glycine max
agctttagtaatgggctgagttagataaaggacatactatacacaccaggttaaacatgattcaatctcacgtttttaatgcttttttccttacccactgaccaacttcatgaacgtggttggatttgtatggagtgg

SEQ ID NO: 162046 - DNA, 428 bp, Glycine max
tcacagtgcatatcaaccttgagtactatctctgggggctcttcatcctttttctcttcttccttcttttcctctgtggtctcttctttcctttcttcttccttgttctcctttaacagcaaagagaatattaattgaatatagcaaagatgtgactgaaaaatctccaccatgtgtagaactagagtatatatggcatgcattacttgataatgatgccaccaccatatatatcatagagcagacattatatacaaaagatcataaaagttaaaaaaatgcatgatcctagtcctatagtgtagttagttctaaggctaaagttgtcgaaaaaaggaagagacagattgattaagaataaatagacaagaattttctgtgtaagagagaactcttacttcaccccatttctgtgacaatgaacaatg

SEQ ID NO: 162047 - DNA, 751 bp, Glycine max
  unsure (1)..(751): unsure at all n locations
cttatctctatatgtaatccggagnctttgcaattgcgcgcgggaataagcctggggggctccccaccccacccaaccaacgcctcccgctctctcccccgccaccaccgcccccacacgacgccccccccttccctcgcctcacccctctcagtccctcgctccccctcctcccccccctctcccccatcgtcccacacccctccctcccaccccctccccccccctcccaccccccgcaccccctcctccctctccctcaccaccccctcctccccccctcccctccccccccctcctcacccctcacccatcaccctccccgccccaccccaccctctctcctccccgccccaccaactctctcctctcctccccctctcccacccctgccacccccacctcccccccccctccacccgtcccccccacccctccccctacccccctcccccccccccctcccccccccccccccccccctcccccctcgcccccccctccccgccccgcccacccccctaccttctcctcccctcatccccctccccctccccctctcctcccctacccctcccccaccccctccctcctcccctcctccatcgaccctcccctctcccgcacccccccctccacccccccccactcctctcccccccccccncctcactacctcctccccctccgccttccctcatccctccccctcctccccctccccccccctctctcaccctccccctccccc

SEQ ID NO: 162048 - DNA, 256 bp, Glycine max
caccggcgagcctttgaattgcttcgattaagtatctatgagacacatgtttcctaccataccctttgaccagctcctgagcaagtaatatgttatcctggatattcctaccaggaataaaagctgaatgagtgtttttcaccacactatttatcacatcactcagtctgctagtcaaaatcttcgatgtgaccttataaattgtgctacaacatgatattggcctcatgtctttgatggtttttgcctccgggga

SEQ ID NO: 162049 - DNA, 420 bp, Glycine max
agcttcaacattcaatttcgagcgtctccatatattacgggactcaatcagacatccgagtaaaaagttattgtcgtttgaatttgctcaaagcttcaacattcaaattcgagcgtctcgttatattataggactcagtcagacatccgagtaaaaagttattgacgtttgaatttgctcagagcttcaacattcaatttcgagcgtgtcgctatattacgggactatatcagacatccgagtaaaaagttattgtcgtttgaatttgctcagagcttcaacattcaatttcgagcgtctccatatattacgggactcaatcagacatccgagtaaaaagttattgccggttgaatttgctcaaagcttccacattcaaattcgagcgtctcgctatattacaggactcactcacacatc

SEQ ID NO: 162050 - DNA, 368 bp, Glycine max
  unsure (1)..(368): unsure at all n locations
ntgagcaaattcaaacgacaaaagctttttactaggttgtttgattgagtcccgtaatatatcgagacgctcgaaattgaatgttgaagctttgagcaaattcaaacgacaacaactttttactcggatgtctgattgagtcccgtaatatatcgagacgctcggaattgaatgttgaacctctgagccaattcaaacgacaatcactttttactcggatgtctgaatgagtcccgcaatatattgagacgctataaattgaatggtgaagctttgagcaaattcaaacaacgataaccttgtactcagatgtctgattgcgtcccgtaatatatcgagacgctcgaaattgaatggtgaagctctga

SEQ ID NO: 162051 - DNA, 533 bp, Glycine max
agctttagaggactacacgtcttcgccttcagaggactactagtcctcgccttcagaggactacacgtccttgccatcagagggctacacgccttcaccattagaggactacacgtcctcgccatcacaagactacatgtcctcacaatcagagggcaacacgccctaacctttagaggactacacgtcctcgccgtcagaggacttcacgtcgtcaccttcagagggctacaagccttcacctttagaggactacacgtcctcgcaatcagggggctgcacgccctcaccttcagaggacttcacctcctcgccatcagagggcagtacgccctcaccttcagaggactacacgtcctcgccatcagaggactacacgccctcacccttagaggactacacgtcctcgccattagaggactacacgccctcgccatcagaggactacaggtcctcccctttaaaggactacacgccctcccttttagacgactacccgctctcccctttaaaggcttccacgccctcccctt

SEQ ID NO: 162052 - DNA, 258 bp, Glycine max
ttttggagtagaaacatgggaccaactcattttatttttgaaagtcgtatcaagtcaagatctgagagaccatacaagtttcctagcgggttctaattatatgggccattaagtctatcatatgctgacaatagctgagaagcccatgaatttcttccggggcggagtaagtgtccgccattgccctggctatggctaacaatcggggaagttcttgactcccgttcaaggtaagagcagaccgatccattcacatgg

SEQ ID NO: 162053 - DNA, 163 bp, Glycine max
atcatctatgatcctatatttgcacaagaattattgtgcttgtcgttggtttaccctataacatgctggaacaactcgtttctttttcaacaaaataaaatgactagattgtattaataacaggtaaaccaacctatttcacacatgcttctcaagcatattt

SEQ ID NO: 162054 - DNA, 471 bp, Glycine max
tacttttttctttcctatagatggtttcagttactatatcttttatgacagtcttgagctggtcacaaaaggtcaaacaatagactatggaatgaacctgcactttgtgagcttaattgatatgtcaagttacaatttgtctggaataatacctccccaaatgttcagcctcattggattgtactccttgaacttttcccacatcaaattaacaggacaaataccaaatgagattggcaacattgaaaacttggagtcccttgatttctcaacaaaccaacttcggggtgaaattcctcaaggcctttccaatttgtcctttcttgcttccttagacctgtcatttaacaatttcacaggcaaaataccatcaggcacacagctttaagggtttcgtgcactcagctatataggcaatcgcaatctttgggacctccactttcaaaattttgctgcagggtagtgaaccta

SEQ ID NO: 162055 - DNA, 379 bp, Glycine max
agctttgaagtttttcaccttctcgctaagccaaactactggcttagcgagcgtccgctaagcacaacactcatgggctaagcgcgtggaagactctggaagaagataagttgtacaggttcgttaagcgcaccgcttcatctcactaagcgcaccgcttcagttcatccgctaagcgagaaaggcacgcgctaagccgaaattcactaatgtgcgctaagtggtccataagtgtgctaagcgcacgagcacgaacacgaccacctatttaagcctgaaataagattttagagggagtttggattgggattcagagctttgcatgtctagagtttctagagagagaaaggtccaagcttcaagagttttgagagatttt

SEQ ID NO: 162056 - DNA, 422 bp, Glycine max
tgactattggattccaaaatgatgggaaaattaatgatgttacacacaaaatataagttgggtggttaaattgtagaaacacgagtggttatttgtgaccgtaaggaatctaccaaggtcaaaggaaagttttattgtactgctatacgaccaacaatactctagtaatgagtggtgggctttaaaaagaccacaagaaaaaagtgagagtagcataaaagagaatgttcggattaatgtgttgtcattcaagaaagggcaagatacaaaatgattgtatatgagaagatattgatatgacacttatcctgaagatgacaacaaaaaatcaattaaggcagtttgaacatatgcaaagaaggccactgaaggcactggtgaggagagtagattacatgaattttagccatttgaataaaaat

SEQ ID NO: 162057 - DNA, 189 bp, Glycine max
agcttgtgtgggttccactccagaatccaaattcaaaagcaaaaatagtcattccttgatccatatgggctttattgggcttgtaacatggtcagggggtaagaaggctatgaaagaaaagatcaaagaggctcaaagagtgtttaagggttatattgagtaagaaccttgagatccttgcctgtactt

SEQ ID NO: 162058 - DNA, 327 bp, Glycine max
tgcctcaaagaggtccaggaaggacaaggcggccgatggaacttgttccgctctggagtatgacagtcaccgctttaggagcgctgtacaccagcagcgcttcgaggccatcaagggatggtcgtttctccgggagcgacgcgttcagctcatggacgacgagtataccgatttccaggaggaaatatggcgccggcggtggacatcactggttactcccatggccaagttcgattcagaaatagtccttgagtattatgccaatgcttggccaacagaggaaggcgtgcgtgacatgagatcctatgtaaggggtcagtggatccc

SEQ ID NO: 162059 - DNA, 888 bp, Glycine max
  unsure (1)..(888): unsure at all n locations
ccacatagcacttcgctgcacanacacnanagntaanccgcccgcacgctgccttccatataggactgcatagcctgcggcatttttattttatttgccggaacctgcttaagagcgacccgcgcctagtgcatgatgaagcctttacattctttcaaacagttgtgaagagatactcctctctcttgccatctatcaagactaccttgcgcctcacaacctacagggccagcaccccccctaactctttacaagcgacactcgcgtctctccccttgcacaccgacttcctcgtcctccctccctccgaggccctcctagccctccacccccagaggctccaccctcacatccccctcccgcgcgtcgcctccccctctccctcatacgaccttcccctccccgcccccctaaggtccctccctcctccccttccagcttggtcactgcccctcccccctccacccccacgacacgctcgcccgtcacaaccctcttcggttacccccctcccgacccctccgaccccgcctgccatcgaaatctgactcgctcctctacccaccctgccctcccccccccctcccccgcctctgcgcctctccttccgtcctccgtctcactcctctacccctcttcccctccctactcacccctctcccctctcctacaacacccacttcctccgcgctactatactcgctgctccgcctcaccctcgtaccacgccccgcttctccgtcctctcgcgccactgccnatacccactctctttcccgcccaacgtcaccgctcccattctccttctctcgccccgcctctccacctattctaccctctactctcctctccgctccccctaccccgcgcccgtacctacccggcccg

SEQ ID NO: 162060 - DNA, 301 bp, Glycine max
agcttctagccaaatggacttaccttgaattaattcctttggtagcccttttgagccttgtttccctttccttgttttgaagctcactacaagccttaagtgaaaaaccatgatattaccatatccttaaggaattttggagctttggaattgttttgggaataagtgtggggggttactgcaagcctatagcgcataagcctacattttgaccgttgggatctactaccaaacatccacaccttactctgcactacactttccacagcccaccacacacaagcatttttctgcacttgcg

SEQ ID NO: 162061 - DNA, 431 bp, Glycine max
ttacagcagattttagtaatgacccactaacctagaattaaatttacttaatgccattaacctagggaattaaaagaacttaatggctgtgaaattgtggcaaccaaaagtcacccccaacagccaacaagtcatccaccatttggtctcccaaaaggctgatgcctaagttgccaattgggcccttattacaacttgaactaaacctaactaaagcccttttaggtgattaacccaaaacatatttttggtcagtcaactttaccaggattgggccattatttatacaaactaaacactctaaaattgagacaaagtggtgccatttagtcctccttcatttgggccatgatacaactcataaccttggacttttcttcttgaaacttgggcatgtattcaaatagtatggacaacacttgttgatgagc

SEQ ID NO: 162062 - DNA, 186 bp, Glycine max
  unsure (1)..(186): unsure at all n locations
agcttccacttattagtgcatagctccttcaagaatttagcatatcttggaatttgctttattgcatccagcagaggcatgtttacctctacttttccaaatgtttccaagatctccttctctgcctcttccatttttttgntggaaattgctcttggagggaatggaaaagggatatgttgcttt

SEQ ID NO: 162063 - DNA, 886 bp, Glycine max
  unsure (1)..(886): unsure at all n locations
natatatctacgtagtanctgtcactatanacatactnnnngccttttgagatcctaagaaaagagagccatatgtaatcttgaggggagcaaggcttccctttttattctgggaanagcgccaccggagggcctgagagggtataattataatcgcccacccacgtgcacccaatcggacctcacgcgcatagaaggaaggaaaatattgcggcacggccaaacgtgacgggtggcgaacaaaagctcgagccatgctacaaaagcccccgcaagacccaaatgaggaaaaacggatagtagcagatgcaaaggatcgacacgacgataccacacaccccgggcgcctcggaacgacatcgcagccatatgagcgacgcgcccacgaaccccgtaaggcataggggccacaagaaagacgatagaagaagagaaacacaagccactcttcgacgaagacaagagctcagacacacatcgtaagagccgtcgaagaaaagaaggcggggcacgtgacagacgaggcgcagcacaacacagagtgagccccgacagtgaagaccccgatcaagtatacgggccatcgaagaatcgaaccgatccgatggacgtcatctggacgcaacacaagcttgcgtacagcaacgactaagaatggcacgtgtaccaaccgtatcgcaatacgaaaagccgactcgctctcgtacgacagcacacagctgtgtacacgatgcaacagaccccgacatgaactcggaaacgcctgcgaaccgtatactatatgaggacccgaactgggagggtactcaaacacaagaaatgcaacgccagcagctacaacatggtggcgtgaacgcggactcggataacaagaatcgagaaggct

SEQ ID NO: 162064 - DNA, 462 bp, Glycine max
agcttatccttaaataagaaaaagtatccctcccattataatccaaagtttgataaaaaaaaaaaaagaaaaaacattgctgtttcaatagcaatatccttacaatatctctgcggataagctcctgaagtttaaacataatgcgttgacgagtggtgataggagtatttttccatgaaggaaaagcttgcttggctgcactaactgcagctttaaactcttcatatatagttaaatgaacttgagatacaacttcttgcgttgcctgagtaaagataaatattcaaattactttttacataaaccatcacaatgctaagaaaatttcaagcaaatatcattgaaaaacatatcaacttacgggatttataacatcaatgattacagaaccctgagaatttacaaatttccccccaataaaatttgagacctttagctacataccaataaaaaaggccataa

SEQ ID NO: 162065 - DNA, 424 bp, Glycine max
cgtccaactttagaagcaagaaaccaaaagaagaagggcagtcttgttttctatgtcaaagtgcatatattagaagttgtatatgactagaagtatcattttggaggtagtttaagtcaaggggcagatattggaagctgcacatgacttaagaatcattagaagatgcaatggtttgactacaagtgaagataaacatgtctacatagtcaagaagcacacattgagagttgtaatggtcaacaccatgcatcagtgtattgatgcattaccttgttgaagcactcttgatccaacaaatctaattcaaaataagagagataagctctactttagcaagataaccatgaagaagaaatgtagtcattcacaagctgcaaatagtaaaaaagaatgaacaccatttctgcgaatgactcacttt

SEQ ID NO: 162066 - DNA, 523 bp, Glycine max
  unsure (1)..(523): unsure at all n locations
agcttccccaacatcaaagtaatacaacattcatacagcacanactatcacagccaagaaaacagaacaaaggcagaaaactctgccaaaacaccaaccaaaaatcacagcttttcccactcaaagaccccagtaacaattccttcgatccaattcgtaaaccgttggatcgactccaaaattttactggaagtctatagtgcataagcctacattttgaccgttgggatctactagcaaacatccagaactcattctgcactagactttccacagccaaccacacacaagcatttttctgcacttgtgcaaaattctgctgcacaatttcacagcaaaaattctgcataagtgcagatttcgaaaatcacccttcctctcatccaatcttgcccaaatcaaatcctacaagtcccaaatcatgtatcaaacatgtctaaaccaaagccaagcttcaaaccacagcaacacaaaatctaggtgtccaaaacccctcaattcaatggcttttctaggcttgaaa

SEQ ID NO: 162067 - DNA, 443 bp, Glycine max
  unsure (1)..(443): unsure at all n locations
ctaagctttataggtgaaatcaggtgcagccatttcccttagagtcctctcacgaggtggaggttgtgccatgttctcagaatgtgcaaaatcagaatgctcagaatcagaatgctcaaaattataatgctcaagatcaggatgttcaaaatcaccaataacagaatgcacagattcaccagttatggaatgctcagaatgatcaaaaggtataaaatgatgcctaactaatctatgaaatgtcctatctatctcaggatcaaagggttgtaagtcagatggattgcctctagtcatacactacattcagcatgcacacaactagttgccttgtcatgtaaataaaggtgtaggtttgaactacagctaccctcaaatgatatccaaatgacttgaaattntgtgagcaaccctataaaatgatgagaagatagcacaaaaaa

SEQ ID NO: 162068 - DNA, 152 bp, Glycine max
agcttgagctcattgttgctgacccacaaagctctacggaatttgtctcggccatgctcttccttgcgagccctcttggtttctttttcaagggctcttgcggaagcttaattttcttctcgtaactcgacacactcttttcagacgtctat

SEQ ID NO: 162069 - DNA, 317 bp, Glycine max
cgcatttggagaggttccatcaaccgccctaattccgtgatgcttgtggtttctaagctttaaccttgacttggtaggacctcttgccagtttgttttgtccccatgcttactaaagtgagacaaaaagctagtgcaaatcaaaactccgatattttatgggtgggatggatgaatgcatgatggaatgcatatgacacagatgcaatatttaaaagcgggggttcggggaatctgaccccatcttagacacaacgattaagggtagcaaatggccccaacgtacgtttttaataatgcgacgcaaaccctccgttg

SEQ ID NO: 162070 - DNA, 376 bp, Glycine max
  unsure (1)..(376): unsure at all n locations
agctntaggactcgccccccattccttatattcagaaataatatacaattcaagaatttctctttgtcccttaatcatttctaatttctcaaatgggcaatgcagaaaatgcttatttcaaacatatccaatatccatctcctcaaacaacctccaaatgttcttaatctccaaaagtttaggtaactaaaacaaaggatattttttaatatgaagatatgaagaaaaattgagattcctatcatctagaataaaatcgaaaatagggtgtgcgagcatgtttgcacgggtggacagacattacaaatatctcacgacttaacttccaatctgttaaaagattgtaagtcccatcatacatcacatgatagtcttt

SEQ ID NO: 162071 - DNA, 511 bp, Glycine max
ttggggctggaaaactttataatagcaccaaggttctagtttagctctctctcttctctttctccttttttttcgtttttgcaattcaagttctgacttttcattttagcaataaaattttgttcttcaatctataatttcgttctctattgattaatggaaggctaagtccccagcgttgttttctcttgaggatcaaacacagttctctttgaggttctatcattattgttaaattctgttcagtttttcctcttcactaattactctgaatttgttgctattaattcatgcatgcttagtgcttgattaattgtctctgcgcttaatttatgttcatgcttaatgatcatttatgagtaatttctgtatgtgttgcttaatcacataatgaatgccttatgttaaattttgcttagtaatttaatatacggttggattaagtggttgaactgataaacgataaattctcgcaacctacgataagagacttgcttgtgaatcaagggga

SEQ ID NO: 162072 - DNA, 262 bp, Glycine max
agcttttattttctgatgagtaatcgttctagtatgtcttgaatgagctcctcgaaaacttgatgtaaataaacgaatttttgtccttcgtttccgagctatatatcctcgtttaattctggtcattgaataattgagactttgatgaataactatttgatttttcagctattcttttcttcttactagtctattaataacacaaatggattcttccaatgtataaaaaaagaacttcacaggctcttgctactataacctc

SEQ ID NO: 162073 - DNA, 447 bp, Glycine max
caggcttcataagtaaaaaaaatgttattgctggctagactgttttctctcttttggtaagcatgtgatgtgaactacttatatagttgaatttcaagtaaaattacagtgtccatttgactcctgttcccaaatcagtatttcgctttttgtttgttttaataggatggttggtgatatatggtttgttcatctttaaaaactgtttcaaacccaaaaaaataagaacaattattgttctcaaatgttctacttactgttcttgactgctggccactttgtagataaactggacactggtgtagcaatttgtaaattacttgggacagtggtatttcatggcaattttctaggttagtaaaactacaagtagaacacatagactactgttcaaacaagtcaattgtcatggttttagtgaactttcttttgctactcaagtttttt

SEQ ID NO: 162074 - DNA, 450 bp, Glycine max
  unsure (1)..(450): unsure at all n locations
agcttgagatgaggaagtgtagaagggtgaaacttcctgcttttattcgttgaccacagagtggtacctggagatatgtcgcgggggtcaggagaccttggggacgtcaggtggggtgctattgcccaaaaccaagcttgaccaatcccgacccaacccgggcatagtcaatcagtgagaacctatgatgtacctaaacaggcgagctcttggcagtcaacagataaaagaaactaagaccgcaaagcaaggaggcttgtgtggtggctggccagctgtgaactttgattgatatgtgggttatggcctctggtaatcgataacaagggtgggtaatcgattacaaggcttaaaaatgaagacaggagattaagatggtctctggtaatcnantaccacngggtgtcatccatttacccgtcttacatatgaatgtagcccgttgtggag

SEQ ID NO: 162075 - DNA, 183 bp, Glycine max
tggagcagacaatctatatactcaaggtggagggggagtgttttgttttctgttgcattttatcctcaggacgacaataaagttgatttactcgtatctactttggcatagtagatttaagcttttcccctatgtaaaacttggtatgggctctctgtgaccaaacattacatatatttaaat

SEQ ID NO: 162076 - DNA, 180 bp, Glycine max
agcttagtttgtttcaaattgtctgtcatttttaaaatcaaaccaagaaaacattaatgtttttatttttttaatttaatggttgtttcttggtgagtgtgtgtgtaccaatcctgcaaatagcttctctgctggcagggttccccaggccccacctccttgtgctctaagcacccattt

SEQ ID NO: 162077 - DNA, 551 bp, Glycine max
  unsure (1)..(551): unsure at all n locations
tgagttaagcaagcctaaagagggtcgaggtttagtactttctgctatagcatagaacacaaaagcatgattgattagagaaatatccttatatgcatcaacttgtttgttagaaatacccaacacttttgtagaagcaagcttcatgatgatgaaccaagtaattttgatgatgccaaaagcccaaatgattgattcaagattgattcaagacttcaagatcaagcatcaagaatccaatccaagattcaagattcaagagaagaaatcaagaagcaacaagtcaagacttcatataggataagtattaaaagaanttttcaaaaaccaaatagcacagttttgttttacaaaagaattttttcaaattttctaagttaccagagtgattactctctggtaatcgattgcctgttatcagtaatcgattaccagtgaccaatttagttttcaaatgtttgcaacgttccaaaatgattttcaaatagtgtaatcgattacactatattagtaatcgattacaagtgaatcggaacgttggaattcaaaat

SEQ ID NO: 162078 - DNA, 359 bp, Glycine max
agcttgctgcctcatgaggaatgccttgcgcttatatagcatgaaaaaacccttcgataatatgtatgtatgtaaatgtgtagcatgaaatgccttgcaaaatgttgaataaaatgccttgcaaaatatgaatatatatagcatgaaaatgccttgcataatatgaatatatatagcatgaagtgccttacaaagttgtttggatgggtagcgtaaaagtgtttttcaaaatgtgtatttgcaagtaggtagcaaaagaagccttccaaaaaaaatgtgtgtatatgtataggatgtagcatgaaaaggtttgtcaaaaaatatgtacatggatgcgtgcccaaactgcctttccccaa

SEQ ID NO: 162079 - DNA, 531 bp, Glycine max
tgtaggcgttggatcttcttcatcaatggagtcatttgcttcttgaatatcatggcagcggaatagagaaggaagaaagatgattggagaccccacttcaaggagatgatgagtcaagaagaagctcaccaccacaggaagccatggataagagcttgaaggaaggcgaagatgagtggagggagagggagagaaggggcacgaaattttatgcctcaaatgaggtctgaactttgaagtgtaattctcaaatgatcaaagttcaaaataatgcacacacatggcctctatttatagcctaagtgtcacacaaaattggagagaaatttgaatttctattcaaatttcacttgaatttgaaattgaatttgtggagccaaaatttcaataattatgattaatggaatttagatatggttcagcccactaatccaagatcaagtccaagattcttcactaagtgtgcttaggtgtcatgagacatgtaaaacatgaatgacatgcacaagtgtgactatatgatgtggcaac

SEQ ID NO: 162080 - DNA, 115 bp, Glycine max
agcttcaaaagcctatttttgtggacgagctttactaggtgagtttgattttagccttagtttcactttagacattaataaattctcaaaagggcgatgcagaaaatgcttattt

SEQ ID NO: 162081 - DNA, 217 bp, Glycine max
ctgctctaaatttacattggtgcctgtgtttatgggatgtggttatatgccattcttgcattaagagtgatggcccactggttaaactaactttccaaatgtatgccttcacatgaatggcccctaggaagcttgcctcaaagaggtccatgaaggacaacgcggccgaaggaacttgtccctctccggggtacgacaattaccccttttagagctt

SEQ ID NO: 162082 - DNA, 360 bp, Glycine max
agcttgtactattgcgtaagctttattttgtgtttcgtgtgttatcgtttattttcaattttataatgtttgtaggattttgcttcatttcttaaaactaaattaaatgacattgaggcttgagcacgaatattagagatttgtggttgttcctcaaccctcatatacaggttccttgattggctaatataatcgaaacaagtatttctgcctcatgtttctttctgtacagttaaatttcttttggatgcttagaaatatttcataaaatttaactaaattatttaacttgtaagaggatttgtggttcggattacacaagcatataagtacaaccctttacagtcatttcacccctac

SEQ ID NO: 162083 - DNA, 419 bp, Glycine max
  unsure (1)..(419): unsure at all n locations
ntgctgtgagctcctagatttaaaggattctgtggagaacttttgcggcaatatgcactccaagttcttggctttcttgaggtaaacattttgtgtattgctctgaatcacaatttatttgaagttacccaccaaggaatttcatgacccttttataaattggtgtgccttttgtctatattgcactgttacaagttcaagtaccagcacacatatatgggtatgatgggtacaatgttttaatctcaatggtgtatcgtgctttagtcatgtggccattatccttgttcgtgcagatttaactttttgcgctaactagtatttgtttcttgaatcaatattaaatggtcatttgtttttgattctgcagaagatcttatttctttgattggaaattcttgataggaattatttgtaag

SEQ ID NO: 162084 - DNA, 354 bp, Glycine max
agcttgttggagagagcaatgtcaatattgtcatcaacttcagccctaatagttgggcctggaaactgaccgttgattcccatcagaacgtgttccaagcaatctggttttctgatcatgtactccacatcaaacttgtagtgtctcactattcctccgattgacaattctaccaaacccaaccatattatgcacccaacaaaaagagctttgaagctcattcttaattaattttgatcagagaaagcctaattagcaatataacaggaaggtatcaagtagtagaacgaagctattgatgaacaaattgaaagaataggtatagaggatcgaggatttggattgctggtaccc

SEQ ID NO: 162085 - DNA, 561 bp, Glycine max
ttttaaaaaaagcggggtaaaattcatcaatatataaacaagttgttgtaattttgattaaaatgaaaaagttgaggattaaaattaactaaaaaaataattattttagcctgctacatcaacttaatggataaaatttgtaagttttttaaaaattagaaataaaatatgtcaaattaatttgttgaggataaaattcctctaaaaataaatcgaaggtagaaaggacaattattttaacattccatgtcaacttatatttgaaaaaagataaaaagttgaatgtaaaaaatgaaattaagttttttttaaaaaataacttagacaacccaatattcgcagaattctatcaatgacattggttaggactatgggtatgtttggcccaaaggctctacacacgttcatttggatgaaataaatatgccagaacatgttttgtagccagataatacagtgtttaaagccctaaacatcgagactgagagagagacacacacatagccctataggagcatctttagtggtaaatcccaagttggatttaaactactttttggt

SEQ ID NO: 162086 - DNA, 333 bp, Glycine max
  unsure (1)..(333): unsure at all n locations
agctttgagcanattcaaacgacaataactnttgactgttttttccgatgtgccccgtaggaaattgagccgctcggaattgaaaaacggaggctctgagaacaaactaacgacaataacctttaactcggatgtctgatagaaccctgtaatatatcaagacgctcgaaattgaaaacggaagctctaataaaagtcctacgacactaacttttgacttcgatgtccgattgagccccgtaatatatcgagacgctcctaaacgaaaacagaaactttgaccaaattctaacgacaataacctttgacttcgatgtccgactgcgccccctc

SEQ ID NO: 162087 - DNA, 248 bp, Glycine max
ctcagtccctgagaaactgattcccagaagacaacagggagtgtttattgctgaaaaccctagccttgcaacaagttctagggaagtagacaaggagatggacaagaaaatccgcagtatcgtgagtagcattttaaaagacgcctctgttcctgaagctgatgaagatgttccaacatcttccaccccgaatgtttctgtgcctgatgttgagaaagatgttccaacatactttcggtccaaatgct

SEQ ID NO: 162088 - DNA, 76 bp, Glycine max
agctttggcaggtcaaggagagtggacttcattctgtgatgttttagcactgccgatgtttgggatcgtgctcttt

SEQ ID NO: 162089 - DNA, 561 bp, Glycine max
  unsure (1)..(561): unsure at all n locations
tggacttttatgatttttgaatgatggttatgaaaacaatagatataataataaagggaatggtactgataatttgagaaggagtagaagaaagggagcatcatacgagtgctggaagcgattgcggcatttgttgcagcgaaaaagcttgtctgggaaaccaacgtcgccgcacatgcagcaaacggtttgaagatccaccattggttttggtgtcacagggatgaatgaaaaaaagaagaggaaaaataggcgaatttggagggtgggagagacaaagagagagacccagaaagccaaagagtaaacaagaacccaaaaaagagagagaatataatcactccgagaagagagaagaaacacaagagaagagaggagagagaaatagagatagagagagtttacactttatatagaggaagattagaagtgcggaactgctcatgttgangtggtgtatggaactgatgcatagtttattttttaattattagaaatttaagaaactctattggatatattttttaaaaattaaatttaataaaagaattttttttaaac

SEQ ID NO: 162090 - DNA, 460 bp, Glycine max
agcttttgaatcctagaaaaaccaatgaatttttgtagccaagcctcatgacaagcctgcgaaagtccttctgattctgtttatacatttttgactttatggcatgagatgaagtgcaaagattggatctcttgttagttgttattaatgaatagcttaaacacttatgcttgagtgaaacagtagccgtgagactgtggtttaagctactttccttgatatctgttttatgcctaaccctatctaattgttcaggttacattttattcttctctttggataactgcataccttgtgaaagacaagtgatgagggcattttacttcattctcttatcatgtaatcagtaatttttgctgcatacacctttgtacatgatcactacatgttattatcacttgaggacaagtgagctattctctttttgcttgaggacaagaaaaattgtaaatttggggga

SEQ ID NO: 162091 - DNA, 427 bp, Glycine max
tcctcctcagatccctcttgttggactaggcttaatttagactgccttcctaggtttagactaacttaaactaagcttcatcctcagatcccgcttgttggactagactcaacttaaatagcttacaaaagtttagataaatttagcctaagctttttcctcaaatccctcttgttggactagacttagaccaaacaacatatttaaaaccaaaacttaatccgcagatccctcttgtaagactaagtttcaattctgcttcattcaagttctaaggcaaaaatcatttcccaatgctaaagtcatctaactaggcacacaaatggttgattagaccaaaagcatacagaatttaagcactgaaagaatcattgaacacaagaaacacaatcaattagatattagaatattaaatcaattgttattt

SEQ ID NO: 162092 - DNA, 599 bp, Glycine max
agctttgtttacatagatacatagatacaacttttttaaaatgtaacggaaatgatgaataaaaatcaaaagaattggaatgaaatgactaagacaatgatgaagattaacagaaaaccagaggaaatgttcaacatagttcatattaaggatcatgttaggaatttcaagactattcttaaataaacatggcataatataacacatcagtattgcttatattagtttactttaaatgtagcctcatggtgaagtgagtaggtcctttgatgcatgatggaaggatcaactagagcatatttagcatctgctagacagtaatgacaatatgcactttgttaaatacaaccaagatttggtgaacccaactacattggctggatggatagaactcatatatttctatggactcataggaaaacatcaagtgaccatgacccattttggatagtgtgttcatcctgaccatcttcaaaagcagctctgagctaaaaacttatcctaaatggaactcattgtactaccaaattcttttctatcacttttaaagtcttaccgaatgagtacaaagtgactggcaacagtttgatgagcaactt

SEQ ID NO: 162093 - DNA, 538 bp, Glycine max
gacactctgaatctaagcttaataggatagatggacctatggcatccctctatgaccttaattcatgaaagtttcactcggtcatataccaaagtgtaacaatccatttccatccttcaatggtttatgcagttagtctcaaagccttatatttccttattgtgcaaactataagggtgttcatgggtcggctcgaaccggttttggccaaattcaagactcaacccaatcaaatttgatcggtttggtttggttcagttttcacaatttgtttttgaaacccaacccattcattaacggttcgattcgattcgggccaacagattacccatttaaatttgatctcattgtcaatatcatgattcatccaaatatccaatattattaacacaatattgtcaaatgtcttaaatagttaaaattgatcattaatacaatcacactatatttaaatagactatacaaattaaacaaattttcttatgagattactttatagtctgaatataactgtttctacaaataatttttgcataag

SEQ ID NO: 162094 - DNA, 428 bp, Glycine max
gcttgactacgaccacaccctagctcactgatgttcaacacataatagatcatggtgcttctagacatatgaagagggtaatcttttccttgcacaaaatagttctctttttttttccccctcttttggtactaattgaactcaagagtcttggaggacaatgaaacatatatatattgcggatttggtaagaaaaaattataaacagtaggcattgaagacttactaataaaacactccagaatttcatattactcatcccattcttagggaagctcagagtatatgccaacattgttaaagaccaagaatgtataaaaataagaagaagaatgttaagttatatatatctaatccctacttgataatgaaagcttcgttatttgagtcaaacttctgatgccttcattttgtttgagtggaaacat

SEQ ID NO: 162095 - DNA, 424 bp, Glycine max
cttctcatcatcaatgaaagtgtggattcccttgctctgaagagtgttgtagagatggccagtaaaagcactacgtgtgtcttcacccctgaagctgaggaacacatcgtaattggaggaataggaagaggaacgtgatccccaagccatgatatgaaatcttagtatgaatttggatggctgcttgttgggtctccaaaatcaaacttgagtaggtatgaaactgataagtgtgtattactctcagaaccatacatatctattatcagatttttatccggcatatttacctttatggaaaatctttctctgttccggctctttttcttagaagattaaacctttggctgggctaacccggggatacgtttctctccgcactatctaaactctacaataaatacctttttatttgttataatca

SEQ ID NO: 162096 - DNA, 445 bp, Glycine max
agcttatccaaacaaggtccactatatatttttttatctggtactgtgccatatatatggatggtggttttggacatttggatttgtgtagttgttgttaataacaatgatgcttatgcctttgggcatgggtttggactagttgtatcaaactatgcttgtgtattggaattttgggggaggatttccacttgcttactgcatttttacatgtatattatgtaactggtttcattttattgctacatgtgaggtataactattctattttttaaagccattgcattccttttttatttttttgctaaaagtttaaagttggcactgacaggcatttgaatcgatttaaattccacttgatttgcagagatgttggtgcttgaaagctccacacctgctgattcagttctagagttcttgggttcgatgctcttgtcattctgca

SEQ ID NO: 162097 - DNA, 894 bp, Glycine max
  unsure (1)..(894): unsure at all n locations
agcgaggacgggggcgagcgaaaaacgacacagcgcatcaaagcggctgcatgggaaaccactataatttctaggtggtnngnttggtgatgcctcataccgaccttnaaaaanaaacccngcgccgaaaaaagcacatgaaagtacccggaagaactctgcccaaccttcgacaaacgtgagagcgagcgcaaaggggggcagcaacggcacgagacacgtgagcacgagccgaccggagagacctgtgagaaggagacaggagtgggcgagaaaccacacaaggaagcaacgggaagacgcctcggacagaagctggcggggaagactacatgcagcggccgcgaggaaaacacgggccagagcaggaaacccgggggagcgggcacactgacgaggagggacgccgcagagacaatggaccacgagactaccggaggggagcaagggagaacacgcccggaaggggaaaaaaagcagcgggacccagagcgaaccgtaaatcaagggaagagacggtggccacgaggaggtgaagaaaaaaggagcgaggccggatcggctgggggaggggcagactgaaagggacagaaggtaggaagcaaccaaggaacggatgggacgagagaacgcgaagggcggtaccgggagaacggagagggaaggaagaccgcggagcggaggggacggacgaaatcggctgcggggagaggataagaaaggaccccgaacagacggcccgatgcccaggagcagcgcggaagcgacgggaggcaaaggagaacagacacacgcgcagagaagggacggcgatgagcagagaggagatgggaggcgaacgggacggacagggatagagaggagacacgccaccgtaacggaactgaacacgat

SEQ ID NO: 162098 - DNA, 181 bp, Glycine max
agcttgctgcctatataacagacttgagtaccccctaaatgactggtaagaacatctgccaggtgataatttcaattgatgaagctaccggtgacgtctctggataaaatctacagtgaggaggtagagagaacattgtcatggaatttcaatagatggcactgatggaggggaggacccc

SEQ ID NO: 162099 - DNA, 918 bp, Glycine max
  unsure (1)..(918): unsure at all n locations
acgaggtaacgaatgtgaataagcaaccgaccacgagaaggaatccggaagtggcaatggaacgaaaaatcannaaagnnaannnnncagggtactgctgcactggcataccatcacaanagannaacgtgtggaaggggaatgatataaccaacaccacttttttttattaaagcgaacggccataacgagggaatggggaactaaaagggaacaccgccccccatacgacaagagacgatcaacgtaagggacaccaacacacagcacgacgcgacacaaacaatccgaaaatgcagaagactgaaaggaacgacgatggaaagacataaacagagcgtaggccggaaacatggcaggacacggacaaaccagaggaaacgagggggaaacacaagaacggaatcaacgcaatgacagaagaaagcgaagcaacacgcgacagagaaaacgccataatctcacgcaacgagggaccataacggcgaaacaacagacgagagcgaagatacgtatgcaagaccaaattgatcgaaaagaacgacagaatcgacggcacgcatcgacagaccgaacgaagacaagggacgaccaaataaattgacacgaaagaacgaaacacaactacttcacgggaatgaatagaacaagcagaatgaaacacgacgggacagattaaatggatgtagcaggtggggaaacggaatggaatcgaagcgaaaccaacagacatgccagaagagtgcacggacaagaactgcgacggtcagggaaagagaaagacaggaacagtcacggacgcgaagtggatatggccaaagaaataaaaacgccaccggctgggcaatgatagatagaggtcacacacacgcaagagagacgagaagaataggnactggaattgaactgcaaacaccc

SEQ ID NO: 162100 - DNA, 178 bp, Glycine max
agcttatatatccgcaaacgggccccacttttcttggctcgccatatcccttgccttgccttccaagtatttccgtggcaggcctactacgccgttgcgagtttgcttcatgcgatccaactcttttgccgaatcctcaaccacagctacaatcttgctcaaggagggacgattctta

SEQ ID NO: 162101 - DNA, 466 bp, Glycine max
tatgcgcatatttccttacgaacgttcacttgcacaatacattctattaactaagaaaaatgcacccatatacaatcaaggcagcttcgttacctagattatttacatgtacttccaaggtgtatttgttacttacatcacacacatcttcttggctaaatttacatacatgcatactcaaagcattttggggtaccaaaaattgcacatgtgcacatcttggaatttctaatacctatacatacacaaacttcatgatgaatcttgactatctacaataaggcgctacatttcttgctcttttcaagtttttgctacctaaagccgcatgcaaattcaagtatattttcctttgctgactaaaattgtattcaaattaaaacgtatatatttttttgtaatgtattttctttacataacatgcaacatatttatatatatatttttttgtgagacattttgacta

SEQ ID NO: 162102 - DNA, 490 bp, Glycine max
agcttaatcatacagcgaagaaaattaatgaattgagaaagacaataaagagtactttattgttggccttttttccttgctaaaattgagaccaaattacgctcctctgtccgaacccgccctttccttcgctggtctcatcgacaaattttatttgaaaaatttcaagttggccctaccccacacgggtgtccctttccacttttgcccccatttctatactcacgtttattgcctccagctcctctgtctctttcacacccccttttcctttttgccacccactacactacccacttccccgcatcctctttctttctctgttcaactcaaataaaatcaaatgttatctaagctctagttcacttacattcacttccagtttcaccctctttctaggtctctacactttctttctaggtagagctcgtgaaacaaccactcttcaactactctcactcacattgcgcttctcacttcactttttttt

SEQ ID NO: 162103 - DNA, 395 bp, Glycine max
tgactagtttgcaaaatggcatacttgaaatatatatgttggatcaagtggcctcggaataattaagaagggggggttgaattaattattgatgtgccttgactaattaaaaatctatccttcttaatgttactagatttaattaagtttttactacaaagttaagaaagtaaagaacagtaattgaaacttaaccaaaagtaaaaacgataattaaaagagcacaacgaaaattaaaagtgtagggaagaagaagacaaacactataattttatactggttcggcaacaacctgtgcctacatccagtccccaagcgacctgcggtccttgagatttcttttcaaccttgtaaaaacctttacaagcaaagatccacaagggatgtacccctcc

SEQ ID NO: 162104 - DNA, 280 bp, Glycine max
agcttgttgttgccatggtctgtaggttaactttgttgcttgattatgtgcacttcgcattcgattatgtttattcaatgagtttaatttatattaactatcaatatattcggtaatttatgtgatgctaaggcaagtttcaattagatgtacgcgttaattgtaaaatgactttacactgataatatatataaattaaactcattcaatattgtctaacataacttactcaacctgaaatggcatcgttattacagggatctgcccaggtttgggaccc

SEQ ID NO: 162105 - DNA, 474 bp, Glycine max
tcctatagaaactcaaaatcttctagctgtgtgcaagagggaaagcatggctgagtatccatcacccgaaaaggatgataataattgtaagcacatggatgactacccttcacctcaaacagataatccaaagcctttctctcaaatatacaaacgaaggcggcataacttgaactccaacaactctcatgtttctggagattcaatccgaaccagccaggatccgtgctcctctacaataactactgctgcaactgcactcccaaccactaatgctgctgctggcacagccaccaacactgcaccgaaaaaacattttctttccgcactggtggagttttcgctgctagagtcccttgaatcaaaggacagccttgcttcaattaagacaccggattctgacgtggaaaatcttgagtcatccatgcctccaagcttgcgcaaagttcttcaaggaaatgaaaagtgagatgc

SEQ ID NO: 162106 - DNA, 1054 bp, Glycine max
  unsure (1)..(1054): unsure at all n locations
ccgcacaccaacgagagtgagaagaacagccacacgcaccgcgcctaacacacgaaacacgacaccacacacgccggacgcntacagaatacgaagcatnnaactcccccaagccnccnncccccnnnnnggagatggaatggaagncnatngnacnnnagnnngnnaaannnnccncgggcggaaggagccaaccaccnaccagagacaaaaagaaacgatattaaattaaacacaccaagaaaaaaaaggaggggaggggggaaaacaaaagaaaaaacaacagagacaaaaaacaagacaaaaaaaaaaaaaagaacgagagagaaaaagaagacaacaaccaaaaaaaacagcgagacaagaaagaaagacgaagagacgaacagaaaaggagaaacaaaaacagaagagaaaacaaaaacacgcggcgaaaacaaagagaaagggaaaagacagacgccagaaaaaaaaagagacaaacaaaaacaccaaacacgacaaaagaaggcgccaagaaaaacaaacggaaacaaaaacaaagggaaaaaaaaaaaagaagaacaacacagagacgaggaaaaagaaacaacaaaaacacgaagcgcggaaaggaaaacaaccaacaccaagcgaacaaagagaaaaaaagcaaaagaagagaaaaacaaaaacgcacacagaagagagacggaagagacaaaaccacgcaagcgaacaacaccagcaacgcaaacagaaacaaaacaacgagaacaacaaagagagggaaaaaaagaaaaacacaaagaagaaacaaaaaacaaggagaaaaagacaccaacacgaagacacaaacccaggaccgagaaaaacataacgagagaaaaaagcaaaaaaacacgaaaacaaacaaaaacgcgagaaaaacgaaagaagacaggaaagagaaaagaagaagggagagaaacaaaacgaaaacaaaggagaaaganaagaaaaacgaaggagaagaaaacaaacaagaaaagcacaagaaaagacaacgggagaggagaaaaaccaaaaaagacan

SEQ ID NO: 162107 - DNA, 437 bp, Glycine max
agcttgtcaagatccggatcctactatttaaataccaattttcaataactcagtgattcataagaaacacatacacagaggggttttataaggggcaaggtatagaacttaaactatctgcattatttaaaagctacaccaagcttacctgctcaagatgtatgcttccaccattctcattagtaatgcccaccgaatgtgaatgagaagtttttgagtcaacaatcccctctcctgtatcttttacacgatcaacctctccctgactttctttgccaccaccagacatagctctaacagatgaagttgttgctccactataaaaattcagtgcacatccatgagtacgtgcacaaatagcaaaaaaaaaacatttagcagctatcatattcaataataaaatggacattatggttctaaatacagtactacatttt

SEQ ID NO: 162108 - DNA, 474 bp, Glycine max
tgttgatttaagcacagataatccatcaattgcttctgatggtttagcagcatttcagcgtgtaagcaaattgacaagaaaagtgaacctttttgaaaaggattatatcttcatccccataaactatagtcttcactggagtttgaatgtcatttgtcaccctgctgaagtcatgacatgctacagagatgaagaaactaaaggatctcccaaagaagcttgcatcttgcacatggattcccgaaaaggaattcatcaagatctacacaatgttttccaaagttatctatgtgaagaatggaaagagaggcacaacaatgtgagggatgatgatgtttcttctatatttttacatcttccattcgtgccacttgagctgcctcagcaacaaaatgcatacgattggggcatctttttgtccactatgtggaacgttttctggacatgcttcaatcaacttcaaccgtccatgat

SEQ ID NO: 162109 - DNA, 886 bp, Glycine max
  unsure (1)..(886): unsure at all n locations
caccccgacgggggaggagagacgaacatcaagggggacataaataacatcgccggagagacacccccccncagaccccncccnaactgatgctgaaacncncagttgnnaaaacccccggggcagcaagccccaagcaaaacgcaacacagcagttttttttttttncnccccagaaagacaggggggaaagaccctaagcggagagaacgaaaccacctatggttgtaatacaaatatacggcaaggggaaaaaaaaaaactgccaaacacaaaatttaccttacaccacggggaatatgaaaaaaaacaataccatggcgggagaaaaaaaaaagaagggaaaaataaggcncaacatcataaatcaaacaagccaaaaggaaaaaaggaccaatcggtaaaaggaagaaagacaaaaaaaagggaaaaaataatgcagaggaaaaaaagaaaaggaaaggcctaaataaatgggacaaaaaaaaaggcgaaacactgtaattaaagaaaaaagattaaaaatagcgggaaaaaaacaacatgaaaaaaaaaagggagaaaattaaaacacagaacgggggaaaaagggaaaaaaccgggcaagaaaagaaatttttttaacgggaaaaaaaaaagtaaaaaagaaaaccccaaatgatttgggggaaaaaaacccaaattggaaanggggccccaaaagaggggaaagggacaaaaaaccatgcgaggaagaaaaaaaaaaaaaaaaaactgaccccaagggaaaaaaaagggtaagaacaagctgaaaacaaagagggggaaccacacgggggcaaaaaggaacgggaagaaacaaccgacaaaaagcaaggaagggaggacaatggggaaaaagaaggaa

SEQ ID NO: 162110 - DNA, 647 bp, Glycine max
  unsure (1)..(647): unsure at all n locations
ccgcaagcttcctgcacaatgactatattattaagatttgttctcaagctggtataatcttatcatgcttcagcgagtcagtggcacttacactaatcaagtgtcaagtaccaacgaagcatcagtaaggaaagttagtttacaataatttatctccacaagtaatactgagttctggcaacaaagaaaaaccataccaagaataaattagaaaaggcacaaaacagtctaccttgcatcaggaattccatggcagattacttcattaactgacctgttagataaagcaaatttcattcttaacatataccatggcaataagagaaaaatatgacattacagaaggaaagtacctacgtgcagcaagatttagggaagaaaaggtaattgagaggtgatggatatcctcctgaaaaagtaaaaagtcagaaaaaaattcattaccaatgaccatttgtaatagccatatgacaatgacatcatgaaactcaatgaaccatcatttggaagaggaattataacaaagttaggaagcatcctctctgtaatgctcaaggcttttttttgactttttcaaattctggtaagcagatagcagccttgatatacattntggtatttttttggcccccccttctctgacccat

SEQ ID NO: 162111 - DNA, 484 bp, Glycine max
acactatataatacataagccttagttacaatctaacctcaacaatgaagagatctaactaccttttctgatgggtagcacaaaaaacaatgatgaaaggagaaaatgaaagaaaagaacaatggaaaagcttttccttcaccaaatattgtttttgtcttgcaatggagtcttcccttaaaatggagatttggcccctttttatataatcccaaaaaatctagctttttaatgaagatcggcttaaactaaatcttttccaactcaaaccaaaattgctatagctttaccttttaagctttctcaatcttttctctaagatgcctttcaacccacttcaaattcttaaaaaaatccattaattagcacaagttacctatttaaatgattaacttaagagaaaaattgcctattcattaaatttataattaaaaagaaccaattaaatcctaatgagagaaaaaaattagataattccctaaat

SEQ ID NO: 162112 - DNA, 187 bp, Glycine max
agcttggtctaaaattcccgaaaaattagctttttatgattatatcggaaataatccagcaaaaggggggttatttagagcaggttcaatggacaatggagatggaataaccgtcggttggatacgaccttctgtgtataaagaaaaagatgggcatgaactctttgtacgctcccccccctccttt

SEQ ID NO: 162113 - DNA, 344 bp, Glycine max
cttttctagttagagaccaacgtcttggggctaatgtatgatctgctcaaggacctacaggtttaggtaaatatctaatgcgttccccgacaggagaagttatttttgggggagaaactatgcgtttttgggatttgcgtgctccttggttagaacctctaatgggtccgaatggtttagacttgagtagactgaaaaaagatatacagccttggcaagaacgccgatctgcggaatatatgactcatgcttctttaagttccttaaattccgtgggtggcgtatcttcagagattaatgcagtcaattatgtctctcctagaagatgggtagctacttctcat

SEQ ID NO: 162114 - DNA, 297 bp, Glycine max
agcttgaagcttcctttacatatattatatagatatatagatataatagataatagatgagccactaacaagtaacaactcacatttttcttaaaaaaatttgttgttacatgatatttgagttctattgacataacattttagaaatttacttgtcggtttaacaaatctagtttcaactatgataatatatactacatgtgattctttacttaagaaataaataattaagaggagggtttgaattacatcgctaactttgataattattatattatttttataaattaatataaa

SEQ ID NO: 162115 - DNA, 546 bp, Glycine max
ttctccactaagttgcctgatgcctgaaatgtcttttctgatggcagtggtcctagatgcagggaagaatttctccaagaacaccctcttaaggtcatcccagctgaaaatggacctgggagcaaggtagtatagccaatctttggccactccctctggagaatgaggaaaagtctttagaaagatatgatcttcttggacatcggggggcttcatggtggaacaaacaatatggaactccttaagatgcttatgaggatcttcacctgcaagaccatgaaacttgggcagcaaatgtattagtccagtcttgagaacatatggaacaccctcatcaggatattgaatgcacaagctttcataagttaaattaggtgcaaccatctccctaagagtcctctcacgaggtggagggtgagccatgttctaagtaggaaaattagtagtggaatgctcacaattagatattcagaatcacccttaacagaatgctcaaaatgcacagaatgaccaggatgcacactatgcctaactaatctatgaaag

SEQ ID NO: 162116 - DNA, 620 bp, Glycine max
agctttcaagcacaatcccaacacttcagttttctttttttttttttttgaaggtcaaaactgaaatcccttaagctgtgagaatgaaacgacttatggttttattactactattttgcaattggataaaattaatttttcaatcacagattttactttacaccatgtagattatgaaaattaacattactattgctcgagacaaataatagaagtaaaaaataagttttaattcatatattacacaagtcaaatgtaatatattatcattttttataattattaattacaaaagaagtaaaaaattattcatagtaaataattaaagtaaattcttatatatatgtcacatatataaagtttaatcattttatttatagaagaatatttaaatatatctgaatataataattatgaatataataaggaacataattaaattacataacgtgggaaaatgtaaaaacacgtgtatgaatagtactttttttaccgttaaaaataagttaaatatgacactcttaattttttttgttgataaatacccattttgatattggtccctaaaagtgggagatggtaacaaattcattcatgcaagataaaaaaaaaattaaatt

SEQ ID NO: 162117 - DNA, 375 bp, Glycine max
ctataaaatacctcagctttgggctcaaatgattcctttggattcataatggatctcgtactttaataactcaacgaaccaagccatcatcctcttggctaacttagactttcacaacattttagctattaggtagtcgatccaaacattaatcccatgtttttgtgaatactaccgatgacactgagcagtagtaaccaatgcctatgccactttctccattacctaatactgagtttcttgatcttgtaacacttggctaacaaagtataccgattttaaatcattgttttcttcttggaagaggacatcacttatggcttcaacggagaccgagaggtatactatgagtatcttactagtgccagaagttga

SEQ ID NO: 162118 - DNA, 379 bp, Glycine max
agcttataagtatgtttacatatggcaaatatatataacaaatcactatacatatatagaataaaagtgatacacaagcaagatactcaaactcatgaatttccaaattggttcctaaagtatacttaagcaaatacatatattttatatatgaaattgaaatctaaaacaaaatcactacatatgtatccttatatatatatatatatatatatatatatatatatatatatataacacattagaatcttatatacatataatcatataattttatatatggaaaacaaatatacatatatcactaaacatactccaaggcaaccataggaatctagccacgagaaatttactcaatagaagattatgatcaattttc

SEQ ID NO: 162119 - DNA, 367 bp, Glycine max
tctactacacgccgaggagaggcgaaacgccgcgttttgaaatatgatagctgcgatagtgacaaagcgacgctgcttgcgagaatcggtgagttggacgagaaattgagattgaagatgcatgagattgaggaggcggagacaaagcggggtcggcctagacgccttcactctttctttggcggcgggggtgttttttttccgctttaccccatcattcattcatggtctttggaagtctcctttactccttctatcatcattgggaactctcttttgctcttgattgtgatcgtttgtgcccgtgagaggattttttttttcatttggaatttttggtgagcacccggtgcatgtaaaaatcaaa

SEQ ID NO: 162120 - DNA, 225 bp, Glycine max
agcttgatgatttccttttatagaagtgaaattggatgataaaatctcaatttcctttttagataatgtaaaataggaaaatatatgattttatcttatctttcctctaataacagataatattcgattttagaagatatttttatctttctagtagaaaatagaatttttctcttaccttaattaaatccattacattctctaaatccgagttgcctgctcagc

SEQ ID NO: 162121 - DNA, 487 bp, Glycine max
tggtaatggcgtcctccagcctatcggaattggctttggatctagtggactctgccatggaagcaactcaatgagagcaccaaattgttagagcacaatttctggactttgagggccagttcctctaagaagaaaaataaagagtaagaaggataattttcatttcatgtctgccttattacattatgctagtatttacacaacaaagagaaatagttggaagctaaggtggggaaagggagacaatttgtctgctcatgttgggttgtatacttggtttcatgatggagatcaaggaaatcctttaagagaagaacgaagagcatggaagagggagaatataattgggctaggaggcccaataacaagggtaagacctaagaaagataaggagatgttgcttgaaaaaaagatctacttacaagctcaaacctaaagtgagaaagaagaacccaagatacatttgatctaaggcgaataacagtga

SEQ ID NO: 162122 - DNA, 323 bp, Glycine max
agcttcttacaagagactaagaaatttttgacgaaatttttttagaggaaagatcttggggaagcctcgatcttgcggaagcctcttttgtattaggaatcaagatattaagagatcgctcttaaggtatcctaaggttgtcacaaaagagttatatcgataaggtcctagatagattcaacatgaaagatagtaaaccaggagatatcccgatagctcaaggagacaaatttagtctcaaacaatgccccaataatgaccttgaaagaatagagatgcacaagattctttatgaatcaacagttggaagtctactgccccct

SEQ ID NO: 162123 - DNA, 435 bp, Glycine max
tgccttgccccttgatatatttgagggactcatggtcactatgaatgacaaattccttgggataaaggtagtgttgccatgttttcaaagcccgtactaaggcatacaactccttatcataagttgaatagttaagggtatgaccacttaacttttcactaaaataagcaattggatggccttcttgcatcaacacagccccaatcccaacatttgaagcatcacactcaatttcaaaagatttttgaaagtttggcaacgcaagtatcggggcattagtaagcttttgcttaagaacattgaaagcttcttcttgtttctctccccatttgaaaccaacatttttcttgagcacttcattgagaggtgctgccaatgtgcttaaatccttcacaaatcgtctattaaaacttgcttagccatgaaaacttccta

SEQ ID NO: 162124 - DNA, 440 bp, Glycine max
agctttgctaagagcaaaaattaacctttaatattattttatacaaaatagattttcaataataatcatacaaaagtttctgggtatgtgaaacaatttgagctagcttaagagttatatatcaaagatataaacatttaaaaccaagctactcaagcaaaagatttagaaaatagacaaattagaagcaataagaagagtaaagcacacatgggaactatcatggttcaccccacctggactacatttagcctctacaactgtaggctttccactaatactagcaccaatcagatattttttctttcatggcgctcctccccaggatcctacacctaaatattctctaagtctctataagttctcccacaactttttcaccaaccctcttcaggtcacccctaccttatctaatcctccccaggcctatctacccccct

SEQ ID NO: 162125 - DNA, 554 bp, Glycine max
  unsure (1)..(554): unsure at all n locations
ttctaatgggcctaggggggcccaggggctaaggaatgcccccaaattgaccatttggcccccattttgagtattttgctcatttccttctgaaacgtcacaaaaccctatggattgcgcagcaattggtgttaagcaactcaactcggccggcgaaaatacacatgttgacaaacaatcatccccggacgaaattagggtatgagaataccctcattatcctaataagattaacatatataaaacattttctaacattattgatgcacacattaagttacatcgagtcgattcctcacactcgagaatccaaagaatatttaccaaatattgatccctcgcatatgaagtcaatatcccaacattagaatcataatctcatactatntgcaatcaaaacgttatgctctattcctagcaacttaatataaagagtaaaatcattcagttcaaattctaagagtactttccaatcaaacttaaaatccaatttcatgaaactagtgatcaaatagaaatcagcattacgaacaaaatgaaatcacccataatgg

SEQ ID NO: 162126 - DNA, 293 bp, Glycine max
atgcaagcttttaactgggaaatgctccaagaaacactatcttctttttccgattctctggctgcttgctccagtaaagcacaagaagaaatatgagcaccagcagattgccccattagataaatcctattacatagtaacaaaaaaaaggaaaagataaatctcagttgaatgtctaaatatatgatgaaaaggaatcttgtatcatagtagcacgccacctattagggtcacctccataattagctatgttgttgatgatgaacgaaattccccgcgaagtatcatttacc

SEQ ID NO: 162127 - DNA, 504 bp, Glycine max
  unsure (1)..(504): unsure at all n locations
taagaccatttctaatgggttagataatntatttttaattgtttatcctatgctaattagtccttataatatcacattataattaaataatttatatatttcttgtttcaataagtaattcttaaataataagaaaatattttttctcataagtaattattattatatatatataattataggttaattttaaacaatttaatgtgacatataaataatctaccatagttaaaaaaattaacaattatatctaaaaataaaccaatcgttaaataatgagcattgaagatgctctaagataggaatactcccataaataataaatcatgccattatgttattcctgtatgaatatctaatcatgtttctttttttactccccaattttattacctatatatcctttgaaaaatatactataaatattttgatgtattttttaagagaacaaaggctcctggtttaacaaaaagccaagacaggggaattaaggccatttaaaaa

SEQ ID NO: 162128 - DNA, 911 bp, Glycine max
  unsure (1)..(911): unsure at all n locations
aacgacgagagtggagggagtgatgaacaacttatgaagtggcggaaaacatctttgtggtcgggatgttggtaaattggggggcccnnncnnnnnnnttctagcatgaaaagcnagcnnnnnntttaagaaaccccgnatgnnntnatttacaagagagtgaggagagagnggattttttattttgggaggaaagataatggggggggggggtaattgaggaagcgtcttttggataaggagagaggaaataaagagaaggggtgtaagggaagataagggtgggaaagaagagagatggggataaggggagggatggagatggaaaaggaagagagtagaagaggagggggatgggagaggaagagggggagagaatggaggggaaagaatgaagtaagagagataggggaagaattgagaaggaagtggtattggatggaaaaggagtgggaggtgaagaagaggagtgaaagaatagaggttggaatggggtgatgggtaaaagggggggagaggtggataggtggaatagaggatgggaaagaagaataatgtagataaagaattaatatgtgagaagagggaagagcatataataaataggggtagagagataagaagagagaataggggaggatgggaagagaaggagtggagggtagagatgggaagaatagaaggtgggagaggggaaagtagagataagtgaatagagaggaatgtatggaagagaagagagagagaggatgtaaaagaagagagaagaagatagtgaaatagagggaagtaagaggtagagtgtagaggagaaagtgaggggagggtaaatggttaaaagtagagatgtgaggtaaggaggtagtaagatagaaaattaggggaaagaggtaggtatagagaggaaatga

SEQ ID NO: 162129 - DNA, 397 bp, Glycine max
ttgtaagcaccatacaaaagagggtcactctctttatgagggttttagcctaaacacagacttgtcactcagagaactatcacaatgtgttgtagttttggaatgcttcaacttgttctttatagccttcacatctgccttattaaactcccaagaaaaaccattgtagtggactccacacttctggagtaagtatggtcacttctacaactatcatgaagtgacaatatacatccattatgaggaacctttctaatgggcattctagtgtttacaaagaatgaatccatgtattgatgaagactagattggtgctccattctgatgtagtgtgactttattactcttaacactttctttaaatccttaagcatttctgaatttgattacttcaaaa

SEQ ID NO: 162130 - DNA, 131 bp, Glycine max
cgacagcttgtcatctctcagactggcttagtggcttgttaaagagaatgaaatcagaatcatgaatttttagacaaatattctacccggaagagccagcactctaagtgatgtttaacaaaaacgtcatg

SEQ ID NO: 162131 - DNA, 386 bp, Glycine max
tggactccatttctctagagtatggaacatagataaaccactttctactccttctctgcacagctcttctgctcttgtgtcattgagccacatgagaagcaccatgtcaccgccaatgtattttggtttaactcttcacctccatcccacataagtacttcatcaagtctatcaaacgccattaggttcctcagtctacctatccaagctttggttagccatgccttcttattcattgatagtgttagttggatagacgagcgagaggtcataccttgatgcctgcgcatactttaatgtccaccgtttcaccacatgcatactgtctgctgcaaccacattcggatatgatctgaaagttgcctctcgcttgggattctgctggt

SEQ ID NO: 162132 - DNA, 183 bp, Glycine max
caagcttgtgattgttgaaatatatatatatatatattctataaagaaaagaaaaccccctgagggtcgcacttgcacatttgagaagaaaactcattggaccaaaagctcatgggaaaagcccgaagacaattgcgatagtagggtgcatttgatgattgtccctcatgcacactacttatg

SEQ ID NO: 162133 - DNA, 395 bp, Glycine max
ctgattctatttatgcatttctgactttatggcttgtgatgaagttcaaagattggacctcttgctagtttttattgatgaatagcttaaacacttgtgcttgaatgaaacaaaagttttgagactgtggtttaagctgctttccttgatatatgtcttatgcctaacttcatctaattgtacaggttacattttattcttctctttgaacaactgcatgctttgtgaaagacaagtgatgagggcattttggttcatccctttatcatgcaatcaatcaaaactgtaaatttgggggagttcttagtcgatgaatacgactaacttttggtataaaacctgtgtaattgttcaaaatctccaatttatggtattttgagggttgcattactttt

SEQ ID NO: 162134 - DNA, 852 bp, Glycine max
  unsure (1)..(852): unsure at all n locations
ccacctcaaaactaacaactccctcctccctctccaccccaccccttccccctatttcgctcccctccacccaacaccccnncccnnnnnnnngatatctccacagcagccncnnatttntaaccccccctcaaaactctcacccaaccgcacacacgtttttttctccctcttgtccttccccacgggccgcccgtacaaaagacccccaccacgcacaacccccaaaagaaacaccaccccctacaaaaactaccgatcaacccaaccacccccccccccacaccctcccacactcccacccaacccacacccctncccaacacatcataccaccccacccacacctccctccccaaccaccctacccacaccccctcccccacccccctcatacccaacgcccccacccacaacccccacctcaccccactcccccaccacccatacccgaccccctacccctcccaccccgcgcccccaccccacccccccacccccccacgcccccaataaacacccgcaccacaaccccaccaccgaaccccacacccccctaccccggcccaccccccccctgcccccaaccctcaccctcgcccactcccacccaacacacaccctacccccaaccaaccaccatacactcacgtactcccaccccaccacccaccacacactcccacaacccccccccccactaccacaccaccacataagcaacccaccccccacaatcaccccccatcccccacacacacgcaccccctccaacaactaccacccgcactctcttacacgcaaactacaataccaccaacctaacccaccacacacgaccaccccgacaca

SEQ ID NO: 162135 - DNA, 674 bp, Glycine max
tttcttgaaacggggattcttaaagacctgcggcatgaacctcacaataggttagtggaaattttttttttccgacaccgaaacttctggggggtttagggaaaaaggatctccccattaaaaccgtttataacttaccaagttcttagacaagttttcattttcctggcctaccactcaataaaactcgacgatgttcattagaaatttgtcctaaaacttttatctgaacggtagttacattctttcgaacgtggtcatgtttacagcggtgtcgcatgttccaaggaggcgacctttttttcaatgtaacgggtctactccacctctcgtagcgagcttctctattttcctccggatgttgttattggttctcacgtcccttttaacgtcttccgtttttgctagcgggcctctattctcgacccatcaactcccgtcctttgataggagtttacagtctatacctttcctgtgcttttatctccttcattttttttcccttacttacaacgttacttggttctttttacagctatctgctcggtacccactcctgtatcttttcctgctacttcataatggtattcaattatcactcttgtcgtgtgctacgtctcgatgaataccgtgactctttaatgtatgctccttttccacaatagcgtctcatc

SEQ ID NO: 162136 - DNA, 240 bp, Glycine max
cgatgacaatcatgaaactggccaaatacaggctaaaggcccatttggataatgacaaagcccccgagtggagaaagatgaaggcccaagtggagaacgatgaacgcccataggcagagacactatcaagactatcaattgttgctaaaggcccaaactaaattgaaagcccaagataaataagctcttagtcatcaactatttttatcgcaattttgacccaaactgtttagaaggccc

SEQ ID NO: 162137 - DNA, 240 bp, Glycine max
agcttctgagagtgccttattgtgtgctgtttttttttaggcaaattcccttagcaatctcccaaattaaggacttatcataacttgaaacccttatgctctcttagaaccctaaaacaaggtcaaggatatcaaaattaggatcaggggcttattcaaacaaatcattaattacttttggctcaacagggctgcaaggaaaaaaactcacacacgggaactattctggctcaccccccc

SEQ ID NO: 162138 - DNA, 605 bp, Glycine max
taagcttgcaaactagcttgtttaaataataataataataataagaataattattattatctataccatttttatggcattatgaatgacagtatgaagtagcataatgtgcttagagagttcacttgcattggaaaattttcaaaaagaaaaaaacttaagttaaaaggataatgcaaccagattaatacttccaaagaaaaaaatgttttgtaaaaacattttcagacaatttaaatatttttatttgactatattagtataaatcatctctaatccatatatttttaatattatgttctttttttttcattttcttttgatatactttgtgttttaataacttgaattcaatatgattttgtttatcaattatttttggatttgtgcattacttatacgaaattttataagtttcttcttttggttagtatgttagtatttcacgaggttttaaaataattaattgattaaagacgtctttaagcagactcttaaataggttcgtaggccgataagccgagtcgagcctttaaaaaaagctatgacagataatgagtcgaactcaaatcttacgtagttaacttaagtcaaactccaatcta

SEQ ID NO: 162139 - DNA, 246 bp, Glycine max
agcttcgaaatcgaaaactaagcggttgatgatcgacgaacaatgaagaacgaacgaagaacagcggagaacgctcacagaattgatcacagaaacatcacgaaagcattacagaagcatcttggcttgaattttcttcttcttgatccttcttttcactaattttaagtgaaatatgtttgcccagggtgctgaccccttcccttcagcctcccacgcctttttatagccaaaacagggaaggag

SEQ ID NO: 162140 - DNA, 323 bp, Glycine max
cagccccttaggcacctttttttcttttgaatttgcagaggaaaattatctccggaagaaaatcaagccgaggcgcttctgtaacgtttccgtgagtaattactcgaagattcttgaccgttcttcaagatccatcgttcgggcttcattttcttcagtctacagcgggtaagtaccttaaaccatgcttttcaattcgttgctatgtacccgtggtgctccacattttgttgcatgtatttttagttattggtgtgatgtactttttatacccccttttgatgtgcttaagtcatttatttaagtcatttctcgcttaatct

SEQ ID NO: 162141 - DNA, 247 bp, Glycine max
agcttgtagaatggccagacatgatacatgtcatggtttggtttggttcaagggtaaaagggatgccccacattatttccatgacacaaatgcaaaaatgaagatttggaaactttatgcaaaactggtcatgcatgcacctatgtggacactcaagtgtcaaatttttatggtcatgtgaagctagggtttacgattcattccctctattttagtcaacccaatgtttccaacaaatgctcttttt

SEQ ID NO: 162142 - DNA, 426 bp, Glycine max
  unsure (1)..(426): unsure at all n locations
tgctcgtggggcttctatggaggctggatctttgagcttcaatgttgttctttaatggngattttccaccatggagatgcagcggaagacaaaggagaagaggtgagaggaggtgccatccactatggaataagccatggaagaaagagtttcaccaccaagatgagccttggataagaagcttggagaggatgcttcaatgaaggaaaagaaagagggagagaaagagagaggggggagcacaaaattgaaggaagaaaaagggagagatagtgaactttgagttatgtctcacaagactcccattcatcaaagttacaacaagtgttacacatgcttctatttatagactatgtagctttcttgagaagctttcttgagaaaactttcttgagaagtttttttggaaaaacttcttgaaaagct

SEQ ID NO: 162143 - DNA, 347 bp, Glycine max
agcttcattaagaggcttcctccagaagcttcctcgtggcttctttgcgaagctttctcaagtggattctttgagaagttagatccttatctatccacacccttctattaactaaattaacttccttaaaaataattacggatgaaaataacgcaacaaataatcaaacatcaaacataattacgaataatatatatatatatatatatatatatatatcagggtgttacaatcatagctcatacgacacaggaaatagagtaactgtggccaagtgtactttgtactagggggctgtcacctggtagggaacacctttgggctcccaggctgatcacctatgggag

SEQ ID NO: 162144 - DNA, 454 bp, Glycine max
tgagatgaggaagtgttgaagggtgaaacttcctgcttttattgttgaccacagagtggtacctggagatatgtcgcgggggtcaggagaccttggggacgtcaggtggggtgctattgcccaaaaccaagcttgaccaatcccgacccaacccgggcatagtcggtcagtgagaacctgtgatgtacctaagcaggcgagctcctggcagtcaacagataaaaggaaaacaagaccacaaagcaaggaggcttgtggtggctggccagctgtgaattttgtgtaatatgtggattgtggcctctggtaatcgattactaaaggtgggtaatcgattacaaggcttaaaattgaggacaggaggctaagatggtctctggtaatcgattaccaaagggggtaatcgattaccaagcttgaaaacgaagtcatggaacttagggagcctctggtt

SEQ ID NO: 162145 - DNA, 573 bp, Glycine max
agcttccaagaatcaagatcaagattcaagatttaatattcatgaatcaagagaacacttaatcaagataagtatgaaaaagttttttcaaatactaagtagcacatggatttttctcaaaatctgtttaccaaagagtttttactctctggtaatcgattaccagattattgtaatcgattactagtagcgaaaatggttttaaaaaaacttttaactgaatttacaatgttccaattgatttcaaaatgttgtaatcgattacaatgttttggtaatcgattaccagtgtgcttgaacgttgaaattcaaattcaaatgtgaagagtcacattctttcacaaaaaagctttgtgtaatcgattaccagtgaaagtttttgaacaaatcaaaagatgtaactttttaaatagtttttgactctttcaaattggctttaagtttttctaaaagtcataactcttctaatggttctcttgaccagacatgaagagtctataaaaacaacgctttgttttgcattcttacagctattcaatccaatcaatcttatacaatcctttacaagccctg

SEQ ID NO: 162146 - DNA, 419 bp, Glycine max
tgcctgaaactatatgagatccctttgtcgttgccttccaactagggttaagcttaaggagaacccaatctcctatctggtagttcacttcacgacgtttcccatcagcttggcttttcatagcagcttgttccttagaagcttatttcgaatagcttggaaagtgttatccctatcagttaacatctcttcaacggcctcaatgttcgaagaccctgtaatatattcaggaaagttaaagggttttcggccaaaggtgacaccatactgattggctccagttcccgcattccatgaagtattatgggaccattcgacccacgggaggagctatccccccatgcttggcccacgatggatgaaggctcgcaaatattgttcaattatgcaattcaaaacccttgtctgtccatcaattt

SEQ ID NO: 162147 - DNA, 69 bp, Glycine max
gagacgagccgcagcatgcaagattgcactaaatttacattgatggttgtatttatgtcacgcaccccc

SEQ ID NO: 162148 - DNA, 305 bp, Glycine max
ctttgctgcaaaattcctttttgttggtgtttttttggtttgtgctaaaggtggtcttcgtcattggaagtgccgtagacaggctttgtggttgatttagggatggcctttgtggataatcgggtggtggggtacggaggacccttccctcccccaccccaccccccctctccccttccctcccccccccccaccgttccaccccctcactccctcctccccccccaccctcctccccgccacccccccccctcccccccccccctccccccaccctcccccctcccctccccctcctctcctcc

SEQ ID NO: 162149 - DNA, 537 bp, Glycine max
acggccccagtatgtgtaaggtaaggctacacaaggaaaaggttaaccaagaaaaaggctaacaatgtttttaggcacaaatgaaggaaataaaattcagaatttacgaattcaagtaacaatccttcatgcaacccatatattaccttaaagagattttttttttaaaagttctttaagcatgaaccattcagccccattttttttttttcttttaactgtgcttataccaatacctgcctctctttttttttccaccccaccacacgcacaggctctactttttccatggctcaccccctatttatcctctccgattcttcacgcatctctcccgccgcctcacctcattcatcgctgcctcccctacttccctctctcgcatccgtgccccctacttccctccctctcctcaccactcgttcccgcctccctccctcgcgctggcctcaacatattctgtctcaccctcaccctctcctgctccatactcatcctcgctccgtccgatgctctccactcccccgctccctcccc

SEQ ID NO: 162150 - DNA, 320 bp, Glycine max
agctttacaaacatgcttgtttaaaataaaaattaaagtagtctacatatgggtttagttagttacagttatagatgcacatgtgattagttggcgtggcgaatagtctctctactactacataagccgtatatagttattatgttaacgactttcacatttcagtaatttcactttctttctttcaaattcctagtcctagtcctacctaaactcctcctccttctatcttggcttaaatttttcagagaaataaaatacaaaatccttcaaaggatgattctattaaccatgatatcaacgtgccatatcccgaattg

SEQ ID NO: 162151 - DNA, 453 bp, Glycine max
tccaccttctatgtactcataaatcagtatcttctctgaaccatttaggcaccaaccgtagagtgtgaccaggtttggatgtggccaaccaaagccatgaccactcagaacctccatttcagccttgaattccttctcaccctcaagaccttccctttgaagcttcttcactgccacttgtctgccatctgaaaacactcccttgtacactgttccaaaccctccttttcctataactctgtcctctgagaagctgctagttgctttcagaatgtcggcatgtgtgaaaactgtcttgttcagacggataaccttaactgtgtcagacatccatgatgaggatccggagctgctggaatcatgccattgttttgtatccctcaagaggtatcttggttcctctgaagggcttttcaccgatacacagactaggatcgtaagaagcccgatact

SEQ ID NO: 162152 - DNA, 493 bp, Glycine max
  unsure (1)..(493): unsure at all n locations
agcttgcatttggaattgcgaaagccccactccatcattatgattagtacctgacatctcaaacaaacaaatcaaacgtaacaagacaattatagttgctgtttgaatacctcacccactcaagtgtatcacacaattatggcttttctctaatgaaacactcttgccttttaccactctaattccccttgagttcttaggcaattcaagagattatggccacaacaaagaacaattcaccaatatgtgtaaggtaaggctagacaaggaaaaggttaaccaagaaaaaggctaacaatgtttttaggcacaaatgaaggaaataaaattcagaatttaggaattcaagtaacaatccttcatgcaaccaatatattaccttaaagagattttttttttaaaagttcttcaagcatgaaccattcagcccaatttttttttttttttttaattntgcttatacgaaattctgcttcttttttttttttataac

SEQ ID NO: 162153 - DNA, 548 bp, Glycine max
agcttgtgcatccaataccctgatgaggatgtcccatttgttcttaaaactagacgaatccatttgcttccaaagtttcatggccttgcaggtgaagacctgcacaaacatctgaaagaattccatattgtctgctacaccatgaaacccccagatgtccaggaggatcacatatttatgaaggcctttcctcattctttagagggagtggcgaaggactggctttattaccttgctccacggtccatcacgagttgggatgacctcaagagagtattcttagaaaaaaaatttccctacttccaggaccacggtcatcagaaaggatatttcaggcattagacaactcagtggagagagcttgtatgaatactgggagagatttaagaaactatgtgccagttgccctcaccactagatttctgagcagcttctcctccaatatttttatgaaggactcaataacatggagaggagtatgatagatgcttgccgtggtggagctcttggagacatgacccctgctgaaaccagaaatttaattgaga

SEQ ID NO: 162154 - DNA, 546 bp, Glycine max
  unsure (1)..(546): unsure at all n locations
agctcaatcaatatttttgtctccactgttctttccaaattcagccaaccaaacattgttctatattttgtttgatatttcaaagggttaacttttctatttattaaatataaaaaatccttttaaattaatttagtgtttatcataaaaaaaatactagatactttatttaactcagtctattttgacctagtctaatatatagttttagaaactctattttttcagtaaaaatatctatgcttaaaatggtttttgagaactctctcccacatcttttctctttgccttttgtctagtaacaatgtcacatctcatgttaattttgtttgtaatcaaataatttcttaaattggatatgaatcatagttcatgattgatcaattcaagataggtcatagttcatatttaattgtgattatggatagtaaggacaagaaacacaacctaaagagtcctataagttagcattctttgaattgggaagagtaccatttctttcctcanattaaatatatttaataccaaaaggtgaccaaacattta

SEQ ID NO: 162155 - DNA, 230 bp, Glycine max
tccattattcaaaagttgcctgtgcttcttcaacccgtggctgttaatggtaatttagtccccctcggacaaagaaaactgatgtgtaatgatgactgtgctaagttagagcggaaaagggttcttgcagatgcttttgagattaccgctccaaatctggattcactccattttggtgagaattcggttgcttctgaattgctggctgacatgttgagacgtgattctaa

SEQ ID NO: 162156 - DNA, 311 bp, Glycine max
agcttgaaatgaggaagtgtggaagggtgagacttcctacttttattcgttgaccacagagtggtacctgaagatatgtcgcgggggtcaggagaccttggggacgtcaggtggggtgctattgcccagaaccaagcttgaccaatcccgacccaacccgggcatagtcagtcagtgagaacctgtgatgtacctaaacaggcgagctcctggcagtcaacagataaaaggaacaaagaccacaaagcaaggaggcttgtgtggtggttgcccacctgcgaactctgactgttatatgggatatgccctct

SEQ ID NO: 162157 - DNA, 496 bp, Glycine max
tcaagaaaaggtcaaactccctcagaaatcttatttcaggcttaaataggtggctttgttcatgcttatgcgcttagcgcaattctgaaccgcttagcgcgcattagtgaatttcggcttagcgcggcttttctcactcaacggatggattgaagcagtgcgcttagcggaatgacccttcgctcagtgaatatgcacaactcatctttcttctagattcttcctcgtgctcagccgacatgtgttgcgctcagcggatggctcgctaagccacaagattggcttagcgagagggtgaaaataagcacttcaaaacttgcttaattaacctgaaattgagagaaaaatgattattaaacacacaaaatggaagtactaagtacttattacctatctttagcaaaaagtatttaccacactacaaaataccaataaattggaggattttgatacaatttaaaccaagtttatacacaacaagttagtcatattcatc

SEQ ID NO: 162158 - DNA, 435 bp, Glycine max
agcttatcagatatagtggcgttaattggctccacagcctacaacatttacatttacgagtaacatggccgagaaatttattagcaatttagcatcacttacctcgtaaggtgattaactacaacaataaaagaaatgggcttttcaataaagaagatgaacaaatgtttggcccagttcgttatttaagaaaaagaaaaactaaaaataaaagagtgaacaagcattatcacagactaaagtttcaaaggatatttttaaaatattcttaaaatttgagtttgatttaactcaatttagtaactagtaattcaaaaagtggtgagaattctcttccacttatatattattattattattattattttaaaattttcaataagtctcatgccgaacaattgtttctttttgtaaaacaagatatcacattttttt

SEQ ID NO: 162159 - DNA, 466 bp, Glycine max
tcaactgtgaagctatcttcgtatcgagcatggccaaatatgcatgactttcggtttgcgctttacaagttgccattgcgggttcccaaagatgaccaagaatatgctggtttatggggaggaacttttggttggcctcctggaaagccttctgaagacaagcctggaaaggctttattctttcttctgctcttttatgaggagttccagggacaacagcttcttattgcaacaaaaattttggaaggcacacactatgtgttacatcctaacgtgtcagcaatgtttacagcaaatatcaatgatccttcatccgaaccctttccctgggacactgatgcagactcggttccagtgaatatcaagcaagctttcgtgggagagggtattgcaagtggttacgggttcagataccctggatcaaagcctggttccctctttgttttagaaaatggtatccttgcct

SEQ ID NO: 162160 - DNA, 418 bp, Glycine max
agaccagccgcggcctgccagtcttgtaacaatttttcctagctcgcacctttattatgaatctattcacagacctacacccagaacttgaggtacaaaggaaagctttgtcgccgctgtttgaatacctcacccactcagtgtatcacacccttcatggcctttctccaaagaaacactcatgccctttacccctctaattccccttgagttcttaggcaatgcaagagattatggccaccacaaagaaccactccccagtatcgtgtagggtcgggctggccaaggaaaaggttacccaagaaaaaggctacccatgtttctaggcacacaatgatcgaaataaaattcataatttatgaactcacctgaccatccttcctgccaccaatactattaccttaaacagaattctttt

SEQ ID NO: 162161 - DNA, 207 bp, Glycine max
tcgctgaatcactattctggtaggaaagatagacactttattatcctgacatacccagtgtggatgacacatttactcctgtgtctaaaacatttagaatctgcacaaaataaagctgaacacttcattactcattccctagttaaatgttactccattcggatgtatcatcaattcaaagaaaatgacttcgctcacaaatgaatt

SEQ ID NO: 162162 - DNA, 277 bp, Glycine max
agcttttgattgaaaggaagtcttcaaaactttgccacaacttcatcaaaatgtgtaaatggtttgttatggcaggattctaaagctttcaatggcatcaaatcaaaagactagacatcaatgaaggcgaaagggtcagcgtttattggatctatttctccttgaaaatgttcggcattcttagttggagaattttcaacgacaactataataaaaattaaaataaaattagattcgatattcgaacaaagaataattgagcgcatagtttatttac

SEQ ID NO: 162163 - DNA, 436 bp, Glycine max
tcttctatatatagccttcatatttaagtatccattgtctctctatagttggattcttcactatattcttcgtttgatgtcttgagtccgtttgagcatttaatgcacgtctcttttcatgcaaagaccatgatgataggataacatgttttatacttaaatgaggaagtcacttctttcatcatagtaggtctacaacaatagagagcgccctttgatgaggatcaacatctccaaagtgtgggtttcatttattctttataggactatgatagatcctaggagaatggtgggtggagagatcgtctaaagcacatcttgatgttacaacaatggtggtaggagagatcaccacttgagtcttagcaacagtccccttgttgctgactccatcttgtcttgttgttcttaaaaaaacctattggtcataatgaca

SEQ ID NO: 162164 - DNA, 326 bp, Glycine max
  unsure (1)..(326): unsure at all n locations
agcttatattcacaaaggaccctagngttgggtgccttagtctcttttttcgggctgggagttgtagattggttgtgattgcttgtaaggattcttgatgcatagtggaaatctaattcaggttgtggattagataagttacttagcttctctagaaatagagagtgaactagtataaaagattgtgtctttcttctcttgtcctaatctttttctctcatttaagggtcaatcaactcattcaagtttaatcaagtcttttgagtattaaacaagtttttcacaaagattcaagttttatgattgtgaaagaaaggatgttactg

SEQ ID NO: 162165 - DNA, 528 bp, Glycine max
actatgaaactaagctttaacaaatgtcttcacaaataatcatcacatagcttaaacctagcaagactacccatcatatctccccaaaccccatacccacgaaaatcaaaggagaaagaagtccacccaaacctgaatttttgaagtcccactcgtagccacgcacttcacgaccccgaaaatgccctccttttgcgatttggagcagaaatgatggccaaaggttgaagctttgcttggagcttcaatggaaaatgaagaaaaagaaaatggcaacgtgagggcgagagagggctgtctgaaaagtgtggtggggctgagtgaagagagagaaaagctttttggtttaaataaaaaggggtttctcttttttctattattttatttatgcaaatgccacatgtctccatttgagtggagcaagaaaggcccaacttctctttttgactgtgacccatactcagtcaccaaagtgaggaaaaatctgaccctttgaaacgctaaaatcctgcctcggtttgcgtgccg

SEQ ID NO: 162166 - DNA, 461 bp, Glycine max
agcttagagccaattcaaacgacaataactttttactcggatgtctgattgagtcccgtcatatatcgagacgctcgaaattgaatgttgaagctctgagccaatccaaacgaccataactttttactcggatgtctgattgagtcccggaatataacgagacgctcaaaattgaatgttgaagctttgagccaattcaaacgacaataactttttactcggatgtctgattgagactcgtaatatatcgagacgctcgaaattgaatgttgaagctctgagccaattcaaacgacaataactttttactcggatgtctgattgaggcccgtcatatatcgagacgctcgaaattgaatgttgaagctctgagccaattcaaacgaccataactttttactcggatgtctgattgagccccgcatatatcgagacgctcgaacatgaatgttgaacctctg

SEQ ID NO: 162167 - DNA, 430 bp, Glycine max
taaacattcaacttcgagcgtctcgatatattacgagtctcaatcaatcatccgagaaaaaagttattgtcgtttgaatttgctcagaggttcaacattcaattttgagcgtctcgatatatgacgggactcaatcagacatccgagtagaaagttattgtcgtttgaattagctcagagcttcaacattcaatttcgagcgtctcgatatgtgacgggactgaatcagacatccgagtacaaagttattgtcgtttgaatttgctcaaaggttcaacattcaatttcgagcgtctcgatatattacgggactcaatcagacatccgagtaaaaagttattgtcgtttgaattggctcatagcttcaacattcaatttcgagcgtctcgatatatgacgggactcaatcatacatccgagtgaaaaggta

SEQ ID NO: 162168 - DNA, 441 bp, Glycine max
agcttttagaaacaggtcagcattcactctctctatttctttttaaaatattatgtgcaatattattgttcttgtatatctcaaaatttataaagattggctcttgcttctttcctgtttaatacaacaatgttaagaggttaaactctttctgtattatatattagaggaaattgcactagcatcccctgagattttcctaaatgatacaatccagtcctctagattcttttgacttgctgaatacagtgagttgtattttacatttttttagagtactgaatacagtgagttttatgactaatagatttatatcttaaatttgtagtatatgaaatttgaaagtataattaaatttggatggtgttgaaaaaatattttactttgttctgcattggaaaaacatgtattgaaacattatttacaaacattgtatcatct

SEQ ID NO: 162169 - DNA, 553 bp, Glycine max
tgcatccatgtgcactagttattgtattattgaagagaaagaataaatttgaggtagagactacagagtgtagcatacatgtccacttgctgtttctgacagttggcgggtccataaatttgaaagattcaatgaaccatctttcagagacattgctattcccattgttgcagctgagtgtgatgatagattgctggaatatgaagcacaagaaacattaaaaggattgctaaaacaggcaaaagagtatgttcaatttgatttactgaatacaaaattacccaccgagttgtttgcaccccgattagtgcacgcagaccagccgaggccacaacctctactgacgaaacttctgaaagttgatgcctaaacacagcagtagcagctccaccaccttcatctccattcactgctaaattacctccaatcgtaacagcattgtgctttgataactgagaactgaattcacttgtcatagccattctgatactcataaacgtaataaaatacacaaacaatcagaccaaaaacaaagaagtgcttaacacattaa

SEQ ID NO: 162170 - DNA, 485 bp, Glycine max
agcttcatcctcagatccttcttgttggactaggctcaatttagacaaccctcctaggtttagacaaacttaagctaagcttcatcctcaaatccctcttgttggactagacttagcttgtcataccctaatttcgtctggggactattgtttgatggcatgaaacctttggttgaccgcttcgagttacttggcaccctttgttgcacaatacgtgaagttccgagacatgccggaaatcaacaggaagcattgttatgcaatccgtgaaattccgtaacatgtcggaaatcaaaaggaagtattgttatgcaatccgtgagtttccgtaacattccaaaagctaaaaaaggagtaattacatgatccgtaaggttccgtaaccttacggaaagaaaacaagtatcgttatgaaattcgtacagtttcgtaacattacggaaaatgaatcaccacaagaagcaaaggggggtgtatttaataaa

SEQ ID NO: 162171 - DNA, 320 bp, Glycine max
ttcttgtagcatgcatgggtttgacgtattcttttgcttgaattcactagatcccttcccgcctagtatttctcactggtaggctaccggggaaactcggtggagccgctgctggttctttgtctctttggcccttaattggcgccctagtcgaccctttcttctctttattcattccacattctactttctgtaaaccccttactctgtgtcttgcgcttttcagcctgaattccattcccgaaatcttctatgatatgaaactacatacatcaattaagaaaatagtgtaggaatctaagataagatagagtcctact

SEQ ID NO: 162172 - DNA, 357 bp, Glycine max
agcttctatagaaggttcattcctaatttctctacaattgcatcacctctcaatgagctggtgaagaagaatgtggcatttaccttgggtgataaacaagatcaagcctttgctttgctcaaagaaaagcttactaaggcacctgttctagctcttcctgacttttctaaaacttttgagctagaatgtgatgcctctagagtgggagttggagttgtattgttacaaggtgggcaccctattgcttattttagtgaaaaacttcatagtgccccccttcactaccccacctatgataaagagctttatgccttaataagagcccctcaaacttaggaatattaccttgtttccaag

SEQ ID NO: 162173 - DNA, 551 bp, Glycine max
tgtatagttccccaatttatggttattttgtattgatttttgtataataaatcttgttttatggttaatgttgtctctagaatatttccattggatttaatgatgaaatctgtgcattttcaggtgaaaaagaggctaagttttgaattgcaaaatgtagtagtggggctaagctcagcagttgggctaaagcgcatatccattgctaagtgcagcttcagcgcgcttagtgcaaaagataatctggcagagtatcagtgttcggctttcggcaagtgcaccggatcgcacaagtagtataaaacggtaagaaccgagtatcgaacactcggggaacttgttgtatttggtaatctatttcagcaaataggcgtctattgtgtaaaaataagtgtgaatatgaacaagtgtataaactatctgtgcaaaaagaatgaaaatcacgcgagagaaatgatgtgtaaaaacaagtagagtacacgttggtcttcctaataggtgcctgatgcgaaaatgatattctctatctaacaatgctcatgtgctcttat

SEQ ID NO: 162174 - DNA, 603 bp, Glycine max
agcttctcaaggaggtgagcttagttatgagagtgggtgtgtgtagctaagctctagcttctcaaggaagctcctccacatactcctctcccacgcccctcaccctccagccggccctcacctatctctctccacccccactcccccctctccctcccctccgacccccctccctccttgcctgcccccctccccttaccctcccccactttcctccccctccccgcccctcccccacccccccgcccccccccccccccccccgtctcccccctcccccccttcccccccatctcccccccccctcccttcctcccctccccccccccctctcccccacctcccccatccttacctccccccctccctcccatcccccccccctctaccctccctgcctcccccccccccccccctcatcctccactccctccccccactccccccccttccccccctcctcccccagccccgcctctctctccccccccccccccctccccaactcccccccccgcccctccccctcttcccccccccccgccccctcccttcccccctctctcccccacccctcccccacacccccccccccccctcctc

SEQ ID NO: 162175 - DNA, 400 bp, Glycine max
tctaaactttatacaagaatgaagctctgataccacttgttggataagtggcctcagatatcttacgaaagggggttgaattaagatatcacaaactatttccccaattaaaaatttattttactttctattcaagttataaattcccttaaaaatgaacttcttaaatattgattcaaataaagcaatttgaatatgaatataaaacaataataaataaaggagtttaagggaagagagattgcaaactcagacttatactggttcggtcactcccttgtgcctacgttcagtccccaagcaacccgcttgagagttccactatcttgtaaaagcctattacaagatctgaaccacacaaggacaacccttcctttgtgtttagatttctttacaacaa

SEQ ID NO: 162176 - DNA, 111 bp, Glycine max
agcttgcataactgaaaccatcttttggggtattttattggtaaaaacagcagcaccttcaacagaattcattgaataaccacatggcttaaaagtaaagtcacaaatctc

SEQ ID NO: 162177 - DNA, 416 bp, Glycine max
tgccagaataatgggttggatacagattattctgggatggtttgtcatcttggtaagccttttgagtctcactagattctactctgcaggctttttcgtccacaatgaaggcatatgccaacacttctacaatgtgagggatgtttctgatggttttgatgtcaaatcactctctgatagagttggagaagtgatagacaagttggaaactttgcatgccaagcttgagtcaaaagtgcaagaaatggagaaaaacaaaggcacctagttggaccaagaagtttttaaaggatcaaatagtttggccatttcatagtgctaatgttgctctaaggcgggttcgggttccgaaggttgatgaatggatgaagttcgcagtgaaagaggatcatgtgatcaatttttttcatcactga

SEQ ID NO: 162178 - DNA, 948 bp, Glycine max
  unsure (1)..(948): unsure at all n locations
accttttttctttcacacgccaccaccncgttcacggcgctcgtgaagaagaacggggcattctctcccgcggcggtcaaccaaccacacaagccctttgcttctgctcaaaggaaaagccttacttatcggcccctgcgcctagctcttctccgcacttttctataaacaccttccacgccttaaagcgcgacccccctctaaaggcggactctcgagacccgcctcccgctcccacgccgcgccccccctcttggcctatttttacccgcacgaaactccgcttgtggccgcccttcgtcctcccccctccccactctaaacaacaacctctcatcccgcctccaataagccacgccccctcgctcatccactagctcccccctctgttctctatggcccttgcctcttctttcgacgtctctatcccctctacctcccgccgcacacgatccagctcccttccttctctcaacctaatctctcttaccgtcccttcgtccctcggctccctcttcaccaccctcctctctctccgccacaccgacctctcttccccacttccccctcgcggcgccacgctccattgctttccgcaccaccgcctgccaccgatcactctcccgcccctccccacttactttctccccgccaatcacccccgtcactcccctctcctctgcccacttctctcctctcgcacgctaccatccactcgtcattgctccacctatccgacgctcctacctcctactctctatcacctatcttacctntncttgactacaacgctacctcgcgcgtcctcgcctctacgcgcaccaccagttccttcctatctccgctctactctgttcaacagccccgttcttattgcgactcnccatcttcgtccctacctccgacgctcacgcttgcgcgtcgcctncagctcgtctcactcgccgn

SEQ ID NO: 162179 - DNA, 382 bp, Glycine max
  unsure (1)..(382): unsure at all n locations
tgtcctgaaactggantaagaagaaaaaaatacattttgagaattatagcttagtcaggaggttccttggcctcgaatcaaggaaaaacgcgtctctctccgtactctcacctttttccctctttcttctttaaccaacgcataacaacatggggtggagtatccctaacaggccgtaacaccctaatgcattgtcggtagtgtcatctcgatgagagtgatagtgtcaagttgtccattgtgcgacaatctatcgactacatggactcccagcctacattcacaaagtattttcaaaatggtaccatatgcatgcaaatccataagttaaatgtgaatcatcttgcatgtgtgtctatgtgtatgagacatttgaagggga

SEQ ID NO: 162180 - DNA, 431 bp, Glycine max
agctttcccgccatccccaaaataattttcatactattatttcataaaaatccctaacgcgtgtgttcctttccccaccacaaatgcgaacgaagaaaacaatgtgtacatggcagattctctccaactccccaaataatttccactggcaacgcattaccaccaccaccacccaccaacacgcttcacctccctcctttcccctcccttccatgcaagatcttcttcgccagggttccgattcctcaatctctttttctatttccaaaaacattcttttccttttcctctttttttattttaccaattctttttctcgcaggcactccaactcttcccctccaagacgacgccggtgctccaggtcgagctaatgctttgccccaaacgaattcataatcttaattaactattttaaaacctccgcattc

SEQ ID NO: 162181 - DNA, 387 bp, Glycine max
aatactaagctcgcttctacatttatcacctttatagatgattgttcgtgatatatgaatatttattcgcttcataacaaaaataaagcattggatcccttcaaagtctttaaggctgaagttgagaaccaatgtggtaagaaaataaaaatagtgagattagatagaggtggagaatattatggcaaatatactgagaatggacaagcacctggtccttttgcaaagtttcttcaagaacatacgattgttgcccggtacactatgcctggttctccaaatcactatggtgtggctaaaagaacgaaccgaacattattggacacggtacggagtatgcttagcaactctgatcttcctaaatacttgtgggctgaagcactaaag

SEQ ID NO: 162182 - DNA, 358 bp, Glycine max
cgcatgcatgctattgcgctccaatttgaagtgttttctttttcatgacagacaaacccaaattgaagttgcgttcggaaattatccttgcccatcgcccattttattgatctcttgcatcctcctaaaacattaatcatattatagttaattattaagatacagaagtacttataatattatattatgaggtgccttgccactgatagatacatttgtgtaagattaatgaatcgaagcctccacacaattacagttacataaaatattcattaaccctagtatgtgataatcacatacctaatgcattgagtttagtctggtttgaatattactactgtgtttcctatatattttt

SEQ ID NO: 162183 - DNA, 953 bp, Glycine max
  unsure (1)..(953): unsure at all n locations
accacgaacgcgagacgggcgtgtgtgcgactngancgtacgttcacactcncagcacatanacngagtgctntncagcggngcgtcagcattaaagtgtagcacacaggaancacgcncnctctagcagccnncccccccnnccgagagatgaaaccnctgtaacagacgccgggcatctataaaagagagctggcgggaagccagctttgggtaaggagcattaaaaggagattggtatggggaaaaaaaaggagggggcttaaagtatacacacagaggcatatgcacaagaagctgccagggtaagagtaaaaacaggcattgatgctgagggtgacggcccctatgccccctcagaaatacaatatgtgaagcaggccggctatacattcgtagcatggcccacacaacttgggaaagctgtattaaatgagggaacatggtagatttgacatgcgcaaaggaaaacaatcatagaatacaggacaaatactcgcccacttttattaaacaggtaggaaccacaaagtaattcacacaacgaggatgcacatgtgccgaagccggctaatggggaagcagatgaaccggtgcggggaacgataaagaacagttcggagaattaagaaaacccacgggagactacgtttgatgggaggtttcttggaatggagacggctcacatcgaaatccataaaaatcacgagggagggaaaaaaagcggggaaaaaagtctgaacataactggcacacaacaacgcgaaaggaagggaacaccttaattaattagccctcattaatggagtaaacggagcaatacaaagcgttaaatacagggaaagggcaaagggcgaacggagccacaaatntccacgggggtcaggaagccatcgcgtggggcacaaaggaggatcggccgaagaggaaaaaacaccaccggcgacaaaact

SEQ ID NO: 162184 - DNA, 321 bp, Glycine max
gcttcgggagttgtatttacgcacggggaaggtattagcattctctctcgtccatcacaagagacgacagcctttaatcaaatgtgcaaatatgactttaattcatggtatcttccctttctgcgttcttatggttttgtatgcttttttatatttttatctttttgaggtcgacaagggggtttccctttgctcctacgtattcctcaattgtgataacgaaatcatacctacgttagtctttgtgaataaagtgtttggttaagtttgctctattcctttttgcgagatatgtctttattgaatgaaaggtcattttaa

SEQ ID NO: 162185 - DNA, 401 bp, Glycine max
  unsure (1)..(401): unsure at all n locations
agctttgttcactgcagtttcaaatttctgatttattactcttctaatcatatccccaatcatataacaatatttaattgtttgttgttaagcacattactatttattttctttaaatttatgaagctacaaagtataagacttttatgatgatatgttaaaaataaattctgagtcactttatgaaaacaaaaacaatggtatcaattgaataataactacaattaatgactctaatttgttaggactaagctcagacatatttctttcttcatgtaggtgttcaagctgcaaccagatattattacaaatgtggggatagntctattccagccatgacccaagagcatttcttttagacttttccaaaacctagtgccaaataattatccaactccaat

SEQ ID NO: 162186 - DNA, 426 bp, Glycine max
tgatgaagagtgcttgacagcttttcagaccttgaataccagtctcgtgtctgctcccataatagtgacacctgactggagtaaagagtttgagctcatgtgtgatgtcggtgactatgcaatgggtgcaattcttggacaacagcaaaacaaggtattccatgccatttattatgccagcaaggtcctaaatgatgcacaactgaattatgccaccattgagaaagaaatgctcatcattgtttatgccttagagaagttcggatccctatttgttgggctccaaagtcatcatctttactgatcatgcagctattaagtatcttctaacgaagaccgatttggagccaagggtaatcacatgggttcttctgattcaagagtttgatatagcgattaaagacaaatagggctaagagtaaagtc

SEQ ID NO: 162187 - DNA, 301 bp, Glycine max
agcttttagagatggattgtatgtatttgactaccttttgtctatctcaccgtgttttgtgacaccaagtttgtaaatgtgttcgtaacgattcttcttttatttcgtgcataaaaaatattttaagtcatgtaacaatgtgaactctgattagctaatttacatttttaaataaaatgtcttttgtttgtgtacacattgtctcggcaaatctctcaaattgacttttctaacagtacgtaacaccatgtatgctaacatggtactggatttggaggcaatgtgaacaaaaacaagagta

SEQ ID NO: 162188 - DNA, 390 bp, Glycine max
  unsure (1)..(390): unsure at all n locations
tatagaaactcagctttacaagttttccttgtctttcagatactgagtcattggcatgctttcaagaaacaaatggttgagttggtctttagtatcaaacaatccatatttaatatactcagaagcatgtttaccaagaacatcttgcaacttctcaatgaagttcccatatgctggcaacaagatgtgttggagtgacattattattttctcacttagctgcttatcaaaggcacgccatttagaattgagtgctacatatatccttgaagtgcatgttgaactaattgaggctgcctttcagtgactctgcgttcgcattatgctccactagctngttgtctctagctccagaaagttagcgccatattccaagaactactttgatta

SEQ ID NO: 162189 - DNA, 353 bp, Glycine max
gcttaaggagaccactttgaactttttcacgaacaatatggcaatctaagtcaatgtgtttagtacgctcgtgaaaaacttggttaaaagagatctggatagcgattgattgtcacaccaaaaattggggggtgaacctaccaaacacgtaaatcttgaaggagatatgtgagccattggagctcgcaagtagtggaagccaaggctcgatactcagcttcggaggagctgcgagacagagtgggctgtttctttgagcaccaagaaataatggaattgtcgagatagacggagaagccgatgatggaacgtcgagtgtcatgacaaccggcccaatcagaatcactgaatgc

SEQ ID NO: 162190 - DNA, 609 bp, Glycine max
catcccatgcttctttggccgtcgttgcgttggatatcttctcaaatgtatcttcatccaccgattgataaatgagaaagagagctttcttgtctctctttcttgactccttcaacgtctcctttacaccttggcttagcgaggcttcatcttgttcctcgaagccattctctatgatatcccacacatcttgagctcctagtagcgccttcatcttgatactccaattatcatagttgttctttgtgagcatcggcatttggaaaggaaaacctccattcgccatcttttgaggatcttgaagctctgataccactttgttggaaataaggctttttatgtttaggaaaagtgtttaggaatattggagactttgaataggaaggagaattctctatggaggagagaactttgtatttttgcttgatacaaatgtgtaggattacatctctatttatactactctaaggagaactctagacacactaattctagagagttctcaactctagagatccaaagaggattctagagaatattaaaaccataagaaatatctagacacttcaaacactacaaaaattctctagaacatgacccataattact

SEQ ID NO: 162191 - DNA, 348 bp, Glycine max
agcttgcacactctattatattggtctaccaagtgttataacacaatagtgaagcgttattattgcacaacagtgaagtgtacttattttcagtctaggccacaatcttcaccccattctccctgctcaaccactgaatcaaaatttctccagccacaccaaaatagagatgcagaaaggaggcaaactaatactaccaataacccccaagttccacgttttaggtgggaattatactattaccaaaacgggttctacaacctcttacagtagcataactcttgcaaacactctaaatagtaaaaaaaaaaacttcaacattacagaactcacttccatgtgaaaaac

SEQ ID NO: 162192 - DNA, 460 bp, Glycine max
tatggatcattatgtggatcaactcattgcatatgcatatctctaggtacacaaaaatatttttaaaccttttcccattatttgaccggtagacactacacatacacatgatttggtccccaagtaagttactagggttttagaagccagcagcagtaggcaaaaatgtcgagttccatgatgacgctctcaaggaggctctattgctctctgcttcgaacccccaatgcatatcgccacttctccaccgatcaccttttcgactctggacgaggccgactcagcacccgacccacccgcacccgacgccgttcaagaagaagaaaagttcgtcatcgatcgccccctcgagaatggcctcgacgatggcatctacagggtatcgtatttctattcgaaatccaatttacaattagcgattcattttcccattcaattgtgctgtgttgtgttaggctat

SEQ ID NO: 162193 - DNA, 988 bp, Glycine max
  unsure (1)..(988): unsure at all n locations
acgacataacacattaccgagatgtggacatacatatccttaccgtgtgaacgataagagataaagagatccttataaaactctaagganntnnnntgtgatgatgcctgcaaccgtgcaatagcgcactatncaatacccagctatgagggcgcgtcagccaccaacacagcagaatatagtattaattgatgtgagcaaccaacacgagcgacggaacgcgatattaacacaccgtactaaactctacacgacgtaatacgaaaccacaaaaggaacacatactctaggccagccaaacagaacgacaacctaataaagacccattcaaaaacgtcaacagagggggcgggcacaatgcaacaagacacggatagagactaacgacaacacaacaacgaaatagggattgcacacccacacaacacaggagcctanaaagacataatataaacaaaataaatgacagtgaggagacagttgaaacgggagcgatcaaattgccacccagacgattgccaccgcaaacaaccgggggacaattgaaggaatgataacgaactaagggacccatgataagaacgacacgaatgcaaaagaaggcaatggtgataaggaaacaaattaactcgaatgaacacatacaaagtgaaataataaacaagtgataacgcatagacggtcagataacgactgggttattatcaaggagaaatgacctcactggatacgaaacgacgtggaaccgaacagaacagcgagatcaatgaaaccaaacggaagcacataacaacgaaattgaccgcacagaaatgcgaaacggaccgtctgcgatacggccgtcattgacaccgagcagtcatcgcaaacgaaccacatcgtatgaagcaaacacagagagatatgaactttactacacgatcacgccacgcatagtgaacgagacggagagtctcaactcggaacacacaactcactactacgagct

SEQ ID NO: 162194 - DNA, 370 bp, Glycine max
agcttgcttccttttgatttcggagacgtctcttgacatcatttattgtgcaaccaaggacgccaagttttctcaaagcggccaatccaaggttgtatatcatcaaataataatccccggacgaaattagggtatgacaggagccaccagaaccaccttagattgttttgtcttttttctcttccttccttcctactccttctccttaccttcttctctttcttaccttctttgtaacaccctgaaatttcatcttaaattatttcctacattgtgaaagactagatagtgtaagttcactctatgtaaatttactttgtgaatttatgaatttaatttattgtttggataattctaatccttgaaattt

SEQ ID NO: 162195 - DNA, 577 bp, Glycine max
tcttcagaaacgtggcatttgtgtgcaatacacaatgctcggttcaccacaacaaaatggtgtatcagaaaggtgtaatagaacattaatggatatgattaggagtatgttaatcaatttgactttaatcatatctttgtggatgtatgccttgaaaactgtcatgtatttgttgaataggattcctagtaaggcagttccaaagacacctttgaactgtggacaaataggacacctaatatgaggtacctgcatgtttggggttggcaagcagaaataaggatttataatctgcaagaaagaaaattggatgcaagaacaatcagtggctatttcattagttatccagagaaatcaaaggggtatatgttttattgtcctaatcataatatgagaattgtcgaaactggaaatgcaagattcattgaaaatggtgaaatcagtgggagtacagttccacgagaagtggaaattaaagaagttagagtgcaggtcctttttgcttgggcctctaacagtaaggtgattgctcttttaattggtgttgcataattaatgaagaggagcaacacattaa

SEQ ID NO: 162196 - DNA, 409 bp, Glycine max
  unsure (1)..(409): unsure at all n locations
gcttttctacccgggaagcttaacgtggttctagtagatgaagatcataatctgtggcaagcatgagggcatacatgttatatactattgtatatttgtgttggttgatagtgaatatggtgaaggatgaggttgagatgggattntgtttatgattagctgagggggatgaaatgagctagataaaacttggaaattgattctctgtgcttcaaattcaagttgagcacatttaatgtccaatttgccatgtgattcacattgagagcgtccttcgaaagatcaccatcatagttttaaaaggtgttcactatcatctgacagcatggtatccttcccatttttaaacgacatacttatataagaaaaccccaaatagaccctgtgcttgttcttacatagttacatg

SEQ ID NO: 162197 - DNA, 378 bp, Glycine max
cttctttgatacctgtcatgcttgttagcttattttatttgtgctgcttaatagacatgttcatatctttgaaatactgcatatctttgtgaaaggttgttggttgaagcattactaattctctctgttcatgtgattgaaacctttgaaacaaacacgattttggctaaccacttgtgattcctttcacttgaggacaagtaaactattaattctttgcttgaggacaagcaaaatttgaaatttgggggaagttggtagatgctattcataagttagtttggtattgaaaattttcaaggaaatagcactgtgctcccaatttatggttcttttgaggaattgacataatttccttattgtgtgatttattagagt

SEQ ID NO: 162198 - DNA, 375 bp, Glycine max
gagacaaaggagcagtctggtagggaaaaatagaagcaagagagtgaatgaatatacgtgcctgaaggtgcgagatgagttgatggtttgaaatggatagtaagtaactaataactaagtaatggaaagaggatgcgggatatgtgataatgtgaccatatccatatctctgctgtgtttggtggagcaaaggtaaccagaggaagacaagatgaccaaagctcgtgactcacacatggtgttcacgggtcagcctagccatacatgatgcacgtgcgtgttttatccaagggttaaaaaatcttcacctttaatgccgaggtacaccctattagtttctttaatacaacatgcataggtatttttacattaatc

SEQ ID NO: 162199 - DNA, 391 bp, Glycine max
caacaggcgcatgcacaacatttatactctgcatctacctacaaaagtaatttaattcccattattattattcatattcttaatttcttataatactttttaatatggcacggtgtgaaatgaaatattcatatgttgtttattacaacgagacagccaaggactataaatatatttcctatatttgattattgcgcgtgctacacgtccaccgtgttccctagccacgttgaattctaactccatgttcatcacatatgttaccaaaccataggagaaacaaaattacaaataatcgtcttaactcttgaaaactaatatatatgtagatacaatgttgttaggaacataccaactccattctgttttcgctgttgttgtgctgctagta

SEQ ID NO: 162200 - DNA, 484 bp, Glycine max
atctctaagtcacctgcggcatgcaagcttttcgtcttacagacagcaaaaagtttatactgataaccactcgggtaattccgcccgtcagcgtgactcaaaagtcactatgacagatcttgtgagcgcggaagatgacgtaaatctccgtgtgtcaacgggcttgtcggccccgattgacgaagggcgctgaagacgacgttagactctgcgtgctatcaggcttttcgtcttacagacagcaaaaagtttatacggataaccactcgggtatttccgcccgtcagcgtgactcaaaagtcagtatgacagatcttgtgagcgcggaagatgacgtaaatctccacgtgtcaacgggcttgtcggccgcgattgacgaagggcgcagaagacgacgttagtctctgcgtgctatcaggcttttcgtcttacagacaactaaaaagttatacggataaccactcgggtatttccgccgtcagcg

SEQ ID NO: 162201 - DNA, 469 bp, Glycine max
  unsure (1)..(469): unsure at all n locations
ggatagcacgcagagactaacgtcgtcttctgcgcccttcgtcaatctcggccgaaaggcccgttgacacgcggagaattacgtcatcttccgcgctcacaagatctgtcatactaacttttgagtcacgctgacaggcggaattacccgagcggttatccgtataaactttttgctgtctttaagacgaaaagcctgatagcacgcagagactaacgtcatcttctgcgcccttcgtcaatcgcggccgacaagcccgttgacacgcggagatttacgtcatcttccgcgctcacaagatctgtcatactgacttttgagtcacgctgacgggcggaaatacccgagtggttatccgtataaactctntgatgtctgtaagacgaacagcctgataacacgcagagactaacgttctcttttgcgaccttcgtcaatcgcggcctacaagcccgttgacacgatgaga

SEQ ID NO: 162202 - DNA, 455 bp, Glycine max
  unsure (1)..(455): unsure at all n locations
agcttgttagcatatatcgatttatggattaaatgtattttttctagtcctgaatctgtcatcaagtggtttgaacaaagggatcgagctgtggacagtagaggggttgcggaatatcttcgagctcttgtggtcactaatgctattagtgaatatcttcctgatgaggattctggaaaagcttctagccttcctaccctggtaatcattttgagcatcatgttctttatatcctgcttttcaatttttagcctgtgtaaccaaattcttactgctgcattttcattagtagaggtggaggggtttcctgtgcatcttgtttggcatctatttgttaataataatattggtctgttcaaaagtttattctgttttatttccatacgcatcatctaagatatttggatttgttntgtaatacgtaattcaatctgtgactggtttgatcaaagtgc

SEQ ID NO: 162203 - DNA, 475 bp, Glycine max
  unsure (1)..(475): unsure at all n locations
actaagcttagggtgctcattcactccagattgttgcaaagaaggacagagatctgtatggtgatctgcagaagaacatagatcacagaatcttgcaacaggtgtagatttctgattcatggcaagctgggttactaggttgacccaggcatcaagttttccttcaagctttttattttcagtagatgaagatgaatttatggccacctcatggactcctctaagaacaatagcatcatttcttgcactgaattgttgggagttagaagccatcttctcaatcaaattcctagcttcagcaggggtcatatcaccaagggctccaccactggctgcatcaatcaaacttctctccatgttgctaagtcccttatagaaatattgaagaaagagttgcttataaatcttgtggtgaggacagtttgcaaacaatntcttgaatctttntcagtactcatacaagttttcttcacta

SEQ ID NO: 162204 - DNA, 334 bp, Glycine max
ccttggattatagggttgaaccgagctcatgcttttacaaaaaggttcatcaagtcaagttgaaatacggaagtaaccgtcttgcaaaattggggcaaaagatgaatcgagtcacatcactgcttcgtctactgccaaacatatttaggattgttgatgtccttgttacttccagtttcaccttgacaaagatgtcatggatcatgttgaaaatctaaattgattcaaccccatattctgcgtaaaaattctcaatacttcaactgtacatcattcgcatacatccatgcttttcattggttgcattgctcattgcattctttccttgacaaat

SEQ ID NO: 162205 - DNA, 429 bp, Glycine max
  unsure (1)..(429): unsure at all n locations
gaaaacttgatgctnttgtctatctagtaactcagcttgccatgaattagaaatctgcacctgttgcaagagtctgtggtctatgttcttctgcagatcaccatacagatctttgtccttctttgcagcaatctggagtcaatgagcaacctgaagcttatgctgcaaacatttataatagacctcctcaacagcaaaaccaacaacaacagaataattatgacctttcaagcaataaatacaatccgggttggaggaatcatccaaatctaagatggacaagtcctccacaacaacaacagcctgttgatcgaggccatacccgaatcaaataaacattaaaaatgcagtatctaggaagtgatcctaggtcgtctcccaatgagcaatggtcaaccaaatgttcataacaaatagtaataaaatagt

SEQ ID NO: 162206 - DNA, 333 bp, Glycine max
  unsure (1)..(333): unsure at all n locations
ttgtaagagaggggatgaanaaagagggcgataagatattaagcggaaaaagagtttaagaaaacgacaagactggacctcgcgtgaagagtgttggaacggtttatgtaactcaattacaattaggatgaatgctgtcattttctactgtaacaatggatagcattttcaaaatgaaattccaaaattactcaatcaaccaaataacaatggattaagataaaataaaaatattaaaagcataccacgccgataaattagactatcaacgatagtcatagataaggatggtcacagtttccaatctcatctgtaatatctccacttggtagt

SEQ ID NO: 162207 - DNA, 451 bp, Glycine max
  unsure (1)..(451): unsure at all n locations
agcttatcctcttctcttacagcttgctactgaaaatacctttctatcttcgttaactagcccatcggatcttcttccttgaatattggcatttcaagagttctccaccgatttctgccttgggcaacgttccccttattccctcctatcgaattgtccacatgaacgttcgattcaggaggtttttttcatccatgccgctgctaatcattgtatcattccttctatcaaaatcaatcgcgcctccaccgcttcgcgattctcctctatcaccttctccatggcttccatgcgtgtctccattctcacgttcgcctacatcaccattaactgttcccatgctcctagataagagctctgatatcagttgataaaactaaacccgaaacagagaatgtgtgtattattattgtggtacctncaacacccgacgaaaaatacatgagtttcg

SEQ ID NO: 162208 - DNA, 474 bp, Glycine max
  unsure (1)..(474): unsure at all n locations
tgccactgcagcagttaagtgaacaaatgaagtgttattaactaataagatttcatgcatgttattaactaataagatttcgttactgctttcagccctttgatgatgattatcgtagccatcatgggtgccttcatcctttcagaaaaaatatatcttggagggtaagtactcaatactcatattcactcccaatgaacatatcttgttttaggcacaaagaaagaagcttaaacgttttaattgactcactcttgtatcataaactaaaagtttggtgtttcttacataaaagttgaaacatgacaatcttaaaaagctatagtcattagagctatagctttgaaacagtggatttatctgcagctgatttcaggggtcattagagctattctcatagtaatgggacttcactctntcaggttgaagctgtagtatgtgtcatatattgatccaaacattaactattacacc

SEQ ID NO: 162209 - DNA, 432 bp, Glycine max
agcttatagcaaattcgaacgacaataattattcactcggaagtccgattgagtcccgtaatacatcgacatgctcgaaatttaaaaccgaagctcctagcaaattcgaacgacaataacttttcactaagaagtccgattgagtcccgcaatatatcgagacgctcgaaatttaaaaccgaagcccgtcgaacgacaataacaattcactcggaagttcgatagagtcccggaatatatcgacatgctcgaagtttaaaactgaagctcctagcctattcgaacgacaatagcttttcactcggaagtccgattgagtcccgcaatatatcgagacgctcgaaatttaaaaccgaagcccgtcgaatattataagacaataactttggtctcggatgtccgagtgagtgacgtgacatattgagatgctcg

SEQ ID NO: 162210 - DNA, 453 bp, Glycine max
  unsure (1)..(453): unsure at all n locations
acactataaatctcagcttcgttntaaatttcgagcgtctcgatatattacgggtcttaatcggacttccgagtaaaatgttattgtcgttcgactttgctacgagcttcggttttaaaattcgagcgtcacgatatattacgggactcaatcagacttccgagtgaaatgttattgtcgttcgaatttgctacgagcttcggttttaaaattcgagcgtctcgatatattacgggactcaataggacttccgagtgaaatgttattgtcgttcgactttgctacgagcttcggttttaaaattcgagcgtcacgatatattacgggactcaatcagacttccgagtgaaatgttattgtcgctcgaatttgctacgagcttccgtttaaaattcgagcgtctcgatatatacgggactcaatcggactttcgagtgaaatgttattgccgtt

SEQ ID NO: 162211 - DNA, 452 bp, Glycine max
agctttgtaatcactctgtgaatgtttgtgtgggagaaagaccaacagtaactgttttattatttgaaggctcttccaacttactatcattctcctcaatcatcacattattggctgtattatgactcaaaccacttgggaatccatgcgtcttacaccatacatcaacagtgtgaccactcttatctcaataattgccattgttttccattaaaatggaacttcctttttccagtgaattttctgccatatgcaacattcaccataacttgtgaatcctcagtgggggcaagaccattttgcctttcatgttgtatcaccattgaaaagacatggtttaacagtggcaaaggatccatgagtaaagcttgcaatctcacaacactgaaattatcatttgacaagaatcattatctgtgagaaacctaataatgcaatcttctcgcttatat

SEQ ID NO: 162212 - DNA, 479 bp, Glycine max
tgtgctcaaccattttctacgcgtggggcgacatcaattagcgcaagaactcggaaatcaacacaggtataacaatggagtagcaagatataagtatcagagtattaaatccaatgagccggacttataatcaagaaaataatcaaaccagaattcaaataacataaaatgtcgacaaccacaaaatatccaagactgaaacacaagaaaaataagcagagtacttagcataataatgtaaattctaagaaactaaaagccaaaatacacggcttataaaagataaataagcagaatctaaaatctaagaagacggaggaggtggtggaagatcaaaactctgacgaatgtatccgacatcctcttcaagctgtgtaagacgaatgtccataccggcaaagcgtgaatctaacgagtcaaagcggtcaccaacatacgaacgaagaccctgttattctgagaggactgcattcatgagt

SEQ ID NO: 162213 - DNA, 461 bp, Glycine max
agcttatatattcagcatcttgtttattgtcatcttcaaaataatcaaataattttctcttgcactcttctccagtattcgcataatatagtattgtattcctgccgaagaaaattatctgaaactgttttgtcgataccttcagcaaattcttcacgctgtctacacaattcatgaagaacgtattgtgcattctgacttgaagccagctaacttcctccttgtcaaaggttccttaaaactgattgattttggaatagccaaagcattcatgagtgatacaacaaacatacaacgcgattcacaggtattgcatacttctatccttagttatcaatctcacgtaacatcgcgtagcatgaagcatgatggctgctcgtttaaatattagaaaaaaaacttcgcaccctattgcccggaggctcttcgctatgcgaaagtatgggggacggatattgcac

SEQ ID NO: 162214 - DNA, 407 bp, Glycine max
  unsure (1)..(407): unsure at all n locations
aagtatagaatgacatcgtaagtctccccactgcgataaggggtcaaatggctgattccagcagtagtgtattgatcaaaatcactcctccgggccactcgctctgctcttgcaggcatattggctcctagcctgattaatgatttcctgaaacaagaagaatcctacttaatacatgccataaaatttgcaaatatgcattcacataaaagccaacagccttgaatgggttagtaatgtgacgaaatagtaaaanaaaaaaaaacagcttgcaatcttcaaatcacacagtaactacaggctggaactgtgtttaattgcccgaataagctgaatgtgtaggaatagttcagaaaaatcatgaatccagagatagtatgaaacaatcatacttgactcgatgaatc

SEQ ID NO: 162215 - DNA, 381 bp, Glycine max
  unsure (1)..(381): unsure at all n locations
tgaaaaagaaatctgcgaacaggaatatagtttttatatagactgtgttgatataaatagagggtctttaatgccgtgtgtgtacaaaacagggttgtcctgtatagggatgtaagtgtacaaagaaaagcttttctcataaatagcgatgaatgtatagttcttgcaaacatagaagaatgaaacaataaagaaaagagaaagaaagacctcgatggtcggcatgttatggtcataggaagcctaaataattcgcagagagcaaacatatcttttggaaacaagggactgacgctaagagtttatnttccagaataactaacataagaatggatggattccttgaaccgatgaaaaacatacattgaaatattgggctac

SEQ ID NO: 162216 - DNA, 427 bp, Glycine max
  unsure (1)..(427): unsure at all n locations
ttctcggggccttttctgcgaaggcaacatttggaaagttagttttaccaagaaatgctactcttaaaacaaaaatggcatacaacctcctccaataaacacaaatatcaatgttaatttagagcaaactcatgcacatacttccttgcgaacattcactcgcacaagatattcttctaactaagaaaaatgcacccatgcacaatcaaggcaccttcgttacctagattatttatatgtacttccaaggtgtatttgctacctacatcacatgcacttccttggctaaatntacatacatccatactcaaagcatcttggctaccaaaaattgcacacgtgcacattctggtatttctaatacctatgcatatacaaactttgtgatgaatcttggctatctacacaataaggtgctacatttcat

SEQ ID NO: 162217 - DNA, 427 bp, Glycine max
  unsure (1)..(427): unsure at all n locations
atcgattaaaacaaagagtttttccttctgaagaaacttttgtaacttagaatttttttctccccacttactcatgatgatgcataatgcacaaaagatatgatatggactaagatacattcaatataacaaccaatacaaaagccactcaagggaattgggcatgtaaaagacaaaacatcttcatgattttctccaagctccaagctttagtcttcatgttgttcatgttgctccccctatctctaacacaaaggcatgacattntttcctcttagaagtcaaccaacaagagattcttctatacatcgtgttatatgtattggtcatgtgtatgaaaattattttggtcaggtaaaataatgatcatcccatttgaatgtgtatatgcctatngcacaggtatatgcccatttgaatgtatgac

SEQ ID NO: 162218 - DNA, 488 bp, Glycine max
  unsure (1)..(488): unsure at all n locations
tgtgaatatgggtntcgtgtgttcttgatcacctattgctatattatttatcagggtatcatacaggagagtatgttgaaacagctgttgatagatttttctcattgcattgggcgctgttgtggttctagggataaatgtttgcatatatccaatctaggttgctgaggatctacacaagcttggggcaaaaaatttcaggggcattgttgcatcattggaaggttgtctacaatattttctttatcctcacattntgtttgaaatcaactaattactaccatttagttactacttcataatcttattttctatgttgaataactttgttaagcttctttntcaggtgttgtaaataactatcttaattgtattgaatatgagacagtggcttcaaaaattctcacgtaccaagcttctaaagatgaagtttacaaaggctacagatcagttgttgaatctaccagcatagaagattcattggtata

SEQ ID NO: 162219 - DNA, 461 bp, Glycine max
  unsure (1)..(461): unsure at all n locations
gcttttcgattcattctatgtacccatggtggtccacaatgnggtttgggtatttctattctcggttcatttactttttataccccctcttgacgtgcttaagccattttacttaagtcatttctcgcttaacttaaaaataaaataaatttccaccgaacgtttgaattgtattatcccgtaacttcggttaaaatgaattccgaccgttcggtcgtgccgtaaccacgttggaaatcaaaaagagataaaataataatataataataaaaaatgttcattagtaaaataaagcggaaaatcaatcggacgttttctctttgggatntctcattcttaatggaattgactaataactaaggtgaaactaaggctaaaatcaactcgcctaatcaagctcgtccacaaaaataggttttngaagttngcatttcaatctctcactaagtaaaatggatcat

SEQ ID NO: 162220 - DNA, 430 bp, Glycine max
  unsure (1)..(430): unsure at all n locations
agtttccgacatgctctgtgtggtggtttcttctcaaaaagagagagcaagaattgtggtttgaaagaacaagggtgatgatgaatagaacgaaagaatcactctttccagcgagggcaacacacaaaggttgagaaagtcctttgatacagccaaggtgttcttgaatcactcaagaatctacgagaatcactctcactaagataaaagagataaactctaatnttctgaataaaactcaacttgtgtctattgataaaatggttcagcttatatagaaactttacagcatattttattaatgacccactaacctacaattaatataacttaatgccattaacctatggaattataaaaactaatggctgagttaactgaaattgagcaaccaaaagtacccccaacagccacaagtatgccccatttg

SEQ ID NO: 162221 - DNA, 311 bp, Glycine max
cttactttatagacctctcatgtccggccaagaagaccattcacaagaagtataacttttacaaaaacttaaaacccatctgataaagccaaaccctttttgaagagacacacctcttgatctactcagaccatagcactggtacatcaacacacaaagctctagagtgaaaggatgtgactctacacattaagatttgaattccaactgacaaggacactggcaatcgactaccagaacactcgaatcgactacaacctttcgaaaatactcggaacgaggaaatccagcttgaaaccttccaacccatt

SEQ ID NO: 162222 - DNA, 475 bp, Glycine max
  unsure (1)..(475): unsure at all n locations
aaaactaagctntaaagagaataatctggcactgttattaagaaaagaatttttatgttcggaggtgcgaatcaattggatagtgaagaagaaaaattaaacccgcctcccaaacgacgattttgccctccgtaacttgtcaactcatccacgctagtgaaagggtgattctgcctttgtccagagtgaattttgcatctctagatataattaaatgtaaaatcaataagaaaaaaaaacataataatagtaataattagcttttcttttatagaattcttgaaagggaatggaatggcctcaaccgcatccttttgtaacaacttgtggaaatgccatgtgacacgctcaccacataatattctccatctttttcataagatttaccttcagttgtatcgtactgtttaaagatataacaatctctctataccaaacacaatattactattactacaacaataacaatctcttc

SEQ ID NO: 162223 - DNA, 392 bp, Glycine max
agattataaacaacttcaatggaaacatgaagaaaagatagataattcttcaaaaatatcttctcaatcatgtgatgactttgaaagcttaaagttaaagacaataaagcttcaccttgagaatgaggaaatttgcaaagaaagatctagtctattacaagaccttcagaagttgaaaaatcaactagaaggcttacaaaatgagtatatcacactcaacaaacttcatgattacctaaatgaagaaatgtgtaatctattgaaggaatgttcacaagtccataagaattatgaaaacttggaggcaagtaaacataacttatgggttgaatgtgaaggatataagaacagcctaaaattctcaaatgataaacttgaatagtatgaggctc

SEQ ID NO: 162224 - DNA, 422 bp, Glycine max
  unsure (1)..(422): unsure at all n locations
ggatccttaatcacctgcngcatgcaagcttgctctaaatttacattgatgtttgtatttatgggaggaggttgcatgtcatttttgttttaagagtagtgtcccactggtaaaactaactttccaaatgtttgccttcacgggaaatggccccgaggaagcttgcctcanagaggtccaggaaggacaaggcagccgaatgaactagttccgctccggagtatgatactcaccgctttaggagtgctgtacaccagcagcgcttcgaggccatcaagggatggtcgtttctccgggagtgacgcgtccagctcanggacgacgagtatactaatttccaggaggaaatagggcgccggcggngggcatcactggttactcccatggccaagtttgatccacaaatagtccttgagttttat

SEQ ID NO: 162225 - DNA, 469 bp, Glycine max
  unsure (1)..(469): unsure at all n locations
tgcccaacatgactattangganattaaaacaccatttttgctatgagctcttataaggctcctggccatgatgggtttcatcctttcacacctcctttttgagtgctgctaggtgcacctagtgtagacaaaggatcaagctgaatgttttgatgatgccaaaggattacatgaattatatgcttctcaaagatttactcaagacaaagtaattagagatattcaagatggatgatcaagacagtctatagagtcttagaaaggatattaaataggaagggaattccaattgaaattgcaaaaggtttggccaagaattataagttaaaaaagtctttttcaacaaatttactctctggtaatcgattaccagaggatgtaatcgattatcagtggccaaaactgatntacaacagctattaaaaattgaattcaaaatttgcactgtgtaatcgattacacatatat

SEQ ID NO: 162226 - DNA, 462 bp, Glycine max
  unsure (1)..(462): unsure at all n locations
tcacacctgacatggaaatagtctgtgaattccttgatctctatgtcaactatgctctgattngaccatatttataaatttactgtnatattgaaataccattcgtaaattcttgtaaattacacactgatttgcttcttaactttttgcgacaaactatgtctttaacaatatgcctttggtatttctggttcttgggatataatacctatttttattttgtatcatcatcagatttcatttgcacatatcgatgatccacttttttttttatcttatattactttttacctcattcactcgcttttaaatttaagaaattacaatatattataactatataatttacacctatattgtcaattggtattttcagtttacccgttagttattgataacataattcttatgtaacttatagtaggataatttgagcctttctcanatttataattaaatcat

SEQ ID NO: 162227 - DNA, 453 bp, Glycine max
  unsure (1)..(453): unsure at all n locations
gcttattacatctttgggttgttccattcatgagaaggggacaggaaaaaggggaaaatactatgcgtttctttggtctttctatttgatctttntaaggtaaatgtttatgacccgttatgctagatgagtatgttataacactgattagtcatgggctctgagaaaaagagttaaaaactaagtattagagattattgtgattttctcaaagccctaggtttgctaaaattggagattttgtctaatcccttgttctattatttaaatgcttaggttctatggaaaatactgtggttgaccttcctaacagcggtagaagtcagtgattgcgttatttagatgagtagctaatatacttagcgattttcttaaagttcattatggagaaacaagtacactttcanaaatatatgtttatggtgagctttgaatctattttgagatcttgat

SEQ ID NO: 162228 - DNA, 425 bp, Glycine max
gcttctaaggaggttagcttagctattagaggggtgtgtgtatcttatctctagcttctcaaggaagttttctcaaagaagcttctcaaggaagttttctcaaagaaaacttctcaaggaagctacctagtctataaatagaagcatgtgtaacgcttgttgttactttgatgaatgagagtcttgtgagacacaactcaaagttcaacttctctccctttttcttctttcaatttcgtgctcccccctctctctttctctccctctttcttttcctccattgaagcatcctctccaagcttcttatccaaggctcatcttggtggtgaaactccttcttccatggcttattccctagtggatggcgcctcctctcaccacttatcctttgtcttccactgcatcttcatggtggaaaatcacca

SEQ ID NO: 162229 - DNA, 459 bp, Glycine max
ctgcaagcttgattccttagaagatgagatgttcatgatttctcttctttcgactctcctttctattctttctatctttttttatggctaggattaagagaatattctattgtcaagaagggatcctgtttcacgttagtgggtattactccctttaaaccactactcctatcaaataataattatctctagaaactgttccacttaagcccaagacccatttacaatttagtccataattattatttatttatttatcagcccttgctaagtcacaagcctttcacatgagacattaaatcttatcttgccacttgactcatgtgacattacctaacatcatggacgaataaataaattaattaaacttacataatgcacattgaaatgactaaatcgttccatacagtagccacatcataatttcataattaagaatagggtctaatttgagtcatg

SEQ ID NO: 162230 - DNA, 483 bp, Glycine max
  unsure (1)..(483): unsure at all n locations
ctggtctctnntatttaattttatttgctccgtgccatcaccaagttaatgaataactgcgatcgagtaggaaaatgtttttttttttccttttccttttccttttcaaaagacgtttgttgatacaaaataaataaaaaaatgggagtcgcaaggctaatgattactattctccttatttatccattccaatggggtcaccacatattgccacccatgcatgcatgaggaaacataattatatacacacccaccttatatagcactgtgttatctcatctcatcctcggcattaaatagctcgcaccgacgttcaaggaaaaaggaaacatcccatctacaattgtatccatcttgttgtngcatttgtagctttgtacagtgggaattcaaaaaacattgcagagagacaaactacgatgtctcgcgcctagctgctccttatacttntatatatcttcgatagccttttcanaatataat

SEQ ID NO: 162231 - DNA, 433 bp, Glycine max
  unsure (1)..(433): unsure at all n locations
agcttgtcgaacctggattatattgatgatgaaagcttanggaaagcgtcctcccatcggtcagtacttgttttcgaacgagtgccgtcagccatggcaacgatgatgaaagcaccaatgttagcagctggtcttcgaggcccaacaacctcctcaaagggaaagagagataagagagagagatagaggaaaagagtattatttattcttatttttgcaaagcgctttcaaacatttatcgtttattacaaaaggaaccaagctcaacgcctataacagaaagcctaactgccagttagttattctaacagaaagcttctaatggttgtattcttctcgaagctgcttgcctatttcgtgtacatgcatggcttaactatcaagtatgtagtcctttacgcgcaggggagtattactttgccttttgagcttt

SEQ ID NO: 162232 - DNA, 177 bp, Glycine max
ttgtcacaaaggacgaaagcctttaatcgagtgtgcgaaaacgtgagttcaatcttatttattttcactttatatattttttattttcttggggtcgacaacgctgttgctcttgctcctacgtattctcaggtgcgatgaagaattcaaacctatgtagttctttaagtctgaaat

SEQ ID NO: 162233 - DNA, 450 bp, Glycine max
  unsure (1)..(450): unsure at all n locations
agcttcnggcttttcaattgcttcttttgtttctcacaaaggcacaagtatgtgtggtggtcgatagaggagcataaaccacacagtctggcgacaggtgcaaattttttattcatggccagttgggttaccnnnntaaccaaggcatctantttaccttcaagcttcttagtctcacctgatgaattcatggctacttcatgcactcctctattgacaatagcatcacttttggcactaaattgctgggagttggaagccatcttctcaattaaatttctggcttcagcaggggtcatgtctccaagggctccaccactggcagcatctatcatacttctttccatgttgttgagtccttcataaaaatattggaggagaagctgctctgaaatgtgggggtgagggcaactagcacatgattttttaaatctctcccagtattcatat

SEQ ID NO: 162234 - DNA, 478 bp, Glycine max
  unsure (1)..(478): unsure at all n locations
tctactaagttatgatgtttggattgatatactttgtttattctttccattgcttatattgcttctcttaatagtgatgtttatttggctgaaatagataaatgttaaaataataatggagcaggctgtaaaggtgcaagaatagtctttttgtgtatctagtggactagtggttaatctgtttgagtttaatttgtaataaccctaaacatgacaacacccaagtccatcatagaaatcatcagaaccattccctacagcaacaacaacttcttgttttttgttgtccagtccatgatcccttgcacttgtcaaatcactaggcatgttggtggagttgtggttcttagcattagatttatggttattagaatgtncatctgatttagcaaacaccatgtcacctttcatagagtttgaacaaagaacccccatatgacanactcaatctttgtacagaananacaaacaaaacttc

SEQ ID NO: 162235 - DNA, 447 bp, Glycine max
  unsure (1)..(447): unsure at all n locations
agctngaaaacgacctanagcacaatcttctaccacaacaaaatgaaaccccacattacaattcttattgatacttttatatggttagccaagtggacaaaatgacccaataatttgataagaaccttccaacaatcccactgcactgattaagaacttactaagaagagcaacaaactaaggtagagctcataccttgttaactggcagcgtagaaagctttgacctttgagcacccacgactgttccaagagcagtgtagggttttcttcgacccacagttccaatagcagtctaggcttttctttgacttttcttcaatagggggttctgtgggttccagcgagcggtttccgacagtattgaaatcaatgtggggcaatgtgggtgtcgaccgggcggtttccgacagatttcaggtgggaggagaaagagaagagagagtgc

SEQ ID NO: 162236 - DNA, 418 bp, Glycine max
  unsure (1)..(418): unsure at all n locations
ccgctcccgagtatgacagtcaccgctttaggagcgctgtacatcagcagcgcttcgaagccatcaagggatggtcatttctctgggagcgacgcgtccagctcagggacgacgagtatactgatttccaggaggagataggtcgccggcggtgggcatcactagttacccccatggccaaatttgatccagacatagtcctcgaattttatgccaatgcttggccaacagaggagggcgtgcgtgacatgaggtcctgngtgaggggtcagtggatcccgtttgatgcagatgctatcggctagctcctgggatatccgttggtgctggaagagggccaagagtgcgagtatggccagaggaggaaccagtctgatgggttcgatgaagaggccatcgccccagtgctatgtatact

SEQ ID NO: 162237 - DNA, 458 bp, Glycine max
agcttgtgaatgttctacaagccactgattattgagatctttgagaatggaagaaagcatggaaagtgctcttgtggcatacaccaaaggcaaagcccaaggccggagcagtcctagtaaaaagtcatatggtggaaaagaaaaggaagaagaagcaacaagaaaggaggaggttggtaaaagtctccaccttgttcttattacaagaagaacaatcataatgaaaacttttgttggttcaggcctaaagttaaacgtaaggcctgtaatcagcttggccatgtggagaaggcatgcaaaaataaggcaaaccagaaagcgtagtcaactcaagctggtgagaatcaccaacatattgaggagcagttgttagtggttgcacaaattatatgacccacaatgcattcttaagtaactagatcaaacttacttctccaaagacaccatatgcaatggag

SEQ ID NO: 162238 - DNA, 353 bp, Glycine max
  unsure (1)..(353): unsure at all n locations
cgcttgtggagcttctatgaaggctggatctttgttcttttatgangtccttcaatggtgattttccaccatggagatgcagcggaagacaaaggagaagaggtgagaggaggcgccatctactanggaataagcaatggaagaaggagtttcgccaccaagaatgtgccttggataagaagcttggaaaggatgcttcaatggagaaaaagaaagagagagagaaagagagagggggagcatgaaattgaaggaggaaaagcgggagagaagttgaactttgagttgtgtctcacaagactctcattcatcaaagttacaacaagtgttacacatgcttctatttatagact

SEQ ID NO: 162239 - DNA, 461 bp, Glycine max
  unsure (1)..(461): unsure at all n locations
agctngagacatcaagatctgagttccttgtttcttttatcanttttatgcaaactttatcaaggtaaggggggtctttccacttctttaaccttgatcttgttatctttggaaggtagacttcattgtatgtggtattgatgttcaaaattttgtagctactgccttgtatggaactatgtggaaggtttttttcttgatattgtaaggttaaaattgaattatttcagtgtcaaaacatttgtttagccttaaatttcactcaaatgggagttttctagcaaaagttatgaataaaacaagtttaaggacatttttgttgaattaaatttgtcacagaattgaactgactattatggttgtatggactatatttaagatttgacttcataaatagtttgtttggtttgaacatatacggcagcatataagattcatgataaactaactcgcagaacagc

SEQ ID NO: 162240 - DNA, 319 bp, Glycine max
cccacaaactaaccctcgactgcttccattacacatcaagtgagtaatttcgttatttttacgatttacattgtacttcgtcatattaaacgcacgcccatgcattatagtgcatctaggagaggctctgctacttgctccatataggccagcctcttgactatcactatgacactaattggttcacattgacactaccaacttgctgattactcattcctggacgtgtcacatgtccccaatacatcatcatgcatattacatcactggacactataatcacactagagctaccaagtcttggtacaagacaaaacta

SEQ ID NO: 162241 - DNA, 455 bp, Glycine max
  unsure (1)..(455): unsure at all n locations
tagatctagaatctagacttctcttcctgatggctccacaaggcagaatctacccactacatggaatcccaaagttctattactgtagctttctttttnttttttccctcattgctctacttcacaaatcaagtaaaaaagtgcccccttaacctattaagtcgtgtgttagttgatcatatgtttctatattgaggaatattactattgaagttagaaattcataagcagctagcccttgatgattcggatgtctgtgtgtgttgagcatgaagatgcaagtgtggggaataagtttttcataagtgcatgaactgcaggccttgcattgctactgtggtcgttcctaatcacaaaaggaagtgtttcaacttcaatggagacgatgatagctattacctcctctcatggaaatgcangagtggggataagttgttccaaccataactacgtac

SEQ ID NO: 162242 - DNA, 465 bp, Glycine max
  unsure (1)..(465): unsure at all n locations
accaaaatctaagcttcaagtgatttattttatttattttaagaatgttgtgtttaccaattttacggcatgtatattgttaacaggagtccgataaattcttggacgatgataggagtgattggcaatatccattctgtgttccttgatgcaatctcatcacaccttaaaacacgctntaatgattatggtggctataaaacagacgttgaatntgcaagatatatcatgctgaatgaaatagtattacatgacatgacaaataaacggccaaggcttaaaatgatgaaaaaattatccttgtgcacaatgatctcttaacttgtgcacaatgaaaaaattatgtngacgttatgattgtagtcaaattgacttcttaaattatatttttttcttttcaatattaagtttgcattatatattgatatctgtaatatgcaattagcatgagtattttctctcaat

SEQ ID NO: 162243 - DNA, 237 bp, Glycine max
gccaacggagaccctaaaagggcccatttcttcacataacagaaaacgaaggtggcatcttacaaatctgccgctataacccccaccataaccaaaccaaatcaccagaaatcatatcgccaacgcatgtgccggctccagagacaaccgtcaagcgcaactccaactccacatatcaaaaacacaccaaactaaaccgccatcctgcataaagggcaaatgtgtcacacgcaaaca

SEQ ID NO: 162244 - DNA, 353 bp, Glycine max
  unsure (1)..(353): unsure at all n locations
ccaagtttgggctttaagtgctcaacttggctagactcatttacaccgctacttaaaagtatgctatcgccaaaaagcaaatcatctacaataaacaagttatacgctttcctagttttcaaatttcttgacggaagatatcataatcaggggttgtgtgttgatttcaatacaaaaccaaccagttcacagtatgaagactgaaagtatagtctgatgagtcaagattttatgcttggacggctgatgtatccctatagaagaaaactcgctggccttccaaaggatgactttcctcatataaagatgattnggcatttacaagattgtcactcgtcatgatacttctgata

SEQ ID NO: 162245 - DNA, 380 bp, Glycine max
atcacttttcactcggaagtccgattcacgcgcatcacatatagagacgctcgaaattgaacaacggaagctctcgaaaaattcaaatggtcataacttgtcactcggaggtccgattcaggtgcataatatatcgagacgcttgtaattgaacaacagaagctctcgagaaattcaaatggacatcgcttttcactcggaagtccgattcacgcgccatacatatagagacactcgaaattgaacagtggaagctcttgagatattcaaatggtcattacttttaactcggaggtccgattcaagcacacaatatatcgagacgcctcgaattgaacaactgaagctcttgagaaattcaatggtcattactttcactc

SEQ ID NO: 162246 - DNA, 456 bp, Glycine max
atgtgtggagcttcaatggagaatgatggagaagaaaggctttgtgagggagaaggagagagaacgcttctgcaatgttttctgctgagtgaagagagagagagttgctttttggtttttaaaaggctttttcctcttttcttattattttattcaagctctgccacatgttcctaattgattggagcaaaaagggcccactttctctttttgactgtgacccatactcagtcacaaaagtgagaaaaatctgacctttgaaacgctaaaatcctgcctcggtttgcgtgccgtttctctgattccagtttctcgcgtttctctgcgtccgccggggccagcttttgaaagtactcaatatatatatcataacgctcagaatgaaaccccgagcgtggttcagaggttgtgtttcgtaaattctaagtcgcatgcaaaacgatgattttaactaat

SEQ ID NO: 162247 - DNA, 466 bp, Glycine max
  unsure (1)..(466): unsure at all n locations
agctntaaagcacagcaacacagaatctatgtgtccaacacccctccattcaatgggttttctaggtttgaaaagtgaaatttagaatgaggtaaatntgaagcaaactctcacctcacaccagtccatgacatccatttagacttgttcaaactggatttacacctaaaatctcaccgaatcaaaatttgactcttcaacacccaaatttgccctagaaatggctctttgttcactttggtcatttattttattctctctagcacagtccaagctttctcataagtcctaaatgacatttcaagctagtattaactcactttaacctccatttaccacagaattcagacttagccttccaaccctcaaagtctcactctttttccactcataacatcacattctcactntctaatccctaggttagttctacccttcgtctctaacagaatttcatcagcaattt

SEQ ID NO: 162248 - DNA, 478 bp, Glycine max
  unsure (1)..(478): unsure at all n locations
gggagaggatgcttaatggagaaaagaagaggttattagagagaggggggagcacgaaattgaaggaagaaaaagggagagaagttgaactttgagttgtgtctcacaagactctcattcatcaaagttacaacaagtgttacacatgcttctatttatagactaggtagcttccttgagaagctttcttgagaaaacttccttgagaagcttctttgagaaaacttccttgagaagctagagcttagctacacacacccctctcataactaagctcacctccttgagaaacttccttaagaagattcctaaagaagctagagctttgctacacatacctctctaatagctaagctcacctccttgagatgagaagctagaacttagctacacaccccctataatagctaagctcacccncatgacananaacatganaatacaaanaaaaaaaattcctactacagagacactcaaa

SEQ ID NO: 162249 - DNA, 418 bp, Glycine max
  unsure (1)..(418): unsure at all n locations
agctntgacttcagtcagtanaagattatttatatgtgaccatggcatgaatttgaacaatcaagaaatctatctttcaatcttctctctcaacatcattcaatatctttcaactctttctacagaattttttgattcatttctctttatctttctaaaagttttttttcaaatactttctcttccaagaaaagttctttgttcaaaaacttgtgttattcatctttttcattctcttctccctttgccaaaagaacgaaggactaaccgcctgaattcttttgtgtctctcttctcccttacaaaagattcaaaggactaaccgcctgagaattcttttgattcttcccttccccttaagcaaaagatntcaaaggactaaccacctaagatatattntggttccccttacaaagat

SEQ ID NO: 162250 - DNA, 478 bp, Glycine max
  unsure (1)..(478): unsure at all n locations
tgctcctattgcatacttcagtatgtatcgcggatcaatatcttatttaccgagtagctacatgtggagtcctcatgttgttccaaaaccaagtggtatggacaaggattaaattattagttacattatctgatgtccttgtgatagtttttttaaatgagtaatcattgtaagtcattgaagtaatacataagttcaaagatgttattgtgtataactgaatgcacaaaataaccgttgacttggattgtgaatgtatattataaagttatctgttgaaattaaatntaataattgaatgggatttattatattatatatgaatgtataaagcaagactttngtagctgctttggttcgaatcagattccaataaaatgttatctaagttatctaagctctgaagagatntcacagttcacatgcataatgcataaaatataaagtacagttaacttttctgtgtcgatatattata

SEQ ID NO: 162251 - DNA, 428 bp, Glycine max
agcttagcgtgtggtgtcttttgaattatattatgatagcggactgtttttgaggagtttagaagggcaccgttcaattgaacaagaggagattgcctagggcatttttctagagtctaaaaccactttgggagctcttcttttttcatgttctccattttctttgattcttctggtttttggtctctcattaccatgagaggctaacttacctattgttgggggcttggataccaaacactgatgtaatgatctctactattcatttaatgctatcttagtgttattgcttcctttctatgtttattgatttgtttatggtttgatcacttatatacatatgtgtcatagtgttttaatcattgaaaaatgtttttacactaagaacttgaaggaacttctaagtaacccatatctagggatggaat

SEQ ID NO: 162252 - DNA, 372 bp, Glycine max
tgactgaacttcctatgatttcacttagtgagagtgatctgacttacccattgtgaggcatgtcccattatgtactcctaagtgcccgacgaaatttttcactgaaaaatggtaccatattgcatgtaagcttgagtctaaccgtatttgttgcataacgccttgtgttgactttcattgaattaaccattgccggttgatgttatttttccgagtgtgtgaacttgaatgagtttgaataatgtgtgtgatttctgaagcgatgtatttatataaatcagcttaagtatatatgttcacatgtctaatgtttatatatacaatggattactactccggaggtgttgtgttgactgatatatttgttcagga

SEQ ID NO: 162253 - DNA, 471 bp, Glycine max
  unsure (1)..(471): unsure at all n locations
tgaaccgaagattaatctcatagtcaatccaaatgatctttacttgtaggaataccttaagatctcattgaagggccaaaagccctaattatgatgatttaaccagaaaaaactaatttgtttactttagaaaggtaatttatatttataattaattatatttttttcataaaataacacaatgtaaactcattttcatagagcaaaatacacaaaaaaaaattgtgttttcattttgtaattgtttaacccataggattgacatagtggtgtaaggttccgttacattcacaacatatggggagtgattnttttagaagaaaaatntgtgttcaattttctctgtatgtgaaatttttagtctctgacccagtggaaaataaatgaaaatatgtttccattgtataatgagtngaaaaaaaataataacaaannacacgttatgttgacaaaatgcattatgaaattatg

SEQ ID NO: 162254 - DNA, 442 bp, Glycine max
  unsure (1)..(442): unsure at all n locations
agcttagcgagatagcactntttgaaccttcataattttctcctttntacctgaaattcaagtgaaatttacattaaattcaataggaaggattctagtgagcataaatgaaaagtaaactagaaatatttacaatcctaccaaaaattaaccataaattgggagatttatttacattttggaaacttttcaataccaaaaattagtcgtaaaagaagactaacaaactcccccaaatttatagttttgcttgtcctcaagcaaagaaagaacagatcacttgtgctaaagtgacaagttcacaatggttattcaaaaacaatgtttgttccaaagaattcaatcgcatgacatgaatagcatacaatgcttcaatcaatagcttctcacaagacatacaactttntaaagatatgaacatgattattaagaagcacaactg

SEQ ID NO: 162255 - DNA, 456 bp, Glycine max
  unsure (1)..(456): unsure at all n locations
taagaaggtacacaagatgatacaaatagcaagacttgtgtgcatccaacgagaagtaacacaagtactacaacaagaatggtttggcatagtcttcattatgataatgatttatatgcagcggatagaaagaaaaacaaaatgcaaaaaaaataaaataataaggaggtggaaagagagagaaagaggtggtagaaatagaaagagagagattgggacttggttgggagaatgttctntatcagaatcatcaaataacctaggcttcaataataatagtagacaaaagttagattaataatggaatgtgtttttgtctctagctcttgtgtccactcctcgatatatatgtaagttaaggaatggtatcttatatgaaaataaaattctataacctattttatattggactntttttaaccttcttcatatattatattattacacccctaaatg

SEQ ID NO: 162256 - DNA, 450 bp, Glycine max
  unsure (1)..(450): unsure at all n locations
agcttgacggcagatctaacaatttctattatataatntatcaccaataactggtcattagattggaattcttacaataagattaatgttttgaggaattattttatatttcatagctaaaacatgacagcatttaaacaacaacaacaacgacaacaacaacaacaaagccttatcccaaaattaaaccctacagaggaatgaacaaaacttgttaaaataacaaacaaaattctgtcggtaatatgaaagctcatgtagactagcactactaatagttagtgttccctaaagacacataagatggcacatgacatggagaacattgtaccataccaactaagatcagtgtagaacaagcatggctagtctaacagcatcaaataatatacacagaattcaatcctcaccaatatttatgaacatcactttctctatcgaactaacata

SEQ ID NO: 162257 - DNA, 270 bp, Glycine max
  unsure (1)..(270): unsure at all n locations
tatattcgaaatttcccttgaatatttgtcttcttcgtaattaatacactactaatgggtttattggccacaaatagtcatggtatggacatggggtgaatctatctagcaaccaaatgacaacactgcagtaacagttgatgttaatccattgtgttggaattggtggagtaaaagtaggataagttatcanaaaggcatgcattangcagtggaactaaaaattccaatgctttcagtttggcatttgtacatgcatagtagtataat

SEQ ID NO: 162258 - DNA, 226 bp, Glycine max
  unsure (1)..(226): unsure at all n locations
actttgtgctcatttccaattttcacataaccagggggttgatcaataaatacctattcctccaaataaccatgtaagaatgctgactttacatctaattgaaatatangccatgccttttgtgttgctagtgcaactactaacctgattgtatcatgtcttgcaactggtgaaaacacttctgtgtaatcaaccccatactggtgctttgaaccctttggcacca

SEQ ID NO: 162259 - DNA, 443 bp, Glycine max
  unsure (1)..(443): unsure at all n locations
aagctattgaggtgaagataaccagatcttgggacccctattattatgtgttatccaantaactgatcttcactcttgaaaagggcattccacaaccccctaaaggaagagagagaaactcacatggggtagcacccgaactaactgcagatgacacaattcctaggcttgtaattgactcaattaaaccaccatagacaatgcttttaagtatttcccatccttggggttcaccaacttcatctcttggttgttcaccattttgtactacagttcgtggctctgttataatagcatcttcagccggaacatcaagtatcacatcaccacctgcaccatagtaaaaactctgattagtattacacaagataacctgcaagacttattttcagagttaaagaaaacagtgatggtagtgtaaacaagtacaaagctagactggt

SEQ ID NO: 162260 - DNA, 435 bp, Glycine max
  unsure (1)..(435): unsure at all n locations
atttaaaaattgaatcatgcttttttttaaaactcttccaaacatgccgggaagagtagataagaagtngattataagttaaccggtgaaaacatccaaaaaagttacaaatttaaatatgatgatgaaaaaatcttacaatttactgtgactaattgtcttttaaatttgtattaaggggtgtcaatgagatttaaaattaagaattaagataattgattaaacacatgaacatgaatgaatatatatattgtacatgtatataaacctagaaatgtgttacattagagaaaatacaagactaatggagaaaagagatgaccatgatgggcatagatgtaagcttgcctcaaggagtaaatgtgatcgccaggtttcagttggttccgatcaatcttactagaaaacagtcccatttccctctgattatcaaat

SEQ ID NO: 162261 - DNA, 480 bp, Glycine max
  unsure (1)..(480): unsure at all n locations
tagaacaataaacttggccttctcttaattgtctntgtgcttggcgaccacgatcaacaaagtacttttggcacctactatatgttgacttgaccaacgttgttattggaatgttgcaacaatctttcaacaccttattcacaaattctgataggttggttgtcatgtgaccatatcttcgtccagatgtatcgtaagccatgctccatttttcctttgaaatgcgatcaatccatcttcctatggctggactcaattgacgaaatttttctaagttttgatcaaacacatgcttgcaaggagtgtacgctgcatcaaatttgttatcatcaaaagttgtacatagatatgaaactcaaattaaattaatgtataaaataaaccttacccaatttcttgaacatctctttntgtttcgcgttgttgaatntgctatttgaaatgctggctatgtgtcngacgcagtacacatgaataacc

SEQ ID NO: 162262 - DNA, 481 bp, Glycine max
  unsure (1)..(481): unsure at all n locations
ggatcttaagcacctgggctgcagcttataaatatttgttgaaataagctttttcccattctggtgtacattaaatgcatcagatatcaaaccacaaaaagttgaaaagagccatagtttgacgatgccaaaaataatgatagtttataccaaaaagtttttctctttcctgacatgtgtaagacacattctatctttttccttttggttagctacttcggtagcttgtatctggatctgaactaatattagaactactcatgtttcatagtaaaagcaacacaacatttgaaaagacaagacaaaatatgattgttttagtacttagtcatttttcaaaaaaccgtgttaaagttttaggtcataagaaacatttcgtccaaaaatataagagaaataatatatacaactttntttataaaagcatttatgataataaaaaaagaaagtgaacacactcaatcacaatccaactatcaag

SEQ ID NO: 162263 - DNA, 468 bp, Glycine max
  unsure (1)..(468): unsure at all n locations
taactgatacagagaacaacactnttcttcaaggcaatgcatgctactattcatatttctaatgaacatatcagtgaaacataaataacaacaatgaaaggctccaaatgataaaagccccaaattttccctaatttgtaaccctaaaaacctatctgaaacataaatagaatcaaaccaactaataaagttccaatatcaatgcaatacgaaacttacaacaatgaagtgctaaaagattaacttgcatctatatttgaaatgggtatttctgtaaaccctagaactatgaaactgtagaagaaaaatcagaatggaagaaaaaacaatcaacaatgaagctcaacgatgaanatggagaagaanaaacgatgaagattatggaaattttcagaaacagagaaggcgcaacataccttaaacctcgttttcgaacgatcaacgatggaagccgaggacgaacgatga

SEQ ID NO: 162264 - DNA, 483 bp, Glycine max
  unsure (1)..(483): unsure at all n locations
atctctaagtcacctgcggcatgcaagcttaggctcttgggttgtgaaggcctcaccccctcccgaaggagaaggctggactcctagccaagccacctggctaaggaactcctccatgctcatcataggctgcagacctgagctctgtaagctctgcatgatgatcacttgtcctctgtgcagactctgcaagatagcatataatgtctttgaagtaaaggaagatggtcctgtaaaaagagctgtaataagagctggtaagggtgcagatgcagatgcggtagaagaagttagaactgtagtggaaggagctgctgatggggtaatgtcagaagatgggagagtctctgacctcttccccttggccttgcgaggccctctaaaagtgatngaggggtcatcgagggtccggtnagttttcttcatgtaagccaaaataatgggtggactgagactctcaaaagataatgaatcagaagtgac

SEQ ID NO: 162265 - DNA, 465 bp, Glycine max
  unsure (1)..(465): unsure at all n locations
taagctccttcaactgcacaaggctcttaatatttgaagagtatccttgtgtaaccttcacccgacgaagacactgacaaaaacttatcttctccttcttggacaaagtatggcaggctgggggcaagtaaattttcttcccatcagacgttggatgcaactgtgatcgtatacccatatcagttagatcttgacgggtattcaagccatccttcgtcttgccttgaatgttaaggagcgtcccaatcacactatcacaaacattnttctccacatgaataacatcaatacaatgtctaacgtcaagatcacaccagtacggaagatcaaagaaaatggacctcttcttccatatgcaactctgacttttattcttctttntggtcttcccaaatacagtattcaggtgttgaacccgctgatatacctgctcaccagtcaacaatantcgtgcaatatcatgct

SEQ ID NO: 162266 - DNA, 463 bp, Glycine max
  unsure (1)..(463): unsure at all n locations
caagcttgcttccacattaacatatatctttatgcctccaatgacaatgctatctagctgccttgccaactgttggatgtctcgtacccctttaaatctaacaaagccatacttcttccattgtaatttctttgattggctatgaagatttctcttacatcaccccatcatctgaattgttgccatagttccttctccatgatgtcatccgcaaaccttgtaaagtaaaatgacgagatgtctttatgatctctccagtttacgacatcaacattttgctgtactcttcctatgttcttggcatgatcccatcggggttcctttccgaagcttgctctatntctcacctctctctcgcctctactcgtggctcttacccacctagtgtctctctcctctctcctctctcctctagctctagtacaaaactacatagtctaattgtagggataataatcgagct

SEQ ID NO: 162267 - DNA, 480 bp, Glycine max
  unsure (1)..(480): unsure at all n locations
taactgtatacaaattcacatcccaagaaaaaacagtatctataatagtagagaaaatgaactgtgagattatcattaagagaaacagtacagagggtgaaactttatatagctaagctatatgcctcattgccgagtcagcaactaagaaactaataggaaattacagtgaaattacaaacataaaatggacacaatcttatctctaataggtaatgtaagggattgaaatgtgctacataggtttaattgcaaataatcgatgggatcagaaagtgccattttaaaatgtgaagggtcaacaattagaacgctgtgttttggacaaaagtggtatggatgctcactatcccccgctagtcactctntgagagggtttcaaggtaggtatcataaaataatcaagtgtaaagaataacaaanaaggttgaacgaaacatgcactntagccaccatactaacaattaatatataattcat

SEQ ID NO: 162268 - DNA, 439 bp, Glycine max
  unsure (1)..(439): unsure at all n locations
gcttgcttgcctctagttgacaaatgtgctgataactattaggtatcttcgcatgccacctgactcacgggttggggtgacagaactgtggggtggttgacaaaagcgggacttttgctcctacatatcttcaattgcgagactacatagttcttcaatttttgtgtgagactacaaatagtctcaatgttattttactaaaatgcgaacatgctaacatgctttagcaaagaaacaaaccttcaactgatcaaggcaacatatatttttttgaataaaaacaatgcgtctattggagaaggaaagtatgctaataaaattttctcataaccacaaatgagattttggatgttagcatttcgtttctaaatgaccatttagaggaaacactgcgtccaactaanatagaagaaaaccactcaaagtgtatcaatctcac

SEQ ID NO: 162269 - DNA, 448 bp, Glycine max
tagctagacaaccttgtattcccattattttcttttttccttcattctttttcattccttgcttgctctcttttccttttcctctttctttccttttttagttatttatcatttgctcatttcctctctcttctttctttttttttctctttttctctctgaaaaagtcgtgcggacaagggcacacactacctactcacgtctaaccacaaggtgaacgagaaacgcacaaaaatggtaggtcgtaatatggtgacgaaataaatgagagccataacgccgaaaatttctaacagaaacgagcaataatgatagtaatgttagtaaccatatgaacaaaatagaaaatagtaatgtcaacaacaacatgggcaataacagaaaacgtttatagcaaactaataaaaaaaacagatatgtcaaaaaatgcggtgacctcggtcacgtg

SEQ ID NO: 162270 - DNA, 429 bp, Glycine max
  unsure (1)..(429): unsure at all n locations
agctntgagccaaaatcctgactcattattatccttgacccagggtgagaatgccaatccttaccctcggaagcaaaaaaaagaaaagaaggaaaattccccaatcaaagagtgggagaaagctaaaagaaaagaaaggaaaattcccaatcaaagaatgggagaaagtaaaaaaggaagaagaagaaggaaagaaagctcctgatcaaggatcgaaagaaaccagaagaaatgtgcagagaggtctttggaccagacaatatctgaacagtacagaattgtcaccaaatgaacgaaaaaagaaggaaagggaaccacgacctaaaatagtcttctccctttgattaccaaccaaaatcccgtgcgctagcgactttnttttctcgccccgcacttataaaaaaaaaaaataaaaaaaacagaaaaaag

SEQ ID NO: 162271 - DNA, 469 bp, Glycine max
  unsure (1)..(469): unsure at all n locations
agtttccaccaaagaactaagttggccaactgtattgtagtctctcttttcaatcatggtcttgtatatgcaaaactcaaatctgagatgctcgttaatggatctaaactccgtttcacttgaaccaacataatgttggttgagattcatggtttgaatttatttctagaatgaaaaatttaaaaagaattataaatataaaattaaaacatcgattaattaagaatattaaatttattgaaaaaattaaacaagtttaggtatacatgaataatatctagaatattaatgattgtttctattactgtacctttataataaatagtcaaagacatctccaaaaaaatggtttttgatgaaaacaatactactcattaaattcaataataaaatattaattacctttaacaaanatgggttgataactatgaaatttaaaatanattattaattaataatggtaattatc

SEQ ID NO: 162272 - DNA, 441 bp, Glycine max
  unsure (1)..(441): unsure at all n locations
agcttgatgatggggacaaaaccaatttttgctttaaaatagctgacacttagtgagttcccatacatttcctttttaccattntgcattggtcattattgaggtatatgttagacacgtacattatcataatataataataatcaagaaaaacaatagacatcatatattgaaatacctcatgatcaaatttaaattgaacttacactagtttatgactgaaaaatgtactgtaattggtgaattttcaatattgtagtgggtacattgcttctgagtatgcaatgcatggttatttgacggacaaagcagatgtttatagttttggaattgttgcattggaaattgttagtgggatgaacaacaccattagccaccctacggaagaatgtttctctctcaatgataggggataatatgccttatactctcttgcctctg

SEQ ID NO: 162273 - DNA, 391 bp, Glycine max
  unsure (1)..(391): unsure at all n locations
aagtctcacgattgtcacgtgctcatgctacaattgttagccgtggctatacgagacatcttgccaaacaaagtcaggttcaccataactagcctgtgctttttcttccatgctatatgtagcaaagtgattgatccaataatgtttgatgagttggaaaatgaggccgcaattatactgtgccagttggagatgtattttccccctactttctttgacatcatgattcacttgattgtgcatctggtcagagaaatcaaatgctgtggtcctatttatctacggtggatgtacccagttgagcgatacatgaagatctntaaagggtatacaaagaatctatatcatccggaagcatctattgttgagaggtacattgcagaagaagcca

SEQ ID NO: 162274 - DNA, 455 bp, Glycine max
gcttgcacaaagattttctgtacatctaattcatatgtcatggcaagcctgcacattactgcttaatagaagaagagaaagatggtaagccttcttactttgatatcaaacactacattgaagacaaagaatattcgcatgaggcctctaacaacgacaagaggatgttgtgaaggttgacggccaacttcttcctgaatgggaatatcttatacaagaggaaccatgacatggtactgcttcgatgtgtcgatgccagagaggctgaaaaaatgctggcagaggtacatgagggatcctttggaacacatgccaatggacatgccatggcctggaaaattctgagagcagggtattactggctcaccgtggagagtgattgttgcatccatgtgaggaaatgtcataagtgccatgcctttgctcgataatgtaatgttccacccatacctttg

SEQ ID NO: 162275 - DNA, 444 bp, Glycine max
tccttaagaagattcctaaagaagctagagcttagctacacacacctctctaatagctaagctcaccaccttgagatgagaagctagagcttagctacaccccccctataatatctaagctcacccccatgacaaaatacatgaaaatacaaaaaaattccctactacaaagactactcaaaatgcctcgaaatacaaggctaaaaccctatactactagaatggccaaaatacaaggcccaaacgaaggaaaaacctattctaatatttacaaagataagtgggctcatacttagcccatgggcttgaaatctaccctaaggctcatgggaaccctagggccttcccttggatctctggcccaatctacttgaagtattctatccaatgcccttgcagggtaggaatgcatcagttcctaagttgtggttctttcttggtggg

SEQ ID NO: 162276 - DNA, 254 bp, Glycine max
caactatatgataaaagccttaagcctccatcccgcgttacacatatattggtgttaagacgatgaagaaaagcaacccatatacggtccagtggtgaaagattcacgcacttcacatgagattcaaagcaaaaaaaacatgatcacgaaaagtgtatataatgcccaaggcacgccacaaatggcaataagaacaaccactcttgccttggccctaaaactaacaagtagaaaatactcacaactctaatagc

SEQ ID NO: 162277 - DNA, 399 bp, Glycine max
tcatcactctctagtcttaattttactatcaaaaacattacttatctgaggttatgcagttcaaatggttcacaactttttttaatttaaacaaaaatcttatttttgtcacatggtgttgttttgttttcagtcccttctatctattttggatagcccactaaataaagctgggagattgcggtcggtatacataaggactgaaaaaggtgttcttatacaggttaagccctttgttcgtattccaagaacattcaaacgctttgctggtgtcatgtgtaagtcattattagttatttgatgtccttggctcgtgagaagatgaatgaagtctcatttgttgctcctgaactctactatcctgcagtggaattgcttctaaaattgagcatatctgct

SEQ ID NO: 162278 - DNA, 451 bp, Glycine max
  unsure (1)..(451): unsure at all n locations
agctttgagattcctttacaaacatatatattatatttaatnattcatacattttgctatgaaggtgcatgtagtactatgatttaattaatgaaattgttacgaaatgcaagtatttttatgaaaactttgcttcataatgagcctaacagagctaagctgcacctggtagagaactntctgtgtaaggttgaatctaacttcaagtagtttagttcatctattgggcagttgcgcattattaattaatagattgtataaagcccataacttctttgacagttacctgagtttgtctctcttgttaaaagtctgcttacatccagaaaatatcttttactttcatgtaatggttttatgttcattttcattccaaatgttatgttctctagtggagaagaaagtactactgatatattgctcaatggctaaactcgaaaaagtcccatgt

SEQ ID NO: 162279 - DNA, 477 bp, Glycine max
  unsure (1)..(477): unsure at all n locations
tcacatggagctacgtcattgacggtttctcaaattcctttctacgttaataagcatacctctgtatgtctccatcttgatgtagccttccattgattcctcaaacttgcagactcccccatatttagtcctgcaactgctttccaaactgcaacatcaatgatcatctctacatcattaacagtagagtataaattgccttccatatcaacacgggcacatgtgtagaaaacctttaccaactcaaggtagaagatttttatcttctacaccaatcttaacaaaccatatgcttcaagaaggtagagaaatttaaatccctgttgagagaaccattccaagttcagaaactttggttattcttacattctccatggcataaatcatctngaagtcagtcttcttgttntcattagtgaaccatgtatccaacctattgagagctgcttaagagcactgtccttgcttcttttcaag

SEQ ID NO: 162280 - DNA, 451 bp, Glycine max
agcttatgagatactttagagttttatcaaaaaacatatattttaattacgatagctaaaaaaagttatagctttcttgaatattacaagagatattcataattcgaatcaaagcacacactcacatgaggaaaaaagaaaaaaataataaaccatgaaaatttatgtaaatttgagggatagcgaggaataacattattcatactgtaatacctttccctctcaaaaaaaataataataaaatcccattgtatcattttatgtttgttatatgaaaaacaccatattttgttaaatagatacaatatattttttagggtacaacgataacaataaaatttaaaccataaacttggtataaattatctaacttcttaagacgactctactaggataatcgatcctgtggatggcatattatcattattgttggaaatattagtttagcttc

SEQ ID NO: 162281 - DNA, 364 bp, Glycine max
  unsure (1)..(364): unsure at all n locations
ngngtggtaatgtgtagtgctgctactcgaagaaagttcttgcttctatctatgggtttctntcttttatgggatatagttttttccgtgtgctcgggtcatgcaaagtgtggcgcatcttgacgtgggagtgtttctaaagagagaatgatgtaagtatatttgggagtgtatttttttttctttttgaaaaaaaaaagagggaataagcttagatgaaaactggatacaataactgccctaattgaatacacattttgtcccgaagcccttcccaagcaatgagtgtgtgtttagatatgtttctgtagaattggttttaaattaacatgactatagataattaattttaagttaatgttag

SEQ ID NO: 162282 - DNA, 444 bp, Glycine max
  unsure (1)..(444): unsure at all n locations
ggatcttaagcactgagcatgcactgcccatgacttcagtgttttgaatacctttatttttttccatttatcttcatgaaagactctntgtgattgtgtataaattgcactgtacaactgtctggaactaggtttatttatggcttaattgtgtaatgagagttgtgccgattaacttaatccagtttggcttaaaattttctgtcttaggggagttatctgactgtgataaacattatataaaaaagatcaataagtatcaagaaaacccagtagccaaaaaaatgcactttctacatcatctaacagaggactcttgttgaaaagaggtggaaaccttactatggagatttacacttatgcaaattatgtacgttcactaagtgatatgttggaaagccggcttaattgaggtcactcctatcccttatatattgatatgtt

SEQ ID NO: 162283 - DNA, 429 bp, Glycine max
  unsure (1)..(429): unsure at all n locations
ctatgatactaagcttaacacagcgcgacctcggaaccagccacgacccctgttctttgtctcggaaccagccgcgcgtgacccgctgcacacagcagccagcagcgacgacccatggcgtgaacggcggcgacgagcacggcagcgacgagcacggcgtgaacgacggcgactcgaacggagaagacgacccagaaccgcgacctcgacttatactggtgggtgggccaaagcctttttttgtttttgctgcttgacaccccttttctatgtctgcagcttttttttccgtttttctatttgacaccccccttttactttcgacagtcccatttttaaattttttttctatatgacaccacaattttttttttctgttcagtcctcttttanatggctgaaccatcatcctctttaataagcttattt

SEQ ID NO: 162284 - DNA, 340 bp, Glycine max
  unsure (1)..(340): unsure at all n locations
ctaactataattaaaacttaaccacaaaaaagaaaataatatttattaatcnnactataacgcttcgaaattaaatatctattaacataattcaacactggcgacaaagcaatttctctgccttacatgtgcagaacgttcacaaattcattcccgaaagatgaaaattcaaattttaatccttaaaagtaaaaactgccacaaattcattcgtccgttagcctcggtctgttaccgttaatgaaagagcttatatgatacattcagggacaaatatgccaacgcagtacacaatcaggaatgaaaatgactatttatccaagacataactcaatcttca

SEQ ID NO: 162285 - DNA, 396 bp, Glycine max
cagcttcatgagagagtcaaagaatcaatttgttggaaaaataaaagctatgctaaacaagccaacaaagggagaaagaaggttgtctttgaacccggagattgggtttgggtgcacatgaaaaaagaaaggtttccggaacaaaggaaatcaaaacttcaaccaaggggagatggaccatttcaagtgcttgaaagaatcaatgacaatgcttacaaagttgagctggccggtgagtataatgttagttccaccttcaatgtctctgatttatctctttttgatgcagatggagaatcctatttgaggacaaatccttctcaagagggagagaatgatgaggacatgaccaagagcaagggcaaggatccacttgaaggacttggagggcctatg

SEQ ID NO: 162286 - DNA, 478 bp, Glycine max
  unsure (1)..(478): unsure at all n locations
tcgccggatgatgccgatcgaacatttcccaatcgacatcatccaatatttattcagggatcgaatagaataaaaaattgccggtgtcggtcgctatatggccccgactgatatccttcagccgacattgcgcaatttcttttagaaaagctggccgataatgtttttttaccgtagaggaagttttttgttttgctgttgcctacaaaatttacaatgtagggcggctaggattttctgtgcgagctcaaccgaggttgtgtttcgggcgacactggcatgttctcatttagtcggccaagaaaacattagcccaccccggcacaaaaaaaacatcattcacggaaattgatcgaaaaaaatgatagctgacgtcggcgtggagagatgaccgattgaggtctaaaaaggaagcatcaccggatgacgccgatngaacatttctaatcacatcatgcaaatctattagggattgata

SEQ ID NO: 162287 - DNA, 448 bp, Glycine max
gcttatgactattaaatcaaacataggctttgttcataatgaaacacatgtttaggagaattcaaagcttgatgtggaatccaaaattcatttgccttgcttttgatttagtgttagtaaatgtagacaagtacaaattagtagtgtttcttacatttgacatgtgttaaataaatcagaaaaataagatagtttaagtgttttttaatctcagcaacagtggcatataaacaatcctgcaaaagaggtttaatagtcagaaaaactaagtttgaaaaactaagaacattttggaaaaaataaagatgaaaaaatagactgaaacagatcagattaagaaaaactaagaacattttagaatccatgaacaagttattcacattgttggtgttgtgcaaattaacccaagacctccaagaggctcctttggttgctgaaaccaaagaac

SEQ ID NO: 162288 - DNA, 486 bp, Glycine max
  unsure (1)..(486): unsure at all n locations
tgtactcccttgtagaacttgatacattggcttccaatctaatcatcttagagaaaagtttcttatatcgttgtgtgctagttaactttggatatttgatgtgaaacattttaggtcatctttgcatagcattttacataggatatattgcattttatctatatattttagcttgtttttgtttaatttttagtgtttcatacttttaggacttgtcatggcgttttccttgttttcattttagtttagtcattccaagatcaattttcacataaaggatttataaaggaaagtttgagcacaaaagacttgaaaacagataaaaacaatgaggttntgctataccttgtagagaagatcatggngatgtgataggatcaagacccaatcatcagacactaaagctagagcccaaataatatttttaggaagatcatagcccccagaccatcatcataggggcgtgagcacgatcaacttttctgg

SEQ ID NO: 162289 - DNA, 458 bp, Glycine max
agcttgcatcaccttgattcacaggcttttctcttatcctaggttacgaggatgtatcccaaaccagttcaaccacttaatcaaccctaaattaaattactaagcaaaaattaacataaggctgtcattatgtgattaagcaacacctacaccaattaatcatgaacgaaactgatcattaagcatgaacgtaaattaagcgcagagacaattaatcaagcactaagcatgcatggattaatagcaacaaatacagagtaattggtgaagaggaaaaactgatcagtattcaatagtaataacaaaatctcaaagagagctgtgcttgatcctcaagagagaacaacgctagagacttagccttccattaatcagcagaaaatgaaattgtagattgaagcagaaacgaaattacagaatacaaattttattctacgtgaacagtgcgcatgaacagt

SEQ ID NO: 162290 - DNA, 401 bp, Glycine max
  unsure (1)..(401): unsure at all n locations
ttagccttagtttcactctggttattaggtaatttgattaagaaaaatcccaaagaaaacaagtatcgtcatgaaacattcttttgccctctttgacttctagaatgttacggaactttacagattgcgcaataatgcttcctttcgactcccgacatgtcgcggaacttcacggatttcctaacgattggtgttaagtacctcgaagcggtcaagcgaaggttgcatcccaccaaacagatggtctccggacgaaattagggtatgacagttgcccctctttacttgtcttttattggagataaaagcgaagtanagatatgacactaatttcgttcgagcagaacattattcggccggtcaatatccccgccagcggaacctgtcattctgaaagaaaa

SEQ ID NO: 162291 - DNA, 450 bp, Glycine max
agcttgagctaagatgcccaccagtgtttgacacagtgtgtacaatatctgccctcagctctgctgcaagttgctccagatcctgacaaataaatgcagtgattttttacaaacaaatcaacaaaaatcagagaaaataaaaagttttcacccgcagaaaagaaatatgctattgtcagtttcaaacctgtgttgacagattcttcatgtgaattgggtagttgattgtgtccaacaatagagttgctggtttctctcctgcataattgatcttccacccatctttctctttctttataatagttctctcctcatcagctgagccacttgctgaaactctcacacagaactgtcacaaacacaattacacatcatccatcattgcactattggtgaaaaatcatggtctttggttttttagtaacaaaaggaagaacagtgaccgcttat

SEQ ID NO: 162292 - DNA, 451 bp, Glycine max
  unsure (1)..(451): unsure at all n locations
tactcagcttcccacctctatgtcaataaccctgaagaagtgcatcgattaacagaanatattacggagcaactaacaaaaaaaattatagatgagctggagcagtcgatcaatcaaaaagtgactaaacaactaatgttgtccttcaactagatgcagtcctagatgcaatcccagggactcgtactacctcctgaacctgaggttggtctttctgcttcttgtgtcagcacaatggaaggtcgtgtcaacccctcatggtaggacccagacacgggtgaatcatacaaatatgggttgtatgttgatgacaatcctccccgcctggttgcccttggaagagtttatgaagggttgacaaccatccacagcatccttttaggcaatgatcaagtgaaggtcattgttgaggaaagttgagatgttgatgctcaccgtcctgttcccactc

SEQ ID NO: 162293 - DNA, 469 bp, Glycine max
  unsure (1)..(469): unsure at all n locations
tgtnagtccaataaaataaaaaagattgtgtacattatattaatctcaacataatggattaaaaaagtatcaaattataataaaacatgtctttttcaaataattcaaaatgttaatgtgatttaagataaattgttcatcctaagtgtaaaattcttttcacactttaataaaaaatggtcatatgactatttcttatattctattcatactctttatatttgataaaataaatcaatcaccaaattagttcttaagagtaagaaagaaaaaaaaaacatttctatatattaaagctattataaaaaaatttaaaaatataacttcagccttaataacttacatgccgatataattganagtaaattatttatcctcctgaattaaaatcgattatcgtaactaataaatgtacgttatgccttttatctaaattcatctctttctcttctttgtatatcttaataaa

SEQ ID NO: 162294 - DNA, 430 bp, Glycine max
  unsure (1)..(430): unsure at all n locations
gcagcttaatggaaaacggtgaatgactctttttgaagaangagcaagcagaaaccgaaaatcagtatggttcatgcaagcagaaagcgaaaatcaataaggttcanacacaaaggtctatgattcaaagcagaaaacgaatgagcaagcacaaaggtctagggttcaaagcagcgcaatctcgaaagctagcagaaacctgcacacccgtgaggtctaagagcaatttcccttatttgtttttacaactacnaccgtttttttctaaaaaccggcttaaattttataaaacataacattctaaggcggttttcaataaccgccttagaaagtgcgtcgtaaaatgaaaattgttacacaataattacaaaaatgccaccgcaccactttctaaagcggttcctcaaataaccgtcgtaaatcgcgtgtc

SEQ ID NO: 162295 - DNA, 437 bp, Glycine max
  unsure (1)..(437): unsure at all n locations
ntacatcagattttagtaatgatccactaacctataatttataaaacttaatgccattaacctagggaattaaaggaacttaatggctgagtgtaactgaaattgtggtaaccaaaagtcacccccaacagccatcaagtcagccaccatttggtctcccaaaaggctgatgcctaggttgccaattgggcctttattacaacttgaactaaaccaaactaaagcccttttagttgaataacccaaaatatatttttggtcaaccaaatttataaggattgggccattatttagataaactaaacactcaaattgagacaaagtggtgccatttagtcctcctccatttgggccatgatacaactcacaactttggacttttctccttgaaactggggcttgtattcaaatagtatggacaacactttttgaagagc

SEQ ID NO: 162296 - DNA, 315 bp, Glycine max
  unsure (1)..(315): unsure at all n locations
tcgacccggatccttnagtcacctgcggcatgcaagcttattaggaggcgagtacttattttctgctgcaactcgcacgacgaacttagccatgaatttgcctaacatgctctcccctaccagacatcatgagcgtaacaactgatttgcttaacttagaagccttaagcctttgatcactggacctacataaacgagatcatacggctacactgctactgtcgaagtcctatcttcttttgatgccacacttcaaaaaagccgccttttcttagtataagaactagtttcactcttttatatacgctgaccact

SEQ ID NO: 162297 - DNA, 360 bp, Glycine max
  unsure (1)..(360): unsure at all n locations
ntacacgcctaagatacatataacgcctgtgagtctctatctgacgcaggcaactagtctcggctgtctgacactgtatctaaagacatatacttagcatgccttagctaagggatccactcataatcattagccagaactctacattatcgaagacaccatggcgagaaacacacaatctatgagtgtcatctatggacggaactagagtcccttatcgatatatgcgtgtgtatgcctttgcttacattatctgtgatgacattctatatgataaaactgattgtggactctctgaccatacgataccttataatggctgatgctctacatctctaggatatacccgcttcgaatctt

SEQ ID NO: 162298 - DNA, 164 bp, Glycine max
ggtcctgcacttaatttgacagttgaagatcctcgatgggtttggtcagtaaccagctgacccctcagcagagttcatatgagacctttgactaaaatttactactcacatggtgacaacactcctccttaacatgctctcttaccgtgagacaaatgagaaaa

SEQ ID NO: 162299 - DNA, 473 bp, Glycine max
  unsure (1)..(473): unsure at all n locations
tgcacgaattcggtaaggaaaagaagattatggagattaatagccccttaccaaagcttttatggaagaaacctcaagagcacttgtatgaagcttgtaagaagaaagaaatagactcatctctcctttggttgagcttgtgcaaaatggagaagaaagagctccaatttgttttttaaagagacatgatgatgaggtttaaggcttaagttgacaagcttaattgacaacatgaatgactaataaccagcccatggttaacgtgccaagccatgcaattttagtgcattatgccttttgaaatttaagcaaaaatggctaaagtaggtttaaaccaaaaaatggaaatttctgctttggctaaaactagtaaaccctatcctaatcccctagatggacgtgttaccctttcttggattaagcgtaatcaaagtggacgttgcacanagtccactctcacagaactaaattac

SEQ ID NO: 162300 - DNA, 461 bp, Glycine max
  unsure (1)..(461): unsure at all n locations
ctgcagcttggaccaaattctagtgataatatcttttggagccaatattcttcaaatgcagaatctcaaatgggtcatgaattcatggaacttaattattaaggtgaaaaatgttcttaataagggttttatttataggattgggtgtggtgatatttccttttggtatgacaagtagattcctaatggacttctttgtcatgaggttctgatgcatacagggagagagagctagtagaaatattagaaccaggtaaggaagttttccaaatttctgcctcctttattgctcaaccaaaagttacatatatagggagcaaaaacagaataacaaactaagaaatggatccactaatccactactaacagaaaggataagctagcactagtccactacagcangcactaactaactgaccagcattttttttatnagatcaaactagcatattgccctgaat

SEQ ID NO: 162301 - DNA, 472 bp, Glycine max
  unsure (1)..(472): unsure at all n locations
acgtgacctataaaactcagcttggcaagtttaaaaagctntaaaaccattacttgtaaaagatatgaataaagtcaaggtatatctagagtaatcctctacaataacctaagcatagtaattccctccaatgctcatggttctagaaagaccaaaaaaatctaaatgtaaaagttcaaaactctggaggtggaaactacattttttgatttgaaagcatctagtagttgatcatagttatcatcatcttccaaatcagaaacggttacctcactttcagcttcattgtttaccatcaagcacaaattttgttcatcatcttcactattgtcgttggaagttgttgattcatcgtcatccaaagagatatatgtcnttttattcttttggaatgaacccttattcttcttatctccttggtgcttcttttggtagatgggacaatctaccttaatatgacctgtctctttgc

SEQ ID NO: 162302 - DNA, 438 bp, Glycine max
agacttgtgtagtcgattacatataattggtaattgattaaaacagagagtttatgcattgaagaggtttctaactttagaaacaatcttcctatctctacatgatgatgcatgatgtacatatggatagattaagattaagatgcaacattcaatacaaatgtcgctcaatgagttaggcatgtaacaagacaaaactcttcaaactttaaagcttaatcttcatgttgccccccatactttaacactaccaagtgaactcttgatgtaatgttaataatttttcaccatttaaagttattccaactattaccttcaccaaccaatctactctaaccatgatttctcgtgtggaaaaaccttagtcacttgatttcactcctaatcccttagaaatctaaaccaagtaacttggtttaacagtaaagatggataaat

SEQ ID NO: 162303 - DNA, 475 bp, Glycine max
  unsure (1)..(475): unsure at all n locations
nttccgtggctgccttctctnttctgtaactaaagaatttgcataagtactgggagaagaggatgtttgggcaacatcagtcgtgcttcgatcttgcaacagcctatcatttaccaattcttccatgtaagcaagtttatctaaagcagtggtaacccttgcttcagatatatgaacctgttgttattcattaagttgagtaaatatagtgacaaattaataacatattgacaagtttctgccaagttagatcaattaaaaacaactcggtttcaagttgcgctgactggtttgctactgctaaaattaaatacctgtgtgtgtgcttgtgctaattcatcctgcaactcggctagctcctttntcagggtgccaattgatttatattcgcgagctagaggattaagaacttcgaccacctacacccataattnttggaggtataaatcaacanatggtggaacatgcataactc

SEQ ID NO: 162304 - DNA, 416 bp, Glycine max
  unsure (1)..(416): unsure at all n locations
tccatggcttattccttaatggatggcgcctcctcttacctcttcttctttgtcttccgctgcatctccatggtgaaaaatcaccatcgaaggacctcattgaagctcaaagatccagcctccatagaagctccacaagcaagcttccatcaagtggtaatcagagcacaagagcttcaagtaggtgctccttaaacctccattaattttttttctttaccttctcttccattggtgtttcttcatttttctccatgtatctcctcacatgtctngttctaaatgttgttaacatgattctttggagtctccaccaattaaacttgctataaaaactagatttgnatttctatggttcaaatntcttgttcttgttcttgaaccatgaattgtnngtgagttacgttcctttgagt

SEQ ID NO: 162305 - DNA, 405 bp, Glycine max
  unsure (1)..(405): unsure at all n locations
ttaaaaattgaattaaaacattaagtaactggtggtaatcgattaccatatatgtgtaatcgattacacaatgcaaattntgaattcaaattttaatagctgttgtaaatcaattttggccactggtaatcgattacatcctctagtaatcgattaccagagagtaaatctcttgtaaaatactttttaacttaaatttcttggccaaaccttttgctacttcaattggaattcccctcctatttaatataccctttctaagactagagacttgtcttgatcatccatcctaaatatctttaatttctttgtcttgattaaagctntgagacgcatgtgaacctttggcatcatcaaaacanttcagttgatcctttgtctacanttttttgttggctcaaactc

SEQ ID NO: 162306 - DNA, 425 bp, Glycine max
  unsure (1)..(425): unsure at all n locations
tttgaacatgctatataaaaaggtatgaaaagggactcgaaatgaaattttatgatcactggttgcaacattgagaaacaaaaaactatcccaaatccaatttcttatgaggtggatgagatgtcactttagatgtgtcatatattttgaaatgaagtcgaaagagttaattgactaaatatagtttatgaatctcaccaactaaaacaaagcttcattntgtggaattcctcctactcgcatagaccatatgtaaatcacaaaatcgtcttaaattgtgatatagtaacatttttggaattagaaaaattgaattttggtttttactatgcgcattttaagatggttntacatcttagaatgtatgacagtaacatntttgtaattatggggaacttaaactnttggctaaagaactatcaccg

SEQ ID NO: 162307 - DNA, 484 bp, Glycine max
  unsure (1)..(484): unsure at all n locations
ctaagctggaatttaaccctccagcataaccaaacgtgatcctcacagacacccacatgcacgaatgcaagagaaactcttgtttttctctttggggaaagcaaaggaaacaaaatgagcaaaaacgggtgtctcanaggtgagagtacgtgcacacacaccttcatcgctgagaggtgaagcaaatgaagagactaatagcacaagcaccgttgccacaacaagcagcagaaggtgccttctcatatataaataaataattaaattaatattatttaattgatttttatttgatatataataataataattattataatttcacgttacagtaggaatacttgcacattngataagagaaaataatcatttgatccaatgatttcaaaattcatttggatntttattntattntagtcttatactntnttaaattttgcaaaagtatcgaattaattgtaacatatataaaaaaattaaaaaa

SEQ ID NO: 162308 - DNA, 462 bp, Glycine max
  unsure (1)..(462): unsure at all n locations
agctatgaagatgactgactagccagcttgtttttttggcatcactaactgctgcgaagacagaaaattctgcataatccaccataccttcaaatggaagctcaatgntgncactgacaatgacaggtntncnnagactttgaatngnnnnaggtagtccgcatgaagtgggtgtatccccagctggatgcaggcaaaactctgatgtttgcatcccttttattgattgntctcgnctagttgtattatggaaaccttcctccattataacaccaggttcactaaccaatagatcccataacttctctctgattatacctccctgtaaattgaaagatctgtccatgggataaccatagaacagatattccgttagcttttcacaattaaaaagaccagcatgaccatatgtctgttggattaatatacatatgaattatcagtatctatctacaataaaat

SEQ ID NO: 162309 - DNA, 478 bp, Glycine max
tattatttatgatcaacaagggtatcaatacatgcgtatagtgttcaactttactctgtacgatacaaacctgttttttttagagatgacaacccaagtgaattagtggattgaatattctcaacctaccctatgagtgtgcattaattacctaaaactattggcttagtttaaaataatcacacacacacacacacttatttttttctttaatgttatacttccttcctttggttttaaatataaaaaaaatctctcaaatattaaaaaatttcaattaaatgtattttatttaatattattatctttaaaatattcttcatttaattgaggtattaattctaatgagttttttattcttaatactacattctaatgaatgataagttagagaacaatatgctttaattcaaattaatataattaaatatgatgaattaactttcttaattagtatgacttatattttcttcttata

SEQ ID NO: 162310 - DNA, 454 bp, Glycine max
  unsure (1)..(454): unsure at all n locations
agcttnccnctctcctcctctctatcttcttcatctccttctctctattntcttcctttcctccatggctacattcgttaacacctccggccaccactgcaacaccttcgcctggcctcaccttcacttcgcgtctccacctctggccatggtagtctcgcgtcaccttcgctggcgtcaacaatgaagcacatggtcgagtctccagccatggtccggccatggtcgcatcttgggtctccattacggttgcatgtcgcatctccaaccatggtcgcatctcgtgtctcctgccatggtctcgtttccgtcatggtgcgtttgccttcaccttgattgcgtttggttttcccctcttttccttttactgttttgcttaaatctggatctaaatcactttntttcttcaaatnttatgattnttgggatttattatgggtgttcaacgagtata

SEQ ID NO: 162311 - DNA, 481 bp, Glycine max
  unsure (1)..(481): unsure at all n locations
tgaagctgagtgccgtaaactgaaagccatgactctcttaacattttctgtcaatgatcacaggtctgtaactgcatcttcagtttatgttgagtccttcacagatagcatgtcagatagtggagataggctacttgcagttgaaagtgatatgcgtaaattaggtggctgggagatgaatgaatgtgagctacgccgtttcgattcgtgctcatcttctttcgttatggaacttgatcaatttaagaacgaaaaggctaatggaaaaaatcatgtggtctcttcaactgagatcaatctcatggatgatttccttgagatggaaaggcttgctacattgccagatagtgaaagtggaagcaattttgttaggaaagaagtggcatcagatcaatctaatgttggtcagggctacaataaagctgaaatagaagctatgattganaagaatgctgaattggagaagaagctgngaaaatgg

SEQ ID NO: 162312 - DNA, 441 bp, Glycine max
  unsure (1)..(441): unsure at all n locations
agcttatccttatggcttgcctccggactttactccccgtgccactccggaagatntaagccaagcccttacttttgaggggcaactcccgccttatgacgactatcccgggcaagacgatgacgaaggagatacccatctcggccccctgctccacctcaaagatccgtccccacatgaactaccccaaccgaacatagtccgccatatcccggcctcacccacacccgtaaaagaatctgtccccttcgcggaagataagggaaagatagaggcgcttgaagagaggttaagagcagtcgagggccttggcaattacccattctcggatttagtggatttatgtctcatgcccaatatcgtcattcctcccaagttcaaagtgccggactntgataagtacaaagggacgacatgtccgaaggggcatcttcngatgta

SEQ ID NO: 162313 - DNA, 441 bp, Glycine max
  unsure (1)..(441): unsure at all n locations
taaagaacaataaattcacaataataacaataaatgacttatttattagatgaaggaatttgattgcacaaaattaaagagcaataatgacaataattacaagattagtcactttccaggttcacaaggaatgatgaacatgaattattttttttggaaaattggcgaacacaagaacattaccaaactctaggattggggcttcggataccacatgatatgatcctcgttgggagtcatactatttttatggatcatccttaagttggttatcttgttagaggaagtaaagacaaaaataaaagaaaataaaaattaacgtgaagataaagacttgtaacaatgacgcanagtttagagaatgtgaaagtaagaaataactagaaagagatggaanagtaaataacaaaaggaaaagatagcatagacatgaagttaaaa

SEQ ID NO: 162314 - DNA, 446 bp, Glycine max
agctttacttataggaaaggcgcatgttttaccaacatatgagaagagggctggatcggatatcaatagggcggctaaatgttgaagataatgtgaatcttacagcatcaattcttgaacagcacgttagaagagttgcttaggagtgtaatggaagtaaaatcctaagaccagacatgtatacttttaaatttattaagcatttttgggaatgtttgaaatctgacgttttgcaagtcatgcatgaattccattcttttgggaggctgcctaggggttcaaatacttcatttctaacattgatcccaaaggattctacaaaggaactaaggaattataggccaatctcattgattggattcctatacaaaatcttatcaaagagaatcgtcatgcacaaggtggtggaagagacacaatagaccttcactagcggcacaaacatg

SEQ ID NO: 162315 - DNA, 446 bp, Glycine max
tggacaatggtagtgcaatcttgaaaaatcctggattaatcttctagagaaacctgcatgtctaagaaaagaatacacttcccacacagaagcggggtaaggtagagaagtaataacataaatcttggccttattgacctcaagacctctactagagaccaaatgccctaagactataccctcatgtaccatagaatggcatttctcaaagttcaaaacaatgctagtctcaatgcattggtcaagaactctatacaggctattcaaacatgcctcataagaggaaccataaacaatgaaatcattcataaacacctccatgcaactctctaataaatcagagaagatactcaccatgcaccttttcaaggtggtaggagtgttgcataagccaaaaggcatcatggtgtaggcaaatatgccaaatggacaagtgaacatggtct

SEQ ID NO: 162316 - DNA, 428 bp, Glycine max
  unsure (1)..(428): unsure at all n locations
agctntgagcaaattcgaacgacaattttttttattcgcatgtctggttgagtcccgtattatattgagacgctcgaaattgaatggtgaagctntgagccaattcaaacgacaataaccttttactcggatgtctgattgagtcccgtaatatatcgagacgctcaaaattgaatgttgaacctctgatgcaattcaaacgacaataactttttactcggatgtctgattgagtcccgtaatatatcgagacgctcgaaattgaatgttgaacctatgagccaattcaaacgacaataactttttactcggatgtctgatcgagttccgtaatatatcgagacgctcgaaattgaatggtgaacctctgaaccaattcatacgacaataactgtctactcggatgtctgattgagtcccgtaacata

SEQ ID NO: 162317 - DNA, 424 bp, Glycine max
  unsure (1)..(424): unsure at all n locations
taaacattcaactntgagcgtctcgatatattatgggtcttatcagacattcgagtaaaaagtgattgtcgtttgaattggctcaaaggttgaacattcaatttcgagcgtgttgatatattacgggactcaatcaaacatccgaggtaaaagctattgccggttgaattggctcatagctctaacattcaatttcgagcgtctcgttatattacgggactcaatcaatcattcgagtaaaaagttattgtcggtcgaattggctcacaggtttaacattcaatgtcgagcgtctcgctatattactggactcaatcagacatccgagtaaaaagttattgtcgattgaattggctcataggttgaacattctatttctagcgtctcgatatattatgggactcaattagacattcgagttaaa

SEQ ID NO: 162318 - DNA, 434 bp, Glycine max
agcttatatgtgaaatgtgtatagactctttgtatttttggcaaaaatatgtattatttttcgtaatttaactttgatcaatttaattctaaacattagaaaaatagtaattttcatccttcatcaccaatgattttttactataaggaacgaaattactattttttaaagtcgagagatcaaattaatcaaacttaaaatgtgaacactaaaatcaaatttcatcataaatatagatacttgaaaacggattctaccctaaggttgtgtatatattctcatatattgtaaaaataggtatcgtgatcgataaagttgtatttttgttaatattttaataaatctaagttaataaacttacgacacattctttcttgaaacataggtgcaaaagcaatcataggtgttgaggtctaaacttactgatggatatg

SEQ ID NO: 162319 - DNA, 466 bp, Glycine max
  unsure (1)..(466): unsure at all n locations
taagtcctattttcatttcaaatcagatcagcgtttcttaagttgctctcttatcaagttcatgcaaaaacatctgaattcatttgggttttaggaaattccttcattgtttttccttctcaatgttttcaaaagaattcttttgttgtgttctaatccaaaaataagtttaaaaaatattggttgtttgattctttccaaaaagagttataatctataaatatactaacagaatatcaaaccacacgtaaattagtcaaaataaacaagcgtaagtttgtaaacaaaaatccaaaacagtaactaagggagtgaaagcgataaatgaaaataaagacaagtcacaaatctttgaagatcatggctgggaagctccatttccttccatgaaataatcaacaagatccaccatgtcttcatncttctttgctcttcttctatctacttgggcagctcattaagcatc

SEQ ID NO: 162320 - DNA, 441 bp, Glycine max
agcttcacatgatatgtaaatggcaatgtttcaattgttcttatctctacctgctcaattacctcttctggctgtagaagttcagttgccctgccaactgtggtccctgaaagatacatatagacgatatgagagacatggtctataagtaacgtgtttatctaacatggaactagcacccaaaattaaaaaaacaaaacattttcatacaatcaactgatctggcagtgacaaatacgtggttatatagatgtccttttcattcatagtctcacccccaagaaacactaattaaagttaagaagtaaacttaattaatgaccataggcctcctgtgccaccacaatatccctaaaaaaatttaataacaataaatgataaagtgtcataaccattagatagtttgaaccaaatagagctttgcatgttgctacaacatgc

SEQ ID NO: 162321 - DNA, 355 bp, Glycine max
ttgcactttgtgttcgatggccacacactgctcaattgtttgccccggagtacccccgcgatatgcacaggtcacattggggttgtaccactttgggaagggagactggtaaatcctcccaaaagtcactactgccaactggttggcgattaaggatggcaataagtccccatatgacatcggaattggggcaaatttaggaagcctctttactagtggatttctccccgcattgaagttcatgccaggattggcatcaccggcatgacgagggtgtgccggagccaaggtctgagcaggggctccttgtgataggttgggcgctccttgctggactggcgccgagtacgggagc

SEQ ID NO: 162322 - DNA, 403 bp, Glycine max
gcttcgagagtgcactgcgctttctttctttgcttacattgcttagctattcttcttcataatcacctccattagactgactgcgttcttcttatttcgatgctgtcttttattcttgcgaagtattttcgaatgataaatatttattgcgtatatatatatatatatatgaatggtaaatatttcgttaatgtttgtagggttgtgctttgattcactccttgtacgtggattctctcctcttcatattacgtgacttctctgtgcttggtaagtggttcttaactcgtgaactataattgataggttaatgctaggttatacaaattatatgtcatcagatgtgttatatatatagatctatgttacgttatgtatagtgcaatcgatatatattattttc

SEQ ID NO: 162323 - DNA, 431 bp, Glycine max
  unsure (1)..(431): unsure at all n locations
tacgttcccgagagcatttcttatttaagcacttcagcctttgctgtcgagtagcttacgaaaaacgccatttcttggtctttctttctttcagagccatatctaaagttccaagcactttctcgatcacccacagccaccattaggcaccacaaaccatagttgttctccattgaaactccacaacgagaggaacccatcgattggagcgaaatcttccaactcggcttgcggtttcggtagagaacgaaaccctagtctgaccttgtcgtgtctttcgagataaccaaggctctatgatggcttcttgatagcttcatattgtctntgcatcttttctgactgtggaaccgacattgcatgtcttatgcttcctttgaaaaaccttagagaaagagacttgtganacgttatcctttgatgaaatgcat

SEQ ID NO: 162324 - DNA, 400 bp, Glycine max
ctctccaactcttgaactctatgtttggtgttaaacttccttgacaaaatgtcatcttgaaattttcgtgcttgctgtcatgttttggatgtgtgtgctgagctgttttccttgaatattttatgccaaaaatgagttattttcatgttaaaacatagtgttaaccttaaatttcacttaaataagagtttcctagctaaaattatgaataaaacaagtgtaaggacctctgtagaatgaaaatctgtcacgaatttaccctgaatgttacaacagtatgaactatttttcttagagttttgacctcaaaaatgaattttttagatttgaaaatgtagggtagcatataagatttatgaaaatccgattcccagagcacctacaacattgaaaataagct
